United States Patent Application Publication US 2008/0113351 A1 - sequence listing, part 20

SEQ ID NO: 479840 - DNA, 19 bp, Mus musculus
  siRNA target sequence for 4932702D22 (NM_172857.1,1463-1481).
gctgaacaatgtctttgat

SEQ ID NO: 479841 - DNA, 19 bp, Mus musculus
  siRNA target sequence for 4932702D22 (NM_172857.1,1488-1506).
gtagccgacgtccttcaat

SEQ ID NO: 479842 - DNA, 19 bp, Mus musculus
  siRNA target sequence for 4932702D22 (NM_172857.1,1491-1509).
gccgacgtccttcaatttt

SEQ ID NO: 479843 - DNA, 19 bp, Mus musculus
  siRNA target sequence for 4932702D22 (NM_172857.1,1493-1511).
cgacgtccttcaattttct

SEQ ID NO: 479844 - DNA, 19 bp, Mus musculus
  siRNA target sequence for 4932702D22 (NM_172857.1,1494-1512).
gacgtccttcaattttcta

SEQ ID NO: 479845 - DNA, 19 bp, Mus musculus
  siRNA target sequence for 4932702D22 (NM_172857.1,1514-1532).
ggaaacgggtggctttctt

SEQ ID NO: 479846 - DNA, 19 bp, Mus musculus
  siRNA target sequence for 4932702D22 (NM_172857.1,1519-1537).
cgggtggctttcttccaaa

SEQ ID NO: 479847 - DNA, 19 bp, Mus musculus
  siRNA target sequence for 4932702D22 (NM_172857.1,1553-1571).
gcaggagagtttaatcaga

SEQ ID NO: 479848 - DNA, 19 bp, Mus musculus
  siRNA target sequence for 4932702D22 (NM_172857.1,1561-1579).
gtttaatcagacaccttaa

SEQ ID NO: 479849 - DNA, 19 bp, Mus musculus
  siRNA target sequence for 4932702D22 (NM_172857.1,1588-1606).
ccagataccttttcttttt

SEQ ID NO: 479850 - DNA, 19 bp, Mus musculus
  siRNA target sequence for 4932702D22 (NM_172857.1,1591-1609).
gataccttttctttttaga

SEQ ID NO: 479851 - DNA, 19 bp, Mus musculus
  siRNA target sequence for 4932702D22 (NM_172857.1,1619-1637).
gaaacgtattcaggaaaat

SEQ ID NO: 479852 - DNA, 19 bp, Mus musculus
  siRNA target sequence for 4932702D22 (NM_172857.1,1740-1758).
gtgatgtcagacttaacca

SEQ ID NO: 479853 - DNA, 19 bp, Mus musculus
  siRNA target sequence for 4932702D22 (NM_172857.1,2030-2048).
ccaagttccacgcttttta

SEQ ID NO: 479854 - DNA, 19 bp, Mus musculus
  siRNA target sequence for 4932702D22 (NM_172857.1,2031-2049).
caagttccacgctttttat

SEQ ID NO: 479855 - DNA, 19 bp, Mus musculus
  siRNA target sequence for 4932702D22 (NM_172857.1,2082-2100).
gataaagaatctaaacaaa

SEQ ID NO: 479856 - DNA, 19 bp, Mus musculus
  siRNA target sequence for 4932702D22 (NM_172857.1,2294-2312).
gggaaataagggagcttta

SEQ ID NO: 479857 - DNA, 19 bp, Mus musculus
  siRNA target sequence for 4932702D22 (NM_172857.1,2295-2313).
ggaaataagggagctttaa

SEQ ID NO: 479858 - DNA, 19 bp, Mus musculus
  siRNA target sequence for 4932702D22 (NM_172857.1,2444-2462).
gacagactcatggataagt

SEQ ID NO: 479859 - DNA, 19 bp, Mus musculus
  siRNA target sequence for 4932702D22 (NM_172857.1,2455-2473).
ggataagtccatctttaaa

SEQ ID NO: 479860 - DNA, 19 bp, Mus musculus
  siRNA target sequence for 4932702D22 (NM_172857.1,2456-2474).
gataagtccatctttaaat

SEQ ID NO: 479861 - DNA, 19 bp, Mus musculus
  siRNA target sequence for 4932702K14Rik (NM_026226.1,88-106).
gcgaccccagctactcttt

SEQ ID NO: 479862 - DNA, 19 bp, Mus musculus
  siRNA target sequence for 4932702K14Rik (NM_026226.1,101-119).
ctctttggcttcactctat

SEQ ID NO: 479863 - DNA, 19 bp, Mus musculus
  siRNA target sequence for 4932702K14Rik (NM_026226.1,103-121).
ctttggcttcactctatgt

SEQ ID NO: 479864 - DNA, 19 bp, Mus musculus
  siRNA target sequence for 4932702K14Rik (NM_026226.1,701-719).
ggatctatttggcagattt

SEQ ID NO: 479865 - DNA, 19 bp, Mus musculus
  siRNA target sequence for 4932702K14Rik (NM_026226.1,948-966).
gaacgggtaccacaagata

SEQ ID NO: 479866 - DNA, 19 bp, Mus musculus
  siRNA target sequence for 4932702K14Rik (NM_026226.1,951-969).
cgggtaccacaagatagaa

SEQ ID NO: 479867 - DNA, 19 bp, Mus musculus
  siRNA target sequence for 4932702K14Rik (NM_026226.1,1007-1025).
ccttgatgatggtatcgat

SEQ ID NO: 479868 - DNA, 19 bp, Mus musculus
  siRNA target sequence for 4932702K14Rik (NM_026226.1,1052-1070).
cccttttggtacgattact

SEQ ID NO: 479869 - DNA, 19 bp, Mus musculus
  siRNA target sequence for 4932702K14Rik (NM_026226.1,1064-1082).
gattactagtgcaaaggta

SEQ ID NO: 479870 - DNA, 19 bp, Mus musculus
  siRNA target sequence for 4932702K14Rik (NM_026226.1,1358-1376).
gagccgtagggcatactgt

SEQ ID NO: 479871 - DNA, 19 bp, Mus musculus
  siRNA target sequence for 4932702K14Rik (NM_026226.1,1487-1505).
gccatcatttagtacttca

SEQ ID NO: 479872 - DNA, 19 bp, Mus musculus
  siRNA target sequence for 4932702K14Rik (NM_026226.1,1605-1623).
cctgccacccgcacaatta

SEQ ID NO: 479873 - DNA, 19 bp, Mus musculus
  siRNA target sequence for 4932702K14Rik (NM_026226.1,1614-1632).
cgcacaattacccagtata

SEQ ID NO: 479874 - DNA, 19 bp, Mus musculus
  siRNA target sequence for 4932702K14Rik (NM_026226.1,1616-1634).
cacaattacccagtataaa

SEQ ID NO: 479875 - DNA, 19 bp, Mus musculus
  siRNA target sequence for 4932702K14Rik (NM_026226.1,1656-1674).
ccccctcagcatcctaata

SEQ ID NO: 479876 - DNA, 19 bp, Mus musculus
  siRNA target sequence for 4932702K14Rik (NM_026226.1,1705-1723).
ctgttcctgtccaaggtaa

SEQ ID NO: 479877 - DNA, 19 bp, Mus musculus
  siRNA target sequence for 4932702K14Rik (NM_026226.1,1710-1728).
cctgtccaaggtaaagagt

SEQ ID NO: 479878 - DNA, 19 bp, Mus musculus
  siRNA target sequence for 4932702K14Rik (NM_026226.1,1762-1780).
ctcaagctcaaaagcaaat

SEQ ID NO: 479879 - DNA, 19 bp, Mus musculus
  siRNA target sequence for 4932702K14Rik (NM_026226.1,1764-1782).
caagctcaaaagcaaatgt

SEQ ID NO: 479880 - DNA, 19 bp, Mus musculus
  siRNA target sequence for 4932702K14Rik (NM_026226.1,1792-1810).
ggctcttctctcttattca

SEQ ID NO: 479881 - DNA, 19 bp, Mus musculus
  siRNA target sequence for 4932702K14Rik (NM_026226.1,1843-1861).
cgggtatgctgttggaaat

SEQ ID NO: 479882 - DNA, 19 bp, Mus musculus
  siRNA target sequence for 4932702K14Rik (NM_026226.1,1844-1862).
gggtatgctgttggaaatt

SEQ ID NO: 479883 - DNA, 19 bp, Mus musculus
  siRNA target sequence for 4932702K14Rik (NM_026226.1,1851-1869).
ctgttggaaattgataata

SEQ ID NO: 479884 - DNA, 19 bp, Mus musculus
  siRNA target sequence for 4932702K14Rik (NM_026226.1,1989-2007).
gctggtgtcccaaatgctt

SEQ ID NO: 479885 - DNA, 19 bp, Mus musculus
  siRNA target sequence for 4933405K07Rik (NM_028913.1,422-440).
ccgatggggaaggttgatt

SEQ ID NO: 479886 - DNA, 19 bp, Mus musculus
  siRNA target sequence for 4933405K07Rik (NM_028913.1,476-494).
catgactcacaccaaatgt

SEQ ID NO: 479887 - DNA, 19 bp, Mus musculus
  siRNA target sequence for 4933405K07Rik (NM_028913.1,493-511).
gtgtgtgaaggctgcattt

SEQ ID NO: 479888 - DNA, 19 bp, Mus musculus
  siRNA target sequence for 4933405K07Rik (NM_028913.1,504-522).
ctgcatttccaaatgatgt

SEQ ID NO: 479889 - DNA, 19 bp, Mus musculus
  siRNA target sequence for 4933405K07Rik (NM_028913.1,521-539).
gtatcaagagtaatcacta

SEQ ID NO: 479890 - DNA, 19 bp, Mus musculus
  siRNA target sequence for 4933405K07Rik (NM_028913.1,535-553).
cactacaggtggctcatat

SEQ ID NO: 479891 - DNA, 19 bp, Mus musculus
  siRNA target sequence for 4933405K07Rik (NM_028913.1,545-563).
ggctcatattgttccatta

SEQ ID NO: 479892 - DNA, 19 bp, Mus musculus
  siRNA target sequence for 4933405K07Rik (NM_028913.1,546-564).
gctcatattgttccattat

SEQ ID NO: 479893 - DNA, 19 bp, Mus musculus
  siRNA target sequence for 4933405K07Rik (NM_028913.1,549-567).
catattgttccattatcga

SEQ ID NO: 479894 - DNA, 19 bp, Mus musculus
  siRNA target sequence for 4933405K07Rik (NM_028913.1,580-598).
gggtggtgaccctaaaact

SEQ ID NO: 479895 - DNA, 19 bp, Mus musculus
  siRNA target sequence for 4933405K07Rik (NM_028913.1,581-599).
ggtggtgaccctaaaactt

SEQ ID NO: 479896 - DNA, 19 bp, Mus musculus
  siRNA target sequence for 4933405K07Rik (NM_028913.1,597-615).
cttcagatccgcaaaacca

SEQ ID NO: 479897 - DNA, 19 bp, Mus musculus
  siRNA target sequence for 4933405K07Rik (NM_028913.1,683-701).
gctgggggatccattcctt

SEQ ID NO: 479898 - DNA, 19 bp, Mus musculus
  siRNA target sequence for 4933405K07Rik (NM_028913.1,814-832).
gcagcctgacggcattgtt

SEQ ID NO: 479899 - DNA, 19 bp, Mus musculus
  siRNA target sequence for 4933405K07Rik (NM_028913.1,867-885).
ctgctgtgtgtccaattca

SEQ ID NO: 479900 - DNA, 19 bp, Mus musculus
  siRNA target sequence for 4933405K07Rik (NM_028913.1,982-1000).
gccagttgaatataccaaa

SEQ ID NO: 479901 - DNA, 19 bp, Mus musculus
  siRNA target sequence for 4933405K07Rik (NM_028913.1,983-1001).
ccagttgaatataccaaat

SEQ ID NO: 479902 - DNA, 19 bp, Mus musculus
  siRNA target sequence for 4933405K07Rik (NM_028913.1,984-1002).
cagttgaatataccaaata

SEQ ID NO: 479903 - DNA, 19 bp, Mus musculus
  siRNA target sequence for 4933405K07Rik (NM_028913.1,1033-1051).
gtgtcagcagcaaacaact

SEQ ID NO: 479904 - DNA, 19 bp, Mus musculus
  siRNA target sequence for 4933405K07Rik (NM_028913.1,1056-1074).
ctctagagacacattttat

SEQ ID NO: 479905 - DNA, 19 bp, Mus musculus
  siRNA target sequence for 4933405K07Rik (NM_028913.1,1417-1435).
ccactgcgggaaattgttt

SEQ ID NO: 479906 - DNA, 19 bp, Mus musculus
  siRNA target sequence for 4933405K07Rik (NM_028913.1,1422-1440).
gcgggaaattgtttgtcta

SEQ ID NO: 479907 - DNA, 19 bp, Mus musculus
  siRNA target sequence for 4933405K07Rik (NM_028913.1,1423-1441).
cgggaaattgtttgtctat

SEQ ID NO: 479908 - DNA, 19 bp, Mus musculus
  siRNA target sequence for 4933405K07Rik (NM_028913.1,1508-1526).
gggaagttattcaataata

SEQ ID NO: 479909 - DNA, 19 bp, Mus musculus
  siRNA target sequence for 4933405K07Rik (NM_028913.1,1776-1794).
ctaaagcccagctgaatga

SEQ ID NO: 479910 - DNA, 19 bp, Mus musculus
  siRNA target sequence for 4933405K07Rik (NM_028913.1,1957-1975).
gtcatctcaccaacaaact

SEQ ID NO: 479911 - DNA, 19 bp, Mus musculus
  siRNA target sequence for 4933416E05Rik (NM_175163.2,497-515).
ctcctggttggaacgaaat

SEQ ID NO: 479912 - DNA, 19 bp, Mus musculus
  siRNA target sequence for 4933416E05Rik (NM_175163.2,565-583).
gggtaacattccagagaaa

SEQ ID NO: 479913 - DNA, 19 bp, Mus musculus
  siRNA target sequence for 4933416E05Rik (NM_175163.2,769-787).
gcgcccagaatctgaagaa

SEQ ID NO: 479914 - DNA, 19 bp, Mus musculus
  siRNA target sequence for 4933416E05Rik (NM_175163.2,863-881).
cggtgagtgcccttacgtt

SEQ ID NO: 479915 - DNA, 19 bp, Mus musculus
  siRNA target sequence for 4933416E05Rik (NM_175163.2,864-882).
ggtgagtgcccttacgttt

SEQ ID NO: 479916 - DNA, 19 bp, Mus musculus
  siRNA target sequence for 4933416E05Rik (NM_175163.2,1065-1083).
cgtcgcttcgcctatccat

SEQ ID NO: 479917 - DNA, 19 bp, Mus musculus
  siRNA target sequence for 4933416E05Rik (NM_175163.2,1310-1328).
ctgcgaagcccgcttttct

SEQ ID NO: 479918 - DNA, 19 bp, Mus musculus
  siRNA target sequence for 4933416E05Rik (NM_175163.2,1714-1732).
gtagccctagacctcttat

SEQ ID NO: 479919 - DNA, 19 bp, Mus musculus
  siRNA target sequence for 4933416E05Rik (NM_175163.2,1718-1736).
ccctagacctcttatagga

SEQ ID NO: 479920 - DNA, 19 bp, Mus musculus
  siRNA target sequence for 5730403M16Rik (NM_172738.1,389-407).
cttcactgagacttgaact

SEQ ID NO: 479921 - DNA, 19 bp, Mus musculus
  siRNA target sequence for 5730403M16Rik (NM_172738.1,406-424).
ctttctgggattcatgatt

SEQ ID NO: 479922 - DNA, 19 bp, Mus musculus
  siRNA target sequence for 5730403M16Rik (NM_172738.1,475-493).
ctgactccgtgtttatgga

SEQ ID NO: 479923 - DNA, 19 bp, Mus musculus
  siRNA target sequence for 5730403M16Rik (NM_172738.1,518-536).
gtgaaacacccccctttaa

SEQ ID NO: 479924 - DNA, 19 bp, Mus musculus
  siRNA target sequence for 5730403M16Rik (NM_172738.1,744-762).
ctgcaaatgcacttactgt

SEQ ID NO: 479925 - DNA, 19 bp, Mus musculus
  siRNA target sequence for 5730403M16Rik (NM_172738.1,1030-1048).
gcaaagaaggccttaaggt

SEQ ID NO: 479926 - DNA, 19 bp, Mus musculus
  siRNA target sequence for 5730403M16Rik (NM_172738.1,1040-1058).
ccttaaggtccattatcga

SEQ ID NO: 479927 - DNA, 19 bp, Mus musculus
  siRNA target sequence for 5730403M16Rik (NM_172738.1,1041-1059).
cttaaggtccattatcgat

SEQ ID NO: 479928 - DNA, 19 bp, Mus musculus
  siRNA target sequence for 5730403M16Rik (NM_172738.1,1046-1064).
ggtccattatcgatttcat

SEQ ID NO: 479929 - DNA, 19 bp, Mus musculus
  siRNA target sequence for 5730403M16Rik (NM_172738.1,1047-1065).
gtccattatcgatttcata

SEQ ID NO: 479930 - DNA, 19 bp, Mus musculus
  siRNA target sequence for 5730403M16Rik (NM_172738.1,1049-1067).
ccattatcgatttcatact

SEQ ID NO: 479931 - DNA, 19 bp, Mus musculus
  siRNA target sequence for 5730453I16Rik (NM_172302.2,127-145).
ggagtggatttgattgata

SEQ ID NO: 479932 - DNA, 19 bp, Mus musculus
  siRNA target sequence for 5730453I16Rik (NM_172302.2,150-168).
cgctgatgaagagttcaat

SEQ ID NO: 479933 - DNA, 19 bp, Mus musculus
  siRNA target sequence for 5730453I16Rik (NM_172302.2,169-187).
caggactcggagttcaaca

SEQ ID NO: 479934 - DNA, 19 bp, Mus musculus
  siRNA target sequence for 5730453I16Rik (NM_172302.2,172-190).
gactcggagttcaacaata

SEQ ID NO: 479935 - DNA, 19 bp, Mus musculus
  siRNA target sequence for 5730453I16Rik (NM_172302.2,174-192).
ctcggagttcaacaataca

SEQ ID NO: 479936 - DNA, 19 bp, Mus musculus
  siRNA target sequence for 5730453I16Rik (NM_172302.2,176-194).
cggagttcaacaatacaga

SEQ ID NO: 479937 - DNA, 19 bp, Mus musculus
  siRNA target sequence for 5730453I16Rik (NM_172302.2,177-195).
ggagttcaacaatacagat

SEQ ID NO: 479938 - DNA, 19 bp, Mus musculus
  siRNA target sequence for 5730453I16Rik (NM_172302.2,183-201).
caacaatacagatcagatt

SEQ ID NO: 479939 - DNA, 19 bp, Mus musculus
  siRNA target sequence for 5730453I16Rik (NM_172302.2,309-327).
caacaagacccctgcaatt

SEQ ID NO: 479940 - DNA, 19 bp, Mus musculus
  siRNA target sequence for 5730453I16Rik (NM_172302.2,315-333).
gacccctgcaattctgtat

SEQ ID NO: 479941 - DNA, 19 bp, Mus musculus
  siRNA target sequence for 5730453I16Rik (NM_172302.2,318-336).
ccctgcaattctgtataca

SEQ ID NO: 479942 - DNA, 19 bp, Mus musculus
  siRNA target sequence for 5730453I16Rik (NM_172302.2,319-337).
cctgcaattctgtatacat

SEQ ID NO: 479943 - DNA, 19 bp, Mus musculus
  siRNA target sequence for 5730453I16Rik (NM_172302.2,320-338).
ctgcaattctgtatacata

SEQ ID NO: 479944 - DNA, 19 bp, Mus musculus
  siRNA target sequence for 5730453I16Rik (NM_172302.2,356-374).
ggcgagcagctgtctatgt

SEQ ID NO: 479945 - DNA, 19 bp, Mus musculus
  siRNA target sequence for 5730453I16Rik (NM_172302.2,414-432).
ccaggttatccgctctata

SEQ ID NO: 479946 - DNA, 19 bp, Mus musculus
  siRNA target sequence for 5730453I16Rik (NM_172302.2,417-435).
ggttatccgctctatagga

SEQ ID NO: 479947 - DNA, 19 bp, Mus musculus
  siRNA target sequence for 5730453I16Rik (NM_172302.2,423-441).
ccgctctataggagtctat

SEQ ID NO: 479948 - DNA, 19 bp, Mus musculus
  siRNA target sequence for 5730453I16Rik (NM_172302.2,425-443).
gctctataggagtctatga

SEQ ID NO: 479949 - DNA, 19 bp, Mus musculus
  siRNA target sequence for 5730453I16Rik (NM_172302.2,428-446).
ctataggagtctatgatgt

SEQ ID NO: 479950 - DNA, 19 bp, Mus musculus
  siRNA target sequence for 5730453I16Rik (NM_172302.2,473-491).
gtgcaaatggccagtctaa

SEQ ID NO: 479951 - DNA, 19 bp, Mus musculus
  siRNA target sequence for 5730453I16Rik (NM_172302.2,505-523).
gtggtggtagcctctgaaa

SEQ ID NO: 479952 - DNA, 19 bp, Mus musculus
  siRNA target sequence for 5730453I16Rik (NM_172302.2,507-525).
ggtggtagcctctgaaaat

SEQ ID NO: 479953 - DNA, 19 bp, Mus musculus
  siRNA target sequence for 5730453I16Rik (NM_172302.2,508-526).
gtggtagcctctgaaaatt

SEQ ID NO: 479954 - DNA, 19 bp, Mus musculus
  siRNA target sequence for 5730453I16Rik (NM_172302.2,595-613).
gccacccggcagaacttgt

SEQ ID NO: 479955 - DNA, 19 bp, Mus musculus
  siRNA target sequence for 5730453I16Rik (NM_172302.2,657-675).
cccaagagggggaatacct

SEQ ID NO: 479956 - DNA, 19 bp, Mus musculus
  siRNA target sequence for 5730453I16Rik (NM_172302.2,687-705).
ctcccgagactctagtgat

SEQ ID NO: 479957 - DNA, 19 bp, Mus musculus
  siRNA target sequence for 5730453I16Rik (NM_172302.2,690-708).
ccgagactctagtgattct

SEQ ID NO: 479958 - DNA, 19 bp, Mus musculus
  siRNA target sequence for 5730453I16Rik (NM_172302.2,720-738).
ggcaaccccctctgagaat

SEQ ID NO: 479959 - DNA, 19 bp, Mus musculus
  siRNA target sequence for 5730453I16Rik (NM_172302.2,726-744).
cccctctgagaatcttgta

SEQ ID NO: 479960 - DNA, 19 bp, Mus musculus
  siRNA target sequence for 5730453I16Rik (NM_172302.2,749-767).
catctgctcgtgtggataa

SEQ ID NO: 479961 - DNA, 19 bp, Mus musculus
  siRNA target sequence for 5730453I16Rik (NM_172302.2,774-792).
cagcgtgttgccctacttt

SEQ ID NO: 479962 - DNA, 19 bp, Mus musculus
  siRNA target sequence for 5730453I16Rik (NM_172302.2,1027-1045).
gggcctccaccagatactt

SEQ ID NO: 479963 - DNA, 19 bp, Mus musculus
  siRNA target sequence for 5730453I16Rik (NM_172302.2,1028-1046).
ggcctccaccagatactta

SEQ ID NO: 479964 - DNA, 19 bp, Mus musculus
  siRNA target sequence for 5730453I16Rik (NM_172302.2,1055-1073).
cctctacaccctataacca

SEQ ID NO: 479965 - DNA, 19 bp, Mus musculus
  siRNA target sequence for 5730453I16Rik (NM_172302.2,1134-1152).
gataatgaagcgaaacaga

SEQ ID NO: 479966 - DNA, 19 bp, Mus musculus
  siRNA target sequence for 5730453I16Rik (NM_172302.2,1144-1162).
cgaaacagagcaatttcca

SEQ ID NO: 479967 - DNA, 19 bp, Mus musculus
  siRNA target sequence for 5730453I16Rik (NM_172302.2,1257-1275).
gtcccgagtcgccaatgat

SEQ ID NO: 479968 - DNA, 19 bp, Mus musculus
  siRNA target sequence for 5730453I16Rik (NM_172302.2,1259-1277).
cccgagtcgccaatgatga

SEQ ID NO: 479969 - DNA, 19 bp, Mus musculus
  siRNA target sequence for 5730453I16Rik (NM_172302.2,1322-1340).
gcatagaggccaagtcata

SEQ ID NO: 479970 - DNA, 19 bp, Mus musculus
  siRNA target sequence for 5730453I16Rik (NM_172302.2,1433-1451).
gagacttgcttcataacga

SEQ ID NO: 479971 - DNA, 19 bp, Mus musculus
  siRNA target sequence for 5730453I16Rik (NM_172302.2,1450-1468).
gaagaccggcatgatgatt

SEQ ID NO: 479972 - DNA, 19 bp, Mus musculus
  siRNA target sequence for 5730453I16Rik (NM_172302.2,1453-1471).
gaccggcatgatgattatt

SEQ ID NO: 479973 - DNA, 19 bp, Mus musculus
  siRNA target sequence for 5730495N10Rik (NM_146142.1,30-48).
gcagatctggtttcaaaga

SEQ ID NO: 479974 - DNA, 19 bp, Mus musculus
  siRNA target sequence for 5730495N10Rik (NM_146142.1,31-49).
cagatctggtttcaaagat

SEQ ID NO: 479975 - DNA, 19 bp, Mus musculus
  siRNA target sequence for 5730495N10Rik (NM_146142.1,36-54).
ctggtttcaaagatgctaa

SEQ ID NO: 479976 - DNA, 19 bp, Mus musculus
  siRNA target sequence for 5730495N10Rik (NM_146142.1,60-78).
gtcctgcagtctcataaga

SEQ ID NO: 479977 - DNA, 19 bp, Mus musculus
  siRNA target sequence for 5730495N10Rik (NM_146142.1,72-90).
cataagaacgggatcgtat

SEQ ID NO: 479978 - DNA, 19 bp, Mus musculus
  siRNA target sequence for 5730495N10Rik (NM_146142.1,105-123).
ggagagtaccgatctttga

SEQ ID NO: 479979 - DNA, 19 bp, Mus musculus
  siRNA target sequence for 5730495N10Rik (NM_146142.1,200-218).
caggatagaggctagtaga

SEQ ID NO: 479980 - DNA, 19 bp, Mus musculus
  siRNA target sequence for 5730495N10Rik (NM_146142.1,240-258).
gcagtagcctgcacagaaa

SEQ ID NO: 479981 - DNA, 19 bp, Mus musculus
  siRNA target sequence for 5730495N10Rik (NM_146142.1,285-303).
cgtcagaggacctctaaaa

SEQ ID NO: 479982 - DNA, 19 bp, Mus musculus
  siRNA target sequence for 5730495N10Rik (NM_146142.1,290-308).
gaggacctctaaaaggaaa

SEQ ID NO: 479983 - DNA, 19 bp, Mus musculus
  siRNA target sequence for 5730495N10Rik (NM_146142.1,292-310).
ggacctctaaaaggaaaat

SEQ ID NO: 479984 - DNA, 19 bp, Mus musculus
  siRNA target sequence for 5730495N10Rik (NM_146142.1,293-311).
gacctctaaaaggaaaata

SEQ ID NO: 479985 - DNA, 19 bp, Mus musculus
  siRNA target sequence for 5730495N10Rik (NM_146142.1,305-323).
gaaaatagggcgacaaatt

SEQ ID NO: 479986 - DNA, 19 bp, Mus musculus
  siRNA target sequence for 5730495N10Rik (NM_146142.1,397-415).
caggatttgcctcagatta

SEQ ID NO: 479987 - DNA, 19 bp, Mus musculus
  siRNA target sequence for 5730495N10Rik (NM_146142.1,399-417).
ggatttgcctcagattatt

SEQ ID NO: 479988 - DNA, 19 bp, Mus musculus
  siRNA target sequence for 5730495N10Rik (NM_146142.1,432-450).
cctaattcagcgctgttaa

SEQ ID NO: 479989 - DNA, 19 bp, Mus musculus
  siRNA target sequence for 5730495N10Rik (NM_146142.1,604-622).
cctgccctacggaagtcaa

SEQ ID NO: 479990 - DNA, 19 bp, Mus musculus
  siRNA target sequence for 5730495N10Rik (NM_146142.1,605-623).
ctgccctacggaagtcaat

SEQ ID NO: 479991 - DNA, 19 bp, Mus musculus
  siRNA target sequence for 5730495N10Rik (NM_146142.1,607-625).
gccctacggaagtcaatga

SEQ ID NO: 479992 - DNA, 19 bp, Mus musculus
  siRNA target sequence for 5730495N10Rik (NM_146142.1,609-627).
cctacggaagtcaatgata

SEQ ID NO: 479993 - DNA, 19 bp, Mus musculus
  siRNA target sequence for 5730495N10Rik (NM_146142.1,666-684).
cctgcctcttacactaata

SEQ ID NO: 479994 - DNA, 19 bp, Mus musculus
  siRNA target sequence for 5730495N10Rik (NM_146142.1,667-685).
ctgcctcttacactaataa

SEQ ID NO: 479995 - DNA, 19 bp, Mus musculus
  siRNA target sequence for 5730495N10Rik (NM_146142.1,704-722).
ccgcataaaggaaatatta

SEQ ID NO: 479996 - DNA, 19 bp, Mus musculus
  siRNA target sequence for 5730495N10Rik (NM_146142.1,714-732).
gaaatattagacaagcata

SEQ ID NO: 479997 - DNA, 19 bp, Mus musculus
  siRNA target sequence for 5730495N10Rik (NM_146142.1,729-747).
cataacaatggcatttgga

SEQ ID NO: 479998 - DNA, 19 bp, Mus musculus
  siRNA target sequence for 5730495N10Rik (NM_146142.1,734-752).
caatggcatttggatatct

SEQ ID NO: 479999 - DNA, 19 bp, Mus musculus
  siRNA target sequence for 5730495N10Rik (NM_146142.1,751-769).
ctaagcttccacattttta

SEQ ID NO: 480000 - DNA, 19 bp, Mus musculus
  siRNA target sequence for 5730495N10Rik (NM_146142.1,759-777).
ccacatttttacaaagagt

SEQ ID NO: 480001 - DNA, 19 bp, Mus musculus
  siRNA target sequence for 5730495N10Rik (NM_146142.1,802-820).
gagttttacagcagtttga

SEQ ID NO: 480002 - DNA, 19 bp, Mus musculus
  siRNA target sequence for 5730495N10Rik (NM_146142.1,819-837).
gaacactggcctcacattt

SEQ ID NO: 480003 - DNA, 19 bp, Mus musculus
  siRNA target sequence for 5730495N10Rik (NM_146142.1,859-877).
gtggtggtcaagattcact

SEQ ID NO: 480004 - DNA, 19 bp, Mus musculus
  siRNA target sequence for 5730495N10Rik (NM_146142.1,864-882).
ggtcaagattcacttcttt

SEQ ID NO: 480005 - DNA, 19 bp, Mus musculus
  siRNA target sequence for 5730495N10Rik (NM_146142.1,1060-1078).
gtgcgctccccaaagcatt

SEQ ID NO: 480006 - DNA, 19 bp, Mus musculus
  siRNA target sequence for 5730495N10Rik (NM_146142.1,1063-1081).
cgctccccaaagcatttga

SEQ ID NO: 480007 - DNA, 19 bp, Mus musculus
  siRNA target sequence for 5730495N10Rik (NM_146142.1,1103-1121).
ccctgaggatgccttaaaa

SEQ ID NO: 480008 - DNA, 19 bp, Mus musculus
  siRNA target sequence for 5730495N10Rik (NM_146142.1,1143-1161).
gtgtgcaccataaactaca

SEQ ID NO: 480009 - DNA, 19 bp, Mus musculus
  siRNA target sequence for 5730495N10Rik (NM_146142.1,1174-1192).
cccagaaggcaattctcta

SEQ ID NO: 480010 - DNA, 19 bp, Mus musculus
  siRNA target sequence for 5730495N10Rik (NM_146142.1,1208-1226).
gcccactgacaagatctta

SEQ ID NO: 480011 - DNA, 19 bp, Mus musculus
  siRNA target sequence for 5730495N10Rik (NM_146142.1,1259-1277).
catcaagtcgatgattgaa

SEQ ID NO: 480012 - DNA, 19 bp, Mus musculus
  siRNA target sequence for 5730495N10Rik (NM_146142.1,1342-1360).
ctgtgccgcctctggtaat

SEQ ID NO: 480013 - DNA, 19 bp, Mus musculus
  siRNA target sequence for 5730495N10Rik (NM_146142.1,1346-1364).
gccgcctctggtaattcct

SEQ ID NO: 480014 - DNA, 19 bp, Mus musculus
  siRNA target sequence for 5730495N10Rik (NM_146142.1,1347-1365).
ccgcctctggtaattccta

SEQ ID NO: 480015 - DNA, 19 bp, Mus musculus
  siRNA target sequence for 5730495N10Rik (NM_146142.1,1392-1410).
gttgagctgagcaacacaa

SEQ ID NO: 480016 - DNA, 19 bp, Mus musculus
  siRNA target sequence for 5730495N10Rik (NM_146142.1,1475-1493).
gatgaaggagttttacagt

SEQ ID NO: 480017 - DNA, 19 bp, Mus musculus
  siRNA target sequence for 5730495N10Rik (NM_146142.1,1535-1553).
gcagctgctggcagtcaat

SEQ ID NO: 480018 - DNA, 19 bp, Mus musculus
  siRNA target sequence for 5730495N10Rik (NM_146142.1,1570-1588).
ggttgcgagcacagatcat

SEQ ID NO: 480019 - DNA, 19 bp, Mus musculus
  siRNA target sequence for 5730495N10Rik (NM_146142.1,1571-1589).
gttgcgagcacagatcatt

SEQ ID NO: 480020 - DNA, 19 bp, Mus musculus
  siRNA target sequence for 5730495N10Rik (NM_146142.1,1575-1593).
cgagcacagatcatttcca

SEQ ID NO: 480021 - DNA, 19 bp, Mus musculus
  siRNA target sequence for 5730495N10Rik (NM_146142.1,1723-1741).
cagggttggaggttctgaa

SEQ ID NO: 480022 - DNA, 19 bp, Mus musculus
  siRNA target sequence for 5730495N10Rik (NM_146142.1,1726-1744).
ggttggaggttctgaatga

SEQ ID NO: 480023 - DNA, 19 bp, Mus musculus
  siRNA target sequence for 5730495N10Rik (NM_146142.1,1760-1778).
gaaggcggtggaatcacta

SEQ ID NO: 480024 - DNA, 19 bp, Mus musculus
  siRNA target sequence for 5730495N10Rik (NM_146142.1,1763-1781).
ggcggtggaatcactaaca

SEQ ID NO: 480025 - DNA, 19 bp, Mus musculus
  siRNA target sequence for 5730495N10Rik (NM_146142.1,1764-1782).
gcggtggaatcactaacat

SEQ ID NO: 480026 - DNA, 19 bp, Mus musculus
  siRNA target sequence for 5730495N10Rik (NM_146142.1,1849-1867).
cgtcaggagaggacgatat

SEQ ID NO: 480027 - DNA, 19 bp, Mus musculus
  siRNA target sequence for 5730495N10Rik (NM_146142.1,1852-1870).
caggagaggacgatatcaa

SEQ ID NO: 480028 - DNA, 19 bp, Mus musculus
  siRNA target sequence for 5730495N10Rik (NM_146142.1,1854-1872).
ggagaggacgatatcaaca

SEQ ID NO: 480029 - DNA, 19 bp, Mus musculus
  siRNA target sequence for 5730495N10Rik (NM_146142.1,1855-1873).
gagaggacgatatcaacat

SEQ ID NO: 480030 - DNA, 19 bp, Mus musculus
  siRNA target sequence for 5730495N10Rik (NM_146142.1,1859-1877).
ggacgatatcaacatcaat

SEQ ID NO: 480031 - DNA, 19 bp, Mus musculus
  siRNA target sequence for 5730495N10Rik (NM_146142.1,1900-1918).
gtgacagatctctacaagt

SEQ ID NO: 480032 - DNA, 19 bp, Mus musculus
  siRNA target sequence for 5730495N10Rik (NM_146142.1,1926-1944).
caggtggatgccatgtaca

SEQ ID NO: 480033 - DNA, 19 bp, Mus musculus
  siRNA target sequence for 5730495N10Rik (NM_146142.1,1950-1968).
gtcaaagtgaccaacattt

SEQ ID NO: 480034 - DNA, 19 bp, Mus musculus
  siRNA target sequence for 5730495N10Rik (NM_146142.1,1998-2016).
ccctgcaagggtctgaata

SEQ ID NO: 480035 - DNA, 19 bp, Mus musculus
  siRNA target sequence for 5730495N10Rik (NM_146142.1,1999-2017).
cctgcaagggtctgaataa

SEQ ID NO: 480036 - DNA, 19 bp, Mus musculus
  siRNA target sequence for 5730495N10Rik (NM_146142.1,2000-2018).
ctgcaagggtctgaataaa

SEQ ID NO: 480037 - DNA, 19 bp, Mus musculus
  siRNA target sequence for 5730495N10Rik (NM_146142.1,2002-2020).
gcaagggtctgaataaact

SEQ ID NO: 480038 - DNA, 19 bp, Mus musculus
  siRNA target sequence for 5730495N10Rik (NM_146142.1,2173-2191).
gtgcactcgacgttcagtt

SEQ ID NO: 480039 - DNA, 19 bp, Mus musculus
  siRNA target sequence for 5730495N10Rik (NM_146142.1,2193-2211).
ctggactctggcaattcga

SEQ ID NO: 480040 - DNA, 19 bp, Mus musculus
  siRNA target sequence for 5730495N10Rik (NM_146142.1,2377-2395).
gctcggactgtagtattaa

SEQ ID NO: 480041 - DNA, 19 bp, Mus musculus
  siRNA target sequence for 5730495N10Rik (NM_146142.1,2380-2398).
cggactgtagtattaaggt

SEQ ID NO: 480042 - DNA, 19 bp, Mus musculus
  siRNA target sequence for 5730495N10Rik (NM_146142.1,2381-2399).
ggactgtagtattaaggtt

SEQ ID NO: 480043 - DNA, 19 bp, Mus musculus
  siRNA target sequence for 5730495N10Rik (NM_146142.1,2382-2400).
gactgtagtattaaggtta

SEQ ID NO: 480044 - DNA, 19 bp, Mus musculus
  siRNA target sequence for 5730495N10Rik (NM_146142.1,2422-2440).
gggttgcctatgtgtactt

SEQ ID NO: 480045 - DNA, 19 bp, Mus musculus
  siRNA target sequence for 5730495N10Rik (NM_146142.1,2429-2447).
ctatgtgtacttattcact

SEQ ID NO: 480046 - DNA, 19 bp, Mus musculus
  siRNA target sequence for 5730495N10Rik (NM_146142.1,2462-2480).
ggatccccatcgcagtatt

SEQ ID NO: 480047 - DNA, 19 bp, Mus musculus
  siRNA target sequence for 5730495N10Rik (NM_146142.1,2463-2481).
gatccccatcgcagtatta

SEQ ID NO: 480048 - DNA, 19 bp, Mus musculus
  siRNA target sequence for 5730495N10Rik (NM_146142.1,2517-2535).
cagaaggatgtgtttctga

SEQ ID NO: 480049 - DNA, 19 bp, Mus musculus
  siRNA target sequence for 5730495N10Rik (NM_146142.1,2655-2673).
gaccataccagctctttct

SEQ ID NO: 480050 - DNA, 19 bp, Mus musculus
  siRNA target sequence for 5730495N10Rik (NM_146142.1,2747-2765).
ctgtcacccaggccatttt

SEQ ID NO: 480051 - DNA, 19 bp, Mus musculus
  siRNA target sequence for 5730495N10Rik (NM_146142.1,2749-2767).
gtcacccaggccattttgt

SEQ ID NO: 480052 - DNA, 19 bp, Mus musculus
  siRNA target sequence for 5730495N10Rik (NM_146142.1,2780-2798).
gcaggagatccataagcta

SEQ ID NO: 480053 - DNA, 19 bp, Mus musculus
  siRNA target sequence for 5730495N10Rik (NM_146142.1,2881-2899).
cagccaaagtggagaataa

SEQ ID NO: 480054 - DNA, 19 bp, Mus musculus
  siRNA target sequence for 5730495N10Rik (NM_146142.1,2900-2918).
gtggtacagggtactttta

SEQ ID NO: 480055 - DNA, 19 bp, Mus musculus
  siRNA target sequence for 5730495N10Rik (NM_146142.1,2908-2926).
gggtacttttaaaaggaat

SEQ ID NO: 480056 - DNA, 19 bp, Mus musculus
  siRNA target sequence for 5730495N10Rik (NM_146142.1,2972-2990).
gcatgagctcgtcaacata

SEQ ID NO: 480057 - DNA, 19 bp, Mus musculus
  siRNA target sequence for 5730495N10Rik (NM_146142.1,2973-2991).
catgagctcgtcaacataa

SEQ ID NO: 480058 - DNA, 19 bp, Mus musculus
  siRNA target sequence for 5730495N10Rik (NM_146142.1,2976-2994).
gagctcgtcaacataagga

SEQ ID NO: 480059 - DNA, 19 bp, Mus musculus
  siRNA target sequence for 5730495N10Rik (NM_146142.1,2978-2996).
gctcgtcaacataaggaaa

SEQ ID NO: 480060 - DNA, 19 bp, Mus musculus
  siRNA target sequence for 5730495N10Rik (NM_146142.1,3090-3108).
gcttcgatggtgtttcgaa

SEQ ID NO: 480061 - DNA, 19 bp, Mus musculus
  siRNA target sequence for 5730495N10Rik (NM_146142.1,3091-3109).
cttcgatggtgtttcgaaa

SEQ ID NO: 480062 - DNA, 19 bp, Mus musculus
  siRNA target sequence for 5730495N10Rik (NM_146142.1,3094-3112).
cgatggtgtttcgaaatca

SEQ ID NO: 480063 - DNA, 19 bp, Mus musculus
  siRNA target sequence for 5730495N10Rik (NM_146142.1,3137-3155).
gttggtgcagacagttgtt

SEQ ID NO: 480064 - DNA, 19 bp, Mus musculus
  siRNA target sequence for 5730495N10Rik (NM_146142.1,3226-3244).
cctggattcatgactttat

SEQ ID NO: 480065 - DNA, 19 bp, Mus musculus
  siRNA target sequence for 5730495N10Rik (NM_146142.1,3230-3248).
gattcatgactttatgtca

SEQ ID NO: 480066 - DNA, 19 bp, Mus musculus
  siRNA target sequence for 5730565F05Rik (NM_027494.1,212-230).
gccgagaatcaagaactta

SEQ ID NO: 480067 - DNA, 19 bp, Mus musculus
  siRNA target sequence for 5730565F05Rik (NM_027494.1,213-231).
ccgagaatcaagaacttaa

SEQ ID NO: 480068 - DNA, 19 bp, Mus musculus
  siRNA target sequence for 5730565F05Rik (NM_027494.1,214-232).
cgagaatcaagaacttaaa

SEQ ID NO: 480069 - DNA, 19 bp, Mus musculus
  siRNA target sequence for 5730565F05Rik (NM_027494.1,263-281).
ggtatactggtgagcaata

SEQ ID NO: 480070 - DNA, 19 bp, Mus musculus
  siRNA target sequence for 5730565F05Rik (NM_027494.1,274-292).
gagcaatactaagatagat

SEQ ID NO: 480071 - DNA, 19 bp, Mus musculus
  siRNA target sequence for 5730565F05Rik (NM_027494.1,286-304).
gatagatggaccgttacta

SEQ ID NO: 480072 - DNA, 19 bp, Mus musculus
  siRNA target sequence for 5730565F05Rik (NM_027494.1,290-308).
gatggaccgttactacaaa

SEQ ID NO: 480073 - DNA, 19 bp, Mus musculus
  siRNA target sequence for 5730565F05Rik (NM_027494.1,294-312).
gaccgttactacaaattct

SEQ ID NO: 480074 - DNA, 19 bp, Mus musculus
  siRNA target sequence for 5730565F05Rik (NM_027494.1,296-314).
ccgttactacaaattctat

SEQ ID NO: 480075 - DNA, 19 bp, Mus musculus
  siRNA target sequence for 5730565F05Rik (NM_027494.1,297-315).
cgttactacaaattctatt

SEQ ID NO: 480076 - DNA, 19 bp, Mus musculus
  siRNA target sequence for 5730565F05Rik (NM_027494.1,322-340).
caatgctatctcaaagcaa

SEQ ID NO: 480077 - DNA, 19 bp, Mus musculus
  siRNA target sequence for 5730565F05Rik (NM_027494.1,356-374).
gaggagtttgtatcaaact

SEQ ID NO: 480078 - DNA, 19 bp, Mus musculus
  siRNA target sequence for 5730565F05Rik (NM_027494.1,361-379).
gtttgtatcaaacttagta

SEQ ID NO: 480079 - DNA, 19 bp, Mus musculus
  siRNA target sequence for 5730565F05Rik (NM_027494.1,369-387).
caaacttagtaaaacgatt

SEQ ID NO: 480080 - DNA, 19 bp, Mus musculus
  siRNA target sequence for 5730565F05Rik (NM_027494.1,440-458).
cagccgtccagtgttatgt

SEQ ID NO: 480081 - DNA, 19 bp, Mus musculus
  siRNA target sequence for 5730565F05Rik (NM_027494.1,457-475).
gttggaagaggaccataaa

SEQ ID NO: 480082 - DNA, 19 bp, Mus musculus
  siRNA target sequence for 5730565F05Rik (NM_027494.1,469-487).
ccataaagtggaagaatca

SEQ ID NO: 480083 - DNA, 19 bp, Mus musculus
  siRNA target sequence for 5730565F05Rik (NM_027494.1,470-488).
cataaagtggaagaatcat

SEQ ID NO: 480084 - DNA, 19 bp, Mus musculus
  siRNA target sequence for 5730565F05Rik (NM_027494.1,482-500).
gaatcatgtgccgttaaaa

SEQ ID NO: 480085 - DNA, 19 bp, Mus musculus
  siRNA target sequence for 5730565F05Rik (NM_027494.1,486-504).
catgtgccgttaaaaacaa

SEQ ID NO: 480086 - DNA, 19 bp, Mus musculus
  siRNA target sequence for 5730565F05Rik (NM_027494.1,489-507).
gtgccgttaaaaacaacaa

SEQ ID NO: 480087 - DNA, 19 bp, Mus musculus
  siRNA target sequence for 5730565F05Rik (NM_027494.1,508-526).
ggaagcttttagtgttgta

SEQ ID NO: 480088 - DNA, 19 bp, Mus musculus
  siRNA target sequence for 5730565F05Rik (NM_027494.1,524-542).
gtaggaagtgtcctgtatt

SEQ ID NO: 480089 - DNA, 19 bp, Mus musculus
  siRNA target sequence for 5730565F05Rik (NM_027494.1,546-564).
ctaatttttgccttgataa

SEQ ID NO: 480090 - DNA, 19 bp, Mus musculus
  siRNA target sequence for 5730565F05Rik (NM_027494.1,568-586).
ggggcaaccgctactaaat

SEQ ID NO: 480091 - DNA, 19 bp, Mus musculus
  siRNA target sequence for 5730565F05Rik (NM_027494.1,570-588).
ggcaaccgctactaaatga

SEQ ID NO: 480092 - DNA, 19 bp, Mus musculus
  siRNA target sequence for 5730565F05Rik (NM_027494.1,571-589).
gcaaccgctactaaatgaa

SEQ ID NO: 480093 - DNA, 19 bp, Mus musculus
  siRNA target sequence for 5730565F05Rik (NM_027494.1,572-590).
caaccgctactaaatgaaa

SEQ ID NO: 480094 - DNA, 19 bp, Mus musculus
  siRNA target sequence for 5730565F05Rik (NM_027494.1,690-708).
ggccaaagcctcactgttt

SEQ ID NO: 480095 - DNA, 19 bp, Mus musculus
  siRNA target sequence for 5730565F05Rik (NM_027494.1,720-738).
ctgaagagcatcagatgaa

SEQ ID NO: 480096 - DNA, 19 bp, Mus musculus
  siRNA target sequence for 5730565F05Rik (NM_027494.1,837-855).
gctatcatgccgaagaagt

SEQ ID NO: 480097 - DNA, 19 bp, Mus musculus
  siRNA target sequence for 5730565F05Rik (NM_027494.1,838-856).
ctatcatgccgaagaagta

SEQ ID NO: 480098 - DNA, 19 bp, Mus musculus
  siRNA target sequence for 5730565F05Rik (NM_027494.1,877-895).
caagccaggagttattagt

SEQ ID NO: 480099 - DNA, 19 bp, Mus musculus
  siRNA target sequence for 5730565F05Rik (NM_027494.1,933-951).
gtcttccccctttcatcta

SEQ ID NO: 480100 - DNA, 19 bp, Mus musculus
  siRNA target sequence for 5730565F05Rik (NM_027494.1,1011-1029).
ctggacttgcactctatga

SEQ ID NO: 480101 - DNA, 19 bp, Mus musculus
  siRNA target sequence for 5730565F05Rik (NM_027494.1,1087-1105).
cacctacgatctctcaaaa

SEQ ID NO: 480102 - DNA, 19 bp, Mus musculus
  siRNA target sequence for 5730565F05Rik (NM_027494.1,1089-1107).
cctacgatctctcaaaatt

SEQ ID NO: 480103 - DNA, 19 bp, Mus musculus
  siRNA target sequence for 5730565F05Rik (NM_027494.1,1099-1117).
ctcaaaattggtaaactat

SEQ ID NO: 480104 - DNA, 19 bp, Mus musculus
  siRNA target sequence for 5730565F05Rik (NM_027494.1,1109-1127).
gtaaactatccaggtttta

SEQ ID NO: 480105 - DNA, 19 bp, Mus musculus
  siRNA target sequence for 5730565F05Rik (NM_027494.1,1114-1132).
ctatccaggttttaatata

SEQ ID NO: 480106 - DNA, 19 bp, Mus musculus
  siRNA target sequence for 5730565F05Rik (NM_027494.1,1118-1136).
ccaggttttaatatatcta

SEQ ID NO: 480107 - DNA, 19 bp, Mus musculus
  siRNA target sequence for 5730565F05Rik (NM_027494.1,1151-1169).
ccagatgaatggagaatgt

SEQ ID NO: 480108 - DNA, 19 bp, Mus musculus
  siRNA target sequence for 5730565F05Rik (NM_027494.1,1152-1170).
cagatgaatggagaatgtt

SEQ ID NO: 480109 - DNA, 19 bp, Mus musculus
  siRNA target sequence for 5730565F05Rik (NM_027494.1,1162-1180).
gagaatgttcggttccata

SEQ ID NO: 480110 - DNA, 19 bp, Mus musculus
  siRNA target sequence for 5730565F05Rik (NM_027494.1,1214-1232).
gccagttaccttaattcta

SEQ ID NO: 480111 - DNA, 19 bp, Mus musculus
  siRNA target sequence for 5730565F05Rik (NM_027494.1,1218-1236).
gttaccttaattctaacat

SEQ ID NO: 480112 - DNA, 19 bp, Mus musculus
  siRNA target sequence for 5730565F05Rik (NM_027494.1,1237-1255).
ccagtcgccgagtatgaga

SEQ ID NO: 480113 - DNA, 19 bp, Mus musculus
  siRNA target sequence for 5730565F05Rik (NM_027494.1,1238-1256).
cagtcgccgagtatgagat

SEQ ID NO: 480114 - DNA, 19 bp, Mus musculus
  siRNA target sequence for 5730565F05Rik (NM_027494.1,1279-1297).
gcagtccagccctaacagt

SEQ ID NO: 480115 - DNA, 19 bp, Mus musculus
  siRNA target sequence for 5730565F05Rik (NM_027494.1,1287-1305).
gccctaacagtccaaagaa

SEQ ID NO: 480116 - DNA, 19 bp, Mus musculus
  siRNA target sequence for 5730565F05Rik (NM_027494.1,1692-1710).
cgtgtccaaacgagtttga

SEQ ID NO: 480117 - DNA, 19 bp, Mus musculus
  siRNA target sequence for 5730565F05Rik (NM_027494.1,1898-1916).
ggcggtgtgttgaacatga

SEQ ID NO: 480118 - DNA, 19 bp, Mus musculus
  siRNA target sequence for 5730565F05Rik (NM_027494.1,1899-1917).
gcggtgtgttgaacatgaa

SEQ ID NO: 480119 - DNA, 19 bp, Mus musculus
  siRNA target sequence for 5730565F05Rik (NM_027494.1,1901-1919).
ggtgtgttgaacatgaaca

SEQ ID NO: 480120 - DNA, 19 bp, Mus musculus
  siRNA target sequence for 5730565F05Rik (NM_027494.1,2008-2026).
caagtttgccactggaata

SEQ ID NO: 480121 - DNA, 19 bp, Mus musculus
  siRNA target sequence for 5730565F05Rik (NM_027494.1,2052-2070).
ctgaatccactggaatgta

SEQ ID NO: 480122 - DNA, 19 bp, Mus musculus
  siRNA target sequence for 5730565F05Rik (NM_027494.1,2103-2121).
cccgaaatcagcagaaaaa

SEQ ID NO: 480123 - DNA, 19 bp, Mus musculus
  siRNA target sequence for 5830436K05Rik (NM_026367.3,138-156).
ggcatttcagtcgaacaat

SEQ ID NO: 480124 - DNA, 19 bp, Mus musculus
  siRNA target sequence for 5830436K05Rik (NM_026367.3,205-223).
gcaagcccgaggtggattt

SEQ ID NO: 480125 - DNA, 19 bp, Mus musculus
  siRNA target sequence for 5830436K05Rik (NM_026367.3,224-242).
gctgaaactggagaacatt

SEQ ID NO: 480126 - DNA, 19 bp, Mus musculus
  siRNA target sequence for 5830436K05Rik (NM_026367.3,234-252).
gagaacattctcgaaatct

SEQ ID NO: 480127 - DNA, 19 bp, Mus musculus
  siRNA target sequence for 5830436K05Rik (NM_026367.3,236-254).
gaacattctcgaaatctgt

SEQ ID NO: 480128 - DNA, 19 bp, Mus musculus
  siRNA target sequence for 5830436K05Rik (NM_026367.3,295-313).
gaagcggagatcctacaat

SEQ ID NO: 480129 - DNA, 19 bp, Mus musculus
  siRNA target sequence for 5830436K05Rik (NM_026367.3,298-316).
gcggagatcctacaatgtt

SEQ ID NO: 480130 - DNA, 19 bp, Mus musculus
  siRNA target sequence for 5830436K05Rik (NM_026367.3,300-318).
ggagatcctacaatgttca

SEQ ID NO: 480131 - DNA, 19 bp, Mus musculus
  siRNA target sequence for 5830436K05Rik (NM_026367.3,331-349).
gacaggccactgcttaagt

SEQ ID NO: 480132 - DNA, 19 bp, Mus musculus
  siRNA target sequence for 5830436K05Rik (NM_026367.3,357-375).
ctgattctagtttagaaga

SEQ ID NO: 480133 - DNA, 19 bp, Mus musculus
  siRNA target sequence for 5830436K05Rik (NM_026367.3,366-384).
gtttagaagaaccaagtaa

SEQ ID NO: 480134 - DNA, 19 bp, Mus musculus
  siRNA target sequence for 5830436K05Rik (NM_026367.3,374-392).
gaaccaagtaaggactata

SEQ ID NO: 480135 - DNA, 19 bp, Mus musculus
  siRNA target sequence for 5830436K05Rik (NM_026367.3,432-450).
ctgatgaccagatgttagt

SEQ ID NO: 480136 - DNA, 19 bp, Mus musculus
  siRNA target sequence for 5830436K05Rik (NM_026367.3,508-526).
gtggcacgagtctgacttt

SEQ ID NO: 480137 - DNA, 19 bp, Mus musculus
  siRNA target sequence for 5830436K05Rik (NM_026367.3,655-673).
ggacatggacaatgataga

SEQ ID NO: 480138 - DNA, 19 bp, Mus musculus
  siRNA target sequence for 5830436K05Rik (NM_026367.3,676-694).
cagccagtatccagagttt

SEQ ID NO: 480139 - DNA, 19 bp, Mus musculus
  siRNA target sequence for 5830436K05Rik (NM_026367.3,691-709).
gtttacccggaagaaagtt

SEQ ID NO: 480140 - DNA, 19 bp, Mus musculus
  siRNA target sequence for 5830436K05Rik (NM_026367.3,1131-1149).
gaacgccttcaaagaatat

SEQ ID NO: 480141 - DNA, 19 bp, Mus musculus
  siRNA target sequence for 5830436K05Rik (NM_026367.3,1134-1152).
cgccttcaaagaatattaa

SEQ ID NO: 480142 - DNA, 19 bp, Mus musculus
  siRNA target sequence for 5830436K05Rik (NM_026367.3,1241-1259).
cgccatgaccactggttta

SEQ ID NO: 480143 - DNA, 19 bp, Mus musculus
  siRNA target sequence for 5830436K05Rik (NM_026367.3,1289-1307).
catcagcttctgagagata

SEQ ID NO: 480144 - DNA, 19 bp, Mus musculus
  siRNA target sequence for 5830436K05Rik (NM_026367.3,1314-1332).
cggaaagaggacacaagaa

SEQ ID NO: 480145 - DNA, 19 bp, Mus musculus
  siRNA target sequence for 5830436K05Rik (NM_026367.3,1363-1381).
gacaagcatgcatttagga

SEQ ID NO: 480146 - DNA, 19 bp, Mus musculus
  siRNA target sequence for 5830436K05Rik (NM_026367.3,1558-1576).
gatcgcggagccagttcaa

SEQ ID NO: 480147 - DNA, 19 bp, Mus musculus
  siRNA target sequence for 5830436K05Rik (NM_026367.3,1607-1625).
ggatttcctctaccaaaaa

SEQ ID NO: 480148 - DNA, 19 bp, Mus musculus
  siRNA target sequence for 5830468K18Rik (NM_172644.1,538-556).
gtatcttggtttttggtta

SEQ ID NO: 480149 - DNA, 19 bp, Mus musculus
  siRNA target sequence for 5830468K18Rik (NM_172644.1,560-578).
cgtctatgcaggggtttat

SEQ ID NO: 480150 - DNA, 19 bp, Mus musculus
  siRNA target sequence for 5830468K18Rik (NM_172644.1,635-653).
gcgttgagttcacaaagaa

SEQ ID NO: 480151 - DNA, 19 bp, Mus musculus
  siRNA target sequence for 5830468K18Rik (NM_172644.1,636-654).
cgttgagttcacaaagaat

SEQ ID NO: 480152 - DNA, 19 bp, Mus musculus
  siRNA target sequence for 5830468K18Rik (NM_172644.1,640-658).
gagttcacaaagaattcca

SEQ ID NO: 480153 - DNA, 19 bp, Mus musculus
  siRNA target sequence for 5830468K18Rik (NM_172644.1,674-692).
gttgctcggaccaacacat

SEQ ID NO: 480154 - DNA, 19 bp, Mus musculus
  siRNA target sequence for 5830468K18Rik (NM_172644.1,711-729).
cccacttaggccaagaagt

SEQ ID NO: 480155 - DNA, 19 bp, Mus musculus
  siRNA target sequence for 5830468K18Rik (NM_172644.1,757-775).
caggcagaacaccttctta

SEQ ID NO: 480156 - DNA, 19 bp, Mus musculus
  siRNA target sequence for 5830468K18Rik (NM_172644.1,759-777).
ggcagaacaccttcttagt

SEQ ID NO: 480157 - DNA, 19 bp, Mus musculus
  siRNA target sequence for 5830468K18Rik (NM_172644.1,789-807).
gccacggccttgttcagat

SEQ ID NO: 480158 - DNA, 19 bp, Mus musculus
  siRNA target sequence for 5830468K18Rik (NM_172644.1,790-808).
ccacggccttgttcagatt

SEQ ID NO: 480159 - DNA, 19 bp, Mus musculus
  siRNA target sequence for 5830468K18Rik (NM_172644.1,796-814).
ccttgttcagattctcatt

SEQ ID NO: 480160 - DNA, 19 bp, Mus musculus
  siRNA target sequence for 5830468K18Rik (NM_172644.1,833-851).
gcatctgtgaggaggattt

SEQ ID NO: 480161 - DNA, 19 bp, Mus musculus
  siRNA target sequence for 5830468K18Rik (NM_172644.1,882-900).
gagtatctgggacagtaat

SEQ ID NO: 480162 - DNA, 19 bp, Mus musculus
  siRNA target sequence for 5830468K18Rik (NM_172644.1,915-933).
gacaagagaatccgaaaat

SEQ ID NO: 480163 - DNA, 19 bp, Mus musculus
  siRNA target sequence for 5830468K18Rik (NM_172644.1,934-952).
gccgacgggtgagattgaa

SEQ ID NO: 480164 - DNA, 19 bp, Mus musculus
  siRNA target sequence for 5830468K18Rik (NM_172644.1,935-953).
ccgacgggtgagattgaaa

SEQ ID NO: 480165 - DNA, 19 bp, Mus musculus
  siRNA target sequence for 5830468K18Rik (NM_172644.1,936-954).
cgacgggtgagattgaaat

SEQ ID NO: 480166 - DNA, 19 bp, Mus musculus
  siRNA target sequence for 5830468K18Rik (NM_172644.1,1045-1063).
gcagtatcgctacttagat

SEQ ID NO: 480167 - DNA, 19 bp, Mus musculus
  siRNA target sequence for 5830468K18Rik (NM_172644.1,1101-1119).
ggtcgcagatggtcatgaa

SEQ ID NO: 480168 - DNA, 19 bp, Mus musculus
  siRNA target sequence for 5830468K18Rik (NM_172644.1,1102-1120).
gtcgcagatggtcatgaaa

SEQ ID NO: 480169 - DNA, 19 bp, Mus musculus
  siRNA target sequence for 5830468K18Rik (NM_172644.1,1104-1122).
cgcagatggtcatgaaaat

SEQ ID NO: 480170 - DNA, 19 bp, Mus musculus
  siRNA target sequence for 5830468K18Rik (NM_172644.1,1114-1132).
catgaaaatgcgggaatat

SEQ ID NO: 480171 - DNA, 19 bp, Mus musculus
  siRNA target sequence for 5830468K18Rik (NM_172644.1,1123-1141).
gcgggaatatctctgtaat

SEQ ID NO: 480172 - DNA, 19 bp, Mus musculus
  siRNA target sequence for 5830468K18Rik (NM_172644.1,1125-1143).
gggaatatctctgtaatct

SEQ ID NO: 480173 - DNA, 19 bp, Mus musculus
  siRNA target sequence for 5830468K18Rik (NM_172644.1,1289-1307).
ggaggtttagacaggtatt

SEQ ID NO: 480174 - DNA, 19 bp, Mus musculus
  siRNA target sequence for 5830468K18Rik (NM_172644.1,1290-1308).
gaggtttagacaggtattt

SEQ ID NO: 480175 - DNA, 19 bp, Mus musculus
  siRNA target sequence for 5830468K18Rik (NM_172644.1,1338-1356).
gctcaagaccggatagaca

SEQ ID NO: 480176 - DNA, 19 bp, Mus musculus
  siRNA target sequence for 5830468K18Rik (NM_172644.1,1363-1381).
gttcactcagattgacata

SEQ ID NO: 480177 - DNA, 19 bp, Mus musculus
  siRNA target sequence for 5830468K18Rik (NM_172644.1,1404-1422).
ctggcattcagcgtttagt

SEQ ID NO: 480178 - DNA, 19 bp, Mus musculus
  siRNA target sequence for 5830468K18Rik (NM_172644.1,1407-1425).
gcattcagcgtttagttga

SEQ ID NO: 480179 - DNA, 19 bp, Mus musculus
  siRNA target sequence for 5830468K18Rik (NM_172644.1,1427-1445).
ggtttgctgcagtattcct

SEQ ID NO: 480180 - DNA, 19 bp, Mus musculus
  siRNA target sequence for 5830468K18Rik (NM_172644.1,1649-1667).
catgacggagcgaaatact

SEQ ID NO: 480181 - DNA, 19 bp, Mus musculus
  siRNA target sequence for 5830468K18Rik (NM_172644.1,1652-1670).
gacggagcgaaatacttaa

SEQ ID NO: 480182 - DNA, 19 bp, Mus musculus
  siRNA target sequence for 5830468K18Rik (NM_172644.1,1655-1673).
ggagcgaaatacttaagga

SEQ ID NO: 480183 - DNA, 19 bp, Mus musculus
  siRNA target sequence for 5830468K18Rik (NM_172644.1,1656-1674).
gagcgaaatacttaaggaa

SEQ ID NO: 480184 - DNA, 19 bp, Mus musculus
  siRNA target sequence for 5830468K18Rik (NM_172644.1,1759-1777).
ctggagttcgccatttgct

SEQ ID NO: 480185 - DNA, 19 bp, Mus musculus
  siRNA target sequence for 5830468K18Rik (NM_172644.1,1761-1779).
ggagttcgccatttgctaa

SEQ ID NO: 480186 - DNA, 19 bp, Mus musculus
  siRNA target sequence for 5830468K18Rik (NM_172644.1,1764-1782).
gttcgccatttgctaagtt

SEQ ID NO: 480187 - DNA, 19 bp, Mus musculus
  siRNA target sequence for 5830468K18Rik (NM_172644.1,1767-1785).
cgccatttgctaagttcat

SEQ ID NO: 480188 - DNA, 19 bp, Mus musculus
  siRNA target sequence for 5830468K18Rik (NM_172644.1,1768-1786).
gccatttgctaagttcata

SEQ ID NO: 480189 - DNA, 19 bp, Mus musculus
  siRNA target sequence for 5830468K18Rik (NM_172644.1,1769-1787).
ccatttgctaagttcataa

SEQ ID NO: 480190 - DNA, 19 bp, Mus musculus
  siRNA target sequence for 5830468K18Rik (NM_172644.1,1825-1843).
gatacaagaagaagacata

SEQ ID NO: 480191 - DNA, 19 bp, Mus musculus
  siRNA target sequence for 5830468K18Rik (NM_172644.1,1859-1877).
ggggaacatgagaaagcat

SEQ ID NO: 480192 - DNA, 19 bp, Mus musculus
  siRNA target sequence for 5830468K18Rik (NM_172644.1,2052-2070).
ctaactccagtgacattca

SEQ ID NO: 480193 - DNA, 19 bp, Mus musculus
  siRNA target sequence for 5830468K18Rik (NM_172644.1,2063-2081).
gacattcacctcctctata

SEQ ID NO: 480194 - DNA, 19 bp, Mus musculus
  siRNA target sequence for 5830468K18Rik (NM_172644.1,2105-2123).
caacactatgacttggttt

SEQ ID NO: 480195 - DNA, 19 bp, Mus musculus
  siRNA target sequence for 5830468K18Rik (NM_172644.1,2108-2126).
cactatgacttggttttaa

SEQ ID NO: 480196 - DNA, 19 bp, Mus musculus
  siRNA target sequence for 5830468K18Rik (NM_172644.1,2233-2251).
gcttcaggctttagactat

SEQ ID NO: 480197 - DNA, 19 bp, Mus musculus
  siRNA target sequence for 5830468K18Rik (NM_172644.1,2357-2375).
cgaggacaggaccttatga

SEQ ID NO: 480198 - DNA, 19 bp, Mus musculus
  siRNA target sequence for 5830468K18Rik (NM_172644.1,2405-2423).
gagctgaagccttaccata

SEQ ID NO: 480199 - DNA, 19 bp, Mus musculus
  siRNA target sequence for 6030404K05Rik (NM_175472.2,130-148).
gctctacagggagaaaagt

SEQ ID NO: 480200 - DNA, 19 bp, Mus musculus
  siRNA target sequence for 6030404K05Rik (NM_175472.2,186-204).
gactcagacagataatatt

SEQ ID NO: 480201 - DNA, 19 bp, Mus musculus
  siRNA target sequence for 6030404K05Rik (NM_175472.2,238-256).
gatacagcagatgatttga

SEQ ID NO: 480202 - DNA, 19 bp, Mus musculus
  siRNA target sequence for 6030404K05Rik (NM_175472.2,402-420).
catcttccgacttgaaaaa

SEQ ID NO: 480203 - DNA, 19 bp, Mus musculus
  siRNA target sequence for 6030404K05Rik (NM_175472.2,421-439).
cggtcaccagaatatacca

SEQ ID NO: 480204 - DNA, 19 bp, Mus musculus
  siRNA target sequence for 6030404K05Rik (NM_175472.2,422-440).
ggtcaccagaatataccaa

SEQ ID NO: 480205 - DNA, 19 bp, Mus musculus
  siRNA target sequence for 6030404K05Rik (NM_175472.2,423-441).
gtcaccagaatataccaat

SEQ ID NO: 480206 - DNA, 19 bp, Mus musculus
  siRNA target sequence for 6030404K05Rik (NM_175472.2,444-462).
ccgctatctatgcaaactt

SEQ ID NO: 480207 - DNA, 19 bp, Mus musculus
  siRNA target sequence for 6030404K05Rik (NM_175472.2,445-463).
cgctatctatgcaaacttt

SEQ ID NO: 480208 - DNA, 19 bp, Mus musculus
  siRNA target sequence for 6030404K05Rik (NM_175472.2,451-469).
ctatgcaaactttgcttaa

SEQ ID NO: 480209 - DNA, 19 bp, Mus musculus
  siRNA target sequence for 6030404K05Rik (NM_175472.2,455-473).
gcaaactttgcttaattca

SEQ ID NO: 480210 - DNA, 19 bp, Mus musculus
  siRNA target sequence for 6030404K05Rik (NM_175472.2,487-505).
caaggagcacataaacata

SEQ ID NO: 480211 - DNA, 19 bp, Mus musculus
  siRNA target sequence for 6030404K05Rik (NM_175472.2,591-609).
cttggctgctttaagtgtt

SEQ ID NO: 480212 - DNA, 19 bp, Mus musculus
  siRNA target sequence for 6030404K05Rik (NM_175472.2,659-677).
gaatccgccaggacattgt

SEQ ID NO: 480213 - DNA, 19 bp, Mus musculus
  siRNA target sequence for 6030404K05Rik (NM_175472.2,678-696).
ggaggaaatgtcaaaggtt

SEQ ID NO: 480214 - DNA, 19 bp, Mus musculus
  siRNA target sequence for 6030404K05Rik (NM_175472.2,689-707).
caaaggttataatgacatt

SEQ ID NO: 480215 - DNA, 19 bp, Mus musculus
  siRNA target sequence for 6030404K05Rik (NM_175472.2,726-744).
gaggttgtatggttcatct

SEQ ID NO: 480216 - DNA, 19 bp, Mus musculus
  siRNA target sequence for 6030404K05Rik (NM_175472.2,736-754).
ggttcatctctgacaaagt

SEQ ID NO: 480217 - DNA, 19 bp, Mus musculus
  siRNA target sequence for 6030404K05Rik (NM_175472.2,770-788).
gtgatgttaatatagatat

SEQ ID NO: 480218 - DNA, 19 bp, Mus musculus
  siRNA target sequence for 6030404K05Rik (NM_175472.2,804-822).
gatgaatcatccagatctt

SEQ ID NO: 480219 - DNA, 19 bp, Mus musculus
  siRNA target sequence for 6030404K05Rik (NM_175472.2,928-946).
gctttactgtgtagagtaa

SEQ ID NO: 480220 - DNA, 19 bp, Mus musculus
  siRNA target sequence for 6030404K05Rik (NM_175472.2,966-984).
gtgtctcacaactgactta

SEQ ID NO: 480221 - DNA, 19 bp, Mus musculus
  siRNA target sequence for 6030404K05Rik (NM_175472.2,968-986).
gtctcacaactgacttact

SEQ ID NO: 480222 - DNA, 19 bp, Mus musculus
  siRNA target sequence for 6030404K05Rik (NM_175472.2,1019-1037).
ctcccttagtgctagcttt

SEQ ID NO: 480223 - DNA, 19 bp, Mus musculus
  siRNA target sequence for 6030404K05Rik (NM_175472.2,1046-1064).
gggctaagctgtgctatat

SEQ ID NO: 480224 - DNA, 19 bp, Mus musculus
  siRNA target sequence for 6030404K05Rik (NM_175472.2,1081-1099).
ggtggaatcccttcttact

SEQ ID NO: 480225 - DNA, 19 bp, Mus musculus
  siRNA target sequence for 6030404K05Rik (NM_175472.2,1113-1131).
ggtgatgttttttcttcaa

SEQ ID NO: 480226 - DNA, 19 bp, Mus musculus
  siRNA target sequence for 6030404K05Rik (NM_175472.2,1180-1198).
ggctttgacccgaaaagaa

SEQ ID NO: 480227 - DNA, 19 bp, Mus musculus
  siRNA target sequence for 6030404K05Rik (NM_175472.2,1262-1280).
gtagtgcaactgagaaaaa

SEQ ID NO: 480228 - DNA, 19 bp, Mus musculus
  siRNA target sequence for 6030404K05Rik (NM_175472.2,1268-1286).
caactgagaaaaacttaat

SEQ ID NO: 480229 - DNA, 19 bp, Mus musculus
  siRNA target sequence for 6030404K05Rik (NM_175472.2,1342-1360).
gaaacagacaaccaaagta

SEQ ID NO: 480230 - DNA, 19 bp, Mus musculus
  siRNA target sequence for 6030404K05Rik (NM_175472.2,1382-1400).
gcaaatctcctttaacatt

SEQ ID NO: 480231 - DNA, 19 bp, Mus musculus
  siRNA target sequence for 6030449J21 (NM_172817.1,159-177).
gcaccacaggccaaagtga

SEQ ID NO: 480232 - DNA, 19 bp, Mus musculus
  siRNA target sequence for 6030449J21 (NM_172817.1,304-322).
gatctaagcctgttgtgat

SEQ ID NO: 480233 - DNA, 19 bp, Mus musculus
  siRNA target sequence for 6030449J21 (NM_172817.1,584-602).
cgggttgaaccctagtgta

SEQ ID NO: 480234 - DNA, 19 bp, Mus musculus
  siRNA target sequence for 6030490I01Rik (NM_177359.2,272-290).
gaacctgtcctatatagga

SEQ ID NO: 480235 - DNA, 19 bp, Mus musculus
  siRNA target sequence for 6030490I01Rik (NM_177359.2,388-406).
gtcatcagcgtgcagaaat

SEQ ID NO: 480236 - DNA, 19 bp, Mus musculus
  siRNA target sequence for 6030490I01Rik (NM_177359.2,393-411).
cagcgtgcagaaatcttta

SEQ ID NO: 480237 - DNA, 19 bp, Mus musculus
  siRNA target sequence for 6030490I01Rik (NM_177359.2,396-414).
cgtgcagaaatctttaact

SEQ ID NO: 480238 - DNA, 19 bp, Mus musculus
  siRNA target sequence for 6030490I01Rik (NM_177359.2,469-487).
gccctgtctatgaagaagt

SEQ ID NO: 480239 - DNA, 19 bp, Mus musculus
  siRNA target sequence for 6030490I01Rik (NM_177359.2,470-488).
ccctgtctatgaagaagta

SEQ ID NO: 480240 - DNA, 19 bp, Mus musculus
  siRNA target sequence for 6030490I01Rik (NM_177359.2,496-514).
gccatttatctgtgaatgt

SEQ ID NO: 480241 - DNA, 19 bp, Mus musculus
  siRNA target sequence for 6030490I01Rik (NM_177359.2,498-516).
catttatctgtgaatgtct

SEQ ID NO: 480242 - DNA, 19 bp, Mus musculus
  siRNA target sequence for 6030490I01Rik (NM_177359.2,530-548).
cccaggacacaaactgtat

SEQ ID NO: 480243 - DNA, 19 bp, Mus musculus
  siRNA target sequence for 6030490I01Rik (NM_177359.2,545-563).
gtatgccattcaggaatat

SEQ ID NO: 480244 - DNA, 19 bp, Mus musculus
  siRNA target sequence for 6030490I01Rik (NM_177359.2,700-718).
ccagtcagaacgatggaaa

SEQ ID NO: 480245 - DNA, 19 bp, Mus musculus
  siRNA target sequence for 6030490I01Rik (NM_177359.2,729-747).
ggagaaccgcactatgaat

SEQ ID NO: 480246 - DNA, 19 bp, Mus musculus
  siRNA target sequence for 6030490I01Rik (NM_177359.2,784-802).
cttttcgtaggcatgaaga

SEQ ID NO: 480247 - DNA, 19 bp, Mus musculus
  siRNA target sequence for 6030490I01Rik (NM_177359.2,809-827).
cagccgagaaaaatcctat

SEQ ID NO: 480248 - DNA, 19 bp, Mus musculus
  siRNA target sequence for 6030490I01Rik (NM_177359.2,1019-1037).
cttcaccgatcgtagttca

SEQ ID NO: 480249 - DNA, 19 bp, Mus musculus
  siRNA target sequence for 6030490I01Rik (NM_177359.2,1022-1040).
caccgatcgtagttcactt

SEQ ID NO: 480250 - DNA, 19 bp, Mus musculus
  siRNA target sequence for 6030490I01Rik (NM_177359.2,1074-1092).
ccgtataagtgtacgaaat

SEQ ID NO: 480251 - DNA, 19 bp, Mus musculus
  siRNA target sequence for 6030490I01Rik (NM_177359.2,1193-1211).
ctgtgaaagcgcttttcga

SEQ ID NO: 480252 - DNA, 19 bp, Mus musculus
  siRNA target sequence for 6030490I01Rik (NM_177359.2,1202-1220).
cgcttttcgaacacataaa

SEQ ID NO: 480253 - DNA, 19 bp, Mus musculus
  siRNA target sequence for 6030490I01Rik (NM_177359.2,1203-1221).
gcttttcgaacacataaaa

SEQ ID NO: 480254 - DNA, 19 bp, Mus musculus
  siRNA target sequence for 6030490I01Rik (NM_177359.2,1204-1222).
cttttcgaacacataaaat

SEQ ID NO: 480255 - DNA, 19 bp, Mus musculus
  siRNA target sequence for 6030490I01Rik (NM_177359.2,1236-1254).
gaatgtgtctgtaagcaat

SEQ ID NO: 480256 - DNA, 19 bp, Mus musculus
  siRNA target sequence for 6030490I01Rik (NM_177359.2,1273-1291).
gtcacagctccgttaagta

SEQ ID NO: 480257 - DNA, 19 bp, Mus musculus
  siRNA target sequence for 6030490I01Rik (NM_177359.2,1282-1300).
ccgttaagtaccatgaatt

SEQ ID NO: 480258 - DNA, 19 bp, Mus musculus
  siRNA target sequence for 6030490I01Rik (NM_177359.2,1423-1441).
gcgggaaagcttttacctt

SEQ ID NO: 480259 - DNA, 19 bp, Mus musculus
  siRNA target sequence for 6030490I01Rik (NM_177359.2,1424-1442).
cgggaaagcttttaccttt

SEQ ID NO: 480260 - DNA, 19 bp, Mus musculus
  siRNA target sequence for 6030490I01Rik (NM_177359.2,1520-1538).
caggtcttctcgtcaagtt

SEQ ID NO: 480261 - DNA, 19 bp, Mus musculus
  siRNA target sequence for 6030490I01Rik (NM_177359.2,1522-1540).
ggtcttctcgtcaagttca

SEQ ID NO: 480262 - DNA, 19 bp, Mus musculus
  siRNA target sequence for 6030490I01Rik (NM_177359.2,1525-1543).
cttctcgtcaagttcagat

SEQ ID NO: 480263 - DNA, 19 bp, Mus musculus
  siRNA target sequence for 6030490I01Rik (NM_177359.2,1528-1546).
ctcgtcaagttcagataca

SEQ ID NO: 480264 - DNA, 19 bp, Mus musculus
  siRNA target sequence for 6030490I01Rik (NM_177359.2,1647-1665).
ggctcgaacccctacgttt

SEQ ID NO: 480265 - DNA, 19 bp, Mus musculus
  siRNA target sequence for 6030490I01Rik (NM_177359.2,1683-1701).
gcctttagttggtttagta

SEQ ID NO: 480266 - DNA, 19 bp, Mus musculus
  siRNA target sequence for 6030490I01Rik (NM_177359.2,1769-1787).
cttctgtagtcgcatatca

SEQ ID NO: 480267 - DNA, 19 bp, Mus musculus
  siRNA target sequence for 6030490I01Rik (NM_177359.2,1852-1870).
cctttcgttctcctagtta

SEQ ID NO: 480268 - DNA, 19 bp, Mus musculus
  siRNA target sequence for 6030490I01Rik (NM_177359.2,1853-1871).
ctttcgttctcctagttat

SEQ ID NO: 480269 - DNA, 19 bp, Mus musculus
  siRNA target sequence for 6030490I01Rik (NM_177359.2,1857-1875).
cgttctcctagttatctca

SEQ ID NO: 480270 - DNA, 19 bp, Mus musculus
  siRNA target sequence for 6030490I01Rik (NM_177359.2,1941-1959).
cgttctttccgatatgtca

SEQ ID NO: 480271 - DNA, 19 bp, Mus musculus
  siRNA target sequence for 6030490I01Rik (NM_177359.2,1942-1960).
gttctttccgatatgtcaa

SEQ ID NO: 480272 - DNA, 19 bp, Mus musculus
  siRNA target sequence for 6030490I01Rik (NM_177359.2,2015-2033).
gaaagccttcagttattat

SEQ ID NO: 480273 - DNA, 19 bp, Mus musculus
  siRNA target sequence for 6330505F04Rik (NM_172779.1,397-415).
cctatttggacattgctaa

SEQ ID NO: 480274 - DNA, 19 bp, Mus musculus
  siRNA target sequence for 6330505F04Rik (NM_172779.1,398-416).
ctatttggacattgctaaa

SEQ ID NO: 480275 - DNA, 19 bp, Mus musculus
  siRNA target sequence for 6330505F04Rik (NM_172779.1,417-435).
ggcgctgtggagttattct

SEQ ID NO: 480276 - DNA, 19 bp, Mus musculus
  siRNA target sequence for 6330505F04Rik (NM_172779.1,531-549).
gaaaatcacgccacattca

SEQ ID NO: 480277 - DNA, 19 bp, Mus musculus
  siRNA target sequence for 6330505F04Rik (NM_172779.1,539-557).
cgccacattcatgaatgaa

SEQ ID NO: 480278 - DNA, 19 bp, Mus musculus
  siRNA target sequence for 6330505F04Rik (NM_172779.1,613-631).
cctttgatttgttaaatct

SEQ ID NO: 480279 - DNA, 19 bp, Mus musculus
  siRNA target sequence for 6330505F04Rik (NM_172779.1,693-711).
ccgtctattttaattacca

SEQ ID NO: 480280 - DNA, 19 bp, Mus musculus
  siRNA target sequence for 6330505F04Rik (NM_172779.1,736-754).
gtactgctagcgttcaaga

SEQ ID NO: 480281 - DNA, 19 bp, Mus musculus
  siRNA target sequence for 6330505F04Rik (NM_172779.1,739-757).
ctgctagcgttcaagaaga

SEQ ID NO: 480282 - DNA, 19 bp, Mus musculus
  siRNA target sequence for 6330505F04Rik (NM_172779.1,816-834).
cgttgggatcaaaggttat

SEQ ID NO: 480283 - DNA, 19 bp, Mus musculus
  siRNA target sequence for 6330505F04Rik (NM_172779.1,854-872).
gcctggagtggcttctact

SEQ ID NO: 480284 - DNA, 19 bp, Mus musculus
  siRNA target sequence for 6330505F04Rik (NM_172779.1,890-908).
gagtgtcccaagtgatgaa

SEQ ID NO: 480285 - DNA, 19 bp, Mus musculus
  siRNA target sequence for 6330505F04Rik (NM_172779.1,964-982).
cacaaagaatgttaaatca

SEQ ID NO: 480286 - DNA, 19 bp, Mus musculus
  siRNA target sequence for 6330505F04Rik (NM_172779.1,970-988).
gaatgttaaatcagtgttt

SEQ ID NO: 480287 - DNA, 19 bp, Mus musculus
  siRNA target sequence for 6330505F04Rik (NM_172779.1,983-1001).
gtgtttagagtcactagtt

SEQ ID NO: 480288 - DNA, 19 bp, Mus musculus
  siRNA target sequence for 6330505F04Rik (NM_172779.1,994-1012).
cactagttcaaaaagtaca

SEQ ID NO: 480289 - DNA, 19 bp, Mus musculus
  siRNA target sequence for 6330505F04Rik (NM_172779.1,1013-1031).
gagtggtgtagttattaat

SEQ ID NO: 480290 - DNA, 19 bp, Mus musculus
  siRNA target sequence for 6330505F04Rik (NM_172779.1,1091-1109).
caggccaagcaacctattt

SEQ ID NO: 480291 - DNA, 19 bp, Mus musculus
  siRNA target sequence for 6330505F04Rik (NM_172779.1,1113-1131).
gctcaaccgtggcatagtt

SEQ ID NO: 480292 - DNA, 19 bp, Mus musculus
  siRNA target sequence for 6330505F04Rik (NM_172779.1,1123-1141).
ggcatagttgtcataaact

SEQ ID NO: 480293 - DNA, 19 bp, Mus musculus
  siRNA target sequence for 6330505F04Rik (NM_172779.1,1142-1160).
catctatgtgcgacctaat

SEQ ID NO: 480294 - DNA, 19 bp, Mus musculus
  siRNA target sequence for 6330505F04Rik (NM_172779.1,1145-1163).
ctatgtgcgacctaattct

SEQ ID NO: 480295 - DNA, 19 bp, Mus musculus
  siRNA target sequence for 6330505F04Rik (NM_172779.1,1149-1167).
gtgcgacctaattctaaaa

SEQ ID NO: 480296 - DNA, 19 bp, Mus musculus
  siRNA target sequence for 6330505F04Rik (NM_172779.1,1151-1169).
gcgacctaattctaaaact

SEQ ID NO: 480297 - DNA, 19 bp, Mus musculus
  siRNA target sequence for 6330505F04Rik (NM_172779.1,1189-1207).
ggccaattccagaatcgtt

SEQ ID NO: 480298 - DNA, 19 bp, Mus musculus
  siRNA target sequence for 6330505F04Rik (NM_172779.1,1211-1229).
gccagaacagaatttacct

SEQ ID NO: 480299 - DNA, 19 bp, Mus musculus
  siRNA target sequence for 6330505F04Rik (NM_172779.1,1273-1291).
gtgttgattgtgaaccaat

SEQ ID NO: 480300 - DNA, 19 bp, Mus musculus
  siRNA target sequence for 6330505F04Rik (NM_172779.1,1309-1327).
cctttgacaaatatgaact

SEQ ID NO: 480301 - DNA, 19 bp, Mus musculus
  siRNA target sequence for 6330505F04Rik (NM_172779.1,1334-1352).
gtctcccttaactcagtat

SEQ ID NO: 480302 - DNA, 19 bp, Mus musculus
  siRNA target sequence for 6330505F04Rik (NM_172779.1,1336-1354).
ctcccttaactcagtatat

SEQ ID NO: 480303 - DNA, 19 bp, Mus musculus
  siRNA target sequence for 6330505F04Rik (NM_172779.1,1425-1443).
ggatatccatttggttatt

SEQ ID NO: 480304 - DNA, 19 bp, Mus musculus
  siRNA target sequence for 6330505F04Rik (NM_172779.1,1465-1483).
cttgtgtaaacctctttgt

SEQ ID NO: 480305 - DNA, 19 bp, Mus musculus
  siRNA target sequence for 6330505F04Rik (NM_172779.1,1468-1486).
gtgtaaacctctttgtgat

SEQ ID NO: 480306 - DNA, 19 bp, Mus musculus
  siRNA target sequence for 6330505F04Rik (NM_172779.1,1493-1511).
caactacccagtcttactt

SEQ ID NO: 480307 - DNA, 19 bp, Mus musculus
  siRNA target sequence for 6330505F04Rik (NM_172779.1,1573-1591).
cttttgacagctacttaaa

SEQ ID NO: 480308 - DNA, 19 bp, Mus musculus
  siRNA target sequence for 6330505F04Rik (NM_172779.1,1596-1614).
ctgcctccatactacttaa

SEQ ID NO: 480309 - DNA, 19 bp, Mus musculus
  siRNA target sequence for 6330505F04Rik (NM_172779.1,1598-1616).
gcctccatactacttaata

SEQ ID NO: 480310 - DNA, 19 bp, Mus musculus
  siRNA target sequence for 6330505F04Rik (NM_172779.1,1599-1617).
cctccatactacttaataa

SEQ ID NO: 480311 - DNA, 19 bp, Mus musculus
  siRNA target sequence for 6330505F04Rik (NM_172779.1,1602-1620).
ccatactacttaataacca

SEQ ID NO: 480312 - DNA, 19 bp, Mus musculus
  siRNA target sequence for 6330505F04Rik (NM_172779.1,1603-1621).
catactacttaataaccaa

SEQ ID NO: 480313 - DNA, 19 bp, Mus musculus
  siRNA target sequence for 6330505F04Rik (NM_172779.1,1815-1833).
caagtggggctcttaaaca

SEQ ID NO: 480314 - DNA, 19 bp, Mus musculus
  siRNA target sequence for 6330505F04Rik (NM_172779.1,1821-1839).
gggctcttaaacaaggatt

SEQ ID NO: 480315 - DNA, 19 bp, Mus musculus
  siRNA target sequence for 6330505F04Rik (NM_172779.1,1822-1840).
ggctcttaaacaaggattt

SEQ ID NO: 480316 - DNA, 19 bp, Mus musculus
  siRNA target sequence for 6330505F04Rik (NM_172779.1,1852-1870).
catataggaacgcttatga

SEQ ID NO: 480317 - DNA, 19 bp, Mus musculus
  siRNA target sequence for 6330505F04Rik (NM_172779.1,1925-1943).
gcagactcggaagtttatt

SEQ ID NO: 480318 - DNA, 19 bp, Mus musculus
  siRNA target sequence for 6330505F04Rik (NM_172779.1,1928-1946).
gactcggaagtttattgtt

SEQ ID NO: 480319 - DNA, 19 bp, Mus musculus
  siRNA target sequence for 6330505F04Rik (NM_172779.1,1993-2011).
gtaactatcaggaatatct

SEQ ID NO: 480320 - DNA, 19 bp, Mus musculus
  siRNA target sequence for 6330505F04Rik (NM_172779.1,2055-2073).
ccaaaacgactgcatactt

SEQ ID NO: 480321 - DNA, 19 bp, Mus musculus
  siRNA target sequence for 6330505F04Rik (NM_172779.1,2056-2074).
caaaacgactgcatacttt

SEQ ID NO: 480322 - DNA, 19 bp, Mus musculus
  siRNA target sequence for 6330505F04Rik (NM_172779.1,2082-2100).
ccatttaagcaagataaga

SEQ ID NO: 480323 - DNA, 19 bp, Mus musculus
  siRNA target sequence for 6330505F04Rik (NM_172779.1,2133-2151).
gtagtagggccacaaaaca

SEQ ID NO: 480324 - DNA, 19 bp, Mus musculus
  siRNA target sequence for 6330505F04Rik (NM_172779.1,2172-2190).
cccaacagtcctatgtcat

SEQ ID NO: 480325 - DNA, 19 bp, Mus musculus
  siRNA target sequence for 6330505F04Rik (NM_172779.1,2285-2303).
ctcgtggttcccatcttgt

SEQ ID NO: 480326 - DNA, 19 bp, Mus musculus
  siRNA target sequence for 6330505F04Rik (NM_172779.1,2302-2320).
gtccaagcctcgtaaaaca

SEQ ID NO: 480327 - DNA, 19 bp, Mus musculus
  siRNA target sequence for 6330505F04Rik (NM_172779.1,2304-2322).
ccaagcctcgtaaaacaca

SEQ ID NO: 480328 - DNA, 19 bp, Mus musculus
  siRNA target sequence for 6330505F04Rik (NM_172779.1,2395-2413).
ctgatggcttcttattaaa

SEQ ID NO: 480329 - DNA, 19 bp, Mus musculus
  siRNA target sequence for 6330505F04Rik (NM_172779.1,2418-2436).
gctccagcagagtttatga

SEQ ID NO: 480330 - DNA, 19 bp, Mus musculus
  siRNA target sequence for 6330505F04Rik (NM_172779.1,2419-2437).
ctccagcagagtttatgaa

SEQ ID NO: 480331 - DNA, 19 bp, Mus musculus
  siRNA target sequence for 6330505F04Rik (NM_172779.1,2422-2440).
cagcagagtttatgaatgt

SEQ ID NO: 480332 - DNA, 19 bp, Mus musculus
  siRNA target sequence for 6330505F04Rik (NM_172779.1,2439-2457).
gtgtcaggagaaagcttta

SEQ ID NO: 480333 - DNA, 19 bp, Mus musculus
  siRNA target sequence for 6330505F04Rik (NM_172779.1,2516-2534).
cattcacaaacctggtaat

SEQ ID NO: 480334 - DNA, 19 bp, Mus musculus
  siRNA target sequence for 6330505F04Rik (NM_172779.1,2520-2538).
cacaaacctggtaataata

SEQ ID NO: 480335 - DNA, 19 bp, Mus musculus
  siRNA target sequence for 6330505F04Rik (NM_172779.1,2522-2540).
caaacctggtaataatata

SEQ ID NO: 480336 - DNA, 19 bp, Mus musculus
  siRNA target sequence for 6330505F04Rik (NM_172779.1,2544-2562).
ctaggaggagccaaaacct

SEQ ID NO: 480337 - DNA, 19 bp, Mus musculus
  siRNA target sequence for 6330505F04Rik (NM_172779.1,2609-2627).
ggaaacggtgccaaattca

SEQ ID NO: 480338 - DNA, 19 bp, Mus musculus
  siRNA target sequence for 6330505F04Rik (NM_172779.1,2610-2628).
gaaacggtgccaaattcaa

SEQ ID NO: 480339 - DNA, 19 bp, Mus musculus
  siRNA target sequence for 6330505F04Rik (NM_172779.1,2615-2633).
ggtgccaaattcaatgcaa

SEQ ID NO: 480340 - DNA, 19 bp, Mus musculus
  siRNA target sequence for 6330505F04Rik (NM_172779.1,2616-2634).
gtgccaaattcaatgcaaa

SEQ ID NO: 480341 - DNA, 19 bp, Mus musculus
  siRNA target sequence for 6330505F04Rik (NM_172779.1,2655-2673).
ggcatcaatgctgacataa

SEQ ID NO: 480342 - DNA, 19 bp, Mus musculus
  siRNA target sequence for 6330505F04Rik (NM_172779.1,2656-2674).
gcatcaatgctgacataaa

SEQ ID NO: 480343 - DNA, 19 bp, Mus musculus
  siRNA target sequence for 6330505F04Rik (NM_172779.1,2660-2678).
caatgctgacataaagcat

SEQ ID NO: 480344 - DNA, 19 bp, Mus musculus
  siRNA target sequence for 6330505F04Rik (NM_172779.1,2664-2682).
gctgacataaagcatcaat

SEQ ID NO: 480345 - DNA, 19 bp, Mus musculus
  siRNA target sequence for 6330505F04Rik (NM_172779.1,2665-2683).
ctgacataaagcatcaatt

SEQ ID NO: 480346 - DNA, 19 bp, Mus musculus
  siRNA target sequence for 6330505F04Rik (NM_172779.1,2667-2685).
gacataaagcatcaattaa

SEQ ID NO: 480347 - DNA, 19 bp, Mus musculus
  siRNA target sequence for 6330505F04Rik (NM_172779.1,2707-2725).
gacgaaagtatgaaaggat

SEQ ID NO: 480348 - DNA, 19 bp, Mus musculus
  siRNA target sequence for 6330505F04Rik (NM_172779.1,2762-2780).
gacgaagaaacagtttgtt

SEQ ID NO: 480349 - DNA, 19 bp, Mus musculus
  siRNA target sequence for 6330505F04Rik (NM_172779.1,2772-2790).
cagtttgttgaatttacca

SEQ ID NO: 480350 - DNA, 19 bp, Mus musculus
  siRNA target sequence for 6330505F04Rik (NM_172779.1,2843-2861).
ggtactagaaaaaatcgat

SEQ ID NO: 480351 - DNA, 19 bp, Mus musculus
  siRNA target sequence for 6330505F04Rik (NM_172779.1,2859-2877).
gattcccaccaccttctta

SEQ ID NO: 480352 - DNA, 19 bp, Mus musculus
  siRNA target sequence for 6330505F04Rik (NM_172779.1,2874-2892).
cttaacaatgtgaatcaca

SEQ ID NO: 480353 - DNA, 19 bp, Mus musculus
  siRNA target sequence for 6330505F04Rik (NM_172779.1,2889-2907).
cacatcaacagcagatcat

SEQ ID NO: 480354 - DNA, 19 bp, Mus musculus
  siRNA target sequence for 6330505F04Rik (NM_172779.1,2894-2912).
caacagcagatcatcatgt

SEQ ID NO: 480355 - DNA, 19 bp, Mus musculus
  siRNA target sequence for 6330548G22Rik (NM_029532.2,520-538).
gcggattgggtgggaaaaa

SEQ ID NO: 480356 - DNA, 19 bp, Mus musculus
  siRNA target sequence for 6330548G22Rik (NM_029532.2,688-706).
ccagggaacgggatcatga

SEQ ID NO: 480357 - DNA, 19 bp, Mus musculus
  siRNA target sequence for 6330569O16Rik (NM_175235.3,624-642).
cacggtagccggacaatga

SEQ ID NO: 480358 - DNA, 19 bp, Mus musculus
  siRNA target sequence for 6330569O16Rik (NM_175235.3,976-994).
ccatgggagtcaatggatt

SEQ ID NO: 480359 - DNA, 19 bp, Mus musculus
  siRNA target sequence for 6330569O16Rik (NM_175235.3,1033-1051).
ccgacacgctctataacaa

SEQ ID NO: 480360 - DNA, 19 bp, Mus musculus
  siRNA target sequence for 6330569O16Rik (NM_175235.3,1165-1183).
gtaacctcttcatctatca

SEQ ID NO: 480361 - DNA, 19 bp, Mus musculus
  siRNA target sequence for 6330569O16Rik (NM_175235.3,1201-1219).
gggatgcagaactcataca

SEQ ID NO: 480362 - DNA, 19 bp, Mus musculus
  siRNA target sequence for 6330569O16Rik (NM_175235.3,1203-1221).
gatgcagaactcatacaga

SEQ ID NO: 480363 - DNA, 19 bp, Mus musculus
  siRNA target sequence for 6330569O16Rik (NM_175235.3,1302-1320).
gttagttttgacaatccaa

SEQ ID NO: 480364 - DNA, 19 bp, Mus musculus
  siRNA target sequence for 6330581L23Rik (NM_146185.1,453-471).
ctcagtggggctttgcatt

SEQ ID NO: 480365 - DNA, 19 bp, Mus musculus
  siRNA target sequence for 6330581L23Rik (NM_146185.1,455-473).
cagtggggctttgcattta

SEQ ID NO: 480366 - DNA, 19 bp, Mus musculus
  siRNA target sequence for 6330581L23Rik (NM_146185.1,459-477).
ggggctttgcatttatcaa

SEQ ID NO: 480367 - DNA, 19 bp, Mus musculus
  siRNA target sequence for 6330581L23Rik (NM_146185.1,508-526).
caagatgcctgcatggatt

SEQ ID NO: 480368 - DNA, 19 bp, Mus musculus
  siRNA target sequence for 6330581L23Rik (NM_146185.1,750-768).
gacactcgcttgtgacaaa

SEQ ID NO: 480369 - DNA, 19 bp, Mus musculus
  siRNA target sequence for 6330581L23Rik (NM_146185.1,752-770).
cactcgcttgtgacaaact

SEQ ID NO: 480370 - DNA, 19 bp, Mus musculus
  siRNA target sequence for 6330581L23Rik (NM_146185.1,838-856).
gtcaaatcggaaaaatcct

SEQ ID NO: 480371 - DNA, 19 bp, Mus musculus
  siRNA target sequence for 6330581L23Rik (NM_146185.1,985-1003).
ggcaagaaggcatttcagt

SEQ ID NO: 480372 - DNA, 19 bp, Mus musculus
  siRNA target sequence for 6330581L23Rik (NM_146185.1,1446-1464).
cacgtgcgggtcacaatta

SEQ ID NO: 480373 - DNA, 19 bp, Mus musculus
  siRNA target sequence for 6330581L23Rik (NM_146185.1,1449-1467).
gtgcgggtcacaattaagt

SEQ ID NO: 480374 - DNA, 19 bp, Mus musculus
  siRNA target sequence for 6330581L23Rik (NM_146185.1,1451-1469).
gcgggtcacaattaagtca

SEQ ID NO: 480375 - DNA, 19 bp, Mus musculus
  siRNA target sequence for 6330581L23Rik (NM_146185.1,1452-1470).
cgggtcacaattaagtcaa

SEQ ID NO: 480376 - DNA, 19 bp, Mus musculus
  siRNA target sequence for 6330581L23Rik (NM_146185.1,1455-1473).
gtcacaattaagtcaacat

SEQ ID NO: 480377 - DNA, 19 bp, Mus musculus
  siRNA target sequence for 6330581L23Rik (NM_146185.1,1489-1507).
ggcgataaattgcataaat

SEQ ID NO: 480378 - DNA, 19 bp, Mus musculus
  siRNA target sequence for 6330581L23Rik (NM_146185.1,1491-1509).
cgataaattgcataaatgt

SEQ ID NO: 480379 - DNA, 19 bp, Mus musculus
  siRNA target sequence for 6330581L23Rik (NM_146185.1,1492-1510).
gataaattgcataaatgta

SEQ ID NO: 480380 - DNA, 19 bp, Mus musculus
  siRNA target sequence for 6330581L23Rik (NM_146185.1,1546-1564).
catacccagaggcagttaa

SEQ ID NO: 480381 - DNA, 19 bp, Mus musculus
  siRNA target sequence for 6330581L23Rik (NM_146185.1,1552-1570).
cagaggcagttaatttaca

SEQ ID NO: 480382 - DNA, 19 bp, Mus musculus
  siRNA target sequence for 6330581L23Rik (NM_146185.1,1554-1572).
gaggcagttaatttacatt

SEQ ID NO: 480383 - DNA, 19 bp, Mus musculus
  siRNA target sequence for 6330581L23Rik (NM_146185.1,1702-1720).
ctgcgctccatcgttagta

SEQ ID NO: 480384 - DNA, 19 bp, Mus musculus
  siRNA target sequence for 6330581L23Rik (NM_146185.1,1704-1722).
gcgctccatcgttagtagt

SEQ ID NO: 480385 - DNA, 19 bp, Mus musculus
  siRNA target sequence for 6330581L23Rik (NM_146185.1,1707-1725).
ctccatcgttagtagtctt

SEQ ID NO: 480386 - DNA, 19 bp, Mus musculus
  siRNA target sequence for 6330581L23Rik (NM_146185.1,1709-1727).
ccatcgttagtagtcttaa

SEQ ID NO: 480387 - DNA, 19 bp, Mus musculus
  siRNA target sequence for 6330581L23Rik (NM_146185.1,1710-1728).
catcgttagtagtcttaaa

SEQ ID NO: 480388 - DNA, 19 bp, Mus musculus
  siRNA target sequence for 6330581L23Rik (NM_146185.1,1995-2013).
gaaatcacacgaattcaat

SEQ ID NO: 480389 - DNA, 19 bp, Mus musculus
  siRNA target sequence for 6330581L23Rik (NM_146185.1,2068-2086).
cctacgggcgagaaactct

SEQ ID NO: 480390 - DNA, 19 bp, Mus musculus
  siRNA target sequence for 6330581L23Rik (NM_146185.1,2083-2101).
ctctgggaacgtaaggaat

SEQ ID NO: 480391 - DNA, 19 bp, Mus musculus
  siRNA target sequence for 6330581L23Rik (NM_146185.1,2214-2232).
cctcaaggcagttcatatt

SEQ ID NO: 480392 - DNA, 19 bp, Mus musculus
  siRNA target sequence for 6330581L23Rik (NM_146185.1,2227-2245).
catattcgggagaaacgtt

SEQ ID NO: 480393 - DNA, 19 bp, Mus musculus
  siRNA target sequence for 6330581L23Rik (NM_146185.1,2233-2251).
cgggagaaacgttttcaat

SEQ ID NO: 480394 - DNA, 19 bp, Mus musculus
  siRNA target sequence for 6330581L23Rik (NM_146185.1,2261-2279).
gcccaaaggcctttagata

SEQ ID NO: 480395 - DNA, 19 bp, Mus musculus
  siRNA target sequence for 6330581L23Rik (NM_146185.1,2531-2549).
gcagtccgatgctattgaa

SEQ ID NO: 480396 - DNA, 19 bp, Mus musculus
  siRNA target sequence for 6330581L23Rik (NM_146185.1,2562-2580).
cacactggtcaacaatctt

SEQ ID NO: 480397 - DNA, 19 bp, Mus musculus
  siRNA target sequence for 6330581L23Rik (NM_146185.1,2566-2584).
ctggtcaacaatcttataa

SEQ ID NO: 480398 - DNA, 19 bp, Mus musculus
  siRNA target sequence for 6330581L23Rik (NM_146185.1,2568-2586).
ggtcaacaatcttataaat

SEQ ID NO: 480399 - DNA, 19 bp, Mus musculus
  siRNA target sequence for 6330581L23Rik (NM_146185.1,2569-2587).
gtcaacaatcttataaatt

SEQ ID NO: 480400 - DNA, 19 bp, Mus musculus
  siRNA target sequence for 6430573D20Rik (NM_172689.1,119-137).
cggacttcgaacacgttta

SEQ ID NO: 480401 - DNA, 19 bp, Mus musculus
  siRNA target sequence for 6430573D20Rik (NM_172689.1,120-138).
ggacttcgaacacgtttaa

SEQ ID NO: 480402 - DNA, 19 bp, Mus musculus
  siRNA target sequence for 6430573D20Rik (NM_172689.1,121-139).
gacttcgaacacgtttaaa

SEQ ID NO: 480403 - DNA, 19 bp, Mus musculus
  siRNA target sequence for 6430573D20Rik (NM_172689.1,126-144).
cgaacacgtttaaatgcat

SEQ ID NO: 480404 - DNA, 19 bp, Mus musculus
  siRNA target sequence for 6430573D20Rik (NM_172689.1,196-214).
ggaacttggaaagcttttt

SEQ ID NO: 480405 - DNA, 19 bp, Mus musculus
  siRNA target sequence for 6430573D20Rik (NM_172689.1,230-248).
gaattcggcacccagaaat

SEQ ID NO: 480406 - DNA, 19 bp, Mus musculus
  siRNA target sequence for 6430573D20Rik (NM_172689.1,235-253).
cggcacccagaaatatgaa

SEQ ID NO: 480407 - DNA, 19 bp, Mus musculus
  siRNA target sequence for 6430573D20Rik (NM_172689.1,237-255).
gcacccagaaatatgaaca

SEQ ID NO: 480408 - DNA, 19 bp, Mus musculus
  siRNA target sequence for 6430573D20Rik (NM_172689.1,445-463).
ccgagaagcagcattcgat

SEQ ID NO: 480409 - DNA, 19 bp, Mus musculus
  siRNA target sequence for 6430573D20Rik (NM_172689.1,483-501).
ctcggaggtttgaagaaaa

SEQ ID NO: 480410 - DNA, 19 bp, Mus musculus
  siRNA target sequence for 6430573D20Rik (NM_172689.1,486-504).
ggaggtttgaagaaaaact

SEQ ID NO: 480411 - DNA, 19 bp, Mus musculus
  siRNA target sequence for 6430573D20Rik (NM_172689.1,537-555).
gcaatgagaatcctaaact

SEQ ID NO: 480412 - DNA, 19 bp, Mus musculus
  siRNA target sequence for 6430573D20Rik (NM_172689.1,538-556).
caatgagaatcctaaacta

SEQ ID NO: 480413 - DNA, 19 bp, Mus musculus
  siRNA target sequence for 6430573D20Rik (NM_172689.1,578-596).
caagaagagtaccacttaa

SEQ ID NO: 480414 - DNA, 19 bp, Mus musculus
  siRNA target sequence for 6430573D20Rik (NM_172689.1,675-693).
ctgcactaagctttctaaa

SEQ ID NO: 480415 - DNA, 19 bp, Mus musculus
  siRNA target sequence for 6430573D20Rik (NM_172689.1,780-798).
gagccagcggagataacaa

SEQ ID NO: 480416 - DNA, 19 bp, Mus musculus
  siRNA target sequence for 6430573D20Rik (NM_172689.1,782-800).
gccagcggagataacaata

SEQ ID NO: 480417 - DNA, 19 bp, Mus musculus
  siRNA target sequence for 6430573D20Rik (NM_172689.1,783-801).
ccagcggagataacaatat

SEQ ID NO: 480418 - DNA, 19 bp, Mus musculus
  siRNA target sequence for 6430573D20Rik (NM_172689.1,784-802).
cagcggagataacaatatt

SEQ ID NO: 480419 - DNA, 19 bp, Mus musculus
  siRNA target sequence for 6430573D20Rik (NM_172689.1,786-804).
gcggagataacaatattct

SEQ ID NO: 480420 - DNA, 19 bp, Mus musculus
  siRNA target sequence for 6430573D20Rik (NM_172689.1,789-807).
gagataacaatattctgat

SEQ ID NO: 480421 - DNA, 19 bp, Mus musculus
  siRNA target sequence for 6430573D20Rik (NM_172689.1,849-867).
gcaatctcgtcattctcta

SEQ ID NO: 480422 - DNA, 19 bp, Mus musculus
  siRNA target sequence for 6430573D20Rik (NM_172689.1,850-868).
caatctcgtcattctctat

SEQ ID NO: 480423 - DNA, 19 bp, Mus musculus
  siRNA target sequence for 6430573D20Rik (NM_172689.1,854-872).
ctcgtcattctctatgagt

SEQ ID NO: 480424 - DNA, 19 bp, Mus musculus
  siRNA target sequence for 6430573D20Rik (NM_172689.1,878-896).
ggcaacgtcatcaagatga

SEQ ID NO: 480425 - DNA, 19 bp, Mus musculus
  siRNA target sequence for 6430573D20Rik (NM_172689.1,915-933).
gaagagcacgagatagcaa

SEQ ID NO: 480426 - DNA, 19 bp, Mus musculus
  siRNA target sequence for 6430573D20Rik (NM_172689.1,952-970).
cagcgctgacgtgattgaa

SEQ ID NO: 480427 - DNA, 19 bp, Mus musculus
  siRNA target sequence for 6430573D20Rik (NM_172689.1,954-972).
gcgctgacgtgattgaaaa

SEQ ID NO: 480428 - DNA, 19 bp, Mus musculus
  siRNA target sequence for 6430573D20Rik (NM_172689.1,955-973).
cgctgacgtgattgaaaaa

SEQ ID NO: 480429 - DNA, 19 bp, Mus musculus
  siRNA target sequence for 6430573D20Rik (NM_172689.1,1066-1084).
ccgcatacaggtgaatgaa

SEQ ID NO: 480430 - DNA, 19 bp, Mus musculus
  siRNA target sequence for 6430573D20Rik (NM_172689.1,1067-1085).
cgcatacaggtgaatgaaa

SEQ ID NO: 480431 - DNA, 19 bp, Mus musculus
  siRNA target sequence for 6430573D20Rik (NM_172689.1,1220-1238).
gtccttggagacgctttta

SEQ ID NO: 480432 - DNA, 19 bp, Mus musculus
  siRNA target sequence for 6430573D20Rik (NM_172689.1,1264-1282).
ccctaaaccaaagatctat

SEQ ID NO: 480433 - DNA, 19 bp, Mus musculus
  siRNA target sequence for 6430573D20Rik (NM_172689.1,1266-1284).
ctaaaccaaagatctatga

SEQ ID NO: 480434 - DNA, 19 bp, Mus musculus
  siRNA target sequence for 6430573D20Rik (NM_172689.1,1271-1289).
ccaaagatctatgacaatt

SEQ ID NO: 480435 - DNA, 19 bp, Mus musculus
  siRNA target sequence for 6430573D20Rik (NM_172689.1,1333-1351).
ccacgactggggaattttt

SEQ ID NO: 480436 - DNA, 19 bp, Mus musculus
  siRNA target sequence for 6430573D20Rik (NM_172689.1,1341-1359).
ggggaatttttgtgagata

SEQ ID NO: 480437 - DNA, 19 bp, Mus musculus
  siRNA target sequence for 6430573D20Rik (NM_172689.1,1343-1361).
ggaatttttgtgagataca

SEQ ID NO: 480438 - DNA, 19 bp, Mus musculus
  siRNA target sequence for 6430573D20Rik (NM_172689.1,1344-1362).
gaatttttgtgagatacaa

SEQ ID NO: 480439 - DNA, 19 bp, Mus musculus
  siRNA target sequence for 6430573D20Rik (NM_172689.1,1369-1387).
cgagattccagtcataaaa

SEQ ID NO: 480440 - DNA, 19 bp, Mus musculus
  siRNA target sequence for 6430573D20Rik (NM_172689.1,1395-1413).
gtttcgtcgtggaagatat

SEQ ID NO: 480441 - DNA, 19 bp, Mus musculus
  siRNA target sequence for 6430573D20Rik (NM_172689.1,1400-1418).
gtcgtggaagatattgtga

SEQ ID NO: 480442 - DNA, 19 bp, Mus musculus
  siRNA target sequence for 6430573D20Rik (NM_172689.1,1427-1445).
cagaaccggcactcaaagt

SEQ ID NO: 480443 - DNA, 19 bp, Mus musculus
  siRNA target sequence for 6430573D20Rik (NM_172689.1,1440-1458).
caaagtggaaggactttca

SEQ ID NO: 480444 - DNA, 19 bp, Mus musculus
  siRNA target sequence for 6720480D16Rik (NM_145483.1,105-123).
ctcagggacagttgtcatt

SEQ ID NO: 480445 - DNA, 19 bp, Mus musculus
  siRNA target sequence for 6720480D16Rik (NM_145483.1,299-317).
gtggagagtgaggcaataa

SEQ ID NO: 480446 - DNA, 19 bp, Mus musculus
  siRNA target sequence for 6720480D16Rik (NM_145483.1,351-369).
gagctatgagtgcagaaaa

SEQ ID NO: 480447 - DNA, 19 bp, Mus musculus
  siRNA target sequence for 6720480D16Rik (NM_145483.1,353-371).
gctatgagtgcagaaaata

SEQ ID NO: 480448 - DNA, 19 bp, Mus musculus
  siRNA target sequence for 6720480D16Rik (NM_145483.1,397-415).
cagcagtggttcttcaatt

SEQ ID NO: 480449 - DNA, 19 bp, Mus musculus
  siRNA target sequence for 6720480D16Rik (NM_145483.1,448-466).
caaagcacctgttgttcat

SEQ ID NO: 480450 - DNA, 19 bp, Mus musculus
  siRNA target sequence for 6720480D16Rik (NM_145483.1,453-471).
cacctgttgttcatgaata

SEQ ID NO: 480451 - DNA, 19 bp, Mus musculus
  siRNA target sequence for 6720480D16Rik (NM_145483.1,467-485).
gaatatgatgtttattctt

SEQ ID NO: 480452 - DNA, 19 bp, Mus musculus
  siRNA target sequence for 6720480D16Rik (NM_145483.1,501-519).
gacagaaagccaccattaa

SEQ ID NO: 480453 - DNA, 19 bp, Mus musculus
  siRNA target sequence for 6720480D16Rik (NM_145483.1,514-532).
cattaaggggaaaccttat

SEQ ID NO: 480454 - DNA, 19 bp, Mus musculus
  siRNA target sequence for 6720480D16Rik (NM_145483.1,554-572).
gtcttcagttatacttctt

SEQ ID NO: 480455 - DNA, 19 bp, Mus musculus
  siRNA target sequence for 6720480D16Rik (NM_145483.1,559-577).
cagttatacttcttcttta

SEQ ID NO: 480456 - DNA, 19 bp, Mus musculus
  siRNA target sequence for 6720480D16Rik (NM_145483.1,567-585).
cttcttctttagcatatca

SEQ ID NO: 480457 - DNA, 19 bp, Mus musculus
  siRNA target sequence for 6720480D16Rik (NM_145483.1,579-597).
catatcatcggcagattca

SEQ ID NO: 480458 - DNA, 19 bp, Mus musculus
  siRNA target sequence for 6720480D16Rik (NM_145483.1,648-666).
gacgttcttatcttttggt

SEQ ID NO: 480459 - DNA, 19 bp, Mus musculus
  siRNA target sequence for 6720480D16Rik (NM_145483.1,733-751).
gaattcacaccttaagagt

SEQ ID NO: 480460 - DNA, 19 bp, Mus musculus
  siRNA target sequence for 6720480D16Rik (NM_145483.1,748-766).
gagtcatcgaagaatccat

SEQ ID NO: 480461 - DNA, 19 bp, Mus musculus
  siRNA target sequence for 6720480D16Rik (NM_145483.1,903-921).
cctcaagcctcacaattca

SEQ ID NO: 480462 - DNA, 19 bp, Mus musculus
  siRNA target sequence for 6720480D16Rik (NM_145483.1,904-922).
ctcaagcctcacaattcat

SEQ ID NO: 480463 - DNA, 19 bp, Mus musculus
  siRNA target sequence for 6720480D16Rik (NM_145483.1,913-931).
cacaattcatcgtagaact

SEQ ID NO: 480464 - DNA, 19 bp, Mus musculus
  siRNA target sequence for 6720480D16Rik (NM_145483.1,970-988).
gaaagtattcagttcacat

SEQ ID NO: 480465 - DNA, 19 bp, Mus musculus
  siRNA target sequence for 6720480D16Rik (NM_145483.1,974-992).
gtattcagttcacattcaa

SEQ ID NO: 480466 - DNA, 19 bp, Mus musculus
  siRNA target sequence for 6720480D16Rik (NM_145483.1,979-997).
cagttcacattcaaaccta

SEQ ID NO: 480467 - DNA, 19 bp, Mus musculus
  siRNA target sequence for 6720480D16Rik (NM_145483.1,1083-1101).
caaatcattggagaataca

SEQ ID NO: 480468 - DNA, 19 bp, Mus musculus
  siRNA target sequence for 6720480D16Rik (NM_145483.1,1413-1431).
gcctgattgcccatcaagt

SEQ ID NO: 480469 - DNA, 19 bp, Mus musculus
  siRNA target sequence for 6720480D16Rik (NM_145483.1,1414-1432).
cctgattgcccatcaagta

SEQ ID NO: 480470 - DNA, 19 bp, Mus musculus
  siRNA target sequence for 6720480D16Rik (NM_145483.1,1662-1680).
cacatcttgcaaatcatca

SEQ ID NO: 480471 - DNA, 19 bp, Mus musculus
  siRNA target sequence for 6720480D16Rik (NM_145483.1,1991-2009).
cgaagttccaaccttacaa

SEQ ID NO: 480472 - DNA, 19 bp, Mus musculus
  siRNA target sequence for 8030446C20Rik (NM_133905.1,464-482).
cgatgaaaaagcttttcct

SEQ ID NO: 480473 - DNA, 19 bp, Mus musculus
  siRNA target sequence for 9030612M13Rik (NM_172458.2,399-417).
gtttggagcaccatatcat

SEQ ID NO: 480474 - DNA, 19 bp, Mus musculus
  siRNA target sequence for 9030612M13Rik (NM_172458.2,404-422).
gagcaccatatcattgaaa

SEQ ID NO: 480475 - DNA, 19 bp, Mus musculus
  siRNA target sequence for 9030612M13Rik (NM_172458.2,406-424).
gcaccatatcattgaaaat

SEQ ID NO: 480476 - DNA, 19 bp, Mus musculus
  siRNA target sequence for 9030612M13Rik (NM_172458.2,464-482).
gtggagggactctatgact

SEQ ID NO: 480477 - DNA, 19 bp, Mus musculus
  siRNA target sequence for 9030612M13Rik (NM_172458.2,469-487).
gggactctatgactgtaaa

SEQ ID NO: 480478 - DNA, 19 bp, Mus musculus
  siRNA target sequence for 9030612M13Rik (NM_172458.2,506-524).
gaaatcttcgacttcacta

SEQ ID NO: 480479 - DNA, 19 bp, Mus musculus
  siRNA target sequence for 9030612M13Rik (NM_172458.2,520-538).
cactacacacagtattgta

SEQ ID NO: 480480 - DNA, 19 bp, Mus musculus
  siRNA target sequence for 9030612M13Rik (NM_172458.2,547-565).
ctccttgccaggagtgtat

SEQ ID NO: 480481 - DNA, 19 bp, Mus musculus
  siRNA target sequence for 9030612M13Rik (NM_172458.2,582-600).
gatgtgcaacggtagtcat

SEQ ID NO: 480482 - DNA, 19 bp, Mus musculus
  siRNA target sequence for 9030612M13Rik (NM_172458.2,603-621).
gccatttatctctaagtgt

SEQ ID NO: 480483 - DNA, 19 bp, Mus musculus
  siRNA target sequence for 9030612M13Rik (NM_172458.2,604-622).
ccatttatctctaagtgta

SEQ ID NO: 480484 - DNA, 19 bp, Mus musculus
  siRNA target sequence for 9030612M13Rik (NM_172458.2,651-669).
cgtgcgaagatcaggaata

SEQ ID NO: 480485 - DNA, 19 bp, Mus musculus
  siRNA target sequence for 9030612M13Rik (NM_172458.2,652-670).
gtgcgaagatcaggaatat

SEQ ID NO: 480486 - DNA, 19 bp, Mus musculus
  siRNA target sequence for 9030612M13Rik (NM_172458.2,665-683).
gaatatgggaaggaattat

SEQ ID NO: 480487 - DNA, 19 bp, Mus musculus
  siRNA target sequence for 9030612M13Rik (NM_172458.2,676-694).
ggaattatacaatatggaa

SEQ ID NO: 480488 - DNA, 19 bp, Mus musculus
  siRNA target sequence for 9030612M13Rik (NM_172458.2,775-793).
gcgttgtgacgaagactat

SEQ ID NO: 480489 - DNA, 19 bp, Mus musculus
  siRNA target sequence for 9030612M13Rik (NM_172458.2,776-794).
cgttgtgacgaagactata

SEQ ID NO: 480490 - DNA, 19 bp, Mus musculus
  siRNA target sequence for 9030612M13Rik (NM_172458.2,780-798).
gtgacgaagactatagata

SEQ ID NO: 480491 - DNA, 19 bp, Mus musculus
  siRNA target sequence for 9030612M13Rik (NM_172458.2,795-813).
gatatggccaaaatgttga

SEQ ID NO: 480492 - DNA, 19 bp, Mus musculus
  siRNA target sequence for 9030612M13Rik (NM_172458.2,902-920).
cgtcatcgggccaagaaat

SEQ ID NO: 480493 - DNA, 19 bp, Mus musculus
  siRNA target sequence for 9030612M13Rik (NM_172458.2,905-923).
catcgggccaagaaatgct

SEQ ID NO: 480494 - DNA, 19 bp, Mus musculus
  siRNA target sequence for 9030612M13Rik (NM_172458.2,909-927).
gggccaagaaatgctatat

SEQ ID NO: 480495 - DNA, 19 bp, Mus musculus
  siRNA target sequence for 9030612M13Rik (NM_172458.2,911-929).
gccaagaaatgctatatct

SEQ ID NO: 480496 - DNA, 19 bp, Mus musculus
  siRNA target sequence for 9030612M13Rik (NM_172458.2,913-931).
caagaaatgctatatctgt

SEQ ID NO: 480497 - DNA, 19 bp, Mus musculus
  siRNA target sequence for 9030612M13Rik (NM_172458.2,1044-1062).
ctcgttcccttaaaacaca

SEQ ID NO: 480498 - DNA, 19 bp, Mus musculus
  siRNA target sequence for 9030612M13Rik (NM_172458.2,1046-1064).
cgttcccttaaaacacata

SEQ ID NO: 480499 - DNA, 19 bp, Mus musculus
  siRNA target sequence for 9030612M13Rik (NM_172458.2,1077-1095).
cggttagggacctctttgt

SEQ ID NO: 480500 - DNA, 19 bp, Mus musculus
  siRNA target sequence for 9030612M13Rik (NM_172458.2,1079-1097).
gttagggacctctttgtgt

SEQ ID NO: 480501 - DNA, 19 bp, Mus musculus
  siRNA target sequence for 9030612M13Rik (NM_172458.2,1110-1128).
ggaaaaccttacgtcatta

SEQ ID NO: 480502 - DNA, 19 bp, Mus musculus
  siRNA target sequence for 9030612M13Rik (NM_172458.2,1194-1212).
gtaaagccttcattactta

SEQ ID NO: 480503 - DNA, 19 bp, Mus musculus
  siRNA target sequence for 9030612M13Rik (NM_172458.2,1209-1227).
cttaccgctcctttcgaat

SEQ ID NO: 480504 - DNA, 19 bp, Mus musculus
  siRNA target sequence for 9030612M13Rik (NM_172458.2,1301-1319).
cagttgcgaaagcatgaaa

SEQ ID NO: 480505 - DNA, 19 bp, Mus musculus
  siRNA target sequence for 9030612M13Rik (NM_172458.2,1303-1321).
gttgcgaaagcatgaaata

SEQ ID NO: 480506 - DNA, 19 bp, Mus musculus
  siRNA target sequence for 9030612M13Rik (NM_172458.2,1361-1379).
ggaaaaagcttcacttgtt

SEQ ID NO: 480507 - DNA, 19 bp, Mus musculus
  siRNA target sequence for 9030612M13Rik (NM_172458.2,1384-1402).
gtccttgagaacacatgaa

SEQ ID NO: 480508 - DNA, 19 bp, Mus musculus
  siRNA target sequence for 9030612M13Rik (NM_172458.2,1436-1454).
gaccagtgtggatatagct

SEQ ID NO: 480509 - DNA, 19 bp, Mus musculus
  siRNA target sequence for 9030612M13Rik (NM_172458.2,1544-1562).
cgatctgcgtctcttcaaa

SEQ ID NO: 480510 - DNA, 19 bp, Mus musculus
  siRNA target sequence for 9030612M13Rik (NM_172458.2,1708-1726).
cgtgctgtggagtcagttt

SEQ ID NO: 480511 - DNA, 19 bp, Mus musculus
  siRNA target sequence for 9030612M13Rik (NM_172458.2,1755-1773).
cagtgtcctacgtgtgtaa

SEQ ID NO: 480512 - DNA, 19 bp, Mus musculus
  siRNA target sequence for 9030612M13Rik (NM_172458.2,1923-1941).
ggaaggtccacgtgtgtaa

SEQ ID NO: 480513 - DNA, 19 bp, Mus musculus
  siRNA target sequence for 9030612M13Rik (NM_172458.2,2003-2021).
gacgatgagccttttaatt

SEQ ID NO: 480514 - DNA, 19 bp, Mus musculus
  siRNA target sequence for 9030612M13Rik (NM_172458.2,2005-2023).
cgatgagccttttaattgt

SEQ ID NO: 480515 - DNA, 19 bp, Mus musculus
  siRNA target sequence for 9030612M13Rik (NM_172458.2,2053-2071).
gaaccatttgcatagacat

SEQ ID NO: 480516 - DNA, 19 bp, Mus musculus
  siRNA target sequence for 9130009C22Rik (NM_027835.1,296-314).
ggctgaaaatgtacattca

SEQ ID NO: 480517 - DNA, 19 bp, Mus musculus
  siRNA target sequence for 9130009C22Rik (NM_027835.1,610-628).
gtggacaaacttctgatta

SEQ ID NO: 480518 - DNA, 19 bp, Mus musculus
  siRNA target sequence for 9130009C22Rik (NM_027835.1,615-633).
caaacttctgattaacgat

SEQ ID NO: 480519 - DNA, 19 bp, Mus musculus
  siRNA target sequence for 9130009C22Rik (NM_027835.1,647-665).
gcttcgagaagggactatt

SEQ ID NO: 480520 - DNA, 19 bp, Mus musculus
  siRNA target sequence for 9130009C22Rik (NM_027835.1,651-669).
cgagaagggactattgaca

SEQ ID NO: 480521 - DNA, 19 bp, Mus musculus
  siRNA target sequence for 9130009C22Rik (NM_027835.1,711-729).
gaatgagtcaggtgtaaga

SEQ ID NO: 480522 - DNA, 19 bp, Mus musculus
  siRNA target sequence for 9130009C22Rik (NM_027835.1,797-815).
ctggaaatgatgcactatt

SEQ ID NO: 480523 - DNA, 19 bp, Mus musculus
  siRNA target sequence for 9130009C22Rik (NM_027835.1,947-965).
ggaacgtagacgacatatt

SEQ ID NO: 480524 - DNA, 19 bp, Mus musculus
  siRNA target sequence for 9130009C22Rik (NM_027835.1,948-966).
gaacgtagacgacatatta

SEQ ID NO: 480525 - DNA, 19 bp, Mus musculus
  siRNA target sequence for 9130009C22Rik (NM_027835.1,951-969).
cgtagacgacatattacca

SEQ ID NO: 480526 - DNA, 19 bp, Mus musculus
  siRNA target sequence for 9130009C22Rik (NM_027835.1,970-988).
gaggcttcttgtacagatt

SEQ ID NO: 480527 - DNA, 19 bp, Mus musculus
  siRNA target sequence for 9130009C22Rik (NM_027835.1,1033-1051).
gtcagctgcttcgatgaaa

SEQ ID NO: 480528 - DNA, 19 bp, Mus musculus
  siRNA target sequence for 9130009C22Rik (NM_027835.1,1048-1066).
gaaagtcttggacataaca

SEQ ID NO: 480529 - DNA, 19 bp, Mus musculus
  siRNA target sequence for 9130009C22Rik (NM_027835.1,1092-1110).
catgggaagtgattcagat

SEQ ID NO: 480530 - DNA, 19 bp, Mus musculus
  siRNA target sequence for 9130009C22Rik (NM_027835.1,1161-1179).
caggccttaccaaatggaa

SEQ ID NO: 480531 - DNA, 19 bp, Mus musculus
  siRNA target sequence for 9130009C22Rik (NM_027835.1,1182-1200).
ggcccaaccagctctagat

SEQ ID NO: 480532 - DNA, 19 bp, Mus musculus
  siRNA target sequence for 9130009C22Rik (NM_027835.1,1260-1278).
catcaccaaagatcactta

SEQ ID NO: 480533 - DNA, 19 bp, Mus musculus
  siRNA target sequence for 9130009C22Rik (NM_027835.1,1270-1288).
gatcacttagacaagaaga

SEQ ID NO: 480534 - DNA, 19 bp, Mus musculus
  siRNA target sequence for 9130009C22Rik (NM_027835.1,1298-1316).
ctgaatccgggaaggttat

SEQ ID NO: 480535 - DNA, 19 bp, Mus musculus
  siRNA target sequence for 9130009C22Rik (NM_027835.1,1321-1339).
cttgtcaataaggtaatgt

SEQ ID NO: 480536 - DNA, 19 bp, Mus musculus
  siRNA target sequence for 9130009C22Rik (NM_027835.1,1332-1350).
ggtaatgttagcagaacaa

SEQ ID NO: 480537 - DNA, 19 bp, Mus musculus
  siRNA target sequence for 9130009C22Rik (NM_027835.1,1348-1366).
caacttttccgaaaagagt

SEQ ID NO: 480538 - DNA, 19 bp, Mus musculus
  siRNA target sequence for 9130009C22Rik (NM_027835.1,1363-1381).
gagttcaacccatatttga

SEQ ID NO: 480539 - DNA, 19 bp, Mus musculus
  siRNA target sequence for 9130009C22Rik (NM_027835.1,1368-1386).
caacccatatttgaagaaa

SEQ ID NO: 480540 - DNA, 19 bp, Mus musculus
  siRNA target sequence for 9130009C22Rik (NM_027835.1,1383-1401).
gaaatggtatcgaattatt

SEQ ID NO: 480541 - DNA, 19 bp, Mus musculus
  siRNA target sequence for 9130009C22Rik (NM_027835.1,1388-1406).
ggtatcgaattattggatt

SEQ ID NO: 480542 - DNA, 19 bp, Mus musculus
  siRNA target sequence for 9130009C22Rik (NM_027835.1,1389-1407).
gtatcgaattattggatta

SEQ ID NO: 480543 - DNA, 19 bp, Mus musculus
  siRNA target sequence for 9130009C22Rik (NM_027835.1,1411-1429).
ggcgatacccagctgaaaa

SEQ ID NO: 480544 - DNA, 19 bp, Mus musculus
  siRNA target sequence for 9130009C22Rik (NM_027835.1,1412-1430).
gcgatacccagctgaaaat

SEQ ID NO: 480545 - DNA, 19 bp, Mus musculus
  siRNA target sequence for 9130009C22Rik (NM_027835.1,1413-1431).
cgatacccagctgaaaata

SEQ ID NO: 480546 - DNA, 19 bp, Mus musculus
  siRNA target sequence for 9130009C22Rik (NM_027835.1,1438-1456).
ccagaagttgtcaaatctt

SEQ ID NO: 480547 - DNA, 19 bp, Mus musculus
  siRNA target sequence for 9130009C22Rik (NM_027835.1,1447-1465).
gtcaaatcttacgatgtta

SEQ ID NO: 480548 - DNA, 19 bp, Mus musculus
  siRNA target sequence for 9130009C22Rik (NM_027835.1,1449-1467).
caaatcttacgatgttatt

SEQ ID NO: 480549 - DNA, 19 bp, Mus musculus
  siRNA target sequence for 9130009C22Rik (NM_027835.1,1486-1504).
cttgaaaactccctcttaa

SEQ ID NO: 480550 - DNA, 19 bp, Mus musculus
  siRNA target sequence for 9130009C22Rik (NM_027835.1,1545-1563).
cttctctctcattatcatt

SEQ ID NO: 480551 - DNA, 19 bp, Mus musculus
  siRNA target sequence for 9130009C22Rik (NM_027835.1,1581-1599).
caacaaggaggcagtctat

SEQ ID NO: 480552 - DNA, 19 bp, Mus musculus
  siRNA target sequence for 9130009C22Rik (NM_027835.1,1602-1620).
caacatcatgagacgatat

SEQ ID NO: 480553 - DNA, 19 bp, Mus musculus
  siRNA target sequence for 9130009C22Rik (NM_027835.1,1736-1754).
ctgaggctgaaaaacatat

SEQ ID NO: 480554 - DNA, 19 bp, Mus musculus
  siRNA target sequence for 9130009C22Rik (NM_027835.1,1738-1756).
gaggctgaaaaacatattt

SEQ ID NO: 480555 - DNA, 19 bp, Mus musculus
  siRNA target sequence for 9130009C22Rik (NM_027835.1,1841-1859).
catgcaagaaatttgtgat

SEQ ID NO: 480556 - DNA, 19 bp, Mus musculus
  siRNA target sequence for 9130009C22Rik (NM_027835.1,1912-1930).
gcaagcattcagacttact

SEQ ID NO: 480557 - DNA, 19 bp, Mus musculus
  siRNA target sequence for 9130009C22Rik (NM_027835.1,1951-1969).
gattttggaacccaacatt

SEQ ID NO: 480558 - DNA, 19 bp, Mus musculus
  siRNA target sequence for 9130009C22Rik (NM_027835.1,1972-1990).
gagcagtgggccattcaaa

SEQ ID NO: 480559 - DNA, 19 bp, Mus musculus
  siRNA target sequence for 9130009C22Rik (NM_027835.1,2079-2097).
cgacacgatccgaatgatt

SEQ ID NO: 480560 - DNA, 19 bp, Mus musculus
  siRNA target sequence for 9130009C22Rik (NM_027835.1,2082-2100).
cacgatccgaatgattgat

SEQ ID NO: 480561 - DNA, 19 bp, Mus musculus
  siRNA target sequence for 9130009C22Rik (NM_027835.1,2088-2106).
ccgaatgattgatgcatat

SEQ ID NO: 480562 - DNA, 19 bp, Mus musculus
  siRNA target sequence for 9130009C22Rik (NM_027835.1,2089-2107).
cgaatgattgatgcatata

SEQ ID NO: 480563 - DNA, 19 bp, Mus musculus
  siRNA target sequence for 9130009C22Rik (NM_027835.1,2184-2202).
cgaggccagcagttgcaat

SEQ ID NO: 480564 - DNA, 19 bp, Mus musculus
  siRNA target sequence for 9130009C22Rik (NM_027835.1,2206-2224).
caacttaagggcgatgtaa

SEQ ID NO: 480565 - DNA, 19 bp, Mus musculus
  siRNA target sequence for 9130009C22Rik (NM_027835.1,2214-2232).
gggcgatgtaaagaaatct

SEQ ID NO: 480566 - DNA, 19 bp, Mus musculus
  siRNA target sequence for 9130009C22Rik (NM_027835.1,2215-2233).
ggcgatgtaaagaaatctt

SEQ ID NO: 480567 - DNA, 19 bp, Mus musculus
  siRNA target sequence for 9130009C22Rik (NM_027835.1,2313-2331).
cccaaaatacgagaatgaa

SEQ ID NO: 480568 - DNA, 19 bp, Mus musculus
  siRNA target sequence for 9130009C22Rik (NM_027835.1,2314-2332).
ccaaaatacgagaatgaaa

SEQ ID NO: 480569 - DNA, 19 bp, Mus musculus
  siRNA target sequence for 9130009C22Rik (NM_027835.1,2322-2340).
cgagaatgaaaaactcatt

SEQ ID NO: 480570 - DNA, 19 bp, Mus musculus
  siRNA target sequence for 9130009C22Rik (NM_027835.1,2382-2400).
ggagtcctcccgaggaatt

SEQ ID NO: 480571 - DNA, 19 bp, Mus musculus
  siRNA target sequence for 9130009C22Rik (NM_027835.1,2385-2403).
gtcctcccgaggaattatt

SEQ ID NO: 480572 - DNA, 19 bp, Mus musculus
  siRNA target sequence for 9130009C22Rik (NM_027835.1,2507-2525).
ggcacagcagtgaagtcaa

SEQ ID NO: 480573 - DNA, 19 bp, Mus musculus
  siRNA target sequence for 9130009C22Rik (NM_027835.1,2576-2594).
gcgaaataaatctgcttat

SEQ ID NO: 480574 - DNA, 19 bp, Mus musculus
  siRNA target sequence for 9130009C22Rik (NM_027835.1,2613-2631).
ggaaggcctggatatcaaa

SEQ ID NO: 480575 - DNA, 19 bp, Mus musculus
  siRNA target sequence for 9130009C22Rik (NM_027835.1,2617-2635).
ggcctggatatcaaagagt

SEQ ID NO: 480576 - DNA, 19 bp, Mus musculus
  siRNA target sequence for 9130009C22Rik (NM_027835.1,2634-2652).
gtgcaatattgttattcgt

SEQ ID NO: 480577 - DNA, 19 bp, Mus musculus
  siRNA target sequence for 9130009C22Rik (NM_027835.1,2636-2654).
gcaatattgttattcgtta

SEQ ID NO: 480578 - DNA, 19 bp, Mus musculus
  siRNA target sequence for 9130009C22Rik (NM_027835.1,2756-2774).
ccgaacgggagattgttaa

SEQ ID NO: 480579 - DNA, 19 bp, Mus musculus
  siRNA target sequence for 9130009C22Rik (NM_027835.1,2757-2775).
cgaacgggagattgttaat

SEQ ID NO: 480580 - DNA, 19 bp, Mus musculus
  siRNA target sequence for 9130009C22Rik (NM_027835.1,2761-2779).
cgggagattgttaatgatt

SEQ ID NO: 480581 - DNA, 19 bp, Mus musculus
  siRNA target sequence for 9130009C22Rik (NM_027835.1,2762-2780).
gggagattgttaatgattt

SEQ ID NO: 480582 - DNA, 19 bp, Mus musculus
  siRNA target sequence for 9130009C22Rik (NM_027835.1,2776-2794).
gatttccgagagaagatga

SEQ ID NO: 480583 - DNA, 19 bp, Mus musculus
  siRNA target sequence for 9130009C22Rik (NM_027835.1,2781-2799).
ccgagagaagatgatgtat

SEQ ID NO: 480584 - DNA, 19 bp, Mus musculus
  siRNA target sequence for 9130009C22Rik (NM_027835.1,2811-2829).
ccgtgttcaaaacatgaaa

SEQ ID NO: 480585 - DNA, 19 bp, Mus musculus
  siRNA target sequence for 9130009C22Rik (NM_027835.1,2833-2851).
gaggagtatgcacataaga

SEQ ID NO: 480586 - DNA, 19 bp, Mus musculus
  siRNA target sequence for 9130009C22Rik (NM_027835.1,2835-2853).
ggagtatgcacataagatt

SEQ ID NO: 480587 - DNA, 19 bp, Mus musculus
  siRNA target sequence for 9130009C22Rik (NM_027835.1,2857-2875).
gaattgcaggtgcaaagta

SEQ ID NO: 480588 - DNA, 19 bp, Mus musculus
  siRNA target sequence for 9130009C22Rik (NM_027835.1,2896-2914).
gtcaaaagaagcattgcaa

SEQ ID NO: 480589 - DNA, 19 bp, Mus musculus
  siRNA target sequence for 9130009C22Rik (NM_027835.1,2922-2940).
caacgacaatccatcgtta

SEQ ID NO: 480590 - DNA, 19 bp, Mus musculus
  siRNA target sequence for 9130009C22Rik (NM_027835.1,2925-2943).
cgacaatccatcgttaata

SEQ ID NO: 480591 - DNA, 19 bp, Mus musculus
  siRNA target sequence for 9130009C22Rik (NM_027835.1,2926-2944).
gacaatccatcgttaataa

SEQ ID NO: 480592 - DNA, 19 bp, Mus musculus
  siRNA target sequence for 9130009C22Rik (NM_027835.1,2928-2946).
caatccatcgttaataaca

SEQ ID NO: 480593 - DNA, 19 bp, Mus musculus
  siRNA target sequence for 9130009C22Rik (NM_027835.1,3039-3057).
caagggactctacattgta

SEQ ID NO: 480594 - DNA, 19 bp, Mus musculus
  siRNA target sequence for 9130009C22Rik (NM_027835.1,3147-3165).
gatggtgcacaaaggttta

SEQ ID NO: 480595 - DNA, 19 bp, Mus musculus
  siRNA target sequence for 9130009C22Rik (NM_027835.1,3150-3168).
ggtgcacaaaggtttagat

SEQ ID NO: 480596 - DNA, 19 bp, Mus musculus
  siRNA target sequence for 9130009C22Rik (NM_027835.1,3199-3217).
gtcaatttcaaaaataact

SEQ ID NO: 480597 - DNA, 19 bp, Mus musculus
  siRNA target sequence for 9130009C22Rik (NM_027835.1,3218-3236).
caccgaagaaacagtacaa

SEQ ID NO: 480598 - DNA, 19 bp, Mus musculus
  siRNA target sequence for 9130009C22Rik (NM_027835.1,3243-3261).
ggtggaattgcctatcaga

SEQ ID NO: 480599 - DNA, 19 bp, Mus musculus
  siRNA target sequence for 9130009C22Rik (NM_027835.1,3246-3264).
ggaattgcctatcagattt

SEQ ID NO: 480600 - DNA, 19 bp, Mus musculus
  siRNA target sequence for 9130009C22Rik (NM_027835.1,3268-3286).
gatcttgactactcagaat

SEQ ID NO: 480601 - DNA, 19 bp, Mus musculus
  siRNA target sequence for 9130009C22Rik (NM_027835.1,3288-3306).
ctgcttgtatagtgatgaa

SEQ ID NO: 480602 - DNA, 19 bp, Mus musculus
  siRNA target sequence for 9430057O19Rik (NM_174849.2,154-172).
gttcagttctcgctttgat

SEQ ID NO: 480603 - DNA, 19 bp, Mus musculus
  siRNA target sequence for 9430057O19Rik (NM_174849.2,157-175).
cagttctcgctttgattca

SEQ ID NO: 480604 - DNA, 19 bp, Mus musculus
  siRNA target sequence for 9430057O19Rik (NM_174849.2,273-291).
cccctgactacgagttcaa

SEQ ID NO: 480605 - DNA, 19 bp, Mus musculus
  siRNA target sequence for 9430057O19Rik (NM_174849.2,310-328).
ctgtgctgaaacggaatat

SEQ ID NO: 480606 - DNA, 19 bp, Mus musculus
  siRNA target sequence for 9430057O19Rik (NM_174849.2,372-390).
ggactccaggaaagcttat

SEQ ID NO: 480607 - DNA, 19 bp, Mus musculus
  siRNA target sequence for 9430057O19Rik (NM_174849.2,375-393).
ctccaggaaagcttatcaa

SEQ ID NO: 480608 - DNA, 19 bp, Mus musculus
  siRNA target sequence for 9430057O19Rik (NM_174849.2,377-395).
ccaggaaagcttatcaaga

SEQ ID NO: 480609 - DNA, 19 bp, Mus musculus
  siRNA target sequence for 9430057O19Rik (NM_174849.2,381-399).
gaaagcttatcaagatcaa

SEQ ID NO: 480610 - DNA, 19 bp, Mus musculus
  siRNA target sequence for 9430057O19Rik (NM_174849.2,480-498).
gctgggaacgcattagaga

SEQ ID NO: 480611 - DNA, 19 bp, Mus musculus
  siRNA target sequence for 9430057O19Rik (NM_174849.2,541-559).
ctttgttcaccgtttcgta

SEQ ID NO: 480612 - DNA, 19 bp, Mus musculus
  siRNA target sequence for 9430057O19Rik (NM_174849.2,637-655).
gctagaccagcgcttttca

SEQ ID NO: 480613 - DNA, 19 bp, Mus musculus
  siRNA target sequence for 9430057O19Rik (NM_174849.2,643-661).
ccagcgcttttcagagaat

SEQ ID NO: 480614 - DNA, 19 bp, Mus musculus
  siRNA target sequence for 9430057O19Rik (NM_174849.2,675-693).
gcagtcctctggatagtat

SEQ ID NO: 480615 - DNA, 19 bp, Mus musculus
  siRNA target sequence for 9430057O19Rik (NM_174849.2,676-694).
cagtcctctggatagtatt

SEQ ID NO: 480616 - DNA, 19 bp, Mus musculus
  siRNA target sequence for 9430057O19Rik (NM_174849.2,681-699).
ctctggatagtatttatta

SEQ ID NO: 480617 - DNA, 19 bp, Mus musculus
  siRNA target sequence for 9430057O19Rik (NM_174849.2,704-722).
cgagagcttctctgctatt

SEQ ID NO: 480618 - DNA, 19 bp, Mus musculus
  siRNA target sequence for 9430057O19Rik (NM_174849.2,727-745).
ggatggacttcgtgtagat

SEQ ID NO: 480619 - DNA, 19 bp, Mus musculus
  siRNA target sequence for 9430057O19Rik (NM_174849.2,732-750).
gacttcgtgtagatctact

SEQ ID NO: 480620 - DNA, 19 bp, Mus musculus
  siRNA target sequence for 9430057O19Rik (NM_174849.2,737-755).
cgtgtagatctactaacaa

SEQ ID NO: 480621 - DNA, 19 bp, Mus musculus
  siRNA target sequence for 9430057O19Rik (NM_174849.2,738-756).
gtgtagatctactaacaat

SEQ ID NO: 480622 - DNA, 19 bp, Mus musculus
  siRNA target sequence for 9430057O19Rik (NM_174849.2,740-758).
gtagatctactaacaatca

SEQ ID NO: 480623 - DNA, 19 bp, Mus musculus
  siRNA target sequence for 9430057O19Rik (NM_174849.2,792-810).
cccgactagagcagctatt

SEQ ID NO: 480624 - DNA, 19 bp, Mus musculus
  siRNA target sequence for 9430057O19Rik (NM_174849.2,793-811).
ccgactagagcagctattt

SEQ ID NO: 480625 - DNA, 19 bp, Mus musculus
  siRNA target sequence for 9430057O19Rik (NM_174849.2,829-847).
ccgaccattccgtttcaca

SEQ ID NO: 480626 - DNA, 19 bp, Mus musculus
  siRNA target sequence for 9430057O19Rik (NM_174849.2,839-857).
cgtttcacaggcaaaagga

SEQ ID NO: 480627 - DNA, 19 bp, Mus musculus
  siRNA target sequence for 9430057O19Rik (NM_174849.2,846-864).
caggcaaaaggatattctt

SEQ ID NO: 480628 - DNA, 19 bp, Mus musculus
  siRNA target sequence for 9430057O19Rik (NM_174849.2,848-866).
ggcaaaaggatattcttct

SEQ ID NO: 480629 - DNA, 19 bp, Mus musculus
  siRNA target sequence for 9430057O19Rik (NM_174849.2,931-949).
catccttcgacctgatgat

SEQ ID NO: 480630 - DNA, 19 bp, Mus musculus
  siRNA target sequence for 9430057O19Rik (NM_174849.2,963-981).
ctctccgtcgactctttgt

SEQ ID NO: 480631 - DNA, 19 bp, Mus musculus
  siRNA target sequence for 9430057O19Rik (NM_174849.2,965-983).
ctccgtcgactctttgttt

SEQ ID NO: 480632 - DNA, 19 bp, Mus musculus
  siRNA target sequence for 9430057O19Rik (NM_174849.2,967-985).
ccgtcgactctttgttttt

SEQ ID NO: 480633 - DNA, 19 bp, Mus musculus
  siRNA target sequence for 9430057O19Rik (NM_174849.2,968-986).
cgtcgactctttgttttta

SEQ ID NO: 480634 - DNA, 19 bp, Mus musculus
  siRNA target sequence for 9430057O19Rik (NM_174849.2,969-987).
gtcgactctttgtttttaa

SEQ ID NO: 480635 - DNA, 19 bp, Mus musculus
  siRNA target sequence for 9430057O19Rik (NM_174849.2,971-989).
cgactctttgtttttaagt

SEQ ID NO: 480636 - DNA, 19 bp, Mus musculus
  siRNA target sequence for 9430057O19Rik (NM_174849.2,1058-1076).
ctgaaccgtcagtacttga

SEQ ID NO: 480637 - DNA, 19 bp, Mus musculus
  siRNA target sequence for 9430057O19Rik (NM_174849.2,1399-1417).
gagtggtgttgcttactat

SEQ ID NO: 480638 - DNA, 19 bp, Mus musculus
  siRNA target sequence for 9430057O19Rik (NM_174849.2,1401-1419).
gtggtgttgcttactatgt

SEQ ID NO: 480639 - DNA, 19 bp, Mus musculus
  siRNA target sequence for 9430057O19Rik (NM_174849.2,1459-1477).
gtatggcaacagctttagt

SEQ ID NO: 480640 - DNA, 19 bp, Mus musculus
  siRNA target sequence for 9430057O19Rik (NM_174849.2,1495-1513).
ggaaaacatgctatatcca

SEQ ID NO: 480641 - DNA, 19 bp, Mus musculus
  siRNA target sequence for 9430057O19Rik (NM_174849.2,1496-1514).
gaaaacatgctatatccaa

SEQ ID NO: 480642 - DNA, 19 bp, Mus musculus
  siRNA target sequence for 9430057O19Rik (NM_174849.2,1623-1641).
gccgtgtcgcaatctacaa

SEQ ID NO: 480643 - DNA, 19 bp, Mus musculus
  siRNA target sequence for 9430057O19Rik (NM_174849.2,1624-1642).
ccgtgtcgcaatctacaaa

SEQ ID NO: 480644 - DNA, 19 bp, Mus musculus
  siRNA target sequence for 9430057O19Rik (NM_174849.2,1658-1676).
cacagctacacacttgaat

SEQ ID NO: 480645 - DNA, 19 bp, Mus musculus
  siRNA target sequence for 9430057O19Rik (NM_174849.2,1662-1680).
gctacacacttgaatgcaa

SEQ ID NO: 480646 - DNA, 19 bp, Mus musculus
  siRNA target sequence for 9430057O19Rik (NM_174849.2,1668-1686).
cacttgaatgcaactacaa

SEQ ID NO: 480647 - DNA, 19 bp, Mus musculus
  siRNA target sequence for 9430057O19Rik (NM_174849.2,1670-1688).
cttgaatgcaactacaaca

SEQ ID NO: 480648 - DNA, 19 bp, Mus musculus
  siRNA target sequence for 9430057O19Rik (NM_174849.2,1828-1846).
ggacatggcagagtgtaat

SEQ ID NO: 480649 - DNA, 19 bp, Mus musculus
  siRNA target sequence for 9430057O19Rik (NM_174849.2,2035-2053).
gagccgggttcgcagtttt

SEQ ID NO: 480650 - DNA, 19 bp, Mus musculus
  siRNA target sequence for 9430057O19Rik (NM_174849.2,2039-2057).
cgggttcgcagttttagca

SEQ ID NO: 480651 - DNA, 19 bp, Mus musculus
  siRNA target sequence for 9530027K23Rik (NM_176838.2,289-307).
cagtcgctggtggttttgt

SEQ ID NO: 480652 - DNA, 19 bp, Mus musculus
  siRNA target sequence for 9530027K23Rik (NM_176838.2,347-365).
cggacgagaccgacttaat

SEQ ID NO: 480653 - DNA, 19 bp, Mus musculus
  siRNA target sequence for 9530027K23Rik (NM_176838.2,358-376).
gacttaatcctcctagttt

SEQ ID NO: 480654 - DNA, 19 bp, Mus musculus
  siRNA target sequence for 9530027K23Rik (NM_176838.2,506-524).
cggagtccctggacaaagt

SEQ ID NO: 480655 - DNA, 19 bp, Mus musculus
  siRNA target sequence for 9530027K23Rik (NM_176838.2,765-783).
cttgggactagaaacagat

SEQ ID NO: 480656 - DNA, 19 bp, Mus musculus
  siRNA target sequence for 9530027K23Rik (NM_176838.2,819-837).
gactatggtagctgttatt

SEQ ID NO: 480657 - DNA, 19 bp, Mus musculus
  siRNA target sequence for 9530027K23Rik (NM_176838.2,854-872).
ggtccaatggtcagttgtt

SEQ ID NO: 480658 - DNA, 19 bp, Mus musculus
  siRNA target sequence for 9530027K23Rik (NM_176838.2,1140-1158).
catgggtgtccgctatatt

SEQ ID NO: 480659 - DNA, 19 bp, Mus musculus
  siRNA target sequence for 9530027K23Rik (NM_176838.2,1149-1167).
ccgctatattgaggtatat

SEQ ID NO: 480660 - DNA, 19 bp, Mus musculus
  siRNA target sequence for 9530027K23Rik (NM_176838.2,1150-1168).
cgctatattgaggtatata

SEQ ID NO: 480661 - DNA, 19 bp, Mus musculus
  siRNA target sequence for 9530027K23Rik (NM_176838.2,1172-1190).
ccacaggggaggaattcgt

SEQ ID NO: 480662 - DNA, 19 bp, Mus musculus
  siRNA target sequence for 9530027K23Rik (NM_176838.2,1173-1191).
cacaggggaggaattcgta

SEQ ID NO: 480663 - DNA, 19 bp, Mus musculus
  siRNA target sequence for 9530027K23Rik (NM_176838.2,1177-1195).
ggggaggaattcgtaaaga

SEQ ID NO: 480664 - DNA, 19 bp, Mus musculus
  siRNA target sequence for 9530027K23Rik (NM_176838.2,1216-1234).
gaggtggcccgtttcctat

SEQ ID NO: 480665 - DNA, 19 bp, Mus musculus
  siRNA target sequence for 9530027K23Rik (NM_176838.2,1452-1470).
gctgggtaagcgatacatt

SEQ ID NO: 480666 - DNA, 19 bp, Mus musculus
  siRNA target sequence for 9530027K23Rik (NM_176838.2,1457-1475).
gtaagcgatacattgaact

SEQ ID NO: 480667 - DNA, 19 bp, Mus musculus
  siRNA target sequence for 9530027K23Rik (NM_176838.2,1685-1703).
ggcctcatggtgtgcatat

SEQ ID NO: 480668 - DNA, 19 bp, Mus musculus
  siRNA target sequence for 9530027K23Rik (NM_176838.2,1781-1799).
cccagcgatgccacaagaa

SEQ ID NO: 480669 - DNA, 19 bp, Mus musculus
  siRNA target sequence for 9530027K23Rik (NM_176838.2,2060-2078).
ggccagccactcaactcta

SEQ ID NO: 480670 - DNA, 19 bp, Mus musculus
  siRNA target sequence for 9530027K23Rik (NM_176838.2,2241-2259).
ggacctactcagtgtcttt

SEQ ID NO: 480671 - DNA, 19 bp, Mus musculus
  siRNA target sequence for 9530027K23Rik (NM_176838.2,2244-2262).
cctactcagtgtctttcaa

SEQ ID NO: 480672 - DNA, 19 bp, Mus musculus
  siRNA target sequence for 9630006B20Rik (NM_172555.1,254-272).
gcgtcaacagaagcattat

SEQ ID NO: 480673 - DNA, 19 bp, Mus musculus
  siRNA target sequence for 9630006B20Rik (NM_172555.1,292-310).
gtttggcatgtcctaaaga

SEQ ID NO: 480674 - DNA, 19 bp, Mus musculus
  siRNA target sequence for 9630006B20Rik (NM_172555.1,296-314).
ggcatgtcctaaagaaatt

SEQ ID NO: 480675 - DNA, 19 bp, Mus musculus
  siRNA target sequence for 9630006B20Rik (NM_172555.1,298-316).
catgtcctaaagaaattga

SEQ ID NO: 480676 - DNA, 19 bp, Mus musculus
  siRNA target sequence for 9630006B20Rik (NM_172555.1,353-371).
gccatttggagtatttgaa

SEQ ID NO: 480677 - DNA, 19 bp, Mus musculus
  siRNA target sequence for 9630006B20Rik (NM_172555.1,389-407).
ccacaggctggttgttctt

SEQ ID NO: 480678 - DNA, 19 bp, Mus musculus
  siRNA target sequence for 9630006B20Rik (NM_172555.1,394-412).
ggctggttgttcttggtaa

SEQ ID NO: 480679 - DNA, 19 bp, Mus musculus
  siRNA target sequence for 9630006B20Rik (NM_172555.1,395-413).
gctggttgttcttggtaaa

SEQ ID NO: 480680 - DNA, 19 bp, Mus musculus
  siRNA target sequence for 9630006B20Rik (NM_172555.1,396-414).
ctggttgttcttggtaaat

SEQ ID NO: 480681 - DNA, 19 bp, Mus musculus
  siRNA target sequence for 9630006B20Rik (NM_172555.1,402-420).
gttcttggtaaattgaaca

SEQ ID NO: 480682 - DNA, 19 bp, Mus musculus
  siRNA target sequence for 9630006B20Rik (NM_172555.1,405-423).
cttggtaaattgaacaatt

SEQ ID NO: 480683 - DNA, 19 bp, Mus musculus
  siRNA target sequence for 9630006B20Rik (NM_172555.1,484-502).
ctactgttggtggtaaaat

SEQ ID NO: 480684 - DNA, 19 bp, Mus musculus
  siRNA target sequence for 9630006B20Rik (NM_172555.1,492-510).
ggtggtaaaattttcacat

SEQ ID NO: 480685 - DNA, 19 bp, Mus musculus
  siRNA target sequence for 9630006B20Rik (NM_172555.1,666-684).
gcttttgtacctgttataa

SEQ ID NO: 480686 - DNA, 19 bp, Mus musculus
  siRNA target sequence for 9630006B20Rik (NM_172555.1,700-718).
gtattgaaattgatctagt

SEQ ID NO: 480687 - DNA, 19 bp, Mus musculus
  siRNA target sequence for 9630006B20Rik (NM_172555.1,727-745).
gactggcaatacaaaccat

SEQ ID NO: 480688 - DNA, 19 bp, Mus musculus
  siRNA target sequence for 9630006B20Rik (NM_172555.1,729-747).
ctggcaatacaaaccatat

SEQ ID NO: 480689 - DNA, 19 bp, Mus musculus
  siRNA target sequence for 9630006B20Rik (NM_172555.1,731-749).
ggcaatacaaaccatatca

SEQ ID NO: 480690 - DNA, 19 bp, Mus musculus
  siRNA target sequence for 9630006B20Rik (NM_172555.1,738-756).
caaaccatatcagataatt

SEQ ID NO: 480691 - DNA, 19 bp, Mus musculus
  siRNA target sequence for 9630006B20Rik (NM_172555.1,789-807).
cttgatatacggtgcatta

SEQ ID NO: 480692 - DNA, 19 bp, Mus musculus
  siRNA target sequence for 9630006B20Rik (NM_172555.1,792-810).
gatatacggtgcattagaa

SEQ ID NO: 480693 - DNA, 19 bp, Mus musculus
  siRNA target sequence for 9630006B20Rik (NM_172555.1,798-816).
cggtgcattagaagtttaa

SEQ ID NO: 480694 - DNA, 19 bp, Mus musculus
  siRNA target sequence for 9630006B20Rik (NM_172555.1,799-817).
ggtgcattagaagtttaaa

SEQ ID NO: 480695 - DNA, 19 bp, Mus musculus
  siRNA target sequence for 9630006B20Rik (NM_172555.1,845-863).
gcacttagtgccaaataaa

SEQ ID NO: 480696 - DNA, 19 bp, Mus musculus
  siRNA target sequence for 9630006B20Rik (NM_172555.1,882-900).
ctaagagcagtcaaattat

SEQ ID NO: 480697 - DNA, 19 bp, Mus musculus
  siRNA target sequence for 9630006B20Rik (NM_172555.1,902-920).
ggcaaagcgccgtggtatt

SEQ ID NO: 480698 - DNA, 19 bp, Mus musculus
  siRNA target sequence for 9630006B20Rik (NM_172555.1,903-921).
gcaaagcgccgtggtattt

SEQ ID NO: 480699 - DNA, 19 bp, Mus musculus
  siRNA target sequence for 9630006B20Rik (NM_172555.1,904-922).
caaagcgccgtggtattta

SEQ ID NO: 480700 - DNA, 19 bp, Mus musculus
  siRNA target sequence for 9630006B20Rik (NM_172555.1,909-927).
cgccgtggtatttattcca

SEQ ID NO: 480701 - DNA, 19 bp, Mus musculus
  siRNA target sequence for 9630006B20Rik (NM_172555.1,910-928).
gccgtggtatttattccaa

SEQ ID NO: 480702 - DNA, 19 bp, Mus musculus
  siRNA target sequence for 9630006B20Rik (NM_172555.1,912-930).
cgtggtatttattccaata

SEQ ID NO: 480703 - DNA, 19 bp, Mus musculus
  siRNA target sequence for 9630006B20Rik (NM_172555.1,1000-1018).
cagcagcttcaactttagt

SEQ ID NO: 480704 - DNA, 19 bp, Mus musculus
  siRNA target sequence for 9630006B20Rik (NM_172555.1,1003-1021).
cagcttcaactttagttca

SEQ ID NO: 480705 - DNA, 19 bp, Mus musculus
  siRNA target sequence for 9630006B20Rik (NM_172555.1,1006-1024).
cttcaactttagttcacaa

SEQ ID NO: 480706 - DNA, 19 bp, Mus musculus
  siRNA target sequence for 9630006B20Rik (NM_172555.1,1009-1027).
caactttagttcacaagtt

SEQ ID NO: 480707 - DNA, 19 bp, Mus musculus
  siRNA target sequence for 9630006B20Rik (NM_172555.1,1012-1030).
ctttagttcacaagttttt

SEQ ID NO: 480708 - DNA, 19 bp, Mus musculus
  siRNA target sequence for 9630006B20Rik (NM_172555.1,1109-1127).
ctgggatcctcgggtaaat

SEQ ID NO: 480709 - DNA, 19 bp, Mus musculus
  siRNA target sequence for 9630006B20Rik (NM_172555.1,1129-1147).
cgtcagacaggtatcatct

SEQ ID NO: 480710 - DNA, 19 bp, Mus musculus
  siRNA target sequence for 9630006B20Rik (NM_172555.1,1130-1148).
gtcagacaggtatcatctt

SEQ ID NO: 480711 - DNA, 19 bp, Mus musculus
  siRNA target sequence for 9630006B20Rik (NM_172555.1,1173-1191).
ccacaacagaattctacat

SEQ ID NO: 480712 - DNA, 19 bp, Mus musculus
  siRNA target sequence for 9630006B20Rik (NM_172555.1,1204-1222).
catcaactcgaacagtaat

SEQ ID NO: 480713 - DNA, 19 bp, Mus musculus
  siRNA target sequence for 9630006B20Rik (NM_172555.1,1207-1225).
caactcgaacagtaatggt

SEQ ID NO: 480714 - DNA, 19 bp, Mus musculus
  siRNA target sequence for 9630006B20Rik (NM_172555.1,1399-1417).
ctaaaatccgtgtacttgt

SEQ ID NO: 480715 - DNA, 19 bp, Mus musculus
  siRNA target sequence for 9630006B20Rik (NM_172555.1,1408-1426).
gtgtacttgttggaaactt

SEQ ID NO: 480716 - DNA, 19 bp, Mus musculus
  siRNA target sequence for 9630006B20Rik (NM_172555.1,1424-1442).
cttggaacggaatgaattt

SEQ ID NO: 480717 - DNA, 19 bp, Mus musculus
  siRNA target sequence for 9630006B20Rik (NM_172555.1,1428-1446).
gaacggaatgaatttatta

SEQ ID NO: 480718 - DNA, 19 bp, Mus musculus
  siRNA target sequence for 9630006B20Rik (NM_172555.1,1432-1450).
ggaatgaatttattactct

SEQ ID NO: 480719 - DNA, 19 bp, Mus musculus
  siRNA target sequence for 9630006B20Rik (NM_172555.1,1500-1518).
gccaacaattacgtatcaa

SEQ ID NO: 480720 - DNA, 19 bp, Mus musculus
  siRNA target sequence for 9630006B20Rik (NM_172555.1,1501-1519).
ccaacaattacgtatcaat

SEQ ID NO: 480721 - DNA, 19 bp, Mus musculus
  siRNA target sequence for 9630006B20Rik (NM_172555.1,1520-1538).
gtggttccttgggataatt

SEQ ID NO: 480722 - DNA, 19 bp, Mus musculus
  siRNA target sequence for 9630006B20Rik (NM_172555.1,1560-1578).
gaaagtgttaacatagact

SEQ ID NO: 480723 - DNA, 19 bp, Mus musculus
  siRNA target sequence for 9630006B20Rik (NM_172555.1,1566-1584).
gttaacatagacttgacat

SEQ ID NO: 480724 - DNA, 19 bp, Mus musculus
  siRNA target sequence for 9630006B20Rik (NM_172555.1,1571-1589).
catagacttgacatatgat

SEQ ID NO: 480725 - DNA, 19 bp, Mus musculus
  siRNA target sequence for 9630006B20Rik (NM_172555.1,1764-1782).
ggccttcagtccaaaagat

SEQ ID NO: 480726 - DNA, 19 bp, Mus musculus
  siRNA target sequence for 9630006B20Rik (NM_172555.1,1767-1785).
cttcagtccaaaagatcat

SEQ ID NO: 480727 - DNA, 19 bp, Mus musculus
  siRNA target sequence for 9630006B20Rik (NM_172555.1,1824-1842).
gacagtggaacacctttta

SEQ ID NO: 480728 - DNA, 19 bp, Mus musculus
  siRNA target sequence for 9630006B20Rik (NM_172555.1,1844-1862).
ctctccggtgtctgcaaat

SEQ ID NO: 480729 - DNA, 19 bp, Mus musculus
  siRNA target sequence for 9630006B20Rik (NM_172555.1,1846-1864).
ctccggtgtctgcaaataa

SEQ ID NO: 480730 - DNA, 19 bp, Mus musculus
  siRNA target sequence for 9630006B20Rik (NM_172555.1,1882-1900).
gccccacaggagaaataga

SEQ ID NO: 480731 - DNA, 19 bp, Mus musculus
  siRNA target sequence for 9630006B20Rik (NM_172555.1,1994-2012).
ggttgaccctacagcaaaa

SEQ ID NO: 480732 - DNA, 19 bp, Mus musculus
  siRNA target sequence for 9630006B20Rik (NM_172555.1,2028-2046).
gctgtgtgcaccattccta

SEQ ID NO: 480733 - DNA, 19 bp, Mus musculus
  siRNA target sequence for 9630006B20Rik (NM_172555.1,2033-2051).
gtgcaccattcctactgta

SEQ ID NO: 480734 - DNA, 19 bp, Mus musculus
  siRNA target sequence for 9630006B20Rik (NM_172555.1,2049-2067).
gtagtaggacggaatgtta

SEQ ID NO: 480735 - DNA, 19 bp, Mus musculus
  siRNA target sequence for 9630006B20Rik (NM_172555.1,2059-2077).
ggaatgttattcctagaat

SEQ ID NO: 480736 - DNA, 19 bp, Mus musculus
  siRNA target sequence for 9630006B20Rik (NM_172555.1,2100-2118).
cagggacaaccacatctaa

SEQ ID NO: 480737 - DNA, 19 bp, Mus musculus
  siRNA target sequence for 9630006B20Rik (NM_172555.1,2102-2120).
gggacaaccacatctaaat

SEQ ID NO: 480738 - DNA, 19 bp, Mus musculus
  siRNA target sequence for 9630006B20Rik (NM_172555.1,2112-2130).
catctaaatgggatatcaa

SEQ ID NO: 480739 - DNA, 19 bp, Mus musculus
  siRNA target sequence for 9630006B20Rik (NM_172555.1,2115-2133).
ctaaatgggatatcaaata

SEQ ID NO: 480740 - DNA, 19 bp, Mus musculus
  siRNA target sequence for 9630006B20Rik (NM_172555.1,2121-2139).
gggatatcaaatattacta

SEQ ID NO: 480741 - DNA, 19 bp, Mus musculus
  siRNA target sequence for 9630006B20Rik (NM_172555.1,2122-2140).
ggatatcaaatattactaa

SEQ ID NO: 480742 - DNA, 19 bp, Mus musculus
  siRNA target sequence for 9630006B20Rik (NM_172555.1,2162-2180).
ccattcgccacctacagat

SEQ ID NO: 480743 - DNA, 19 bp, Mus musculus
  siRNA target sequence for 9630006B20Rik (NM_172555.1,2172-2190).
cctacagatgggacttcta

SEQ ID NO: 480744 - DNA, 19 bp, Mus musculus
  siRNA target sequence for 9630006B20Rik (NM_172555.1,2194-2212).
ggctgaaagacatagaaaa

SEQ ID NO: 480745 - DNA, 19 bp, Mus musculus
  siRNA target sequence for 9630006B20Rik (NM_172555.1,2196-2214).
ctgaaagacatagaaaagt

SEQ ID NO: 480746 - DNA, 19 bp, Mus musculus
  siRNA target sequence for 9630006B20Rik (NM_172555.1,2269-2287).
gaaaaccaatggattcgat

SEQ ID NO: 480747 - DNA, 19 bp, Mus musculus
  siRNA target sequence for 9630006B20Rik (NM_172555.1,2299-2317).
ctatgcctattccaactat

SEQ ID NO: 480748 - DNA, 19 bp, Mus musculus
  siRNA target sequence for 9630006B20Rik (NM_172555.1,2303-2321).
gcctattccaactattgat

SEQ ID NO: 480749 - DNA, 19 bp, Mus musculus
  siRNA target sequence for 9630006B20Rik (NM_172555.1,2304-2322).
cctattccaactattgata

SEQ ID NO: 480750 - DNA, 19 bp, Mus musculus
  siRNA target sequence for 9630006B20Rik (NM_172555.1,2319-2337).
gatacggcacgcaaaaaga

SEQ ID NO: 480751 - DNA, 19 bp, Mus musculus
  siRNA target sequence for 9630006B20Rik (NM_172555.1,2411-2429).
gatccgcctgacccttaat

SEQ ID NO: 480752 - DNA, 19 bp, Mus musculus
  siRNA target sequence for 9630041N07 (NM_173387.1,399-417).
ggtcatcgctcagttagaa

SEQ ID NO: 480753 - DNA, 19 bp, Mus musculus
  siRNA target sequence for 9630041N07 (NM_173387.1,402-420).
catcgctcagttagaacaa

SEQ ID NO: 480754 - DNA, 19 bp, Mus musculus
  siRNA target sequence for 9630041N07 (NM_173387.1,438-456).
ggtggaaagtgggatgttt

SEQ ID NO: 480755 - DNA, 19 bp, Mus musculus
  siRNA target sequence for 9630041N07 (NM_173387.1,441-459).
ggaaagtgggatgtttcaa

SEQ ID NO: 480756 - DNA, 19 bp, Mus musculus
  siRNA target sequence for 9630041N07 (NM_173387.1,534-552).
ccagagagtggataaattt

SEQ ID NO: 480757 - DNA, 19 bp, Mus musculus
  siRNA target sequence for 9630041N07 (NM_173387.1,535-553).
cagagagtggataaatttt

SEQ ID NO: 480758 - DNA, 19 bp, Mus musculus
  siRNA target sequence for 9630041N07 (NM_173387.1,601-619).
gagcaaccaggcaataaga

SEQ ID NO: 480759 - DNA, 19 bp, Mus musculus
  siRNA target sequence for 9630041N07 (NM_173387.1,603-621).
gcaaccaggcaataagaaa

SEQ ID NO: 480760 - DNA, 19 bp, Mus musculus
  siRNA target sequence for 9630041N07 (NM_173387.1,604-622).
caaccaggcaataagaaaa

SEQ ID NO: 480761 - DNA, 19 bp, Mus musculus
  siRNA target sequence for 9630041N07 (NM_173387.1,632-650).
gcgagatgctgctttctgt

SEQ ID NO: 480762 - DNA, 19 bp, Mus musculus
  siRNA target sequence for 9630041N07 (NM_173387.1,686-704).
gggtcggactcgtgagaaa

SEQ ID NO: 480763 - DNA, 19 bp, Mus musculus
  siRNA target sequence for 9630041N07 (NM_173387.1,687-705).
ggtcggactcgtgagaaat

SEQ ID NO: 480764 - DNA, 19 bp, Mus musculus
  siRNA target sequence for 9630041N07 (NM_173387.1,701-719).
gaaatcccggcataaagct

SEQ ID NO: 480765 - DNA, 19 bp, Mus musculus
  siRNA target sequence for 9630041N07 (NM_173387.1,717-735).
gctcccatttcgtaggaaa

SEQ ID NO: 480766 - DNA, 19 bp, Mus musculus
  siRNA target sequence for 9630041N07 (NM_173387.1,1026-1044).
cttcaccacctctctcatt

SEQ ID NO: 480767 - DNA, 19 bp, Mus musculus
  siRNA target sequence for 9630041N07 (NM_173387.1,1209-1227).
gattcagcaccataggatt

SEQ ID NO: 480768 - DNA, 19 bp, Mus musculus
  siRNA target sequence for 9630041N07 (NM_173387.1,1264-1282).
gggaaggcctttacatcaa

SEQ ID NO: 480769 - DNA, 19 bp, Mus musculus
  siRNA target sequence for 9630041N07 (NM_173387.1,1265-1283).
ggaaggcctttacatcaat

SEQ ID NO: 480770 - DNA, 19 bp, Mus musculus
  siRNA target sequence for 9630041N07 (NM_173387.1,1269-1287).
ggcctttacatcaatatca

SEQ ID NO: 480771 - DNA, 19 bp, Mus musculus
  siRNA target sequence for 9630041N07 (NM_173387.1,1532-1550).
ggctctcacggcttaacat

SEQ ID NO: 480772 - DNA, 19 bp, Mus musculus
  siRNA target sequence for 9630041N07 (NM_173387.1,1625-1643).
cggtcaatacgcacagaaa

SEQ ID NO: 480773 - DNA, 19 bp, Mus musculus
  siRNA target sequence for 9630041N07 (NM_173387.1,1627-1645).
gtcaatacgcacagaaaga

SEQ ID NO: 480774 - DNA, 19 bp, Mus musculus
  siRNA target sequence for 9630041N07 (NM_173387.1,1746-1764).
gccgtttaactgtaaagtt

SEQ ID NO: 480775 - DNA, 19 bp, Mus musculus
  siRNA target sequence for 9630041N07 (NM_173387.1,1783-1801).
cagagttcctcgcttatga

SEQ ID NO: 480776 - DNA, 19 bp, Mus musculus
  siRNA target sequence for 9630041N07 (NM_173387.1,1790-1808).
cctcgcttatgacacatat

SEQ ID NO: 480777 - DNA, 19 bp, Mus musculus
  siRNA target sequence for 9930016F01Rik (NM_173769.2,87-105).
cgggatgggagccaatgaa

SEQ ID NO: 480778 - DNA, 19 bp, Mus musculus
  siRNA target sequence for 9930016F01Rik (NM_173769.2,89-107).
ggatgggagccaatgaata

SEQ ID NO: 480779 - DNA, 19 bp, Mus musculus
  siRNA target sequence for 9930016F01Rik (NM_173769.2,193-211).
ccttcactgtggtcttgaa

SEQ ID NO: 480780 - DNA, 19 bp, Mus musculus
  siRNA target sequence for 9930016F01Rik (NM_173769.2,232-250).
ggagaaggcaacttctgtt

SEQ ID NO: 480781 - DNA, 19 bp, Mus musculus
  siRNA target sequence for 9930016F01Rik (NM_173769.2,327-345).
cccagggcctagtaactat

SEQ ID NO: 480782 - DNA, 19 bp, Mus musculus
  siRNA target sequence for 9930016F01Rik (NM_173769.2,395-413).
ccctcgcagacagactttt

SEQ ID NO: 480783 - DNA, 19 bp, Mus musculus
  siRNA target sequence for 9930016F01Rik (NM_173769.2,617-635).
gtggaacctcccagaacat

SEQ ID NO: 480784 - DNA, 19 bp, Mus musculus
  siRNA target sequence for 9930016F01Rik (NM_173769.2,619-637).
ggaacctcccagaacatta

SEQ ID NO: 480785 - DNA, 19 bp, Mus musculus
  siRNA target sequence for 9930016F01Rik (NM_173769.2,620-638).
gaacctcccagaacattat

SEQ ID NO: 480786 - DNA, 19 bp, Mus musculus
  siRNA target sequence for 9930016F01Rik (NM_173769.2,812-830).
cctcaatgtgggaaacagt

SEQ ID NO: 480787 - DNA, 19 bp, Mus musculus
  siRNA target sequence for 9930016F01Rik (NM_173769.2,1238-1256).
cgcaagcaccacctagata

SEQ ID NO: 480788 - DNA, 19 bp, Mus musculus
  siRNA target sequence for 9930025G17 (NM_177811.2,330-348).
cagcaagcccactaattgt

SEQ ID NO: 480789 - DNA, 19 bp, Mus musculus
  siRNA target sequence for 9930025G17 (NM_177811.2,332-350).
gcaagcccactaattgtga

SEQ ID NO: 480790 - DNA, 19 bp, Mus musculus
  siRNA target sequence for 9930025G17 (NM_177811.2,338-356).
ccactaattgtgaatcact

SEQ ID NO: 480791 - DNA, 19 bp, Mus musculus
  siRNA target sequence for 9930025G17 (NM_177811.2,357-375).
ccttcttaaacgaagaaga

SEQ ID NO: 480792 - DNA, 19 bp, Mus musculus
  siRNA target sequence for 9930025G17 (NM_177811.2,665-683).
gtggatacgcttcttatga

SEQ ID NO: 480793 - DNA, 19 bp, Mus musculus
  siRNA target sequence for 9930025G17 (NM_177811.2,674-692).
cttcttatgacccttcatt

SEQ ID NO: 480794 - DNA, 19 bp, Mus musculus
  siRNA target sequence for 9930025G17 (NM_177811.2,835-853).
gatgttttagggtatctaa

SEQ ID NO: 480795 - DNA, 19 bp, Mus musculus
  siRNA target sequence for A230042K10 (NM_177622.2,363-381).
gcggaaaaaggatttcaaa

SEQ ID NO: 480796 - DNA, 19 bp, Mus musculus
  siRNA target sequence for A230042K10 (NM_177622.2,1112-1130).
gtttcgttgtccatcatta

SEQ ID NO: 480797 - DNA, 19 bp, Mus musculus
  siRNA target sequence for A230042K10 (NM_177622.2,1193-1211).
ggccttccatactacaact

SEQ ID NO: 480798 - DNA, 19 bp, Mus musculus
  siRNA target sequence for A230042K10 (NM_177622.2,1194-1212).
gccttccatactacaactt

SEQ ID NO: 480799 - DNA, 19 bp, Mus musculus
  siRNA target sequence for A230042K10 (NM_177622.2,1195-1213).
ccttccatactacaacttt

SEQ ID NO: 480800 - DNA, 19 bp, Mus musculus
  siRNA target sequence for A230042K10 (NM_177622.2,1199-1217).
ccatactacaactttatgt

SEQ ID NO: 480801 - DNA, 19 bp, Mus musculus
  siRNA target sequence for A230042K10 (NM_177622.2,1442-1460).
caaagcatttgattatcca

SEQ ID NO: 480802 - DNA, 19 bp, Mus musculus
  siRNA target sequence for A230102I05Rik (NM_146179.1,297-315).
gaggctcctgtatcttgat

SEQ ID NO: 480803 - DNA, 19 bp, Mus musculus
  siRNA target sequence for A230102I05Rik (NM_146179.1,324-342).
ggagaattttacccttata

SEQ ID NO: 480804 - DNA, 19 bp, Mus musculus
  siRNA target sequence for A230102I05Rik (NM_146179.1,325-343).
gagaattttacccttataa

SEQ ID NO: 480805 - DNA, 19 bp, Mus musculus
  siRNA target sequence for A230102I05Rik (NM_146179.1,453-471).
ctgtagcaccgtccttaaa

SEQ ID NO: 480806 - DNA, 19 bp, Mus musculus
  siRNA target sequence for A230102I05Rik (NM_146179.1,455-473).
gtagcaccgtccttaaaga

SEQ ID NO: 480807 - DNA, 19 bp, Mus musculus
  siRNA target sequence for A230102I05Rik (NM_146179.1,458-476).
gcaccgtccttaaagatat

SEQ ID NO: 480808 - DNA, 19 bp, Mus musculus
  siRNA target sequence for A230102I05Rik (NM_146179.1,461-479).
ccgtccttaaagatatctt

SEQ ID NO: 480809 - DNA, 19 bp, Mus musculus
  siRNA target sequence for A230102I05Rik (NM_146179.1,560-578).
ccaagaattggttaaagaa

SEQ ID NO: 480810 - DNA, 19 bp, Mus musculus
  siRNA target sequence for A230102I05Rik (NM_146179.1,597-615).
gaagaactgtatattccat

SEQ ID NO: 480811 - DNA, 19 bp, Mus musculus
  siRNA target sequence for A230102I05Rik (NM_146179.1,628-646).
ccttctgtctgtagtaaga

SEQ ID NO: 480812 - DNA, 19 bp, Mus musculus
  siRNA target sequence for A230102I05Rik (NM_146179.1,629-647).
cttctgtctgtagtaagat

SEQ ID NO: 480813 - DNA, 19 bp, Mus musculus
  siRNA target sequence for A230102I05Rik (NM_146179.1,641-659).
gtaagattggcgagaaatt

SEQ ID NO: 480814 - DNA, 19 bp, Mus musculus
  siRNA target sequence for A230102I05Rik (NM_146179.1,660-678).
cccagctgtatggaatctt

SEQ ID NO: 480815 - DNA, 19 bp, Mus musculus
  siRNA target sequence for A230102I05Rik (NM_146179.1,735-753).
ggcttttcactcagagaaa

SEQ ID NO: 480816 - DNA, 19 bp, Mus musculus
  siRNA target sequence for A230102I05Rik (NM_146179.1,808-826).
catgaatatccaagacttt

SEQ ID NO: 480817 - DNA, 19 bp, Mus musculus
  siRNA target sequence for A230102I05Rik (NM_146179.1,841-859).
gggtttgagtctaacagtt

SEQ ID NO: 480818 - DNA, 19 bp, Mus musculus
  siRNA target sequence for A230102I05Rik (NM_146179.1,857-875).
gttgtgagcaagacttaaa

SEQ ID NO: 480819 - DNA, 19 bp, Mus musculus
  siRNA target sequence for A230102I05Rik (NM_146179.1,862-880).
gagcaagacttaaacaagt

SEQ ID NO: 480820 - DNA, 19 bp, Mus musculus
  siRNA target sequence for A230102I05Rik (NM_146179.1,909-927).
gactgaaaaccgaccatat

SEQ ID NO: 480821 - DNA, 19 bp, Mus musculus
  siRNA target sequence for A230102I05Rik (NM_146179.1,1059-1077).
cgaacactgtagagttcat

SEQ ID NO: 480822 - DNA, 19 bp, Mus musculus
  siRNA target sequence for A230102I05Rik (NM_146179.1,1117-1135).
gccttcgggtgccattcta

SEQ ID NO: 480823 - DNA, 19 bp, Mus musculus
  siRNA target sequence for A230102I05Rik (NM_146179.1,1119-1137).
cttcgggtgccattctagt

SEQ ID NO: 480824 - DNA, 19 bp, Mus musculus
  siRNA target sequence for A230102I05Rik (NM_146179.1,1122-1140).
cgggtgccattctagtctt

SEQ ID NO: 480825 - DNA, 19 bp, Mus musculus
  siRNA target sequence for A230102I05Rik (NM_146179.1,1189-1207).
gactgcgggaggctgttta

SEQ ID NO: 480826 - DNA, 19 bp, Mus musculus
  siRNA target sequence for A230102I05Rik (NM_146179.1,1210-1228).
cagattgtcagcctgatta

SEQ ID NO: 480827 - DNA, 19 bp, Mus musculus
  siRNA target sequence for A230102I05Rik (NM_146179.1,1378-1396).
caaagcgccaaccttatta

SEQ ID NO: 480828 - DNA, 19 bp, Mus musculus
  siRNA target sequence for A230102I05Rik (NM_146179.1,1464-1482).
gagagctaccctcatgaaa

SEQ ID NO: 480829 - DNA, 19 bp, Mus musculus
  siRNA target sequence for A230102I05Rik (NM_146179.1,1466-1484).
gagctaccctcatgaaaca

SEQ ID NO: 480830 - DNA, 19 bp, Mus musculus
  siRNA target sequence for A230102I05Rik (NM_146179.1,1531-1549).
ggtaagttctttaaacagt

SEQ ID NO: 480831 - DNA, 19 bp, Mus musculus
  siRNA target sequence for A230102I05Rik (NM_146179.1,1548-1566).
gtacttctacctcattgaa

SEQ ID NO: 480832 - DNA, 19 bp, Mus musculus
  siRNA target sequence for A230102I05Rik (NM_146179.1,1560-1578).
cattgaacacagtaggatt

SEQ ID NO: 480833 - DNA, 19 bp, Mus musculus
  siRNA target sequence for A230102I05Rik (NM_146179.1,1581-1599).
caccacaacagaattttat

SEQ ID NO: 480834 - DNA, 19 bp, Mus musculus
  siRNA target sequence for A230102I05Rik (NM_146179.1,1606-1624).
ggacagtgcgggaaatctt

SEQ ID NO: 480835 - DNA, 19 bp, Mus musculus
  siRNA target sequence for A230102I05Rik (NM_146179.1,1607-1625).
gacagtgcgggaaatctta

SEQ ID NO: 480836 - DNA, 19 bp, Mus musculus
  siRNA target sequence for A230102I05Rik (NM_146179.1,1609-1627).
cagtgcgggaaatcttata

SEQ ID NO: 480837 - DNA, 19 bp, Mus musculus
  siRNA target sequence for A230102I05Rik (NM_146179.1,1711-1729).
gaatacaaatccagactta

SEQ ID NO: 480838 - DNA, 19 bp, Mus musculus
  siRNA target sequence for A230102I05Rik (NM_146179.1,1716-1734).
caaatccagacttaatcga

SEQ ID NO: 480839 - DNA, 19 bp, Mus musculus
  siRNA target sequence for A230102I05Rik (NM_146179.1,1791-1809).
cttcagggaaagctacaat

SEQ ID NO: 480840 - DNA, 19 bp, Mus musculus
  siRNA target sequence for A230102I05Rik (NM_146179.1,1794-1812).
cagggaaagctacaatctt

SEQ ID NO: 480841 - DNA, 19 bp, Mus musculus
  siRNA target sequence for A230102I05Rik (NM_146179.1,1882-1900).
cggagagctgacttggtta

SEQ ID NO: 480842 - DNA, 19 bp, Mus musculus
  siRNA target sequence for A230102I05Rik (NM_146179.1,1884-1902).
gagagctgacttggttaaa

SEQ ID NO: 480843 - DNA, 19 bp, Mus musculus
  siRNA target sequence for A230102I05Rik (NM_146179.1,1886-1904).
gagctgacttggttaaaca

SEQ ID NO: 480844 - DNA, 19 bp, Mus musculus
  siRNA target sequence for A230102I05Rik (NM_146179.1,1967-1985).
gaactaccaaccttgttca

SEQ ID NO: 480845 - DNA, 19 bp, Mus musculus
  siRNA target sequence for A330079D15 (NM_177888.2,530-548).
gtggcagtggagaacacta

SEQ ID NO: 480846 - DNA, 19 bp, Mus musculus
  siRNA target sequence for A330079D15 (NM_177888.2,677-695).
gaaataggctacaaacaca

SEQ ID NO: 480847 - DNA, 19 bp, Mus musculus
  siRNA target sequence for A330079D15 (NM_177888.2,688-706).
caaacacaccgaatcctta

SEQ ID NO: 480848 - DNA, 19 bp, Mus musculus
  siRNA target sequence for A330079D15 (NM_177888.2,694-712).
caccgaatccttaaaatct

SEQ ID NO: 480849 - DNA, 19 bp, Mus musculus
  siRNA target sequence for A330079D15 (NM_177888.2,715-733).
ccatctggatagtgtagaa

SEQ ID NO: 480850 - DNA, 19 bp, Mus musculus
  siRNA target sequence for A330079D15 (NM_177888.2,782-800).
cccaaggtatggaaataca

SEQ ID NO: 480851 - DNA, 19 bp, Mus musculus
  siRNA target sequence for A330079D15 (NM_177888.2,783-801).
ccaaggtatggaaatacaa

SEQ ID NO: 480852 - DNA, 19 bp, Mus musculus
  siRNA target sequence for A330079D15 (NM_177888.2,812-830).
gcagggaagaccattttta

SEQ ID NO: 480853 - DNA, 19 bp, Mus musculus
  siRNA target sequence for A330079D15 (NM_177888.2,815-833).
gggaagaccatttttaaat

SEQ ID NO: 480854 - DNA, 19 bp, Mus musculus
  siRNA target sequence for A330079D15 (NM_177888.2,817-835).
gaagaccatttttaaatgt

SEQ ID NO: 480855 - DNA, 19 bp, Mus musculus
  siRNA target sequence for A330079D15 (NM_177888.2,862-880).
cagctcagctgttacagtt

SEQ ID NO: 480856 - DNA, 19 bp, Mus musculus
  siRNA target sequence for A330079D15 (NM_177888.2,1282-1300).
gagtatacaccttgttgtt

SEQ ID NO: 480857 - DNA, 19 bp, Mus musculus
  siRNA target sequence for A330079D15 (NM_177888.2,1444-1462).
caatagaagtgcctatctt

SEQ ID NO: 480858 - DNA, 19 bp, Mus musculus
  siRNA target sequence for A330079D15 (NM_177888.2,1532-1550).
catgctgcctatcttataa

SEQ ID NO: 480859 - DNA, 19 bp, Mus musculus
  siRNA target sequence for A430104C18Rik (NM_145931.1,412-430).
gcctccgtgatgaagtttt

SEQ ID NO: 480860 - DNA, 19 bp, Mus musculus
  siRNA target sequence for A430104C18Rik (NM_145931.1,413-431).
cctccgtgatgaagtttta

SEQ ID NO: 480861 - DNA, 19 bp, Mus musculus
  siRNA target sequence for A430104C18Rik (NM_145931.1,567-585).
caggatgaacatgtaataa

SEQ ID NO: 480862 - DNA, 19 bp, Mus musculus
  siRNA target sequence for A430104C18Rik (NM_145931.1,816-834).
cctattatgccggtaactt

SEQ ID NO: 480863 - DNA, 19 bp, Mus musculus
  siRNA target sequence for A430104C18Rik (NM_145931.1,826-844).
cggtaacttctgttttgca

SEQ ID NO: 480864 - DNA, 19 bp, Mus musculus
  siRNA target sequence for A430104C18Rik (NM_145931.1,827-845).
ggtaacttctgttttgcaa

SEQ ID NO: 480865 - DNA, 19 bp, Mus musculus
  siRNA target sequence for A430104C18Rik (NM_145931.1,908-926).
caccatatccgatgctttt

SEQ ID NO: 480866 - DNA, 19 bp, Mus musculus
  siRNA target sequence for A430104C18Rik (NM_145931.1,910-928).
ccatatccgatgcttttct

SEQ ID NO: 480867 - DNA, 19 bp, Mus musculus
  siRNA target sequence for A430104C18Rik (NM_145931.1,1091-1109).
gcccatgggtacaaggtat

SEQ ID NO: 480868 - DNA, 19 bp, Mus musculus
  siRNA target sequence for A430104C18Rik (NM_145931.1,1150-1168).
catccttggaagaatttta

SEQ ID NO: 480869 - DNA, 19 bp, Mus musculus
  siRNA target sequence for A430104C18Rik (NM_145931.1,1236-1254).
ggaacaccgcttaacaaca

SEQ ID NO: 480870 - DNA, 19 bp, Mus musculus
  siRNA target sequence for A430104C18Rik (NM_145931.1,1242-1260).
ccgcttaacaacagtaatt

SEQ ID NO: 480871 - DNA, 19 bp, Mus musculus
  siRNA target sequence for A430104C18Rik (NM_145931.1,1255-1273).
gtaattcctcccttttact

SEQ ID NO: 480872 - DNA, 19 bp, Mus musculus
  siRNA target sequence for A430104C18Rik (NM_145931.1,1261-1279).
cctcccttttacttatgaa

SEQ ID NO: 480873 - DNA, 19 bp, Mus musculus
  siRNA target sequence for A430104C18Rik (NM_145931.1,1363-1381).
gtgtgatcgctaaaccatt

SEQ ID NO: 480874 - DNA, 19 bp, Mus musculus
  siRNA target sequence for A430104C18Rik (NM_145931.1,1365-1383).
gtgatcgctaaaccatttt

SEQ ID NO: 480875 - DNA, 19 bp, Mus musculus
  siRNA target sequence for A430104C18Rik (NM_145931.1,1367-1385).
gatcgctaaaccattttca

SEQ ID NO: 480876 - DNA, 19 bp, Mus musculus
  siRNA target sequence for A430104C18Rik (NM_145931.1,1370-1388).
cgctaaaccattttcatca

SEQ ID NO: 480877 - DNA, 19 bp, Mus musculus
  siRNA target sequence for A430104C18Rik (NM_145931.1,1459-1477).
caggccctaagttaatgga

SEQ ID NO: 480878 - DNA, 19 bp, Mus musculus
  siRNA target sequence for A430104C18Rik (NM_145931.1,1461-1479).
ggccctaagttaatggatt

SEQ ID NO: 480879 - DNA, 19 bp, Mus musculus
  siRNA target sequence for A430104C18Rik (NM_145931.1,1462-1480).
gccctaagttaatggattt

SEQ ID NO: 480880 - DNA, 19 bp, Mus musculus
  siRNA target sequence for A430104C18Rik (NM_145931.1,1481-1499).
cacataccatgctaatgta

SEQ ID NO: 480881 - DNA, 19 bp, Mus musculus
  siRNA target sequence for A430104C18Rik (NM_145931.1,1483-1501).
cataccatgctaatgtaga

SEQ ID NO: 480882 - DNA, 19 bp, Mus musculus
  siRNA target sequence for A430104C18Rik (NM_145931.1,1487-1505).
ccatgctaatgtagatcat

SEQ ID NO: 480883 - DNA, 19 bp, Mus musculus
  siRNA target sequence for A430104C18Rik (NM_145931.1,1491-1509).
gctaatgtagatcataaat

SEQ ID NO: 480884 - DNA, 19 bp, Mus musculus
  siRNA target sequence for A430104C18Rik (NM_145931.1,1497-1515).
gtagatcataaatgtaaga

SEQ ID NO: 480885 - DNA, 19 bp, Mus musculus
  siRNA target sequence for A430104C18Rik (NM_145931.1,1510-1528).
gtaagaaagatattttaat

SEQ ID NO: 480886 - DNA, 19 bp, Mus musculus
  siRNA target sequence for A430104C18Rik (NM_145931.1,1599-1617).
gaaggaccatattatatat

SEQ ID NO: 480887 - DNA, 19 bp, Mus musculus
  siRNA target sequence for A430104C18Rik (NM_145931.1,1603-1621).
gaccatattatatatgcaa

SEQ ID NO: 480888 - DNA, 19 bp, Mus musculus
  siRNA target sequence for A430104C18Rik (NM_145931.1,1656-1674).
ggccactgtacatttgctt

SEQ ID NO: 480889 - DNA, 19 bp, Mus musculus
  siRNA target sequence for A430104C18Rik (NM_145931.1,1657-1675).
gccactgtacatttgctta

SEQ ID NO: 480890 - DNA, 19 bp, Mus musculus
  siRNA target sequence for A430104C18Rik (NM_145931.1,1724-1742).
cagtcgagaggctttcttt

SEQ ID NO: 480891 - DNA, 19 bp, Mus musculus
  siRNA target sequence for A430104C18Rik (NM_145931.1,1763-1781).
ccttactgtggtcagaatt

SEQ ID NO: 480892 - DNA, 19 bp, Mus musculus
  siRNA target sequence for A430104C18Rik (NM_145931.1,1797-1815).
ggagagtttacattccttt

SEQ ID NO: 480893 - DNA, 19 bp, Mus musculus
  siRNA target sequence for A430104C18Rik (NM_145931.1,1830-1848).
gatcataaacctagaatga

SEQ ID NO: 480894 - DNA, 19 bp, Mus musculus
  siRNA target sequence for A430104C18Rik (NM_145931.1,1839-1857).
cctagaatgataagtaaaa

SEQ ID NO: 480895 - DNA, 19 bp, Mus musculus
  siRNA target sequence for A430104C18Rik (NM_145931.1,1882-1900).
gctctcaccccgtcacaaa

SEQ ID NO: 480896 - DNA, 19 bp, Mus musculus
  siRNA target sequence for A430104C18Rik (NM_145931.1,1892-1910).
cgtcacaaagcatgaattt

SEQ ID NO: 480897 - DNA, 19 bp, Mus musculus
  siRNA target sequence for A430104C18Rik (NM_145931.1,1948-1966).
ccacagtaaaatattccaa

SEQ ID NO: 480898 - DNA, 19 bp, Mus musculus
  siRNA target sequence for A430104C18Rik (NM_145931.1,1986-2004).
caatgtcaatttgatattt

SEQ ID NO: 480899 - DNA, 19 bp, Mus musculus
  siRNA target sequence for A430104C18Rik (NM_145931.1,2005-2023).
gtcgacatgaagttcgtta

SEQ ID NO: 480900 - DNA, 19 bp, Mus musculus
  siRNA target sequence for A430104C18Rik (NM_145931.1,2047-2065).
gcttctatgcccatagtct

SEQ ID NO: 480901 - DNA, 19 bp, Mus musculus
  siRNA target sequence for A430104C18Rik (NM_145931.1,2062-2080).
gtcttattgaactgaaagt

SEQ ID NO: 480902 - DNA, 19 bp, Mus musculus
  siRNA target sequence for A430104C18Rik (NM_145931.1,2081-2099).
ctggataatgcaaagtgaa

SEQ ID NO: 480903 - DNA, 19 bp, Mus musculus
  siRNA target sequence for A430104C18Rik (NM_145931.1,2101-2119).
gaggtatctcccatgatga

SEQ ID NO: 480904 - DNA, 19 bp, Mus musculus
  siRNA target sequence for A430104C18Rik (NM_145931.1,2124-2142).
gctcaacaatccaaacaat

SEQ ID NO: 480905 - DNA, 19 bp, Mus musculus
  siRNA target sequence for A430104C18Rik (NM_145931.1,2130-2148).
caatccaaacaatattgga

SEQ ID NO: 480906 - DNA, 19 bp, Mus musculus
  siRNA target sequence for A430104C18Rik (NM_145931.1,2180-2198).
ggtccttggtaatcaaata

SEQ ID NO: 480907 - DNA, 19 bp, Mus musculus
  siRNA target sequence for A430104C18Rik (NM_145931.1,2181-2199).
gtccttggtaatcaaataa

SEQ ID NO: 480908 - DNA, 19 bp, Mus musculus
  siRNA target sequence for A430104C18Rik (NM_145931.1,2211-2229).
cttaacatggagataaagt

SEQ ID NO: 480909 - DNA, 19 bp, Mus musculus
  siRNA target sequence for A430104C18Rik (NM_145931.1,2251-2269).
gaaatggccaagtcattga

SEQ ID NO: 480910 - DNA, 19 bp, Mus musculus
  siRNA target sequence for A430104C18Rik (NM_145931.1,2334-2352).
gcaatgagagcgatgtctt

SEQ ID NO: 480911 - DNA, 19 bp, Mus musculus
  siRNA target sequence for A430104C18Rik (NM_145931.1,2335-2353).
caatgagagcgatgtcttt

SEQ ID NO: 480912 - DNA, 19 bp, Mus musculus
  siRNA target sequence for A430104C18Rik (NM_145931.1,2339-2357).
gagagcgatgtcttttgaa

SEQ ID NO: 480913 - DNA, 19 bp, Mus musculus
  siRNA target sequence for A430104C18Rik (NM_145931.1,2344-2362).
cgatgtcttttgaacgtaa

SEQ ID NO: 480914 - DNA, 19 bp, Mus musculus
  siRNA target sequence for A430104C18Rik (NM_145931.1,2359-2377).
gtaagaagtggatgaacat

SEQ ID NO: 480915 - DNA, 19 bp, Mus musculus
  siRNA target sequence for A430104C18Rik (NM_145931.1,2380-2398).
gtcctctccccacaaagaa

SEQ ID NO: 480916 - DNA, 19 bp, Mus musculus
  siRNA target sequence for A430104C18Rik (NM_145931.1,2405-2423).
gcctttacagtttgatcta

SEQ ID NO: 480917 - DNA, 19 bp, Mus musculus
  siRNA target sequence for A430104C18Rik (NM_145931.1,2406-2424).
cctttacagtttgatctat

SEQ ID NO: 480918 - DNA, 19 bp, Mus musculus
  siRNA target sequence for A430104C18Rik (NM_145931.1,2421-2439).
ctatgcaaccatattgcta

SEQ ID NO: 480919 - DNA, 19 bp, Mus musculus
  siRNA target sequence for A430104C18Rik (NM_145931.1,2443-2461).
gaaaaaagtgtcagtatgt

SEQ ID NO: 480920 - DNA, 19 bp, Mus musculus
  siRNA target sequence for A430104C18Rik (NM_145931.1,2468-2486).
ctgttcctttgctcatagt

SEQ ID NO: 480921 - DNA, 19 bp, Mus musculus
  siRNA target sequence for A430104C18Rik (NM_145931.1,2497-2515).
gggaagtgtggacttacat

SEQ ID NO: 480922 - DNA, 19 bp, Mus musculus
  siRNA target sequence for A430104C18Rik (NM_145931.1,2506-2524).
ggacttacatgaaggataa

SEQ ID NO: 480923 - DNA, 19 bp, Mus musculus
  siRNA target sequence for A430104C18Rik (NM_145931.1,2509-2527).
cttacatgaaggataacaa

SEQ ID NO: 480924 - DNA, 19 bp, Mus musculus
  siRNA target sequence for A430104C18Rik (NM_145931.1,2799-2817).
cccactgggtacttcagta

SEQ ID NO: 480925 - DNA, 19 bp, Mus musculus
  siRNA target sequence for A430104C18Rik (NM_145931.1,2800-2818).
ccactgggtacttcagtat

SEQ ID NO: 480926 - DNA, 19 bp, Mus musculus
  siRNA target sequence for A430104C18Rik (NM_145931.1,2961-2979).
gccccaaatgataatgact

SEQ ID NO: 480927 - DNA, 19 bp, Mus musculus
  siRNA target sequence for A430104C18Rik (NM_145931.1,2962-2980).
ccccaaatgataatgactt

SEQ ID NO: 480928 - DNA, 19 bp, Mus musculus
  siRNA target sequence for A730012O14 (NM_177882.2,109-127).
ggttcccactgacttttga

SEQ ID NO: 480929 - DNA, 19 bp, Mus musculus
  siRNA target sequence for A730012O14 (NM_177882.2,126-144).
gaagatgtagccatttact

SEQ ID NO: 480930 - DNA, 19 bp, Mus musculus
  siRNA target sequence for A730012O14 (NM_177882.2,152-170).
gcaagagtggcaacactta

SEQ ID NO: 480931 - DNA, 19 bp, Mus musculus
  siRNA target sequence for A730012O14 (NM_177882.2,175-193).
cctggcagaaggaacttta

SEQ ID NO: 480932 - DNA, 19 bp, Mus musculus
  siRNA target sequence for A730012O14 (NM_177882.2,197-215).
gcaagtcatgagaaccaat

SEQ ID NO: 480933 - DNA, 19 bp, Mus musculus
  siRNA target sequence for A730012O14 (NM_177882.2,198-216).
caagtcatgagaaccaatt

SEQ ID NO: 480934 - DNA, 19 bp, Mus musculus
  siRNA target sequence for A730012O14 (NM_177882.2,227-245).
catctctctagataatgga

SEQ ID NO: 480935 - DNA, 19 bp, Mus musculus
  siRNA target sequence for A730012O14 (NM_177882.2,248-266).
gcccaaaccagaactaata

SEQ ID NO: 480936 - DNA, 19 bp, Mus musculus
  siRNA target sequence for A730012O14 (NM_177882.2,296-314).
cggcagctggggagaaaaa

SEQ ID NO: 480937 - DNA, 19 bp, Mus musculus
  siRNA target sequence for A730012O14 (NM_177882.2,334-352).
ctcactgctctatagatga

SEQ ID NO: 480938 - DNA, 19 bp, Mus musculus
  siRNA target sequence for A730012O14 (NM_177882.2,370-388).
ccattgaggaacagttact

SEQ ID NO: 480939 - DNA, 19 bp, Mus musculus
  siRNA target sequence for A730012O14 (NM_177882.2,513-531).
caaggcatcagtcttgtaa

SEQ ID NO: 480940 - DNA, 19 bp, Mus musculus
  siRNA target sequence for A730012O14 (NM_177882.2,633-651).
cctggcttgcagagagttt

SEQ ID NO: 480941 - DNA, 19 bp, Mus musculus
  siRNA target sequence for A730012O14 (NM_177882.2,740-758).
ctcaaagagccggtcatat

SEQ ID NO: 480942 - DNA, 19 bp, Mus musculus
  siRNA target sequence for A730012O14 (NM_177882.2,778-796).
gcagacaggctgatgctaa

SEQ ID NO: 480943 - DNA, 19 bp, Mus musculus
  siRNA target sequence for A730012O14 (NM_177882.2,897-915).
cagtgccctaagtgcaaaa

SEQ ID NO: 480944 - DNA, 19 bp, Mus musculus
  siRNA target sequence for A730012O14 (NM_177882.2,1331-1349).
gcttcgtggagaaaaacca

SEQ ID NO: 480945 - DNA, 19 bp, Mus musculus
  siRNA target sequence for A730012O14 (NM_177882.2,1371-1389).
caaggattcaccaagcatt

SEQ ID NO: 480946 - DNA, 19 bp, Mus musculus
  siRNA target sequence for A730012O14 (NM_177882.2,1415-1433).
cctcagcggggagaaatct

SEQ ID NO: 480947 - DNA, 19 bp, Mus musculus
  siRNA target sequence for A730012O14 (NM_177882.2,1416-1434).
ctcagcggggagaaatctt

SEQ ID NO: 480948 - DNA, 19 bp, Mus musculus
  siRNA target sequence for A730012O14 (NM_177882.2,1515-1533).
cccttccaatgcacaatgt

SEQ ID NO: 480949 - DNA, 19 bp, Mus musculus
  siRNA target sequence for A730012O14 (NM_177882.2,1565-1583).
gagggcccaccaactacaa

SEQ ID NO: 480950 - DNA, 19 bp, Mus musculus
  siRNA target sequence for A730012O14 (NM_177882.2,1568-1586).
ggcccaccaactacaacat

SEQ ID NO: 480951 - DNA, 19 bp, Mus musculus
  siRNA target sequence for A730012O14 (NM_177882.2,1789-1807).
gcaagggctttataagaca

SEQ ID NO: 480952 - DNA, 19 bp, Mus musculus
  siRNA target sequence for A730012O14 (NM_177882.2,2010-2028).
gggcagatgccgttctctt

SEQ ID NO: 480953 - DNA, 19 bp, Mus musculus
  siRNA target sequence for A730012O14 (NM_177882.2,2043-2061).
ggctttgccaagcaatcta

SEQ ID NO: 480954 - DNA, 19 bp, Mus musculus
  siRNA target sequence for A730012O14 (NM_177882.2,2045-2063).
ctttgccaagcaatctaaa

SEQ ID NO: 480955 - DNA, 19 bp, Mus musculus
  siRNA target sequence for A730012O14 (NM_177882.2,2059-2077).
ctaaactcgtggaacacat

SEQ ID NO: 480956 - DNA, 19 bp, Mus musculus
  siRNA target sequence for A730012O14 (NM_177882.2,2123-2141).
caagagcttccgattgaaa

SEQ ID NO: 480957 - DNA, 19 bp, Mus musculus
  siRNA target sequence for A730012O14 (NM_177882.2,2192-2210).
ctgccctgaatgtgataaa

SEQ ID NO: 480958 - DNA, 19 bp, Mus musculus
  siRNA target sequence for A730012O14 (NM_177882.2,2361-2379).
cgtgaacctgacattaaga

SEQ ID NO: 480959 - DNA, 19 bp, Mus musculus
  siRNA target sequence for A830058L05 (NM_172486.1,334-352).
gacagattctcctggaaat

SEQ ID NO: 480960 - DNA, 19 bp, Mus musculus
  siRNA target sequence for A830058L05 (NM_172486.1,433-451).
gaggtctttgtacatcaat

SEQ ID NO: 480961 - DNA, 19 bp, Mus musculus
  siRNA target sequence for A830058L05 (NM_172486.1,487-505).
ggagaactattgtatacgt

SEQ ID NO: 480962 - DNA, 19 bp, Mus musculus
  siRNA target sequence for A830058L05 (NM_172486.1,493-511).
ctattgtatacgtgatact

SEQ ID NO: 480963 - DNA, 19 bp, Mus musculus
  siRNA target sequence for A830058L05 (NM_172486.1,593-611).
gcactttataaaacaagta

SEQ ID NO: 480964 - DNA, 19 bp, Mus musculus
  siRNA target sequence for A830058L05 (NM_172486.1,648-666).
gtgacagggatgtgtctaa

SEQ ID NO: 480965 - DNA, 19 bp, Mus musculus
  siRNA target sequence for A830058L05 (NM_172486.1,710-728).
gaagaaccgtacgaatcta

SEQ ID NO: 480966 - DNA, 19 bp, Mus musculus
  siRNA target sequence for A830058L05 (NM_172486.1,716-734).
ccgtacgaatctaaacact

SEQ ID NO: 480967 - DNA, 19 bp, Mus musculus
  siRNA target sequence for A830058L05 (NM_172486.1,1068-1086).
gtggaatgtcgtttcctta

SEQ ID NO: 480968 - DNA, 19 bp, Mus musculus
  siRNA target sequence for A830058L05 (NM_172486.1,1246-1264).
ctttagacaatgtgcaaat

SEQ ID NO: 480969 - DNA, 19 bp, Mus musculus
  siRNA target sequence for A830058L05 (NM_172486.1,1251-1269).
gacaatgtgcaaatcttaa

SEQ ID NO: 480970 - DNA, 19 bp, Mus musculus
  siRNA target sequence for A830058L05 (NM_172486.1,1337-1355).
cagtcctcatcccttaaaa

SEQ ID NO: 480971 - DNA, 19 bp, Mus musculus
  siRNA target sequence for A830058L05 (NM_172486.1,1497-1515).
cctttaacagttgtacaaa

SEQ ID NO: 480972 - DNA, 19 bp, Mus musculus
  siRNA target sequence for A830058L05 (NM_172486.1,1575-1593).
gaaaggcatttccttacat

SEQ ID NO: 480973 - DNA, 19 bp, Mus musculus
  siRNA target sequence for A830058L05 (NM_172486.1,1750-1768).
ctttaaccaatgtacaaat

SEQ ID NO: 480974 - DNA, 19 bp, Mus musculus
  siRNA target sequence for A830058L05 (NM_172486.1,2013-2031).
gtgcatcccttaaaacaca

SEQ ID NO: 480975 - DNA, 19 bp, Mus musculus
  siRNA target sequence for AA545217 (NM_013726.1,166-184).
gaatcgaccatccttgaaa

SEQ ID NO: 480976 - DNA, 19 bp, Mus musculus
  siRNA target sequence for AA545217 (NM_013726.1,187-205).
cctgaaggccgataataga

SEQ ID NO: 480977 - DNA, 19 bp, Mus musculus
  siRNA target sequence for AA545217 (NM_013726.1,195-213).
ccgataatagactggaaaa

SEQ ID NO: 480978 - DNA, 19 bp, Mus musculus
  siRNA target sequence for AA545217 (NM_013726.1,196-214).
cgataatagactggaaaaa

SEQ ID NO: 480979 - DNA, 19 bp, Mus musculus
  siRNA target sequence for AA545217 (NM_013726.1,251-269).
cttgacttgccttctatca

SEQ ID NO: 480980 - DNA, 19 bp, Mus musculus
  siRNA target sequence for AA545217 (NM_013726.1,268-286).
caccatatgtgagaaacta

SEQ ID NO: 480981 - DNA, 19 bp, Mus musculus
  siRNA target sequence for AA545217 (NM_013726.1,271-289).
catatgtgagaaactacaa

SEQ ID NO: 480982 - DNA, 19 bp, Mus musculus
  siRNA target sequence for AA545217 (NM_013726.1,307-325).
cggagggcgagttgaagaa

SEQ ID NO: 480983 - DNA, 19 bp, Mus musculus
  siRNA target sequence for AA545217 (NM_013726.1,308-326).
ggagggcgagttgaagaat

SEQ ID NO: 480984 - DNA, 19 bp, Mus musculus
  siRNA target sequence for AA545217 (NM_013726.1,312-330).
ggcgagttgaagaatttct

SEQ ID NO: 480985 - DNA, 19 bp, Mus musculus
  siRNA target sequence for AA545217 (NM_013726.1,323-341).
gaatttctcagcaaagata

SEQ ID NO: 480986 - DNA, 19 bp, Mus musculus
  siRNA target sequence for AA545217 (NM_013726.1,333-351).
gcaaagatatcagttactt

SEQ ID NO: 480987 - DNA, 19 bp, Mus musculus
  siRNA target sequence for AA545217 (NM_013726.1,334-352).
caaagatatcagttacttt

SEQ ID NO: 480988 - DNA, 19 bp, Mus musculus
  siRNA target sequence for AA545217 (NM_013726.1,464-482).
gatggaagttcctttaagt

SEQ ID NO: 480989 - DNA, 19 bp, Mus musculus
  siRNA target sequence for AA545217 (NM_013726.1,481-499).
gtctcaagacagagtatgt

SEQ ID NO: 480990 - DNA, 19 bp, Mus musculus
  siRNA target sequence for AA545217 (NM_013726.1,498-516).
gtttgagccgaggaaaatt

SEQ ID NO: 480991 - DNA, 19 bp, Mus musculus
  siRNA target sequence for AA545217 (NM_013726.1,502-520).
gagccgaggaaaattgtta

SEQ ID NO: 480992 - DNA, 19 bp, Mus musculus
  siRNA target sequence for AA545217 (NM_013726.1,531-549).
ctgtgaaggatcatgattt

SEQ ID NO: 480993 - DNA, 19 bp, Mus musculus
  siRNA target sequence for AA545217 (NM_013726.1,554-572).
cctgctaatagtatattat

SEQ ID NO: 480994 - DNA, 19 bp, Mus musculus
  siRNA target sequence for AA545217 (NM_013726.1,557-575).
gctaatagtatattatcaa

SEQ ID NO: 480995 - DNA, 19 bp, Mus musculus
  siRNA target sequence for AA545217 (NM_013726.1,558-576).
ctaatagtatattatcaaa

SEQ ID NO: 480996 - DNA, 19 bp, Mus musculus
  siRNA target sequence for AA545217 (NM_013726.1,589-607).
gggagtaaagattcttcat

SEQ ID NO: 480997 - DNA, 19 bp, Mus musculus
  siRNA target sequence for AA545217 (NM_013726.1,605-623).
catattgatgacattcgat

SEQ ID NO: 480998 - DNA, 19 bp, Mus musculus
  siRNA target sequence for AA545217 (NM_013726.1,611-629).
gatgacattcgatactaca

SEQ ID NO: 480999 - DNA, 19 bp, Mus musculus
  siRNA target sequence for AA545217 (NM_013726.1,650-668).
ctgagtgcactcaagaaat

SEQ ID NO: 481000 - DNA, 19 bp, Mus musculus
  siRNA target sequence for AA545217 (NM_013726.1,704-722).
ggccctggaatacaaaaga

SEQ ID NO: 481001 - DNA, 19 bp, Mus musculus
  siRNA target sequence for AA545217 (NM_013726.1,777-795).
gctacaggccattttacct

SEQ ID NO: 481002 - DNA, 19 bp, Mus musculus
  siRNA target sequence for AA545217 (NM_013726.1,807-825).
gtctgccgtgtataaacta

SEQ ID NO: 481003 - DNA, 19 bp, Mus musculus
  siRNA target sequence for AA545217 (NM_013726.1,809-827).
ctgccgtgtataaactact

SEQ ID NO: 481004 - DNA, 19 bp, Mus musculus
  siRNA target sequence for AA545217 (NM_013726.1,811-829).
gccgtgtataaactacttt

SEQ ID NO: 481005 - DNA, 19 bp, Mus musculus
  siRNA target sequence for AA545217 (NM_013726.1,816-834).
gtataaactactttcttca

SEQ ID NO: 481006 - DNA, 19 bp, Mus musculus
  siRNA target sequence for AA545217 (NM_013726.1,838-856).
gccctgcagtccgtttgat

SEQ ID NO: 481007 - DNA, 19 bp, Mus musculus
  siRNA target sequence for AA545217 (NM_013726.1,839-857).
ccctgcagtccgtttgata

SEQ ID NO: 481008 - DNA, 19 bp, Mus musculus
  siRNA target sequence for AA545217 (NM_013726.1,841-859).
ctgcagtccgtttgatata

SEQ ID NO: 481009 - DNA, 19 bp, Mus musculus
  siRNA target sequence for AA545217 (NM_013726.1,843-861).
gcagtccgtttgatataga

SEQ ID NO: 481010 - DNA, 19 bp, Mus musculus
  siRNA target sequence for AA545217 (NM_013726.1,867-885).
catccagcgtccagaaaca

SEQ ID NO: 481011 - DNA, 19 bp, Mus musculus
  siRNA target sequence for AA545217 (NM_013726.1,888-906).
ctcagcccaagctcagaat

SEQ ID NO: 481012 - DNA, 19 bp, Mus musculus
  siRNA target sequence for AA545217 (NM_013726.1,890-908).
cagcccaagctcagaatta

SEQ ID NO: 481013 - DNA, 19 bp, Mus musculus
  siRNA target sequence for AA545217 (NM_013726.1,927-945).
gtggaaccccagttcaact

SEQ ID NO: 481014 - DNA, 19 bp, Mus musculus
  siRNA target sequence for AA545217 (NM_013726.1,936-954).
cagttcaactccagttgaa

SEQ ID NO: 481015 - DNA, 19 bp, Mus musculus
  siRNA target sequence for AA545217 (NM_013726.1,978-996).
gtgaatgttgcttacagaa

SEQ ID NO: 481016 - DNA, 19 bp, Mus musculus
  siRNA target sequence for AA545217 (NM_013726.1,1051-1069).
gagtaaccagtatcaagtt

SEQ ID NO: 481017 - DNA, 19 bp, Mus musculus
  siRNA target sequence for AA545217 (NM_013726.1,1057-1075).
ccagtatcaagttgttgat

SEQ ID NO: 481018 - DNA, 19 bp, Mus musculus
  siRNA target sequence for AA545217 (NM_013726.1,1086-1104).
ctcagttagttttcgattt

SEQ ID NO: 481019 - DNA, 19 bp, Mus musculus
  siRNA target sequence for AA545217 (NM_013726.1,1270-1288).
caagccgaactctcagtat

SEQ ID NO: 481020 - DNA, 19 bp, Mus musculus
  siRNA target sequence for AA545217 (NM_013726.1,1273-1291).
gccgaactctcagtatgaa

SEQ ID NO: 481021 - DNA, 19 bp, Mus musculus
  siRNA target sequence for AA545217 (NM_013726.1,1331-1349).
gagcccacaacctattctt

SEQ ID NO: 481022 - DNA, 19 bp, Mus musculus
  siRNA target sequence for AA545217 (NM_013726.1,1382-1400).
gtgagcatgttcaatgcaa

SEQ ID NO: 481023 - DNA, 19 bp, Mus musculus
  siRNA target sequence for AA545217 (NM_013726.1,1525-1543).
gtcatgtggacaagtttct

SEQ ID NO: 481024 - DNA, 19 bp, Mus musculus
  siRNA target sequence for AA545217 (NM_013726.1,1549-1567).
cagcacagaaagtaatcta

SEQ ID NO: 481025 - DNA, 19 bp, Mus musculus
  siRNA target sequence for AA545217 (NM_013726.1,1577-1595).
cagttagctgcagacatta

SEQ ID NO: 481026 - DNA, 19 bp, Mus musculus
  siRNA target sequence for AA545217 (NM_013726.1,1627-1645).
gggctttcatgttgtgata

SEQ ID NO: 481027 - DNA, 19 bp, Mus musculus
  siRNA target sequence for AA545217 (NM_013726.1,1658-1676).
gacctggtggcattaaata

SEQ ID NO: 481028 - DNA, 19 bp, Mus musculus
  siRNA target sequence for AA545217 (NM_013726.1,1664-1682).
gtggcattaaatacatcaa

SEQ ID NO: 481029 - DNA, 19 bp, Mus musculus
  siRNA target sequence for AA545217 (NM_013726.1,1786-1804).
gcggaaagtgagaatgcta

SEQ ID NO: 481030 - DNA, 19 bp, Mus musculus
  siRNA target sequence for AA545217 (NM_013726.1,1801-1819).
gctattagggcaacagaaa

SEQ ID NO: 481031 - DNA, 19 bp, Mus musculus
  siRNA target sequence for AA545217 (NM_013726.1,1827-1845).
ctgaaccgagtgctgaatt

SEQ ID NO: 481032 - DNA, 19 bp, Mus musculus
  siRNA target sequence for AA545217 (NM_013726.1,1832-1850).
ccgagtgctgaattggata

SEQ ID NO: 481033 - DNA, 19 bp, Mus musculus
  siRNA target sequence for AA545217 (NM_013726.1,1833-1851).
cgagtgctgaattggataa

SEQ ID NO: 481034 - DNA, 19 bp, Mus musculus
  siRNA target sequence for AA545217 (NM_013726.1,1834-1852).
gagtgctgaattggataaa

SEQ ID NO: 481035 - DNA, 19 bp, Mus musculus
  siRNA target sequence for AA545217 (NM_013726.1,1899-1917).
caccagtacagtctctatt

SEQ ID NO: 481036 - DNA, 19 bp, Mus musculus
  siRNA target sequence for AA545217 (NM_013726.1,1909-1927).
gtctctattggaccttttt

SEQ ID NO: 481037 - DNA, 19 bp, Mus musculus
  siRNA target sequence for AA545217 (NM_013726.1,1928-1946).
cagacaagcgaggagaaat

SEQ ID NO: 481038 - DNA, 19 bp, Mus musculus
  siRNA target sequence for AA545217 (NM_013726.1,1930-1948).
gacaagcgaggagaaatca

SEQ ID NO: 481039 - DNA, 19 bp, Mus musculus
  siRNA target sequence for AA545217 (NM_013726.1,1936-1954).
cgaggagaaatcagaattt

SEQ ID NO: 481040 - DNA, 19 bp, Mus musculus
  siRNA target sequence for AA545217 (NM_013726.1,1972-1990).
cactgaaaacagtggaata

SEQ ID NO: 481041 - DNA, 19 bp, Mus musculus
  siRNA target sequence for AA545217 (NM_013726.1,1983-2001).
gtggaatatgtgatgtttt

SEQ ID NO: 481042 - DNA, 19 bp, Mus musculus
  siRNA target sequence for AA545217 (NM_013726.1,2064-2082).
cttctgcattcgttggatt

SEQ ID NO: 481043 - DNA, 19 bp, Mus musculus
  siRNA target sequence for AA792890 (NM_080855.1,204-222).
gctcggcttgccacaagat

SEQ ID NO: 481044 - DNA, 19 bp, Mus musculus
  siRNA target sequence for AA792890 (NM_080855.1,265-283).
cctggagaatgcattgcat

SEQ ID NO: 481045 - DNA, 19 bp, Mus musculus
  siRNA target sequence for AA792890 (NM_080855.1,371-389).
gggttgtcacacacgaaaa

SEQ ID NO: 481046 - DNA, 19 bp, Mus musculus
  siRNA target sequence for AA792890 (NM_080855.1,373-391).
gttgtcacacacgaaaaat

SEQ ID NO: 481047 - DNA, 19 bp, Mus musculus
  siRNA target sequence for AA792890 (NM_080855.1,416-434).
gaggtcttatggtctgatt

SEQ ID NO: 481048 - DNA, 19 bp, Mus musculus
  siRNA target sequence for AA792890 (NM_080855.1,418-436).
ggtcttatggtctgattct

SEQ ID NO: 481049 - DNA, 19 bp, Mus musculus
  siRNA target sequence for AA792890 (NM_080855.1,476-494).
gaatttatttcaaagctat

SEQ ID NO: 481050 - DNA, 19 bp, Mus musculus
  siRNA target sequence for AA792890 (NM_080855.1,546-564).
gcccagattccttctatgt

SEQ ID NO: 481051 - DNA, 19 bp, Mus musculus
  siRNA target sequence for AA792890 (NM_080855.1,555-573).
ccttctatgtggaacgtaa

SEQ ID NO: 481052 - DNA, 19 bp, Mus musculus
  siRNA target sequence for AA792890 (NM_080855.1,559-577).
ctatgtggaacgtaaccat

SEQ ID NO: 481053 - DNA, 19 bp, Mus musculus
  siRNA target sequence for AA792890 (NM_080855.1,641-659).
cacgttaggaagttcttca

SEQ ID NO: 481054 - DNA, 19 bp, Mus musculus
  siRNA target sequence for AA792890 (NM_080855.1,949-967).
ggagcagaatgggatttta

SEQ ID NO: 481055 - DNA, 19 bp, Mus musculus
  siRNA target sequence for AA792890 (NM_080855.1,994-1012).
caagtattaccctgtcttt

SEQ ID NO: 481056 - DNA, 19 bp, Mus musculus
  siRNA target sequence for AA792890 (NM_080855.1,1441-1459).
gatgctgctggctcacttt

SEQ ID NO: 481057 - DNA, 19 bp, Mus musculus
  siRNA target sequence for AA792890 (NM_080855.1,1687-1705).
gggccctggtcctagaagt

SEQ ID NO: 481058 - DNA, 19 bp, Mus musculus
  siRNA target sequence for AA792890 (NM_080855.1,2053-2071).
cagcgtgccccctgcaata

SEQ ID NO: 481059 - DNA, 19 bp, Mus musculus
  siRNA target sequence for AA792890 (NM_080855.1,2055-2073).
gcgtgccccctgcaataat

SEQ ID NO: 481060 - DNA, 19 bp, Mus musculus
  siRNA target sequence for AA792890 (NM_080855.1,2057-2075).
gtgccccctgcaataatga

SEQ ID NO: 481061 - DNA, 19 bp, Mus musculus
  siRNA target sequence for AA792890 (NM_080855.1,2160-2178).
gcttctgcgccaatagcaa

SEQ ID NO: 481062 - DNA, 19 bp, Mus musculus
  siRNA target sequence for AA792890 (NM_080855.1,2279-2297).
cccgaaagcagcttctaca

SEQ ID NO: 481063 - DNA, 19 bp, Mus musculus
  siRNA target sequence for AA792890 (NM_080855.1,2474-2492).
gtcagctatgccaactact

SEQ ID NO: 481064 - DNA, 19 bp, Mus musculus
  siRNA target sequence for AA792890 (NM_080855.1,2681-2699).
ccacccatgcagaacttca

SEQ ID NO: 481065 - DNA, 19 bp, Mus musculus
  siRNA target sequence for AA792890 (NM_080855.1,2848-2866).
caaccggcaaggaactttt

SEQ ID NO: 481066 - DNA, 19 bp, Mus musculus
  siRNA target sequence for AA792890 (NM_080855.1,2852-2870).
cggcaaggaacttttaggt

SEQ ID NO: 481067 - DNA, 19 bp, Mus musculus
  siRNA target sequence for AA792890 (NM_080855.1,2853-2871).
ggcaaggaacttttaggtt

SEQ ID NO: 481068 - DNA, 19 bp, Mus musculus
  siRNA target sequence for Aars (NM_146217.3,349-367).
cgagagcggtttataaatt

SEQ ID NO: 481069 - DNA, 19 bp, Mus musculus
  siRNA target sequence for Aars (NM_146217.3,350-368).
gagagcggtttataaattt

SEQ ID NO: 481070 - DNA, 19 bp, Mus musculus
  siRNA target sequence for Aars (NM_146217.3,352-370).
gagcggtttataaatttct

SEQ ID NO: 481071 - DNA, 19 bp, Mus musculus
  siRNA target sequence for Aars (NM_146217.3,470-488).
ccatcttcctaaacacaat

SEQ ID NO: 481072 - DNA, 19 bp, Mus musculus
  siRNA target sequence for Aars (NM_146217.3,592-610).
gtctaccaccacactttct

SEQ ID NO: 481073 - DNA, 19 bp, Mus musculus
  siRNA target sequence for Aars (NM_146217.3,598-616).
caccacactttctttgaga

SEQ ID NO: 481074 - DNA, 19 bp, Mus musculus
  siRNA target sequence for Aars (NM_146217.3,637-655).
ggggactatttcaaggaat

SEQ ID NO: 481075 - DNA, 19 bp, Mus musculus
  siRNA target sequence for Aars (NM_146217.3,638-656).
gggactatttcaaggaatt

SEQ ID NO: 481076 - DNA, 19 bp, Mus musculus
  siRNA target sequence for Aars (NM_146217.3,693-711).
gtttggtattccagttgaa

SEQ ID NO: 481077 - DNA, 19 bp, Mus musculus
  siRNA target sequence for Aars (NM_146217.3,704-722).
cagttgaaagactctatgt

SEQ ID NO: 481078 - DNA, 19 bp, Mus musculus
  siRNA target sequence for Aars (NM_146217.3,776-794).
gacagatttggcaaaattt

SEQ ID NO: 481079 - DNA, 19 bp, Mus musculus
  siRNA target sequence for Aars (NM_146217.3,878-896).
gcagcgagatccactatga

SEQ ID NO: 481080 - DNA, 19 bp, Mus musculus
  siRNA target sequence for Aars (NM_146217.3,1346-1364).
ggggtttcttcgctacatt

SEQ ID NO: 481081 - DNA, 19 bp, Mus musculus
  siRNA target sequence for Aars (NM_146217.3,1356-1374).
cgctacattggttgatgtt

SEQ ID NO: 481082 - DNA, 19 bp, Mus musculus
  siRNA target sequence for Aars (NM_146217.3,1366-1384).
gttgatgttgtcgttcaat

SEQ ID NO: 481083 - DNA, 19 bp, Mus musculus
  siRNA target sequence for Aars (NM_146217.3,1425-1443).
gatggtgaaggacatcatt

SEQ ID NO: 481084 - DNA, 19 bp, Mus musculus
  siRNA target sequence for Aars (NM_146217.3,1489-1507).
cgcatcctggaccgaaaaa

SEQ ID NO: 481085 - DNA, 19 bp, Mus musculus
  siRNA target sequence for Aars (NM_146217.3,1490-1508).
gcatcctggaccgaaaaat

SEQ ID NO: 481086 - DNA, 19 bp, Mus musculus
  siRNA target sequence for Aars (NM_146217.3,1491-1509).
catcctggaccgaaaaatt

SEQ ID NO: 481087 - DNA, 19 bp, Mus musculus
  siRNA target sequence for Aars (NM_146217.3,1495-1513).
ctggaccgaaaaattcaga

SEQ ID NO: 481088 - DNA, 19 bp, Mus musculus
  siRNA target sequence for Aars (NM_146217.3,1547-1565).
ccgcttggctcctctatga

SEQ ID NO: 481089 - DNA, 19 bp, Mus musculus
  siRNA target sequence for Aars (NM_146217.3,1549-1567).
gcttggctcctctatgata

SEQ ID NO: 481090 - DNA, 19 bp, Mus musculus
  siRNA target sequence for Aars (NM_146217.3,1553-1571).
ggctcctctatgatactta

SEQ ID NO: 481091 - DNA, 19 bp, Mus musculus
  siRNA target sequence for Aars (NM_146217.3,1557-1575).
cctctatgatacttatgga

SEQ ID NO: 481092 - DNA, 19 bp, Mus musculus
  siRNA target sequence for Aars (NM_146217.3,1615-1633).
ggcctggtggtagatatga

SEQ ID NO: 481093 - DNA, 19 bp, Mus musculus
  siRNA target sequence for Aars (NM_146217.3,1713-1731).
ggacatttacgctattgaa

SEQ ID NO: 481094 - DNA, 19 bp, Mus musculus
  siRNA target sequence for Aars (NM_146217.3,1752-1770).
ggaggccacagatgattct

SEQ ID NO: 481095 - DNA, 19 bp, Mus musculus
  siRNA target sequence for Aars (NM_146217.3,1762-1780).
gatgattctccaaagtata

SEQ ID NO: 481096 - DNA, 19 bp, Mus musculus
  siRNA target sequence for Aars (NM_146217.3,1765-1783).
gattctccaaagtataact

SEQ ID NO: 481097 - DNA, 19 bp, Mus musculus
  siRNA target sequence for Aars (NM_146217.3,1840-1858).
gctctgcgtcgggaaaaga

SEQ ID NO: 481098 - DNA, 19 bp, Mus musculus
  siRNA target sequence for Aars (NM_146217.3,1841-1859).
ctctgcgtcgggaaaagat

SEQ ID NO: 481099 - DNA, 19 bp, Mus musculus
  siRNA target sequence for Aars (NM_146217.3,1843-1861).
ctgcgtcgggaaaagatgt

SEQ ID NO: 481100 - DNA, 19 bp, Mus musculus
  siRNA target sequence for Aars (NM_146217.3,1845-1863).
gcgtcgggaaaagatgttt

SEQ ID NO: 481101 - DNA, 19 bp, Mus musculus
  siRNA target sequence for Aars (NM_146217.3,1984-2002).
gaggacaaaaccgagttta

SEQ ID NO: 481102 - DNA, 19 bp, Mus musculus
  siRNA target sequence for Aars (NM_146217.3,1994-2012).
ccgagtttacagtgaagaa

SEQ ID NO: 481103 - DNA, 19 bp, Mus musculus
  siRNA target sequence for Aars (NM_146217.3,2037-2055).
gctgcacataggaacgata

SEQ ID NO: 481104 - DNA, 19 bp, Mus musculus
  siRNA target sequence for Aars (NM_146217.3,2038-2056).
ctgcacataggaacgatat

SEQ ID NO: 481105 - DNA, 19 bp, Mus musculus
  siRNA target sequence for Aars (NM_146217.3,2040-2058).
gcacataggaacgatatat

SEQ ID NO: 481106 - DNA, 19 bp, Mus musculus
  siRNA target sequence for Aars (NM_146217.3,2043-2061).
cataggaacgatatatggt

SEQ ID NO: 481107 - DNA, 19 bp, Mus musculus
  siRNA target sequence for Aars (NM_146217.3,2077-2095).
gatcaagtccggctgttta

SEQ ID NO: 481108 - DNA, 19 bp, Mus musculus
  siRNA target sequence for Aars (NM_146217.3,2138-2156).
ctacacacatcctcaactt

SEQ ID NO: 481109 - DNA, 19 bp, Mus musculus
  siRNA target sequence for Aars (NM_146217.3,2179-2197).
gaagcggaccagaaaggtt

SEQ ID NO: 481110 - DNA, 19 bp, Mus musculus
  siRNA target sequence for Aars (NM_146217.3,2212-2230).
gaccgccttcggtttgact

SEQ ID NO: 481111 - DNA, 19 bp, Mus musculus
  siRNA target sequence for Aars (NM_146217.3,2246-2264).
ccatgtccacccagcaaat

SEQ ID NO: 481112 - DNA, 19 bp, Mus musculus
  siRNA target sequence for Aars (NM_146217.3,2484-2502).
ctgtggaggaacacatcta

SEQ ID NO: 481113 - DNA, 19 bp, Mus musculus
  siRNA target sequence for Aars (NM_146217.3,2513-2531).
gccacgcaggcgcttttgt

SEQ ID NO: 481114 - DNA, 19 bp, Mus musculus
  siRNA target sequence for Aars (NM_146217.3,2515-2533).
cacgcaggcgcttttgtga

SEQ ID NO: 481115 - DNA, 19 bp, Mus musculus
  siRNA target sequence for Aars (NM_146217.3,2521-2539).
ggcgcttttgtgatagtga

SEQ ID NO: 481116 - DNA, 19 bp, Mus musculus
  siRNA target sequence for Aars (NM_146217.3,2559-2577).
gggtatccggaggattgtt

SEQ ID NO: 481117 - DNA, 19 bp, Mus musculus
  siRNA target sequence for Aars (NM_146217.3,2685-2703).
ggacgtgcagagggaaatt

SEQ ID NO: 481118 - DNA, 19 bp, Mus musculus
  siRNA target sequence for Aars (NM_146217.3,2688-2706).
cgtgcagagggaaattgct

SEQ ID NO: 481119 - DNA, 19 bp, Mus musculus
  siRNA target sequence for Aars (NM_146217.3,2739-2757).
cccccagtggcagaaagat

SEQ ID NO: 481120 - DNA, 19 bp, Mus musculus
  siRNA target sequence for Aars (NM_146217.3,2830-2848).
cagaagcgagtgttagaga

SEQ ID NO: 481121 - DNA, 19 bp, Mus musculus
  siRNA target sequence for Adam5 (NM_007401.1,85-103).
caccctgccgacaactgaa

SEQ ID NO: 481122 - DNA, 19 bp, Mus musculus
  siRNA target sequence for Adam5 (NM_007401.1,93-111).
cgacaactgaacctgaaaa

SEQ ID NO: 481123 - DNA, 19 bp, Mus musculus
  siRNA target sequence for Adam5 (NM_007401.1,96-114).
caactgaacctgaaaagat

SEQ ID NO: 481124 - DNA, 19 bp, Mus musculus
  siRNA target sequence for Adam5 (NM_007401.1,101-119).
gaacctgaaaagatctcat

SEQ ID NO: 481125 - DNA, 19 bp, Mus musculus
  siRNA target sequence for Adam5 (NM_007401.1,135-153).
cagatgcagaagaccatat

SEQ ID NO: 481126 - DNA, 19 bp, Mus musculus
  siRNA target sequence for Adam5 (NM_007401.1,146-164).
gaccatatggcttatctta

SEQ ID NO: 481127 - DNA, 19 bp, Mus musculus
  siRNA target sequence for Adam5 (NM_007401.1,148-166).
ccatatggcttatcttatt

SEQ ID NO: 481128 - DNA, 19 bp, Mus musculus
  siRNA target sequence for Adam5 (NM_007401.1,154-172).
ggcttatcttattacaata

SEQ ID NO: 481129 - DNA, 19 bp, Mus musculus
  siRNA target sequence for Adam5 (NM_007401.1,155-173).
gcttatcttattacaataa

SEQ ID NO: 481130 - DNA, 19 bp, Mus musculus
  siRNA target sequence for Adam5 (NM_007401.1,182-200).
ccccatttcatccatctta

SEQ ID NO: 481131 - DNA, 19 bp, Mus musculus
  siRNA target sequence for Adam5 (NM_007401.1,240-258).
cttacgacagaaatgatgt

SEQ ID NO: 481132 - DNA, 19 bp, Mus musculus
  siRNA target sequence for Adam5 (NM_007401.1,273-291).
ctttgtcagctctggaaaa

SEQ ID NO: 481133 - DNA, 19 bp, Mus musculus
  siRNA target sequence for Adam5 (NM_007401.1,281-299).
gctctggaaaattgcaatt

SEQ ID NO: 481134 - DNA, 19 bp, Mus musculus
  siRNA target sequence for Adam5 (NM_007401.1,284-302).
ctggaaaattgcaattaca

SEQ ID NO: 481135 - DNA, 19 bp, Mus musculus
  siRNA target sequence for Adam5 (NM_007401.1,295-313).
caattacaatggatatgtt

SEQ ID NO: 481136 - DNA, 19 bp, Mus musculus
  siRNA target sequence for Adam5 (NM_007401.1,314-332).
gcaggtttcccaaactcta

SEQ ID NO: 481137 - DNA, 19 bp, Mus musculus
  siRNA target sequence for Adam5 (NM_007401.1,315-333).
caggtttcccaaactctat

SEQ ID NO: 481138 - DNA, 19 bp, Mus musculus
  siRNA target sequence for Adam5 (NM_007401.1,354-372).
caggactcaggggaatcat

SEQ ID NO: 481139 - DNA, 19 bp, Mus musculus
  siRNA target sequence for Adam5 (NM_007401.1,359-377).
ctcaggggaatcatacagt

SEQ ID NO: 481140 - DNA, 19 bp, Mus musculus
  siRNA target sequence for Adam5 (NM_007401.1,365-383).
ggaatcatacagtttgaaa

SEQ ID NO: 481141 - DNA, 19 bp, Mus musculus
  siRNA target sequence for Adam5 (NM_007401.1,479-497).
ggaaagaatcagtcataca

SEQ ID NO: 481142 - DNA, 19 bp, Mus musculus
  siRNA target sequence for Adam5 (NM_007401.1,498-516).
gttggtttgacgaatcaga

SEQ ID NO: 481143 - DNA, 19 bp, Mus musculus
  siRNA target sequence for Adam5 (NM_007401.1,501-519).
ggtttgacgaatcagatta

SEQ ID NO: 481144 - DNA, 19 bp, Mus musculus
  siRNA target sequence for Adam5 (NM_007401.1,506-524).
gacgaatcagattatcaat

SEQ ID NO: 481145 - DNA, 19 bp, Mus musculus
  siRNA target sequence for Adam5 (NM_007401.1,521-539).
caattccggagtaacatga

SEQ ID NO: 481146 - DNA, 19 bp, Mus musculus
  siRNA target sequence for Adam5 (NM_007401.1,527-545).
cggagtaacatgaagaaat

SEQ ID NO: 481147 - DNA, 19 bp, Mus musculus
  siRNA target sequence for Adam5 (NM_007401.1,529-547).
gagtaacatgaagaaatct

SEQ ID NO: 481148 - DNA, 19 bp, Mus musculus
  siRNA target sequence for Adam5 (NM_007401.1,555-573).
ctgtgttacgccaacgatt

SEQ ID NO: 481149 - DNA, 19 bp, Mus musculus
  siRNA target sequence for Adam5 (NM_007401.1,559-577).
gttacgccaacgattcatt

SEQ ID NO: 481150 - DNA, 19 bp, Mus musculus
  siRNA target sequence for Adam5 (NM_007401.1,563-581).
cgccaacgattcattatga

SEQ ID NO: 481151 - DNA, 19 bp, Mus musculus
  siRNA target sequence for Adam5 (NM_007401.1,564-582).
gccaacgattcattatgat

SEQ ID NO: 481152 - DNA, 19 bp, Mus musculus
  siRNA target sequence for Adam5 (NM_007401.1,569-587).
cgattcattatgatggata

SEQ ID NO: 481153 - DNA, 19 bp, Mus musculus
  siRNA target sequence for Adam5 (NM_007401.1,570-588).
gattcattatgatggatat

SEQ ID NO: 481154 - DNA, 19 bp, Mus musculus
  siRNA target sequence for Adam5 (NM_007401.1,656-674).
cagatcatcggtttcgtta

SEQ ID NO: 481155 - DNA, 19 bp, Mus musculus
  siRNA target sequence for Adam5 (NM_007401.1,661-679).
catcggtttcgttaacact

SEQ ID NO: 481156 - DNA, 19 bp, Mus musculus
  siRNA target sequence for Adam5 (NM_007401.1,678-696).
ctatgctctccaagttaaa

SEQ ID NO: 481157 - DNA, 19 bp, Mus musculus
  siRNA target sequence for Adam5 (NM_007401.1,683-701).
ctctccaagttaaaactga

SEQ ID NO: 481158 - DNA, 19 bp, Mus musculus
  siRNA target sequence for Adam5 (NM_007401.1,691-709).
gttaaaactgactgtctta

SEQ ID NO: 481159 - DNA, 19 bp, Mus musculus
  siRNA target sequence for Adam5 (NM_007401.1,733-751).
gaaggaaaacagaattcgt

SEQ ID NO: 481160 - DNA, 19 bp, Mus musculus
  siRNA target sequence for Adam5 (NM_007401.1,756-774).
caaaggcagttgatgactt

SEQ ID NO: 481161 - DNA, 19 bp, Mus musculus
  siRNA target sequence for Adam5 (NM_007401.1,779-797).
gttcagttctcaatttgga

SEQ ID NO: 481162 - DNA, 19 bp, Mus musculus
  siRNA target sequence for Adam5 (NM_007401.1,796-814).
gaaacatgagtatagatca

SEQ ID NO: 481163 - DNA, 19 bp, Mus musculus
  siRNA target sequence for Adam5 (NM_007401.1,886-904).
gtgcaaactggagtacaat

SEQ ID NO: 481164 - DNA, 19 bp, Mus musculus
  siRNA target sequence for Adam5 (NM_007401.1,908-926).
gctgttgccctgtatccaa

SEQ ID NO: 481165 - DNA, 19 bp, Mus musculus
  siRNA target sequence for Adam5 (NM_007401.1,936-954).
cgttagaatcgtttagtgt

SEQ ID NO: 481166 - DNA, 19 bp, Mus musculus
  siRNA target sequence for Adam5 (NM_007401.1,976-994).
cattggtatgggcttaact

SEQ ID NO: 481167 - DNA, 19 bp, Mus musculus
  siRNA target sequence for Adam5 (NM_007401.1,1012-1030).
ccactgtacaggagaagtt

SEQ ID NO: 481168 - DNA, 19 bp, Mus musculus
  siRNA target sequence for Adam5 (NM_007401.1,1022-1040).
ggagaagtttgcctaatga

SEQ ID NO: 481169 - DNA, 19 bp, Mus musculus
  siRNA target sequence for Adam5 (NM_007401.1,1034-1052).
ctaatgacgcccaaagcaa

SEQ ID NO: 481170 - DNA, 19 bp, Mus musculus
  siRNA target sequence for Adam5 (NM_007401.1,1039-1057).
gacgcccaaagcaatatat

SEQ ID NO: 481171 - DNA, 19 bp, Mus musculus
  siRNA target sequence for Adam5 (NM_007401.1,1067-1085).
gtgaaggacttcagtactt

SEQ ID NO: 481172 - DNA, 19 bp, Mus musculus
  siRNA target sequence for Adam5 (NM_007401.1,1069-1087).
gaaggacttcagtacttgt

SEQ ID NO: 481173 - DNA, 19 bp, Mus musculus
  siRNA target sequence for Adam5 (NM_007401.1,1413-1431).
cctattgtgtcctaacaca

SEQ ID NO: 481174 - DNA, 19 bp, Mus musculus
  siRNA target sequence for Adam5 (NM_007401.1,1414-1432).
ctattgtgtcctaacacat

SEQ ID NO: 481175 - DNA, 19 bp, Mus musculus
  siRNA target sequence for Adam5 (NM_007401.1,1438-1456).
cgcaaatgggcagtattgt

SEQ ID NO: 481176 - DNA, 19 bp, Mus musculus
  siRNA target sequence for Adam5 (NM_007401.1,1672-1690).
ggtgctaaaagccaattta

SEQ ID NO: 481177 - DNA, 19 bp, Mus musculus
  siRNA target sequence for Adam5 (NM_007401.1,1704-1722).
cgcaaatccgggatgactt

SEQ ID NO: 481178 - DNA, 19 bp, Mus musculus
  siRNA target sequence for Adam5 (NM_007401.1,1745-1763).
gggaggatacctaagacaa

SEQ ID NO: 481179 - DNA, 19 bp, Mus musculus
  siRNA target sequence for Adam5 (NM_007401.1,1749-1767).
ggatacctaagacaacaaa

SEQ ID NO: 481180 - DNA, 19 bp, Mus musculus
  siRNA target sequence for Adam5 (NM_007401.1,1759-1777).
gacaacaaagacgacatat

SEQ ID NO: 481181 - DNA, 19 bp, Mus musculus
  siRNA target sequence for Adam5 (NM_007401.1,1857-1875).
catgcacagaaactagatt

SEQ ID NO: 481182 - DNA, 19 bp, Mus musculus
  siRNA target sequence for Adam5 (NM_007401.1,1894-1912).
gtgtgattcaactagagat

SEQ ID NO: 481183 - DNA, 19 bp, Mus musculus
  siRNA target sequence for Adam5 (NM_007401.1,1921-1939).
ccatggggtttgcaacaat

SEQ ID NO: 481184 - DNA, 19 bp, Mus musculus
  siRNA target sequence for Adam5 (NM_007401.1,1943-1961).
cagcattgccactgtgata

SEQ ID NO: 481185 - DNA, 19 bp, Mus musculus
  siRNA target sequence for Adam5 (NM_007401.1,1945-1963).
gcattgccactgtgatata

SEQ ID NO: 481186 - DNA, 19 bp, Mus musculus
  siRNA target sequence for Adam5 (NM_007401.1,1991-2009).
cataagggacagtttggaa

SEQ ID NO: 481187 - DNA, 19 bp, Mus musculus
  siRNA target sequence for Adam5 (NM_007401.1,2002-2020).
gtttggaagcgttgatgat

SEQ ID NO: 481188 - DNA, 19 bp, Mus musculus
  siRNA target sequence for Adam5 (NM_007401.1,2036-2054).
gttgaagatggtaaaagct

SEQ ID NO: 481189 - DNA, 19 bp, Mus musculus
  siRNA target sequence for Adam5 (NM_007401.1,2115-2133).
ctctgcccttacttgtgat

SEQ ID NO: 481190 - DNA, 19 bp, Mus musculus
  siRNA target sequence for Adam5 (NM_007401.1,2139-2157).
cagctgtagttataaagca

SEQ ID NO: 481191 - DNA, 19 bp, Mus musculus
  siRNA target sequence for Adam5 (NM_007401.1,2141-2159).
gctgtagttataaagcaaa

SEQ ID NO: 481192 - DNA, 19 bp, Mus musculus
  siRNA target sequence for Adam5 (NM_007401.1,2200-2218).
cgacagctctacaacagaa

SEQ ID NO: 481193 - DNA, 19 bp, Mus musculus
  siRNA target sequence for Adam5 (NM_007401.1,2203-2221).
cagctctacaacagaagat

SEQ ID NO: 481194 - DNA, 19 bp, Mus musculus
  siRNA target sequence for Adam5 (NM_007401.1,2216-2234).
gaagatagcgggagtaaca

SEQ ID NO: 481195 - DNA, 19 bp, Mus musculus
  siRNA target sequence for AI427100 (NM_178912.2,70-88).
cattgatgagcactaagta

SEQ ID NO: 481196 - DNA, 19 bp, Mus musculus
  siRNA target sequence for AI427100 (NM_178912.2,102-120).
gagaagcgtcccaacatga

SEQ ID NO: 481197 - DNA, 19 bp, Mus musculus
  siRNA target sequence for AI427100 (NM_178912.2,107-125).
gcgtcccaacatgaacatt

SEQ ID NO: 481198 - DNA, 19 bp, Mus musculus
  siRNA target sequence for AI427100 (NM_178912.2,108-126).
cgtcccaacatgaacattt

SEQ ID NO: 481199 - DNA, 19 bp, Mus musculus
  siRNA target sequence for AI427100 (NM_178912.2,109-127).
gtcccaacatgaacatttt

SEQ ID NO: 481200 - DNA, 19 bp, Mus musculus
  siRNA target sequence for AI427100 (NM_178912.2,113-131).
caacatgaacattttctca

SEQ ID NO: 481201 - DNA, 19 bp, Mus musculus
  siRNA target sequence for AI427100 (NM_178912.2,138-156).
cctgagcaagatgaaaact

SEQ ID NO: 481202 - DNA, 19 bp, Mus musculus
  siRNA target sequence for AI427100 (NM_178912.2,155-173).
ctatttagaggacagtttt

SEQ ID NO: 481203 - DNA, 19 bp, Mus musculus
  siRNA target sequence for AI427100 (NM_178912.2,259-277).
cagatgaggacatacgata

SEQ ID NO: 481204 - DNA, 19 bp, Mus musculus
  siRNA target sequence for AI427100 (NM_178912.2,261-279).
gatgaggacatacgatata

SEQ ID NO: 481205 - DNA, 19 bp, Mus musculus
  siRNA target sequence for AI427100 (NM_178912.2,264-282).
gaggacatacgatataaaa

SEQ ID NO: 481206 - DNA, 19 bp, Mus musculus
  siRNA target sequence for AI427100 (NM_178912.2,266-284).
ggacatacgatataaaact

SEQ ID NO: 481207 - DNA, 19 bp, Mus musculus
  siRNA target sequence for AI427100 (NM_178912.2,285-303).
cggtatgcagtaaagatca

SEQ ID NO: 481208 - DNA, 19 bp, Mus musculus
  siRNA target sequence for AI427100 (NM_178912.2,286-304).
ggtatgcagtaaagatcaa

SEQ ID NO: 481209 - DNA, 19 bp, Mus musculus
  siRNA target sequence for AI427100 (NM_178912.2,333-351).
cggccaagaaagaaattgt

SEQ ID NO: 481210 - DNA, 19 bp, Mus musculus
  siRNA target sequence for AI427100 (NM_178912.2,552-570).
caggtgcaacccagtataa

SEQ ID NO: 481211 - DNA, 19 bp, Mus musculus
  siRNA target sequence for AI427100 (NM_178912.2,554-572).
ggtgcaacccagtataaca

SEQ ID NO: 481212 - DNA, 19 bp, Mus musculus
  siRNA target sequence for AI427100 (NM_178912.2,557-575).
gcaacccagtataacagat

SEQ ID NO: 481213 - DNA, 19 bp, Mus musculus
  siRNA target sequence for AI427100 (NM_178912.2,602-620).
ggctcagagccataataaa

SEQ ID NO: 481214 - DNA, 19 bp, Mus musculus
  siRNA target sequence for AI427100 (NM_178912.2,651-669).
gttgaatcaaggaaagaat

SEQ ID NO: 481215 - DNA, 19 bp, Mus musculus
  siRNA target sequence for AI427100 (NM_178912.2,802-820).
gggcttgcattcttgtaga

SEQ ID NO: 481216 - DNA, 19 bp, Mus musculus
  siRNA target sequence for AI427100 (NM_178912.2,816-834).
gtagacagtcgtgaaatca

SEQ ID NO: 481217 - DNA, 19 bp, Mus musculus
  siRNA target sequence for AI427100 (NM_178912.2,835-853).
ctaccggtttggaagtaat

SEQ ID NO: 481218 - DNA, 19 bp, Mus musculus
  siRNA target sequence for AI427100 (NM_178912.2,839-857).
cggtttggaagtaatctct

SEQ ID NO: 481219 - DNA, 19 bp, Mus musculus
  siRNA target sequence for AI427100 (NM_178912.2,878-896).
gttacaagtagagatttgt

SEQ ID NO: 481220 - DNA, 19 bp, Mus musculus
  siRNA target sequence for AI427100 (NM_178912.2,949-967).
ggtctcagtctgaaatgtt

SEQ ID NO: 481221 - DNA, 19 bp, Mus musculus
  siRNA target sequence for AI427100 (NM_178912.2,950-968).
gtctcagtctgaaatgtta

SEQ ID NO: 481222 - DNA, 19 bp, Mus musculus
  siRNA target sequence for AI427100 (NM_178912.2,954-972).
cagtctgaaatgttaagta

SEQ ID NO: 481223 - DNA, 19 bp, Mus musculus
  siRNA target sequence for AI427100 (NM_178912.2,1016-1034).
gagcatgtttcaaaggata

SEQ ID NO: 481224 - DNA, 19 bp, Mus musculus
  siRNA target sequence for AI427100 (NM_178912.2,1096-1114).
cgaagtgctatgacagttt

SEQ ID NO: 481225 - DNA, 19 bp, Mus musculus
  siRNA target sequence for AI427100 (NM_178912.2,1135-1153).
ccggaatccgaatcctttt

SEQ ID NO: 481226 - DNA, 19 bp, Mus musculus
  siRNA target sequence for AI427100 (NM_178912.2,1170-1188).
gaaactgcagatttactaa

SEQ ID NO: 481227 - DNA, 19 bp, Mus musculus
  siRNA target sequence for AI427100 (NM_178912.2,1195-1213).
ctgtcattggtggaacaaa

SEQ ID NO: 481228 - DNA, 19 bp, Mus musculus
  siRNA target sequence for AI427100 (NM_178912.2,1197-1215).
gtcattggtggaacaaaga

SEQ ID NO: 481229 - DNA, 19 bp, Mus musculus
  siRNA target sequence for AI427100 (NM_178912.2,1236-1254).
cccagcagtgctaaacact

SEQ ID NO: 481230 - DNA, 19 bp, Mus musculus
  siRNA target sequence for AI449175 (NM_172754.1,547-565).
caggaacttcactgataca

SEQ ID NO: 481231 - DNA, 19 bp, Mus musculus
  siRNA target sequence for AI449175 (NM_172754.1,556-574).
cactgatacaggatgtgaa

SEQ ID NO: 481232 - DNA, 19 bp, Mus musculus
  siRNA target sequence for AI449175 (NM_172754.1,713-731).
gttgaaggctacatggaaa

SEQ ID NO: 481233 - DNA, 19 bp, Mus musculus
  siRNA target sequence for AI449175 (NM_172754.1,727-745).
ggaaactcacactgtgaat

SEQ ID NO: 481234 - DNA, 19 bp, Mus musculus
  siRNA target sequence for AI449175 (NM_172754.1,844-862).
ccaacctgtacgaaaaagt

SEQ ID NO: 481235 - DNA, 19 bp, Mus musculus
  siRNA target sequence for AI449175 (NM_172754.1,845-863).
caacctgtacgaaaaagtt

SEQ ID NO: 481236 - DNA, 19 bp, Mus musculus
  siRNA target sequence for AI449175 (NM_172754.1,851-869).
gtacgaaaaagttatgaat

SEQ ID NO: 481237 - DNA, 19 bp, Mus musculus
  siRNA target sequence for AI449175 (NM_172754.1,985-1003).
caacgcccttcaatcacat

SEQ ID NO: 481238 - DNA, 19 bp, Mus musculus
  siRNA target sequence for AI449175 (NM_172754.1,1056-1074).
cttttagcagacttactca

SEQ ID NO: 481239 - DNA, 19 bp, Mus musculus
  siRNA target sequence for AI449175 (NM_172754.1,1078-1096).
gcgattacatgagaaagtt

SEQ ID NO: 481240 - DNA, 19 bp, Mus musculus
  siRNA target sequence for AI449175 (NM_172754.1,1153-1171).
gagttcctatcatagacat

SEQ ID NO: 481241 - DNA, 19 bp, Mus musculus
  siRNA target sequence for AI449175 (NM_172754.1,1184-1202).
ggagagacattctataatt

SEQ ID NO: 481242 - DNA, 19 bp, Mus musculus
  siRNA target sequence for AI449175 (NM_172754.1,1292-1310).
ctatgtggtaagactttta

SEQ ID NO: 481243 - DNA, 19 bp, Mus musculus
  siRNA target sequence for AI449175 (NM_172754.1,1486-1504).
ctcctaccttcggttacat

SEQ ID NO: 481244 - DNA, 19 bp, Mus musculus
  siRNA target sequence for AI450757 (NM_172592.1,686-704).
gacggcagtgagtagtctt

SEQ ID NO: 481245 - DNA, 19 bp, Mus musculus
  siRNA target sequence for AI450757 (NM_172592.1,695-713).
gagtagtcttggtgtttca

SEQ ID NO: 481246 - DNA, 19 bp, Mus musculus
  siRNA target sequence for AI450757 (NM_172592.1,744-762).
gcgctggacccaaatatta

SEQ ID NO: 481247 - DNA, 19 bp, Mus musculus
  siRNA target sequence for AI450757 (NM_172592.1,749-767).
ggacccaaatattacaaca

SEQ ID NO: 481248 - DNA, 19 bp, Mus musculus
  siRNA target sequence for AI450757 (NM_172592.1,874-892).
cagctgatcaactacttga

SEQ ID NO: 481249 - DNA, 19 bp, Mus musculus
  siRNA target sequence for AI450757 (NM_172592.1,876-894).
gctgatcaactacttgaat

SEQ ID NO: 481250 - DNA, 19 bp, Mus musculus
  siRNA target sequence for AI450757 (NM_172592.1,952-970).
caactcggtttgcttttgt

SEQ ID NO: 481251 - DNA, 19 bp, Mus musculus
  siRNA target sequence for AI450757 (NM_172592.1,1009-1027).
cttttaatggagttatgtt

SEQ ID NO: 481252 - DNA, 19 bp, Mus musculus
  siRNA target sequence for AI450757 (NM_172592.1,1057-1075).
ccaacaatgcaatagtaaa

SEQ ID NO: 481253 - DNA, 19 bp, Mus musculus
  siRNA target sequence for AI450757 (NM_172592.1,1058-1076).
caacaatgcaatagtaaaa

SEQ ID NO: 481254 - DNA, 19 bp, Mus musculus
  siRNA target sequence for AI450757 (NM_172592.1,1099-1117).
ctgcagctaaggagttaga

SEQ ID NO: 481255 - DNA, 19 bp, Mus musculus
  siRNA target sequence for AI450757 (NM_172592.1,1178-1196).
gtctggaaagagcaatgaa

SEQ ID NO: 481256 - DNA, 19 bp, Mus musculus
  siRNA target sequence for AI450757 (NM_172592.1,1289-1307).
caggagtagatcccataat

SEQ ID NO: 481257 - DNA, 19 bp, Mus musculus
  siRNA target sequence for AI450757 (NM_172592.1,1310-1328).
gtcacgctcaagacagaaa

SEQ ID NO: 481258 - DNA, 19 bp, Mus musculus
  siRNA target sequence for AI450757 (NM_172592.1,1312-1330).
cacgctcaagacagaaaga

SEQ ID NO: 481259 - DNA, 19 bp, Mus musculus
  siRNA target sequence for AI450757 (NM_172592.1,1314-1332).
cgctcaagacagaaagata

SEQ ID NO: 481260 - DNA, 19 bp, Mus musculus
  siRNA target sequence for AI450757 (NM_172592.1,1404-1422).
cggtcacgggacaagagaa

SEQ ID NO: 481261 - DNA, 19 bp, Mus musculus
  siRNA target sequence for AI450757 (NM_172592.1,1405-1423).
ggtcacgggacaagagaaa

SEQ ID NO: 481262 - DNA, 19 bp, Mus musculus
  siRNA target sequence for AI450757 (NM_172592.1,1406-1424).
gtcacgggacaagagaaaa

SEQ ID NO: 481263 - DNA, 19 bp, Mus musculus
  siRNA target sequence for AI450757 (NM_172592.1,1486-1504).
gggaaaaggatcgtgaaaa

SEQ ID NO: 481264 - DNA, 19 bp, Mus musculus
  siRNA target sequence for AI450757 (NM_172592.1,1511-1529).
ggagcggggtaaaaacaaa

SEQ ID NO: 481265 - DNA, 19 bp, Mus musculus
  siRNA target sequence for AI450757 (NM_172592.1,1515-1533).
cggggtaaaaacaaagata

SEQ ID NO: 481266 - DNA, 19 bp, Mus musculus
  siRNA target sequence for AI450757 (NM_172592.1,1775-1793).
gaccgtcaaaagaaagtct

SEQ ID NO: 481267 - DNA, 19 bp, Mus musculus
  siRNA target sequence for AI450757 (NM_172592.1,1779-1797).
gtcaaaagaaagtcttcta

SEQ ID NO: 481268 - DNA, 19 bp, Mus musculus
  siRNA target sequence for AI450757 (NM_172592.1,1883-1901).
gcgttctacctccacaaaa

SEQ ID NO: 481269 - DNA, 19 bp, Mus musculus
  siRNA target sequence for AI790326 (NM_134003.1,353-371).
catgagtgaggtatccaat

SEQ ID NO: 481270 - DNA, 19 bp, Mus musculus
  siRNA target sequence for AI790326 (NM_134003.1,368-386).
caatttgggggtaagcaaa

SEQ ID NO: 481271 - DNA, 19 bp, Mus musculus
  siRNA target sequence for AI790326 (NM_134003.1,374-392).
gggggtaagcaaaaatgaa

SEQ ID NO: 481272 - DNA, 19 bp, Mus musculus
  siRNA target sequence for AI790326 (NM_134003.1,375-393).
ggggtaagcaaaaatgaat

SEQ ID NO: 481273 - DNA, 19 bp, Mus musculus
  siRNA target sequence for AI790326 (NM_134003.1,403-421).
gccatgacttccaaaacaa

SEQ ID NO: 481274 - DNA, 19 bp, Mus musculus
  siRNA target sequence for AI790326 (NM_134003.1,550-568).
ccgacctacccaatggtaa

SEQ ID NO: 481275 - DNA, 19 bp, Mus musculus
  siRNA target sequence for AI790326 (NM_134003.1,716-734).
cccaggacgccgtcatgat

SEQ ID NO: 481276 - DNA, 19 bp, Mus musculus
  siRNA target sequence for AI790326 (NM_134003.1,718-736).
caggacgccgtcatgatct

SEQ ID NO: 481277 - DNA, 19 bp, Mus musculus
  siRNA target sequence for AI790326 (NM_134003.1,721-739).
gacgccgtcatgatctcta

SEQ ID NO: 481278 - DNA, 19 bp, Mus musculus
  siRNA target sequence for AI790326 (NM_134003.1,724-742).
gccgtcatgatctctatga

SEQ ID NO: 481279 - DNA, 19 bp, Mus musculus
  siRNA target sequence for AI790326 (NM_134003.1,726-744).
cgtcatgatctctatgaca

SEQ ID NO: 481280 - DNA, 19 bp, Mus musculus
  siRNA target sequence for AI790326 (NM_134003.1,831-849).
catttcgagtcctacgaat

SEQ ID NO: 481281 - DNA, 19 bp, Mus musculus
  siRNA target sequence for AI790326 (NM_134003.1,837-855).
gagtcctacgaatgtaact

SEQ ID NO: 481282 - DNA, 19 bp, Mus musculus
  siRNA target sequence for AI790326 (NM_134003.1,958-976).
ccaccaatgaggtacttct

SEQ ID NO: 481283 - DNA, 19 bp, Mus musculus
  siRNA target sequence for AI790326 (NM_134003.1,1092-1110).
ggcatcgcccagactcata

SEQ ID NO: 481284 - DNA, 19 bp, Mus musculus
  siRNA target sequence for AI790326 (NM_134003.1,1148-1166).
gtcccagcaagaacttgtt

SEQ ID NO: 481285 - DNA, 19 bp, Mus musculus
  siRNA target sequence for AI790326 (NM_134003.1,1381-1399).
ccttagcaggaatcacaat

SEQ ID NO: 481286 - DNA, 19 bp, Mus musculus
  siRNA target sequence for AI790326 (NM_134003.1,1422-1440).
gtgacttaccccattgctt

SEQ ID NO: 481287 - DNA, 19 bp, Mus musculus
  siRNA target sequence for AI875199 (NM_153591.2,468-486).
gtaaatgacggatcttctt

SEQ ID NO: 481288 - DNA, 19 bp, Mus musculus
  siRNA target sequence for AI875199 (NM_153591.2,498-516).
cagattgttgcggattcaa

SEQ ID NO: 481289 - DNA, 19 bp, Mus musculus
  siRNA target sequence for AI875199 (NM_153591.2,650-668).
ggcattccctataaagtat

SEQ ID NO: 481290 - DNA, 19 bp, Mus musculus
  siRNA target sequence for AI875199 (NM_153591.2,651-669).
gcattccctataaagtata

SEQ ID NO: 481291 - DNA, 19 bp, Mus musculus
  siRNA target sequence for AI875199 (NM_153591.2,652-670).
cattccctataaagtataa

SEQ ID NO: 481292 - DNA, 19 bp, Mus musculus
  siRNA target sequence for AI875199 (NM_153591.2,869-887).
ggagccttcaagcaaaata

SEQ ID NO: 481293 - DNA, 19 bp, Mus musculus
  siRNA target sequence for AI875199 (NM_153591.2,892-910).
gacccaaggagagtttctt

SEQ ID NO: 481294 - DNA, 19 bp, Mus musculus
  siRNA target sequence for AI875199 (NM_153591.2,957-975).
gtgatgtcaggagctttta

SEQ ID NO: 481295 - DNA, 19 bp, Mus musculus
  siRNA target sequence for AI875199 (NM_153591.2,967-985).
gagcttttacccaagtatt

SEQ ID NO: 481296 - DNA, 19 bp, Mus musculus
  siRNA target sequence for AI875199 (NM_153591.2,1027-1045).
ggagacacctggctgaatt

SEQ ID NO: 481297 - DNA, 19 bp, Mus musculus
  siRNA target sequence for AI875199 (NM_153591.2,1028-1046).
gagacacctggctgaattt

SEQ ID NO: 481298 - DNA, 19 bp, Mus musculus
  siRNA target sequence for AI875199 (NM_153591.2,1037-1055).
ggctgaattttatatggtt

SEQ ID NO: 481299 - DNA, 19 bp, Mus musculus
  siRNA target sequence for AI875199 (NM_153591.2,1053-1071).
gttgaagcggagatttctt

SEQ ID NO: 481300 - DNA, 19 bp, Mus musculus
  siRNA target sequence for AI875199 (NM_153591.2,1202-1220).
cagactagaacatatgcta

SEQ ID NO: 481301 - DNA, 19 bp, Mus musculus
  siRNA target sequence for AI875199 (NM_153591.2,1212-1230).
catatgctaaaaaacaact

SEQ ID NO: 481302 - DNA, 19 bp, Mus musculus
  siRNA target sequence for AI875199 (NM_153591.2,1243-1261).
cttatacggaggcaattga

SEQ ID NO: 481303 - DNA, 19 bp, Mus musculus
  siRNA target sequence for AI875199 (NM_153591.2,1249-1267).
cggaggcaattgagatctt

SEQ ID NO: 481304 - DNA, 19 bp, Mus musculus
  siRNA target sequence for AI875199 (NM_153591.2,1280-1298).
ccagaacttcgcctttaca

SEQ ID NO: 481305 - DNA, 19 bp, Mus musculus
  siRNA target sequence for AI875199 (NM_153591.2,1304-1322).
gtggggtgttgatctacaa

SEQ ID NO: 481306 - DNA, 19 bp, Mus musculus
  siRNA target sequence for AI875199 (NM_153591.2,1346-1364).
gagacactgtggcaacata

SEQ ID NO: 481307 - DNA, 19 bp, Mus musculus
  siRNA target sequence for AI875199 (NM_153591.2,1395-1413).
ctcaagcccttctacatga

SEQ ID NO: 481308 - DNA, 19 bp, Mus musculus
  siRNA target sequence for AI875199 (NM_153591.2,1406-1424).
ctacatgagggagaatgaa

SEQ ID NO: 481309 - DNA, 19 bp, Mus musculus
  siRNA target sequence for AI875199 (NM_153591.2,1526-1544).
gcagcgactagcaagatca

SEQ ID NO: 481310 - DNA, 19 bp, Mus musculus
  siRNA target sequence for AI875199 (NM_153591.2,1575-1593).
gatcttcgcaagtttggat

SEQ ID NO: 481311 - DNA, 19 bp, Mus musculus
  siRNA target sequence for AI875199 (NM_153591.2,1619-1637).
gggatttgaacgctactta

SEQ ID NO: 481312 - DNA, 19 bp, Mus musculus
  siRNA target sequence for AI875199 (NM_153591.2,1621-1639).
gatttgaacgctacttaca

SEQ ID NO: 481313 - DNA, 19 bp, Mus musculus
  siRNA target sequence for AI875199 (NM_153591.2,1642-1660).
gcatcctaggagttgacaa

SEQ ID NO: 481314 - DNA, 19 bp, Mus musculus
  siRNA target sequence for AI875199 (NM_153591.2,1647-1665).
ctaggagttgacaatatca

SEQ ID NO: 481315 - DNA, 19 bp, Mus musculus
  siRNA target sequence for AL033314 (NM_019776.1,258-276).
ctctgggtgcgccataatt

SEQ ID NO: 481316 - DNA, 19 bp, Mus musculus
  siRNA target sequence for AL033314 (NM_019776.1,260-278).
ctgggtgcgccataattgt

SEQ ID NO: 481317 - DNA, 19 bp, Mus musculus
  siRNA target sequence for AL033314 (NM_019776.1,330-348).
caacattcgagctggaaat

SEQ ID NO: 481318 - DNA, 19 bp, Mus musculus
  siRNA target sequence for AL033314 (NM_019776.1,448-466).
gggaaagaagtctgtttca

SEQ ID NO: 481319 - DNA, 19 bp, Mus musculus
  siRNA target sequence for AL033314 (NM_019776.1,457-475).
gtctgtttcacgatagaaa

SEQ ID NO: 481320 - DNA, 19 bp, Mus musculus
  siRNA target sequence for AL033314 (NM_019776.1,461-479).
gtttcacgatagaaaacaa

SEQ ID NO: 481321 - DNA, 19 bp, Mus musculus
  siRNA target sequence for AL033314 (NM_019776.1,493-511).
cgagagtatgggatgatct

SEQ ID NO: 481322 - DNA, 19 bp, Mus musculus
  siRNA target sequence for AL033314 (NM_019776.1,504-522).
gatgatctacctaggaaaa

SEQ ID NO: 481323 - DNA, 19 bp, Mus musculus
  siRNA target sequence for AL033314 (NM_019776.1,507-525).
gatctacctaggaaaagat

SEQ ID NO: 481324 - DNA, 19 bp, Mus musculus
  siRNA target sequence for AL033314 (NM_019776.1,510-528).
ctacctaggaaaagatact

SEQ ID NO: 481325 - DNA, 19 bp, Mus musculus
  siRNA target sequence for AL033314 (NM_019776.1,523-541).
gatactaatggggaaaaca

SEQ ID NO: 481326 - DNA, 19 bp, Mus musculus
  siRNA target sequence for AL033314 (NM_019776.1,864-882).
cttccgtcgggaaacagat

SEQ ID NO: 481327 - DNA, 19 bp, Mus musculus
  siRNA target sequence for AL033314 (NM_019776.1,906-924).
cgctgcagaagccaagttt

SEQ ID NO: 481328 - DNA, 19 bp, Mus musculus
  siRNA target sequence for AL033314 (NM_019776.1,1009-1027).
cacccgaatggtaacatca

SEQ ID NO: 481329 - DNA, 19 bp, Mus musculus
  siRNA target sequence for AL033314 (NM_019776.1,1059-1077).
ctgtgtggactggtcaatt

SEQ ID NO: 481330 - DNA, 19 bp, Mus musculus
  siRNA target sequence for AL033314 (NM_019776.1,1132-1150).
gagcgcaggctgagaatat

SEQ ID NO: 481331 - DNA, 19 bp, Mus musculus
  siRNA target sequence for AL033314 (NM_019776.1,1135-1153).
cgcaggctgagaatatgga

SEQ ID NO: 481332 - DNA, 19 bp, Mus musculus
  siRNA target sequence for AL033314 (NM_019776.1,1143-1161).
gagaatatggagagactat

SEQ ID NO: 481333 - DNA, 19 bp, Mus musculus
  siRNA target sequence for AL033314 (NM_019776.1,1145-1163).
gaatatggagagactatgt

SEQ ID NO: 481334 - DNA, 19 bp, Mus musculus
  siRNA target sequence for AL033314 (NM_019776.1,1166-1184).
ctcccactgctaatttgga

SEQ ID NO: 481335 - DNA, 19 bp, Mus musculus
  siRNA target sequence for AL033314 (NM_019776.1,1304-1322).
ggttggagggagacaacat

SEQ ID NO: 481336 - DNA, 19 bp, Mus musculus
  siRNA target sequence for AL033314 (NM_019776.1,1315-1333).
gacaacatacaggataaga

SEQ ID NO: 481337 - DNA, 19 bp, Mus musculus
  siRNA target sequence for AL033314 (NM_019776.1,1381-1399).
cgcgaatttcttcgaaaaa

SEQ ID NO: 481338 - DNA, 19 bp, Mus musculus
  siRNA target sequence for AL033314 (NM_019776.1,1382-1400).
gcgaatttcttcgaaaaaa

SEQ ID NO: 481339 - DNA, 19 bp, Mus musculus
  siRNA target sequence for AL033314 (NM_019776.1,1621-1639).
gaggccagagctattaaga

SEQ ID NO: 481340 - DNA, 19 bp, Mus musculus
  siRNA target sequence for AL033314 (NM_019776.1,1623-1641).
ggccagagctattaagaat

SEQ ID NO: 481341 - DNA, 19 bp, Mus musculus
  siRNA target sequence for AL033314 (NM_019776.1,1677-1695).
ccaccgagttgcagacatt

SEQ ID NO: 481342 - DNA, 19 bp, Mus musculus
  siRNA target sequence for AL033314 (NM_019776.1,1678-1696).
caccgagttgcagacattt

SEQ ID NO: 481343 - DNA, 19 bp, Mus musculus
  siRNA target sequence for AL033314 (NM_019776.1,1699-1717).
ggggacacccagaaagcaa

SEQ ID NO: 481344 - DNA, 19 bp, Mus musculus
  siRNA target sequence for AL033314 (NM_019776.1,1907-1925).
gcgaggaggccacactttt

SEQ ID NO: 481345 - DNA, 19 bp, Mus musculus
  siRNA target sequence for AL033314 (NM_019776.1,2285-2303).
gcacccagctggaaaagct

SEQ ID NO: 481346 - DNA, 19 bp, Mus musculus
  siRNA target sequence for AL033314 (NM_019776.1,2376-2394).
gttctgcattgccaaattt

SEQ ID NO: 481347 - DNA, 19 bp, Mus musculus
  siRNA target sequence for AL033314 (NM_019776.1,2379-2397).
ctgcattgccaaatttgta

SEQ ID NO: 481348 - DNA, 19 bp, Mus musculus
  siRNA target sequence for AL033314 (NM_019776.1,2381-2399).
gcattgccaaatttgtaga

SEQ ID NO: 481349 - DNA, 19 bp, Mus musculus
  siRNA target sequence for AL033314 (NM_019776.1,2444-2462).
ccaaagtgcatgtcttcta

SEQ ID NO: 481350 - DNA, 19 bp, Mus musculus
  siRNA target sequence for AL033314 (NM_019776.1,2522-2540).
ccttcagcacgcgtgtatt

SEQ ID NO: 481351 - DNA, 19 bp, Mus musculus
  siRNA target sequence for AL033314 (NM_019776.1,2623-2641).
gtggtgcgggacatccaaa

SEQ ID NO: 481352 - DNA, 19 bp, Mus musculus
  siRNA target sequence for AL033314 (NM_019776.1,2628-2646).
gcgggacatccaaaacact

SEQ ID NO: 481353 - DNA, 19 bp, Mus musculus
  siRNA target sequence for AL033314 (NM_019776.1,2788-2806).
cagaaagtgatcacagaat

SEQ ID NO: 481354 - DNA, 19 bp, Mus musculus
  siRNA target sequence for Ang4 (NM_177544.2,171-189).
cagaatgaaaggtacgaaa

SEQ ID NO: 481355 - DNA, 19 bp, Mus musculus
  siRNA target sequence for Ang4 (NM_177544.2,173-191).
gaatgaaaggtacgaaaaa

SEQ ID NO: 481356 - DNA, 19 bp, Mus musculus
  siRNA target sequence for Ang4 (NM_177544.2,194-212).
cctacgtcagcactatgat

SEQ ID NO: 481357 - DNA, 19 bp, Mus musculus
  siRNA target sequence for Ang4 (NM_177544.2,443-461).
gtaccgagcctttaaagat

SEQ ID NO: 481358 - DNA, 19 bp, Mus musculus
  siRNA target sequence for AW557704 (NM_172456.1,221-239).
gtttgggtttcctttagct

SEQ ID NO: 481359 - DNA, 19 bp, Mus musculus
  siRNA target sequence for AW557704 (NM_172456.1,246-264).
gagacgaggcgttacacta

SEQ ID NO: 481360 - DNA, 19 bp, Mus musculus
  siRNA target sequence for AW557704 (NM_172456.1,262-280).
ctaaccacgccctgtctta

SEQ ID NO: 481361 - DNA, 19 bp, Mus musculus
  siRNA target sequence for AW557704 (NM_172456.1,266-284).
ccacgccctgtcttacgat

SEQ ID NO: 481362 - DNA, 19 bp, Mus musculus
  siRNA target sequence for AW557704 (NM_172456.1,304-322).
gatgggttcttgagcatat

SEQ ID NO: 481363 - DNA, 19 bp, Mus musculus
  siRNA target sequence for AW557704 (NM_172456.1,345-363).
gacgctgacagaaagcatt

SEQ ID NO: 481364 - DNA, 19 bp, Mus musculus
  siRNA target sequence for AW557704 (NM_172456.1,398-416).
cttcagcgccctcaatgaa

SEQ ID NO: 481365 - DNA, 19 bp, Mus musculus
  siRNA target sequence for AW557704 (NM_172456.1,403-421).
gcgccctcaatgaagacta

SEQ ID NO: 481366 - DNA, 19 bp, Mus musculus
  siRNA target sequence for AW557704 (NM_172456.1,404-422).
cgccctcaatgaagactat

SEQ ID NO: 481367 - DNA, 19 bp, Mus musculus
  siRNA target sequence for AW557704 (NM_172456.1,405-423).
gccctcaatgaagactata

SEQ ID NO: 481368 - DNA, 19 bp, Mus musculus
  siRNA target sequence for AW557704 (NM_172456.1,406-424).
ccctcaatgaagactatat

SEQ ID NO: 481369 - DNA, 19 bp, Mus musculus
  siRNA target sequence for AW557704 (NM_172456.1,457-475).
cggcaggaaataacaagtt

SEQ ID NO: 481370 - DNA, 19 bp, Mus musculus
  siRNA target sequence for AW557704 (NM_172456.1,486-504).
gccatggcagaaacctttt

SEQ ID NO: 481371 - DNA, 19 bp, Mus musculus
  siRNA target sequence for AW557704 (NM_172456.1,518-536).
cgtgcctcagaattttgat

SEQ ID NO: 481372 - DNA, 19 bp, Mus musculus
  siRNA target sequence for AW557704 (NM_172456.1,545-563).
cggctactggaacagaata

SEQ ID NO: 481373 - DNA, 19 bp, Mus musculus
  siRNA target sequence for AW557704 (NM_172456.1,547-565).
gctactggaacagaataga

SEQ ID NO: 481374 - DNA, 19 bp, Mus musculus
  siRNA target sequence for AW557704 (NM_172456.1,584-602).
gacggagagatttgaagat

SEQ ID NO: 481375 - DNA, 19 bp, Mus musculus
  siRNA target sequence for AW557704 (NM_172456.1,586-604).
cggagagatttgaagatgt

SEQ ID NO: 481376 - DNA, 19 bp, Mus musculus
  siRNA target sequence for AW557704 (NM_172456.1,597-615).
gaagatgtttggatagtat

SEQ ID NO: 481377 - DNA, 19 bp, Mus musculus
  siRNA target sequence for AW557704 (NM_172456.1,608-626).
gatagtatcaggaccttta

SEQ ID NO: 481378 - DNA, 19 bp, Mus musculus
  siRNA target sequence for AW557704 (NM_172456.1,629-647).
cttacctcatactaggaat

SEQ ID NO: 481379 - DNA, 19 bp, Mus musculus
  siRNA target sequence for AW557704 (NM_172456.1,644-662).
gaatgatggaacgaaaaca

SEQ ID NO: 481380 - DNA, 19 bp, Mus musculus
  siRNA target sequence for AW557704 (NM_172456.1,651-669).
ggaacgaaaacagttagtt

SEQ ID NO: 481381 - DNA, 19 bp, Mus musculus
  siRNA target sequence for AW557704 (NM_172456.1,697-715).
ccgtcccctcgcaccttta

SEQ ID NO: 481382 - DNA, 19 bp, Mus musculus
  siRNA target sequence for AW557704 (NM_172456.1,732-750).
cgcagaagcccggaatcta

SEQ ID NO: 481383 - DNA, 19 bp, Mus musculus
  siRNA target sequence for AW557704 (NM_172456.1,772-790).
cctttgtggtgccaaataa

SEQ ID NO: 481384 - DNA, 19 bp, Mus musculus
  siRNA target sequence for AW557704 (NM_172456.1,773-791).
ctttgtggtgccaaataaa

SEQ ID NO: 481385 - DNA, 19 bp, Mus musculus
  siRNA target sequence for AW557704 (NM_172456.1,798-816).
gggttccagtcccagttat

SEQ ID NO: 481386 - DNA, 19 bp, Mus musculus
  siRNA target sequence for AW557704 (NM_172456.1,889-907).
gcagggacatccggaatat

SEQ ID NO: 481387 - DNA, 19 bp, Mus musculus
  siRNA target sequence for AW557704 (NM_172456.1,890-908).
cagggacatccggaatatt

SEQ ID NO: 481388 - DNA, 19 bp, Mus musculus
  siRNA target sequence for AW557704 (NM_172456.1,894-912).
gacatccggaatatttgct

SEQ ID NO: 481389 - DNA, 19 bp, Mus musculus
  siRNA target sequence for AW557704 (NM_172456.1,962-980).
gagcacgaggaagattgat

SEQ ID NO: 481390 - DNA, 19 bp, Mus musculus
  siRNA target sequence for AW557704 (NM_172456.1,1036-1054).
gggtggaacctgacgatta

SEQ ID NO: 481391 - DNA, 19 bp, Mus musculus
  siRNA target sequence for AW557704 (NM_172456.1,1038-1056).
gtggaacctgacgattact

SEQ ID NO: 481392 - DNA, 19 bp, Mus musculus
  siRNA target sequence for AW557704 (NM_172456.1,1058-1076).
cctgagtcgctatgagaaa

SEQ ID NO: 481393 - DNA, 19 bp, Mus musculus
  siRNA target sequence for AW557704 (NM_172456.1,1059-1077).
ctgagtcgctatgagaaaa

SEQ ID NO: 481394 - DNA, 19 bp, Mus musculus
  siRNA target sequence for AW557805 (NM_144858.1,165-183).
gtaccgcacaaccaaagaa

SEQ ID NO: 481395 - DNA, 19 bp, Mus musculus
  siRNA target sequence for AW557805 (NM_144858.1,258-276).
gccaggggccaaaagaatt

SEQ ID NO: 481396 - DNA, 19 bp, Mus musculus
  siRNA target sequence for AW557805 (NM_144858.1,526-544).
cgctgcgtgctcttcgaaa

SEQ ID NO: 481397 - DNA, 19 bp, Mus musculus
  siRNA target sequence for AW557805 (NM_144858.1,530-548).
gcgtgctcttcgaaacctt

SEQ ID NO: 481398 - DNA, 19 bp, Mus musculus
  siRNA target sequence for AW557805 (NM_144858.1,531-549).
cgtgctcttcgaaaccttt

SEQ ID NO: 481399 - DNA, 19 bp, Mus musculus
  siRNA target sequence for AW557805 (NM_144858.1,799-817).
gcgaccccaaagcagaata

SEQ ID NO: 481400 - DNA, 19 bp, Mus musculus
  siRNA target sequence for AW557805 (NM_144858.1,994-1012).
ccctttcgccgcatttgca

SEQ ID NO: 481401 - DNA, 19 bp, Mus musculus
  siRNA target sequence for AW557805 (NM_144858.1,995-1013).
cctttcgccgcatttgcaa

SEQ ID NO: 481402 - DNA, 19 bp, Mus musculus
  siRNA target sequence for AW557805 (NM_144858.1,1256-1274).
gtggctgtgcactcatgaa

SEQ ID NO: 481403 - DNA, 19 bp, Mus musculus
  siRNA target sequence for AW557805 (NM_144858.1,1280-1298).
ccgccaagttccaacagat

SEQ ID NO: 481404 - DNA, 19 bp, Mus musculus
  siRNA target sequence for AW557805 (NM_144858.1,1467-1485).
ggctgactggccctacata

SEQ ID NO: 481405 - DNA, 19 bp, Mus musculus
  siRNA target sequence for AW557805 (NM_144858.1,1469-1487).
ctgactggccctacataga

SEQ ID NO: 481406 - DNA, 19 bp, Mus musculus
  siRNA target sequence for AW557805 (NM_144858.1,1510-1528).
cccatgcccctgtttggaa

SEQ ID NO: 481407 - DNA, 19 bp, Mus musculus
  siRNA target sequence for AW557805 (NM_144858.1,1512-1530).
catgcccctgtttggaaat

SEQ ID NO: 481408 - DNA, 19 bp, Mus musculus
  siRNA target sequence for AW557805 (NM_144858.1,1622-1640).
ggctgttcacggagatcaa

SEQ ID NO: 481409 - DNA, 19 bp, Mus musculus
  siRNA target sequence for AW557805 (NM_144858.1,1623-1641).
gctgttcacggagatcaaa

SEQ ID NO: 481410 - DNA, 19 bp, Mus musculus
  siRNA target sequence for AW557805 (NM_144858.1,1698-1716).
cactcactacggtttagaa

SEQ ID NO: 481411 - DNA, 19 bp, Mus musculus
  siRNA target sequence for AW557805 (NM_144858.1,1700-1718).
ctcactacggtttagaaca

SEQ ID NO: 481412 - DNA, 19 bp, Mus musculus
  siRNA target sequence for AW557805 (NM_144858.1,1837-1855).
gagaggccaccctattact

SEQ ID NO: 481413 - DNA, 19 bp, Mus musculus
  siRNA target sequence for AW557805 (NM_144858.1,1839-1857).
gaggccaccctattactta

SEQ ID NO: 481414 - DNA, 19 bp, Mus musculus
  siRNA target sequence for B230354B21Rik (NM_175480.3,470-488).
gctagaggaacgaaaggat

SEQ ID NO: 481415 - DNA, 19 bp, Mus musculus
  siRNA target sequence for B230354B21Rik (NM_175480.3,481-499).
gaaaggatctggaaaacct

SEQ ID NO: 481416 - DNA, 19 bp, Mus musculus
  siRNA target sequence for B230354B21Rik (NM_175480.3,530-548).
gggcctctggactgaatgt

SEQ ID NO: 481417 - DNA, 19 bp, Mus musculus
  siRNA target sequence for B230354B21Rik (NM_175480.3,531-549).
ggcctctggactgaatgta

SEQ ID NO: 481418 - DNA, 19 bp, Mus musculus
  siRNA target sequence for B230354B21Rik (NM_175480.3,533-551).
cctctggactgaatgtact

SEQ ID NO: 481419 - DNA, 19 bp, Mus musculus
  siRNA target sequence for B230354B21Rik (NM_175480.3,562-580).
ccggcaataatctgacaaa

SEQ ID NO: 481420 - DNA, 19 bp, Mus musculus
  siRNA target sequence for B230354B21Rik (NM_175480.3,563-581).
cggcaataatctgacaaaa

SEQ ID NO: 481421 - DNA, 19 bp, Mus musculus
  siRNA target sequence for B230354B21Rik (NM_175480.3,565-583).
gcaataatctgacaaaaga

SEQ ID NO: 481422 - DNA, 19 bp, Mus musculus
  siRNA target sequence for B230354B21Rik (NM_175480.3,594-612).
gaagaaaagagtacattat

SEQ ID NO: 481423 - DNA, 19 bp, Mus musculus
  siRNA target sequence for B230354B21Rik (NM_175480.3,615-633).
gaacttcagaaggactttt

SEQ ID NO: 481424 - DNA, 19 bp, Mus musculus
  siRNA target sequence for B230354B21Rik (NM_175480.3,780-798).
caattgtcccaggatcata

SEQ ID NO: 481425 - DNA, 19 bp, Mus musculus
  siRNA target sequence for B230354B21Rik (NM_175480.3,802-820).
gctccactggagagctata

SEQ ID NO: 481426 - DNA, 19 bp, Mus musculus
  siRNA target sequence for B230354B21Rik (NM_175480.3,803-821).
ctccactggagagctatat

SEQ ID NO: 481427 - DNA, 19 bp, Mus musculus
  siRNA target sequence for B230354B21Rik (NM_175480.3,815-833).
gctatattctgataccaaa

SEQ ID NO: 481428 - DNA, 19 bp, Mus musculus
  siRNA target sequence for B230354B21Rik (NM_175480.3,903-921).
caaggcagccctcaagtta

SEQ ID NO: 481429 - DNA, 19 bp, Mus musculus
  siRNA target sequence for B230354B21Rik (NM_175480.3,1072-1090).
gctacagttcccactacat

SEQ ID NO: 481430 - DNA, 19 bp, Mus musculus
  siRNA target sequence for B230354B21Rik (NM_175480.3,1148-1166).
ggccttcagtgttaatgga

SEQ ID NO: 481431 - DNA, 19 bp, Mus musculus
  siRNA target sequence for B230354B21Rik (NM_175480.3,1244-1262).
cagttctgcgtacattact

SEQ ID NO: 481432 - DNA, 19 bp, Mus musculus
  siRNA target sequence for B230354B21Rik (NM_175480.3,1246-1264).
gttctgcgtacattactca

SEQ ID NO: 481433 - DNA, 19 bp, Mus musculus
  siRNA target sequence for B230354B21Rik (NM_175480.3,1426-1444).
ggcagcatcagagtataca

SEQ ID NO: 481434 - DNA, 19 bp, Mus musculus
  siRNA target sequence for B230354B21Rik (NM_175480.3,1479-1497).
gggaaaggcttcactaaaa

SEQ ID NO: 481435 - DNA, 19 bp, Mus musculus
  siRNA target sequence for B230354B21Rik (NM_175480.3,1480-1498).
ggaaaggcttcactaaaaa

SEQ ID NO: 481436 - DNA, 19 bp, Mus musculus
  siRNA target sequence for B230354B21Rik (NM_175480.3,1481-1499).
gaaaggcttcactaaaaat

SEQ ID NO: 481437 - DNA, 19 bp, Mus musculus
  siRNA target sequence for B230354B21Rik (NM_175480.3,2078-2096).
ccacgtcaatgctcactta

SEQ ID NO: 481438 - DNA, 19 bp, Mus musculus
  siRNA target sequence for B230354B21Rik (NM_175480.3,2079-2097).
cacgtcaatgctcacttaa

SEQ ID NO: 481439 - DNA, 19 bp, Mus musculus
  siRNA target sequence for B230354B21Rik (NM_175480.3,2081-2099).
cgtcaatgctcacttaatt

SEQ ID NO: 481440 - DNA, 19 bp, Mus musculus
  siRNA target sequence for B230354B21Rik (NM_175480.3,2082-2100).
gtcaatgctcacttaatta

SEQ ID NO: 481441 - DNA, 19 bp, Mus musculus
  siRNA target sequence for B230354B21Rik (NM_175480.3,2084-2102).
caatgctcacttaattaga

SEQ ID NO: 481442 - DNA, 19 bp, Mus musculus
  siRNA target sequence for B230354B21Rik (NM_175480.3,2235-2253).
gggaaaactttcaggttta

SEQ ID NO: 481443 - DNA, 19 bp, Mus musculus
  siRNA target sequence for B230379M23Rik (NM_172569.1,420-438).
gcaggtatcaccttcgtta

SEQ ID NO: 481444 - DNA, 19 bp, Mus musculus
  siRNA target sequence for B230379M23Rik (NM_172569.1,423-441).
ggtatcaccttcgttacta

SEQ ID NO: 481445 - DNA, 19 bp, Mus musculus
  siRNA target sequence for B230379M23Rik (NM_172569.1,424-442).
gtatcaccttcgttactat

SEQ ID NO: 481446 - DNA, 19 bp, Mus musculus
  siRNA target sequence for B230379M23Rik (NM_172569.1,428-446).
caccttcgttactataaaa

SEQ ID NO: 481447 - DNA, 19 bp, Mus musculus
  siRNA target sequence for B230379M23Rik (NM_172569.1,430-448).
ccttcgttactataaaact

SEQ ID NO: 481448 - DNA, 19 bp, Mus musculus
  siRNA target sequence for B230379M23Rik (NM_172569.1,460-478).
ccatgagacagactcaaaa

SEQ ID NO: 481449 - DNA, 19 bp, Mus musculus
  siRNA target sequence for B230379M23Rik (NM_172569.1,642-660).
gccatgccatgatagaaaa

SEQ ID NO: 481450 - DNA, 19 bp, Mus musculus
  siRNA target sequence for B230379M23Rik (NM_172569.1,643-661).
ccatgccatgatagaaaaa

SEQ ID NO: 481451 - DNA, 19 bp, Mus musculus
  siRNA target sequence for B230379M23Rik (NM_172569.1,890-908).
ggagacgcctgccagtatt

SEQ ID NO: 481452 - DNA, 19 bp, Mus musculus
  siRNA target sequence for B230379M23Rik (NM_172569.1,1008-1026).
gcgccttcgcccacataga

SEQ ID NO: 481453 - DNA, 19 bp, Mus musculus
  siRNA target sequence for B230379M23Rik (NM_172569.1,1009-1027).
cgccttcgcccacatagaa

SEQ ID NO: 481454 - DNA, 19 bp, Mus musculus
  siRNA target sequence for B230379M23Rik (NM_172569.1,1030-1048).
gccacccttaagtgatgat

SEQ ID NO: 481455 - DNA, 19 bp, Mus musculus
  siRNA target sequence for B230379M23Rik (NM_172569.1,1032-1050).
cacccttaagtgatgatgt

SEQ ID NO: 481456 - DNA, 19 bp, Mus musculus
  siRNA target sequence for B230379M23Rik (NM_172569.1,1085-1103).
ccaggtcccgtcttgtaca

SEQ ID NO: 481457 - DNA, 19 bp, Mus musculus
  siRNA target sequence for B230379M23Rik (NM_172569.1,1086-1104).
caggtcccgtcttgtacat

SEQ ID NO: 481458 - DNA, 19 bp, Mus musculus
  siRNA target sequence for B230379M23Rik (NM_172569.1,1171-1189).
cctcctctgtaggaatagt

SEQ ID NO: 481459 - DNA, 19 bp, Mus musculus
  siRNA target sequence for B230379M23Rik (NM_172569.1,1290-1308).
cccctggcagctacaagaa

SEQ ID NO: 481460 - DNA, 19 bp, Mus musculus
  siRNA target sequence for B230379M23Rik (NM_172569.1,1363-1381).
caagtgccaggctaaatta

SEQ ID NO: 481461 - DNA, 19 bp, Mus musculus
  siRNA target sequence for B230379M23Rik (NM_172569.1,1548-1566).
cccctggcatgaatgcaaa

SEQ ID NO: 481462 - DNA, 19 bp, Mus musculus
  siRNA target sequence for B230379M23Rik (NM_172569.1,1549-1567).
ccctggcatgaatgcaaat

SEQ ID NO: 481463 - DNA, 19 bp, Mus musculus
  siRNA target sequence for B230379M23Rik (NM_172569.1,1596-1614).
cggtagagtcggtcataga

SEQ ID NO: 481464 - DNA, 19 bp, Mus musculus
  siRNA target sequence for B230379M23Rik (NM_172569.1,1598-1616).
gtagagtcggtcatagagt

SEQ ID NO: 481465 - DNA, 19 bp, Mus musculus
  siRNA target sequence for B230379M23Rik (NM_172569.1,1847-1865).
cacttgagtcagtcagaaa

SEQ ID NO: 481466 - DNA, 19 bp, Mus musculus
  siRNA target sequence for Bat1a (NM_019693.2,1501-1519).
gctccggcttccgagattt

SEQ ID NO: 481467 - DNA, 19 bp, Mus musculus
  siRNA target sequence for Bat1a (NM_019693.2,1502-1520).
ctccggcttccgagatttt

SEQ ID NO: 481468 - DNA, 19 bp, Mus musculus
  siRNA target sequence for Bat1a (NM_019693.2,1505-1523).
cggcttccgagattttcta

SEQ ID NO: 481469 - DNA, 19 bp, Mus musculus
  siRNA target sequence for Bat1a (NM_019693.2,1797-1815).
gtcaaggtggcagtgtttt

SEQ ID NO: 481470 - DNA, 19 bp, Mus musculus
  siRNA target sequence for Bat1a (NM_019693.2,1818-1836).
ggcggtctgtctatcaaga

SEQ ID NO: 481471 - DNA, 19 bp, Mus musculus
  siRNA target sequence for Bat1a (NM_019693.2,1882-1900).
ggactcctggccgaattct

SEQ ID NO: 481472 - DNA, 19 bp, Mus musculus
  siRNA target sequence for Bat1a (NM_019693.2,1883-1901).
gactcctggccgaattcta

SEQ ID NO: 481473 - DNA, 19 bp, Mus musculus
  siRNA target sequence for Bat1a (NM_019693.2,1921-1939).
gcctgaacctcaaacacat

SEQ ID NO: 481474 - DNA, 19 bp, Mus musculus
  siRNA target sequence for Bat1a (NM_019693.2,2017-2035).
gcatgaccccccatgagaa

SEQ ID NO: 481475 - DNA, 19 bp, Mus musculus
  siRNA target sequence for Bat1a (NM_019693.2,2055-2073).
gctaccttgagcaaagaga

SEQ ID NO: 481476 - DNA, 19 bp, Mus musculus
  siRNA target sequence for Bat1a (NM_019693.2,2124-2142).
gatgacgagaccaagttga

SEQ ID NO: 481477 - DNA, 19 bp, Mus musculus
  siRNA target sequence for Bat1a (NM_019693.2,2160-2178).
cagtactacgtgaaactga

SEQ ID NO: 481478 - DNA, 19 bp, Mus musculus
  siRNA target sequence for Bat1a (NM_019693.2,2306-2324).
cccagccattgctatccat

SEQ ID NO: 481479 - DNA, 19 bp, Mus musculus
  siRNA target sequence for Bat1a (NM_019693.2,2353-2371).
ctcggtatcagcagttcaa

SEQ ID NO: 481480 - DNA, 19 bp, Mus musculus
  siRNA target sequence for Bat1a (NM_019693.2,2430-2448).
gagcgtgtgaacattgctt

SEQ ID NO: 481481 - DNA, 19 bp, Mus musculus
  siRNA target sequence for Bat1a (NM_019693.2,2434-2452).
gtgtgaacattgctttcaa

SEQ ID NO: 481482 - DNA, 19 bp, Mus musculus
  siRNA target sequence for Bat1a (NM_019693.2,2586-2604).
cgtttcgaggtcaacatca

SEQ ID NO: 481483 - DNA, 19 bp, Mus musculus
  siRNA target sequence for Bat4 (NM_032460.1,117-135).
ggccatccttcatcgaatt

SEQ ID NO: 481484 - DNA, 19 bp, Mus musculus
  siRNA target sequence for Bat4 (NM_032460.1,118-136).
gccatccttcatcgaattt

SEQ ID NO: 481485 - DNA, 19 bp, Mus musculus
  siRNA target sequence for Bat4 (NM_032460.1,119-137).
ccatccttcatcgaattta

SEQ ID NO: 481486 - DNA, 19 bp, Mus musculus
  siRNA target sequence for BB114266 (NM_172763.1,213-231).
cctgcattgccaaacctaa

SEQ ID NO: 481487 - DNA, 19 bp, Mus musculus
  siRNA target sequence for BB114266 (NM_172763.1,241-259).
caatttggagcgtggattt

SEQ ID NO: 481488 - DNA, 19 bp, Mus musculus
  siRNA target sequence for BB114266 (NM_172763.1,357-375).
gtttgcggcaactcagaaa

SEQ ID NO: 481489 - DNA, 19 bp, Mus musculus
  siRNA target sequence for BB114266 (NM_172763.1,361-379).
gcggcaactcagaaaaact

SEQ ID NO: 481490 - DNA, 19 bp, Mus musculus
  siRNA target sequence for BB114266 (NM_172763.1,448-466).
gacaacatcccgtcataga

SEQ ID NO: 481491 - DNA, 19 bp, Mus musculus
  siRNA target sequence for BB114266 (NM_172763.1,507-525).
ccaagaatcagacatcata

SEQ ID NO: 481492 - DNA, 19 bp, Mus musculus
  siRNA target sequence for BB114266 (NM_172763.1,549-567).
gtaaggactgcgagaaagt

SEQ ID NO: 481493 - DNA, 19 bp, Mus musculus
  siRNA target sequence for BB114266 (NM_172763.1,558-576).
gcgagaaagttttctgtaa

SEQ ID NO: 481494 - DNA, 19 bp, Mus musculus
  siRNA target sequence for BB114266 (NM_172763.1,559-577).
cgagaaagttttctgtaat

SEQ ID NO: 481495 - DNA, 19 bp, Mus musculus
  siRNA target sequence for BB114266 (NM_172763.1,595-613).
gcattacagaagaactcat

SEQ ID NO: 481496 - DNA, 19 bp, Mus musculus
  siRNA target sequence for BB114266 (NM_172763.1,638-656).
gatgaatgcagtaaaatgt

SEQ ID NO: 481497 - DNA, 19 bp, Mus musculus
  siRNA target sequence for BB114266 (NM_172763.1,648-666).
gtaaaatgtactattggaa

SEQ ID NO: 481498 - DNA, 19 bp, Mus musculus
  siRNA target sequence for BB114266 (NM_172763.1,758-776).
cacctcaatgcacatgaaa

SEQ ID NO: 481499 - DNA, 19 bp, Mus musculus
  siRNA target sequence for BB114266 (NM_172763.1,862-880).
gactcacctgggtgaaaaa

SEQ ID NO: 481500 - DNA, 19 bp, Mus musculus
  siRNA target sequence for BB114266 (NM_172763.1,866-884).
cacctgggtgaaaaacctt

SEQ ID NO: 481501 - DNA, 19 bp, Mus musculus
  siRNA target sequence for BB114266 (NM_172763.1,869-887).
ctgggtgaaaaacctttta

SEQ ID NO: 481502 - DNA, 19 bp, Mus musculus
  siRNA target sequence for BB114266 (NM_172763.1,922-940).
gtccaaactcgctatacat

SEQ ID NO: 481503 - DNA, 19 bp, Mus musculus
  siRNA target sequence for BB114266 (NM_172763.1,924-942).
ccaaactcgctatacatca

SEQ ID NO: 481504 - DNA, 19 bp, Mus musculus
  siRNA target sequence for BB114266 (NM_172763.1,1034-1052).
cattcatctgagaatcctt

SEQ ID NO: 481505 - DNA, 19 bp, Mus musculus
  siRNA target sequence for BC005471 (NM_145612.1,637-655).
gaaaatgatagcagacatt

SEQ ID NO: 481506 - DNA, 19 bp, Mus musculus
  siRNA target sequence for BC005471 (NM_145612.1,677-695).
gccatacagcaaatgaaga

SEQ ID NO: 481507 - DNA, 19 bp, Mus musculus
  siRNA target sequence for BC005471 (NM_145612.1,733-751).
caccgaggggccaaatcct

SEQ ID NO: 481508 - DNA, 19 bp, Mus musculus
  siRNA target sequence for BC005471 (NM_145612.1,735-753).
ccgaggggccaaatcctat

SEQ ID NO: 481509 - DNA, 19 bp, Mus musculus
  siRNA target sequence for BC005471 (NM_145612.1,739-757).
ggggccaaatcctatgaat

SEQ ID NO: 481510 - DNA, 19 bp, Mus musculus
  siRNA target sequence for BC005471 (NM_145612.1,741-759).
ggccaaatcctatgaatgt

SEQ ID NO: 481511 - DNA, 19 bp, Mus musculus
  siRNA target sequence for BC005471 (NM_145612.1,763-781).
gtgtgtttggaagcatttt

SEQ ID NO: 481512 - DNA, 19 bp, Mus musculus
  siRNA target sequence for BC005471 (NM_145612.1,767-785).
gtttggaagcattttacct

SEQ ID NO: 481513 - DNA, 19 bp, Mus musculus
  siRNA target sequence for BC005471 (NM_145612.1,784-802).
ctgaagccacagtatagca

SEQ ID NO: 481514 - DNA, 19 bp, Mus musculus
  siRNA target sequence for BC005471 (NM_145612.1,840-858).
ctgtaagaagtgtagagaa

SEQ ID NO: 481515 - DNA, 19 bp, Mus musculus
  siRNA target sequence for BC005471 (NM_145612.1,873-891).
gtctaccctcagtcagtat

SEQ ID NO: 481516 - DNA, 19 bp, Mus musculus
  siRNA target sequence for BC005471 (NM_145612.1,875-893).
ctaccctcagtcagtatca

SEQ ID NO: 481517 - DNA, 19 bp, Mus musculus
  siRNA target sequence for BC005471 (NM_145612.1,1251-1269).
gccttatgagtgtcaagta

SEQ ID NO: 481518 - DNA, 19 bp, Mus musculus
  siRNA target sequence for BC005471 (NM_145612.1,1258-1276).
gagtgtcaagtatgcaata

SEQ ID NO: 481519 - DNA, 19 bp, Mus musculus
  siRNA target sequence for BC005471 (NM_145612.1,1539-1557).
ctgtaattcacaacttact

SEQ ID NO: 481520 - DNA, 19 bp, Mus musculus
  siRNA target sequence for BC013481 (NM_139065.1,803-821).
gcgtactcaacgtgattgt

SEQ ID NO: 481521 - DNA, 19 bp, Mus musculus
  siRNA target sequence for BC013481 (NM_139065.1,805-823).
gtactcaacgtgattgtgt

SEQ ID NO: 481522 - DNA, 19 bp, Mus musculus
  siRNA target sequence for BC013481 (NM_139065.1,827-845).
ccagtgcggcagacaagat

SEQ ID NO: 481523 - DNA, 19 bp, Mus musculus
  siRNA target sequence for BC013481 (NM_139065.1,830-848).
gtgcggcagacaagatgaa

SEQ ID NO: 481524 - DNA, 19 bp, Mus musculus
  siRNA target sequence for BC013481 (NM_139065.1,1123-1141).
gccttcgtgcacttcacta

SEQ ID NO: 481525 - DNA, 19 bp, Mus musculus
  siRNA target sequence for BC013481 (NM_139065.1,1154-1172).
ctgtgcatgctatgaacaa

SEQ ID NO: 481526 - DNA, 19 bp, Mus musculus
  siRNA target sequence for BC013481 (NM_139065.1,1191-1209).
ggagggatcctgcttagaa

SEQ ID NO: 481527 - DNA, 19 bp, Mus musculus
  siRNA target sequence for BC013481 (NM_139065.1,1384-1402).
cgggactacttcgtgaaaa

SEQ ID NO: 481528 - DNA, 19 bp, Mus musculus
  siRNA target sequence for BC013481 (NM_139065.1,1396-1414).
gtgaaaacaggcagcataa

SEQ ID NO: 481529 - DNA, 19 bp, Mus musculus
  siRNA target sequence for BC013481 (NM_139065.1,1484-1502).
ccgctggccgtggtatata

SEQ ID NO: 481530 - DNA, 19 bp, Mus musculus
  siRNA target sequence for BC013481 (NM_139065.1,1485-1503).
cgctggccgtggtatatat

SEQ ID NO: 481531 - DNA, 19 bp, Mus musculus
  siRNA target sequence for BC013481 (NM_139065.1,1496-1514).
gtatatatagccgatatca

SEQ ID NO: 481532 - DNA, 19 bp, Mus musculus
  siRNA target sequence for BC013481 (NM_139065.1,1581-1599).
caatccagttgccattaaa

SEQ ID NO: 481533 - DNA, 19 bp, Mus musculus
  siRNA target sequence for BC013481 (NM_139065.1,1654-1672).
gccccagccccgaaaataa

SEQ ID NO: 481534 - DNA, 19 bp, Mus musculus
  siRNA target sequence for BC013481 (NM_139065.1,1655-1673).
ccccagccccgaaaataat

SEQ ID NO: 481535 - DNA, 19 bp, Mus musculus
  siRNA target sequence for BC021513 (NM_144894.2,635-653).
gcctgttgtcggtcagaaa

SEQ ID NO: 481536 - DNA, 19 bp, Mus musculus
  siRNA target sequence for BC021513 (NM_144894.2,861-879).
gagcggtgctaaagtgaat

SEQ ID NO: 481537 - DNA, 19 bp, Mus musculus
  siRNA target sequence for BC021513 (NM_144894.2,912-930).
gtatcacaacgctatggta

SEQ ID NO: 481538 - DNA, 19 bp, Mus musculus
  siRNA target sequence for BC021513 (NM_144894.2,967-985).
gtccgagtcctctacctat

SEQ ID NO: 481539 - DNA, 19 bp, Mus musculus
  siRNA target sequence for BC021513 (NM_144894.2,1101-1119).
ctttcaggatccagactta

SEQ ID NO: 481540 - DNA, 19 bp, Mus musculus
  siRNA target sequence for BC021513 (NM_144894.2,1107-1125).
ggatccagacttaagctta

SEQ ID NO: 481541 - DNA, 19 bp, Mus musculus
  siRNA target sequence for BC021513 (NM_144894.2,1204-1222).
ggctactataccgttaagt

SEQ ID NO: 481542 - DNA, 19 bp, Mus musculus
  siRNA target sequence for BC021513 (NM_144894.2,1205-1223).
gctactataccgttaagtt

SEQ ID NO: 481543 - DNA, 19 bp, Mus musculus
  siRNA target sequence for BC021513 (NM_144894.2,1206-1224).
ctactataccgttaagttt

SEQ ID NO: 481544 - DNA, 19 bp, Mus musculus
  siRNA target sequence for BC021513 (NM_144894.2,1214-1232).
ccgttaagtttgactcatt

SEQ ID NO: 481545 - DNA, 19 bp, Mus musculus
  siRNA target sequence for BC021513 (NM_144894.2,1441-1459).
gtcaagatgggctatgagt

SEQ ID NO: 481546 - DNA, 19 bp, Mus musculus
  siRNA target sequence for BC021513 (NM_144894.2,1611-1629).
ccggaggagtggtagtaga

SEQ ID NO: 481547 - DNA, 19 bp, Mus musculus
  siRNA target sequence for BC021513 (NM_144894.2,1659-1677).
gtttgactttttgaatgaa

SEQ ID NO: 481548 - DNA, 19 bp, Mus musculus
  siRNA target sequence for BC021921 (NM_145624.2,184-202).
ggaggaatgggctttacta

SEQ ID NO: 481549 - DNA, 19 bp, Mus musculus
  siRNA target sequence for BC021921 (NM_145624.2,296-314).
gatgaggaccatagatatt

SEQ ID NO: 481550 - DNA, 19 bp, Mus musculus
  siRNA target sequence for BC021921 (NM_145624.2,299-317).
gaggaccatagatattcta

SEQ ID NO: 481551 - DNA, 19 bp, Mus musculus
  siRNA target sequence for BC021921 (NM_145624.2,348-366).
gactgttggagcatagcaa

SEQ ID NO: 481552 - DNA, 19 bp, Mus musculus
  siRNA target sequence for BC021921 (NM_145624.2,358-376).
gcatagcaaaggtactgaa

SEQ ID NO: 481553 - DNA, 19 bp, Mus musculus
  siRNA target sequence for BC021921 (NM_145624.2,466-484).
ggacaacgtgctcattagt

SEQ ID NO: 481554 - DNA, 19 bp, Mus musculus
  siRNA target sequence for BC021921 (NM_145624.2,478-496).
cattagtcagtcatctctt

SEQ ID NO: 481555 - DNA, 19 bp, Mus musculus
  siRNA target sequence for BC021921 (NM_145624.2,483-501).
gtcagtcatctcttactgt

SEQ ID NO: 481556 - DNA, 19 bp, Mus musculus
  siRNA target sequence for BC021921 (NM_145624.2,521-539).
ccacacaaacctcatgaat

SEQ ID NO: 481557 - DNA, 19 bp, Mus musculus
  siRNA target sequence for BC021921 (NM_145624.2,548-566).
catggagagaacctctata

SEQ ID NO: 481558 - DNA, 19 bp, Mus musculus
  siRNA target sequence for BC021921 (NM_145624.2,552-570).
gagagaacctctataaatt

SEQ ID NO: 481559 - DNA, 19 bp, Mus musculus
  siRNA target sequence for BC021921 (NM_145624.2,592-610).
catttatccagaatgcttt

SEQ ID NO: 481560 - DNA, 19 bp, Mus musculus
  siRNA target sequence for BC021921 (NM_145624.2,631-649).
cactagacagagatcctat

SEQ ID NO: 481561 - DNA, 19 bp, Mus musculus
  siRNA target sequence for BC021921 (NM_145624.2,636-654).
gacagagatcctatgagtt

SEQ ID NO: 481562 - DNA, 19 bp, Mus musculus
  siRNA target sequence for BC021921 (NM_145624.2,681-699).
gtaatgattacattcaaat

SEQ ID NO: 481563 - DNA, 19 bp, Mus musculus
  siRNA target sequence for BC021921 (NM_145624.2,701-719).
cgtgtgaatgatgaaacta

SEQ ID NO: 481564 - DNA, 19 bp, Mus musculus
  siRNA target sequence for BC021921 (NM_145624.2,706-724).
gaatgatgaaactagagaa

SEQ ID NO: 481565 - DNA, 19 bp, Mus musculus
  siRNA target sequence for BC021921 (NM_145624.2,732-750).
gtatagataagcagcatta

SEQ ID NO: 481566 - DNA, 19 bp, Mus musculus
  siRNA target sequence for BC021921 (NM_145624.2,742-760).
gcagcattatgcctttaat

SEQ ID NO: 481567 - DNA, 19 bp, Mus musculus
  siRNA target sequence for BC021921 (NM_145624.2,743-761).
cagcattatgcctttaatt

SEQ ID NO: 481568 - DNA, 19 bp, Mus musculus
  siRNA target sequence for BC021921 (NM_145624.2,893-911).
ccatacaggtgtaatatat

SEQ ID NO: 481569 - DNA, 19 bp, Mus musculus
  siRNA target sequence for BC021921 (NM_145624.2,898-916).
caggtgtaatatatgtgat

SEQ ID NO: 481570 - DNA, 19 bp, Mus musculus
  siRNA target sequence for BC021921 (NM_145624.2,920-938).
gccttcacttgttcaacta

SEQ ID NO: 481571 - DNA, 19 bp, Mus musculus
  siRNA target sequence for BC021921 (NM_145624.2,921-939).
ccttcacttgttcaactaa

SEQ ID NO: 481572 - DNA, 19 bp, Mus musculus
  siRNA target sequence for BC021921 (NM_145624.2,927-945).
cttgttcaactaactttca

SEQ ID NO: 481573 - DNA, 19 bp, Mus musculus
  siRNA target sequence for BC021921 (NM_145624.2,933-951).
caactaactttcaagaaca

SEQ ID NO: 481574 - DNA, 19 bp, Mus musculus
  siRNA target sequence for BC021921 (NM_145624.2,1087-1105).
ggctttcagttatttgaca

SEQ ID NO: 481575 - DNA, 19 bp, Mus musculus
  siRNA target sequence for BC021921 (NM_145624.2,1088-1106).
gctttcagttatttgacaa

SEQ ID NO: 481576 - DNA, 19 bp, Mus musculus
  siRNA target sequence for BC021921 (NM_145624.2,1095-1113).
gttatttgacaaactttca

SEQ ID NO: 481577 - DNA, 19 bp, Mus musculus
  siRNA target sequence for BC021921 (NM_145624.2,1167-1185).
ggaaagctttcacttacta

SEQ ID NO: 481578 - DNA, 19 bp, Mus musculus
  siRNA target sequence for BC021921 (NM_145624.2,1172-1190).
gctttcacttactactatt

SEQ ID NO: 481579 - DNA, 19 bp, Mus musculus
  siRNA target sequence for BC021921 (NM_145624.2,1179-1197).
cttactactattcatttca

SEQ ID NO: 481580 - DNA, 19 bp, Mus musculus
  siRNA target sequence for BC021921 (NM_145624.2,1397-1415).
ccccatgtatgtttgcaat

SEQ ID NO: 481581 - DNA, 19 bp, Mus musculus
  siRNA target sequence for BC021921 (NM_145624.2,2028-2046).
gtaagtttagaatacatga

SEQ ID NO: 481582 - DNA, 19 bp, Mus musculus
  siRNA target sequence for BC021921 (NM_145624.2,2153-2171).
cctttcgtatgtaaacact

SEQ ID NO: 481583 - DNA, 19 bp, Mus musculus
  siRNA target sequence for BC021921 (NM_145624.2,2272-2290).
ccggtccagttcccttaaa

SEQ ID NO: 481584 - DNA, 19 bp, Mus musculus
  siRNA target sequence for BC021921 (NM_145624.2,2273-2291).
cggtccagttcccttaaaa

SEQ ID NO: 481585 - DNA, 19 bp, Mus musculus
  siRNA target sequence for BC021921 (NM_145624.2,2274-2292).
ggtccagttcccttaaaat

SEQ ID NO: 481586 - DNA, 19 bp, Mus musculus
  siRNA target sequence for BC021921 (NM_145624.2,2275-2293).
gtccagttcccttaaaata

SEQ ID NO: 481587 - DNA, 19 bp, Mus musculus
  siRNA target sequence for BC023179 (NM_145577.1,557-575).
ggccgtccaccctacaaca

SEQ ID NO: 481588 - DNA, 19 bp, Mus musculus
  siRNA target sequence for BC023179 (NM_145577.1,679-697).
ggggatgcccccatgaaca

SEQ ID NO: 481589 - DNA, 19 bp, Mus musculus
  siRNA target sequence for BC023179 (NM_145577.1,680-698).
gggatgcccccatgaacat

SEQ ID NO: 481590 - DNA, 19 bp, Mus musculus
  siRNA target sequence for BC023179 (NM_145577.1,1029-1047).
caaccttacacgtcacttt

SEQ ID NO: 481591 - DNA, 19 bp, Mus musculus
  siRNA target sequence for BC023179 (NM_145577.1,1032-1050).
ccttacacgtcactttcaa

SEQ ID NO: 481592 - DNA, 19 bp, Mus musculus
  siRNA target sequence for BC023179 (NM_145577.1,1037-1055).
cacgtcactttcaagttca

SEQ ID NO: 481593 - DNA, 19 bp, Mus musculus
  siRNA target sequence for BC027344 (NM_173738.2,345-363).
cgtctcagtgggacttttt

SEQ ID NO: 481594 - DNA, 19 bp, Mus musculus
  siRNA target sequence for BC027344 (NM_173738.2,384-402).
ctccttgttggaaaaagga

SEQ ID NO: 481595 - DNA, 19 bp, Mus musculus
  siRNA target sequence for BC027344 (NM_173738.2,406-424).
gacccctggatgattttga

SEQ ID NO: 481596 - DNA, 19 bp, Mus musculus
  siRNA target sequence for BC027344 (NM_173738.2,438-456).
gggaccttatccagacata

SEQ ID NO: 481597 - DNA, 19 bp, Mus musculus
  siRNA target sequence for BC027344 (NM_173738.2,442-460).
ccttatccagacatagatt

SEQ ID NO: 481598 - DNA, 19 bp, Mus musculus
  siRNA target sequence for BC027344 (NM_173738.2,448-466).
ccagacatagatttcagtt

SEQ ID NO: 481599 - DNA, 19 bp, Mus musculus
  siRNA target sequence for BC027344 (NM_173738.2,464-482).
gttctcagaacaagaagtt

SEQ ID NO: 481600 - DNA, 19 bp, Mus musculus
  siRNA target sequence for BC027344 (NM_173738.2,486-504).
gggaaaacctagcacatat

SEQ ID NO: 481601 - DNA, 19 bp, Mus musculus
  siRNA target sequence for BC027344 (NM_173738.2,498-516).
cacatatgaagaattatct

SEQ ID NO: 481602 - DNA, 19 bp, Mus musculus
  siRNA target sequence for BC027344 (NM_173738.2,542-560).
gaaaacgcagtcttgaaga

SEQ ID NO: 481603 - DNA, 19 bp, Mus musculus
  siRNA target sequence for BC027344 (NM_173738.2,581-599).
gggatggcaaaaatcagtt

SEQ ID NO: 481604 - DNA, 19 bp, Mus musculus
  siRNA target sequence for BC027344 (NM_173738.2,595-613).
cagtttcaaacgcatcaaa

SEQ ID NO: 481605 - DNA, 19 bp, Mus musculus
  siRNA target sequence for BC027344 (NM_173738.2,597-615).
gtttcaaacgcatcaaaat

SEQ ID NO: 481606 - DNA, 19 bp, Mus musculus
  siRNA target sequence for BC027344 (NM_173738.2,634-652).
ctggcagtcgcctatgaaa

SEQ ID NO: 481607 - DNA, 19 bp, Mus musculus
  siRNA target sequence for BC027344 (NM_173738.2,636-654).
ggcagtcgcctatgaaaaa

SEQ ID NO: 481608 - DNA, 19 bp, Mus musculus
  siRNA target sequence for BC027344 (NM_173738.2,662-680).
ctgtgaaccagggtatagt

SEQ ID NO: 481609 - DNA, 19 bp, Mus musculus
  siRNA target sequence for BC027344 (NM_173738.2,664-682).
gtgaaccagggtatagttt

SEQ ID NO: 481610 - DNA, 19 bp, Mus musculus
  siRNA target sequence for BC027344 (NM_173738.2,670-688).
cagggtatagttttcaaca

SEQ ID NO: 481611 - DNA, 19 bp, Mus musculus
  siRNA target sequence for BC027344 (NM_173738.2,743-761).
cccttactgtggaatctga

SEQ ID NO: 481612 - DNA, 19 bp, Mus musculus
  siRNA target sequence for BC027344 (NM_173738.2,753-771).
ggaatctgaccgtattctt

SEQ ID NO: 481613 - DNA, 19 bp, Mus musculus
  siRNA target sequence for BC027344 (NM_173738.2,782-800).
ctccccctggtaacaaagt

SEQ ID NO: 481614 - DNA, 19 bp, Mus musculus
  siRNA target sequence for BC027344 (NM_173738.2,917-935).
gtttgccttcaggaatact

SEQ ID NO: 481615 - DNA, 19 bp, Mus musculus
  siRNA target sequence for BC027344 (NM_173738.2,986-1004).
gcggaaagtcctttacttt

SEQ ID NO: 481616 - DNA, 19 bp, Mus musculus
  siRNA target sequence for BC027344 (NM_173738.2,1017-1035).
gacgcgacatcgcagaatt

SEQ ID NO: 481617 - DNA, 19 bp, Mus musculus
  siRNA target sequence for BC027344 (NM_173738.2,1019-1037).
cgcgacatcgcagaattca

SEQ ID NO: 481618 - DNA, 19 bp, Mus musculus
  siRNA target sequence for BC027344 (NM_173738.2,1256-1274).
gcaaagatttcgattgtca

SEQ ID NO: 481619 - DNA, 19 bp, Mus musculus
  siRNA target sequence for BC027344 (NM_173738.2,1344-1362).
gctttttaggtttcattca

SEQ ID NO: 481620 - DNA, 19 bp, Mus musculus
  siRNA target sequence for BC027344 (NM_173738.2,1372-1390).
gcgcacacacggattcact

SEQ ID NO: 481621 - DNA, 19 bp, Mus musculus
  siRNA target sequence for BC027344 (NM_173738.2,1696-1714).
gcttttggttgtcattcaa

SEQ ID NO: 481622 - DNA, 19 bp, Mus musculus
  siRNA target sequence for BC027344 (NM_173738.2,1717-1735).
cttagtcgccatcagaaaa

SEQ ID NO: 481623 - DNA, 19 bp, Mus musculus
  siRNA target sequence for BC031468 (NM_194055.1,178-196).
cggagcctcccaagttgaa

SEQ ID NO: 481624 - DNA, 19 bp, Mus musculus
  siRNA target sequence for BC031468 (NM_194055.1,199-217).
catggggaacataatttta

SEQ ID NO: 481625 - DNA, 19 bp, Mus musculus
  siRNA target sequence for BC031468 (NM_194055.1,223-241).
gatctccgagccctacaat

SEQ ID NO: 481626 - DNA, 19 bp, Mus musculus
  siRNA target sequence for BC031468 (NM_194055.1,232-250).
gccctacaatcacagattt

SEQ ID NO: 481627 - DNA, 19 bp, Mus musculus
  siRNA target sequence for BC031468 (NM_194055.1,294-312).
gcagcaagatggaacttat

SEQ ID NO: 481628 - DNA, 19 bp, Mus musculus
  siRNA target sequence for BC031468 (NM_194055.1,295-313).
cagcaagatggaacttatt

SEQ ID NO: 481629 - DNA, 19 bp, Mus musculus
  siRNA target sequence for BC031468 (NM_194055.1,368-386).
gatattgcaaggttcttca

SEQ ID NO: 481630 - DNA, 19 bp, Mus musculus
  siRNA target sequence for BC031468 (NM_194055.1,455-473).
gctctggttagatttgtaa

SEQ ID NO: 481631 - DNA, 19 bp, Mus musculus
  siRNA target sequence for BC031468 (NM_194055.1,525-543).
cccggtacattgaggttta

SEQ ID NO: 481632 - DNA, 19 bp, Mus musculus
  siRNA target sequence for BC031468 (NM_194055.1,527-545).
cggtacattgaggtttaca

SEQ ID NO: 481633 - DNA, 19 bp, Mus musculus
  siRNA target sequence for BC031468 (NM_194055.1,528-546).
ggtacattgaggtttacaa

SEQ ID NO: 481634 - DNA, 19 bp, Mus musculus
  siRNA target sequence for BC031468 (NM_194055.1,529-547).
gtacattgaggtttacaaa

SEQ ID NO: 481635 - DNA, 19 bp, Mus musculus
  siRNA target sequence for BC031468 (NM_194055.1,552-570).
caggcgaagatttccttaa

SEQ ID NO: 481636 - DNA, 19 bp, Mus musculus
  siRNA target sequence for BC031468 (NM_194055.1,554-572).
ggcgaagatttccttaaaa

SEQ ID NO: 481637 - DNA, 19 bp, Mus musculus
  siRNA target sequence for BC031468 (NM_194055.1,555-573).
gcgaagatttccttaaaat

SEQ ID NO: 481638 - DNA, 19 bp, Mus musculus
  siRNA target sequence for BC031468 (NM_194055.1,556-574).
cgaagatttccttaaaatt

SEQ ID NO: 481639 - DNA, 19 bp, Mus musculus
  siRNA target sequence for BC031468 (NM_194055.1,723-741).
gcatcctcttcgttaccta

SEQ ID NO: 481640 - DNA, 19 bp, Mus musculus
  siRNA target sequence for BC031468 (NM_194055.1,756-774).
caaccggagatgcttttgt

SEQ ID NO: 481641 - DNA, 19 bp, Mus musculus
  siRNA target sequence for BC031468 (NM_194055.1,824-842).
gagttgctgggtaaaagat

SEQ ID NO: 481642 - DNA, 19 bp, Mus musculus
  siRNA target sequence for BC031468 (NM_194055.1,861-879).
gcacagctgccgaagttca

SEQ ID NO: 481643 - DNA, 19 bp, Mus musculus
  siRNA target sequence for BC031468 (NM_194055.1,962-980).
gtgcctcccacgaatgtca

SEQ ID NO: 481644 - DNA, 19 bp, Mus musculus
  siRNA target sequence for BC031468 (NM_194055.1,1008-1026).
cctatgctgccacaataga

SEQ ID NO: 481645 - DNA, 19 bp, Mus musculus
  siRNA target sequence for BC031468 (NM_194055.1,1009-1027).
ctatgctgccacaatagaa

SEQ ID NO: 481646 - DNA, 19 bp, Mus musculus
  siRNA target sequence for BC031468 (NM_194055.1,1047-1065).
gggagttttccacagatat

SEQ ID NO: 481647 - DNA, 19 bp, Mus musculus
  siRNA target sequence for BC031468 (NM_194055.1,1051-1069).
gttttccacagatattcgt

SEQ ID NO: 481648 - DNA, 19 bp, Mus musculus
  siRNA target sequence for BC031468 (NM_194055.1,1073-1091).
catggagtgcacatggtat

SEQ ID NO: 481649 - DNA, 19 bp, Mus musculus
  siRNA target sequence for BC031468 (NM_194055.1,1076-1094).
ggagtgcacatggtattga

SEQ ID NO: 481650 - DNA, 19 bp, Mus musculus
  siRNA target sequence for BC031468 (NM_194055.1,1077-1095).
gagtgcacatggtattgaa

SEQ ID NO: 481651 - DNA, 19 bp, Mus musculus
  siRNA target sequence for BC031468 (NM_194055.1,1110-1128).
cgtcaggagatgcctttat

SEQ ID NO: 481652 - DNA, 19 bp, Mus musculus
  siRNA target sequence for BC031468 (NM_194055.1,1160-1178).
gctgcgcagaagtaccata

SEQ ID NO: 481653 - DNA, 19 bp, Mus musculus
  siRNA target sequence for BC031468 (NM_194055.1,1161-1179).
ctgcgcagaagtaccataa

SEQ ID NO: 481654 - DNA, 19 bp, Mus musculus
  siRNA target sequence for BC031468 (NM_194055.1,1163-1181).
gcgcagaagtaccataaaa

SEQ ID NO: 481655 - DNA, 19 bp, Mus musculus
  siRNA target sequence for BC031468 (NM_194055.1,1164-1182).
cgcagaagtaccataaaaa

SEQ ID NO: 481656 - DNA, 19 bp, Mus musculus
  siRNA target sequence for BC031468 (NM_194055.1,1165-1183).
gcagaagtaccataaaaaa

SEQ ID NO: 481657 - DNA, 19 bp, Mus musculus
  siRNA target sequence for BC031468 (NM_194055.1,1185-1203).
ccatgaaggacagatatgt

SEQ ID NO: 481658 - DNA, 19 bp, Mus musculus
  siRNA target sequence for BC031468 (NM_194055.1,1189-1207).
gaaggacagatatgttgaa

SEQ ID NO: 481659 - DNA, 19 bp, Mus musculus
  siRNA target sequence for BC031468 (NM_194055.1,1218-1236).
gttcagctgaggagatgaa

SEQ ID NO: 481660 - DNA, 19 bp, Mus musculus
  siRNA target sequence for BC031468 (NM_194055.1,1224-1242).
ctgaggagatgaactttgt

SEQ ID NO: 481661 - DNA, 19 bp, Mus musculus
  siRNA target sequence for BC031468 (NM_194055.1,1252-1270).
gggcactttaaatcgaaat

SEQ ID NO: 481662 - DNA, 19 bp, Mus musculus
  siRNA target sequence for BC031468 (NM_194055.1,1322-1340).
cccacggctgtgattccta

SEQ ID NO: 481663 - DNA, 19 bp, Mus musculus
  siRNA target sequence for BC031468 (NM_194055.1,1342-1360).
cgaagctgccatttatcaa

SEQ ID NO: 481664 - DNA, 19 bp, Mus musculus
  siRNA target sequence for BC031468 (NM_194055.1,1445-1463).
gcctactatcccagtgttt

SEQ ID NO: 481665 - DNA, 19 bp, Mus musculus
  siRNA target sequence for BC049953 (NM_172121.1,48-66).
gcctcctgcagggtctaat

SEQ ID NO: 481666 - DNA, 19 bp, Mus musculus
  siRNA target sequence for BC049953 (NM_172121.1,59-77).
ggtctaattgatgactata

SEQ ID NO: 481667 - DNA, 19 bp, Mus musculus
  siRNA target sequence for BC049953 (NM_172121.1,62-80).
ctaattgatgactataaaa

SEQ ID NO: 481668 - DNA, 19 bp, Mus musculus
  siRNA target sequence for BC049953 (NM_172121.1,214-232).
cccttcgtggcgcaagaaa

SEQ ID NO: 481669 - DNA, 19 bp, Mus musculus
  siRNA target sequence for BC049953 (NM_172121.1,215-233).
ccttcgtggcgcaagaaat

SEQ ID NO: 481670 - DNA, 19 bp, Mus musculus
  siRNA target sequence for BC049953 (NM_172121.1,216-234).
cttcgtggcgcaagaaata

SEQ ID NO: 481671 - DNA, 19 bp, Mus musculus
  siRNA target sequence for BC049953 (NM_172121.1,361-379).
gctcagtccagatcagaat

SEQ ID NO: 481672 - DNA, 19 bp, Mus musculus
  siRNA target sequence for BC049953 (NM_172121.1,362-380).
ctcagtccagatcagaata

SEQ ID NO: 481673 - DNA, 19 bp, Mus musculus
  siRNA target sequence for BC049953 (NM_172121.1,366-384).
gtccagatcagaatatggt

SEQ ID NO: 481674 - DNA, 19 bp, Mus musculus
  siRNA target sequence for BC049953 (NM_172121.1,368-386).
ccagatcagaatatggtta

SEQ ID NO: 481675 - DNA, 19 bp, Mus musculus
  siRNA target sequence for BC049953 (NM_172121.1,369-387).
cagatcagaatatggttat

SEQ ID NO: 481676 - DNA, 19 bp, Mus musculus
  siRNA target sequence for BC049953 (NM_172121.1,659-677).
cggcggacagtcagtgaaa

SEQ ID NO: 481677 - DNA, 19 bp, Mus musculus
  siRNA target sequence for BC049953 (NM_172121.1,661-679).
gcggacagtcagtgaaaat

SEQ ID NO: 481678 - DNA, 19 bp, Mus musculus
  siRNA target sequence for BC049953 (NM_172121.1,745-763).
gaaggtaggccctcattct

SEQ ID NO: 481679 - DNA, 19 bp, Mus musculus
  siRNA target sequence for BC049953 (NM_172121.1,755-773).
cctcattctaccagctatt

SEQ ID NO: 481680 - DNA, 19 bp, Mus musculus
  siRNA target sequence for BC049953 (NM_172121.1,904-922).
ctgtcgaaccagcaagttt

SEQ ID NO: 481681 - DNA, 19 bp, Mus musculus
  siRNA target sequence for BC049953 (NM_172121.1,923-941).
cggaaaaacaactacaaat

SEQ ID NO: 481682 - DNA, 19 bp, Mus musculus
  siRNA target sequence for BC049953 (NM_172121.1,1021-1039).
ggccactttgggtacagtt

SEQ ID NO: 481683 - DNA, 19 bp, Mus musculus
  siRNA target sequence for BC049953 (NM_172121.1,1030-1048).
gggtacagttggaaagaca

SEQ ID NO: 481684 - DNA, 19 bp, Mus musculus
  siRNA target sequence for BC049953 (NM_172121.1,1368-1386).
gcattcctggggacaagaa

SEQ ID NO: 481685 - DNA, 19 bp, Mus musculus
  siRNA target sequence for BC049953 (NM_172121.1,1612-1630).
gacccgctaccgcattgtt

SEQ ID NO: 481686 - DNA, 19 bp, Mus musculus
  siRNA target sequence for BC049953 (NM_172121.1,1614-1632).
cccgctaccgcattgttaa

SEQ ID NO: 481687 - DNA, 19 bp, Mus musculus
  siRNA target sequence for BC049953 (NM_172121.1,1616-1634).
cgctaccgcattgttaaga

SEQ ID NO: 481688 - DNA, 19 bp, Mus musculus
  siRNA target sequence for BC049953 (NM_172121.1,1617-1635).
gctaccgcattgttaagaa

SEQ ID NO: 481689 - DNA, 19 bp, Mus musculus
  siRNA target sequence for BC049953 (NM_172121.1,1713-1731).
ccaggtccctagtgctaaa

SEQ ID NO: 481690 - DNA, 19 bp, Mus musculus
  siRNA target sequence for BC049953 (NM_172121.1,1780-1798).
ccctcgatggcgcaacaaa

SEQ ID NO: 481691 - DNA, 19 bp, Mus musculus
  siRNA target sequence for BC049953 (NM_172121.1,1838-1856).
gccaacaagctctccaaaa

SEQ ID NO: 481692 - DNA, 19 bp, Mus musculus
  siRNA target sequence for BC049953 (NM_172121.1,2007-2025).
gagagtactgcatgtacta

SEQ ID NO: 481693 - DNA, 19 bp, Mus musculus
  siRNA target sequence for BC049953 (NM_172121.1,2089-2107).
ggccgtgtgcaccagattt

SEQ ID NO: 481694 - DNA, 19 bp, Mus musculus
  siRNA target sequence for BC049953 (NM_172121.1,2091-2109).
ccgtgtgcaccagatttgt

SEQ ID NO: 481695 - DNA, 19 bp, Mus musculus
  siRNA target sequence for BC049953 (NM_172121.1,2111-2129).
cgaggcacatgcaagaaga

SEQ ID NO: 481696 - DNA, 19 bp, Mus musculus
  siRNA target sequence for BC049953 (NM_172121.1,2180-2198).
gtgtgctcctactttctga

SEQ ID NO: 481697 - DNA, 19 bp, Mus musculus
  siRNA target sequence for BC050092 (NM_181419.2,263-281).
ctagggcactgtatgaaca

SEQ ID NO: 481698 - DNA, 19 bp, Mus musculus
  siRNA target sequence for BC050092 (NM_181419.2,344-362).
gacaggaacctctcagatt

SEQ ID NO: 481699 - DNA, 19 bp, Mus musculus
  siRNA target sequence for BC050092 (NM_181419.2,346-364).
caggaacctctcagatttt

SEQ ID NO: 481700 - DNA, 19 bp, Mus musculus
  siRNA target sequence for BC050092 (NM_181419.2,367-385).
catattgactgcaccaatt

SEQ ID NO: 481701 - DNA, 19 bp, Mus musculus
  siRNA target sequence for BC050092 (NM_181419.2,425-443).
gctagaaccaccgaaaata

SEQ ID NO: 481702 - DNA, 19 bp, Mus musculus
  siRNA target sequence for BC050092 (NM_181419.2,1104-1122).
gccggtcacagcttactct

SEQ ID NO: 481703 - DNA, 19 bp, Mus musculus
  siRNA target sequence for BC050092 (NM_181419.2,1105-1123).
ccggtcacagcttactcta

SEQ ID NO: 481704 - DNA, 19 bp, Mus musculus
  siRNA target sequence for BC050092 (NM_181419.2,1186-1204).
ctacaaggcacacctaatt

SEQ ID NO: 481705 - DNA, 19 bp, Mus musculus
  siRNA target sequence for BC050092 (NM_181419.2,1189-1207).
caaggcacacctaattaga

SEQ ID NO: 481706 - DNA, 19 bp, Mus musculus
  siRNA target sequence for BC050092 (NM_181419.2,1192-1210).
ggcacacctaattagacat

SEQ ID NO: 481707 - DNA, 19 bp, Mus musculus
  siRNA target sequence for BC050092 (NM_181419.2,1465-1483).
gactgtccatacagatgaa

SEQ ID NO: 481708 - DNA, 19 bp, Mus musculus
  siRNA target sequence for BC050092 (NM_181419.2,1467-1485).
ctgtccatacagatgaaca

SEQ ID NO: 481709 - DNA, 19 bp, Mus musculus
  siRNA target sequence for BC052066 (NM_172761.1,170-188).
ggaatcccatgatatagct

SEQ ID NO: 481710 - DNA, 19 bp, Mus musculus
  siRNA target sequence for BC052066 (NM_172761.1,275-293).
ccatgtggccagaaccatt

SEQ ID NO: 481711 - DNA, 19 bp, Mus musculus
  siRNA target sequence for BC052066 (NM_172761.1,282-300).
gccagaaccattaaagtca

SEQ ID NO: 481712 - DNA, 19 bp, Mus musculus
  siRNA target sequence for BC052066 (NM_172761.1,304-322).
cggacgctcctcagagaaa

SEQ ID NO: 481713 - DNA, 19 bp, Mus musculus
  siRNA target sequence for BC052066 (NM_172761.1,378-396).
ctgcgaacagggctgttta

SEQ ID NO: 481714 - DNA, 19 bp, Mus musculus
  siRNA target sequence for BC052066 (NM_172761.1,381-399).
cgaacagggctgtttaaca

SEQ ID NO: 481715 - DNA, 19 bp, Mus musculus
  siRNA target sequence for BC052066 (NM_172761.1,382-400).
gaacagggctgtttaacaa

SEQ ID NO: 481716 - DNA, 19 bp, Mus musculus
  siRNA target sequence for BC052066 (NM_172761.1,385-403).
cagggctgtttaacaagat

SEQ ID NO: 481717 - DNA, 19 bp, Mus musculus
  siRNA target sequence for BC052066 (NM_172761.1,418-436).
gagccaccaaagacattct

SEQ ID NO: 481718 - DNA, 19 bp, Mus musculus
  siRNA target sequence for BC052066 (NM_172761.1,477-495).
gtcccagtgggcttggatt

SEQ ID NO: 481719 - DNA, 19 bp, Mus musculus
  siRNA target sequence for BC052066 (NM_172761.1,574-592).
gctatgctgatcttgaata

SEQ ID NO: 481720 - DNA, 19 bp, Mus musculus
  siRNA target sequence for BC052066 (NM_172761.1,628-646).
ggacaccggttgtcacaat

SEQ ID NO: 481721 - DNA, 19 bp, Mus musculus
  siRNA target sequence for BC052066 (NM_172761.1,629-647).
gacaccggttgtcacaatt

SEQ ID NO: 481722 - DNA, 19 bp, Mus musculus
  siRNA target sequence for BC052066 (NM_172761.1,631-649).
caccggttgtcacaattgt

SEQ ID NO: 481723 - DNA, 19 bp, Mus musculus
  siRNA target sequence for BC052066 (NM_172761.1,789-807).
gtcagctgtgagatgctta

SEQ ID NO: 481724 - DNA, 19 bp, Mus musculus
  siRNA target sequence for BC052066 (NM_172761.1,1112-1130).
ggcagttctacactataca

SEQ ID NO: 481725 - DNA, 19 bp, Mus musculus
  siRNA target sequence for BC052066 (NM_172761.1,1209-1227).
gggcagcagagggatatgt

SEQ ID NO: 481726 - DNA, 19 bp, Mus musculus
  siRNA target sequence for Bicc1 (NM_031397.1,178-196).
ccgcgtggacaggaagaaa

SEQ ID NO: 481727 - DNA, 19 bp, Mus musculus
  siRNA target sequence for Bicc1 (NM_031397.1,234-252).
gccgaagtggggaagactt

SEQ ID NO: 481728 - DNA, 19 bp, Mus musculus
  siRNA target sequence for Bicc1 (NM_031397.1,235-253).
ccgaagtggggaagacttt

SEQ ID NO: 481729 - DNA, 19 bp, Mus musculus
  siRNA target sequence for Bicc1 (NM_031397.1,236-254).
cgaagtggggaagactttt

SEQ ID NO: 481730 - DNA, 19 bp, Mus musculus
  siRNA target sequence for Bicc1 (NM_031397.1,237-255).
gaagtggggaagacttttt

SEQ ID NO: 481731 - DNA, 19 bp, Mus musculus
  siRNA target sequence for Bicc1 (NM_031397.1,243-261).
gggaagacttttttcagaa

SEQ ID NO: 481732 - DNA, 19 bp, Mus musculus
  siRNA target sequence for Bicc1 (NM_031397.1,290-308).
gcatggccgtccaaactga

SEQ ID NO: 481733 - DNA, 19 bp, Mus musculus
  siRNA target sequence for Bicc1 (NM_031397.1,291-309).
catggccgtccaaactgaa

SEQ ID NO: 481734 - DNA, 19 bp, Mus musculus
  siRNA target sequence for Bicc1 (NM_031397.1,313-331).
cggggctaaatccaagaaa

SEQ ID NO: 481735 - DNA, 19 bp, Mus musculus
  siRNA target sequence for Bicc1 (NM_031397.1,315-333).
gggctaaatccaagaaaga

SEQ ID NO: 481736 - DNA, 19 bp, Mus musculus
  siRNA target sequence for Bicc1 (NM_031397.1,316-334).
ggctaaatccaagaaagat

SEQ ID NO: 481737 - DNA, 19 bp, Mus musculus
  siRNA target sequence for Bicc1 (NM_031397.1,377-395).
gccaaagaaatgatcatgt

SEQ ID NO: 481738 - DNA, 19 bp, Mus musculus
  siRNA target sequence for Bicc1 (NM_031397.1,398-416).
gtcttagacacaaaaagca

SEQ ID NO: 481739 - DNA, 19 bp, Mus musculus
  siRNA target sequence for Bicc1 (NM_031397.1,414-432).
gcaaccgcgtcacattgaa

SEQ ID NO: 481740 - DNA, 19 bp, Mus musculus
  siRNA target sequence for Bicc1 (NM_031397.1,471-489).
gcaagggtggtaacaacat

SEQ ID NO: 481741 - DNA, 19 bp, Mus musculus
  siRNA target sequence for Bicc1 (NM_031397.1,640-658).
ggtgctgatgtttgagtta

SEQ ID NO: 481742 - DNA, 19 bp, Mus musculus
  siRNA target sequence for Bicc1 (NM_031397.1,732-750).
gcgtttctgtgtcctttaa

SEQ ID NO: 481743 - DNA, 19 bp, Mus musculus
  siRNA target sequence for Bicc1 (NM_031397.1,751-769).
gcagaggtctcgaatgtat

SEQ ID NO: 481744 - DNA, 19 bp, Mus musculus
  siRNA target sequence for Bicc1 (NM_031397.1,788-806).
cgaggctctcagaataaca

SEQ ID NO: 481745 - DNA, 19 bp, Mus musculus
  siRNA target sequence for Bicc1 (NM_031397.1,791-809).
ggctctcagaataacacta

SEQ ID NO: 481746 - DNA, 19 bp, Mus musculus
  siRNA target sequence for Bicc1 (NM_031397.1,792-810).
gctctcagaataacactaa

SEQ ID NO: 481747 - DNA, 19 bp, Mus musculus
  siRNA target sequence for Bicc1 (NM_031397.1,935-953).
gggagcaacgtcaaacaca

SEQ ID NO: 481748 - DNA, 19 bp, Mus musculus
  siRNA target sequence for Bicc1 (NM_031397.1,936-954).
ggagcaacgtcaaacacat

SEQ ID NO: 481749 - DNA, 19 bp, Mus musculus
  siRNA target sequence for Bicc1 (NM_031397.1,939-957).
gcaacgtcaaacacatcat

SEQ ID NO: 481750 - DNA, 19 bp, Mus musculus
  siRNA target sequence for Bicc1 (NM_031397.1,1025-1043).
ctccagggcaccattgagt

SEQ ID NO: 481751 - DNA, 19 bp, Mus musculus
  siRNA target sequence for Bicc1 (NM_031397.1,1050-1068).
gcctagcaaggcagtatct

SEQ ID NO: 481752 - DNA, 19 bp, Mus musculus
  siRNA target sequence for Bicc1 (NM_031397.1,1077-1095).
gtcttcctctggtgttgat

SEQ ID NO: 481753 - DNA, 19 bp, Mus musculus
  siRNA target sequence for Bicc1 (NM_031397.1,1154-1172).
cagctggacgtctttatca

SEQ ID NO: 481754 - DNA, 19 bp, Mus musculus
  siRNA target sequence for Bicc1 (NM_031397.1,1156-1174).
gctggacgtctttatcagt

SEQ ID NO: 481755 - DNA, 19 bp, Mus musculus
  siRNA target sequence for Bicc1 (NM_031397.1,1159-1177).
ggacgtctttatcagtatt

SEQ ID NO: 481756 - DNA, 19 bp, Mus musculus
  siRNA target sequence for Bicc1 (NM_031397.1,1162-1180).
cgtctttatcagtattaaa

SEQ ID NO: 481757 - DNA, 19 bp, Mus musculus
  siRNA target sequence for Bicc1 (NM_031397.1,1341-1359).
gtcccagcctggatatctt

SEQ ID NO: 481758 - DNA, 19 bp, Mus musculus
  siRNA target sequence for Bicc1 (NM_031397.1,1379-1397).
ctcactggactaggtttat

SEQ ID NO: 481759 - DNA, 19 bp, Mus musculus
  siRNA target sequence for Bicc1 (NM_031397.1,1549-1567).
cacaggtttctctacgata

SEQ ID NO: 481760 - DNA, 19 bp, Mus musculus
  siRNA target sequence for Bicc1 (NM_031397.1,1560-1578).
ctacgataccacaccttat

SEQ ID NO: 481761 - DNA, 19 bp, Mus musculus
  siRNA target sequence for Bicc1 (NM_031397.1,1563-1581).
cgataccacaccttatgct

SEQ ID NO: 481762 - DNA, 19 bp, Mus musculus
  siRNA target sequence for Bicc1 (NM_031397.1,1564-1582).
gataccacaccttatgctt

SEQ ID NO: 481763 - DNA, 19 bp, Mus musculus
  siRNA target sequence for Bicc1 (NM_031397.1,1592-1610).
gcccaggccacattaacca

SEQ ID NO: 481764 - DNA, 19 bp, Mus musculus
  siRNA target sequence for Bicc1 (NM_031397.1,1597-1615).
ggccacattaaccaatatt

SEQ ID NO: 481765 - DNA, 19 bp, Mus musculus
  siRNA target sequence for Bicc1 (NM_031397.1,1598-1616).
gccacattaaccaatattt

SEQ ID NO: 481766 - DNA, 19 bp, Mus musculus
  siRNA target sequence for Bicc1 (NM_031397.1,1599-1617).
ccacattaaccaatatttt

SEQ ID NO: 481767 - DNA, 19 bp, Mus musculus
  siRNA target sequence for Bicc1 (NM_031397.1,1720-1738).
catctctgcgtctataaat

SEQ ID NO: 481768 - DNA, 19 bp, Mus musculus
  siRNA target sequence for Bicc1 (NM_031397.1,1723-1741).
ctctgcgtctataaatgga

SEQ ID NO: 481769 - DNA, 19 bp, Mus musculus
  siRNA target sequence for Bicc1 (NM_031397.1,1747-1765).
gcagcctgcaaacatgaaa

SEQ ID NO: 481770 - DNA, 19 bp, Mus musculus
  siRNA target sequence for Bicc1 (NM_031397.1,1785-1803).
catcgcttggggaaaaagt

SEQ ID NO: 481771 - DNA, 19 bp, Mus musculus
  siRNA target sequence for Bicc1 (NM_031397.1,1938-1956).
gaaacgctggcgacttgaa

SEQ ID NO: 481772 - DNA, 19 bp, Mus musculus
  siRNA target sequence for Bicc1 (NM_031397.1,2012-2030).
ctgcagggcacgaagaact

SEQ ID NO: 481773 - DNA, 19 bp, Mus musculus
  siRNA target sequence for Bicc1 (NM_031397.1,2088-2106).
gtccgcttgctgacaagaa

SEQ ID NO: 481774 - DNA, 19 bp, Mus musculus
  siRNA target sequence for Bicc1 (NM_031397.1,2176-2194).
ggcctcgcagccaacatat

SEQ ID NO: 481775 - DNA, 19 bp, Mus musculus
  siRNA target sequence for Bicc1 (NM_031397.1,2178-2196).
cctcgcagccaacatatgt

SEQ ID NO: 481776 - DNA, 19 bp, Mus musculus
  siRNA target sequence for Bicc1 (NM_031397.1,2200-2218).
catgcaggcatttgattat

SEQ ID NO: 481777 - DNA, 19 bp, Mus musculus
  siRNA target sequence for Bicc1 (NM_031397.1,2238-2256).
ccaccaaagcgatgttaaa

SEQ ID NO: 481778 - DNA, 19 bp, Mus musculus
  siRNA target sequence for Bicc1 (NM_031397.1,2241-2259).
ccaaagcgatgttaaagaa

SEQ ID NO: 481779 - DNA, 19 bp, Mus musculus
  siRNA target sequence for Bicc1 (NM_031397.1,2275-2293).
ggtcagaacacctacgaat

SEQ ID NO: 481780 - DNA, 19 bp, Mus musculus
  siRNA target sequence for Bicc1 (NM_031397.1,2276-2294).
gtcagaacacctacgaata

SEQ ID NO: 481781 - DNA, 19 bp, Mus musculus
  siRNA target sequence for Bicc1 (NM_031397.1,2322-2340).
ccatgccggcagaaaccat

SEQ ID NO: 481782 - DNA, 19 bp, Mus musculus
  siRNA target sequence for Bicc1 (NM_031397.1,2323-2341).
catgccggcagaaaccatt

SEQ ID NO: 481783 - DNA, 19 bp, Mus musculus
  siRNA target sequence for Bicc1 (NM_031397.1,2328-2346).
cggcagaaaccattaagga

SEQ ID NO: 481784 - DNA, 19 bp, Mus musculus
  siRNA target sequence for Bicc1 (NM_031397.1,2357-2375).
gccaaccacgtatcctata

SEQ ID NO: 481785 - DNA, 19 bp, Mus musculus
  siRNA target sequence for Bicc1 (NM_031397.1,2358-2376).
ccaaccacgtatcctataa

SEQ ID NO: 481786 - DNA, 19 bp, Mus musculus
  siRNA target sequence for Bicc1 (NM_031397.1,2473-2491).
gagagaccggaatggaata

SEQ ID NO: 481787 - DNA, 19 bp, Mus musculus
  siRNA target sequence for Bicc1 (NM_031397.1,2495-2513).
cccatgggtcacagtgaat

SEQ ID NO: 481788 - DNA, 19 bp, Mus musculus
  siRNA target sequence for Bicc1 (NM_031397.1,2496-2514).
ccatgggtcacagtgaatt

SEQ ID NO: 481789 - DNA, 19 bp, Mus musculus
  siRNA target sequence for Bicc1 (NM_031397.1,2500-2518).
gggtcacagtgaattctca

SEQ ID NO: 481790 - DNA, 19 bp, Mus musculus
  siRNA target sequence for Bicc1 (NM_031397.1,2536-2554).
caagcgcaagcagaacaaa

SEQ ID NO: 481791 - DNA, 19 bp, Mus musculus
  siRNA target sequence for Bicc1 (NM_031397.1,2540-2558).
cgcaagcagaacaaatcaa

SEQ ID NO: 481792 - DNA, 19 bp, Mus musculus
  siRNA target sequence for Bicc1 (NM_031397.1,2602-2620).
ctcgctgacgggaagcaat

SEQ ID NO: 481793 - DNA, 19 bp, Mus musculus
  siRNA target sequence for Bicc1 (NM_031397.1,2652-2670).
ccgacctccccgagctttt

SEQ ID NO: 481794 - DNA, 19 bp, Mus musculus
  siRNA target sequence for Bicc1 (NM_031397.1,2654-2672).
gacctccccgagcttttca

SEQ ID NO: 481795 - DNA, 19 bp, Mus musculus
  siRNA target sequence for Bicc1 (NM_031397.1,2688-2706).
gcaaatacacggatgtctt

SEQ ID NO: 481796 - DNA, 19 bp, Mus musculus
  siRNA target sequence for Bicc1 (NM_031397.1,2782-2800).
ctttggtgcccgaaggaaa

SEQ ID NO: 481797 - DNA, 19 bp, Mus musculus
  siRNA target sequence for Bicc1 (NM_031397.1,2787-2805).
gtgcccgaaggaaaatgct

SEQ ID NO: 481798 - DNA, 19 bp, Mus musculus
  siRNA target sequence for Bicc1 (NM_031397.1,2826-2844).
gtaaaaaccgaagaaaact

SEQ ID NO: 481799 - DNA, 19 bp, Mus musculus
  siRNA target sequence for Bicc1 (NM_031397.1,2902-2920).
gctgcctcgccagtatcat

SEQ ID NO: 481800 - DNA, 19 bp, Mus musculus
  siRNA target sequence for Bicc1 (NM_031397.1,2903-2921).
ctgcctcgccagtatcatt

SEQ ID NO: 481801 - DNA, 19 bp, Mus musculus
  siRNA target sequence for Bicc1 (NM_031397.1,2905-2923).
gcctcgccagtatcattca

SEQ ID NO: 481802 - DNA, 19 bp, Mus musculus
  siRNA target sequence for C330008I15Rik (NM_144917.2,803-821).
ctccagaccatctacaaga

SEQ ID NO: 481803 - DNA, 19 bp, Mus musculus
  siRNA target sequence for C330008I15Rik (NM_144917.2,1019-1037).
caattccccttctgtttga

SEQ ID NO: 481804 - DNA, 19 bp, Mus musculus
  siRNA target sequence for C330008I15Rik (NM_144917.2,1086-1104).
gtctctccagggagtgtaa

SEQ ID NO: 481805 - DNA, 19 bp, Mus musculus
  siRNA target sequence for C330008I15Rik (NM_144917.2,1141-1159).
ctacgcggctactttcctt

SEQ ID NO: 481806 - DNA, 19 bp, Mus musculus
  siRNA target sequence for C330008I15Rik (NM_144917.2,1146-1164).
cggctactttccttcatct

SEQ ID NO: 481807 - DNA, 19 bp, Mus musculus
  siRNA target sequence for C330008I15Rik (NM_144917.2,1179-1197).
ggacccagcagaagactat

SEQ ID NO: 481808 - DNA, 19 bp, Mus musculus
  siRNA target sequence for C330008I15Rik (NM_144917.2,1187-1205).
cagaagactattttagact

SEQ ID NO: 481809 - DNA, 19 bp, Mus musculus
  siRNA target sequence for C330011K17 (NM_177712.2,328-346).
caacaggcaatgaatttaa

SEQ ID NO: 481810 - DNA, 19 bp, Mus musculus
  siRNA target sequence for C330011K17 (NM_177712.2,334-352).
gcaatgaatttaacaatca

SEQ ID NO: 481811 - DNA, 19 bp, Mus musculus
  siRNA target sequence for C330011K17 (NM_177712.2,371-389).
cagctctctaagtatgcaa

SEQ ID NO: 481812 - DNA, 19 bp, Mus musculus
  siRNA target sequence for C330011K17 (NM_177712.2,382-400).
gtatgcaatgccagagaat

SEQ ID NO: 481813 - DNA, 19 bp, Mus musculus
  siRNA target sequence for C330011K17 (NM_177712.2,409-427).
gagaggaaccctactactt

SEQ ID NO: 481814 - DNA, 19 bp, Mus musculus
  siRNA target sequence for C330011K17 (NM_177712.2,697-715).
cctttcttcatcactcata

SEQ ID NO: 481815 - DNA, 19 bp, Mus musculus
  siRNA target sequence for C330011K17 (NM_177712.2,1396-1414).
gacatcaaatccattccat

SEQ ID NO: 481816 - DNA, 19 bp, Mus musculus
  siRNA target sequence for C430015I23Rik (NM_145547.1,408-426).
ctccgagaagcctgtataa

SEQ ID NO: 481817 - DNA, 19 bp, Mus musculus
  siRNA target sequence for C430015I23Rik (NM_145547.1,414-432).
gaagcctgtataaagatgt

SEQ ID NO: 481818 - DNA, 19 bp, Mus musculus
  siRNA target sequence for C430015I23Rik (NM_145547.1,417-435).
gcctgtataaagatgtcat

SEQ ID NO: 481819 - DNA, 19 bp, Mus musculus
  siRNA target sequence for C430015I23Rik (NM_145547.1,457-475).
ggtctcgctggatgtttta

SEQ ID NO: 481820 - DNA, 19 bp, Mus musculus
  siRNA target sequence for C430015I23Rik (NM_145547.1,533-551).
ccacagggtgtaatagtta

SEQ ID NO: 481821 - DNA, 19 bp, Mus musculus
  siRNA target sequence for C430015I23Rik (NM_145547.1,536-554).
cagggtgtaatagttacaa

SEQ ID NO: 481822 - DNA, 19 bp, Mus musculus
  siRNA target sequence for C430015I23Rik (NM_145547.1,540-558).
gtgtaatagttacaagaat

SEQ ID NO: 481823 - DNA, 19 bp, Mus musculus
  siRNA target sequence for C430015I23Rik (NM_145547.1,582-600).
ctgtgggtagcgaaacctt

SEQ ID NO: 481824 - DNA, 19 bp, Mus musculus
  siRNA target sequence for C430015I23Rik (NM_145547.1,586-604).
gggtagcgaaacctttgaa

SEQ ID NO: 481825 - DNA, 19 bp, Mus musculus
  siRNA target sequence for C430015I23Rik (NM_145547.1,591-609).
gcgaaacctttgaacttgt

SEQ ID NO: 481826 - DNA, 19 bp, Mus musculus
  siRNA target sequence for C430015I23Rik (NM_145547.1,592-610).
cgaaacctttgaacttgtt

SEQ ID NO: 481827 - DNA, 19 bp, Mus musculus
  siRNA target sequence for C430015I23Rik (NM_145547.1,634-652).
gatctttttgtgggaaata

SEQ ID NO: 481828 - DNA, 19 bp, Mus musculus
  siRNA target sequence for C430015I23Rik (NM_145547.1,673-691).
ggaacagaaactatttaga

SEQ ID NO: 481829 - DNA, 19 bp, Mus musculus
  siRNA target sequence for C430015I23Rik (NM_145547.1,697-715).
cactaatgtccgtaagaga

SEQ ID NO: 481830 - DNA, 19 bp, Mus musculus
  siRNA target sequence for C430015I23Rik (NM_145547.1,733-751).
gtgtcataaatgtgaagaa

SEQ ID NO: 481831 - DNA, 19 bp, Mus musculus
  siRNA target sequence for C430015I23Rik (NM_145547.1,767-785).
gtccgcaaggcccatttca

SEQ ID NO: 481832 - DNA, 19 bp, Mus musculus
  siRNA target sequence for C430015I23Rik (NM_145547.1,769-787).
ccgcaaggcccatttcatt

SEQ ID NO: 481833 - DNA, 19 bp, Mus musculus
  siRNA target sequence for C430015I23Rik (NM_145547.1,771-789).
gcaaggcccatttcattca

SEQ ID NO: 481834 - DNA, 19 bp, Mus musculus
  siRNA target sequence for C430015I23Rik (NM_145547.1,861-879).
cctttgttattgaacatca

SEQ ID NO: 481835 - DNA, 19 bp, Mus musculus
  siRNA target sequence for C430015I23Rik (NM_145547.1,899-917).
cgaccctatgagtgtaatt

SEQ ID NO: 481836 - DNA, 19 bp, Mus musculus
  siRNA target sequence for C430015I23Rik (NM_145547.1,938-956).
gtgagctctacccttatta

SEQ ID NO: 481837 - DNA, 19 bp, Mus musculus
  siRNA target sequence for C430015I23Rik (NM_145547.1,991-1009).
ccagtgtaatcagtgtaaa

SEQ ID NO: 481838 - DNA, 19 bp, Mus musculus
  siRNA target sequence for C430015I23Rik (NM_145547.1,1026-1044).
gaaggagccttgtgaaaca

SEQ ID NO: 481839 - DNA, 19 bp, Mus musculus
  siRNA target sequence for C430015I23Rik (NM_145547.1,1154-1172).
ccctatcactgtaccaaat

SEQ ID NO: 481840 - DNA, 19 bp, Mus musculus
  siRNA target sequence for C430015I23Rik (NM_145547.1,1182-1200).
gttttagtcgaaactcatt

SEQ ID NO: 481841 - DNA, 19 bp, Mus musculus
  siRNA target sequence for C430015I23Rik (NM_145547.1,1395-1413).
cgggggaacgcccttatca

SEQ ID NO: 481842 - DNA, 19 bp, Mus musculus
  siRNA target sequence for C430015I23Rik (NM_145547.1,1397-1415).
ggggaacgcccttatcagt

SEQ ID NO: 481843 - DNA, 19 bp, Mus musculus
  siRNA target sequence for C430015I23Rik (NM_145547.1,1559-1577).
catatcagggaaaagactt

SEQ ID NO: 481844 - DNA, 19 bp, Mus musculus
  siRNA target sequence for C430015I23Rik (NM_145547.1,1587-1605).
gtgaaactaaggaaagttt

SEQ ID NO: 481845 - DNA, 19 bp, Mus musculus
  siRNA target sequence for C430015I23Rik (NM_145547.1,1611-1629).
caaactgcagtctggttat

SEQ ID NO: 481846 - DNA, 19 bp, Mus musculus
  siRNA target sequence for C430015I23Rik (NM_145547.1,1640-1658).
gtctcccctaaggagaaat

SEQ ID NO: 481847 - DNA, 19 bp, Mus musculus
  siRNA target sequence for C430015I23Rik (NM_145547.1,1644-1662).
cccctaaggagaaatcgta

SEQ ID NO: 481848 - DNA, 19 bp, Mus musculus
  siRNA target sequence for C430015I23Rik (NM_145547.1,1690-1708).
cagtgtcagtgctcatctt

SEQ ID NO: 481849 - DNA, 19 bp, Mus musculus
  siRNA target sequence for C430015I23Rik (NM_145547.1,1837-1855).
cagacagtgtggcaaaagt

SEQ ID NO: 481850 - DNA, 19 bp, Mus musculus
  siRNA target sequence for C430015I23Rik (NM_145547.1,1860-1878).
gtcaactttgtaatctcat

SEQ ID NO: 481851 - DNA, 19 bp, Mus musculus
  siRNA target sequence for C430015I23Rik (NM_145547.1,1993-2011).
gccttataggtgtggaaaa

SEQ ID NO: 481852 - DNA, 19 bp, Mus musculus
  siRNA target sequence for C430015I23Rik (NM_145547.1,1994-2012).
ccttataggtgtggaaaat

SEQ ID NO: 481853 - DNA, 19 bp, Mus musculus
  siRNA target sequence for C430015I23Rik (NM_145547.1,2107-2125).
cggcgaagcctttacttgt

SEQ ID NO: 481854 - DNA, 19 bp, Mus musculus
  siRNA target sequence for C430015I23Rik (NM_145547.1,2116-2134).
ctttacttgtcagatttct

SEQ ID NO: 481855 - DNA, 19 bp, Mus musculus
  siRNA target sequence for C430015I23Rik (NM_145547.1,2143-2161).
gcatcaaaagttgcatatt

SEQ ID NO: 481856 - DNA, 19 bp, Mus musculus
  siRNA target sequence for C430015I23Rik (NM_145547.1,2144-2162).
catcaaaagttgcatatta

SEQ ID NO: 481857 - DNA, 19 bp, Mus musculus
  siRNA target sequence for C430015I23Rik (NM_145547.1,2147-2165).
caaaagttgcatattatgt

SEQ ID NO: 481858 - DNA, 19 bp, Mus musculus
  siRNA target sequence for C430039G02Rik (NM_029952.2,974-992).
caaggcctgtcgtgatcat

SEQ ID NO: 481859 - DNA, 19 bp, Mus musculus
  siRNA target sequence for C430039G02Rik (NM_029952.2,1015-1033).
ggagtttcatatgtaagta

SEQ ID NO: 481860 - DNA, 19 bp, Mus musculus
  siRNA target sequence for C430039G02Rik (NM_029952.2,1062-1080).
caacttcttcagcatgaaa

SEQ ID NO: 481861 - DNA, 19 bp, Mus musculus
  siRNA target sequence for C530015C18 (NM_177681.2,232-250).
ccttaggcccactgtcatt

SEQ ID NO: 481862 - DNA, 19 bp, Mus musculus
  siRNA target sequence for C530015C18 (NM_177681.2,411-429).
gaagagaaccagtcaagtt

SEQ ID NO: 481863 - DNA, 19 bp, Mus musculus
  siRNA target sequence for C530015C18 (NM_177681.2,432-450).
gctgtgttcagctacagaa

SEQ ID NO: 481864 - DNA, 19 bp, Mus musculus
  siRNA target sequence for C530015C18 (NM_177681.2,454-472).
gggctgatgcctctagtaa

SEQ ID NO: 481865 - DNA, 19 bp, Mus musculus
  siRNA target sequence for C530015C18 (NM_177681.2,579-597).
ggaagctacgcaaaactga

SEQ ID NO: 481866 - DNA, 19 bp, Mus musculus
  siRNA target sequence for C530015C18 (NM_177681.2,664-682).
gaggtgagtcttacgaatt

SEQ ID NO: 481867 - DNA, 19 bp, Mus musculus
  siRNA target sequence for C530015C18 (NM_177681.2,666-684).
ggtgagtcttacgaattta

SEQ ID NO: 481868 - DNA, 19 bp, Mus musculus
  siRNA target sequence for C530015C18 (NM_177681.2,712-730).
gtgaagaaggcgtgtatca

SEQ ID NO: 481869 - DNA, 19 bp, Mus musculus
  siRNA target sequence for C530015C18 (NM_177681.2,714-732).
gaagaaggcgtgtatcaga

SEQ ID NO: 481870 - DNA, 19 bp, Mus musculus
  siRNA target sequence for C530015C18 (NM_177681.2,749-767).
ggagccctttgaatacgtt

SEQ ID NO: 481871 - DNA, 19 bp, Mus musculus
  siRNA target sequence for C530015C18 (NM_177681.2,791-809).
gggcactgtgtttcttaat

SEQ ID NO: 481872 - DNA, 19 bp, Mus musculus
  siRNA target sequence for C530015C18 (NM_177681.2,1235-1253).
gggagagaggccctatgtt

SEQ ID NO: 481873 - DNA, 19 bp, Mus musculus
  siRNA target sequence for C530015C18 (NM_177681.2,1319-1337).
gggcgtcaaactctacaaa

SEQ ID NO: 481874 - DNA, 19 bp, Mus musculus
  siRNA target sequence for C530015C18 (NM_177681.2,1323-1341).
gtcaaactctacaaatgca

SEQ ID NO: 481875 - DNA, 19 bp, Mus musculus
  siRNA target sequence for C530015C18 (NM_177681.2,2121-2139).
cacaagtccgcgttcaata

SEQ ID NO: 481876 - DNA, 19 bp, Mus musculus
  siRNA target sequence for C85658 (NM_133798.1,271-289).
cgcttgcccaggctgatat

SEQ ID NO: 481877 - DNA, 19 bp, Mus musculus
  siRNA target sequence for C85658 (NM_133798.1,308-326).
ccaggacgcttttggatat

SEQ ID NO: 481878 - DNA, 19 bp, Mus musculus
  siRNA target sequence for C85658 (NM_133798.1,309-327).
caggacgcttttggatata

SEQ ID NO: 481879 - DNA, 19 bp, Mus musculus
  siRNA target sequence for C85658 (NM_133798.1,311-329).
ggacgcttttggatatatt

SEQ ID NO: 481880 - DNA, 19 bp, Mus musculus
  siRNA target sequence for C85658 (NM_133798.1,330-348).
ggcagatggtgctatctta

SEQ ID NO: 481881 - DNA, 19 bp, Mus musculus
  siRNA target sequence for C85658 (NM_133798.1,331-349).
gcagatggtgctatcttaa

SEQ ID NO: 481882 - DNA, 19 bp, Mus musculus
  siRNA target sequence for C85658 (NM_133798.1,332-350).
cagatggtgctatcttaaa

SEQ ID NO: 481883 - DNA, 19 bp, Mus musculus
  siRNA target sequence for C85658 (NM_133798.1,384-402).
gcttctacaggattatggt

SEQ ID NO: 481884 - DNA, 19 bp, Mus musculus
  siRNA target sequence for C85658 (NM_133798.1,448-466).
cagggaaacaatatactct

SEQ ID NO: 481885 - DNA, 19 bp, Mus musculus
  siRNA target sequence for C85658 (NM_133798.1,473-491).
ggcttagcctgaaatcact

SEQ ID NO: 481886 - DNA, 19 bp, Mus musculus
  siRNA target sequence for C85658 (NM_133798.1,474-492).
gcttagcctgaaatcactt

SEQ ID NO: 481887 - DNA, 19 bp, Mus musculus
  siRNA target sequence for C85658 (NM_133798.1,493-511).
gctgagactattttgaact

SEQ ID NO: 481888 - DNA, 19 bp, Mus musculus
  siRNA target sequence for C85658 (NM_133798.1,546-564).
caactgggatgctgagaat

SEQ ID NO: 481889 - DNA, 19 bp, Mus musculus
  siRNA target sequence for C85658 (NM_133798.1,592-610).
gccagggatgcgcagattt

SEQ ID NO: 481890 - DNA, 19 bp, Mus musculus
  siRNA target sequence for C85658 (NM_133798.1,594-612).
cagggatgcgcagatttca

SEQ ID NO: 481891 - DNA, 19 bp, Mus musculus
  siRNA target sequence for C85658 (NM_133798.1,648-666).
ctctagagattcctatgaa

SEQ ID NO: 481892 - DNA, 19 bp, Mus musculus
  siRNA target sequence for C85658 (NM_133798.1,670-688).
gaaagtacggaccaaatca

SEQ ID NO: 481893 - DNA, 19 bp, Mus musculus
  siRNA target sequence for C85658 (NM_133798.1,729-747).
catcccattccgaagcaaa

SEQ ID NO: 481894 - DNA, 19 bp, Mus musculus
  siRNA target sequence for C85658 (NM_133798.1,860-878).
gagaccccaggaagcataa

SEQ ID NO: 481895 - DNA, 19 bp, Mus musculus
  siRNA target sequence for C85658 (NM_133798.1,862-880).
gaccccaggaagcataaga

SEQ ID NO: 481896 - DNA, 19 bp, Mus musculus
  siRNA target sequence for C85658 (NM_133798.1,898-916).
ggctattctgccagaaaat

SEQ ID NO: 481897 - DNA, 19 bp, Mus musculus
  siRNA target sequence for C85658 (NM_133798.1,1023-1041).
ggtgagtaaagaacctttt

SEQ ID NO: 481898 - DNA, 19 bp, Mus musculus
  siRNA target sequence for C85658 (NM_133798.1,1044-1062).
ggtcaggctacagtttgaa

SEQ ID NO: 481899 - DNA, 19 bp, Mus musculus
  siRNA target sequence for C85658 (NM_133798.1,1078-1096).
gagtccccaggagattatt

SEQ ID NO: 481900 - DNA, 19 bp, Mus musculus
  siRNA target sequence for C85658 (NM_133798.1,1082-1100).
ccccaggagattattactt

SEQ ID NO: 481901 - DNA, 19 bp, Mus musculus
  siRNA target sequence for C85658 (NM_133798.1,1085-1103).
caggagattattacttgat

SEQ ID NO: 481902 - DNA, 19 bp, Mus musculus
  siRNA target sequence for C85658 (NM_133798.1,1145-1163).
cctacatccggaaaaatat

SEQ ID NO: 481903 - DNA, 19 bp, Mus musculus
  siRNA target sequence for C85658 (NM_133798.1,1146-1164).
ctacatccggaaaaatata

SEQ ID NO: 481904 - DNA, 19 bp, Mus musculus
  siRNA target sequence for C85658 (NM_133798.1,1152-1170).
ccggaaaaatataattcca

SEQ ID NO: 481905 - DNA, 19 bp, Mus musculus
  siRNA target sequence for C85658 (NM_133798.1,1171-1189).
catgagtaccgcaagcatt

SEQ ID NO: 481906 - DNA, 19 bp, Mus musculus
  siRNA target sequence for C85658 (NM_133798.1,1247-1265).
gccatgccatctctaacta

SEQ ID NO: 481907 - DNA, 19 bp, Mus musculus
  siRNA target sequence for C85658 (NM_133798.1,1249-1267).
catgccatctctaactact

SEQ ID NO: 481908 - DNA, 19 bp, Mus musculus
  siRNA target sequence for C85658 (NM_133798.1,1441-1459).
ctcagggagttttacaaca

SEQ ID NO: 481909 - DNA, 19 bp, Mus musculus
  siRNA target sequence for C85658 (NM_133798.1,1455-1473).
caacacagatattattaca

SEQ ID NO: 481910 - DNA, 19 bp, Mus musculus
  siRNA target sequence for C85658 (NM_133798.1,1499-1517).
gcctggagaccaggatata

SEQ ID NO: 481911 - DNA, 19 bp, Mus musculus
  siRNA target sequence for C85658 (NM_133798.1,1503-1521).
ggagaccaggatatacaat

SEQ ID NO: 481912 - DNA, 19 bp, Mus musculus
  siRNA target sequence for C85658 (NM_133798.1,1511-1529).
ggatatacaatgaaagtta

SEQ ID NO: 481913 - DNA, 19 bp, Mus musculus
  siRNA target sequence for C85658 (NM_133798.1,1518-1536).
caatgaaagttatattcct

SEQ ID NO: 481914 - DNA, 19 bp, Mus musculus
  siRNA target sequence for Cdk9 (NM_130860.1,121-139).
caccaagtacgagaaactt

SEQ ID NO: 481915 - DNA, 19 bp, Mus musculus
  siRNA target sequence for Cdk9 (NM_130860.1,156-174).
gcacattcggggaagtctt

SEQ ID NO: 481916 - DNA, 19 bp, Mus musculus
  siRNA target sequence for Cdk9 (NM_130860.1,157-175).
cacattcggggaagtcttt

SEQ ID NO: 481917 - DNA, 19 bp, Mus musculus
  siRNA target sequence for Cdk9 (NM_130860.1,159-177).
cattcggggaagtctttaa

SEQ ID NO: 481918 - DNA, 19 bp, Mus musculus
  siRNA target sequence for Cdk9 (NM_130860.1,265-283).
gagggaaatcaagattcta

SEQ ID NO: 481919 - DNA, 19 bp, Mus musculus
  siRNA target sequence for Cdk9 (NM_130860.1,286-304).
gctcctaaaacatgagaat

SEQ ID NO: 481920 - DNA, 19 bp, Mus musculus
  siRNA target sequence for Cdk9 (NM_130860.1,308-326).
gtgaacctaattgagattt

SEQ ID NO: 481921 - DNA, 19 bp, Mus musculus
  siRNA target sequence for Cdk9 (NM_130860.1,310-328).
gaacctaattgagatttgt

SEQ ID NO: 481922 - DNA, 19 bp, Mus musculus
  siRNA target sequence for Cdk9 (NM_130860.1,333-351).
ccaaagcctcaccgtataa

SEQ ID NO: 481923 - DNA, 19 bp, Mus musculus
  siRNA target sequence for Cdk9 (NM_130860.1,366-384).
gcatctatctggtgtttga

SEQ ID NO: 481924 - DNA, 19 bp, Mus musculus
  siRNA target sequence for Cdk9 (NM_130860.1,473-491).
ctgaacggcctctactaca

SEQ ID NO: 481925 - DNA, 19 bp, Mus musculus
  siRNA target sequence for Cdk9 (NM_130860.1,588-606).
gtgccttcagcctagctaa

SEQ ID NO: 481926 - DNA, 19 bp, Mus musculus
  siRNA target sequence for Cdk9 (NM_130860.1,591-609).
ccttcagcctagctaagaa

SEQ ID NO: 481927 - DNA, 19 bp, Mus musculus
  siRNA target sequence for Cdk9 (NM_130860.1,592-610).
cttcagcctagctaagaat

SEQ ID NO: 481928 - DNA, 19 bp, Mus musculus
  siRNA target sequence for Cdk9 (NM_130860.1,630-648).
ccaaccgtgtggtgacatt

SEQ ID NO: 481929 - DNA, 19 bp, Mus musculus
  siRNA target sequence for Cdk9 (NM_130860.1,741-759).
ggactcgtagccctatcat

SEQ ID NO: 481930 - DNA, 19 bp, Mus musculus
  siRNA target sequence for Cdk9 (NM_130860.1,936-954).
ctctggacctcattgacaa

SEQ ID NO: 481931 - DNA, 19 bp, Mus musculus
  siRNA target sequence for Cnot4 (NM_016877.2,313-331).
ctcgcagtcctgatgcaaa

SEQ ID NO: 481932 - DNA, 19 bp, Mus musculus
  siRNA target sequence for Cnot4 (NM_016877.2,413-431).
ccagatatgccgattttgt

SEQ ID NO: 481933 - DNA, 19 bp, Mus musculus
  siRNA target sequence for Cnot4 (NM_016877.2,414-432).
cagatatgccgattttgtt

SEQ ID NO: 481934 - DNA, 19 bp, Mus musculus
  siRNA target sequence for Cnot4 (NM_016877.2,424-442).
gattttgttggcatcgaat

SEQ ID NO: 481935 - DNA, 19 bp, Mus musculus
  siRNA target sequence for Cnot4 (NM_016877.2,492-510).
gaagatccagcagtttaca

SEQ ID NO: 481936 - DNA, 19 bp, Mus musculus
  siRNA target sequence for Cnot4 (NM_016877.2,608-626).
ggctagtgtacgtgttgta

SEQ ID NO: 481937 - DNA, 19 bp, Mus musculus
  siRNA target sequence for Cnot4 (NM_016877.2,610-628).
ctagtgtacgtgttgtaca

SEQ ID NO: 481938 - DNA, 19 bp, Mus musculus
  siRNA target sequence for Cnot4 (NM_016877.2,613-631).
gtgtacgtgttgtacaaaa

SEQ ID NO: 481939 - DNA, 19 bp, Mus musculus
  siRNA target sequence for Cnot4 (NM_016877.2,615-633).
gtacgtgttgtacaaaaaa

SEQ ID NO: 481940 - DNA, 19 bp, Mus musculus
  siRNA target sequence for Cnot4 (NM_016877.2,619-637).
gtgttgtacaaaaaaacct

SEQ ID NO: 481941 - DNA, 19 bp, Mus musculus
  siRNA target sequence for Cnot4 (NM_016877.2,665-683).
cctagcagacccagaagtt

SEQ ID NO: 481942 - DNA, 19 bp, Mus musculus
  siRNA target sequence for Cnot4 (NM_016877.2,706-724).
ggaagtttggtaaaataca

SEQ ID NO: 481943 - DNA, 19 bp, Mus musculus
  siRNA target sequence for Cnot4 (NM_016877.2,737-755).
caataatagcacatcctat

SEQ ID NO: 481944 - DNA, 19 bp, Mus musculus
  siRNA target sequence for Cnot4 (NM_016877.2,772-790).
cgagtgccagtgcttatgt

SEQ ID NO: 481945 - DNA, 19 bp, Mus musculus
  siRNA target sequence for Cnot4 (NM_016877.2,781-799).
gtgcttatgtaacgtatat

SEQ ID NO: 481946 - DNA, 19 bp, Mus musculus
  siRNA target sequence for Cnot4 (NM_016877.2,794-812).
gtatatccggtcagaagat

SEQ ID NO: 481947 - DNA, 19 bp, Mus musculus
  siRNA target sequence for Cnot4 (NM_016877.2,836-854).
caacaatgtggtagtagat

SEQ ID NO: 481948 - DNA, 19 bp, Mus musculus
  siRNA target sequence for Cnot4 (NM_016877.2,864-882).
ctaaaggcatctttaggta

SEQ ID NO: 481949 - DNA, 19 bp, Mus musculus
  siRNA target sequence for Cnot4 (NM_016877.2,871-889).
catctttaggtacaacaaa

SEQ ID NO: 481950 - DNA, 19 bp, Mus musculus
  siRNA target sequence for Cnot4 (NM_016877.2,996-1014).
gcgggtaagcaccaagaat

SEQ ID NO: 481951 - DNA, 19 bp, Mus musculus
  siRNA target sequence for Cnot4 (NM_016877.2,997-1015).
cgggtaagcaccaagaata

SEQ ID NO: 481952 - DNA, 19 bp, Mus musculus
  siRNA target sequence for Cnot4 (NM_016877.2,998-1016).
gggtaagcaccaagaatat

SEQ ID NO: 481953 - DNA, 19 bp, Mus musculus
  siRNA target sequence for Cnot4 (NM_016877.2,1000-1018).
gtaagcaccaagaatatga

SEQ ID NO: 481954 - DNA, 19 bp, Mus musculus
  siRNA target sequence for Cnot4 (NM_016877.2,1022-1040).
gaagctcctccaagaatta

SEQ ID NO: 481955 - DNA, 19 bp, Mus musculus
  siRNA target sequence for Cnot4 (NM_016877.2,1025-1043).
gctcctccaagaattatat

SEQ ID NO: 481956 - DNA, 19 bp, Mus musculus
  siRNA target sequence for Cnot4 (NM_016877.2,1026-1044).
ctcctccaagaattatata

SEQ ID NO: 481957 - DNA, 19 bp, Mus musculus
  siRNA target sequence for Cnot4 (NM_016877.2,1072-1090).
ctacgggttcagttgataa

SEQ ID NO: 481958 - DNA, 19 bp, Mus musculus
  siRNA target sequence for Cnot4 (NM_016877.2,1075-1093).
cgggttcagttgataagaa

SEQ ID NO: 481959 - DNA, 19 bp, Mus musculus
  siRNA target sequence for Cnot4 (NM_016877.2,1106-1124).
gacaccattacaaaggtat

SEQ ID NO: 481960 - DNA, 19 bp, Mus musculus
  siRNA target sequence for Cnot4 (NM_016877.2,1133-1151).
cattgacaaaccttcagat

SEQ ID NO: 481961 - DNA, 19 bp, Mus musculus
  siRNA target sequence for Cnot4 (NM_016877.2,1159-1177).
gtatagggaatggtgataa

SEQ ID NO: 481962 - DNA, 19 bp, Mus musculus
  siRNA target sequence for Cnot4 (NM_016877.2,1181-1199).
ccaacagatatctaacagt

SEQ ID NO: 481963 - DNA, 19 bp, Mus musculus
  siRNA target sequence for Cnot4 (NM_016877.2,1185-1203).
cagatatctaacagtgata

SEQ ID NO: 481964 - DNA, 19 bp, Mus musculus
  siRNA target sequence for Cnot4 (NM_016877.2,1213-1231).
caccacctggtttatcaaa

SEQ ID NO: 481965 - DNA, 19 bp, Mus musculus
  siRNA target sequence for Cnot4 (NM_016877.2,1242-1260).
gtcatccccatcagttcat

SEQ ID NO: 481966 - DNA, 19 bp, Mus musculus
  siRNA target sequence for Cnot4 (NM_016877.2,1268-1286).
cagtgcgaggtctcctttt

SEQ ID NO: 481967 - DNA, 19 bp, Mus musculus
  siRNA target sequence for Cnot4 (NM_016877.2,1270-1288).
gtgcgaggtctccttttga

SEQ ID NO: 481968 - DNA, 19 bp, Mus musculus
  siRNA target sequence for Cnot4 (NM_016877.2,1302-1320).
gagtcacagtcattattct

SEQ ID NO: 481969 - DNA, 19 bp, Mus musculus
  siRNA target sequence for Cnot4 (NM_016877.2,1310-1328).
gtcattattctcagacaat

SEQ ID NO: 481970 - DNA, 19 bp, Mus musculus
  siRNA target sequence for Cnot4 (NM_016877.2,1335-1353).
caccccaaccctataccaa

SEQ ID NO: 481971 - DNA, 19 bp, Mus musculus
  siRNA target sequence for Cnot4 (NM_016877.2,1481-1499).
cggctttggttcttctaaa

SEQ ID NO: 481972 - DNA, 19 bp, Mus musculus
  siRNA target sequence for Cnot4 (NM_016877.2,1484-1502).
ctttggttcttctaaacaa

SEQ ID NO: 481973 - DNA, 19 bp, Mus musculus
  siRNA target sequence for Cnot4 (NM_016877.2,1692-1710).
gccaactctctcaatagta

SEQ ID NO: 481974 - DNA, 19 bp, Mus musculus
  siRNA target sequence for Cnot4 (NM_016877.2,1697-1715).
ctctctcaatagtaccttt

SEQ ID NO: 481975 - DNA, 19 bp, Mus musculus
  siRNA target sequence for Cnot4 (NM_016877.2,1748-1766).
gcagcaccgagcagtttat

SEQ ID NO: 481976 - DNA, 19 bp, Mus musculus
  siRNA target sequence for Cnot4 (NM_016877.2,1749-1767).
cagcaccgagcagtttata

SEQ ID NO: 481977 - DNA, 19 bp, Mus musculus
  siRNA target sequence for Cnot4 (NM_016877.2,1752-1770).
caccgagcagtttataatt

SEQ ID NO: 481978 - DNA, 19 bp, Mus musculus
  siRNA target sequence for Cnot4 (NM_016877.2,1755-1773).
cgagcagtttataattcgt

SEQ ID NO: 481979 - DNA, 19 bp, Mus musculus
  siRNA target sequence for Cnot4 (NM_016877.2,1756-1774).
gagcagtttataattcgtt

SEQ ID NO: 481980 - DNA, 19 bp, Mus musculus
  siRNA target sequence for Cnot4 (NM_016877.2,1813-1831).
cctttccacgcaatagcat

SEQ ID NO: 481981 - DNA, 19 bp, Mus musculus
  siRNA target sequence for Cnot4 (NM_016877.2,1856-1874).
ccccacctcaaatagtaat

SEQ ID NO: 481982 - DNA, 19 bp, Mus musculus
  siRNA target sequence for Cnot4 (NM_016877.2,1858-1876).
ccacctcaaatagtaattt

SEQ ID NO: 481983 - DNA, 19 bp, Mus musculus
  siRNA target sequence for Cnot4 (NM_016877.2,1861-1879).
cctcaaatagtaatttctt

SEQ ID NO: 481984 - DNA, 19 bp, Mus musculus
  siRNA target sequence for Cnot4 (NM_016877.2,1975-1993).
cctcttcccattcattaca

SEQ ID NO: 481985 - DNA, 19 bp, Mus musculus
  siRNA target sequence for Cnot4 (NM_016877.2,1978-1996).
cttcccattcattacaaca

SEQ ID NO: 481986 - DNA, 19 bp, Mus musculus
  siRNA target sequence for Col4a3 (NM_007734.1,648-666).
gggaataactggattacca

SEQ ID NO: 481987 - DNA, 19 bp, Mus musculus
  siRNA target sequence for Col4a3 (NM_007734.1,747-765).
cggatctaagggtgaacaa

SEQ ID NO: 481988 - DNA, 19 bp, Mus musculus
  siRNA target sequence for Col4a3 (NM_007734.1,854-872).
gagaagacaggggattcaa

SEQ ID NO: 481989 - DNA, 19 bp, Mus musculus
  siRNA target sequence for Col4a3 (NM_007734.1,861-879).
caggggattcaatggaaaa

SEQ ID NO: 481990 - DNA, 19 bp, Mus musculus
  siRNA target sequence for Col4a3 (NM_007734.1,958-976).
ccaggacctccgggatttt

SEQ ID NO: 481991 - DNA, 19 bp, Mus musculus
  siRNA target sequence for Col4a3 (NM_007734.1,959-977).
caggacctccgggattttt

SEQ ID NO: 481992 - DNA, 19 bp, Mus musculus
  siRNA target sequence for Col4a3 (NM_007734.1,1032-1050).
cgtgataggacaaaaagga

SEQ ID NO: 481993 - DNA, 19 bp, Mus musculus
  siRNA target sequence for Col4a3 (NM_007734.1,1051-1069).
gaaaggggtatgaaaggat

SEQ ID NO: 481994 - DNA, 19 bp, Mus musculus
  siRNA target sequence for Col4a3 (NM_007734.1,1113-1131).
cacccagccatacaacaaa

SEQ ID NO: 481995 - DNA, 19 bp, Mus musculus
  siRNA target sequence for Col4a3 (NM_007734.1,1832-1850).
caggatttccaggattaga

SEQ ID NO: 481996 - DNA, 19 bp, Mus musculus
  siRNA target sequence for Col4a3 (NM_007734.1,2007-2025).
ggggcaagtgggtaatcca

SEQ ID NO: 481997 - DNA, 19 bp, Mus musculus
  siRNA target sequence for Col4a3 (NM_007734.1,2282-2300).
ctggagaagccggtcttaa

SEQ ID NO: 481998 - DNA, 19 bp, Mus musculus
  siRNA target sequence for Col4a3 (NM_007734.1,2483-2501).
ctaagggaaatcaaggttt

SEQ ID NO: 481999 - DNA, 19 bp, Mus musculus
  siRNA target sequence for Col4a3 (NM_007734.1,2818-2836).
cttcccggcttgaatggat

SEQ ID NO: 482000 - DNA, 19 bp, Mus musculus
  siRNA target sequence for Col4a3 (NM_007734.1,3524-3542).
gggagccgggttattcaga

SEQ ID NO: 482001 - DNA, 19 bp, Mus musculus
  siRNA target sequence for Col4a3 (NM_007734.1,3525-3543).
ggagccgggttattcagaa

SEQ ID NO: 482002 - DNA, 19 bp, Mus musculus
  siRNA target sequence for Col4a3 (NM_007734.1,4045-4063).
ggtctacctggggcaatta

SEQ ID NO: 482003 - DNA, 19 bp, Mus musculus
  siRNA target sequence for Col4a3 (NM_007734.1,4399-4417).
ggaaaacctggcactctta

SEQ ID NO: 482004 - DNA, 19 bp, Mus musculus
  siRNA target sequence for Col4a3 (NM_007734.1,4400-4418).
gaaaacctggcactcttaa

SEQ ID NO: 482005 - DNA, 19 bp, Mus musculus
  siRNA target sequence for Col4a3 (NM_007734.1,4587-4605).
gggcaacaagggcttgaaa

SEQ ID NO: 482006 - DNA, 19 bp, Mus musculus
  siRNA target sequence for Col4a3 (NM_007734.1,4691-4709).
gaatgcgaggcttcatctt

SEQ ID NO: 482007 - DNA, 19 bp, Mus musculus
  siRNA target sequence for Col4a3 (NM_007734.1,4753-4771).
ggaacacagccactctata

SEQ ID NO: 482008 - DNA, 19 bp, Mus musculus
  siRNA target sequence for Col4a3 (NM_007734.1,4857-4875).
caccacaatgccgttctta

SEQ ID NO: 482009 - DNA, 19 bp, Mus musculus
  siRNA target sequence for Col4a3 (NM_007734.1,4859-4877).
ccacaatgccgttcttatt

SEQ ID NO: 482010 - DNA, 19 bp, Mus musculus
  siRNA target sequence for Col4a3 (NM_007734.1,4867-4885).
ccgttcttattctgtaaca

SEQ ID NO: 482011 - DNA, 19 bp, Mus musculus
  siRNA target sequence for Col4a3 (NM_007734.1,4868-4886).
cgttcttattctgtaacat

SEQ ID NO: 482012 - DNA, 19 bp, Mus musculus
  siRNA target sequence for Col4a3 (NM_007734.1,4906-4924).
gcatcacgaaatgattatt

SEQ ID NO: 482013 - DNA, 19 bp, Mus musculus
  siRNA target sequence for Col4a3 (NM_007734.1,4910-4928).
cacgaaatgattattcata

SEQ ID NO: 482014 - DNA, 19 bp, Mus musculus
  siRNA target sequence for Col4a3 (NM_007734.1,4959-4977).
ggacatggctccaattagt

SEQ ID NO: 482015 - DNA, 19 bp, Mus musculus
  siRNA target sequence for Col4a3 (NM_007734.1,4982-5000).
gagctctcgaaccctatat

SEQ ID NO: 482016 - DNA, 19 bp, Mus musculus
  siRNA target sequence for Col4a3 (NM_007734.1,4987-5005).
ctcgaaccctatattagca

SEQ ID NO: 482017 - DNA, 19 bp, Mus musculus
  siRNA target sequence for Col4a3 (NM_007734.1,5099-5117).
ggaaaggtttttctttcat

SEQ ID NO: 482018 - DNA, 19 bp, Mus musculus
  siRNA target sequence for Col4a3 (NM_007734.1,5190-5208).
ccgagccagtccatttata

SEQ ID NO: 482019 - DNA, 19 bp, Mus musculus
  siRNA target sequence for Col4a3 (NM_007734.1,5192-5210).
gagccagtccatttataga

SEQ ID NO: 482020 - DNA, 19 bp, Mus musculus
  siRNA target sequence for Col4a3 (NM_007734.1,5194-5212).
gccagtccatttatagaat

SEQ ID NO: 482021 - DNA, 19 bp, Mus musculus
  siRNA target sequence for Col4a3 (NM_007734.1,5218-5236).
ggacgagggacatgtaact

SEQ ID NO: 482022 - DNA, 19 bp, Mus musculus
  siRNA target sequence for Col4a3 (NM_007734.1,5219-5237).
gacgagggacatgtaacta

SEQ ID NO: 482023 - DNA, 19 bp, Mus musculus
  siRNA target sequence for Col4a3 (NM_007734.1,5270-5288).
cgctgaacccagaaagaat

SEQ ID NO: 482024 - DNA, 19 bp, Mus musculus
  siRNA target sequence for Col4a3 (NM_007734.1,5326-5344).
gacttagagaaaatcataa

SEQ ID NO: 482025 - DNA, 19 bp, Mus musculus
  siRNA target sequence for Cova1 (NM_145951.2,400-418).
gaattgctggacaaccaat

SEQ ID NO: 482026 - DNA, 19 bp, Mus musculus
  siRNA target sequence for Cova1 (NM_145951.2,446-464).
gatgatgactggaatacca

SEQ ID NO: 482027 - DNA, 19 bp, Mus musculus
  siRNA target sequence for Cova1 (NM_145951.2,452-470).
gactggaataccaccaata

SEQ ID NO: 482028 - DNA, 19 bp, Mus musculus
  siRNA target sequence for Cova1 (NM_145951.2,505-523).
caccgattcctccagatat

SEQ ID NO: 482029 - DNA, 19 bp, Mus musculus
  siRNA target sequence for Cova1 (NM_145951.2,526-544).
cggtagcaaaggagatcat

SEQ ID NO: 482030 - DNA, 19 bp, Mus musculus
  siRNA target sequence for Cova1 (NM_145951.2,692-710).
gtgtggagagattattgct

SEQ ID NO: 482031 - DNA, 19 bp, Mus musculus
  siRNA target sequence for Cova1 (NM_145951.2,694-712).
gtggagagattattgctat

SEQ ID NO: 482032 - DNA, 19 bp, Mus musculus
  siRNA target sequence for Cova1 (NM_145951.2,708-726).
gctatccggaagagcaaaa

SEQ ID NO: 482033 - DNA, 19 bp, Mus musculus
  siRNA target sequence for Cova1 (NM_145951.2,709-727).
ctatccggaagagcaaaaa

SEQ ID NO: 482034 - DNA, 19 bp, Mus musculus
  siRNA target sequence for Cova1 (NM_145951.2,768-786).
gacaaagccctctatctgt

SEQ ID NO: 482035 - DNA, 19 bp, Mus musculus
  siRNA target sequence for Cova1 (NM_145951.2,785-803).
gtctggttaccgaattcgt

SEQ ID NO: 482036 - DNA, 19 bp, Mus musculus
  siRNA target sequence for Cova1 (NM_145951.2,808-826).
gctctagtactgacaagaa

SEQ ID NO: 482037 - DNA, 19 bp, Mus musculus
  siRNA target sequence for Cova1 (NM_145951.2,860-878).
ggctcgggatgacttatat

SEQ ID NO: 482038 - DNA, 19 bp, Mus musculus
  siRNA target sequence for Cova1 (NM_145951.2,862-880).
ctcgggatgacttatatga

SEQ ID NO: 482039 - DNA, 19 bp, Mus musculus
  siRNA target sequence for Cova1 (NM_145951.2,887-905).
gtgtaaacagcgtatgcta

SEQ ID NO: 482040 - DNA, 19 bp, Mus musculus
  siRNA target sequence for Cova1 (NM_145951.2,974-992).
ggtccactattcagatcat

SEQ ID NO: 482041 - DNA, 19 bp, Mus musculus
  siRNA target sequence for Cova1 (NM_145951.2,977-995).
ccactattcagatcatgaa

SEQ ID NO: 482042 - DNA, 19 bp, Mus musculus
  siRNA target sequence for Cova1 (NM_145951.2,1149-1167).
ctggtaaatgagaaagcta

SEQ ID NO: 482043 - DNA, 19 bp, Mus musculus
  siRNA target sequence for Cova1 (NM_145951.2,1160-1178).
gaaagctacccatgagaaa

SEQ ID NO: 482044 - DNA, 19 bp, Mus musculus
  siRNA target sequence for Cova1 (NM_145951.2,1165-1183).
ctacccatgagaaagagat

SEQ ID NO: 482045 - DNA, 19 bp, Mus musculus
  siRNA target sequence for Cova1 (NM_145951.2,1214-1232).
cctttctggaattctcatt

SEQ ID NO: 482046 - DNA, 19 bp, Mus musculus
  siRNA target sequence for Cova1 (NM_145951.2,1256-1274).
gtaccattccgcttccaaa

SEQ ID NO: 482047 - DNA, 19 bp, Mus musculus
  siRNA target sequence for Cova1 (NM_145951.2,1281-1299).
gcatgggaccacttcacaa

SEQ ID NO: 482048 - DNA, 19 bp, Mus musculus
  siRNA target sequence for Cova1 (NM_145951.2,1282-1300).
catgggaccacttcacaaa

SEQ ID NO: 482049 - DNA, 19 bp, Mus musculus
  siRNA target sequence for Cova1 (NM_145951.2,1302-1320).
gcacaacgtaaaaacatca

SEQ ID NO: 482050 - DNA, 19 bp, Mus musculus
  siRNA target sequence for Cova1 (NM_145951.2,1351-1369).
gcaacattcataatgatga

SEQ ID NO: 482051 - DNA, 19 bp, Mus musculus
  siRNA target sequence for Cova1 (NM_145951.2,1573-1591).
gggaggatgacccaaacaa

SEQ ID NO: 482052 - DNA, 19 bp, Mus musculus
  siRNA target sequence for Cova1 (NM_145951.2,1681-1699).
ctgagcttgaccgaatcaa

SEQ ID NO: 482053 - DNA, 19 bp, Mus musculus
  siRNA target sequence for Cova1 (NM_145951.2,1706-1724).
caatttacaggtagaacaa

SEQ ID NO: 482054 - DNA, 19 bp, Mus musculus
  siRNA target sequence for Cova1 (NM_145951.2,1792-1810).
gtgagcaacctcttgagaa

SEQ ID NO: 482055 - DNA, 19 bp, Mus musculus
  siRNA target sequence for Cova1 (NM_145951.2,1862-1880).
gatcatctccacattcctt

SEQ ID NO: 482056 - DNA, 19 bp, Mus musculus
  siRNA target sequence for Cova1 (NM_145951.2,1925-1943).
cttgaatcgtctcgataat

SEQ ID NO: 482057 - DNA, 19 bp, Mus musculus
  siRNA target sequence for Cpeb1 (NM_007755.1,133-151).
ggataaatgccattttgga

SEQ ID NO: 482058 - DNA, 19 bp, Mus musculus
  siRNA target sequence for Cpeb1 (NM_007755.1,487-505).
ggtctgacttggacaagtt

SEQ ID NO: 482059 - DNA, 19 bp, Mus musculus
  siRNA target sequence for Cpeb1 (NM_007755.1,718-736).
cccgaatggaccaagaaca

SEQ ID NO: 482060 - DNA, 19 bp, Mus musculus
  siRNA target sequence for Cpeb1 (NM_007755.1,837-855).
gacccattcagcatagaga

SEQ ID NO: 482061 - DNA, 19 bp, Mus musculus
  siRNA target sequence for Cpeb1 (NM_007755.1,924-942).
cctccccggaactataaga

SEQ ID NO: 482062 - DNA, 19 bp, Mus musculus
  siRNA target sequence for Cpeb1 (NM_007755.1,925-943).
ctccccggaactataagaa

SEQ ID NO: 482063 - DNA, 19 bp, Mus musculus
  siRNA target sequence for Cpeb1 (NM_007755.1,977-995).
cgttccttgggatattaca

SEQ ID NO: 482064 - DNA, 19 bp, Mus musculus
  siRNA target sequence for Cpeb1 (NM_007755.1,1078-1096).
gtcctcccaaaggtaatat

SEQ ID NO: 482065 - DNA, 19 bp, Mus musculus
  siRNA target sequence for Cpeb1 (NM_007755.1,1183-1201).
cagatggcctgagtgaata

SEQ ID NO: 482066 - DNA, 19 bp, Mus musculus
  siRNA target sequence for Cpeb1 (NM_007755.1,1185-1203).
gatggcctgagtgaatatt

SEQ ID NO: 482067 - DNA, 19 bp, Mus musculus
  siRNA target sequence for Cpeb1 (NM_007755.1,1309-1327).
ccagcaggacggtgtttgt

SEQ ID NO: 482068 - DNA, 19 bp, Mus musculus
  siRNA target sequence for Cpeb1 (NM_007755.1,1369-1387).
ccatcttgaatgacctatt

SEQ ID NO: 482069 - DNA, 19 bp, Mus musculus
  siRNA target sequence for Cpeb1 (NM_007755.1,1370-1388).
catcttgaatgacctattt

SEQ ID NO: 482070 - DNA, 19 bp, Mus musculus
  siRNA target sequence for Cpeb1 (NM_007755.1,1373-1391).
cttgaatgacctatttggt

SEQ ID NO: 482071 - DNA, 19 bp, Mus musculus
  siRNA target sequence for Cpeb1 (NM_007755.1,1444-1462).
ctggtcgtgtgactttcaa

SEQ ID NO: 482072 - DNA, 19 bp, Mus musculus
  siRNA target sequence for Cpeb1 (NM_007755.1,1446-1464).
ggtcgtgtgactttcaata

SEQ ID NO: 482073 - DNA, 19 bp, Mus musculus
  siRNA target sequence for Cpeb1 (NM_007755.1,1447-1465).
gtcgtgtgactttcaataa

SEQ ID NO: 482074 - DNA, 19 bp, Mus musculus
  siRNA target sequence for Cpeb1 (NM_007755.1,1450-1468).
gtgtgactttcaataacca

SEQ ID NO: 482075 - DNA, 19 bp, Mus musculus
  siRNA target sequence for Cpeb1 (NM_007755.1,1460-1478).
caataaccaacgtagttat

SEQ ID NO: 482076 - DNA, 19 bp, Mus musculus
  siRNA target sequence for Cpeb1 (NM_007755.1,1466-1484).
ccaacgtagttatctgaaa

SEQ ID NO: 482077 - DNA, 19 bp, Mus musculus
  siRNA target sequence for Cpeb1 (NM_007755.1,1547-1565).
cccctatctagaagattct

SEQ ID NO: 482078 - DNA, 19 bp, Mus musculus
  siRNA target sequence for Cpeb1 (NM_007755.1,1549-1567).
cctatctagaagattctct

SEQ ID NO: 482079 - DNA, 19 bp, Mus musculus
  siRNA target sequence for Cpeb1 (NM_007755.1,1616-1634).
ggtctgcttcaagtacttt

SEQ ID NO: 482080 - DNA, 19 bp, Mus musculus
  siRNA target sequence for Cpeb1 (NM_007755.1,1680-1698).
caccatagccccctaatga

SEQ ID NO: 482081 - DNA, 19 bp, Mus musculus
  siRNA target sequence for Cpeb2 (NM_175937.2,372-390).
ggatcccagggactatgaa

SEQ ID NO: 482082 - DNA, 19 bp, Mus musculus
  siRNA target sequence for Cpeb2 (NM_175937.2,373-391).
gatcccagggactatgaat

SEQ ID NO: 482083 - DNA, 19 bp, Mus musculus
  siRNA target sequence for Cpeb2 (NM_175937.2,377-395).
ccagggactatgaatcaga

SEQ ID NO: 482084 - DNA, 19 bp, Mus musculus
  siRNA target sequence for Cpeb2 (NM_175937.2,378-396).
cagggactatgaatcagat

SEQ ID NO: 482085 - DNA, 19 bp, Mus musculus
  siRNA target sequence for Cpeb2 (NM_175937.2,380-398).
gggactatgaatcagatat

SEQ ID NO: 482086 - DNA, 19 bp, Mus musculus
  siRNA target sequence for Cpeb2 (NM_175937.2,412-430).
gccgttctcgggtaatgtt

SEQ ID NO: 482087 - DNA, 19 bp, Mus musculus
  siRNA target sequence for Cpeb2 (NM_175937.2,413-431).
ccgttctcgggtaatgtta

SEQ ID NO: 482088 - DNA, 19 bp, Mus musculus
  siRNA target sequence for Cpeb2 (NM_175937.2,414-432).
cgttctcgggtaatgttat

SEQ ID NO: 482089 - DNA, 19 bp, Mus musculus
  siRNA target sequence for Cpeb2 (NM_175937.2,415-433).
gttctcgggtaatgttata

SEQ ID NO: 482090 - DNA, 19 bp, Mus musculus
  siRNA target sequence for Cpeb2 (NM_175937.2,418-436).
ctcgggtaatgttatagca

SEQ ID NO: 482091 - DNA, 19 bp, Mus musculus
  siRNA target sequence for Cpeb2 (NM_175937.2,483-501).
ggattgaagataatgtgtt

SEQ ID NO: 482092 - DNA, 19 bp, Mus musculus
  siRNA target sequence for Cpeb2 (NM_175937.2,533-551).
cccttacaggtgagatcta

SEQ ID NO: 482093 - DNA, 19 bp, Mus musculus
  siRNA target sequence for Cpeb2 (NM_175937.2,535-553).
cttacaggtgagatctagt

SEQ ID NO: 482094 - DNA, 19 bp, Mus musculus
  siRNA target sequence for Cpeb2 (NM_175937.2,567-585).
cttggggctcagattcact

SEQ ID NO: 482095 - DNA, 19 bp, Mus musculus
  siRNA target sequence for Cpeb2 (NM_175937.2,609-627).
ccggaacatccagaataga

SEQ ID NO: 482096 - DNA, 19 bp, Mus musculus
  siRNA target sequence for Cpeb2 (NM_175937.2,626-644).
gaccaggatcgaagtagaa

SEQ ID NO: 482097 - DNA, 19 bp, Mus musculus
  siRNA target sequence for Cpeb2 (NM_175937.2,629-647).
caggatcgaagtagaatgt

SEQ ID NO: 482098 - DNA, 19 bp, Mus musculus
  siRNA target sequence for Cpeb2 (NM_175937.2,635-653).
cgaagtagaatgtatgata

SEQ ID NO: 482099 - DNA, 19 bp, Mus musculus
  siRNA target sequence for Cpeb2 (NM_175937.2,639-657).
gtagaatgtatgatagctt

SEQ ID NO: 482100 - DNA, 19 bp, Mus musculus
  siRNA target sequence for Cpeb2 (NM_175937.2,743-761).
ccaggaaccgacaatctgt

SEQ ID NO: 482101 - DNA, 19 bp, Mus musculus
  siRNA target sequence for Cpeb2 (NM_175937.2,744-762).
caggaaccgacaatctgtt

SEQ ID NO: 482102 - DNA, 19 bp, Mus musculus
  siRNA target sequence for Cpeb2 (NM_175937.2,746-764).
ggaaccgacaatctgttaa

SEQ ID NO: 482103 - DNA, 19 bp, Mus musculus
  siRNA target sequence for Cpeb2 (NM_175937.2,747-765).
gaaccgacaatctgttaat

SEQ ID NO: 482104 - DNA, 19 bp, Mus musculus
  siRNA target sequence for Cpeb2 (NM_175937.2,751-769).
cgacaatctgttaatgtta

SEQ ID NO: 482105 - DNA, 19 bp, Mus musculus
  siRNA target sequence for Cpeb2 (NM_175937.2,752-770).
gacaatctgttaatgttaa

SEQ ID NO: 482106 - DNA, 19 bp, Mus musculus
  siRNA target sequence for Cpeb2 (NM_175937.2,754-772).
caatctgttaatgttaaat

SEQ ID NO: 482107 - DNA, 19 bp, Mus musculus
  siRNA target sequence for Cpeb2 (NM_175937.2,776-794).
cgctcttccctatttccaa

SEQ ID NO: 482108 - DNA, 19 bp, Mus musculus
  siRNA target sequence for Cpeb2 (NM_175937.2,778-796).
ctcttccctatttccaata

SEQ ID NO: 482109 - DNA, 19 bp, Mus musculus
  siRNA target sequence for Cpeb2 (NM_175937.2,783-801).
ccctatttccaatagatga

SEQ ID NO: 482110 - DNA, 19 bp, Mus musculus
  siRNA target sequence for Cpeb2 (NM_175937.2,784-802).
cctatttccaatagatgat

SEQ ID NO: 482111 - DNA, 19 bp, Mus musculus
  siRNA target sequence for Cpeb2 (NM_175937.2,858-876).
gttattcagctcatcaaaa

SEQ ID NO: 482112 - DNA, 19 bp, Mus musculus
  siRNA target sequence for Cpeb2 (NM_175937.2,893-911).
cgcttctctcgaaaagttt

SEQ ID NO: 482113 - DNA, 19 bp, Mus musculus
  siRNA target sequence for Cpeb2 (NM_175937.2,894-912).
gcttctctcgaaaagtttt

SEQ ID NO: 482114 - DNA, 19 bp, Mus musculus
  siRNA target sequence for Cpeb2 (NM_175937.2,921-939).
ggcttcctccggatattga

SEQ ID NO: 482115 - DNA, 19 bp, Mus musculus
  siRNA target sequence for Cpeb2 (NM_175937.2,922-940).
gcttcctccggatattgat

SEQ ID NO: 482116 - DNA, 19 bp, Mus musculus
  siRNA target sequence for Cpeb2 (NM_175937.2,954-972).
ctgccagcttccgaagatt

SEQ ID NO: 482117 - DNA, 19 bp, Mus musculus
  siRNA target sequence for Cpeb2 (NM_175937.2,974-992).
ggacctttggtagtagatt

SEQ ID NO: 482118 - DNA, 19 bp, Mus musculus
  siRNA target sequence for Cpeb2 (NM_175937.2,1068-1086).
cagtccaggcactcattga

SEQ ID NO: 482119 - DNA, 19 bp, Mus musculus
  siRNA target sequence for Cpeb2 (NM_175937.2,1081-1099).
cattgacgcttgcattgaa

SEQ ID NO: 482120 - DNA, 19 bp, Mus musculus
  siRNA target sequence for Cpeb2 (NM_175937.2,1087-1105).
cgcttgcattgaagaagat

SEQ ID NO: 482121 - DNA, 19 bp, Mus musculus
  siRNA target sequence for Cpeb2 (NM_175937.2,1124-1142).
gtttccagccctactatca

SEQ ID NO: 482122 - DNA, 19 bp, Mus musculus
  siRNA target sequence for Cpeb2 (NM_175937.2,1141-1159).
caaagacaaacctgttcaa

SEQ ID NO: 482123 - DNA, 19 bp, Mus musculus
  siRNA target sequence for Cpeb2 (NM_175937.2,1157-1175).
caaatccgtccttggaatt

SEQ ID NO: 482124 - DNA, 19 bp, Mus musculus
  siRNA target sequence for Cpeb2 (NM_175937.2,1162-1180).
ccgtccttggaatttaagt

SEQ ID NO: 482125 - DNA, 19 bp, Mus musculus
  siRNA target sequence for Cpeb2 (NM_175937.2,1164-1182).
gtccttggaatttaagtga

SEQ ID NO: 482126 - DNA, 19 bp, Mus musculus
  siRNA target sequence for Cpeb2 (NM_175937.2,1216-1234).
ggatccccgaaaaacaatt

SEQ ID NO: 482127 - DNA, 19 bp, Mus musculus
  siRNA target sequence for Cpeb2 (NM_175937.2,1217-1235).
gatccccgaaaaacaattt

SEQ ID NO: 482128 - DNA, 19 bp, Mus musculus
  siRNA target sequence for Cpeb2 (NM_175937.2,1309-1327).
gtgttacgcaggaattgat

SEQ ID NO: 482129 - DNA, 19 bp, Mus musculus
  siRNA target sequence for Cpeb2 (NM_175937.2,1315-1333).
cgcaggaattgatacagat

SEQ ID NO: 482130 - DNA, 19 bp, Mus musculus
  siRNA target sequence for Cpeb2 (NM_175937.2,1329-1347).
cagatccagaactcaaata

SEQ ID NO: 482131 - DNA, 19 bp, Mus musculus
  siRNA target sequence for Cpeb2 (NM_175937.2,1402-1420).
catcagtgctcgatttgtt

SEQ ID NO: 482132 - DNA, 19 bp, Mus musculus
  siRNA target sequence for Cpeb2 (NM_175937.2,1423-1441).
gcttcagcacggtgacatt

SEQ ID NO: 482133 - DNA, 19 bp, Mus musculus
  siRNA target sequence for Cpeb2 (NM_175937.2,1427-1445).
cagcacggtgacattgata

SEQ ID NO: 482134 - DNA, 19 bp, Mus musculus
  siRNA target sequence for Cpeb2 (NM_175937.2,1429-1447).
gcacggtgacattgataaa

SEQ ID NO: 482135 - DNA, 19 bp, Mus musculus
  siRNA target sequence for Cpeb2 (NM_175937.2,1432-1450).
cggtgacattgataaacgt

SEQ ID NO: 482136 - DNA, 19 bp, Mus musculus
  siRNA target sequence for Cpeb2 (NM_175937.2,1601-1619).
gcaggacgcgagttccata

SEQ ID NO: 482137 - DNA, 19 bp, Mus musculus
  siRNA target sequence for Cpeb2 (NM_175937.2,1602-1620).
caggacgcgagttccataa

SEQ ID NO: 482138 - DNA, 19 bp, Mus musculus
  siRNA target sequence for Cpeb3 (NM_198300.1,1038-1056).
cgctttccggaccgataat

SEQ ID NO: 482139 - DNA, 19 bp, Mus musculus
  siRNA target sequence for Cpeb3 (NM_198300.1,1047-1065).
gaccgataatggtaacaat

SEQ ID NO: 482140 - DNA, 19 bp, Mus musculus
  siRNA target sequence for Cpeb3 (NM_198300.1,1049-1067).
ccgataatggtaacaatct

SEQ ID NO: 482141 - DNA, 19 bp, Mus musculus
  siRNA target sequence for Cpeb3 (NM_198300.1,1051-1069).
gataatggtaacaatctgt

SEQ ID NO: 482142 - DNA, 19 bp, Mus musculus
  siRNA target sequence for Cpeb3 (NM_198300.1,1084-1102).
cggagtaggccctatgaca

SEQ ID NO: 482143 - DNA, 19 bp, Mus musculus
  siRNA target sequence for Cpeb3 (NM_198300.1,1088-1106).
gtaggccctatgacacttt

SEQ ID NO: 482144 - DNA, 19 bp, Mus musculus
  siRNA target sequence for Cpeb3 (NM_198300.1,1091-1109).
ggccctatgacacttttaa

SEQ ID NO: 482145 - DNA, 19 bp, Mus musculus
  siRNA target sequence for Cpeb3 (NM_198300.1,1118-1136).
ccttggagaactccttaat

SEQ ID NO: 482146 - DNA, 19 bp, Mus musculus
  siRNA target sequence for Cpeb3 (NM_198300.1,1122-1140).
ggagaactccttaatggat

SEQ ID NO: 482147 - DNA, 19 bp, Mus musculus
  siRNA target sequence for Cpeb3 (NM_198300.1,1123-1141).
gagaactccttaatggata

SEQ ID NO: 482148 - DNA, 19 bp, Mus musculus
  siRNA target sequence for Cpeb3 (NM_198300.1,1156-1174).
catgagcctctgaaaggta

SEQ ID NO: 482149 - DNA, 19 bp, Mus musculus
  siRNA target sequence for Cpeb3 (NM_198300.1,1221-1239).
gtggaggaatcattttgca

SEQ ID NO: 482150 - DNA, 19 bp, Mus musculus
  siRNA target sequence for Cpeb3 (NM_198300.1,1237-1255).
gcaggacgcatgggaataa

SEQ ID NO: 482151 - DNA, 19 bp, Mus musculus
  siRNA target sequence for Cpeb3 (NM_198300.1,1238-1256).
caggacgcatgggaataaa

SEQ ID NO: 482152 - DNA, 19 bp, Mus musculus
  siRNA target sequence for Cpeb3 (NM_198300.1,1240-1258).
ggacgcatgggaataaatt

SEQ ID NO: 482153 - DNA, 19 bp, Mus musculus
  siRNA target sequence for Cpeb3 (NM_198300.1,1241-1259).
gacgcatgggaataaattt

SEQ ID NO: 482154 - DNA, 19 bp, Mus musculus
  siRNA target sequence for Cpeb3 (NM_198300.1,1267-1285).
ccaggaacagataacatta

SEQ ID NO: 482155 - DNA, 19 bp, Mus musculus
  siRNA target sequence for Cpeb3 (NM_198300.1,1372-1390).
ggtgatcaggccttatcgt

SEQ ID NO: 482156 - DNA, 19 bp, Mus musculus
  siRNA target sequence for Cpeb3 (NM_198300.1,1383-1401).
cttatcgtctggcttaagt

SEQ ID NO: 482157 - DNA, 19 bp, Mus musculus
  siRNA target sequence for Cpeb3 (NM_198300.1,1403-1421).
ctcctactcgatgtcaaaa

SEQ ID NO: 482158 - DNA, 19 bp, Mus musculus
  siRNA target sequence for Cpeb3 (NM_198300.1,1429-1447).
cgagtggaacgctactcta

SEQ ID NO: 482159 - DNA, 19 bp, Mus musculus
  siRNA target sequence for Cpeb3 (NM_198300.1,1432-1450).
gtggaacgctactctagaa

SEQ ID NO: 482160 - DNA, 19 bp, Mus musculus
  siRNA target sequence for Cpeb3 (NM_198300.1,1530-1548).
ggtggactggcctcataaa

SEQ ID NO: 482161 - DNA, 19 bp, Mus musculus
  siRNA target sequence for Cpeb3 (NM_198300.1,1571-1589).
ctcctaaaggctatgcttt

SEQ ID NO: 482162 - DNA, 19 bp, Mus musculus
  siRNA target sequence for Cpeb3 (NM_198300.1,1709-1727).
gaccgtggaacctaagtga

SEQ ID NO: 482163 - DNA, 19 bp, Mus musculus
  siRNA target sequence for Cpeb3 (NM_198300.1,1762-1780).
gaccccagaaaaactatct

SEQ ID NO: 482164 - DNA, 19 bp, Mus musculus
  siRNA target sequence for Cpeb3 (NM_198300.1,1802-1820).
cccttcgagctgttgaact

SEQ ID NO: 482165 - DNA, 19 bp, Mus musculus
  siRNA target sequence for Cpeb3 (NM_198300.1,1813-1831).
gttgaactggcaatgataa

SEQ ID NO: 482166 - DNA, 19 bp, Mus musculus
  siRNA target sequence for Cpeb3 (NM_198300.1,1955-1973).
cgcgctttgtgcaacttca

SEQ ID NO: 482167 - DNA, 19 bp, Mus musculus
  siRNA target sequence for Cpeb3 (NM_198300.1,2063-2081).
ggaagtttgccccattctt

SEQ ID NO: 482168 - DNA, 19 bp, Mus musculus
  siRNA target sequence for Cpeb4 (NM_026252.1,64-82).
ggggatcaacctcttcata

SEQ ID NO: 482169 - DNA, 19 bp, Mus musculus
  siRNA target sequence for Cpeb4 (NM_026252.1,66-84).
ggatcaacctcttcatagt

SEQ ID NO: 482170 - DNA, 19 bp, Mus musculus
  siRNA target sequence for Cpeb4 (NM_026252.1,126-144).
gagagtggaacgatactct

SEQ ID NO: 482171 - DNA, 19 bp, Mus musculus
  siRNA target sequence for Cpeb4 (NM_026252.1,136-154).
cgatactctcgcaaagtgt

SEQ ID NO: 482172 - DNA, 19 bp, Mus musculus
  siRNA target sequence for Cpeb4 (NM_026252.1,137-155).
gatactctcgcaaagtgtt

SEQ ID NO: 482173 - DNA, 19 bp, Mus musculus
  siRNA target sequence for Cpeb4 (NM_026252.1,161-179).
gtggattgcctcctgatat

SEQ ID NO: 482174 - DNA, 19 bp, Mus musculus
  siRNA target sequence for Cpeb4 (NM_026252.1,311-329).
ctgttcaggctctcattga

SEQ ID NO: 482175 - DNA, 19 bp, Mus musculus
  siRNA target sequence for Cpeb4 (NM_026252.1,457-475).
cttgacccacggaaaacaa

SEQ ID NO: 482176 - DNA, 19 bp, Mus musculus
  siRNA target sequence for Cpeb4 (NM_026252.1,460-478).
gacccacggaaaacaatat

SEQ ID NO: 482177 - DNA, 19 bp, Mus musculus
  siRNA target sequence for Cpeb4 (NM_026252.1,462-480).
cccacggaaaacaatattt

SEQ ID NO: 482178 - DNA, 19 bp, Mus musculus
  siRNA target sequence for Cpeb4 (NM_026252.1,464-482).
cacggaaaacaatatttgt

SEQ ID NO: 482179 - DNA, 19 bp, Mus musculus
  siRNA target sequence for Cpeb4 (NM_026252.1,552-570).
ctgctatgctggaatcgat

SEQ ID NO: 482180 - DNA, 19 bp, Mus musculus
  siRNA target sequence for Cpeb4 (NM_026252.1,572-590).
ctgacccagagctcaaata

SEQ ID NO: 482181 - DNA, 19 bp, Mus musculus
  siRNA target sequence for Cpeb4 (NM_026252.1,620-638).
ctaatcaacagagttacat

SEQ ID NO: 482182 - DNA, 19 bp, Mus musculus
  siRNA target sequence for Cpeb4 (NM_026252.1,839-857).
ctcgtgctggcagagaatt

SEQ ID NO: 482183 - DNA, 19 bp, Mus musculus
  siRNA target sequence for Cpeb4 (NM_026252.1,842-860).
gtgctggcagagaattcca

SEQ ID NO: 482184 - DNA, 19 bp, Mus musculus
  siRNA target sequence for Cpeb4 (NM_026252.1,886-904).
gaccgccctcggcatattt

SEQ ID NO: 482185 - DNA, 19 bp, Mus musculus
  siRNA target sequence for Cpeb4 (NM_026252.1,888-906).
ccgccctcggcatatttca

SEQ ID NO: 482186 - DNA, 19 bp, Mus musculus
  siRNA target sequence for Cpeb4 (NM_026252.1,889-907).
cgccctcggcatatttcat

SEQ ID NO: 482187 - DNA, 19 bp, Mus musculus
  siRNA target sequence for Cpeb4 (NM_026252.1,890-908).
gccctcggcatatttcatt

SEQ ID NO: 482188 - DNA, 19 bp, Mus musculus
  siRNA target sequence for Cpsf4 (NM_178576.1,151-169).
ccagcgtagatcacatcaa

SEQ ID NO: 482189 - DNA, 19 bp, Mus musculus
  siRNA target sequence for Cpsf4 (NM_178576.1,154-172).
gcgtagatcacatcaagtt

SEQ ID NO: 482190 - DNA, 19 bp, Mus musculus
  siRNA target sequence for Cpsf4 (NM_178576.1,414-432).
cctgagtgctacttttact

SEQ ID NO: 482191 - DNA, 19 bp, Mus musculus
  siRNA target sequence for Cpsf4 (NM_178576.1,461-479).
gcacacccggagagtcatt

SEQ ID NO: 482192 - DNA, 19 bp, Mus musculus
  siRNA target sequence for Cpsf4 (NM_178576.1,472-490).
gagtcatttgtgtgaacta

SEQ ID NO: 482193 - DNA, 19 bp, Mus musculus
  siRNA target sequence for Cpsf4 (NM_178576.1,510-528).
gagggaccatcatgtaaat

SEQ ID NO: 482194 - DNA, 19 bp, Mus musculus
  siRNA target sequence for Cpsf4 (NM_178576.1,513-531).
ggaccatcatgtaaattca

SEQ ID NO: 482195 - DNA, 19 bp, Mus musculus
  siRNA target sequence for Cpsf4 (NM_178576.1,514-532).
gaccatcatgtaaattcat

SEQ ID NO: 482196 - DNA, 19 bp, Mus musculus
  siRNA target sequence for Cpsf4 (NM_178576.1,530-548).
catgcaccctcgatttgaa

SEQ ID NO: 482197 - DNA, 19 bp, Mus musculus
  siRNA target sequence for Cpsf4 (NM_178576.1,627-645).
ggggtcatgcagagtcaaa

SEQ ID NO: 482198 - DNA, 19 bp, Mus musculus
  siRNA target sequence for Cpsf4 (NM_178576.1,684-702).
caagtcacttgctacaagt

SEQ ID NO: 482199 - DNA, 19 bp, Mus musculus
  siRNA target sequence for Cpsf4 (NM_178576.1,714-732).
ggacactacgccaacagat

SEQ ID NO: 482200 - DNA, 19 bp, Mus musculus
  siRNA target sequence for Csad (NM_144942.1,238-256).
cgtgtttgggattgttgta

SEQ ID NO: 482201 - DNA, 19 bp, Mus musculus
  siRNA target sequence for Csad (NM_144942.1,241-259).
gtttgggattgttgtagat

SEQ ID NO: 482202 - DNA, 19 bp, Mus musculus
  siRNA target sequence for Csad (NM_144942.1,306-324).
ggaaggagcctgaagaact

SEQ ID NO: 482203 - DNA, 19 bp, Mus musculus
  siRNA target sequence for Csad (NM_144942.1,938-956).
gatgcaattgccgatgttt

SEQ ID NO: 482204 - DNA, 19 bp, Mus musculus
  siRNA target sequence for Csad (NM_144942.1,1102-1120).
gcagtgctccgctcttctt

SEQ ID NO: 482205 - DNA, 19 bp, Mus musculus
  siRNA target sequence for Csad (NM_144942.1,1364-1382).
gaaggatttgagttggtaa

SEQ ID NO: 482206 - DNA, 19 bp, Mus musculus
  siRNA target sequence for Csad (NM_144942.1,1368-1386).
gatttgagttggtaatgga

SEQ ID NO: 482207 - DNA, 19 bp, Mus musculus
  siRNA target sequence for Csad (NM_144942.1,1591-1609).
ggcccaggccgatatagat

SEQ ID NO: 482208 - DNA, 19 bp, Mus musculus
  siRNA target sequence for Csad (NM_144942.1,1592-1610).
gcccaggccgatatagatt

SEQ ID NO: 482209 - DNA, 19 bp, Mus musculus
  siRNA target sequence for Csad (NM_144942.1,1597-1615).
ggccgatatagatttcctt

SEQ ID NO: 482210 - DNA, 19 bp, Mus musculus
  siRNA target sequence for Cstf2 (NM_133196.3,67-85).
ccgtcttcgtgggaaacat

SEQ ID NO: 482211 - DNA, 19 bp, Mus musculus
  siRNA target sequence for Cstf2 (NM_133196.3,131-149).
ggttgggcctgttgttagt

SEQ ID NO: 482212 - DNA, 19 bp, Mus musculus
  siRNA target sequence for Cstf2 (NM_133196.3,135-153).
gggcctgttgttagtttca

SEQ ID NO: 482213 - DNA, 19 bp, Mus musculus
  siRNA target sequence for Cstf2 (NM_133196.3,137-155).
gcctgttgttagtttcaga

SEQ ID NO: 482214 - DNA, 19 bp, Mus musculus
  siRNA target sequence for Cstf2 (NM_133196.3,138-156).
cctgttgttagtttcagat

SEQ ID NO: 482215 - DNA, 19 bp, Mus musculus
  siRNA target sequence for Cstf2 (NM_133196.3,164-182).
cgatagggagacaggaaaa

SEQ ID NO: 482216 - DNA, 19 bp, Mus musculus
  siRNA target sequence for Cstf2 (NM_133196.3,232-250).
gtgccatgcggaacttgaa

SEQ ID NO: 482217 - DNA, 19 bp, Mus musculus
  siRNA target sequence for Cstf2 (NM_133196.3,271-289).
gagcacttcgagtggataa

SEQ ID NO: 482218 - DNA, 19 bp, Mus musculus
  siRNA target sequence for Cstf2 (NM_133196.3,334-352).
ctggtgcacctgtcataga

SEQ ID NO: 482219 - DNA, 19 bp, Mus musculus
  siRNA target sequence for Cstf2 (NM_133196.3,336-354).
ggtgcacctgtcatagagt

SEQ ID NO: 482220 - DNA, 19 bp, Mus musculus
  siRNA target sequence for Cstf2 (NM_133196.3,384-402).
gatgcccctgaatccatta

SEQ ID NO: 482221 - DNA, 19 bp, Mus musculus
  siRNA target sequence for Cstf2 (NM_133196.3,389-407).
ccctgaatccattagcaaa

SEQ ID NO: 482222 - DNA, 19 bp, Mus musculus
  siRNA target sequence for Cstf2 (NM_133196.3,418-436).
gtcttccaccagaacagat

SEQ ID NO: 482223 - DNA, 19 bp, Mus musculus
  siRNA target sequence for Cstf2 (NM_133196.3,588-606).
ctgcatcgccagacaaata

SEQ ID NO: 482224 - DNA, 19 bp, Mus musculus
  siRNA target sequence for Cstf2 (NM_133196.3,626-644).
caaccctcagccagttcat

SEQ ID NO: 482225 - DNA, 19 bp, Mus musculus
  siRNA target sequence for Cstf2 (NM_133196.3,657-675).
ggctcaggacccaatgttt

SEQ ID NO: 482226 - DNA, 19 bp, Mus musculus
  siRNA target sequence for Cstf2 (NM_133196.3,719-737).
gggtggaatgcatgtcaat

SEQ ID NO: 482227 - DNA, 19 bp, Mus musculus
  siRNA target sequence for Cstf2 (NM_133196.3,748-766).
ctatgatgcaagcttctat

SEQ ID NO: 482228 - DNA, 19 bp, Mus musculus
  siRNA target sequence for Cstf2 (NM_133196.3,964-982).
caactcctcgtggtctttt

SEQ ID NO: 482229 - DNA, 19 bp, Mus musculus
  siRNA target sequence for Cstf2 (NM_133196.3,1011-1029).
ggcactttaatgactgtaa

SEQ ID NO: 482230 - DNA, 19 bp, Mus musculus
  siRNA target sequence for Cstf2 (NM_133196.3,1123-1141).
gaccgcctccacatgacat

SEQ ID NO: 482231 - DNA, 19 bp, Mus musculus
  siRNA target sequence for Cstf2 (NM_133196.3,1158-1176).
gctgagccgagacctttaa

SEQ ID NO: 482232 - DNA, 19 bp, Mus musculus
  siRNA target sequence for Cstf2 (NM_133196.3,1159-1177).
ctgagccgagacctttaat

SEQ ID NO: 482233 - DNA, 19 bp, Mus musculus
  siRNA target sequence for Cstf2 (NM_133196.3,1490-1508).
gaacatgggggcagttgtt

SEQ ID NO: 482234 - DNA, 19 bp, Mus musculus
  siRNA target sequence for Cstf2 (NM_133196.3,1632-1650).
gagaaggctgctttgatta

SEQ ID NO: 482235 - DNA, 19 bp, Mus musculus
  siRNA target sequence for Cstf2 (NM_133196.3,1700-1718).
gcaaagacagagtatccta

SEQ ID NO: 482236 - DNA, 19 bp, Mus musculus
  siRNA target sequence for Cstf2 (NM_133196.3,1705-1723).
gacagagtatcctaatctt

SEQ ID NO: 482237 - DNA, 19 bp, Mus musculus
  siRNA target sequence for Cstf2 (NM_133196.3,1707-1725).
cagagtatcctaatcttaa

SEQ ID NO: 482238 - DNA, 19 bp, Mus musculus
  siRNA target sequence for Cstf2 (NM_133196.3,1711-1729).
gtatcctaatcttaaagga

SEQ ID NO: 482239 - DNA, 19 bp, Mus musculus
  siRNA target sequence for Cyp4f18 (NM_024444.1,194-212).
ccacagcctcccaaacgaa

SEQ ID NO: 482240 - DNA, 19 bp, Mus musculus
  siRNA target sequence for Cyp4f18 (NM_024444.1,373-391).
cttggctccagctttagtt

SEQ ID NO: 482241 - DNA, 19 bp, Mus musculus
  siRNA target sequence for Cyp4f18 (NM_024444.1,440-458).
gatggcctcttgatgagta

SEQ ID NO: 482242 - DNA, 19 bp, Mus musculus
  siRNA target sequence for Cyp4f18 (NM_024444.1,588-606).
ccaagggcagtgcctattt

SEQ ID NO: 482243 - DNA, 19 bp, Mus musculus
  siRNA target sequence for Cyp4f18 (NM_024444.1,600-618).
cctatttgaacatgtttga

SEQ ID NO: 482244 - DNA, 19 bp, Mus musculus
  siRNA target sequence for Cyp4f18 (NM_024444.1,601-619).
ctatttgaacatgtttgaa

SEQ ID NO: 482245 - DNA, 19 bp, Mus musculus
  siRNA target sequence for Cyp4f18 (NM_024444.1,706-724).
cactgccatcttagaactt

SEQ ID NO: 482246 - DNA, 19 bp, Mus musculus
  siRNA target sequence for Cyp4f18 (NM_024444.1,761-779).
ctgcacgtggacctgtttt

SEQ ID NO: 482247 - DNA, 19 bp, Mus musculus
  siRNA target sequence for Cyp4f18 (NM_024444.1,819-837).
gccgtctagtgcatgactt

SEQ ID NO: 482248 - DNA, 19 bp, Mus musculus
  siRNA target sequence for Cyp4f18 (NM_024444.1,1289-1307).
ggtgtcataagccgaataa

SEQ ID NO: 482249 - DNA, 19 bp, Mus musculus
  siRNA target sequence for Cyp4f18 (NM_024444.1,1292-1310).
gtcataagccgaataagta

SEQ ID NO: 482250 - DNA, 19 bp, Mus musculus
  siRNA target sequence for Cyp4f18 (NM_024444.1,1509-1527).
gcgttctgccggatgacaa

SEQ ID NO: 482251 - DNA, 19 bp, Mus musculus
  siRNA target sequence for D030014N22Rik (NM_178734.2,391-409).
ggaaggaggacgaccttaa

SEQ ID NO: 482252 - DNA, 19 bp, Mus musculus
  siRNA target sequence for D030014N22Rik (NM_178734.2,392-410).
gaaggaggacgaccttaaa

SEQ ID NO: 482253 - DNA, 19 bp, Mus musculus
  siRNA target sequence for D030014N22Rik (NM_178734.2,395-413).
ggaggacgaccttaaagga

SEQ ID NO: 482254 - DNA, 19 bp, Mus musculus
  siRNA target sequence for D030014N22Rik (NM_178734.2,560-578).
ggacatgttctcatttaca

SEQ ID NO: 482255 - DNA, 19 bp, Mus musculus
  siRNA target sequence for D030014N22Rik (NM_178734.2,679-697).
gtggtttcgtagaagaaga

SEQ ID NO: 482256 - DNA, 19 bp, Mus musculus
  siRNA target sequence for D030014N22Rik (NM_178734.2,682-700).
gtttcgtagaagaagactt

SEQ ID NO: 482257 - DNA, 19 bp, Mus musculus
  siRNA target sequence for D030014N22Rik (NM_178734.2,724-742).
ccaacgggcaactcaactt

SEQ ID NO: 482258 - DNA, 19 bp, Mus musculus
  siRNA target sequence for D030014N22Rik (NM_178734.2,725-743).
caacgggcaactcaacttt

SEQ ID NO: 482259 - DNA, 19 bp, Mus musculus
  siRNA target sequence for D030014N22Rik (NM_178734.2,740-758).
ctttgaagcctgtataggt

SEQ ID NO: 482260 - DNA, 19 bp, Mus musculus
  siRNA target sequence for D030014N22Rik (NM_178734.2,756-774).
ggtgaggattggctaaata

SEQ ID NO: 482261 - DNA, 19 bp, Mus musculus
  siRNA target sequence for D030014N22Rik (NM_178734.2,810-828).
gacatcagcgacaaggaaa

SEQ ID NO: 482262 - DNA, 19 bp, Mus musculus
  siRNA target sequence for D030014N22Rik (NM_178734.2,993-1011).
ggacacgagaagccatata

SEQ ID NO: 482263 - DNA, 19 bp, Mus musculus
  siRNA target sequence for D030014N22Rik (NM_178734.2,994-1012).
gacacgagaagccatataa

SEQ ID NO: 482264 - DNA, 19 bp, Mus musculus
  siRNA target sequence for D030014N22Rik (NM_178734.2,1154-1172).
gactccagcaagctatgaa

SEQ ID NO: 482265 - DNA, 19 bp, Mus musculus
  siRNA target sequence for D030014N22Rik (NM_178734.2,1196-1214).
gaaaaggtttagtcagaat

SEQ ID NO: 482266 - DNA, 19 bp, Mus musculus
  siRNA target sequence for D030014N22Rik (NM_178734.2,1541-1559).
cagtggggcctttcatcta

SEQ ID NO: 482267 - DNA, 19 bp, Mus musculus
  siRNA target sequence for D030014N22Rik (NM_178734.2,1549-1567).
cctttcatctagctaaaca

SEQ ID NO: 482268 - DNA, 19 bp, Mus musculus
  siRNA target sequence for D030014N22Rik (NM_178734.2,1606-1624).
cgtgccctgccgtcttcaa

SEQ ID NO: 482269 - DNA, 19 bp, Mus musculus
  siRNA target sequence for D030014N22Rik (NM_178734.2,1611-1629).
cctgccgtcttcaacctaa

SEQ ID NO: 482270 - DNA, 19 bp, Mus musculus
  siRNA target sequence for D030014N22Rik (NM_178734.2,1644-1662).
cagcatcgcaagtcacatt

SEQ ID NO: 482271 - DNA, 19 bp, Mus musculus
  siRNA target sequence for D030014N22Rik (NM_178734.2,1711-1729).
ggcggtcatcactcattaa

SEQ ID NO: 482272 - DNA, 19 bp, Mus musculus
  siRNA target sequence for D030014N22Rik (NM_178734.2,1714-1732).
ggtcatcactcattaagca

SEQ ID NO: 482273 - DNA, 19 bp, Mus musculus
  siRNA target sequence for D030014N22Rik (NM_178734.2,1730-1748).
gcaccaggctattcacaaa

SEQ ID NO: 482274 - DNA, 19 bp, Mus musculus
  siRNA target sequence for D030014N22Rik (NM_178734.2,1871-1889).
cttctgtcggagaacagat

SEQ ID NO: 482275 - DNA, 19 bp, Mus musculus
  siRNA target sequence for D030014N22Rik (NM_178734.2,1940-1958).
cgtgtgtgccaggactttt

SEQ ID NO: 482276 - DNA, 19 bp, Mus musculus
  siRNA target sequence for D030014N22Rik (NM_178734.2,1941-1959).
gtgtgtgccaggactttta

SEQ ID NO: 482277 - DNA, 19 bp, Mus musculus
  siRNA target sequence for D030014N22Rik (NM_178734.2,1961-1979).
ccgaccttcacacttagtt

SEQ ID NO: 482278 - DNA, 19 bp, Mus musculus
  siRNA target sequence for D030014N22Rik (NM_178734.2,2030-2048).
caaggagaccttcatctat

SEQ ID NO: 482279 - DNA, 19 bp, Mus musculus
  siRNA target sequence for D030014N22Rik (NM_178734.2,2033-2051).
ggagaccttcatctataaa

SEQ ID NO: 482280 - DNA, 19 bp, Mus musculus
  siRNA target sequence for D030014N22Rik (NM_178734.2,2036-2054).
gaccttcatctataaagaa

SEQ ID NO: 482281 - DNA, 19 bp, Mus musculus
  siRNA target sequence for D030014N22Rik (NM_178734.2,2038-2056).
ccttcatctataaagaaca

SEQ ID NO: 482282 - DNA, 19 bp, Mus musculus
  siRNA target sequence for D030014N22Rik (NM_178734.2,2055-2073).
cagctagagcggcacaata

SEQ ID NO: 482283 - DNA, 19 bp, Mus musculus
  siRNA target sequence for D030014N22Rik (NM_178734.2,2057-2075).
gctagagcggcacaataaa

SEQ ID NO: 482284 - DNA, 19 bp, Mus musculus
  siRNA target sequence for D030014N22Rik (NM_178734.2,2081-2099).
caccatcgagggcttgtat

SEQ ID NO: 482285 - DNA, 19 bp, Mus musculus
  siRNA target sequence for D030014N22Rik (NM_178734.2,2083-2101).
ccatcgagggcttgtatga

SEQ ID NO: 482286 - DNA, 19 bp, Mus musculus
  siRNA target sequence for D030014N22Rik (NM_178734.2,2115-2133).
ggagaacacttcatttgca

SEQ ID NO: 482287 - DNA, 19 bp, Mus musculus
  siRNA target sequence for D030014N22Rik (NM_178734.2,2156-2174).
gagcatacacattagagaa

SEQ ID NO: 482288 - DNA, 19 bp, Mus musculus
  siRNA target sequence for D030014N22Rik (NM_178734.2,2275-2293).
ggcagcatgagaagattca

SEQ ID NO: 482289 - DNA, 19 bp, Mus musculus
  siRNA target sequence for D030014N22Rik (NM_178734.2,2382-2400).
ggtgtgaaaccaagtgaat

SEQ ID NO: 482290 - DNA, 19 bp, Mus musculus
  siRNA target sequence for D030014N22Rik (NM_178734.2,2507-2525).
gcgtgcccacctttcaaaa

SEQ ID NO: 482291 - DNA, 19 bp, Mus musculus
  siRNA target sequence for D030014N22Rik (NM_178734.2,2509-2527).
gtgcccacctttcaaaaca

SEQ ID NO: 482292 - DNA, 19 bp, Mus musculus
  siRNA target sequence for D030014N22Rik (NM_178734.2,2581-2599).
ccttcaagcagagtaacta

SEQ ID NO: 482293 - DNA, 19 bp, Mus musculus
  siRNA target sequence for D030014N22Rik (NM_178734.2,2673-2691).
cagcgatcatgcctttcta

SEQ ID NO: 482294 - DNA, 19 bp, Mus musculus
  siRNA target sequence for D030014N22Rik (NM_178734.2,2857-2875).
cccttcaccttagaattca

SEQ ID NO: 482295 - DNA, 19 bp, Mus musculus
  siRNA target sequence for D11Ertd636e (NM_026682.1,395-413).
caggactgcccgtggtata

SEQ ID NO: 482296 - DNA, 19 bp, Mus musculus
  siRNA target sequence for D11Ertd636e (NM_026682.1,400-418).
ctgcccgtggtataaccaa

SEQ ID NO: 482297 - DNA, 19 bp, Mus musculus
  siRNA target sequence for D11Ertd636e (NM_026682.1,447-465).
gtaaataccgccatgttca

SEQ ID NO: 482298 - DNA, 19 bp, Mus musculus
  siRNA target sequence for D11Ertd636e (NM_026682.1,454-472).
ccgccatgttcatcaagta

SEQ ID NO: 482299 - DNA, 19 bp, Mus musculus
  siRNA target sequence for D11Ertd636e (NM_026682.1,589-607).
gccatgggattcaacaact

SEQ ID NO: 482300 - DNA, 19 bp, Mus musculus
  siRNA target sequence for D11Ertd636e (NM_026682.1,595-613).
ggattcaacaacttctact

SEQ ID NO: 482301 - DNA, 19 bp, Mus musculus
  siRNA target sequence for D11Ertd636e (NM_029794.1,742-760).
ccaccatgccagcaaagta

SEQ ID NO: 482302 - DNA, 19 bp, Mus musculus
  siRNA target sequence for D11Ertd636e (NM_029794.1,768-786).
cccgttggagccatcaaaa

SEQ ID NO: 482303 - DNA, 19 bp, Mus musculus
  siRNA target sequence for D11Ertd636e (NM_029794.1,771-789).
gttggagccatcaaaacct

SEQ ID NO: 482304 - DNA, 19 bp, Mus musculus
  siRNA target sequence for D11Ertd730e (NM_148673.3,196-214).
cgctgtggacccagttagt

SEQ ID NO: 482305 - DNA, 19 bp, Mus musculus
  siRNA target sequence for D11Ertd730e (NM_148673.3,219-237).
cacccatgacgggatcaaa

SEQ ID NO: 482306 - DNA, 19 bp, Mus musculus
  siRNA target sequence for D11Ertd730e (NM_148673.3,251-269).
gaggagccgaaaaagatga

SEQ ID NO: 482307 - DNA, 19 bp, Mus musculus
  siRNA target sequence for D11Ertd730e (NM_148673.3,366-384).
ctcatattcctcagtatat

SEQ ID NO: 482308 - DNA, 19 bp, Mus musculus
  siRNA target sequence for D11Ertd730e (NM_148673.3,390-408).
cggttccatggtacattga

SEQ ID NO: 482309 - DNA, 19 bp, Mus musculus
  siRNA target sequence for D11Ertd730e (NM_148673.3,391-409).
ggttccatggtacattgat

SEQ ID NO: 482310 - DNA, 19 bp, Mus musculus
  siRNA target sequence for D11Ertd730e (NM_148673.3,418-436).
gagacccactttaaagcat

SEQ ID NO: 482311 - DNA, 19 bp, Mus musculus
  siRNA target sequence for D11Ertd730e (NM_148673.3,460-478).
gaagcagttcagttcatct

SEQ ID NO: 482312 - DNA, 19 bp, Mus musculus
  siRNA target sequence for D11Ertd730e (NM_148673.3,494-512).
cgaggcgtaaaggagaatt

SEQ ID NO: 482313 - DNA, 19 bp, Mus musculus
  siRNA target sequence for D11Ertd730e (NM_148673.3,498-516).
gcgtaaaggagaattctat

SEQ ID NO: 482314 - DNA, 19 bp, Mus musculus
  siRNA target sequence for D11Ertd730e (NM_148673.3,532-550).
caaaggtgcatgtgagaat

SEQ ID NO: 482315 - DNA, 19 bp, Mus musculus
  siRNA target sequence for D11Ertd730e (NM_148673.3,568-586).
caagaggaaagattgcttt

SEQ ID NO: 482316 - DNA, 19 bp, Mus musculus
  siRNA target sequence for D11Ertd730e (NM_148673.3,595-613).
gaggcgggttggagctaaa

SEQ ID NO: 482317 - DNA, 19 bp, Mus musculus
  siRNA target sequence for D11Ertd730e (NM_148673.3,597-615).
ggcgggttggagctaaatt

SEQ ID NO: 482318 - DNA, 19 bp, Mus musculus
  siRNA target sequence for D11Ertd730e (NM_148673.3,599-617).
cgggttggagctaaattca

SEQ ID NO: 482319 - DNA, 19 bp, Mus musculus
  siRNA target sequence for D11Ertd730e (NM_148673.3,609-627).
ctaaattcacaggaactaa

SEQ ID NO: 482320 - DNA, 19 bp, Mus musculus
  siRNA target sequence for D11Ertd730e (NM_148673.3,654-672).
cccagctgatgtttgacta

SEQ ID NO: 482321 - DNA, 19 bp, Mus musculus
  siRNA target sequence for D11Ertd730e (NM_148673.3,655-673).
ccagctgatgtttgactat

SEQ ID NO: 482322 - DNA, 19 bp, Mus musculus
  siRNA target sequence for D11Ertd730e (NM_148673.3,707-725).
ccggaagagcacatgaaga

SEQ ID NO: 482323 - DNA, 19 bp, Mus musculus
  siRNA target sequence for D11Ertd730e (NM_148673.3,754-772).
ggcaaaacggacattgaaa

SEQ ID NO: 482324 - DNA, 19 bp, Mus musculus
  siRNA target sequence for D11Ertd730e (NM_148673.3,765-783).
cattgaaagcacagaaact

SEQ ID NO: 482325 - DNA, 19 bp, Mus musculus
  siRNA target sequence for D11Ertd730e (NM_148673.3,936-954).
ggcagaatttcgactctaa

SEQ ID NO: 482326 - DNA, 19 bp, Mus musculus
  siRNA target sequence for D11Ertd730e (NM_148673.3,938-956).
cagaatttcgactctaaga

SEQ ID NO: 482327 - DNA, 19 bp, Mus musculus
  siRNA target sequence for D11Ertd730e (NM_148673.3,940-958).
gaatttcgactctaagaga

SEQ ID NO: 482328 - DNA, 19 bp, Mus musculus
  siRNA target sequence for D11Ertd730e (NM_148673.3,949-967).
ctctaagagacgcattact

SEQ ID NO: 482329 - DNA, 19 bp, Mus musculus
  siRNA target sequence for D11Ertd730e (NM_148673.3,951-969).
ctaagagacgcattactgt

SEQ ID NO: 482330 - DNA, 19 bp, Mus musculus
  siRNA target sequence for D11Ertd730e (NM_148673.3,977-995).
ctccggattcgtgaagata

SEQ ID NO: 482331 - DNA, 19 bp, Mus musculus
  siRNA target sequence for D11Ertd730e (NM_148673.3,979-997).
ccggattcgtgaagatatt

SEQ ID NO: 482332 - DNA, 19 bp, Mus musculus
  siRNA target sequence for D11Ertd730e (NM_148673.3,986-1004).
cgtgaagatattgcaaaat

SEQ ID NO: 482333 - DNA, 19 bp, Mus musculus
  siRNA target sequence for D11Ertd730e (NM_148673.3,992-1010).
gatattgcaaaatatttga

SEQ ID NO: 482334 - DNA, 19 bp, Mus musculus
  siRNA target sequence for D11Ertd730e (NM_148673.3,1051-1069).
cagagcgatgagagagaat

SEQ ID NO: 482335 - DNA, 19 bp, Mus musculus
  siRNA target sequence for D11Ertd730e (NM_148673.3,1055-1073).
gcgatgagagagaatcctt

SEQ ID NO: 482336 - DNA, 19 bp, Mus musculus
  siRNA target sequence for D11Ertd730e (NM_148673.3,1056-1074).
cgatgagagagaatcctta

SEQ ID NO: 482337 - DNA, 19 bp, Mus musculus
  siRNA target sequence for D11Ertd730e (NM_148673.3,1086-1104).
ggaagaatccagatgaagt

SEQ ID NO: 482338 - DNA, 19 bp, Mus musculus
  siRNA target sequence for D11Ertd730e (NM_148673.3,1107-1125).
gctacgctggagataactt

SEQ ID NO: 482339 - DNA, 19 bp, Mus musculus
  siRNA target sequence for D11Ertd730e (NM_148673.3,1111-1129).
cgctggagataactttgtt

SEQ ID NO: 482340 - DNA, 19 bp, Mus musculus
  siRNA target sequence for D11Ertd730e (NM_148673.3,1116-1134).
gagataactttgttcgata

SEQ ID NO: 482341 - DNA, 19 bp, Mus musculus
  siRNA target sequence for D11Ertd730e (NM_148673.3,1131-1149).
gatacacaggagataccat

SEQ ID NO: 482342 - DNA, 19 bp, Mus musculus
  siRNA target sequence for D11Ertd730e (NM_148673.3,1150-1168).
ctccatggctcaaacacaa

SEQ ID NO: 482343 - DNA, 19 bp, Mus musculus
  siRNA target sequence for D11Ertd730e (NM_148673.3,1213-1231).
ccaggcagatccgacaaaa

SEQ ID NO: 482344 - DNA, 19 bp, Mus musculus
  siRNA target sequence for D11Ertd730e (NM_148673.3,1216-1234).
ggcagatccgacaaaacta

SEQ ID NO: 482345 - DNA, 19 bp, Mus musculus
  siRNA target sequence for D11Ertd730e (NM_148673.3,1218-1236).
cagatccgacaaaactaga

SEQ ID NO: 482346 - DNA, 19 bp, Mus musculus
  siRNA target sequence for D11Ertd730e (NM_148673.3,1389-1407).
ggcatggcacagtcattaa

SEQ ID NO: 482347 - DNA, 19 bp, Mus musculus
  siRNA target sequence for D11Ertd730e (NM_148673.3,1390-1408).
gcatggcacagtcattaaa

SEQ ID NO: 482348 - DNA, 19 bp, Mus musculus
  siRNA target sequence for D11Ertd730e (NM_148673.3,1445-1463).
gaagacgtgaagatcaata

SEQ ID NO: 482349 - DNA, 19 bp, Mus musculus
  siRNA target sequence for D11Ertd730e (NM_148673.3,1521-1539).
gtcactcgttttttaagta

SEQ ID NO: 482350 - DNA, 19 bp, Mus musculus
  siRNA target sequence for D11Ertd730e (NM_148673.3,1527-1545).
cgttttttaagtattccta

SEQ ID NO: 482351 - DNA, 19 bp, Mus musculus
  siRNA target sequence for D11Ertd730e (NM_148673.3,1562-1580).
gggaaggagagcgttaact

SEQ ID NO: 482352 - DNA, 19 bp, Mus musculus
  siRNA target sequence for D11Ertd730e (NM_148673.3,1564-1582).
gaaggagagcgttaactca

SEQ ID NO: 482353 - DNA, 19 bp, Mus musculus
  siRNA target sequence for D11Ertd730e (NM_148673.3,1648-1666).
gctacatcaggagaaacta

SEQ ID NO: 482354 - DNA, 19 bp, Mus musculus
  siRNA target sequence for D11Ertd730e (NM_148673.3,1831-1849).
gccctacaacagcatctat

SEQ ID NO: 482355 - DNA, 19 bp, Mus musculus
  siRNA target sequence for D11Ertd730e (NM_148673.3,1834-1852).
ctacaacagcatctatgaa

SEQ ID NO: 482356 - DNA, 19 bp, Mus musculus
  siRNA target sequence for D11Ertd730e (NM_148673.3,1879-1897).
ggaggcctacaggatgaaa

SEQ ID NO: 482357 - DNA, 19 bp, Mus musculus
  siRNA target sequence for D11Lgp2e (NM_030150.1,150-168).
gggcaagaatatcattata

SEQ ID NO: 482358 - DNA, 19 bp, Mus musculus
  siRNA target sequence for D11Lgp2e (NM_030150.1,250-268).
gtggtggtactggtcaata

SEQ ID NO: 482359 - DNA, 19 bp, Mus musculus
  siRNA target sequence for D11Lgp2e (NM_030150.1,303-321).
caggcgcatgctggataaa

SEQ ID NO: 482360 - DNA, 19 bp, Mus musculus
  siRNA target sequence for D11Lgp2e (NM_030150.1,405-423).
ctgtacggcagagttgtta

SEQ ID NO: 482361 - DNA, 19 bp, Mus musculus
  siRNA target sequence for D11Lgp2e (NM_030150.1,407-425).
gtacggcagagttgttaca

SEQ ID NO: 482362 - DNA, 19 bp, Mus musculus
  siRNA target sequence for D11Lgp2e (NM_030150.1,470-488).
gagaattctcgctgattgt

SEQ ID NO: 482363 - DNA, 19 bp, Mus musculus
  siRNA target sequence for D230005D02Rik (NM_172813.1,698-716).
ggtagatgcggctggattt

SEQ ID NO: 482364 - DNA, 19 bp, Mus musculus
  siRNA target sequence for D230005D02Rik (NM_172813.1,733-751).
gtccacgggagcttcatca

SEQ ID NO: 482365 - DNA, 19 bp, Mus musculus
  siRNA target sequence for D230005D02Rik (NM_172813.1,736-754).
cacgggagcttcatcagat

SEQ ID NO: 482366 - DNA, 19 bp, Mus musculus
  siRNA target sequence for D230005D02Rik (NM_172813.1,780-798).
gggagcatagccctagata

SEQ ID NO: 482367 - DNA, 19 bp, Mus musculus
  siRNA target sequence for D230005D02Rik (NM_172813.1,840-858).
gccacagctatgaataact

SEQ ID NO: 482368 - DNA, 19 bp, Mus musculus
  siRNA target sequence for D230005D02Rik (NM_172813.1,841-859).
ccacagctatgaataactt

SEQ ID NO: 482369 - DNA, 19 bp, Mus musculus
  siRNA target sequence for D230005D02Rik (NM_172813.1,894-912).
ctcgtgtccgactcaatct

SEQ ID NO: 482370 - DNA, 19 bp, Mus musculus
  siRNA target sequence for D230005D02Rik (NM_172813.1,927-945).
gatccaggcctcaacatga

SEQ ID NO: 482371 - DNA, 19 bp, Mus musculus
  siRNA target sequence for D230005D02Rik (NM_172813.1,930-948).
ccaggcctcaacatgatga

SEQ ID NO: 482372 - DNA, 19 bp, Mus musculus
  siRNA target sequence for D230005D02Rik (NM_172813.1,949-967).
ctggaatcacccccattaa

SEQ ID NO: 482373 - DNA, 19 bp, Mus musculus
  siRNA target sequence for D230005D02Rik (NM_172813.1,959-977).
ccccattaacccgatgata

SEQ ID NO: 482374 - DNA, 19 bp, Mus musculus
  siRNA target sequence for D230005D02Rik (NM_172813.1,1020-1038).
gctgtcgtcaaggaaataa

SEQ ID NO: 482375 - DNA, 19 bp, Mus musculus
  siRNA target sequence for D230005D02Rik (NM_172813.1,1104-1122).
cgacctccagggtgtaaga

SEQ ID NO: 482376 - DNA, 19 bp, Mus musculus
  siRNA target sequence for D230005D02Rik (NM_172813.1,1127-1145).
gtttgttggaggattacca

SEQ ID NO: 482377 - DNA, 19 bp, Mus musculus
  siRNA target sequence for D230005D02Rik (NM_172813.1,1153-1171).
caacggaagaaattattca

SEQ ID NO: 482378 - DNA, 19 bp, Mus musculus
  siRNA target sequence for D230005D02Rik (NM_172813.1,1209-1227).
cgaaagagcaagaagaatt

SEQ ID NO: 482379 - DNA, 19 bp, Mus musculus
  siRNA target sequence for D230005D02Rik (NM_172813.1,1302-1320).
gggtcgagcacggataaaa

SEQ ID NO: 482380 - DNA, 19 bp, Mus musculus
  siRNA target sequence for D230005D02Rik (NM_172813.1,1303-1321).
ggtcgagcacggataaaaa

SEQ ID NO: 482381 - DNA, 19 bp, Mus musculus
  siRNA target sequence for D230005D02Rik (NM_172813.1,1307-1325).
gagcacggataaaaaggat

SEQ ID NO: 482382 - DNA, 19 bp, Mus musculus
  siRNA target sequence for D230005D02Rik (NM_172813.1,1355-1373).
ggccagggatgacttctat

SEQ ID NO: 482383 - DNA, 19 bp, Mus musculus
  siRNA target sequence for D230005D02Rik (NM_172813.1,1357-1375).
ccagggatgacttctatga

SEQ ID NO: 482384 - DNA, 19 bp, Mus musculus
  siRNA target sequence for D230005D02Rik (NM_172813.1,1378-1396).
gggaatgcaagcaaaggat

SEQ ID NO: 482385 - DNA, 19 bp, Mus musculus
  siRNA target sequence for D230005D02Rik (NM_172813.1,1588-1606).
gctcggcaaaccagttcta

SEQ ID NO: 482386 - DNA, 19 bp, Mus musculus
  siRNA target sequence for D230005D02Rik (NM_172813.1,1634-1652).
cgtgcgcaggctcatgaat

SEQ ID NO: 482387 - DNA, 19 bp, Mus musculus
  siRNA target sequence for D230005D02Rik (NM_172813.1,1660-1678).
ctacccacgagcaggaaat

SEQ ID NO: 482388 - DNA, 19 bp, Mus musculus
  siRNA target sequence for D230005D02Rik (NM_172813.1,1714-1732).
cggggatcctcactcaatt

SEQ ID NO: 482389 - DNA, 19 bp, Mus musculus
  siRNA target sequence for D230005D02Rik (NM_172813.1,1757-1775).
cgcttctaccagacaaaaa

SEQ ID NO: 482390 - DNA, 19 bp, Mus musculus
  siRNA target sequence for D230005D02Rik (NM_172813.1,1798-1816).
cccagcgcaagaacataga

SEQ ID NO: 482391 - DNA, 19 bp, Mus musculus
  siRNA target sequence for D230005D02Rik (NM_172813.1,1802-1820).
gcgcaagaacatagacatt

SEQ ID NO: 482392 - DNA, 19 bp, Mus musculus
  siRNA target sequence for D230005D02Rik (NM_172813.1,1918-1936).
gtgacagcccgactaaaaa

SEQ ID NO: 482393 - DNA, 19 bp, Mus musculus
  siRNA target sequence for D230005D02Rik (NM_172813.1,1920-1938).
gacagcccgactaaaaaaa

SEQ ID NO: 482394 - DNA, 19 bp, Mus musculus
  siRNA target sequence for D230005D02Rik (NM_172813.1,2163-2181).
gagctgaacaacaaaaagt

SEQ ID NO: 482395 - DNA, 19 bp, Mus musculus
  siRNA target sequence for D230005D02Rik (NM_172813.1,2218-2236).
cgcaagcgttgctgaaagt

SEQ ID NO: 482396 - DNA, 19 bp, Mus musculus
  siRNA target sequence for D230005D02Rik (NM_172813.1,2237-2255).
cctccaggagcagttaaaa

SEQ ID NO: 482397 - DNA, 19 bp, Mus musculus
  siRNA target sequence for D230005D02Rik (NM_172813.1,2288-2306).
cagccacgaggatgcaaat

SEQ ID NO: 482398 - DNA, 19 bp, Mus musculus
  siRNA target sequence for D230005D02Rik (NM_172813.1,2323-2341).
cggtcgcgttggttaacca

SEQ ID NO: 482399 - DNA, 19 bp, Mus musculus
  siRNA target sequence for D230005D02Rik (NM_172813.1,2371-2389).
gccaaggtttgaaatctga

SEQ ID NO: 482400 - DNA, 19 bp, Mus musculus
  siRNA target sequence for D230005D02Rik (NM_172813.1,2399-2417).
cctgctgataggcatcata

SEQ ID NO: 482401 - DNA, 19 bp, Mus musculus
  siRNA target sequence for D230005D02Rik (NM_172813.1,2400-2418).
ctgctgataggcatcatat

SEQ ID NO: 482402 - DNA, 19 bp, Mus musculus
  siRNA target sequence for D230005D02Rik (NM_172813.1,2402-2420).
gctgataggcatcatatca

SEQ ID NO: 482403 - DNA, 19 bp, Mus musculus
  siRNA target sequence for D230005D02Rik (NM_172813.1,2403-2421).
ctgataggcatcatatcaa

SEQ ID NO: 482404 - DNA, 19 bp, Mus musculus
  siRNA target sequence for D230005D02Rik (NM_172813.1,2436-2454).
cacccctttggagctaata

SEQ ID NO: 482405 - DNA, 19 bp, Mus musculus
  siRNA target sequence for D230005D02Rik (NM_172813.1,2438-2456).
cccctttggagctaatata

SEQ ID NO: 482406 - DNA, 19 bp, Mus musculus
  siRNA target sequence for D230005D02Rik (NM_172813.1,2446-2464).
gagctaatatagagtatct

SEQ ID NO: 482407 - DNA, 19 bp, Mus musculus
  siRNA target sequence for D230005D02Rik (NM_172813.1,2448-2466).
gctaatatagagtatctgt

SEQ ID NO: 482408 - DNA, 19 bp, Mus musculus
  siRNA target sequence for D230005D02Rik (NM_172813.1,2457-2475).
gagtatctgtggtcataca

SEQ ID NO: 482409 - DNA, 19 bp, Mus musculus
  siRNA target sequence for D230005D02Rik (NM_172813.1,2481-2499).
cagctggactctaagatat

SEQ ID NO: 482410 - DNA, 19 bp, Mus musculus
  siRNA target sequence for D230005D02Rik (NM_172813.1,2500-2518).
ccgccaatgaaattgaaat

SEQ ID NO: 482411 - DNA, 19 bp, Mus musculus
  siRNA target sequence for D230005D02Rik (NM_172813.1,2530-2548).
ggctgccacggatgttcaa

SEQ ID NO: 482412 - DNA, 19 bp, Mus musculus
  siRNA target sequence for D230005D02Rik (NM_172813.1,2531-2549).
gctgccacggatgttcaaa

SEQ ID NO: 482413 - DNA, 19 bp, Mus musculus
  siRNA target sequence for D230005D02Rik (NM_172813.1,2571-2589).
gcgacgctagagaagagat

SEQ ID NO: 482414 - DNA, 19 bp, Mus musculus
  siRNA target sequence for D230022C05Rik (NM_172918.3,493-511).
cagtctatctcccaagttt

SEQ ID NO: 482415 - DNA, 19 bp, Mus musculus
  siRNA target sequence for D230022C05Rik (NM_172918.3,497-515).
ctatctcccaagtttgcta

SEQ ID NO: 482416 - DNA, 19 bp, Mus musculus
  siRNA target sequence for D230022C05Rik (NM_172918.3,563-581).
ccatcaaaatatgattctt

SEQ ID NO: 482417 - DNA, 19 bp, Mus musculus
  siRNA target sequence for D230022C05Rik (NM_172918.3,652-670).
ggagtctgtgacatttcaa

SEQ ID NO: 482418 - DNA, 19 bp, Mus musculus
  siRNA target sequence for D230022C05Rik (NM_172918.3,683-701).
gactttactgagaaagagt

SEQ ID NO: 482419 - DNA, 19 bp, Mus musculus
  siRNA target sequence for D230022C05Rik (NM_172918.3,726-744).
gaaaactgtacaaagatgt

SEQ ID NO: 482420 - DNA, 19 bp, Mus musculus
  siRNA target sequence for D230022C05Rik (NM_172918.3,879-897).
ggggaactacatctaaagt

SEQ ID NO: 482421 - DNA, 19 bp, Mus musculus
  siRNA target sequence for D230022C05Rik (NM_172918.3,881-899).
ggaactacatctaaagtca

SEQ ID NO: 482422 - DNA, 19 bp, Mus musculus
  siRNA target sequence for D230022C05Rik (NM_172918.3,882-900).
gaactacatctaaagtcaa

SEQ ID NO: 482423 - DNA, 19 bp, Mus musculus
  siRNA target sequence for D230022C05Rik (NM_172918.3,934-952).
ggaagcatctgatgatgta

SEQ ID NO: 482424 - DNA, 19 bp, Mus musculus
  siRNA target sequence for D230022C05Rik (NM_172918.3,935-953).
gaagcatctgatgatgtaa

SEQ ID NO: 482425 - DNA, 19 bp, Mus musculus
  siRNA target sequence for D230022C05Rik (NM_172918.3,1117-1135).
gcacatgagcatgaatgat

SEQ ID NO: 482426 - DNA, 19 bp, Mus musculus
  siRNA target sequence for D230022C05Rik (NM_172918.3,1193-1211).
cttacaaggcaccatagaa

SEQ ID NO: 482427 - DNA, 19 bp, Mus musculus
  siRNA target sequence for D230022C05Rik (NM_172918.3,1321-1339).
ctgtagtcagtgtagtaat

SEQ ID NO: 482428 - DNA, 19 bp, Mus musculus
  siRNA target sequence for D230022C05Rik (NM_172918.3,1524-1542).
cccacctgaaggaacatgt

SEQ ID NO: 482429 - DNA, 19 bp, Mus musculus
  siRNA target sequence for D230022C05Rik (NM_172918.3,1534-1552).
ggaacatgtccgaaaccat

SEQ ID NO: 482430 - DNA, 19 bp, Mus musculus
  siRNA target sequence for D230022C05Rik (NM_172918.3,1535-1553).
gaacatgtccgaaaccata

SEQ ID NO: 482431 - DNA, 19 bp, Mus musculus
  siRNA target sequence for D230022C05Rik (NM_172918.3,1681-1699).
cagtgacctcctatcaaga

SEQ ID NO: 482432 - DNA, 19 bp, Mus musculus
  siRNA target sequence for D230022C05Rik (NM_172918.3,1781-1799).
ctgaaaacacacatgaact

SEQ ID NO: 482433 - DNA, 19 bp, Mus musculus
  siRNA target sequence for D230022C05Rik (NM_172918.3,1923-1941).
gaaaggtctttggtgatta

SEQ ID NO: 482434 - DNA, 19 bp, Mus musculus
  siRNA target sequence for D230022C05Rik (NM_172918.3,2103-2121).
gcataggatccaaccttaa

SEQ ID NO: 482435 - DNA, 19 bp, Mus musculus
  siRNA target sequence for D230022C05Rik (NM_172918.3,2104-2122).
cataggatccaaccttaat

SEQ ID NO: 482436 - DNA, 19 bp, Mus musculus
  siRNA target sequence for D230022C05Rik (NM_172918.3,2152-2170).
gccttatgagtgtcttatt

SEQ ID NO: 482437 - DNA, 19 bp, Mus musculus
  siRNA target sequence for D230022C05Rik (NM_172918.3,2246-2264).
cgtctgtgtgggaaaggtt

SEQ ID NO: 482438 - DNA, 19 bp, Mus musculus
  siRNA target sequence for D330023I21Rik (NM_153586.1,206-224).
gcgcctgggactatgtaca

SEQ ID NO: 482439 - DNA, 19 bp, Mus musculus
  siRNA target sequence for D330023I21Rik (NM_153586.1,207-225).
cgcctgggactatgtacaa

SEQ ID NO: 482440 - DNA, 19 bp, Mus musculus
  siRNA target sequence for D330023I21Rik (NM_153586.1,242-260).
gcagctgggacaatgactt

SEQ ID NO: 482441 - DNA, 19 bp, Mus musculus
  siRNA target sequence for D330023I21Rik (NM_153586.1,245-263).
gctgggacaatgactttgt

SEQ ID NO: 482442 - DNA, 19 bp, Mus musculus
  siRNA target sequence for D330023I21Rik (NM_153586.1,312-330).
gggaattagggctcaatga

SEQ ID NO: 482443 - DNA, 19 bp, Mus musculus
  siRNA target sequence for D330023I21Rik (NM_153586.1,314-332).
gaattagggctcaatgaaa

SEQ ID NO: 482444 - DNA, 19 bp, Mus musculus
  siRNA target sequence for D330023I21Rik (NM_153586.1,335-353).
gaaatattgatctggaaaa

SEQ ID NO: 482445 - DNA, 19 bp, Mus musculus
  siRNA target sequence for D330023I21Rik (NM_153586.1,354-372).
gccatgtttccggtgaaaa

SEQ ID NO: 482446 - DNA, 19 bp, Mus musculus
  siRNA target sequence for D330023I21Rik (NM_153586.1,356-374).
catgtttccggtgaaaaga

SEQ ID NO: 482447 - DNA, 19 bp, Mus musculus
  siRNA target sequence for D330023I21Rik (NM_153586.1,387-405).
gggcaactcccgaagcaat

SEQ ID NO: 482448 - DNA, 19 bp, Mus musculus
  siRNA target sequence for D330023I21Rik (NM_153586.1,393-411).
ctcccgaagcaatacagaa

SEQ ID NO: 482449 - DNA, 19 bp, Mus musculus
  siRNA target sequence for D330023I21Rik (NM_153586.1,443-461).
gagcgccagcgcatccttt

SEQ ID NO: 482450 - DNA, 19 bp, Mus musculus
  siRNA target sequence for D330023I21Rik (NM_153586.1,491-509).
cagctgacccgaagagaaa

SEQ ID NO: 482451 - DNA, 19 bp, Mus musculus
  siRNA target sequence for D330023I21Rik (NM_153586.1,511-529).
ggaaattgagaagtcttta

SEQ ID NO: 482452 - DNA, 19 bp, Mus musculus
  siRNA target sequence for D330023I21Rik (NM_153586.1,542-560).
gatcgtcactccttcctta

SEQ ID NO: 482453 - DNA, 19 bp, Mus musculus
  siRNA target sequence for D330023I21Rik (NM_153586.1,553-571).
cttccttaaggctctttat

SEQ ID NO: 482454 - DNA, 19 bp, Mus musculus
  siRNA target sequence for D330023I21Rik (NM_153586.1,634-652).
ccgcgagactataatgaaa

SEQ ID NO: 482455 - DNA, 19 bp, Mus musculus
  siRNA target sequence for D330023I21Rik (NM_153586.1,635-653).
cgcgagactataatgaaaa

SEQ ID NO: 482456 - DNA, 19 bp, Mus musculus
  siRNA target sequence for D330023I21Rik (NM_153586.1,805-823).
gctccatgtggcaaagctt

SEQ ID NO: 482457 - DNA, 19 bp, Mus musculus
  siRNA target sequence for D330023I21Rik (NM_153586.1,806-824).
ctccatgtggcaaagctta

SEQ ID NO: 482458 - DNA, 19 bp, Mus musculus
  siRNA target sequence for D330023I21Rik (NM_153586.1,812-830).
gtggcaaagcttattgatt

SEQ ID NO: 482459 - DNA, 19 bp, Mus musculus
  siRNA target sequence for D330023I21Rik (NM_153586.1,833-851).
ccaactgagcaatattgga

SEQ ID NO: 482460 - DNA, 19 bp, Mus musculus
  siRNA target sequence for D330023I21Rik (NM_153586.1,862-880).
gacgctgaagcaaccaata

SEQ ID NO: 482461 - DNA, 19 bp, Mus musculus
  siRNA target sequence for D330023I21Rik (NM_153586.1,866-884).
ctgaagcaaccaatagaat

SEQ ID NO: 482462 - DNA, 19 bp, Mus musculus
  siRNA target sequence for D330023I21Rik (NM_153586.1,929-947).
gagatccgaaacattccta

SEQ ID NO: 482463 - DNA, 19 bp, Mus musculus
  siRNA target sequence for D330023I21Rik (NM_153586.1,949-967).
gttttcttcatataatcca

SEQ ID NO: 482464 - DNA, 19 bp, Mus musculus
  siRNA target sequence for D330023I21Rik (NM_153586.1,1023-1041).
gagaccttatctcattatt

SEQ ID NO: 482465 - DNA, 19 bp, Mus musculus
  siRNA target sequence for D330023I21Rik (NM_153586.1,1071-1089).
ccattcagttccgaatgat

SEQ ID NO: 482466 - DNA, 19 bp, Mus musculus
  siRNA target sequence for D330023I21Rik (NM_153586.1,1117-1135).
cctcacctttcccaataaa

SEQ ID NO: 482467 - DNA, 19 bp, Mus musculus
  siRNA target sequence for D330023I21Rik (NM_153586.1,1154-1172).
ctgcaccaaattaatggat

SEQ ID NO: 482468 - DNA, 19 bp, Mus musculus
  siRNA target sequence for D330023I21Rik (NM_153586.1,1156-1174).
gcaccaaattaatggatat

SEQ ID NO: 482469 - DNA, 19 bp, Mus musculus
  siRNA target sequence for D330023I21Rik (NM_153586.1,1157-1175).
caccaaattaatggatata

SEQ ID NO: 482470 - DNA, 19 bp, Mus musculus
  siRNA target sequence for D330023I21Rik (NM_153586.1,1238-1256).
cagcgctcttcccttataa

SEQ ID NO: 482471 - DNA, 19 bp, Mus musculus
  siRNA target sequence for D330023I21Rik (NM_153586.1,1240-1258).
gcgctcttcccttataaca

SEQ ID NO: 482472 - DNA, 19 bp, Mus musculus
  siRNA target sequence for D330023I21Rik (NM_153586.1,1241-1259).
cgctcttcccttataacat

SEQ ID NO: 482473 - DNA, 19 bp, Mus musculus
  siRNA target sequence for D330023I21Rik (NM_153586.1,1243-1261).
ctcttcccttataacatct

SEQ ID NO: 482474 - DNA, 19 bp, Mus musculus
  siRNA target sequence for D330038O06 (NM_177899.2,218-236).
cgctgcgatagggtatata

SEQ ID NO: 482475 - DNA, 19 bp, Mus musculus
  siRNA target sequence for D330038O06 (NM_177899.2,219-237).
gctgcgatagggtatatat

SEQ ID NO: 482476 - DNA, 19 bp, Mus musculus
  siRNA target sequence for D330038O06 (NM_177899.2,261-279).
gactgcaaaaattttggaa

SEQ ID NO: 482477 - DNA, 19 bp, Mus musculus
  siRNA target sequence for D330038O06 (NM_177899.2,290-308).
gcatgtcatatctgattct

SEQ ID NO: 482478 - DNA, 19 bp, Mus musculus
  siRNA target sequence for D330038O06 (NM_177899.2,344-362).
caagccatacgattctagt

SEQ ID NO: 482479 - DNA, 19 bp, Mus musculus
  siRNA target sequence for D330038O06 (NM_177899.2,389-407).
gggagcgcacactgtgaat

SEQ ID NO: 482480 - DNA, 19 bp, Mus musculus
  siRNA target sequence for D330038O06 (NM_177899.2,479-497).
ccacagtggacaaaacgtt

SEQ ID NO: 482481 - DNA, 19 bp, Mus musculus
  siRNA target sequence for D330038O06 (NM_177899.2,495-513).
gtttgtgactacaaggaat

SEQ ID NO: 482482 - DNA, 19 bp, Mus musculus
  siRNA target sequence for D330038O06 (NM_177899.2,529-547).
gttaccacagttcacttta

SEQ ID NO: 482483 - DNA, 19 bp, Mus musculus
  siRNA target sequence for D330038O06 (NM_177899.2,558-576).
gggactgacactgtaagaa

SEQ ID NO: 482484 - DNA, 19 bp, Mus musculus
  siRNA target sequence for D330038O06 (NM_177899.2,559-577).
ggactgacactgtaagaaa

SEQ ID NO: 482485 - DNA, 19 bp, Mus musculus
  siRNA target sequence for D330038O06 (NM_177899.2,560-578).
gactgacactgtaagaaaa

SEQ ID NO: 482486 - DNA, 19 bp, Mus musculus
  siRNA target sequence for D330038O06 (NM_177899.2,1018-1036).
gtagtaggctcttcattta

SEQ ID NO: 482487 - DNA, 19 bp, Mus musculus
  siRNA target sequence for D330038O06 (NM_177899.2,1072-1090).
cgagtgaaagaccatataa

SEQ ID NO: 482488 - DNA, 19 bp, Mus musculus
  siRNA target sequence for D330038O06 (NM_177899.2,1292-1310).
cacttcccttcggttacat

SEQ ID NO: 482489 - DNA, 19 bp, Mus musculus
  siRNA target sequence for D330038O06 (NM_177899.2,1297-1315).
cccttcggttacatgagat

SEQ ID NO: 482490 - DNA, 19 bp, Mus musculus
  siRNA target sequence for D330038O06 (NM_177899.2,1446-1464).
gcctttatacggtacagtt

SEQ ID NO: 482491 - DNA, 19 bp, Mus musculus
  siRNA target sequence for D330038O06 (NM_177899.2,1447-1465).
cctttatacggtacagtta

SEQ ID NO: 482492 - DNA, 19 bp, Mus musculus
  siRNA target sequence for D330038O06 (NM_177899.2,1593-1611).
gagtgtcagcagtatctaa

SEQ ID NO: 482493 - DNA, 19 bp, Mus musculus
  siRNA target sequence for D330038O06 (NM_177899.2,1599-1617).
cagcagtatctaattcctt

SEQ ID NO: 482494 - DNA, 19 bp, Mus musculus
  siRNA target sequence for D3Ertd330e (NM_057172.1,161-179).
cgttaacgacgctttcaaa

SEQ ID NO: 482495 - DNA, 19 bp, Mus musculus
  siRNA target sequence for D3Ertd330e (NM_057172.1,221-239).
gggtgatgctggtacatca

SEQ ID NO: 482496 - DNA, 19 bp, Mus musculus
  siRNA target sequence for D3Ertd330e (NM_057172.1,228-246).
gctggtacatcattgaatt

SEQ ID NO: 482497 - DNA, 19 bp, Mus musculus
  siRNA target sequence for D3Ertd330e (NM_057172.1,408-426).
gatgggatggtcggattta

SEQ ID NO: 482498 - DNA, 19 bp, Mus musculus
  siRNA target sequence for D3Ertd330e (NM_057172.1,411-429).
gggatggtcggatttataa

SEQ ID NO: 482499 - DNA, 19 bp, Mus musculus
  siRNA target sequence for D3Ertd330e (NM_057172.1,412-430).
ggatggtcggatttataat

SEQ ID NO: 482500 - DNA, 19 bp, Mus musculus
  siRNA target sequence for D3Ertd330e (NM_057172.1,413-431).
gatggtcggatttataatt

SEQ ID NO: 482501 - DNA, 19 bp, Mus musculus
  siRNA target sequence for D3Ertd330e (NM_057172.1,472-490).
ctggatgcaagatacagat

SEQ ID NO: 482502 - DNA, 19 bp, Mus musculus
  siRNA target sequence for D3Ertd330e (NM_057172.1,554-572).
ccaatcagcaaaaagatta

SEQ ID NO: 482503 - DNA, 19 bp, Mus musculus
  siRNA target sequence for D3Ertd330e (NM_057172.1,634-652).
gaaatgcagttcaggaaat

SEQ ID NO: 482504 - DNA, 19 bp, Mus musculus
  siRNA target sequence for D3Ertd330e (NM_057172.1,639-657).
gcagttcaggaaatcatga

SEQ ID NO: 482505 - DNA, 19 bp, Mus musculus
  siRNA target sequence for D3Ertd330e (NM_057172.1,667-685).
gcaaagcaggactagttat

SEQ ID NO: 482506 - DNA, 19 bp, Mus musculus
  siRNA target sequence for D3Ertd330e (NM_057172.1,668-686).
caaagcaggactagttatt

SEQ ID NO: 482507 - DNA, 19 bp, Mus musculus
  siRNA target sequence for D3Ertd330e (NM_057172.1,672-690).
gcaggactagttattggaa

SEQ ID NO: 482508 - DNA, 19 bp, Mus musculus
  siRNA target sequence for D3Ertd330e (NM_057172.1,673-691).
caggactagttattggaaa

SEQ ID NO: 482509 - DNA, 19 bp, Mus musculus
  siRNA target sequence for D3Ertd330e (NM_057172.1,697-715).
gcgagactattaaacaact

SEQ ID NO: 482510 - DNA, 19 bp, Mus musculus
  siRNA target sequence for D3Ertd330e (NM_057172.1,720-738).
gaacgggctggtgttaaaa

SEQ ID NO: 482511 - DNA, 19 bp, Mus musculus
  siRNA target sequence for D3Ertd330e (NM_057172.1,777-795).
gataaacctcttaggatta

SEQ ID NO: 482512 - DNA, 19 bp, Mus musculus
  siRNA target sequence for D3Ertd330e (NM_057172.1,796-814).
cgggtgacccatacaaagt

SEQ ID NO: 482513 - DNA, 19 bp, Mus musculus
  siRNA target sequence for D3Ertd330e (NM_057172.1,797-815).
gggtgacccatacaaagtt

SEQ ID NO: 482514 - DNA, 19 bp, Mus musculus
  siRNA target sequence for D3Ertd330e (NM_057172.1,828-846).
gaaatggtattagagttaa

SEQ ID NO: 482515 - DNA, 19 bp, Mus musculus
  siRNA target sequence for D3Ertd330e (NM_057172.1,868-886).
gagaagtgcggaatgagta

SEQ ID NO: 482516 - DNA, 19 bp, Mus musculus
  siRNA target sequence for D3Ertd330e (NM_057172.1,996-1014).
gctggtgttcgaattcagt

SEQ ID NO: 482517 - DNA, 19 bp, Mus musculus
  siRNA target sequence for D3Ertd330e (NM_057172.1,1078-1096).
gtcagcacgctgcagaaat

SEQ ID NO: 482518 - DNA, 19 bp, Mus musculus
  siRNA target sequence for D3Ertd330e (NM_057172.1,1085-1103).
cgctgcagaaataatcaca

SEQ ID NO: 482519 - DNA, 19 bp, Mus musculus
  siRNA target sequence for D3Ertd330e (NM_057172.1,1165-1183).
gaggtagaggtcaaggaaa

SEQ ID NO: 482520 - DNA, 19 bp, Mus musculus
  siRNA target sequence for D3Ertd330e (NM_057172.1,1209-1227).
ctccaggagtttaatttca

SEQ ID NO: 482521 - DNA, 19 bp, Mus musculus
  siRNA target sequence for D3Ertd330e (NM_057172.1,1298-1316).
gtctggtgcaagaatagaa

SEQ ID NO: 482522 - DNA, 19 bp, Mus musculus
  siRNA target sequence for D3Ertd330e (NM_057172.1,1336-1354).
ctaatgcagatcccaatat

SEQ ID NO: 482523 - DNA, 19 bp, Mus musculus
  siRNA target sequence for D3Ertd330e (NM_057172.1,1344-1362).
gatcccaatatgaagttat

SEQ ID NO: 482524 - DNA, 19 bp, Mus musculus
  siRNA target sequence for D3Ertd330e (NM_057172.1,1372-1390).
ggggcactccacagcaaat

SEQ ID NO: 482525 - DNA, 19 bp, Mus musculus
  siRNA target sequence for D3Ertd330e (NM_057172.1,1375-1393).
gcactccacagcaaataga

SEQ ID NO: 482526 - DNA, 19 bp, Mus musculus
  siRNA target sequence for D3Ertd330e (NM_057172.1,1378-1396).
ctccacagcaaatagacta

SEQ ID NO: 482527 - DNA, 19 bp, Mus musculus
  siRNA target sequence for D3Ertd330e (NM_057172.1,1394-1412).
ctatgctcgacaactcata

SEQ ID NO: 482528 - DNA, 19 bp, Mus musculus
  siRNA target sequence for D3Ertd330e (NM_057172.1,1519-1537).
ctccaatgggaccatacaa

SEQ ID NO: 482529 - DNA, 19 bp, Mus musculus
  siRNA target sequence for D3Ertd330e (NM_057172.1,1685-1703).
ggcagcttgggctgcttat

SEQ ID NO: 482530 - DNA, 19 bp, Mus musculus
  siRNA target sequence for D3Ertd330e (NM_057172.1,1686-1704).
gcagcttgggctgcttatt

SEQ ID NO: 482531 - DNA, 19 bp, Mus musculus
  siRNA target sequence for D3Ertd330e (NM_057172.1,1687-1705).
cagcttgggctgcttatta

SEQ ID NO: 482532 - DNA, 19 bp, Mus musculus
  siRNA target sequence for D3Ertd330e (NM_057172.1,1699-1717).
cttattatgctcactatta

SEQ ID NO: 482533 - DNA, 19 bp, Mus musculus
  siRNA target sequence for D3Ertd330e (NM_057172.1,1812-1830).
gctggacaggttgattata

SEQ ID NO: 482534 - DNA, 19 bp, Mus musculus
  siRNA target sequence for D3Ertd330e (NM_057172.1,1899-1917).
ggtggtcagccggattata

SEQ ID NO: 482535 - DNA, 19 bp, Mus musculus
  siRNA target sequence for D3Ertd330e (NM_057172.1,1942-1960).
gacagcaagcagcgtatta

SEQ ID NO: 482536 - DNA, 19 bp, Mus musculus
  siRNA target sequence for D430030K24Rik (NM_178732.2,431-449).
caacctggccgctgacaaa

SEQ ID NO: 482537 - DNA, 19 bp, Mus musculus
  siRNA target sequence for D430030K24Rik (NM_178732.2,535-553).
gccttgtaccgccatgtaa

SEQ ID NO: 482538 - DNA, 19 bp, Mus musculus
  siRNA target sequence for D430030K24Rik (NM_178732.2,536-554).
ccttgtaccgccatgtaat

SEQ ID NO: 482539 - DNA, 19 bp, Mus musculus
  siRNA target sequence for D430030K24Rik (NM_178732.2,645-663).
ggttcccaacaggacaaat

SEQ ID NO: 482540 - DNA, 19 bp, Mus musculus
  siRNA target sequence for D430030K24Rik (NM_178732.2,646-664).
gttcccaacaggacaaata

SEQ ID NO: 482541 - DNA, 19 bp, Mus musculus
  siRNA target sequence for D430030K24Rik (NM_178732.2,699-717).
ccttggatccaattatagt

SEQ ID NO: 482542 - DNA, 19 bp, Mus musculus
  siRNA target sequence for D430030K24Rik (NM_178732.2,700-718).
cttggatccaattatagta

SEQ ID NO: 482543 - DNA, 19 bp, Mus musculus
  siRNA target sequence for D430030K24Rik (NM_178732.2,703-721).
ggatccaattatagtacaa

SEQ ID NO: 482544 - DNA, 19 bp, Mus musculus
  siRNA target sequence for D430030K24Rik (NM_178732.2,772-790).
gataggatacctactagta

SEQ ID NO: 482545 - DNA, 19 bp, Mus musculus
  siRNA target sequence for D430030K24Rik (NM_178732.2,777-795).
gatacctactagtatcctt

SEQ ID NO: 482546 - DNA, 19 bp, Mus musculus
  siRNA target sequence for D430030K24Rik (NM_178732.2,808-826).
gcctaccctgatgcaaaaa

SEQ ID NO: 482547 - DNA, 19 bp, Mus musculus
  siRNA target sequence for D430030K24Rik (NM_178732.2,873-891).
cacaggggtatcagtgatt

SEQ ID NO: 482548 - DNA, 19 bp, Mus musculus
  siRNA target sequence for D430030K24Rik (NM_178732.2,875-893).
caggggtatcagtgattta

SEQ ID NO: 482549 - DNA, 19 bp, Mus musculus
  siRNA target sequence for D430030K24Rik (NM_178732.2,877-895).
ggggtatcagtgatttact

SEQ ID NO: 482550 - DNA, 19 bp, Mus musculus
  siRNA target sequence for D430030K24Rik (NM_178732.2,970-988).
cctgaaaatggttcatcta

SEQ ID NO: 482551 - DNA, 19 bp, Mus musculus
  siRNA target sequence for D430030K24Rik (NM_178732.2,1066-1084).
ctaacccctgggagaactt

SEQ ID NO: 482552 - DNA, 19 bp, Mus musculus
  siRNA target sequence for D430030K24Rik (NM_178732.2,1155-1173).
gggagaccccaatgttaca

SEQ ID NO: 482553 - DNA, 19 bp, Mus musculus
  siRNA target sequence for D430030K24Rik (NM_178732.2,1157-1175).
gagaccccaatgttacaga

SEQ ID NO: 482554 - DNA, 19 bp, Mus musculus
  siRNA target sequence for D430030K24Rik (NM_178732.2,1253-1271).
gtagggcgtgcaacaaagt

SEQ ID NO: 482555 - DNA, 19 bp, Mus musculus
  siRNA target sequence for D430030K24Rik (NM_178732.2,1256-1274).
gggcgtgcaacaaagtgtt

SEQ ID NO: 482556 - DNA, 19 bp, Mus musculus
  siRNA target sequence for D430030K24Rik (NM_178732.2,1296-1314).
caagcatctgcgtactcat

SEQ ID NO: 482557 - DNA, 19 bp, Mus musculus
  siRNA target sequence for D430030K24Rik (NM_178732.2,1400-1418).
gcggtgagacgccttatgt

SEQ ID NO: 482558 - DNA, 19 bp, Mus musculus
  siRNA target sequence for D430030K24Rik (NM_178732.2,1543-1561).
ctcagtcagcacctaaaga

SEQ ID NO: 482559 - DNA, 19 bp, Mus musculus
  siRNA target sequence for D430030K24Rik (NM_178732.2,1545-1563).
cagtcagcacctaaagata

SEQ ID NO: 482560 - DNA, 19 bp, Mus musculus
  siRNA target sequence for D430030K24Rik (NM_178732.2,1611-1629).
ctgccgcaactcacatctt

SEQ ID NO: 482561 - DNA, 19 bp, Mus musculus
  siRNA target sequence for D430030K24Rik (NM_178732.2,1613-1631).
gccgcaactcacatcttat

SEQ ID NO: 482562 - DNA, 19 bp, Mus musculus
  siRNA target sequence for D430030K24Rik (NM_178732.2,1680-1698).
ctgtggcgcagcctttagt

SEQ ID NO: 482563 - DNA, 19 bp, Mus musculus
  siRNA target sequence for D430030K24Rik (NM_178732.2,2039-2057).
ggtctcttggggtatcctt

SEQ ID NO: 482564 - DNA, 19 bp, Mus musculus
  siRNA target sequence for D430030K24Rik (NM_178732.2,2040-2058).
gtctcttggggtatcctta

SEQ ID NO: 482565 - DNA, 19 bp, Mus musculus
  siRNA target sequence for D4Wsu132e (NM_138590.2,1852-1870).
gaccccttctggacaatca

SEQ ID NO: 482566 - DNA, 19 bp, Mus musculus
  siRNA target sequence for D4Wsu132e (NM_138590.2,1863-1881).
gacaatcagcgttagtgta

SEQ ID NO: 482567 - DNA, 19 bp, Mus musculus
  siRNA target sequence for D4Wsu132e (NM_138590.2,1865-1883).
caatcagcgttagtgtatt

SEQ ID NO: 482568 - DNA, 19 bp, Mus musculus
  siRNA target sequence for D4Wsu132e (NM_138590.2,1869-1887).
cagcgttagtgtattgcta

SEQ ID NO: 482569 - DNA, 19 bp, Mus musculus
  siRNA target sequence for D4Wsu132e (NM_138590.2,1923-1941).
gtacagagagacgaatgtt

SEQ ID NO: 482570 - DNA, 19 bp, Mus musculus
  siRNA target sequence for D4Wsu132e (NM_138590.2,1926-1944).
cagagagacgaatgtttaa

SEQ ID NO: 482571 - DNA, 19 bp, Mus musculus
  siRNA target sequence for D4Wsu132e (NM_138590.2,1955-1973).
ccaacatctccattcatat

SEQ ID NO: 482572 - DNA, 19 bp, Mus musculus
  siRNA target sequence for D4Wsu132e (NM_138590.2,2002-2020).
gcaaagggatcggagaata

SEQ ID NO: 482573 - DNA, 19 bp, Mus musculus
  siRNA target sequence for D4Wsu132e (NM_138590.2,2056-2074).
ctttccaaggcagttcaaa

SEQ ID NO: 482574 - DNA, 19 bp, Mus musculus
  siRNA target sequence for D4Wsu132e (NM_138590.2,2068-2086).
gttcaaaagaccacatgta

SEQ ID NO: 482575 - DNA, 19 bp, Mus musculus
  siRNA target sequence for D4Wsu132e (NM_138590.2,2071-2089).
caaaagaccacatgtagaa

SEQ ID NO: 482576 - DNA, 19 bp, Mus musculus
  siRNA target sequence for D4Wsu132e (NM_138590.2,2104-2122).
gcgccaccacgatatgaga

SEQ ID NO: 482577 - DNA, 19 bp, Mus musculus
  siRNA target sequence for D4Wsu132e (NM_138590.2,2107-2125).
ccaccacgatatgagaaaa

SEQ ID NO: 482578 - DNA, 19 bp, Mus musculus
  siRNA target sequence for D4Wsu132e (NM_138590.2,2108-2126).
caccacgatatgagaaaaa

SEQ ID NO: 482579 - DNA, 19 bp, Mus musculus
  siRNA target sequence for D4Wsu132e (NM_138590.2,2127-2145).
gccgttccccaagaaaata

SEQ ID NO: 482580 - DNA, 19 bp, Mus musculus
  siRNA target sequence for D4Wsu132e (NM_138590.2,2129-2147).
cgttccccaagaaaataca

SEQ ID NO: 482581 - DNA, 19 bp, Mus musculus
  siRNA target sequence for D4Wsu132e (NM_138590.2,2154-2172).
ggcctcgagaaaataaaga

SEQ ID NO: 482582 - DNA, 19 bp, Mus musculus
  siRNA target sequence for D4Wsu132e (NM_138590.2,2235-2253).
ggggtgaggatgaagactt

SEQ ID NO: 482583 - DNA, 19 bp, Mus musculus
  siRNA target sequence for D4Wsu132e (NM_138590.2,2251-2269).
cttccccaggggctcaaaa

SEQ ID NO: 482584 - DNA, 19 bp, Mus musculus
  siRNA target sequence for D4Wsu132e (NM_138590.2,2411-2429).
ggcagccatgatgatttgt

SEQ ID NO: 482585 - DNA, 19 bp, Mus musculus
  siRNA target sequence for D4Wsu132e (NM_138590.2,2420-2438).
gatgatttgtttcttatta

SEQ ID NO: 482586 - DNA, 19 bp, Mus musculus
  siRNA target sequence for D8Ertd233e (NM_172762.1,46-64).
ggggaggaacgcaagagaa

SEQ ID NO: 482587 - DNA, 19 bp, Mus musculus
  siRNA target sequence for D8Ertd233e (NM_172762.1,224-242).
cggctcctcctgtatttgt

SEQ ID NO: 482588 - DNA, 19 bp, Mus musculus
  siRNA target sequence for D8Ertd233e (NM_172762.1,247-265).
gtgccccaggaaacatcta

SEQ ID NO: 482589 - DNA, 19 bp, Mus musculus
  siRNA target sequence for D8Ertd233e (NM_172762.1,249-267).
gccccaggaaacatctaaa

SEQ ID NO: 482590 - DNA, 19 bp, Mus musculus
  siRNA target sequence for D8Ertd233e (NM_172762.1,250-268).
ccccaggaaacatctaaaa

SEQ ID NO: 482591 - DNA, 19 bp, Mus musculus
  siRNA target sequence for D8Ertd233e (NM_172762.1,304-322).
gagagtgtgtcccaaacta

SEQ ID NO: 482592 - DNA, 19 bp, Mus musculus
  siRNA target sequence for D8Ertd233e (NM_172762.1,342-360).
gccttcgagaaaagtgaaa

SEQ ID NO: 482593 - DNA, 19 bp, Mus musculus
  siRNA target sequence for D8Ertd233e (NM_172762.1,416-434).
caagtgctgatctagaaga

SEQ ID NO: 482594 - DNA, 19 bp, Mus musculus
  siRNA target sequence for D8Ertd233e (NM_172762.1,476-494).
ctcagtctcggggtaaagt

SEQ ID NO: 482595 - DNA, 19 bp, Mus musculus
  siRNA target sequence for D8Ertd233e (NM_172762.1,664-682).
gagtatggacaagtagaat

SEQ ID NO: 482596 - DNA, 19 bp, Mus musculus
  siRNA target sequence for D8Ertd233e (NM_172762.1,679-697).
gaatccgtacgatttcgtt

SEQ ID NO: 482597 - DNA, 19 bp, Mus musculus
  siRNA target sequence for D8Ertd233e (NM_172762.1,732-750).
gttggctgcaataaaacgt

SEQ ID NO: 482598 - DNA, 19 bp, Mus musculus
  siRNA target sequence for D8Ertd233e (NM_172762.1,735-753).
ggctgcaataaaacgtaaa

SEQ ID NO: 482599 - DNA, 19 bp, Mus musculus
  siRNA target sequence for D8Ertd233e (NM_172762.1,773-791).
gcatcaatgcatatgtagt

SEQ ID NO: 482600 - DNA, 19 bp, Mus musculus
  siRNA target sequence for D8Ertd233e (NM_172762.1,920-938).
ggaatcttccttacaaaat

SEQ ID NO: 482601 - DNA, 19 bp, Mus musculus
  siRNA target sequence for D8Ertd233e (NM_172762.1,950-968).
ctttggaggaacactttct

SEQ ID NO: 482602 - DNA, 19 bp, Mus musculus
  siRNA target sequence for D8Ertd233e (NM_172762.1,999-1017).
cgtgagaaacccacttaca

SEQ ID NO: 482603 - DNA, 19 bp, Mus musculus
  siRNA target sequence for D8Ertd233e (NM_172762.1,1066-1084).
gttcatcttgctttgaagt

SEQ ID NO: 482604 - DNA, 19 bp, Mus musculus
  siRNA target sequence for D8Ertd233e (NM_172762.1,1072-1090).
cttgctttgaagttaaata

SEQ ID NO: 482605 - DNA, 19 bp, Mus musculus
  siRNA target sequence for D8Ertd233e (NM_172762.1,1118-1136).
gagtcatgcgttctgttaa

SEQ ID NO: 482606 - DNA, 19 bp, Mus musculus
  siRNA target sequence for D8Ertd233e (NM_172762.1,1120-1138).
gtcatgcgttctgttaata

SEQ ID NO: 482607 - DNA, 19 bp, Mus musculus
  siRNA target sequence for D8Ertd233e (NM_172762.1,1122-1140).
catgcgttctgttaataaa

SEQ ID NO: 482608 - DNA, 19 bp, Mus musculus
  siRNA target sequence for D8Ertd233e (NM_172762.1,1125-1143).
gcgttctgttaataaagaa

SEQ ID NO: 482609 - DNA, 19 bp, Mus musculus
  siRNA target sequence for D8Ertd233e (NM_172762.1,1126-1144).
cgttctgttaataaagaaa

SEQ ID NO: 482610 - DNA, 19 bp, Mus musculus
  siRNA target sequence for D930016N04 (NM_183185.1,393-411).
gctagagaactatagtcat

SEQ ID NO: 482611 - DNA, 19 bp, Mus musculus
  siRNA target sequence for D930016N04 (NM_183185.1,423-441).
ggggtatcctattaccaaa

SEQ ID NO: 482612 - DNA, 19 bp, Mus musculus
  siRNA target sequence for D930016N04 (NM_183185.1,448-466).
gtgatcgcctctttagaga

SEQ ID NO: 482613 - DNA, 19 bp, Mus musculus
  siRNA target sequence for D930016N04 (NM_183185.1,469-487).
ggagtccttgggataataa

SEQ ID NO: 482614 - DNA, 19 bp, Mus musculus
  siRNA target sequence for D930016N04 (NM_183185.1,472-490).
gtccttgggataataaaga

SEQ ID NO: 482615 - DNA, 19 bp, Mus musculus
  siRNA target sequence for D930016N04 (NM_183185.1,571-589).
cacctggagcaagctatat

SEQ ID NO: 482616 - DNA, 19 bp, Mus musculus
  siRNA target sequence for D930016N04 (NM_183185.1,574-592).
ctggagcaagctatatcca

SEQ ID NO: 482617 - DNA, 19 bp, Mus musculus
  siRNA target sequence for D930016N04 (NM_183185.1,576-594).
ggagcaagctatatccatt

SEQ ID NO: 482618 - DNA, 19 bp, Mus musculus
  siRNA target sequence for D930016N04 (NM_183185.1,577-595).
gagcaagctatatccatta

SEQ ID NO: 482619 - DNA, 19 bp, Mus musculus
  siRNA target sequence for D930016N04 (NM_183185.1,583-601).
gctatatccattattgaga

SEQ ID NO: 482620 - DNA, 19 bp, Mus musculus
  siRNA target sequence for D930016N04 (NM_183185.1,584-602).
ctatatccattattgagaa

SEQ ID NO: 482621 - DNA, 19 bp, Mus musculus
  siRNA target sequence for D930016N04 (NM_183185.1,680-698).
caggacccacaccctatat

SEQ ID NO: 482622 - DNA, 19 bp, Mus musculus
  siRNA target sequence for D930016N04 (NM_183185.1,682-700).
ggacccacaccctatatga

SEQ ID NO: 482623 - DNA, 19 bp, Mus musculus
  siRNA target sequence for D930016N04 (NM_183185.1,683-701).
gacccacaccctatatgaa

SEQ ID NO: 482624 - DNA, 19 bp, Mus musculus
  siRNA target sequence for D930016N04 (NM_183185.1,742-760).
gtcaatcctagtagtatga

SEQ ID NO: 482625 - DNA, 19 bp, Mus musculus
  siRNA target sequence for D930016N04 (NM_183185.1,767-785).
cagctcaggaatgttatga

SEQ ID NO: 482626 - DNA, 19 bp, Mus musculus
  siRNA target sequence for D930016N04 (NM_183185.1,769-787).
gctcaggaatgttatgaat

SEQ ID NO: 482627 - DNA, 19 bp, Mus musculus
  siRNA target sequence for D930016N04 (NM_183185.1,818-836).
gcagacatgagataagtga

SEQ ID NO: 482628 - DNA, 19 bp, Mus musculus
  siRNA target sequence for D930016N04 (NM_183185.1,849-867).
ccaggagcataatatgttt

SEQ ID NO: 482629 - DNA, 19 bp, Mus musculus
  siRNA target sequence for D930016N04 (NM_183185.1,953-971).
cccttagcccaagttcatt

SEQ ID NO: 482630 - DNA, 19 bp, Mus musculus
  siRNA target sequence for D930016N04 (NM_183185.1,1028-1046).
gcagagaagcattcaacaa

SEQ ID NO: 482631 - DNA, 19 bp, Mus musculus
  siRNA target sequence for D930016N04 (NM_183185.1,1089-1107).
caagctttttgaatgtaat

SEQ ID NO: 482632 - DNA, 19 bp, Mus musculus
  siRNA target sequence for D930016N04 (NM_183185.1,1131-1149).
ggagtcaacactgcatata

SEQ ID NO: 482633 - DNA, 19 bp, Mus musculus
  siRNA target sequence for D930016N04 (NM_183185.1,1134-1152).
gtcaacactgcatatacat

SEQ ID NO: 482634 - DNA, 19 bp, Mus musculus
  siRNA target sequence for D930016N04 (NM_183185.1,1196-1214).
gtggcaatgcttttcaaga

SEQ ID NO: 482635 - DNA, 19 bp, Mus musculus
  siRNA target sequence for D930016N04 (NM_183185.1,1198-1216).
ggcaatgcttttcaagaaa

SEQ ID NO: 482636 - DNA, 19 bp, Mus musculus
  siRNA target sequence for D930016N04 (NM_183185.1,1199-1217).
gcaatgcttttcaagaaaa

SEQ ID NO: 482637 - DNA, 19 bp, Mus musculus
  siRNA target sequence for D930016N04 (NM_183185.1,1534-1552).
gggagagcatttaaccaaa

SEQ ID NO: 482638 - DNA, 19 bp, Mus musculus
  siRNA target sequence for D930016N04 (NM_183185.1,1708-1726).
gcctttacccttaagctaa

SEQ ID NO: 482639 - DNA, 19 bp, Mus musculus
  siRNA target sequence for D930016N04 (NM_183185.1,1802-1820).
ggaagtcatacctcatgtt

SEQ ID NO: 482640 - DNA, 19 bp, Mus musculus
  siRNA target sequence for D930016N04 (NM_183185.1,1803-1821).
gaagtcatacctcatgtta

SEQ ID NO: 482641 - DNA, 19 bp, Mus musculus
  siRNA target sequence for D930016N04 (NM_183185.1,1806-1824).
gtcatacctcatgttacat

SEQ ID NO: 482642 - DNA, 19 bp, Mus musculus
  siRNA target sequence for D930016N04 (NM_183185.1,1886-1904).
cattcttacagaaatcata

SEQ ID NO: 482643 - DNA, 19 bp, Mus musculus
  siRNA target sequence for D930016N04 (NM_183185.1,2111-2129).
cctatgactgccctgaatt

SEQ ID NO: 482644 - DNA, 19 bp, Mus musculus
  siRNA target sequence for D930016N04 (NM_183185.1,2151-2169).
caaagttcctcatggatta

SEQ ID NO: 482645 - DNA, 19 bp, Mus musculus
  siRNA target sequence for D930016N04 (NM_183185.1,2155-2173).
gttcctcatggattagaga

SEQ ID NO: 482646 - DNA, 19 bp, Mus musculus
  siRNA target sequence for D930035B09Rik (NM_172876.1,85-103).
gttacgctcggctcagtta

SEQ ID NO: 482647 - DNA, 19 bp, Mus musculus
  siRNA target sequence for D930035B09Rik (NM_172876.1,98-116).
cagttacggagctacttta

SEQ ID NO: 482648 - DNA, 19 bp, Mus musculus
  siRNA target sequence for D930035B09Rik (NM_172876.1,362-380).
cggctgcttcgcatgtact

SEQ ID NO: 482649 - DNA, 19 bp, Mus musculus
  siRNA target sequence for D930035B09Rik (NM_172876.1,510-528).
gtcgaagggcggagaatga

SEQ ID NO: 482650 - DNA, 19 bp, Mus musculus
  siRNA target sequence for D930035B09Rik (NM_172876.1,516-534).
gggcggagaatgaagcttt

SEQ ID NO: 482651 - DNA, 19 bp, Mus musculus
  siRNA target sequence for D930035B09Rik (NM_172876.1,517-535).
ggcggagaatgaagctttt

SEQ ID NO: 482652 - DNA, 19 bp, Mus musculus
  siRNA target sequence for D930035B09Rik (NM_172876.1,607-625).
ccccctgcgggtcttttta

SEQ ID NO: 482653 - DNA, 19 bp, Mus musculus
  siRNA target sequence for D930035B09Rik (NM_172876.1,609-627).
ccctgcgggtctttttaga

SEQ ID NO: 482654 - DNA, 19 bp, Mus musculus
  siRNA target sequence for D930035B09Rik (NM_172876.1,714-732).
gcaacgtgccctttctgta

SEQ ID NO: 482655 - DNA, 19 bp, Mus musculus
  siRNA target sequence for D930035B09Rik (NM_172876.1,715-733).
caacgtgccctttctgtat

SEQ ID NO: 482656 - DNA, 19 bp, Mus musculus
  siRNA target sequence for D930035B09Rik (NM_172876.1,1017-1035).
gctctggcctcgtgttcta

SEQ ID NO: 482657 - DNA, 19 bp, Mus musculus
  siRNA target sequence for D930035B09Rik (NM_172876.1,1149-1167).
cccgtgactctgtccaaat

SEQ ID NO: 482658 - DNA, 19 bp, Mus musculus
  siRNA target sequence for D930035B09Rik (NM_172876.1,1436-1454).
ggcttggggctcatttcca

SEQ ID NO: 482659 - DNA, 19 bp, Mus musculus
  siRNA target sequence for Dars (NM_145507.1,176-194).
gagagatatgggatatctt

SEQ ID NO: 482660 - DNA, 19 bp, Mus musculus
  siRNA target sequence for Dars (NM_145507.1,180-198).
gatatgggatatcttctat

SEQ ID NO: 482661 - DNA, 19 bp, Mus musculus
  siRNA target sequence for Dars (NM_145507.1,187-205).
gatatcttctatgatacaa

SEQ ID NO: 482662 - DNA, 19 bp, Mus musculus
  siRNA target sequence for Dars (NM_145507.1,225-243).
gagttttggttcgagttaa

SEQ ID NO: 482663 - DNA, 19 bp, Mus musculus
  siRNA target sequence for Dars (NM_145507.1,247-265).
cctgacagttcaaaaagct

SEQ ID NO: 482664 - DNA, 19 bp, Mus musculus
  siRNA target sequence for Dars (NM_145507.1,280-298).
ggtccgtgcaagagttcat

SEQ ID NO: 482665 - DNA, 19 bp, Mus musculus
  siRNA target sequence for Dars (NM_145507.1,281-299).
gtccgtgcaagagttcata

SEQ ID NO: 482666 - DNA, 19 bp, Mus musculus
  siRNA target sequence for Dars (NM_145507.1,283-301).
ccgtgcaagagttcataca

SEQ ID NO: 482667 - DNA, 19 bp, Mus musculus
  siRNA target sequence for Dars (NM_145507.1,284-302).
cgtgcaagagttcatacaa

SEQ ID NO: 482668 - DNA, 19 bp, Mus musculus
  siRNA target sequence for Dars (NM_145507.1,386-404).
gcaagcaagcagatggtta

SEQ ID NO: 482669 - DNA, 19 bp, Mus musculus
  siRNA target sequence for Dars (NM_145507.1,387-405).
caagcaagcagatggttaa

SEQ ID NO: 482670 - DNA, 19 bp, Mus musculus
  siRNA target sequence for Dars (NM_145507.1,390-408).
gcaagcagatggttaaatt

SEQ ID NO: 482671 - DNA, 19 bp, Mus musculus
  siRNA target sequence for Dars (NM_145507.1,449-467).
ggtgttgtgaggaaagtca

SEQ ID NO: 482672 - DNA, 19 bp, Mus musculus
  siRNA target sequence for Dars (NM_145507.1,623-641).
caggatacaagattagaca

SEQ ID NO: 482673 - DNA, 19 bp, Mus musculus
  siRNA target sequence for Dars (NM_145507.1,655-673).
ccttaggacatcaactagt

SEQ ID NO: 482674 - DNA, 19 bp, Mus musculus
  siRNA target sequence for Dars (NM_145507.1,836-854).
gctcagtctccacaattgt

SEQ ID NO: 482675 - DNA, 19 bp, Mus musculus
  siRNA target sequence for Dars (NM_145507.1,839-857).
cagtctccacaattgtata

SEQ ID NO: 482676 - DNA, 19 bp, Mus musculus
  siRNA target sequence for Dars (NM_145507.1,843-861).
ctccacaattgtataagca

SEQ ID NO: 482677 - DNA, 19 bp, Mus musculus
  siRNA target sequence for Dars (NM_145507.1,925-943).
ctccaatacccatagacat

SEQ ID NO: 482678 - DNA, 19 bp, Mus musculus
  siRNA target sequence for Dars (NM_145507.1,1017-1035).
ctgacactttggtgcaaat

SEQ ID NO: 482679 - DNA, 19 bp, Mus musculus
  siRNA target sequence for Dars (NM_145507.1,1019-1037).
gacactttggtgcaaatat

SEQ ID NO: 482680 - DNA, 19 bp, Mus musculus
  siRNA target sequence for Dars (NM_145507.1,1056-1074).
ggtttcagactgaaattca

SEQ ID NO: 482681 - DNA, 19 bp, Mus musculus
  siRNA target sequence for Dars (NM_145507.1,1073-1091).
caaactgtgagtaaacagt

SEQ ID NO: 482682 - DNA, 19 bp, Mus musculus
  siRNA target sequence for Dars (NM_145507.1,1093-1111).
cccatgtgagccgttcaaa

SEQ ID NO: 482683 - DNA, 19 bp, Mus musculus
  siRNA target sequence for Dars (NM_145507.1,1094-1112).
ccatgtgagccgttcaaat

SEQ ID NO: 482684 - DNA, 19 bp, Mus musculus
  siRNA target sequence for Dars (NM_145507.1,1095-1113).
catgtgagccgttcaaatt

SEQ ID NO: 482685 - DNA, 19 bp, Mus musculus
  siRNA target sequence for Dars (NM_145507.1,1144-1162).
cgaggctttggcaatgctt

SEQ ID NO: 482686 - DNA, 19 bp, Mus musculus
  siRNA target sequence for Dars (NM_145507.1,1145-1163).
gaggctttggcaatgctta

SEQ ID NO: 482687 - DNA, 19 bp, Mus musculus
  siRNA target sequence for Dars (NM_145507.1,1164-1182).
gagaagctggagttgaaat

SEQ ID NO: 482688 - DNA, 19 bp, Mus musculus
  siRNA target sequence for Dars (NM_145507.1,1186-1204).
cgatgaggaagatctaagt

SEQ ID NO: 482689 - DNA, 19 bp, Mus musculus
  siRNA target sequence for Dars (NM_145507.1,1199-1217).
ctaagtacaccaaatgaaa

SEQ ID NO: 482690 - DNA, 19 bp, Mus musculus
  siRNA target sequence for Dars (NM_145507.1,1203-1221).
gtacaccaaatgaaaaact

SEQ ID NO: 482691 - DNA, 19 bp, Mus musculus
  siRNA target sequence for Dars (NM_145507.1,1206-1224).
caccaaatgaaaaactgtt

SEQ ID NO: 482692 - DNA, 19 bp, Mus musculus
  siRNA target sequence for Dars (NM_145507.1,1226-1244).
ggtcgtttggtgaaggaaa

SEQ ID NO: 482693 - DNA, 19 bp, Mus musculus
  siRNA target sequence for Dars (NM_145507.1,1227-1245).
gtcgtttggtgaaggaaaa

SEQ ID NO: 482694 - DNA, 19 bp, Mus musculus
  siRNA target sequence for Dars (NM_145507.1,1265-1283).
gttcttgataaatatccat

SEQ ID NO: 482695 - DNA, 19 bp, Mus musculus
  siRNA target sequence for Dars (NM_145507.1,1285-1303).
ggctgtaagacctttctat

SEQ ID NO: 482696 - DNA, 19 bp, Mus musculus
  siRNA target sequence for Dars (NM_145507.1,1286-1304).
gctgtaagacctttctata

SEQ ID NO: 482697 - DNA, 19 bp, Mus musculus
  siRNA target sequence for Dars (NM_145507.1,1289-1307).
gtaagacctttctatacca

SEQ ID NO: 482698 - DNA, 19 bp, Mus musculus
  siRNA target sequence for Dars (NM_145507.1,1325-1343).
ccgaaacagtccaactctt

SEQ ID NO: 482699 - DNA, 19 bp, Mus musculus
  siRNA target sequence for Dars (NM_145507.1,1394-1412).
catgatcctcagttgctta

SEQ ID NO: 482700 - DNA, 19 bp, Mus musculus
  siRNA target sequence for Dars (NM_145507.1,1525-1543).
gacgatgctgtttttagga

SEQ ID NO: 482701 - DNA, 19 bp, Mus musculus
  siRNA target sequence for Dars (NM_145507.1,1527-1545).
cgatgctgtttttaggatt

SEQ ID NO: 482702 - DNA, 19 bp, Mus musculus
  siRNA target sequence for Dars (NM_145507.1,1553-1571).
gtacgccagacctcaatgt

SEQ ID NO: 482703 - DNA, 19 bp, Mus musculus
  siRNA target sequence for Dars (NM_177445.2,419-437).
gcagatggttaaatttgct

SEQ ID NO: 482704 - DNA, 19 bp, Mus musculus
  siRNA target sequence for Dars (NM_177445.2,631-649).
gaagagctacggttaacca

SEQ ID NO: 482705 - DNA, 19 bp, Mus musculus
  siRNA target sequence for Dars (NM_177445.2,641-659).
ggttaaccaggatacaaga

SEQ ID NO: 482706 - DNA, 19 bp, Mus musculus
  siRNA target sequence for Dazap1 (NM_133188.1,169-187).
gtgtcatcatgaaagataa

SEQ ID NO: 482707 - DNA, 19 bp, Mus musculus
  siRNA target sequence for Dazap1 (NM_133188.1,171-189).
gtcatcatgaaagataaaa

SEQ ID NO: 482708 - DNA, 19 bp, Mus musculus
  siRNA target sequence for Dazap1 (NM_133188.1,370-388).
gcgacagcagcaaatccaa

SEQ ID NO: 482709 - DNA, 19 bp, Mus musculus
  siRNA target sequence for Dazap1 (NM_133188.1,379-397).
gcaaatccaacaagatctt

SEQ ID NO: 482710 - DNA, 19 bp, Mus musculus
  siRNA target sequence for Dazap1 (NM_133188.1,465-483).
gtcacagaggtggttatga

SEQ ID NO: 482711 - DNA, 19 bp, Mus musculus
  siRNA target sequence for Dazap1 (NM_133188.1,473-491).
ggtggttatgatctatgat

SEQ ID NO: 482712 - DNA, 19 bp, Mus musculus
  siRNA target sequence for Dazap1 (NM_133188.1,504-522).
cggcctcgaggttttggat

SEQ ID NO: 482713 - DNA, 19 bp, Mus musculus
  siRNA target sequence for Dazap1 (NM_133188.1,506-524).
gcctcgaggttttggattt

SEQ ID NO: 482714 - DNA, 19 bp, Mus musculus
  siRNA target sequence for Dazap1 (NM_133188.1,507-525).
cctcgaggttttggattta

SEQ ID NO: 482715 - DNA, 19 bp, Mus musculus
  siRNA target sequence for Dazap1 (NM_133188.1,508-526).
ctcgaggttttggatttat

SEQ ID NO: 482716 - DNA, 19 bp, Mus musculus
  siRNA target sequence for Dazap1 (NM_133188.1,510-528).
cgaggttttggatttatta

SEQ ID NO: 482717 - DNA, 19 bp, Mus musculus
  siRNA target sequence for Dazap1 (NM_133188.1,555-573).
caggctgtcaacatgcatt

SEQ ID NO: 482718 - DNA, 19 bp, Mus musculus
  siRNA target sequence for Dazap1 (NM_133188.1,944-962).
cccaccccctgatcagttt

SEQ ID NO: 482719 - DNA, 19 bp, Mus musculus
  siRNA target sequence for Ddb1 (NM_015735.1,132-150).
ctgtgtgaccggacacttt

SEQ ID NO: 482720 - DNA, 19 bp, Mus musculus
  siRNA target sequence for Ddb1 (NM_015735.1,136-154).
gtgaccggacactttactt

SEQ ID NO: 482721 - DNA, 19 bp, Mus musculus
  siRNA target sequence for Ddb1 (NM_015735.1,138-156).
gaccggacactttacttca

SEQ ID NO: 482722 - DNA, 19 bp, Mus musculus
  siRNA target sequence for Ddb1 (NM_015735.1,168-186).
gaacctgttgattgctaaa

SEQ ID NO: 482723 - DNA, 19 bp, Mus musculus
  siRNA target sequence for Ddb1 (NM_015735.1,189-207).
cacaagattagagatctat

SEQ ID NO: 482724 - DNA, 19 bp, Mus musculus
  siRNA target sequence for Ddb1 (NM_015735.1,222-240).
gggtcttcggccagtcaaa

SEQ ID NO: 482725 - DNA, 19 bp, Mus musculus
  siRNA target sequence for Ddb1 (NM_015735.1,224-242).
gtcttcggccagtcaaaga

SEQ ID NO: 482726 - DNA, 19 bp, Mus musculus
  siRNA target sequence for Ddb1 (NM_015735.1,246-264).
gggaatgtacgggaagatt

SEQ ID NO: 482727 - DNA, 19 bp, Mus musculus
  siRNA target sequence for Ddb1 (NM_015735.1,312-330).
gttcatcttgactgctaaa

SEQ ID NO: 482728 - DNA, 19 bp, Mus musculus
  siRNA target sequence for Ddb1 (NM_015735.1,338-356).
cctgtatcttggagtataa

SEQ ID NO: 482729 - DNA, 19 bp, Mus musculus
  siRNA target sequence for Ddb1 (NM_015735.1,341-359).
gtatcttggagtataagca

SEQ ID NO: 482730 - DNA, 19 bp, Mus musculus
  siRNA target sequence for Ddb1 (NM_015735.1,357-375).
gcagagtggcgaaagcatt

SEQ ID NO: 482731 - DNA, 19 bp, Mus musculus
  siRNA target sequence for Ddb1 (NM_015735.1,362-380).
gtggcgaaagcattgacat

SEQ ID NO: 482732 - DNA, 19 bp, Mus musculus
  siRNA target sequence for Ddb1 (NM_015735.1,366-384).
cgaaagcattgacatcatt

SEQ ID NO: 482733 - DNA, 19 bp, Mus musculus
  siRNA target sequence for Ddb1 (NM_015735.1,426-444).
ctcggagactggcatcatt

SEQ ID NO: 482734 - DNA, 19 bp, Mus musculus
  siRNA target sequence for Ddb1 (NM_015735.1,456-474).
ccctgagtgccgtatgatt

SEQ ID NO: 482735 - DNA, 19 bp, Mus musculus
  siRNA target sequence for Ddb1 (NM_015735.1,484-502).
ctctacgatggccttttca

SEQ ID NO: 482736 - DNA, 19 bp, Mus musculus
  siRNA target sequence for Ddb1 (NM_015735.1,511-529).
ccactagaccgagacaata

SEQ ID NO: 482737 - DNA, 19 bp, Mus musculus
  siRNA target sequence for Ddb1 (NM_015735.1,512-530).
cactagaccgagacaataa

SEQ ID NO: 482738 - DNA, 19 bp, Mus musculus
  siRNA target sequence for Ddb1 (NM_015735.1,532-550).
gagctcaaggcctttaaca

SEQ ID NO: 482739 - DNA, 19 bp, Mus musculus
  siRNA target sequence for Ddb1 (NM_015735.1,561-579).
ggaactgcacgtcattgat

SEQ ID NO: 482740 - DNA, 19 bp, Mus musculus
  siRNA target sequence for Ddb1 (NM_015735.1,607-625).
cctaccatttgctttgtct

SEQ ID NO: 482741 - DNA, 19 bp, Mus musculus
  siRNA target sequence for Ddb1 (NM_015735.1,698-716).
cttggaaacaggagaatgt

SEQ ID NO: 482742 - DNA, 19 bp, Mus musculus
  siRNA target sequence for Ddb1 (NM_015735.1,794-812).
cctatcataacggtgataa

SEQ ID NO: 482743 - DNA, 19 bp, Mus musculus
  siRNA target sequence for Ddb1 (NM_015735.1,837-855).
cattaagcaaagcactatt

SEQ ID NO: 482744 - DNA, 19 bp, Mus musculus
  siRNA target sequence for Ddb1 (NM_015735.1,890-908).
ggtaccttctgggagatat

SEQ ID NO: 482745 - DNA, 19 bp, Mus musculus
  siRNA target sequence for Ddb1 (NM_015735.1,1017-1035).
gtgcctaacttatcttgat

SEQ ID NO: 482746 - DNA, 19 bp, Mus musculus
  siRNA target sequence for Ddb1 (NM_015735.1,1019-1037).
gcctaacttatcttgataa

SEQ ID NO: 482747 - DNA, 19 bp, Mus musculus
  siRNA target sequence for Ddb1 (NM_015735.1,1020-1038).
cctaacttatcttgataat

SEQ ID NO: 482748 - DNA, 19 bp, Mus musculus
  siRNA target sequence for Ddb1 (NM_015735.1,1030-1048).
cttgataatggtgttgtat

SEQ ID NO: 482749 - DNA, 19 bp, Mus musculus
  siRNA target sequence for Ddb1 (NM_015735.1,1067-1085).
gtgactcccagctcgtaaa

SEQ ID NO: 482750 - DNA, 19 bp, Mus musculus
  siRNA target sequence for Ddb1 (NM_015735.1,1104-1122).
cgaacaaggctcctatgta

SEQ ID NO: 482751 - DNA, 19 bp, Mus musculus
  siRNA target sequence for Ddb1 (NM_015735.1,1150-1168).
ggacccattgtggatatgt

SEQ ID NO: 482752 - DNA, 19 bp, Mus musculus
  siRNA target sequence for Ddb1 (NM_015735.1,1254-1272).
gaacggcattggaatccat

SEQ ID NO: 482753 - DNA, 19 bp, Mus musculus
  siRNA target sequence for Ddb1 (NM_015735.1,1275-1293).
gcatgccagcattgactta

SEQ ID NO: 482754 - DNA, 19 bp, Mus musculus
  siRNA target sequence for Ddb1 (NM_015735.1,1294-1312).
ccaggcatcaaaggtttat

SEQ ID NO: 482755 - DNA, 19 bp, Mus musculus
  siRNA target sequence for Ddb1 (NM_015735.1,1352-1370).
ctttggtgctctcttttgt

SEQ ID NO: 482756 - DNA, 19 bp, Mus musculus
  siRNA target sequence for Ddb1 (NM_015735.1,1438-1456).
gacgatcagcagactttct

SEQ ID NO: 482757 - DNA, 19 bp, Mus musculus
  siRNA target sequence for Ddb1 (NM_015735.1,1440-1458).
cgatcagcagactttcttt

SEQ ID NO: 482758 - DNA, 19 bp, Mus musculus
  siRNA target sequence for Ddb1 (NM_015735.1,1558-1576).
cctcagggcaagaacatca

SEQ ID NO: 482759 - DNA, 19 bp, Mus musculus
  siRNA target sequence for Ddb1 (NM_015735.1,1613-1631).
ccgtgggaagggcactata

SEQ ID NO: 482760 - DNA, 19 bp, Mus musculus
  siRNA target sequence for Ddb1 (NM_015735.1,1614-1632).
cgtgggaagggcactatat

SEQ ID NO: 482761 - DNA, 19 bp, Mus musculus
  siRNA target sequence for Ddb1 (NM_015735.1,1615-1633).
gtgggaagggcactatatt

SEQ ID NO: 482762 - DNA, 19 bp, Mus musculus
  siRNA target sequence for Ddb1 (NM_015735.1,1619-1637).
gaagggcactatattacct

SEQ ID NO: 482763 - DNA, 19 bp, Mus musculus
  siRNA target sequence for Ddb1 (NM_015735.1,1625-1643).
cactatattaccttcagat

SEQ ID NO: 482764 - DNA, 19 bp, Mus musculus
  siRNA target sequence for Ddb1 (NM_015735.1,1785-1803).
cctgaagctcccatccttt

SEQ ID NO: 482765 - DNA, 19 bp, Mus musculus
  siRNA target sequence for Ddb1 (NM_015735.1,1791-1809).
gctcccatcctttgaacta

SEQ ID NO: 482766 - DNA, 19 bp, Mus musculus
  siRNA target sequence for Ddb1 (NM_015735.1,1794-1812).
cccatcctttgaactacta

SEQ ID NO: 482767 - DNA, 19 bp, Mus musculus
  siRNA target sequence for Ddb1 (NM_015735.1,1855-1873).
ctgatgaccacttttgaga

SEQ ID NO: 482768 - DNA, 19 bp, Mus musculus
  siRNA target sequence for Ddb1 (NM_015735.1,1929-1947).
caacatcgagacaggttta

SEQ ID NO: 482769 - DNA, 19 bp, Mus musculus
  siRNA target sequence for Ddb1 (NM_015735.1,1998-2016).
gacattccgttctctttct

SEQ ID NO: 482770 - DNA, 19 bp, Mus musculus
  siRNA target sequence for Ddb1 (NM_015735.1,2098-2116).
ctcaaggaggtgaactata

SEQ ID NO: 482771 - DNA, 19 bp, Mus musculus
  siRNA target sequence for Ddb1 (NM_015735.1,2103-2121).
ggaggtgaactatatgtgt

SEQ ID NO: 482772 - DNA, 19 bp, Mus musculus
  siRNA target sequence for Ddb1 (NM_015735.1,2150-2168).
gtctggcattggccaataa

SEQ ID NO: 482773 - DNA, 19 bp, Mus musculus
  siRNA target sequence for Ddb1 (NM_015735.1,2286-2304).
cctttccagccgcattgaa

SEQ ID NO: 482774 - DNA, 19 bp, Mus musculus
  siRNA target sequence for Ddb1 (NM_015735.1,2373-2391).
cgtcagctccagcaaactt

SEQ ID NO: 482775 - DNA, 19 bp, Mus musculus
  siRNA target sequence for Ddb1 (NM_015735.1,2374-2392).
gtcagctccagcaaacttt

SEQ ID NO: 482776 - DNA, 19 bp, Mus musculus
  siRNA target sequence for Ddb1 (NM_015735.1,2420-2438).
cctcctttggagaagaagt

SEQ ID NO: 482777 - DNA, 19 bp, Mus musculus
  siRNA target sequence for Ddb1 (NM_015735.1,2484-2502).
gcttcacgcccatcagttt

SEQ ID NO: 482778 - DNA, 19 bp, Mus musculus
  siRNA target sequence for Ddb1 (NM_015735.1,2490-2508).
cgcccatcagtttctacaa

SEQ ID NO: 482779 - DNA, 19 bp, Mus musculus
  siRNA target sequence for Ddb1 (NM_015735.1,2491-2509).
gcccatcagtttctacaaa

SEQ ID NO: 482780 - DNA, 19 bp, Mus musculus
  siRNA target sequence for Ddb1 (NM_015735.1,2534-2552).
cctgcaagttgggtaaaga

SEQ ID NO: 482781 - DNA, 19 bp, Mus musculus
  siRNA target sequence for Ddb1 (NM_015735.1,2545-2563).
ggtaaagaccccaacactt

SEQ ID NO: 482782 - DNA, 19 bp, Mus musculus
  siRNA target sequence for Ddb1 (NM_015735.1,2607-2625).
gcccaagcagggtcgtatt

SEQ ID NO: 482783 - DNA, 19 bp, Mus musculus
  siRNA target sequence for Ddb1 (NM_015735.1,2722-2740).
cttgccagcatcaatagca

SEQ ID NO: 482784 - DNA, 19 bp, Mus musculus
  siRNA target sequence for Ddb1 (NM_015735.1,2738-2756).
gcacggtgcggctctatga

SEQ ID NO: 482785 - DNA, 19 bp, Mus musculus
  siRNA target sequence for Ddb1 (NM_015735.1,2775-2793).
gcttcgcactgagtgtaat

SEQ ID NO: 482786 - DNA, 19 bp, Mus musculus
  siRNA target sequence for Ddb1 (NM_015735.1,2783-2801).
ctgagtgtaatcactacaa

SEQ ID NO: 482787 - DNA, 19 bp, Mus musculus
  siRNA target sequence for Ddb1 (NM_015735.1,2785-2803).
gagtgtaatcactacaaca

SEQ ID NO: 482788 - DNA, 19 bp, Mus musculus
  siRNA target sequence for Ddb1 (NM_015735.1,2789-2807).
gtaatcactacaacaacat

SEQ ID NO: 482789 - DNA, 19 bp, Mus musculus
  siRNA target sequence for Ddb1 (NM_015735.1,2889-2907).
gcctatggaaggaaacttt

SEQ ID NO: 482790 - DNA, 19 bp, Mus musculus
  siRNA target sequence for Ddb1 (NM_015735.1,2911-2929).
gagattgcccgagacttta

SEQ ID NO: 482791 - DNA, 19 bp, Mus musculus
  siRNA target sequence for Ddb1 (NM_015735.1,2913-2931).
gattgcccgagactttaat

SEQ ID NO: 482792 - DNA, 19 bp, Mus musculus
  siRNA target sequence for Ddb1 (NM_015735.1,2958-2976).
cttggatgatgacaatttt

SEQ ID NO: 482793 - DNA, 19 bp, Mus musculus
  siRNA target sequence for Ddb1 (NM_015735.1,2992-3010).
gcctttaacttgtttgtgt

SEQ ID NO: 482794 - DNA, 19 bp, Mus musculus
  siRNA target sequence for Ddb1 (NM_015735.1,3076-3094).
cacctgggcgagtttgtca

SEQ ID NO: 482795 - DNA, 19 bp, Mus musculus
  siRNA target sequence for Ddb1 (NM_015735.1,3078-3096).
cctgggcgagtttgtcaat

SEQ ID NO: 482796 - DNA, 19 bp, Mus musculus
  siRNA target sequence for Ddb1 (NM_015735.1,3082-3100).
ggcgagtttgtcaatgtgt

SEQ ID NO: 482797 - DNA, 19 bp, Mus musculus
  siRNA target sequence for Ddb1 (NM_015735.1,3212-3230).
cagagagctggtataacct

SEQ ID NO: 482798 - DNA, 19 bp, Mus musculus
  siRNA target sequence for Ddb1 (NM_015735.1,3240-3258).
catgcagaaccgactcaat

SEQ ID NO: 482799 - DNA, 19 bp, Mus musculus
  siRNA target sequence for Ddb1 (NM_015735.1,3251-3269).
gactcaataaggtcatcaa

SEQ ID NO: 482800 - DNA, 19 bp, Mus musculus
  siRNA target sequence for Ddb1 (NM_015735.1,3253-3271).
ctcaataaggtcatcaaaa

SEQ ID NO: 482801 - DNA, 19 bp, Mus musculus
  siRNA target sequence for Ddb1 (NM_015735.1,3267-3285).
caaaagcgtgggcaagatt

SEQ ID NO: 482802 - DNA, 19 bp, Mus musculus
  siRNA target sequence for Ddb1 (NM_015735.1,3352-3370).
ggtgatctgattgaaagtt

SEQ ID NO: 482803 - DNA, 19 bp, Mus musculus
  siRNA target sequence for Ddb1 (NM_015735.1,3408-3426).
ggcaaacttgcagtatgat

SEQ ID NO: 482804 - DNA, 19 bp, Mus musculus
  siRNA target sequence for Ddb1 (NM_015735.1,3455-3473).
ctgcagatgacctcatcaa

SEQ ID NO: 482805 - DNA, 19 bp, Mus musculus
  siRNA target sequence for Ddb1 (NM_015735.1,3484-3502).
gagctaactcggatccatt

SEQ ID NO: 482806 - DNA, 19 bp, Mus musculus
  siRNA target sequence for Ddx1 (NM_134040.1,144-162).
cagaatctatcccattgat

SEQ ID NO: 482807 - DNA, 19 bp, Mus musculus
  siRNA target sequence for Ddx1 (NM_134040.1,168-186).
gaggaggggatgtactcat

SEQ ID NO: 482808 - DNA, 19 bp, Mus musculus
  siRNA target sequence for Ddx1 (NM_134040.1,230-248).
cccgttatccagatagtgt

SEQ ID NO: 482809 - DNA, 19 bp, Mus musculus
  siRNA target sequence for Ddx1 (NM_134040.1,231-249).
ccgttatccagatagtgta

SEQ ID NO: 482810 - DNA, 19 bp, Mus musculus
  siRNA target sequence for Ddx1 (NM_134040.1,232-250).
cgttatccagatagtgtat

SEQ ID NO: 482811 - DNA, 19 bp, Mus musculus
  siRNA target sequence for Ddx1 (NM_134040.1,306-324).
gtgcttcagtgctcaacaa

SEQ ID NO: 482812 - DNA, 19 bp, Mus musculus
  siRNA target sequence for Ddx1 (NM_134040.1,308-326).
gcttcagtgctcaacaagt

SEQ ID NO: 482813 - DNA, 19 bp, Mus musculus
  siRNA target sequence for Ddx1 (NM_134040.1,329-347).
cagatgaacccatatgata

SEQ ID NO: 482814 - DNA, 19 bp, Mus musculus
  siRNA target sequence for Ddx1 (NM_134040.1,331-349).
gatgaacccatatgataga

SEQ ID NO: 482815 - DNA, 19 bp, Mus musculus
  siRNA target sequence for Ddx1 (NM_134040.1,352-370).
gtctgcttttgcaattgga

SEQ ID NO: 482816 - DNA, 19 bp, Mus musculus
  siRNA target sequence for Ddx1 (NM_134040.1,387-405).
gtcagagcagagaagtgaa

SEQ ID NO: 482817 - DNA, 19 bp, Mus musculus
  siRNA target sequence for Ddx1 (NM_134040.1,442-460).
gaaagggaagcactactat

SEQ ID NO: 482818 - DNA, 19 bp, Mus musculus
  siRNA target sequence for Ddx1 (NM_134040.1,526-544).
cctaggtactgacaagttt

SEQ ID NO: 482819 - DNA, 19 bp, Mus musculus
  siRNA target sequence for Ddx1 (NM_134040.1,530-548).
ggtactgacaagtttggat

SEQ ID NO: 482820 - DNA, 19 bp, Mus musculus
  siRNA target sequence for Ddx1 (NM_134040.1,608-626).
gaattcactatgcatgata

SEQ ID NO: 482821 - DNA, 19 bp, Mus musculus
  siRNA target sequence for Ddx1 (NM_134040.1,623-641).
gataccattggatgttact

SEQ ID NO: 482822 - DNA, 19 bp, Mus musculus
  siRNA target sequence for Ddx1 (NM_134040.1,627-645).
ccattggatgttacttaga

SEQ ID NO: 482823 - DNA, 19 bp, Mus musculus
  siRNA target sequence for Ddx1 (NM_134040.1,628-646).
cattggatgttacttagat

SEQ ID NO: 482824 - DNA, 19 bp, Mus musculus
  siRNA target sequence for Ddx1 (NM_134040.1,633-651).
gatgttacttagatatcga

SEQ ID NO: 482825 - DNA, 19 bp, Mus musculus
  siRNA target sequence for Ddx1 (NM_134040.1,636-654).
gttacttagatatcgataa

SEQ ID NO: 482826 - DNA, 19 bp, Mus musculus
  siRNA target sequence for Ddx1 (NM_134040.1,656-674).
gggcatgtgaagttctcta

SEQ ID NO: 482827 - DNA, 19 bp, Mus musculus
  siRNA target sequence for Ddx1 (NM_134040.1,657-675).
ggcatgtgaagttctctaa

SEQ ID NO: 482828 - DNA, 19 bp, Mus musculus
  siRNA target sequence for Ddx1 (NM_134040.1,689-707).
cttggtctggcatttgaaa

SEQ ID NO: 482829 - DNA, 19 bp, Mus musculus
  siRNA target sequence for Ddx1 (NM_134040.1,754-772).
gaagaatgctgaattgaaa

SEQ ID NO: 482830 - DNA, 19 bp, Mus musculus
  siRNA target sequence for Ddx1 (NM_134040.1,831-849).
ccaaggccccagataatta

SEQ ID NO: 482831 - DNA, 19 bp, Mus musculus
  siRNA target sequence for Ddx1 (NM_134040.1,881-899).
caggtgtcacaaacaaaat

SEQ ID NO: 482832 - DNA, 19 bp, Mus musculus
  siRNA target sequence for Ddx1 (NM_134040.1,904-922).
cccgaatgctccaaaagct

SEQ ID NO: 482833 - DNA, 19 bp, Mus musculus
  siRNA target sequence for Ddx1 (NM_134040.1,951-969).
ctgagcaaaccttgaacaa

SEQ ID NO: 482834 - DNA, 19 bp, Mus musculus
  siRNA target sequence for Ddx1 (NM_134040.1,971-989).
gtcaagcagtttaagaagt

SEQ ID NO: 482835 - DNA, 19 bp, Mus musculus
  siRNA target sequence for Ddx1 (NM_134040.1,1009-1027).
gcgggagcttctcataatt

SEQ ID NO: 482836 - DNA, 19 bp, Mus musculus
  siRNA target sequence for Ddx1 (NM_134040.1,1012-1030).
ggagcttctcataattggt

SEQ ID NO: 482837 - DNA, 19 bp, Mus musculus
  siRNA target sequence for Ddx1 (NM_134040.1,1119-1137).
cgactggaaagctcaactt

SEQ ID NO: 482838 - DNA, 19 bp, Mus musculus
  siRNA target sequence for Ddx1 (NM_134040.1,1130-1148).
ctcaacttgtctcaagtta

SEQ ID NO: 482839 - DNA, 19 bp, Mus musculus
  siRNA target sequence for Ddx1 (NM_134040.1,1223-1241).
cagattccgcagattacgt

SEQ ID NO: 482840 - DNA, 19 bp, Mus musculus
  siRNA target sequence for Ddx1 (NM_134040.1,1239-1257).
cgtgtgatgggaaaagact

SEQ ID NO: 482841 - DNA, 19 bp, Mus musculus
  siRNA target sequence for Ddx1 (NM_134040.1,1240-1258).
gtgtgatgggaaaagactt

SEQ ID NO: 482842 - DNA, 19 bp, Mus musculus
  siRNA target sequence for Ddx1 (NM_134040.1,1303-1321).
gaagctatcggagaagata

SEQ ID NO: 482843 - DNA, 19 bp, Mus musculus
  siRNA target sequence for Ddx1 (NM_134040.1,1331-1349).
cccacatgggtcgatttga

SEQ ID NO: 482844 - DNA, 19 bp, Mus musculus
  siRNA target sequence for Ddx1 (NM_134040.1,1368-1386).
cagatactgtgcatcatgt

SEQ ID NO: 482845 - DNA, 19 bp, Mus musculus
  siRNA target sequence for Ddx1 (NM_134040.1,1433-1451).
gggaagaaccacattcgaa

SEQ ID NO: 482846 - DNA, 19 bp, Mus musculus
  siRNA target sequence for Ddx1 (NM_134040.1,1438-1456).
gaaccacattcgaactgat

SEQ ID NO: 482847 - DNA, 19 bp, Mus musculus
  siRNA target sequence for Ddx1 (NM_134040.1,1441-1459).
ccacattcgaactgatgat

SEQ ID NO: 482848 - DNA, 19 bp, Mus musculus
  siRNA target sequence for Ddx1 (NM_134040.1,1460-1478).
gtacacgcaaaggataaca

SEQ ID NO: 482849 - DNA, 19 bp, Mus musculus
  siRNA target sequence for Ddx1 (NM_134040.1,1463-1481).
cacgcaaaggataacacaa

SEQ ID NO: 482850 - DNA, 19 bp, Mus musculus
  siRNA target sequence for Ddx1 (NM_134040.1,1567-1585).
caagatggatcaagcaatt

SEQ ID NO: 482851 - DNA, 19 bp, Mus musculus
  siRNA target sequence for Ddx1 (NM_134040.1,1574-1592).
gatcaagcaattatcttct

SEQ ID NO: 482852 - DNA, 19 bp, Mus musculus
  siRNA target sequence for Ddx1 (NM_134040.1,1580-1598).
gcaattatcttctgtagaa

SEQ ID NO: 482853 - DNA, 19 bp, Mus musculus
  siRNA target sequence for Ddx1 (NM_134040.1,1720-1738).
gcaaaacttggaacgattt

SEQ ID NO: 482854 - DNA, 19 bp, Mus musculus
  siRNA target sequence for Ddx1 (NM_134040.1,1721-1739).
caaaacttggaacgattta

SEQ ID NO: 482855 - DNA, 19 bp, Mus musculus
  siRNA target sequence for Ddx1 (NM_134040.1,1745-1763).
ggagacgtaagattcttga

SEQ ID NO: 482856 - DNA, 19 bp, Mus musculus
  siRNA target sequence for Ddx1 (NM_134040.1,1746-1764).
gagacgtaagattcttgat

SEQ ID NO: 482857 - DNA, 19 bp, Mus musculus
  siRNA target sequence for Ddx1 (NM_134040.1,1748-1766).
gacgtaagattcttgattt

SEQ ID NO: 482858 - DNA, 19 bp, Mus musculus
  siRNA target sequence for Ddx1 (NM_134040.1,1751-1769).
gtaagattcttgatttgca

SEQ ID NO: 482859 - DNA, 19 bp, Mus musculus
  siRNA target sequence for Ddx1 (NM_134040.1,1799-1817).
catggcgttccttatgtga

SEQ ID NO: 482860 - DNA, 19 bp, Mus musculus
  siRNA target sequence for Ddx1 (NM_134040.1,1954-1972).
ccgtgggaagggatgctat

SEQ ID NO: 482861 - DNA, 19 bp, Mus musculus
  siRNA target sequence for Ddx1 (NM_134040.1,1955-1973).
cgtgggaagggatgctata

SEQ ID NO: 482862 - DNA, 19 bp, Mus musculus
  siRNA target sequence for Ddx1 (NM_134040.1,1956-1974).
gtgggaagggatgctataa

SEQ ID NO: 482863 - DNA, 19 bp, Mus musculus
  siRNA target sequence for Ddx1 (NM_134040.1,2004-2022).
ctatctggtacaatgaaat

SEQ ID NO: 482864 - DNA, 19 bp, Mus musculus
  siRNA target sequence for Ddx1 (NM_134040.1,2026-2044).
gctactttccgagatagaa

SEQ ID NO: 482865 - DNA, 19 bp, Mus musculus
  siRNA target sequence for Ddx1 (NM_134040.1,2048-2066).
cacctgaactgcaccattt

SEQ ID NO: 482866 - DNA, 19 bp, Mus musculus
  siRNA target sequence for Ddx1 (NM_134040.1,2068-2086).
ccaggtcgagccagatata

SEQ ID NO: 482867 - DNA, 19 bp, Mus musculus
  siRNA target sequence for Ddx1 (NM_134040.1,2069-2087).
caggtcgagccagatataa

SEQ ID NO: 482868 - DNA, 19 bp, Mus musculus
  siRNA target sequence for Ddx1 (NM_134040.1,2074-2092).
cgagccagatataaaggtt

SEQ ID NO: 482869 - DNA, 19 bp, Mus musculus
  siRNA target sequence for Ddx1 (NM_134040.1,2139-2157).
ctgctggcggtggaaacta

SEQ ID NO: 482870 - DNA, 19 bp, Mus musculus
  siRNA target sequence for Ddx1 (NM_134040.1,2141-2159).
gctggcggtggaaactaca

SEQ ID NO: 482871 - DNA, 19 bp, Mus musculus
  siRNA target sequence for Ddx1 (NM_134040.1,2181-2199).
cacctaccgttcaagagtt

SEQ ID NO: 482872 - DNA, 19 bp, Mus musculus
  siRNA target sequence for Ddx26 (NM_008715.1,698-716).
gcaccgctttggtagcaat

SEQ ID NO: 482873 - DNA, 19 bp, Mus musculus
  siRNA target sequence for Ddx26 (NM_008715.1,699-717).
caccgctttggtagcaatt

SEQ ID NO: 482874 - DNA, 19 bp, Mus musculus
  siRNA target sequence for Ddx26 (NM_008715.1,703-721).
gctttggtagcaattaggt

SEQ ID NO: 482875 - DNA, 19 bp, Mus musculus
  siRNA target sequence for Ddx26 (NM_008715.1,712-730).
gcaattaggtttttattca

SEQ ID NO: 482876 - DNA, 19 bp, Mus musculus
  siRNA target sequence for Ddx26 (NM_008715.1,729-747).
caccctggtattaaaacta

SEQ ID NO: 482877 - DNA, 19 bp, Mus musculus
  siRNA target sequence for Ddx26 (NM_008715.1,1001-1019).
gtccactctctctcttaga

SEQ ID NO: 482878 - DNA, 19 bp, Mus musculus
  siRNA target sequence for Ddx26 (NM_008715.1,1091-1109).
cctatccagtcatatctaa

SEQ ID NO: 482879 - DNA, 19 bp, Mus musculus
  siRNA target sequence for Ddx26 (NM_008715.1,1092-1110).
ctatccagtcatatctaat

SEQ ID NO: 482880 - DNA, 19 bp, Mus musculus
  siRNA target sequence for Ddx26 (NM_008715.1,1155-1173).
gatatttcgttgtgcaata

SEQ ID NO: 482881 - DNA, 19 bp, Mus musculus
  siRNA target sequence for Ddx26 (NM_008715.1,1168-1186).
gcaatatcccctcttctat

SEQ ID NO: 482882 - DNA, 19 bp, Mus musculus
  siRNA target sequence for Ddx26 (NM_008715.1,2249-2267).
ggactggtagggttacagt

SEQ ID NO: 482883 - DNA, 19 bp, Mus musculus
  siRNA target sequence for Ddx26 (NM_008715.1,2285-2303).
cgtggcagacgaaactctt

SEQ ID NO: 482884 - DNA, 19 bp, Mus musculus
  siRNA target sequence for Ddx26 (NM_008715.1,2286-2304).
gtggcagacgaaactctta

SEQ ID NO: 482885 - DNA, 19 bp, Mus musculus
  siRNA target sequence for Ddx26 (NM_008715.1,2314-2332).
ggtattgtgttctatgtta

SEQ ID NO: 482886 - DNA, 19 bp, Mus musculus
  siRNA target sequence for Ddx26 (NM_008715.1,2360-2378).
gtgtagcctggcttcaatt

SEQ ID NO: 482887 - DNA, 19 bp, Mus musculus
  siRNA target sequence for Ddx26 (NM_008715.1,2394-2412).
ggactctcccgttgattct

SEQ ID NO: 482888 - DNA, 19 bp, Mus musculus
  siRNA target sequence for Ddx26 (NM_008715.1,2395-2413).
gactctcccgttgattctt

SEQ ID NO: 482889 - DNA, 19 bp, Mus musculus
  siRNA target sequence for Ddx26 (NM_008715.1,2544-2562).
cgtgctctgtacggtattt

SEQ ID NO: 482890 - DNA, 19 bp, Mus musculus
  siRNA target sequence for Ddx26 (NM_008715.1,2548-2566).
ctctgtacggtatttgaga

SEQ ID NO: 482891 - DNA, 19 bp, Mus musculus
  siRNA target sequence for Ddx26 (NM_008715.1,2565-2583).
gagggaaaaaaattgtact

SEQ ID NO: 482892 - DNA, 19 bp, Mus musculus
  siRNA target sequence for Ddx26 (NM_008715.1,2592-2610).
cacaacaaactgtgcatat

SEQ ID NO: 482893 - DNA, 19 bp, Mus musculus
  siRNA target sequence for Ddx26 (NM_008715.1,2619-2637).
cccagagcttacggtttat

SEQ ID NO: 482894 - DNA, 19 bp, Mus musculus
  siRNA target sequence for Ddx26 (NM_008715.1,2621-2639).
cagagcttacggtttatct

SEQ ID NO: 482895 - DNA, 19 bp, Mus musculus
  siRNA target sequence for Ddx26 (NM_008715.1,2693-2711).
gtgacatcatttctactat

SEQ ID NO: 482896 - DNA, 19 bp, Mus musculus
  siRNA target sequence for Ddx26 (NM_008715.1,2783-2801).
gtaggtcagttgtgcttaa

SEQ ID NO: 482897 - DNA, 19 bp, Mus musculus
  siRNA target sequence for Ddx26 (NM_008715.1,2789-2807).
cagttgtgcttaaatcctt

SEQ ID NO: 482898 - DNA, 19 bp, Mus musculus
  siRNA target sequence for Ddx26 (NM_008715.1,2804-2822).
ccttagccgttttgaagtt

SEQ ID NO: 482899 - DNA, 19 bp, Mus musculus
  siRNA target sequence for Ddx26 (NM_008715.1,2810-2828).
ccgttttgaagtttcttgt

SEQ ID NO: 482900 - DNA, 19 bp, Mus musculus
  siRNA target sequence for Ddx26 (NM_008715.1,2881-2899).
ggtatttgtcgtttagatt

SEQ ID NO: 482901 - DNA, 19 bp, Mus musculus
  siRNA target sequence for Ddx26 (NM_008715.1,2905-2923).
catgttgacctgtttatga

SEQ ID NO: 482902 - DNA, 19 bp, Mus musculus
  siRNA target sequence for Ddx26 (NM_008715.1,2939-2957).
gtagtaaactggttaagaa

SEQ ID NO: 482903 - DNA, 19 bp, Mus musculus
  siRNA target sequence for Ddx26 (NM_008715.1,2965-2983).
gagctgaatgaaatagtct

SEQ ID NO: 482904 - DNA, 19 bp, Mus musculus
  siRNA target sequence for Ddx26 (NM_008715.1,3031-3049).
cactgtgtggcagtatata

SEQ ID NO: 482905 - DNA, 19 bp, Mus musculus
  siRNA target sequence for Ddx26 (NM_008715.1,3116-3134).
gggttagtgagatatgcat

SEQ ID NO: 482906 - DNA, 19 bp, Mus musculus
  siRNA target sequence for Ddx26 (NM_008715.1,3117-3135).
ggttagtgagatatgcata

SEQ ID NO: 482907 - DNA, 19 bp, Mus musculus
  siRNA target sequence for Ddx26 (NM_008715.1,3346-3364).
gtgggcattctttttctaa

SEQ ID NO: 482908 - DNA, 19 bp, Mus musculus
  siRNA target sequence for Ddx26 (NM_008715.1,3348-3366).
gggcattctttttctaaga

SEQ ID NO: 482909 - DNA, 19 bp, Mus musculus
  siRNA target sequence for Ddx26 (NM_008715.1,3361-3379).
ctaagaattggttttgtaa

SEQ ID NO: 482910 - DNA, 19 bp, Mus musculus
  siRNA target sequence for Ddx26 (NM_008715.1,3394-3412).
cagaacttaagccttgata

SEQ ID NO: 482911 - DNA, 19 bp, Mus musculus
  siRNA target sequence for Ddx26 (NM_008715.1,3465-3483).
caagccagcaataataatt

SEQ ID NO: 482912 - DNA, 19 bp, Mus musculus
  siRNA target sequence for Ddx26 (NM_008715.1,3468-3486).
gccagcaataataattaca

SEQ ID NO: 482913 - DNA, 19 bp, Mus musculus
  siRNA target sequence for Ddx26 (NM_008715.1,3496-3514).
gggagcaagttgactacta

SEQ ID NO: 482914 - DNA, 19 bp, Mus musculus
  siRNA target sequence for Ddx26 (NM_008715.1,3498-3516).
gagcaagttgactactact

SEQ ID NO: 482915 - DNA, 19 bp, Mus musculus
  siRNA target sequence for Ddx26 (NM_008715.1,3501-3519).
caagttgactactactagt

SEQ ID NO: 482916 - DNA, 19 bp, Mus musculus
  siRNA target sequence for Ddx26 (NM_008715.1,3556-3574).
ccgttggctggaagtgaat

SEQ ID NO: 482917 - DNA, 19 bp, Mus musculus
  siRNA target sequence for Ddx26 (NM_008715.1,3557-3575).
cgttggctggaagtgaatt

SEQ ID NO: 482918 - DNA, 19 bp, Mus musculus
  siRNA target sequence for Ddx26 (NM_008715.1,3576-3594).
gaccaaggaacctttcgtt

SEQ ID NO: 482919 - DNA, 19 bp, Mus musculus
  siRNA target sequence for Ddx26 (NM_008715.1,3602-3620).
gagactatttgcttttagt

SEQ ID NO: 482920 - DNA, 19 bp, Mus musculus
  siRNA target sequence for Ddx26 (NM_008715.1,3638-3656).
ccatgtcggtggaatcaga

SEQ ID NO: 482921 - DNA, 19 bp, Mus musculus
  siRNA target sequence for Ddx26 (NM_008715.1,3639-3657).
catgtcggtggaatcagaa

SEQ ID NO: 482922 - DNA, 19 bp, Mus musculus
  siRNA target sequence for Ddx26 (NM_008715.1,3644-3662).
cggtggaatcagaacagtt

SEQ ID NO: 482923 - DNA, 19 bp, Mus musculus
  siRNA target sequence for Ddx26 (NM_008715.1,3667-3685).
ggtgtgcctttggatgatt

SEQ ID NO: 482924 - DNA, 19 bp, Mus musculus
  siRNA target sequence for Ddx26 (NM_008715.1,3718-3736).
ggccggtcatactctgtat

SEQ ID NO: 482925 - DNA, 19 bp, Mus musculus
  siRNA target sequence for Ddx26 (NM_008715.1,3737-3755).
gttctccaagaatgcttaa

SEQ ID NO: 482926 - DNA, 19 bp, Mus musculus
  siRNA target sequence for Ddx26 (NM_008715.1,3740-3758).
ctccaagaatgcttaatca

SEQ ID NO: 482927 - DNA, 19 bp, Mus musculus
  siRNA target sequence for Ddx26 (NM_008715.1,3771-3789).
cttggtgcagaaagtacaa

SEQ ID NO: 482928 - DNA, 19 bp, Mus musculus
  siRNA target sequence for Ddx26 (NM_008715.1,3774-3792).
ggtgcagaaagtacaaagt

SEQ ID NO: 482929 - DNA, 19 bp, Mus musculus
  siRNA target sequence for Ddx26 (NM_008715.1,3791-3809).
gtggggtggtaataaactt

SEQ ID NO: 482930 - DNA, 19 bp, Mus musculus
  siRNA target sequence for Ddx26 (NM_008715.1,3847-3865).
gaggggcagccagatatat

SEQ ID NO: 482931 - DNA, 19 bp, Mus musculus
  siRNA target sequence for Ddx26 (NM_008715.1,3896-3914).
gctgtcacaagctcatata

SEQ ID NO: 482932 - DNA, 19 bp, Mus musculus
  siRNA target sequence for Ddx26 (NM_008715.1,3899-3917).
gtcacaagctcatatatgt

SEQ ID NO: 482933 - DNA, 19 bp, Mus musculus
  siRNA target sequence for Ddx26 (NM_008715.1,4016-4034).
ctcatcctgtagtgaagtt

SEQ ID NO: 482934 - DNA, 19 bp, Mus musculus
  siRNA target sequence for Ddx26 (NM_008715.1,4142-4160).
cgtgttggcaggtgtatgt

SEQ ID NO: 482935 - DNA, 19 bp, Mus musculus
  siRNA target sequence for Ddx26 (NM_008715.1,4150-4168).
caggtgtatgtgagcaata

SEQ ID NO: 482936 - DNA, 19 bp, Mus musculus
  siRNA target sequence for Ddx26 (NM_008715.1,4152-4170).
ggtgtatgtgagcaatagt

SEQ ID NO: 482937 - DNA, 19 bp, Mus musculus
  siRNA target sequence for Ddx26 (NM_008715.1,4169-4187).
gtgcaaagtataatgaact

SEQ ID NO: 482938 - DNA, 19 bp, Mus musculus
  siRNA target sequence for Ddx26 (NM_008715.1,4223-4241).
cactgacctgtgtcaactt

SEQ ID NO: 482939 - DNA, 19 bp, Mus musculus
  siRNA target sequence for Ddx26 (NM_008715.1,4227-4245).
gacctgtgtcaacttattt

SEQ ID NO: 482940 - DNA, 19 bp, Mus musculus
  siRNA target sequence for Ddx26 (NM_008715.1,4229-4247).
cctgtgtcaacttatttgt

SEQ ID NO: 482941 - DNA, 19 bp, Mus musculus
  siRNA target sequence for Ddx26 (NM_008715.1,4323-4341).
gaaatggagacagtcattt

SEQ ID NO: 482942 - DNA, 19 bp, Mus musculus
  siRNA target sequence for Ddx26 (NM_008715.1,4342-4360).
gaaagttatttgaagacaa

SEQ ID NO: 482943 - DNA, 19 bp, Mus musculus
  siRNA target sequence for Ddx26 (NM_008715.1,4438-4456).
gagtatggactcagttaca

SEQ ID NO: 482944 - DNA, 19 bp, Mus musculus
  siRNA target sequence for Ddx26 (NM_008715.1,4447-4465).
ctcagttacagtgtcattt

SEQ ID NO: 482945 - DNA, 19 bp, Mus musculus
  siRNA target sequence for Ddx26 (NM_008715.1,4459-4477).
gtcatttcatacctcaaaa

SEQ ID NO: 482946 - DNA, 19 bp, Mus musculus
  siRNA target sequence for Ddx26 (NM_008715.1,4482-4500).
gagtcaacaggccaaaatt

SEQ ID NO: 482947 - DNA, 19 bp, Mus musculus
  siRNA target sequence for Ddx26 (NM_008715.1,4484-4502).
gtcaacaggccaaaattga

SEQ ID NO: 482948 - DNA, 19 bp, Mus musculus
  siRNA target sequence for Ddx26 (NM_008715.1,4486-4504).
caacaggccaaaattgaat

SEQ ID NO: 482949 - DNA, 19 bp, Mus musculus
  siRNA target sequence for Ddx26 (NM_008715.1,4518-4536).
cggatccgtaggcaaaaaa

SEQ ID NO: 482950 - DNA, 19 bp, Mus musculus
  siRNA target sequence for Ddx26 (NM_008715.1,4520-4538).
gatccgtaggcaaaaaagt

SEQ ID NO: 482951 - DNA, 19 bp, Mus musculus
  siRNA target sequence for Ddx26 (NM_008715.1,4523-4541).
ccgtaggcaaaaaagtagt

SEQ ID NO: 482952 - DNA, 19 bp, Mus musculus
  siRNA target sequence for Ddx26 (NM_008715.1,4524-4542).
cgtaggcaaaaaagtagta

SEQ ID NO: 482953 - DNA, 19 bp, Mus musculus
  siRNA target sequence for Ddx26 (NM_008715.1,4570-4588).
cggtcacatgggttgtcaa

SEQ ID NO: 482954 - DNA, 19 bp, Mus musculus
  siRNA target sequence for Ddx26 (NM_008715.1,4571-4589).
ggtcacatgggttgtcaat

SEQ ID NO: 482955 - DNA, 19 bp, Mus musculus
  siRNA target sequence for Ddx26 (NM_008715.1,4592-4610).
cgcataggaaaggttttca

SEQ ID NO: 482956 - DNA, 19 bp, Mus musculus
  siRNA target sequence for Ddx26 (NM_008715.1,4609-4627).
caagtgctgcagggtattt

SEQ ID NO: 482957 - DNA, 19 bp, Mus musculus
  siRNA target sequence for Ddx26 (NM_008715.1,4644-4662).
caggttgctagaccttaat

SEQ ID NO: 482958 - DNA, 19 bp, Mus musculus
  siRNA target sequence for Ddx26 (NM_008715.1,4683-4701).
ccaggttgctttactaaat

SEQ ID NO: 482959 - DNA, 19 bp, Mus musculus
  siRNA target sequence for Ddx26 (NM_008715.1,4690-4708).
gctttactaaataaggatt

SEQ ID NO: 482960 - DNA, 19 bp, Mus musculus
  siRNA target sequence for Ddx26 (NM_008715.1,4721-4739).
cctttagaaacgcttatga

SEQ ID NO: 482961 - DNA, 19 bp, Mus musculus
  siRNA target sequence for Ddx26 (NM_008715.1,4722-4740).
ctttagaaacgcttatgat

SEQ ID NO: 482962 - DNA, 19 bp, Mus musculus
  siRNA target sequence for Ddx26 (NM_008715.1,4762-4780).
gatcatttaacaagaatga

SEQ ID NO: 482963 - DNA, 19 bp, Mus musculus
  siRNA target sequence for Ddx26 (NM_008715.1,4775-4793).
gaatgagatcgaacctttt

SEQ ID NO: 482964 - DNA, 19 bp, Mus musculus
  siRNA target sequence for Ddx26 (NM_008715.1,4799-4817).
gcacccgcaaatttcttaa

SEQ ID NO: 482965 - DNA, 19 bp, Mus musculus
  siRNA target sequence for Ddx26 (NM_008715.1,4800-4818).
cacccgcaaatttcttaaa

SEQ ID NO: 482966 - DNA, 19 bp, Mus musculus
  siRNA target sequence for Ddx26 (NM_008715.1,4839-4857).
gcacagtgtacctatagca

SEQ ID NO: 482967 - DNA, 19 bp, Mus musculus
  siRNA target sequence for Ddx26 (NM_008715.1,4856-4874).
cacaaatggggaattacca

SEQ ID NO: 482968 - DNA, 19 bp, Mus musculus
  siRNA target sequence for Ddx26 (NM_008715.1,4865-4883).
ggaattaccaggaatacct

SEQ ID NO: 482969 - DNA, 19 bp, Mus musculus
  siRNA target sequence for Ddx26 (NM_008715.1,4898-4916).
ctccattgagagaacttga

SEQ ID NO: 482970 - DNA, 19 bp, Mus musculus
  siRNA target sequence for Ddx26 (NM_008715.1,4924-4942).
cagcctcgaaggttgcata

SEQ ID NO: 482971 - DNA, 19 bp, Mus musculus
  siRNA target sequence for Ddx26 (NM_008715.1,4928-4946).
ctcgaaggttgcatacatt

SEQ ID NO: 482972 - DNA, 19 bp, Mus musculus
  siRNA target sequence for Ddx26 (NM_008715.1,5052-5070).
gcaagggatcccaaaaaga

SEQ ID NO: 482973 - DNA, 19 bp, Mus musculus
  siRNA target sequence for Ddx26 (NM_008715.1,5168-5186).
cacagccaggtcttattaa

SEQ ID NO: 482974 - DNA, 19 bp, Mus musculus
  siRNA target sequence for Ddx26 (NM_008715.1,5206-5224).
gaagccactaatgattcaa

SEQ ID NO: 482975 - DNA, 19 bp, Mus musculus
  siRNA target sequence for Ddx26 (NM_008715.1,5210-5228).
ccactaatgattcaatagt

SEQ ID NO: 482976 - DNA, 19 bp, Mus musculus
  siRNA target sequence for Ddx26 (NM_008715.1,5211-5229).
cactaatgattcaatagta

SEQ ID NO: 482977 - DNA, 19 bp, Mus musculus
  siRNA target sequence for Ddx26 (NM_008715.1,5248-5266).
catgttgctgaccaacttt

SEQ ID NO: 482978 - DNA, 19 bp, Mus musculus
  siRNA target sequence for Ddx26 (NM_008715.1,5272-5290).
gacatgacaccaaatgcta

SEQ ID NO: 482979 - DNA, 19 bp, Mus musculus
  siRNA target sequence for Ddx26 (NM_008715.1,5292-5310).
ggatactgaatttttaaca

SEQ ID NO: 482980 - DNA, 19 bp, Mus musculus
  siRNA target sequence for Ddx26 (NM_008715.1,5328-5346).
ggaaccatcaaccaatcat

SEQ ID NO: 482981 - DNA, 19 bp, Mus musculus
  siRNA target sequence for Ddx26 (NM_008715.1,5329-5347).
gaaccatcaaccaatcata

SEQ ID NO: 482982 - DNA, 19 bp, Mus musculus
  siRNA target sequence for Ddx26 (NM_008715.1,5413-5431).
catgaggagccaagaaata

SEQ ID NO: 482983 - DNA, 19 bp, Mus musculus
  siRNA target sequence for Ddx26 (NM_008715.1,5437-5455).
caaagtgccgaagagaata

SEQ ID NO: 482984 - DNA, 19 bp, Mus musculus
  siRNA target sequence for Ddx26 (NM_008715.1,5512-5530).
gaggtcaacactgaactaa

SEQ ID NO: 482985 - DNA, 19 bp, Mus musculus
  siRNA target sequence for Ddx26 (NM_008715.1,5522-5540).
ctgaactaaaagcacaaat

SEQ ID NO: 482986 - DNA, 19 bp, Mus musculus
  siRNA target sequence for Ddx26 (NM_008715.1,5579-5597).
gaatcttcaccttactgaa

SEQ ID NO: 482987 - DNA, 19 bp, Mus musculus
  siRNA target sequence for Ddx26 (NM_008715.1,5621-5639).
caaggctaatattcttaca

SEQ ID NO: 482988 - DNA, 19 bp, Mus musculus
  siRNA target sequence for Ddx26 (NM_008715.1,5653-5671).
gaagcatccaggtttaaga

SEQ ID NO: 482989 - DNA, 19 bp, Mus musculus
  siRNA target sequence for Ddx26 (NM_008715.1,5660-5678).
ccaggtttaagaaacgaat

SEQ ID NO: 482990 - DNA, 19 bp, Mus musculus
  siRNA target sequence for Ddx26 (NM_008715.1,5664-5682).
gtttaagaaacgaatgcta

SEQ ID NO: 482991 - DNA, 19 bp, Mus musculus
  siRNA target sequence for Ddx26 (NM_008715.1,5700-5718).
cttcttggatgaaattcat

SEQ ID NO: 482992 - DNA, 19 bp, Mus musculus
  siRNA target sequence for Ddx26 (NM_008715.1,5716-5734).
catcgaagagccaatcaaa

SEQ ID NO: 482993 - DNA, 19 bp, Mus musculus
  siRNA target sequence for Ddx26 (NM_008715.1,5719-5737).
cgaagagccaatcaaatca

SEQ ID NO: 482994 - DNA, 19 bp, Mus musculus
  siRNA target sequence for Ddx26 (NM_008715.1,5726-5744).
ccaatcaaatcaaccatat

SEQ ID NO: 482995 - DNA, 19 bp, Mus musculus
  siRNA target sequence for Ddx26 (NM_008715.1,5727-5745).
caatcaaatcaaccatatt

SEQ ID NO: 482996 - DNA, 19 bp, Mus musculus
  siRNA target sequence for Ddx26 (NM_008715.1,5736-5754).
caaccatattaatagcaat

SEQ ID NO: 482997 - DNA, 19 bp, Mus musculus
  siRNA target sequence for Ddx28 (NM_028038.1,312-330).
gatcgcggcaagaccattt

SEQ ID NO: 482998 - DNA, 19 bp, Mus musculus
  siRNA target sequence for Ddx28 (NM_028038.1,537-555).
gtggcaagacgcttagcta

SEQ ID NO: 482999 - DNA, 19 bp, Mus musculus
  siRNA target sequence for Ddx28 (NM_028038.1,553-571).
ctacctactgcccctattt

SEQ ID NO: 483000 - DNA, 19 bp, Mus musculus
  siRNA target sequence for Ddx28 (NM_028038.1,596-614).
ctggactcccgcagtttca

SEQ ID NO: 483001 - DNA, 19 bp, Mus musculus
  siRNA target sequence for Ddx28 (NM_028038.1,768-786).
gaccggcagccgatgtgtt

SEQ ID NO: 483002 - DNA, 19 bp, Mus musculus
  siRNA target sequence for Ddx28 (NM_028038.1,771-789).
cggcagccgatgtgttagt

SEQ ID NO: 483003 - DNA, 19 bp, Mus musculus
  siRNA target sequence for Ddx28 (NM_028038.1,810-828).
ggaaggctctgaaaagtca

SEQ ID NO: 483004 - DNA, 19 bp, Mus musculus
  siRNA target sequence for Ddx28 (NM_028038.1,853-871).
cttcatagtgctagatgaa

SEQ ID NO: 483005 - DNA, 19 bp, Mus musculus
  siRNA target sequence for Ddx28 (NM_028038.1,856-874).
catagtgctagatgaagta

SEQ ID NO: 483006 - DNA, 19 bp, Mus musculus
  siRNA target sequence for Ddx28 (NM_028038.1,875-893).
gacacactgctagatgaaa

SEQ ID NO: 483007 - DNA, 19 bp, Mus musculus
  siRNA target sequence for Ddx28 (NM_028038.1,879-897).
cactgctagatgaaagctt

SEQ ID NO: 483008 - DNA, 19 bp, Mus musculus
  siRNA target sequence for Ddx28 (NM_028038.1,922-940).
ggaaaagagccctatagca

SEQ ID NO: 483009 - DNA, 19 bp, Mus musculus
  siRNA target sequence for Ddx28 (NM_028038.1,928-946).
gagccctatagcagaaagt

SEQ ID NO: 483010 - DNA, 19 bp, Mus musculus
  siRNA target sequence for Ddx28 (NM_028038.1,945-963).
gtccagccgagttagaaga

SEQ ID NO: 483011 - DNA, 19 bp, Mus musculus
  siRNA target sequence for Ddx28 (NM_028038.1,1016-1034).
ggcctaaaccagttactga

SEQ ID NO: 483012 - DNA, 19 bp, Mus musculus
  siRNA target sequence for Ddx28 (NM_028038.1,1103-1121).
gtcagacagacatttatga

SEQ ID NO: 483013 - DNA, 19 bp, Mus musculus
  siRNA target sequence for Ddx28 (NM_028038.1,1105-1123).
cagacagacatttatgaga

SEQ ID NO: 483014 - DNA, 19 bp, Mus musculus
  siRNA target sequence for Ddx28 (NM_028038.1,1202-1220).
ggaactgtcctggtattct

SEQ ID NO: 483015 - DNA, 19 bp, Mus musculus
  siRNA target sequence for Ddx28 (NM_028038.1,1240-1258).
gaactggcttgggtacatt

SEQ ID NO: 483016 - DNA, 19 bp, Mus musculus
  siRNA target sequence for Ddx28 (NM_028038.1,1267-1285).
ccacaagattcaacatcta

SEQ ID NO: 483017 - DNA, 19 bp, Mus musculus
  siRNA target sequence for Ddx28 (NM_028038.1,1268-1286).
cacaagattcaacatctaa

SEQ ID NO: 483018 - DNA, 19 bp, Mus musculus
  siRNA target sequence for Ddx28 (NM_028038.1,1342-1360).
gaagggctcccagaacata

SEQ ID NO: 483019 - DNA, 19 bp, Mus musculus
  siRNA target sequence for Ddx28 (NM_028038.1,1345-1363).
gggctcccagaacatactt

SEQ ID NO: 483020 - DNA, 19 bp, Mus musculus
  siRNA target sequence for Ddx28 (NM_028038.1,1347-1365).
gctcccagaacatacttgt

SEQ ID NO: 483021 - DNA, 19 bp, Mus musculus
  siRNA target sequence for Ddx28 (NM_028038.1,1403-1421).
cacgtggaagtggttatca

SEQ ID NO: 483022 - DNA, 19 bp, Mus musculus
  siRNA target sequence for Ddx28 (NM_028038.1,1405-1423).
cgtggaagtggttatcaat

SEQ ID NO: 483023 - DNA, 19 bp, Mus musculus
  siRNA target sequence for Ddx28 (NM_028038.1,1412-1430).
gtggttatcaattacgatt

SEQ ID NO: 483024 - DNA, 19 bp, Mus musculus
  siRNA target sequence for Ddx28 (NM_028038.1,1495-1513).
gccagggtccgttatcagt

SEQ ID NO: 483025 - DNA, 19 bp, Mus musculus
  siRNA target sequence for Ddx28 (NM_028038.1,1496-1514).
ccagggtccgttatcagtt

SEQ ID NO: 483026 - DNA, 19 bp, Mus musculus
  siRNA target sequence for Ddx28 (NM_028038.1,1497-1515).
cagggtccgttatcagttt

SEQ ID NO: 483027 - DNA, 19 bp, Mus musculus
  siRNA target sequence for Ddx28 (NM_028038.1,1500-1518).
ggtccgttatcagttttgt

SEQ ID NO: 483028 - DNA, 19 bp, Mus musculus
  siRNA target sequence for Ddx3y (NM_012008.1,136-154).
gaatggaggaggaaataca

SEQ ID NO: 483029 - DNA, 19 bp, Mus musculus
  siRNA target sequence for Ddx3y (NM_012008.1,157-175).
gagcaaagggcgctatata

SEQ ID NO: 483030 - DNA, 19 bp, Mus musculus
  siRNA target sequence for Ddx3y (NM_012008.1,160-178).
caaagggcgctatatacct

SEQ ID NO: 483031 - DNA, 19 bp, Mus musculus
  siRNA target sequence for Ddx3y (NM_012008.1,231-249).
caggatggagctgtagtaa

SEQ ID NO: 483032 - DNA, 19 bp, Mus musculus
  siRNA target sequence for Ddx3y (NM_012008.1,240-258).
gctgtagtaaagataaaga

SEQ ID NO: 483033 - DNA, 19 bp, Mus musculus
  siRNA target sequence for Ddx3y (NM_012008.1,295-313).
gaagcccaattatttcagt

SEQ ID NO: 483034 - DNA, 19 bp, Mus musculus
  siRNA target sequence for Ddx3y (NM_012008.1,343-361).
cgatgatcatggtcgaaat

SEQ ID NO: 483035 - DNA, 19 bp, Mus musculus
  siRNA target sequence for Ddx3y (NM_012008.1,347-365).
gatcatggtcgaaatgact

SEQ ID NO: 483036 - DNA, 19 bp, Mus musculus
  siRNA target sequence for Ddx3y (NM_012008.1,357-375).
gaaatgactatgatggtat

SEQ ID NO: 483037 - DNA, 19 bp, Mus musculus
  siRNA target sequence for Ddx3y (NM_012008.1,485-503).
cgcttagagcaagaacttt

SEQ ID NO: 483038 - DNA, 19 bp, Mus musculus
  siRNA target sequence for Ddx3y (NM_012008.1,554-572).
gtagaagcaactggaaata

SEQ ID NO: 483039 - DNA, 19 bp, Mus musculus
  siRNA target sequence for Ddx3y (NM_012008.1,625-643).
catggggaacattgaactt

SEQ ID NO: 483040 - DNA, 19 bp, Mus musculus
  siRNA target sequence for Ddx3y (NM_012008.1,657-675).
gtcctactccagtgcaaaa

SEQ ID NO: 483041 - DNA, 19 bp, Mus musculus
  siRNA target sequence for Ddx3y (NM_012008.1,862-880).
ggtgttagccccaacaaga

SEQ ID NO: 483042 - DNA, 19 bp, Mus musculus
  siRNA target sequence for Ddx3y (NM_012008.1,865-883).
gttagccccaacaagagaa

SEQ ID NO: 483043 - DNA, 19 bp, Mus musculus
  siRNA target sequence for Ddx3y (NM_012008.1,937-955).
ccgtccttgtgtagtgtat

SEQ ID NO: 483044 - DNA, 19 bp, Mus musculus
  siRNA target sequence for Ddx3y (NM_012008.1,1052-1070).
ggaaagattggattagatt

SEQ ID NO: 483045 - DNA, 19 bp, Mus musculus
  siRNA target sequence for Ddx3y (NM_012008.1,1128-1146).
ctcaaatacgtcgtatagt

SEQ ID NO: 483046 - DNA, 19 bp, Mus musculus
  siRNA target sequence for Ddx3y (NM_012008.1,1172-1190).
ggggttcgtcacactatga

SEQ ID NO: 483047 - DNA, 19 bp, Mus musculus
  siRNA target sequence for Ddx3y (NM_012008.1,1173-1191).
gggttcgtcacactatgat

SEQ ID NO: 483048 - DNA, 19 bp, Mus musculus
  siRNA target sequence for Ddx3y (NM_012008.1,1222-1240).
gatgcttgctcgtgacttt

SEQ ID NO: 483049 - DNA, 19 bp, Mus musculus
  siRNA target sequence for Ddx3y (NM_012008.1,1230-1248).
ctcgtgactttttagatga

SEQ ID NO: 483050 - DNA, 19 bp, Mus musculus
  siRNA target sequence for Ddx3y (NM_012008.1,1270-1288).
cagagtaggatctacttct

SEQ ID NO: 483051 - DNA, 19 bp, Mus musculus
  siRNA target sequence for Ddx3y (NM_012008.1,1325-1343).
ctagacaaacggtcatttt

SEQ ID NO: 483052 - DNA, 19 bp, Mus musculus
  siRNA target sequence for Ddx3y (NM_012008.1,1419-1437).
cgctggagaacttcttatt

SEQ ID NO: 483053 - DNA, 19 bp, Mus musculus
  siRNA target sequence for Ddx3y (NM_012008.1,1423-1441).
ggagaacttcttatttcaa

SEQ ID NO: 483054 - DNA, 19 bp, Mus musculus
  siRNA target sequence for Ddx3y (NM_012008.1,1426-1444).
gaacttcttatttcaagaa

SEQ ID NO: 483055 - DNA, 19 bp, Mus musculus
  siRNA target sequence for Ddx3y (NM_012008.1,1442-1460).
gaaagatatgcgtgtacta

SEQ ID NO: 483056 - DNA, 19 bp, Mus musculus
  siRNA target sequence for Ddx3y (NM_012008.1,1518-1536).
cagggcgaaagccaatttt

SEQ ID NO: 483057 - DNA, 19 bp, Mus musculus
  siRNA target sequence for Ddx3y (NM_012008.1,1554-1572).
cagcaagaggtctagacat

SEQ ID NO: 483058 - DNA, 19 bp, Mus musculus
  siRNA target sequence for Ddx3y (NM_012008.1,1556-1574).
gcaagaggtctagacattt

SEQ ID NO: 483059 - DNA, 19 bp, Mus musculus
  siRNA target sequence for Ddx3y (NM_012008.1,1606-1624).
gccaagcgatattgaagaa

SEQ ID NO: 483060 - DNA, 19 bp, Mus musculus
  siRNA target sequence for Ddx3y (NM_012008.1,1607-1625).
ccaagcgatattgaagaat

SEQ ID NO: 483061 - DNA, 19 bp, Mus musculus
  siRNA target sequence for Ddx3y (NM_012008.1,1608-1626).
caagcgatattgaagaata

SEQ ID NO: 483062 - DNA, 19 bp, Mus musculus
  siRNA target sequence for Ddx3y (NM_012008.1,1644-1662).
gcacaggacgtgtaggaaa

SEQ ID NO: 483063 - DNA, 19 bp, Mus musculus
  siRNA target sequence for Ddx3y (NM_012008.1,1674-1692).
ccacctcttttttcaatga

SEQ ID NO: 483064 - DNA, 19 bp, Mus musculus
  siRNA target sequence for Ddx3y (NM_012008.1,1729-1747).
ccttgttgaggctaaacaa

SEQ ID NO: 483065 - DNA, 19 bp, Mus musculus
  siRNA target sequence for Ddx3y (NM_012008.1,1765-1783).
ggaaagtatggcttatgaa

SEQ ID NO: 483066 - DNA, 19 bp, Mus musculus
  siRNA target sequence for Ddx3y (NM_012008.1,1903-1921).
caatagcagccgaagtagt

SEQ ID NO: 483067 - DNA, 19 bp, Mus musculus
  siRNA target sequence for Ddx3y (NM_012008.1,1930-1948).
ccacaacagaggatttggt

SEQ ID NO: 483068 - DNA, 19 bp, Mus musculus
  siRNA target sequence for Ddx3y (NM_012008.1,1969-1987).
ctacaataatgatggttat

SEQ ID NO: 483069 - DNA, 19 bp, Mus musculus
  siRNA target sequence for Ddx4 (NM_010029.1,58-76).
gggaggcagaaatactcaa

SEQ ID NO: 483070 - DNA, 19 bp, Mus musculus
  siRNA target sequence for Ddx4 (NM_010029.1,99-117).
cctgtatttgagaaggata

SEQ ID NO: 483071 - DNA, 19 bp, Mus musculus
  siRNA target sequence for Ddx4 (NM_010029.1,171-189).
gatattggcgagtctagta

SEQ ID NO: 483072 - DNA, 19 bp, Mus musculus
  siRNA target sequence for Ddx4 (NM_010029.1,178-196).
gcgagtctagtaaaaaaga

SEQ ID NO: 483073 - DNA, 19 bp, Mus musculus
  siRNA target sequence for Ddx4 (NM_010029.1,236-254).
ctttggaaacagaggtttt

SEQ ID NO: 483074 - DNA, 19 bp, Mus musculus
  siRNA target sequence for Ddx4 (NM_010029.1,387-405).
gcatcaggcccgttcagaa

SEQ ID NO: 483075 - DNA, 19 bp, Mus musculus
  siRNA target sequence for Ddx4 (NM_010029.1,447-465).
ggtctaggaagaccaaata

SEQ ID NO: 483076 - DNA, 19 bp, Mus musculus
  siRNA target sequence for Ddx4 (NM_010029.1,457-475).
gaccaaatagtgaatctga

SEQ ID NO: 483077 - DNA, 19 bp, Mus musculus
  siRNA target sequence for Ddx4 (NM_010029.1,494-512).
gcgtggtggtggccttttt

SEQ ID NO: 483078 - DNA, 19 bp, Mus musculus
  siRNA target sequence for Ddx4 (NM_010029.1,582-600).
cgaggtggttacaaaggtt

SEQ ID NO: 483079 - DNA, 19 bp, Mus musculus
  siRNA target sequence for Ddx4 (NM_010029.1,583-601).
gaggtggttacaaaggttt

SEQ ID NO: 483080 - DNA, 19 bp, Mus musculus
  siRNA target sequence for Ddx4 (NM_010029.1,585-603).
ggtggttacaaaggtttaa

SEQ ID NO: 483081 - DNA, 19 bp, Mus musculus
  siRNA target sequence for Ddx4 (NM_010029.1,681-699).
ggtccaaaagtgacatata

SEQ ID NO: 483082 - DNA, 19 bp, Mus musculus
  siRNA target sequence for Ddx4 (NM_010029.1,728-746).
ctccatctttgcacattat

SEQ ID NO: 483083 - DNA, 19 bp, Mus musculus
  siRNA target sequence for Ddx4 (NM_010029.1,751-769).
caggcataaactttgataa

SEQ ID NO: 483084 - DNA, 19 bp, Mus musculus
  siRNA target sequence for Ddx4 (NM_010029.1,776-794).
caccatacttgttgaagta

SEQ ID NO: 483085 - DNA, 19 bp, Mus musculus
  siRNA target sequence for Ddx4 (NM_010029.1,807-825).
gcaccaccggcaattttga

SEQ ID NO: 483086 - DNA, 19 bp, Mus musculus
  siRNA target sequence for Ddx4 (NM_010029.1,810-828).
ccaccggcaattttgactt

SEQ ID NO: 483087 - DNA, 19 bp, Mus musculus
  siRNA target sequence for Ddx4 (NM_010029.1,814-832).
cggcaattttgacttttga

SEQ ID NO: 483088 - DNA, 19 bp, Mus musculus
  siRNA target sequence for Ddx4 (NM_010029.1,824-842).
gacttttgaagaagctaat

SEQ ID NO: 483089 - DNA, 19 bp, Mus musculus
  siRNA target sequence for Ddx4 (NM_010029.1,826-844).
cttttgaagaagctaatct

SEQ ID NO: 483090 - DNA, 19 bp, Mus musculus
  siRNA target sequence for Ddx4 (NM_010029.1,855-873).
ctgaataacaacattgcta

SEQ ID NO: 483091 - DNA, 19 bp, Mus musculus
  siRNA target sequence for Ddx4 (NM_010029.1,870-888).
gctaaagctggctatacta

SEQ ID NO: 483092 - DNA, 19 bp, Mus musculus
  siRNA target sequence for Ddx4 (NM_010029.1,871-889).
ctaaagctggctatactaa

SEQ ID NO: 483093 - DNA, 19 bp, Mus musculus
  siRNA target sequence for Ddx4 (NM_010029.1,876-894).
gctggctatactaagctta

SEQ ID NO: 483094 - DNA, 19 bp, Mus musculus
  siRNA target sequence for Ddx4 (NM_010029.1,914-932).
cattcccattgtattagca

SEQ ID NO: 483095 - DNA, 19 bp, Mus musculus
  siRNA target sequence for Ddx4 (NM_010029.1,993-1011).
cctattttggctcatatga

SEQ ID NO: 483096 - DNA, 19 bp, Mus musculus
  siRNA target sequence for Ddx4 (NM_010029.1,994-1012).
ctattttggctcatatgat

SEQ ID NO: 483097 - DNA, 19 bp, Mus musculus
  siRNA target sequence for Ddx4 (NM_010029.1,1010-1028).
gatgcgggatggaataact

SEQ ID NO: 483098 - DNA, 19 bp, Mus musculus
  siRNA target sequence for Ddx4 (NM_010029.1,1027-1045).
ctgccagtcgctttaaaga

SEQ ID NO: 483099 - DNA, 19 bp, Mus musculus
  siRNA target sequence for Ddx4 (NM_010029.1,1030-1048).
ccagtcgctttaaagaact

SEQ ID NO: 483100 - DNA, 19 bp, Mus musculus
  siRNA target sequence for Ddx4 (NM_010029.1,1078-1096).
caactcgagaactgatcaa

SEQ ID NO: 483101 - DNA, 19 bp, Mus musculus
  siRNA target sequence for Ddx4 (NM_010029.1,1083-1101).
cgagaactgatcaaccaaa

SEQ ID NO: 483102 - DNA, 19 bp, Mus musculus
  siRNA target sequence for Ddx4 (NM_010029.1,1183-1201).
cagttcgacagatagtaca

SEQ ID NO: 483103 - DNA, 19 bp, Mus musculus
  siRNA target sequence for Ddx4 (NM_010029.1,1232-1250).
gaggctgatggacatcata

SEQ ID NO: 483104 - DNA, 19 bp, Mus musculus
  siRNA target sequence for Ddx4 (NM_010029.1,1267-1285).
gcctcaaacaagtcaagta

SEQ ID NO: 483105 - DNA, 19 bp, Mus musculus
  siRNA target sequence for Ddx4 (NM_010029.1,1269-1287).
ctcaaacaagtcaagtact

SEQ ID NO: 483106 - DNA, 19 bp, Mus musculus
  siRNA target sequence for Ddx4 (NM_010029.1,1271-1289).
caaacaagtcaagtactta

SEQ ID NO: 483107 - DNA, 19 bp, Mus musculus
  siRNA target sequence for Ddx4 (NM_010029.1,1330-1348).
gaccagagatgaagaaact

SEQ ID NO: 483108 - DNA, 19 bp, Mus musculus
  siRNA target sequence for Ddx4 (NM_010029.1,1337-1355).
gatgaagaaactaatttct

SEQ ID NO: 483109 - DNA, 19 bp, Mus musculus
  siRNA target sequence for Ddx4 (NM_010029.1,1380-1398).
caacgccaaacccttttat

SEQ ID NO: 483110 - DNA, 19 bp, Mus musculus
  siRNA target sequence for Ddx4 (NM_010029.1,1434-1452).
gctggggactttctaaagt

SEQ ID NO: 483111 - DNA, 19 bp, Mus musculus
  siRNA target sequence for Ddx4 (NM_010029.1,1446-1464).
ctaaagtccagttacttgt

SEQ ID NO: 483112 - DNA, 19 bp, Mus musculus
  siRNA target sequence for Ddx4 (NM_010029.1,1489-1507).
gagcttgcagagatgttca

SEQ ID NO: 483113 - DNA, 19 bp, Mus musculus
  siRNA target sequence for Ddx4 (NM_010029.1,1508-1526).
gcagacgatccttcaagtt

SEQ ID NO: 483114 - DNA, 19 bp, Mus musculus
  siRNA target sequence for Ddx4 (NM_010029.1,1585-1603).
gaactatggtctttgttga

SEQ ID NO: 483115 - DNA, 19 bp, Mus musculus
  siRNA target sequence for Ddx4 (NM_010029.1,1610-1628).
gaaaaaagccgatttcatt

SEQ ID NO: 483116 - DNA, 19 bp, Mus musculus
  siRNA target sequence for Ddx4 (NM_010029.1,1618-1636).
ccgatttcattgcaacttt

SEQ ID NO: 483117 - DNA, 19 bp, Mus musculus
  siRNA target sequence for Ddx4 (NM_010029.1,1726-1744).
gaaagtgcccagttcttgt

SEQ ID NO: 483118 - DNA, 19 bp, Mus musculus
  siRNA target sequence for Ddx4 (NM_010029.1,1762-1780).
ccagagggcttgatattga

SEQ ID NO: 483119 - DNA, 19 bp, Mus musculus
  siRNA target sequence for Ddx4 (NM_010029.1,1765-1783).
gagggcttgatattgaaaa

SEQ ID NO: 483120 - DNA, 19 bp, Mus musculus
  siRNA target sequence for Ddx4 (NM_010029.1,1816-1834).
ctaccattgatgagtatgt

SEQ ID NO: 483121 - DNA, 19 bp, Mus musculus
  siRNA target sequence for Ddx4 (NM_010029.1,1819-1837).
ccattgatgagtatgttca

SEQ ID NO: 483122 - DNA, 19 bp, Mus musculus
  siRNA target sequence for Ddx4 (NM_010029.1,1878-1896).
gcgatttctttttttgata

SEQ ID NO: 483123 - DNA, 19 bp, Mus musculus
  siRNA target sequence for Ddx4 (NM_010029.1,1918-1936).
cacagcctctagttaaagt

SEQ ID NO: 483124 - DNA, 19 bp, Mus musculus
  siRNA target sequence for Ddx4 (NM_010029.1,1963-1981).
ccgcatggctagaagagat

SEQ ID NO: 483125 - DNA, 19 bp, Mus musculus
  siRNA target sequence for Ddx4 (NM_010029.1,1964-1982).
cgcatggctagaagagatt

SEQ ID NO: 483126 - DNA, 19 bp, Mus musculus
  siRNA target sequence for Ddx4 (NM_010029.1,2072-2090).
gggcaagcacacgttgaat

SEQ ID NO: 483127 - DNA, 19 bp, Mus musculus
  siRNA target sequence for Ddx4 (NM_010029.1,2073-2091).
ggcaagcacacgttgaata

SEQ ID NO: 483128 - DNA, 19 bp, Mus musculus
  siRNA target sequence for Ddx4 (NM_010029.1,2075-2093).
caagcacacgttgaataca

SEQ ID NO: 483129 - DNA, 19 bp, Mus musculus
  siRNA target sequence for Ddx4 (NM_010029.1,2087-2105).
gaatacagcggggatttct

SEQ ID NO: 483130 - DNA, 19 bp, Mus musculus
  siRNA target sequence for Ddx41 (NM_134059.1,415-433).
cctatgacgatccaatcaa

SEQ ID NO: 483131 - DNA, 19 bp, Mus musculus
  siRNA target sequence for Ddx41 (NM_134059.1,416-434).
ctatgacgatccaatcaaa

SEQ ID NO: 483132 - DNA, 19 bp, Mus musculus
  siRNA target sequence for Ddx41 (NM_134059.1,420-438).
gacgatccaatcaaaacta

SEQ ID NO: 483133 - DNA, 19 bp, Mus musculus
  siRNA target sequence for Ddx41 (NM_134059.1,422-440).
cgatccaatcaaaactagt

SEQ ID NO: 483134 - DNA, 19 bp, Mus musculus
  siRNA target sequence for Ddx41 (NM_134059.1,486-504).
gagcgagttcggaagaagt

SEQ ID NO: 483135 - DNA, 19 bp, Mus musculus
  siRNA target sequence for Ddx41 (NM_134059.1,488-506).
gcgagttcggaagaagtat

SEQ ID NO: 483136 - DNA, 19 bp, Mus musculus
  siRNA target sequence for Ddx41 (NM_134059.1,490-508).
gagttcggaagaagtatca

SEQ ID NO: 483137 - DNA, 19 bp, Mus musculus
  siRNA target sequence for Ddx41 (NM_134059.1,566-584).
gtttcctgcagctatcctt

SEQ ID NO: 483138 - DNA, 19 bp, Mus musculus
  siRNA target sequence for Ddx41 (NM_134059.1,777-795).
ccttatgggctcatcatct

SEQ ID NO: 483139 - DNA, 19 bp, Mus musculus
  siRNA target sequence for Ddx41 (NM_134059.1,828-846).
ggcatcctggagtattact

SEQ ID NO: 483140 - DNA, 19 bp, Mus musculus
  siRNA target sequence for Ddx41 (NM_134059.1,966-984).
cctggacgcctcatggatt

SEQ ID NO: 483141 - DNA, 19 bp, Mus musculus
  siRNA target sequence for Ddx41 (NM_134059.1,967-985).
ctggacgcctcatggattt

SEQ ID NO: 483142 - DNA, 19 bp, Mus musculus
  siRNA target sequence for Ddx41 (NM_134059.1,1042-1060).
ctgaccgcatgattgacat

SEQ ID NO: 483143 - DNA, 19 bp, Mus musculus
  siRNA target sequence for Ddx41 (NM_134059.1,1061-1079).
gggctttgagggtgacatt

SEQ ID NO: 483144 - DNA, 19 bp, Mus musculus
  siRNA target sequence for Ddx41 (NM_134059.1,1074-1092).
gacattcgtaccatcttct

SEQ ID NO: 483145 - DNA, 19 bp, Mus musculus
  siRNA target sequence for Ddx41 (NM_134059.1,1133-1151).
caccatgccgaagaagatt

SEQ ID NO: 483146 - DNA, 19 bp, Mus musculus
  siRNA target sequence for Ddx41 (NM_134059.1,1135-1153).
ccatgccgaagaagattca

SEQ ID NO: 483147 - DNA, 19 bp, Mus musculus
  siRNA target sequence for Ddx41 (NM_134059.1,1136-1154).
catgccgaagaagattcaa

SEQ ID NO: 483148 - DNA, 19 bp, Mus musculus
  siRNA target sequence for Ddx41 (NM_134059.1,1447-1465).
gcaagaaggacgtcttagt

SEQ ID NO: 483149 - DNA, 19 bp, Mus musculus
  siRNA target sequence for Ddx41 (NM_134059.1,1501-1519).
ctgccatccagcatgtcat

SEQ ID NO: 483150 - DNA, 19 bp, Mus musculus
  siRNA target sequence for Ddx41 (NM_134059.1,1781-1799).
cactgactgccccaaactt

SEQ ID NO: 483151 - DNA, 19 bp, Mus musculus
  siRNA target sequence for Ddx41 (NM_134059.1,1789-1807).
gccccaaacttgaagctat

SEQ ID NO: 483152 - DNA, 19 bp, Mus musculus
  siRNA target sequence for Ddx42 (NM_028074.2,629-647).
gctgctagagacatgaaga

SEQ ID NO: 483153 - DNA, 19 bp, Mus musculus
  siRNA target sequence for Ddx42 (NM_028074.2,816-834).
caattgcaccttccaaaaa

SEQ ID NO: 483154 - DNA, 19 bp, Mus musculus
  siRNA target sequence for Ddx42 (NM_028074.2,821-839).
gcaccttccaaaaaaatta

SEQ ID NO: 483155 - DNA, 19 bp, Mus musculus
  siRNA target sequence for Ddx42 (NM_028074.2,847-865).
ccttcctcccattgatcat

SEQ ID NO: 483156 - DNA, 19 bp, Mus musculus
  siRNA target sequence for Ddx42 (NM_028074.2,860-878).
gatcattcggagattgact

SEQ ID NO: 483157 - DNA, 19 bp, Mus musculus
  siRNA target sequence for Ddx42 (NM_028074.2,931-949).
cactccacagcagttgata

SEQ ID NO: 483158 - DNA, 19 bp, Mus musculus
  siRNA target sequence for Ddx42 (NM_028074.2,1026-1044).
ggtttgatgaacaacttat

SEQ ID NO: 483159 - DNA, 19 bp, Mus musculus
  siRNA target sequence for Ddx42 (NM_028074.2,1037-1055).
caacttatgcaccagatta

SEQ ID NO: 483160 - DNA, 19 bp, Mus musculus
  siRNA target sequence for Ddx42 (NM_028074.2,1045-1063).
gcaccagattaggaaatct

SEQ ID NO: 483161 - DNA, 19 bp, Mus musculus
  siRNA target sequence for Ddx42 (NM_028074.2,1073-1091).
cagccgaccccaatacagt

SEQ ID NO: 483162 - DNA, 19 bp, Mus musculus
  siRNA target sequence for Ddx42 (NM_028074.2,1118-1136).
gggagagacatgattggta

SEQ ID NO: 483163 - DNA, 19 bp, Mus musculus
  siRNA target sequence for Ddx42 (NM_028074.2,1119-1137).
ggagagacatgattggtat

SEQ ID NO: 483164 - DNA, 19 bp, Mus musculus
  siRNA target sequence for Ddx42 (NM_028074.2,1120-1138).
gagagacatgattggtatt

SEQ ID NO: 483165 - DNA, 19 bp, Mus musculus
  siRNA target sequence for Ddx42 (NM_028074.2,1126-1144).
catgattggtattgctaaa

SEQ ID NO: 483166 - DNA, 19 bp, Mus musculus
  siRNA target sequence for Ddx42 (NM_028074.2,1176-1194).
ggcccatgttgattcatat

SEQ ID NO: 483167 - DNA, 19 bp, Mus musculus
  siRNA target sequence for Ddx42 (NM_028074.2,1177-1195).
gcccatgttgattcatata

SEQ ID NO: 483168 - DNA, 19 bp, Mus musculus
  siRNA target sequence for Ddx42 (NM_028074.2,1178-1196).
cccatgttgattcatataa

SEQ ID NO: 483169 - DNA, 19 bp, Mus musculus
  siRNA target sequence for Ddx42 (NM_028074.2,1179-1197).
ccatgttgattcatataat

SEQ ID NO: 483170 - DNA, 19 bp, Mus musculus
  siRNA target sequence for Ddx42 (NM_028074.2,1183-1201).
gttgattcatataatggat

SEQ ID NO: 483171 - DNA, 19 bp, Mus musculus
  siRNA target sequence for Ddx42 (NM_028074.2,1379-1397).
gcagagattgttgtatgta

SEQ ID NO: 483172 - DNA, 19 bp, Mus musculus
  siRNA target sequence for Ddx42 (NM_028074.2,1398-1416).
ccccaggtcgactgattga

SEQ ID NO: 483173 - DNA, 19 bp, Mus musculus
  siRNA target sequence for Ddx42 (NM_028074.2,1399-1417).
cccaggtcgactgattgat

SEQ ID NO: 483174 - DNA, 19 bp, Mus musculus
  siRNA target sequence for Ddx42 (NM_028074.2,1401-1419).
caggtcgactgattgatca

SEQ ID NO: 483175 - DNA, 19 bp, Mus musculus
  siRNA target sequence for Ddx42 (NM_028074.2,1404-1422).
gtcgactgattgatcatgt

SEQ ID NO: 483176 - DNA, 19 bp, Mus musculus
  siRNA target sequence for Ddx42 (NM_028074.2,1407-1425).
gactgattgatcatgtgaa

SEQ ID NO: 483177 - DNA, 19 bp, Mus musculus
  siRNA target sequence for Ddx42 (NM_028074.2,1434-1452).
ctactaatcttcaaagagt

SEQ ID NO: 483178 - DNA, 19 bp, Mus musculus
  siRNA target sequence for Ddx42 (NM_028074.2,1449-1467).
gagtctcttaccttgtgtt

SEQ ID NO: 483179 - DNA, 19 bp, Mus musculus
  siRNA target sequence for Ddx42 (NM_028074.2,1508-1526).
caggttcggtccatagcaa

SEQ ID NO: 483180 - DNA, 19 bp, Mus musculus
  siRNA target sequence for Ddx42 (NM_028074.2,1516-1534).
gtccatagcaagtcatgtt

SEQ ID NO: 483181 - DNA, 19 bp, Mus musculus
  siRNA target sequence for Ddx42 (NM_028074.2,1536-1554).
gtcctgacagacaaactct

SEQ ID NO: 483182 - DNA, 19 bp, Mus musculus
  siRNA target sequence for Ddx42 (NM_028074.2,1563-1581).
gtgcaacttttcgaaagaa

SEQ ID NO: 483183 - DNA, 19 bp, Mus musculus
  siRNA target sequence for Ddx42 (NM_028074.2,1574-1592).
cgaaagaagattgaaaagt

SEQ ID NO: 483184 - DNA, 19 bp, Mus musculus
  siRNA target sequence for Ddx42 (NM_028074.2,1606-1624).
cttgattgaccctattcga

SEQ ID NO: 483185 - DNA, 19 bp, Mus musculus
  siRNA target sequence for Ddx42 (NM_028074.2,1684-1702).
ccattccggacccagtaaa

SEQ ID NO: 483186 - DNA, 19 bp, Mus musculus
  siRNA target sequence for Ddx42 (NM_028074.2,1685-1703).
cattccggacccagtaaat

SEQ ID NO: 483187 - DNA, 19 bp, Mus musculus
  siRNA target sequence for Ddx42 (NM_028074.2,1689-1707).
ccggacccagtaaatggaa

SEQ ID NO: 483188 - DNA, 19 bp, Mus musculus
  siRNA target sequence for Ddx42 (NM_028074.2,1744-1762).
ggggagtgtgctcttgttt

SEQ ID NO: 483189 - DNA, 19 bp, Mus musculus
  siRNA target sequence for Ddx42 (NM_028074.2,1751-1769).
gtgctcttgtttgttacta

SEQ ID NO: 483190 - DNA, 19 bp, Mus musculus
  siRNA target sequence for Ddx42 (NM_028074.2,1854-1872).
gcgaaagaaacaaggttat

SEQ ID NO: 483191 - DNA, 19 bp, Mus musculus
  siRNA target sequence for Ddx42 (NM_028074.2,1855-1873).
cgaaagaaacaaggttatt

SEQ ID NO: 483192 - DNA, 19 bp, Mus musculus
  siRNA target sequence for Ddx42 (NM_028074.2,1947-1965).
ccattaagacagtcattaa

SEQ ID NO: 483193 - DNA, 19 bp, Mus musculus
  siRNA target sequence for Ddx42 (NM_028074.2,2037-2055).
gtgtagcctataccttatt

SEQ ID NO: 483194 - DNA, 19 bp, Mus musculus
  siRNA target sequence for Ddx42 (NM_028074.2,2105-2123).
ggagccaaccaacatgttt

SEQ ID NO: 483195 - DNA, 19 bp, Mus musculus
  siRNA target sequence for Ddx42 (NM_028074.2,2217-2235).
gaggcttgggctatagaga

SEQ ID NO: 483196 - DNA, 19 bp, Mus musculus
  siRNA target sequence for Ddx42 (NM_028074.2,2266-2284).
ccgaggaaataataacaat

SEQ ID NO: 483197 - DNA, 19 bp, Mus musculus
  siRNA target sequence for Ddx42 (NM_028074.2,2368-2386).
ccagtacaagagtcacttt

SEQ ID NO: 483198 - DNA, 19 bp, Mus musculus
  siRNA target sequence for Ddx42 (NM_028074.2,2393-2411).
gccagtttaagtaatcaga

SEQ ID NO: 483199 - DNA, 19 bp, Mus musculus
  siRNA target sequence for Ddx42 (NM_028074.2,2394-2412).
ccagtttaagtaatcagaa

SEQ ID NO: 483200 - DNA, 19 bp, Mus musculus
  siRNA target sequence for Ddx42 (NM_028074.2,2446-2464).
gactagtgcaggaagctta

SEQ ID NO: 483201 - DNA, 19 bp, Mus musculus
  siRNA target sequence for Ddx42 (NM_028074.2,2448-2466).
ctagtgcaggaagcttaaa

SEQ ID NO: 483202 - DNA, 19 bp, Mus musculus
  siRNA target sequence for Ddx42 (NM_028074.2,2486-2504).
gcacagcagggccataata

SEQ ID NO: 483203 - DNA, 19 bp, Mus musculus
  siRNA target sequence for Ddx42 (NM_028074.2,2554-2572).
caactctgggaatatcagt

SEQ ID NO: 483204 - DNA, 19 bp, Mus musculus
  siRNA target sequence for Ddx42 (NM_028074.2,2580-2598).
cagtgacctacccttctat

SEQ ID NO: 483205 - DNA, 19 bp, Mus musculus
  siRNA target sequence for Ddx42 (NM_028074.2,2603-2621).
gcccaaggagtcaacaaca

SEQ ID NO: 483206 - DNA, 19 bp, Mus musculus
  siRNA target sequence for Ddx42 (NM_028074.2,2781-2799).
gtggtagccgtcatactga

SEQ ID NO: 483207 - DNA, 19 bp, Mus musculus
  siRNA target sequence for Ddx42 (NM_028074.2,2890-2908).
caggaaagaaggttttaat

SEQ ID NO: 483208 - DNA, 19 bp, Mus musculus
  siRNA target sequence for Ddx42 (NM_028074.2,2940-2958).
gcagcaggatggacaaagt

SEQ ID NO: 483209 - DNA, 19 bp, Mus musculus
  siRNA target sequence for Ddx46 (NM_145975.1,346-364).
gtctggacgagatttgatt

SEQ ID NO: 483210 - DNA, 19 bp, Mus musculus
  siRNA target sequence for Ddx46 (NM_145975.1,493-511).
gctggctttacaaatcact

SEQ ID NO: 483211 - DNA, 19 bp, Mus musculus
  siRNA target sequence for Ddx46 (NM_145975.1,494-512).
ctggctttacaaatcacta

SEQ ID NO: 483212 - DNA, 19 bp, Mus musculus
  siRNA target sequence for Ddx46 (NM_145975.1,496-514).
ggctttacaaatcactaaa

SEQ ID NO: 483213 - DNA, 19 bp, Mus musculus
  siRNA target sequence for Ddx46 (NM_145975.1,515-533).
gaatgtaagaagttttcga

SEQ ID NO: 483214 - DNA, 19 bp, Mus musculus
  siRNA target sequence for Ddx46 (NM_145975.1,606-624).
gaggtgctgaaattattgt

SEQ ID NO: 483215 - DNA, 19 bp, Mus musculus
  siRNA target sequence for Ddx46 (NM_145975.1,627-645).
gcacacctggtcgaatgat

SEQ ID NO: 483216 - DNA, 19 bp, Mus musculus
  siRNA target sequence for Ddx46 (NM_145975.1,630-648).
cacctggtcgaatgattga

SEQ ID NO: 483217 - DNA, 19 bp, Mus musculus
  siRNA target sequence for Ddx46 (NM_145975.1,632-650).
cctggtcgaatgattgaca

SEQ ID NO: 483218 - DNA, 19 bp, Mus musculus
  siRNA target sequence for Ddx46 (NM_145975.1,633-651).
ctggtcgaatgattgacat

SEQ ID NO: 483219 - DNA, 19 bp, Mus musculus
  siRNA target sequence for Ddx46 (NM_145975.1,636-654).
gtcgaatgattgacatgtt

SEQ ID NO: 483220 - DNA, 19 bp, Mus musculus
  siRNA target sequence for Ddx46 (NM_145975.1,649-667).
catgttagcggctaacagt

SEQ ID NO: 483221 - DNA, 19 bp, Mus musculus
  siRNA target sequence for Ddx46 (NM_145975.1,664-682).
cagtggtcgggtcacaaat

SEQ ID NO: 483222 - DNA, 19 bp, Mus musculus
  siRNA target sequence for Ddx46 (NM_145975.1,666-684).
gtggtcgggtcacaaatct

SEQ ID NO: 483223 - DNA, 19 bp, Mus musculus
  siRNA target sequence for Ddx46 (NM_145975.1,687-705).
gaagagtgacatatgttgt

SEQ ID NO: 483224 - DNA, 19 bp, Mus musculus
  siRNA target sequence for Ddx46 (NM_145975.1,690-708).
gagtgacatatgttgtttt

SEQ ID NO: 483225 - DNA, 19 bp, Mus musculus
  siRNA target sequence for Ddx46 (NM_145975.1,694-712).
gacatatgttgttttagat

SEQ ID NO: 483226 - DNA, 19 bp, Mus musculus
  siRNA target sequence for Ddx46 (NM_145975.1,757-775).
gcgcattgtggataacgtt

SEQ ID NO: 483227 - DNA, 19 bp, Mus musculus
  siRNA target sequence for Ddx46 (NM_145975.1,782-800).
gaccgacagacagttatgt

SEQ ID NO: 483228 - DNA, 19 bp, Mus musculus
  siRNA target sequence for Ddx46 (NM_145975.1,785-803).
cgacagacagttatgtttt

SEQ ID NO: 483229 - DNA, 19 bp, Mus musculus
  siRNA target sequence for Ddx46 (NM_145975.1,979-997).
gtcaggatctgtcattata

SEQ ID NO: 483230 - DNA, 19 bp, Mus musculus
  siRNA target sequence for Ddx46 (NM_145975.1,981-999).
caggatctgtcattatatt

SEQ ID NO: 483231 - DNA, 19 bp, Mus musculus
  siRNA target sequence for Ddx46 (NM_145975.1,1066-1084).
gtctcttcacggaggtatt

SEQ ID NO: 483232 - DNA, 19 bp, Mus musculus
  siRNA target sequence for Ddx46 (NM_145975.1,1068-1086).
ctcttcacggaggtattga

SEQ ID NO: 483233 - DNA, 19 bp, Mus musculus
  siRNA target sequence for Ddx46 (NM_145975.1,1073-1091).
cacggaggtattgatcaat

SEQ ID NO: 483234 - DNA, 19 bp, Mus musculus
  siRNA target sequence for Ddx46 (NM_145975.1,1075-1093).
cggaggtattgatcaatat

SEQ ID NO: 483235 - DNA, 19 bp, Mus musculus
  siRNA target sequence for Ddx46 (NM_145975.1,1077-1095).
gaggtattgatcaatatga

SEQ ID NO: 483236 - DNA, 19 bp, Mus musculus
  siRNA target sequence for Ddx46 (NM_145975.1,1079-1097).
ggtattgatcaatatgaca

SEQ ID NO: 483237 - DNA, 19 bp, Mus musculus
  siRNA target sequence for Ddx46 (NM_145975.1,1100-1118).
gacagtatcataaatgact

SEQ ID NO: 483238 - DNA, 19 bp, Mus musculus
  siRNA target sequence for Ddx46 (NM_145975.1,1164-1182).
ctcgtggtctcgatgtgaa

SEQ ID NO: 483239 - DNA, 19 bp, Mus musculus
  siRNA target sequence for Ddx46 (NM_145975.1,1167-1185).
gtggtctcgatgtgaaaca

SEQ ID NO: 483240 - DNA, 19 bp, Mus musculus
  siRNA target sequence for Ddx46 (NM_145975.1,1174-1192).
cgatgtgaaacatctaatt

SEQ ID NO: 483241 - DNA, 19 bp, Mus musculus
  siRNA target sequence for Ddx46 (NM_145975.1,1187-1205).
ctaattcttgtagtgaatt

SEQ ID NO: 483242 - DNA, 19 bp, Mus musculus
  siRNA target sequence for Ddx46 (NM_145975.1,1207-1225).
cagctgccccaatcattat

SEQ ID NO: 483243 - DNA, 19 bp, Mus musculus
  siRNA target sequence for Ddx46 (NM_145975.1,1209-1227).
gctgccccaatcattatga

SEQ ID NO: 483244 - DNA, 19 bp, Mus musculus
  siRNA target sequence for Ddx46 (NM_145975.1,1210-1228).
ctgccccaatcattatgaa

SEQ ID NO: 483245 - DNA, 19 bp, Mus musculus
  siRNA target sequence for Ddx46 (NM_145975.1,1212-1230).
gccccaatcattatgaaga

SEQ ID NO: 483246 - DNA, 19 bp, Mus musculus
  siRNA target sequence for Ddx46 (NM_145975.1,1215-1233).
ccaatcattatgaagatta

SEQ ID NO: 483247 - DNA, 19 bp, Mus musculus
  siRNA target sequence for Ddx46 (NM_145975.1,1300-1318).
ggatcaagctcgatatgct

SEQ ID NO: 483248 - DNA, 19 bp, Mus musculus
  siRNA target sequence for Ddx46 (NM_145975.1,1384-1402).
gagtgacttcaaagatcaa

SEQ ID NO: 483249 - DNA, 19 bp, Mus musculus
  siRNA target sequence for Ddx46 (NM_145975.1,1698-1716).
gaatcaacgctcagaagaa

SEQ ID NO: 483250 - DNA, 19 bp, Mus musculus
  siRNA target sequence for Ddx46 (NM_145975.1,1898-1916).
gggcagagcgagtctttca

SEQ ID NO: 483251 - DNA, 19 bp, Mus musculus
  siRNA target sequence for Ddx46 (NM_145975.1,1899-1917).
ggcagagcgagtctttcaa

SEQ ID NO: 483252 - DNA, 19 bp, Mus musculus
  siRNA target sequence for Ddx46 (NM_145975.1,1901-1919).
cagagcgagtctttcaaga

SEQ ID NO: 483253 - DNA, 19 bp, Mus musculus
  siRNA target sequence for Ddx46 (NM_145975.1,1918-1936).
gagatacgaggaagaatta

SEQ ID NO: 483254 - DNA, 19 bp, Mus musculus
  siRNA target sequence for Ddx46 (NM_145975.1,1931-1949).
gaattagaaattaatgact

SEQ ID NO: 483255 - DNA, 19 bp, Mus musculus
  siRNA target sequence for Ddx46 (NM_145975.1,2165-2183).
ctgatccgactgcaaaatt

SEQ ID NO: 483256 - DNA, 19 bp, Mus musculus
  siRNA target sequence for Ddx46 (NM_145975.1,2167-2185).
gatccgactgcaaaattca

SEQ ID NO: 483257 - DNA, 19 bp, Mus musculus
  siRNA target sequence for Ddx46 (NM_145975.1,2204-2222).
ggacgatacaaagtattat

SEQ ID NO: 483258 - DNA, 19 bp, Mus musculus
  siRNA target sequence for Ddx47 (NM_026360.1,108-126).
ctgggtgttacggatgtat

SEQ ID NO: 483259 - DNA, 19 bp, Mus musculus
  siRNA target sequence for Ddx47 (NM_026360.1,111-129).
ggtgttacggatgtattgt

SEQ ID NO: 483260 - DNA, 19 bp, Mus musculus
  siRNA target sequence for Ddx47 (NM_026360.1,170-188).
gatccagatcgaagctatt

SEQ ID NO: 483261 - DNA, 19 bp, Mus musculus
  siRNA target sequence for Ddx47 (NM_026360.1,173-191).
ccagatcgaagctattcct

SEQ ID NO: 483262 - DNA, 19 bp, Mus musculus
  siRNA target sequence for Ddx47 (NM_026360.1,174-192).
cagatcgaagctattcctt

SEQ ID NO: 483263 - DNA, 19 bp, Mus musculus
  siRNA target sequence for Ddx47 (NM_026360.1,200-218).
gcaaggtcgtgatattatt

SEQ ID NO: 483264 - DNA, 19 bp, Mus musculus
  siRNA target sequence for Ddx47 (NM_026360.1,327-345).
cgagagttggcctttcaga

SEQ ID NO: 483265 - DNA, 19 bp, Mus musculus
  siRNA target sequence for Ddx47 (NM_026360.1,362-380).
ggccctggggtcatctatt

SEQ ID NO: 483266 - DNA, 19 bp, Mus musculus
  siRNA target sequence for Ddx47 (NM_026360.1,365-383).
cctggggtcatctattgga

SEQ ID NO: 483267 - DNA, 19 bp, Mus musculus
  siRNA target sequence for Ddx47 (NM_026360.1,402-420).
gttggtggaattgattcaa

SEQ ID NO: 483268 - DNA, 19 bp, Mus musculus
  siRNA target sequence for Ddx47 (NM_026360.1,430-448).
cactagcattggccaaaaa

SEQ ID NO: 483269 - DNA, 19 bp, Mus musculus
  siRNA target sequence for Ddx47 (NM_026360.1,440-458).
ggccaaaaaaccacatata

SEQ ID NO: 483270 - DNA, 19 bp, Mus musculus
  siRNA target sequence for Ddx47 (NM_026360.1,442-460).
ccaaaaaaccacatatagt

SEQ ID NO: 483271 - DNA, 19 bp, Mus musculus
  siRNA target sequence for Ddx47 (NM_026360.1,450-468).
ccacatatagtaatagcta

SEQ ID NO: 483272 - DNA, 19 bp, Mus musculus
  siRNA target sequence for Ddx47 (NM_026360.1,469-487).
ctcctggccgactgattga

SEQ ID NO: 483273 - DNA, 19 bp, Mus musculus
  siRNA target sequence for Ddx47 (NM_026360.1,486-504).
gaccacttggaaaatacca

SEQ ID NO: 483274 - DNA, 19 bp, Mus musculus
  siRNA target sequence for Ddx47 (NM_026360.1,546-564).
gaagcagaccggatactga

SEQ ID NO: 483275 - DNA, 19 bp, Mus musculus
  siRNA target sequence for Ddx47 (NM_026360.1,550-568).
cagaccggatactgaacat

SEQ ID NO: 483276 - DNA, 19 bp, Mus musculus
  siRNA target sequence for Ddx47 (NM_026360.1,555-573).
cggatactgaacatggatt

SEQ ID NO: 483277 - DNA, 19 bp, Mus musculus
  siRNA target sequence for Ddx47 (NM_026360.1,561-579).
ctgaacatggattttgaga

SEQ ID NO: 483278 - DNA, 19 bp, Mus musculus
  siRNA target sequence for Ddx47 (NM_026360.1,609-627).
ccccgagatcggaaaacat

SEQ ID NO: 483279 - DNA, 19 bp, Mus musculus
  siRNA target sequence for Ddx47 (NM_026360.1,610-628).
cccgagatcggaaaacatt

SEQ ID NO: 483280 - DNA, 19 bp, Mus musculus
  siRNA target sequence for Ddx47 (NM_026360.1,611-629).
ccgagatcggaaaacattt

SEQ ID NO: 483281 - DNA, 19 bp, Mus musculus
  siRNA target sequence for Ddx47 (NM_026360.1,613-631).
gagatcggaaaacatttct

SEQ ID NO: 483282 - DNA, 19 bp, Mus musculus
  siRNA target sequence for Ddx47 (NM_026360.1,647-665).
gaccaagaaggtacaaaaa

SEQ ID NO: 483283 - DNA, 19 bp, Mus musculus
  siRNA target sequence for Ddx47 (NM_026360.1,740-758).
gcagtattacctttttatt

SEQ ID NO: 483284 - DNA, 19 bp, Mus musculus
  siRNA target sequence for Ddx47 (NM_026360.1,759-777).
ccctcgaaattcaaggata

SEQ ID NO: 483285 - DNA, 19 bp, Mus musculus
  siRNA target sequence for Ddx47 (NM_026360.1,763-781).
cgaaattcaaggataccta

SEQ ID NO: 483286 - DNA, 19 bp, Mus musculus
  siRNA target sequence for Ddx47 (NM_026360.1,773-791).
ggatacctacctggtttat

SEQ ID NO: 483287 - DNA, 19 bp, Mus musculus
  siRNA target sequence for Ddx47 (NM_026360.1,774-792).
gatacctacctggtttata

SEQ ID NO: 483288 - DNA, 19 bp, Mus musculus
  siRNA target sequence for Ddx47 (NM_026360.1,810-828).
ggaaactcctttatgatat

SEQ ID NO: 483289 - DNA, 19 bp, Mus musculus
  siRNA target sequence for Ddx47 (NM_026360.1,927-945).
cgcctcggatcccttaata

SEQ ID NO: 483290 - DNA, 19 bp, Mus musculus
  siRNA target sequence for Ddx47 (NM_026360.1,928-946).
gcctcggatcccttaataa

SEQ ID NO: 483291 - DNA, 19 bp, Mus musculus
  siRNA target sequence for Ddx47 (NM_026360.1,930-948).
ctcggatcccttaataagt

SEQ ID NO: 483292 - DNA, 19 bp, Mus musculus
  siRNA target sequence for Ddx47 (NM_026360.1,932-950).
cggatcccttaataagttt

SEQ ID NO: 483293 - DNA, 19 bp, Mus musculus
  siRNA target sequence for Ddx47 (NM_026360.1,933-951).
ggatcccttaataagttta

SEQ ID NO: 483294 - DNA, 19 bp, Mus musculus
  siRNA target sequence for Ddx47 (NM_026360.1,934-952).
gatcccttaataagtttaa

SEQ ID NO: 483295 - DNA, 19 bp, Mus musculus
  siRNA target sequence for Ddx47 (NM_026360.1,959-977).
ggcgaggtccattcttcta

SEQ ID NO: 483296 - DNA, 19 bp, Mus musculus
  siRNA target sequence for Ddx47 (NM_026360.1,1038-1056).
gacattccgactcattcta

SEQ ID NO: 483297 - DNA, 19 bp, Mus musculus
  siRNA target sequence for Ddx47 (NM_026360.1,1044-1062).
ccgactcattctaaggatt

SEQ ID NO: 483298 - DNA, 19 bp, Mus musculus
  siRNA target sequence for Ddx47 (NM_026360.1,1045-1063).
cgactcattctaaggatta

SEQ ID NO: 483299 - DNA, 19 bp, Mus musculus
  siRNA target sequence for Ddx47 (NM_026360.1,1046-1064).
gactcattctaaggattat

SEQ ID NO: 483300 - DNA, 19 bp, Mus musculus
  siRNA target sequence for Ddx47 (NM_026360.1,1100-1118).
ctctgggaaggccattact

SEQ ID NO: 483301 - DNA, 19 bp, Mus musculus
  siRNA target sequence for Ddx47 (NM_026360.1,1102-1120).
ctgggaaggccattacttt

SEQ ID NO: 483302 - DNA, 19 bp, Mus musculus
  siRNA target sequence for Ddx47 (NM_026360.1,1109-1127).
ggccattacttttgtaaca

SEQ ID NO: 483303 - DNA, 19 bp, Mus musculus
  siRNA target sequence for Ddx47 (NM_026360.1,1151-1169).
gcgcatcgagcacttgatt

SEQ ID NO: 483304 - DNA, 19 bp, Mus musculus
  siRNA target sequence for Ddx47 (NM_026360.1,1217-1235).
gctcacggaacgtgtgaat

SEQ ID NO: 483305 - DNA, 19 bp, Mus musculus
  siRNA target sequence for Ddx47 (NM_026360.1,1267-1285).
gggagcacggagaaaagaa

SEQ ID NO: 483306 - DNA, 19 bp, Mus musculus
  siRNA target sequence for Ddx50 (NM_053183.1,160-178).
gaaggagcggcaaaagagt

SEQ ID NO: 483307 - DNA, 19 bp, Mus musculus
  siRNA target sequence for Ddx50 (NM_053183.1,164-182).
gagcggcaaaagagtgata

SEQ ID NO: 483308 - DNA, 19 bp, Mus musculus
  siRNA target sequence for Ddx50 (NM_053183.1,166-184).
gcggcaaaagagtgataga

SEQ ID NO: 483309 - DNA, 19 bp, Mus musculus
  siRNA target sequence for Ddx50 (NM_053183.1,167-185).
cggcaaaagagtgatagaa

SEQ ID NO: 483310 - DNA, 19 bp, Mus musculus
  siRNA target sequence for Ddx50 (NM_053183.1,190-208).
gtcaaggcaccattctgaa

SEQ ID NO: 483311 - DNA, 19 bp, Mus musculus
  siRNA target sequence for Ddx50 (NM_053183.1,269-287).
cccaaaaaagctaaaatga

SEQ ID NO: 483312 - DNA, 19 bp, Mus musculus
  siRNA target sequence for Ddx50 (NM_053183.1,348-366).
ctcataagtcaagaagaaa

SEQ ID NO: 483313 - DNA, 19 bp, Mus musculus
  siRNA target sequence for Ddx50 (NM_053183.1,513-531).
ctgaggagaccataaagct

SEQ ID NO: 483314 - DNA, 19 bp, Mus musculus
  siRNA target sequence for Ddx50 (NM_053183.1,540-558).
gtcgaggggtaacatatct

SEQ ID NO: 483315 - DNA, 19 bp, Mus musculus
  siRNA target sequence for Ddx50 (NM_053183.1,542-560).
cgaggggtaacatatctct

SEQ ID NO: 483316 - DNA, 19 bp, Mus musculus
  siRNA target sequence for Ddx50 (NM_053183.1,543-561).
gaggggtaacatatctctt

SEQ ID NO: 483317 - DNA, 19 bp, Mus musculus
  siRNA target sequence for Ddx50 (NM_053183.1,552-570).
catatctctttcctattca

SEQ ID NO: 483318 - DNA, 19 bp, Mus musculus
  siRNA target sequence for Ddx50 (NM_053183.1,563-581).
cctattcaagttaaaacct

SEQ ID NO: 483319 - DNA, 19 bp, Mus musculus
  siRNA target sequence for Ddx50 (NM_053183.1,653-671).
gccatacccttgattgaaa

SEQ ID NO: 483320 - DNA, 19 bp, Mus musculus
  siRNA target sequence for Ddx50 (NM_053183.1,711-729).
caccaaaggtactcgtttt

SEQ ID NO: 483321 - DNA, 19 bp, Mus musculus
  siRNA target sequence for Ddx50 (NM_053183.1,761-779).
gccaaagatttcaaagata

SEQ ID NO: 483322 - DNA, 19 bp, Mus musculus
  siRNA target sequence for Ddx50 (NM_053183.1,767-785).
gatttcaaagatataacta

SEQ ID NO: 483323 - DNA, 19 bp, Mus musculus
  siRNA target sequence for Ddx50 (NM_053183.1,791-809).
ctcagtgtggcgtgttttt

SEQ ID NO: 483324 - DNA, 19 bp, Mus musculus
  siRNA target sequence for Ddx50 (NM_053183.1,812-830).
ggtggaacatcatatcaaa

SEQ ID NO: 483325 - DNA, 19 bp, Mus musculus
  siRNA target sequence for Ddx50 (NM_053183.1,908-926).
ggccgtttggatctttcaa

SEQ ID NO: 483326 - DNA, 19 bp, Mus musculus
  siRNA target sequence for Ddx50 (NM_053183.1,924-942).
caaagctacgccatgttgt

SEQ ID NO: 483327 - DNA, 19 bp, Mus musculus
  siRNA target sequence for Ddx50 (NM_053183.1,953-971).
gtagatcaaatgttagatt

SEQ ID NO: 483328 - DNA, 19 bp, Mus musculus
  siRNA target sequence for Ddx50 (NM_053183.1,980-998).
gctgaacaagtcgaagata

SEQ ID NO: 483329 - DNA, 19 bp, Mus musculus
  siRNA target sequence for Ddx50 (NM_053183.1,981-999).
ctgaacaagtcgaagatat

SEQ ID NO: 483330 - DNA, 19 bp, Mus musculus
  siRNA target sequence for Ddx50 (NM_053183.1,991-1009).
cgaagatattattcatgaa

SEQ ID NO: 483331 - DNA, 19 bp, Mus musculus
  siRNA target sequence for Ddx50 (NM_053183.1,1033-1051).
caatcctcagaccttactt

SEQ ID NO: 483332 - DNA, 19 bp, Mus musculus
  siRNA target sequence for Ddx50 (NM_053183.1,1065-1083).
gcccacagtgggtatacaa

SEQ ID NO: 483333 - DNA, 19 bp, Mus musculus
  siRNA target sequence for Ddx50 (NM_053183.1,1068-1086).
cacagtgggtatacaaagt

SEQ ID NO: 483334 - DNA, 19 bp, Mus musculus
  siRNA target sequence for Ddx50 (NM_053183.1,1074-1092).
gggtatacaaagttgcaaa

SEQ ID NO: 483335 - DNA, 19 bp, Mus musculus
  siRNA target sequence for Ddx50 (NM_053183.1,1120-1138).
ggttgaccttgttggaaaa

SEQ ID NO: 483336 - DNA, 19 bp, Mus musculus
  siRNA target sequence for Ddx50 (NM_053183.1,1154-1172).
gcaaccactgtggaacatt

SEQ ID NO: 483337 - DNA, 19 bp, Mus musculus
  siRNA target sequence for Ddx50 (NM_053183.1,1194-1212).
ctcagagaccagcagttat

SEQ ID NO: 483338 - DNA, 19 bp, Mus musculus
  siRNA target sequence for Ddx50 (NM_053183.1,1247-1265).
gggagagctattatcttct

SEQ ID NO: 483339 - DNA, 19 bp, Mus musculus
  siRNA target sequence for Ddx50 (NM_053183.1,1253-1271).
gctattatcttctgtgaaa

SEQ ID NO: 483340 - DNA, 19 bp, Mus musculus
  siRNA target sequence for Ddx50 (NM_053183.1,1294-1312).
ggccatgaatccacacata

SEQ ID NO: 483341 - DNA, 19 bp, Mus musculus
  siRNA target sequence for Ddx50 (NM_053183.1,1295-1313).
gccatgaatccacacataa

SEQ ID NO: 483342 - DNA, 19 bp, Mus musculus
  siRNA target sequence for Ddx50 (NM_053183.1,1327-1345).
gtgtttgcatggagacatt

SEQ ID NO: 483343 - DNA, 19 bp, Mus musculus
  siRNA target sequence for Ddx50 (NM_053183.1,1443-1461).
ctgaggttgacctagtgat

SEQ ID NO: 483344 - DNA, 19 bp, Mus musculus
  siRNA target sequence for Ddx50 (NM_053183.1,1448-1466).
gttgacctagtgattcaga

SEQ ID NO: 483345 - DNA, 19 bp, Mus musculus
  siRNA target sequence for Ddx50 (NM_053183.1,1472-1490).
cctccacaggatgttgaat

SEQ ID NO: 483346 - DNA, 19 bp, Mus musculus
  siRNA target sequence for Ddx50 (NM_053183.1,1478-1496).
caggatgttgaatcctata

SEQ ID NO: 483347 - DNA, 19 bp, Mus musculus
  siRNA target sequence for Ddx50 (NM_053183.1,1523-1541).
gctggccggacaggaattt

SEQ ID NO: 483348 - DNA, 19 bp, Mus musculus
  siRNA target sequence for Ddx50 (NM_053183.1,1527-1545).
gccggacaggaatttgtgt

SEQ ID NO: 483349 - DNA, 19 bp, Mus musculus
  siRNA target sequence for Ddx50 (NM_053183.1,1528-1546).
ccggacaggaatttgtgta

SEQ ID NO: 483350 - DNA, 19 bp, Mus musculus
  siRNA target sequence for Ddx50 (NM_053183.1,1529-1547).
cggacaggaatttgtgtat

SEQ ID NO: 483351 - DNA, 19 bp, Mus musculus
  siRNA target sequence for Ddx50 (NM_053183.1,1569-1587).
gaggtcaactgagatatgt

SEQ ID NO: 483352 - DNA, 19 bp, Mus musculus
  siRNA target sequence for Ddx50 (NM_053183.1,1625-1643).
gttccgtctacaatggatt

SEQ ID NO: 483353 - DNA, 19 bp, Mus musculus
  siRNA target sequence for Ddx50 (NM_053183.1,1629-1647).
cgtctacaatggatttagt

SEQ ID NO: 483354 - DNA, 19 bp, Mus musculus
  siRNA target sequence for Ddx50 (NM_053183.1,1632-1650).
ctacaatggatttagttaa

SEQ ID NO: 483355 - DNA, 19 bp, Mus musculus
  siRNA target sequence for Ddx50 (NM_053183.1,1692-1710).
cttatgctgctgttgattt

SEQ ID NO: 483356 - DNA, 19 bp, Mus musculus
  siRNA target sequence for Ddx50 (NM_053183.1,1725-1743).
ctcaaagactgatagaaga

SEQ ID NO: 483357 - DNA, 19 bp, Mus musculus
  siRNA target sequence for Ddx50 (NM_053183.1,1805-1823).
gaaccacgatctttgataa

SEQ ID NO: 483358 - DNA, 19 bp, Mus musculus
  siRNA target sequence for Ddx50 (NM_053183.1,1808-1826).
ccacgatctttgataactt

SEQ ID NO: 483359 - DNA, 19 bp, Mus musculus
  siRNA target sequence for Ddx50 (NM_053183.1,1893-1911).
ggaaggaacttaacagaaa

SEQ ID NO: 483360 - DNA, 19 bp, Mus musculus
  siRNA target sequence for Ddx50 (NM_053183.1,1906-1924).
cagaaagctcagtagtaat

SEQ ID NO: 483361 - DNA, 19 bp, Mus musculus
  siRNA target sequence for Ddx50 (NM_053183.1,1950-1968).
gcctcctgaaaggaaatat

SEQ ID NO: 483362 - DNA, 19 bp, Mus musculus
  siRNA target sequence for Ddx50 (NM_053183.1,1978-1996).
ctttgatgttcctacaagt

SEQ ID NO: 483363 - DNA, 19 bp, Mus musculus
  siRNA target sequence for Ddx50 (NM_053183.1,1988-2006).
cctacaagtgagtcagaaa

SEQ ID NO: 483364 - DNA, 19 bp, Mus musculus
  siRNA target sequence for Ddx50 (NM_053183.1,2016-2034).
cagagtggcatgattcaga

SEQ ID NO: 483365 - DNA, 19 bp, Mus musculus
  siRNA target sequence for Ddx50 (NM_053183.1,2044-2062).
ctcagtgccagccaaatta

SEQ ID NO: 483366 - DNA, 19 bp, Mus musculus
  siRNA target sequence for Ddx50 (NM_053183.1,2052-2070).
cagccaaattacctgaaat

SEQ ID NO: 483367 - DNA, 19 bp, Mus musculus
  siRNA target sequence for Ddx50 (NM_053183.1,2245-2263).
gaacagaaatcgatcaaga

SEQ ID NO: 483368 - DNA, 19 bp, Mus musculus
  siRNA target sequence for Ddx50 (NM_053183.1,2248-2266).
cagaaatcgatcaagaagt

SEQ ID NO: 483369 - DNA, 19 bp, Mus musculus
  siRNA target sequence for Ddx50 (NM_053183.1,2271-2289).
gccataaacggaattttga

SEQ ID NO: 483370 - DNA, 19 bp, Mus musculus
  siRNA target sequence for Ddx50 (NM_053183.1,2273-2291).
cataaacggaattttgact

SEQ ID NO: 483371 - DNA, 19 bp, Mus musculus
  siRNA target sequence for Ddx52 (NM_030096.1,77-95).
ctcgattccaggtaggaaa

SEQ ID NO: 483372 - DNA, 19 bp, Mus musculus
  siRNA target sequence for Ddx52 (NM_030096.1,79-97).
cgattccaggtaggaaaaa

SEQ ID NO: 483373 - DNA, 19 bp, Mus musculus
  siRNA target sequence for Ddx52 (NM_030096.1,139-157).
gacttcttcggaaacaaga

SEQ ID NO: 483374 - DNA, 19 bp, Mus musculus
  siRNA target sequence for Ddx52 (NM_030096.1,324-342).
gtggacatcctctgtagaa

SEQ ID NO: 483375 - DNA, 19 bp, Mus musculus
  siRNA target sequence for Ddx52 (NM_030096.1,495-513).
gcaacttgaccaggaatat

SEQ ID NO: 483376 - DNA, 19 bp, Mus musculus
  siRNA target sequence for Ddx52 (NM_030096.1,496-514).
caacttgaccaggaatata

SEQ ID NO: 483377 - DNA, 19 bp, Mus musculus
  siRNA target sequence for Ddx52 (NM_030096.1,507-525).
ggaatataaaatcaattct

SEQ ID NO: 483378 - DNA, 19 bp, Mus musculus
  siRNA target sequence for Ddx52 (NM_030096.1,527-545).
gattgctccagaatattct

SEQ ID NO: 483379 - DNA, 19 bp, Mus musculus
  siRNA target sequence for Ddx52 (NM_030096.1,643-661).
gggaagacgttggcattta

SEQ ID NO: 483380 - DNA, 19 bp, Mus musculus
  siRNA target sequence for Ddx52 (NM_030096.1,662-680).
gcatccccattttaatgca

SEQ ID NO: 483381 - DNA, 19 bp, Mus musculus
  siRNA target sequence for Ddx52 (NM_030096.1,704-722).
gctttagagccctggttat

SEQ ID NO: 483382 - DNA, 19 bp, Mus musculus
  siRNA target sequence for Ddx52 (NM_030096.1,705-723).
ctttagagccctggttata

SEQ ID NO: 483383 - DNA, 19 bp, Mus musculus
  siRNA target sequence for Ddx52 (NM_030096.1,746-764).
gccagattcacagagaatt

SEQ ID NO: 483384 - DNA, 19 bp, Mus musculus
  siRNA target sequence for Ddx52 (NM_030096.1,747-765).
ccagattcacagagaatta

SEQ ID NO: 483385 - DNA, 19 bp, Mus musculus
  siRNA target sequence for Ddx52 (NM_030096.1,818-836).
caatagcagctaagaaatt

SEQ ID NO: 483386 - DNA, 19 bp, Mus musculus
  siRNA target sequence for Ddx52 (NM_030096.1,838-856).
ggacctaaatcatctaaga

SEQ ID NO: 483387 - DNA, 19 bp, Mus musculus
  siRNA target sequence for Ddx52 (NM_030096.1,839-857).
gacctaaatcatctaagaa

SEQ ID NO: 483388 - DNA, 19 bp, Mus musculus
  siRNA target sequence for Ddx52 (NM_030096.1,842-860).
ctaaatcatctaagaagtt

SEQ ID NO: 483389 - DNA, 19 bp, Mus musculus
  siRNA target sequence for Ddx52 (NM_030096.1,867-885).
ccttgtgactactccaaat

SEQ ID NO: 483390 - DNA, 19 bp, Mus musculus
  siRNA target sequence for Ddx52 (NM_030096.1,878-896).
ctccaaatcgactgatcta

SEQ ID NO: 483391 - DNA, 19 bp, Mus musculus
  siRNA target sequence for Ddx52 (NM_030096.1,880-898).
ccaaatcgactgatctact

SEQ ID NO: 483392 - DNA, 19 bp, Mus musculus
  siRNA target sequence for Ddx52 (NM_030096.1,881-899).
caaatcgactgatctactt

SEQ ID NO: 483393 - DNA, 19 bp, Mus musculus
  siRNA target sequence for Ddx52 (NM_030096.1,886-904).
cgactgatctacttgttga

SEQ ID NO: 483394 - DNA, 19 bp, Mus musculus
  siRNA target sequence for Ddx52 (NM_030096.1,916-934).
ccagggattgacctaacaa

SEQ ID NO: 483395 - DNA, 19 bp, Mus musculus
  siRNA target sequence for Ddx52 (NM_030096.1,945-963).
gctggtagtagatgaatca

SEQ ID NO: 483396 - DNA, 19 bp, Mus musculus
  siRNA target sequence for Ddx52 (NM_030096.1,955-973).
gatgaatcagacaaactgt

SEQ ID NO: 483397 - DNA, 19 bp, Mus musculus
  siRNA target sequence for Ddx52 (NM_030096.1,1206-1224).
ggccatgagagaacttgtt

SEQ ID NO: 483398 - DNA, 19 bp, Mus musculus
  siRNA target sequence for Ddx52 (NM_030096.1,1241-1259).
cacctgttcttgttttcgt

SEQ ID NO: 483399 - DNA, 19 bp, Mus musculus
  siRNA target sequence for Ddx52 (NM_030096.1,1257-1275).
cgttcagtccattgaaaga

SEQ ID NO: 483400 - DNA, 19 bp, Mus musculus
  siRNA target sequence for Ddx52 (NM_030096.1,1263-1281).
gtccattgaaagagctaaa

SEQ ID NO: 483401 - DNA, 19 bp, Mus musculus
  siRNA target sequence for Ddx52 (NM_030096.1,1285-1303).
cttttccatgagctcatat

SEQ ID NO: 483402 - DNA, 19 bp, Mus musculus
  siRNA target sequence for Ddx52 (NM_030096.1,1417-1435).
cttgcaagagggattgact

SEQ ID NO: 483403 - DNA, 19 bp, Mus musculus
  siRNA target sequence for Ddx52 (NM_030096.1,1420-1438).
gcaagagggattgacttta

SEQ ID NO: 483404 - DNA, 19 bp, Mus musculus
  siRNA target sequence for Ddx52 (NM_030096.1,1442-1460).
gcgtaaacctggtcatcaa

SEQ ID NO: 483405 - DNA, 19 bp, Mus musculus
  siRNA target sequence for Ddx52 (NM_030096.1,1443-1461).
cgtaaacctggtcatcaat

SEQ ID NO: 483406 - DNA, 19 bp, Mus musculus
  siRNA target sequence for Ddx52 (NM_030096.1,1444-1462).
gtaaacctggtcatcaatt

SEQ ID NO: 483407 - DNA, 19 bp, Mus musculus
  siRNA target sequence for Ddx52 (NM_030096.1,1449-1467).
cctggtcatcaattatgat

SEQ ID NO: 483408 - DNA, 19 bp, Mus musculus
  siRNA target sequence for Ddx52 (NM_030096.1,1450-1468).
ctggtcatcaattatgatt

SEQ ID NO: 483409 - DNA, 19 bp, Mus musculus
  siRNA target sequence for Ddx52 (NM_030096.1,1485-1503).
ggagtacatccataggata

SEQ ID NO: 483410 - DNA, 19 bp, Mus musculus
  siRNA target sequence for Ddx52 (NM_030096.1,1558-1576).
gatgataaaccattactaa

SEQ ID NO: 483411 - DNA, 19 bp, Mus musculus
  siRNA target sequence for Ddx52 (NM_030096.1,1577-1595).
gaagtgttgccaatgttat

SEQ ID NO: 483412 - DNA, 19 bp, Mus musculus
  siRNA target sequence for Ddx52 (NM_030096.1,1580-1598).
gtgttgccaatgttatcca

SEQ ID NO: 483413 - DNA, 19 bp, Mus musculus
  siRNA target sequence for Ddx52 (NM_030096.1,1612-1630).
cctgtgcccgaatacataa

SEQ ID NO: 483414 - DNA, 19 bp, Mus musculus
  siRNA target sequence for Ddx52 (NM_030096.1,1613-1631).
ctgtgcccgaatacataaa

SEQ ID NO: 483415 - DNA, 19 bp, Mus musculus
  siRNA target sequence for Ddx52 (NM_030096.1,1617-1635).
gcccgaatacataaaaggt

SEQ ID NO: 483416 - DNA, 19 bp, Mus musculus
  siRNA target sequence for Ddx52 (NM_030096.1,1618-1636).
cccgaatacataaaaggtt

SEQ ID NO: 483417 - DNA, 19 bp, Mus musculus
  siRNA target sequence for Ddx52 (NM_030096.1,1619-1637).
ccgaatacataaaaggttt

SEQ ID NO: 483418 - DNA, 19 bp, Mus musculus
  siRNA target sequence for Ddx52 (NM_030096.1,1692-1710).
ggagagcatttgtacaact

SEQ ID NO: 483419 - DNA, 19 bp, Mus musculus
  siRNA target sequence for Ddx52 (NM_030096.1,1703-1721).
gtacaactccaaagtactt

SEQ ID NO: 483420 - DNA, 19 bp, Mus musculus
  siRNA target sequence for Ddx52 (NM_030096.1,1719-1737).
cttcttagagcaagctaaa

SEQ ID NO: 483421 - DNA, 19 bp, Mus musculus
  siRNA target sequence for Ddx52 (NM_030096.1,1753-1771).
ggccaaaacagcaagaaga

SEQ ID NO: 483422 - DNA, 19 bp, Mus musculus
  siRNA target sequence for Ddx54 (NM_028041.1,572-590).
cctcagagtgcgtatcaga

SEQ ID NO: 483423 - DNA, 19 bp, Mus musculus
  siRNA target sequence for Ddx54 (NM_028041.1,573-591).
ctcagagtgcgtatcagat

SEQ ID NO: 483424 - DNA, 19 bp, Mus musculus
  siRNA target sequence for Ddx54 (NM_028041.1,618-636).
gcgagcccagaacaagaaa

SEQ ID NO: 483425 - DNA, 19 bp, Mus musculus
  siRNA target sequence for Ddx54 (NM_028041.1,684-702).
gttcaaggggatcatgaaa

SEQ ID NO: 483426 - DNA, 19 bp, Mus musculus
  siRNA target sequence for Ddx54 (NM_028041.1,906-924).
gaccatgaagttcactaaa

SEQ ID NO: 483427 - DNA, 19 bp, Mus musculus
  siRNA target sequence for Ddx54 (NM_028041.1,1003-1021).
cacgagaaccctgacataa

SEQ ID NO: 483428 - DNA, 19 bp, Mus musculus
  siRNA target sequence for Ddx54 (NM_028041.1,1452-1470).
gagttgcgcccacatctat

SEQ ID NO: 483429 - DNA, 19 bp, Mus musculus
  siRNA target sequence for Ddx54 (NM_028041.1,2081-2099).
cgcgcacaaccatctttga

SEQ ID NO: 483430 - DNA, 19 bp, Mus musculus
  siRNA target sequence for Ddx54 (NM_028041.1,2119-2137).
gacccaagcagccaaatga

SEQ ID NO: 483431 - DNA, 19 bp, Mus musculus
  siRNA target sequence for Ddx54 (NM_028041.1,2365-2383).
cagcgagaccaggagtttt

SEQ ID NO: 483432 - DNA, 19 bp, Mus musculus
  siRNA target sequence for Ddx54 (NM_028041.1,2367-2385).
gcgagaccaggagttttat

SEQ ID NO: 483433 - DNA, 19 bp, Mus musculus
  siRNA target sequence for Ddx54 (NM_028041.1,2627-2645).
cttacaagcgggatctcta

SEQ ID NO: 483434 - DNA, 19 bp, Mus musculus
  siRNA target sequence for Ddx55 (NM_026409.1,170-188).
cctctgttcatgaaaaaca

SEQ ID NO: 483435 - DNA, 19 bp, Mus musculus
  siRNA target sequence for Ddx55 (NM_026409.1,223-241).
gaaaaccctggcttttgtt

SEQ ID NO: 483436 - DNA, 19 bp, Mus musculus
  siRNA target sequence for Ddx55 (NM_026409.1,265-283).
gagaagggaggagaagtta

SEQ ID NO: 483437 - DNA, 19 bp, Mus musculus
  siRNA target sequence for Ddx55 (NM_026409.1,328-346).
gctggccattcagattgat

SEQ ID NO: 483438 - DNA, 19 bp, Mus musculus
  siRNA target sequence for Ddx55 (NM_026409.1,445-463).
gcacggtgggaacatcatt

SEQ ID NO: 483439 - DNA, 19 bp, Mus musculus
  siRNA target sequence for Ddx55 (NM_026409.1,588-606).
gctttgaggcaagcataaa

SEQ ID NO: 483440 - DNA, 19 bp, Mus musculus
  siRNA target sequence for Ddx55 (NM_026409.1,1310-1328).
ggcatgaaagcctttgtgt

SEQ ID NO: 483441 - DNA, 19 bp, Mus musculus
  siRNA target sequence for Ddx55 (NM_026409.1,1486-1504).
gataccgacaccattccat

SEQ ID NO: 483442 - DNA, 19 bp, Mus musculus
  siRNA target sequence for Dhx15 (NM_007839.1,142-160).
gagaggaccgatctaaaga

SEQ ID NO: 483443 - DNA, 19 bp, Mus musculus
  siRNA target sequence for Dhx15 (NM_007839.1,229-247).
gagcttccaccaatgctat

SEQ ID NO: 483444 - DNA, 19 bp, Mus musculus
  siRNA target sequence for Dhx15 (NM_007839.1,235-253).
ccaccaatgctatgcttat

SEQ ID NO: 483445 - DNA, 19 bp, Mus musculus
  siRNA target sequence for Dhx15 (NM_007839.1,379-397).
cacagtgcattaatccatt

SEQ ID NO: 483446 - DNA, 19 bp, Mus musculus
  siRNA target sequence for Dhx15 (NM_007839.1,409-427).
cccatactcctcgatacta

SEQ ID NO: 483447 - DNA, 19 bp, Mus musculus
  siRNA target sequence for Dhx15 (NM_007839.1,410-428).
ccatactcctcgatactat

SEQ ID NO: 483448 - DNA, 19 bp, Mus musculus
  siRNA target sequence for Dhx15 (NM_007839.1,415-433).
ctcctcgatactatgatat

SEQ ID NO: 483449 - DNA, 19 bp, Mus musculus
  siRNA target sequence for Dhx15 (NM_007839.1,418-436).
ctcgatactatgatattct

SEQ ID NO: 483450 - DNA, 19 bp, Mus musculus
  siRNA target sequence for Dhx15 (NM_007839.1,420-438).
cgatactatgatattctaa

SEQ ID NO: 483451 - DNA, 19 bp, Mus musculus
  siRNA target sequence for Dhx15 (NM_007839.1,421-439).
gatactatgatattctaaa

SEQ ID NO: 483452 - DNA, 19 bp, Mus musculus
  siRNA target sequence for Dhx15 (NM_007839.1,463-481).
gggaatacaaggatagatt

SEQ ID NO: 483453 - DNA, 19 bp, Mus musculus
  siRNA target sequence for Dhx15 (NM_007839.1,464-482).
ggaatacaaggatagattt

SEQ ID NO: 483454 - DNA, 19 bp, Mus musculus
  siRNA target sequence for Dhx15 (NM_007839.1,693-711).
gttggatactccattcgat

SEQ ID NO: 483455 - DNA, 19 bp, Mus musculus
  siRNA target sequence for Dhx15 (NM_007839.1,717-735).
gactgcagtagtgcaaaaa

SEQ ID NO: 483456 - DNA, 19 bp, Mus musculus
  siRNA target sequence for Dhx15 (NM_007839.1,721-739).
gcagtagtgcaaaaaccat

SEQ ID NO: 483457 - DNA, 19 bp, Mus musculus
  siRNA target sequence for Dhx15 (NM_007839.1,791-809).
ccttctggagcgttatggt

SEQ ID NO: 483458 - DNA, 19 bp, Mus musculus
  siRNA target sequence for Dhx15 (NM_007839.1,797-815).
ggagcgttatggtgtgata

SEQ ID NO: 483459 - DNA, 19 bp, Mus musculus
  siRNA target sequence for Dhx15 (NM_007839.1,798-816).
gagcgttatggtgtgataa

SEQ ID NO: 483460 - DNA, 19 bp, Mus musculus
  siRNA target sequence for Dhx15 (NM_007839.1,800-818).
gcgttatggtgtgataatt

SEQ ID NO: 483461 - DNA, 19 bp, Mus musculus
  siRNA target sequence for Dhx15 (NM_007839.1,882-900).
gtaagacagagatcagatt

SEQ ID NO: 483462 - DNA, 19 bp, Mus musculus
  siRNA target sequence for Dhx15 (NM_007839.1,892-910).
gatcagatttaaaggttat

SEQ ID NO: 483463 - DNA, 19 bp, Mus musculus
  siRNA target sequence for Dhx15 (NM_007839.1,895-913).
cagatttaaaggttatagt

SEQ ID NO: 483464 - DNA, 19 bp, Mus musculus
  siRNA target sequence for Dhx15 (NM_007839.1,897-915).
gatttaaaggttatagtta

SEQ ID NO: 483465 - DNA, 19 bp, Mus musculus
  siRNA target sequence for Dhx15 (NM_007839.1,934-952).
ctgggaaattccagattta

SEQ ID NO: 483466 - DNA, 19 bp, Mus musculus
  siRNA target sequence for Dhx15 (NM_007839.1,936-954).
gggaaattccagatttact

SEQ ID NO: 483467 - DNA, 19 bp, Mus musculus
  siRNA target sequence for Dhx15 (NM_007839.1,945-963).
cagatttactttgataact

SEQ ID NO: 483468 - DNA, 19 bp, Mus musculus
  siRNA target sequence for Dhx15 (NM_007839.1,947-965).
gatttactttgataactgt

SEQ ID NO: 483469 - DNA, 19 bp, Mus musculus
  siRNA target sequence for Dhx15 (NM_007839.1,1054-1072).
ggacagtgatccaaataca

SEQ ID NO: 483470 - DNA, 19 bp, Mus musculus
  siRNA target sequence for Dhx15 (NM_007839.1,1095-1113).
gaccttcttcttttcttga

SEQ ID NO: 483471 - DNA, 19 bp, Mus musculus
  siRNA target sequence for Dhx15 (NM_007839.1,1145-1163).
gagaataaagcgtgaagtt

SEQ ID NO: 483472 - DNA, 19 bp, Mus musculus
  siRNA target sequence for Dhx15 (NM_007839.1,1147-1165).
gaataaagcgtgaagttga

SEQ ID NO: 483473 - DNA, 19 bp, Mus musculus
  siRNA target sequence for Dhx15 (NM_007839.1,1174-1192).
gccctgaagttggtgatat

SEQ ID NO: 483474 - DNA, 19 bp, Mus musculus
  siRNA target sequence for Dhx15 (NM_007839.1,1295-1313).
ggtggtgtcaactaatatt

SEQ ID NO: 483475 - DNA, 19 bp, Mus musculus
  siRNA target sequence for Dhx15 (NM_007839.1,1298-1316).
ggtgtcaactaatattgca

SEQ ID NO: 483476 - DNA, 19 bp, Mus musculus
  siRNA target sequence for Dhx15 (NM_007839.1,1314-1332).
gcagagacctctttgacaa

SEQ ID NO: 483477 - DNA, 19 bp, Mus musculus
  siRNA target sequence for Dhx15 (NM_007839.1,1315-1333).
cagagacctctttgacaat

SEQ ID NO: 483478 - DNA, 19 bp, Mus musculus
  siRNA target sequence for Dhx15 (NM_007839.1,1337-1355).
cggtgtggtgtttgtaatt

SEQ ID NO: 483479 - DNA, 19 bp, Mus musculus
  siRNA target sequence for Dhx15 (NM_007839.1,1358-1376).
ccctggatttgcaaaacaa

SEQ ID NO: 483480 - DNA, 19 bp, Mus musculus
  siRNA target sequence for Dhx15 (NM_007839.1,1359-1377).
cctggatttgcaaaacaaa

SEQ ID NO: 483481 - DNA, 19 bp, Mus musculus
  siRNA target sequence for Dhx15 (NM_007839.1,1363-1381).
gatttgcaaaacaaaaggt

SEQ ID NO: 483482 - DNA, 19 bp, Mus musculus
  siRNA target sequence for Dhx15 (NM_007839.1,1380-1398).
gtatataatcctagaatca

SEQ ID NO: 483483 - DNA, 19 bp, Mus musculus
  siRNA target sequence for Dhx15 (NM_007839.1,1415-1433).
ggtgactgccattagtaaa

SEQ ID NO: 483484 - DNA, 19 bp, Mus musculus
  siRNA target sequence for Dhx15 (NM_007839.1,1547-1565).
gatcctgcgctctaaccta

SEQ ID NO: 483485 - DNA, 19 bp, Mus musculus
  siRNA target sequence for Dhx15 (NM_007839.1,1583-1601).
gctgaagaagcttggtatt

SEQ ID NO: 483486 - DNA, 19 bp, Mus musculus
  siRNA target sequence for Dhx15 (NM_007839.1,1586-1604).
gaagaagcttggtattgat

SEQ ID NO: 483487 - DNA, 19 bp, Mus musculus
  siRNA target sequence for Dhx15 (NM_007839.1,1605-1623).
gacttggtacactttgatt

SEQ ID NO: 483488 - DNA, 19 bp, Mus musculus
  siRNA target sequence for Dhx15 (NM_007839.1,1746-1764).
gatccacagctcgctaaaa

SEQ ID NO: 483489 - DNA, 19 bp, Mus musculus
  siRNA target sequence for Dhx15 (NM_007839.1,1750-1768).
cacagctcgctaaaatggt

SEQ ID NO: 483490 - DNA, 19 bp, Mus musculus
  siRNA target sequence for Dhx15 (NM_007839.1,1752-1770).
cagctcgctaaaatggtta

SEQ ID NO: 483491 - DNA, 19 bp, Mus musculus
  siRNA target sequence for Dhx15 (NM_007839.1,1754-1772).
gctcgctaaaatggttatt

SEQ ID NO: 483492 - DNA, 19 bp, Mus musculus
  siRNA target sequence for Dhx15 (NM_007839.1,1757-1775).
cgctaaaatggttattgca

SEQ ID NO: 483493 - DNA, 19 bp, Mus musculus
  siRNA target sequence for Dhx15 (NM_007839.1,1773-1791).
gcaagttgtgactacaact

SEQ ID NO: 483494 - DNA, 19 bp, Mus musculus
  siRNA target sequence for Dhx15 (NM_007839.1,1795-1813).
ctaatgaggtcctatctat

SEQ ID NO: 483495 - DNA, 19 bp, Mus musculus
  siRNA target sequence for Dhx15 (NM_007839.1,1872-1890).
gcagatgaggccaagatga

SEQ ID NO: 483496 - DNA, 19 bp, Mus musculus
  siRNA target sequence for Dhx15 (NM_007839.1,1875-1893).
gatgaggccaagatgagat

SEQ ID NO: 483497 - DNA, 19 bp, Mus musculus
  siRNA target sequence for Dhx15 (NM_007839.1,1934-1952).
ctaccacgcttttaaacaa

SEQ ID NO: 483498 - DNA, 19 bp, Mus musculus
  siRNA target sequence for Dhx15 (NM_007839.1,1937-1955).
ccacgcttttaaacaaaat

SEQ ID NO: 483499 - DNA, 19 bp, Mus musculus
  siRNA target sequence for Dhx15 (NM_007839.1,1963-1981).
ctgttcagtggtgttatga

SEQ ID NO: 483500 - DNA, 19 bp, Mus musculus
  siRNA target sequence for Dhx15 (NM_007839.1,1972-1990).
ggtgttatgacaacttcat

SEQ ID NO: 483501 - DNA, 19 bp, Mus musculus
  siRNA target sequence for Dhx15 (NM_007839.1,1973-1991).
gtgttatgacaacttcatt

SEQ ID NO: 483502 - DNA, 19 bp, Mus musculus
  siRNA target sequence for Dhx15 (NM_007839.1,1975-1993).
gttatgacaacttcattaa

SEQ ID NO: 483503 - DNA, 19 bp, Mus musculus
  siRNA target sequence for Dhx15 (NM_007839.1,2025-2043).
cgccagcagctatcaagaa

SEQ ID NO: 483504 - DNA, 19 bp, Mus musculus
  siRNA target sequence for Dhx15 (NM_007839.1,2026-2044).
gccagcagctatcaagaat

SEQ ID NO: 483505 - DNA, 19 bp, Mus musculus
  siRNA target sequence for Dhx15 (NM_007839.1,2063-2081).
gcctcgtcgaagtactgat

SEQ ID NO: 483506 - DNA, 19 bp, Mus musculus
  siRNA target sequence for Dhx15 (NM_007839.1,2064-2082).
cctcgtcgaagtactgatt

SEQ ID NO: 483507 - DNA, 19 bp, Mus musculus
  siRNA target sequence for Dhx15 (NM_007839.1,2065-2083).
ctcgtcgaagtactgattt

SEQ ID NO: 483508 - DNA, 19 bp, Mus musculus
  siRNA target sequence for Dhx15 (NM_007839.1,2067-2085).
cgtcgaagtactgatttca

SEQ ID NO: 483509 - DNA, 19 bp, Mus musculus
  siRNA target sequence for Dhx15 (NM_007839.1,2086-2104).
caagcagggactattatat

SEQ ID NO: 483510 - DNA, 19 bp, Mus musculus
  siRNA target sequence for Dhx15 (NM_007839.1,2089-2107).
gcagggactattatattaa

SEQ ID NO: 483511 - DNA, 19 bp, Mus musculus
  siRNA target sequence for Dhx15 (NM_007839.1,2141-2159).
gcaagtggcacatttagaa

SEQ ID NO: 483512 - DNA, 19 bp, Mus musculus
  siRNA target sequence for Dhx15 (NM_007839.1,2157-2175).
gaacgaacggggcattatt

SEQ ID NO: 483513 - DNA, 19 bp, Mus musculus
  siRNA target sequence for Dhx15 (NM_007839.1,2160-2178).
cgaacggggcattatttaa

SEQ ID NO: 483514 - DNA, 19 bp, Mus musculus
  siRNA target sequence for Dhx15 (NM_007839.1,2164-2182).
cggggcattatttaactgt

SEQ ID NO: 483515 - DNA, 19 bp, Mus musculus
  siRNA target sequence for Dhx15 (NM_007839.1,2234-2252).
gcctgaatgggtgctttat

SEQ ID NO: 483516 - DNA, 19 bp, Mus musculus
  siRNA target sequence for Dhx15 (NM_007839.1,2264-2282).
gctgacgacaaagaattat

SEQ ID NO: 483517 - DNA, 19 bp, Mus musculus
  siRNA target sequence for Dhx15 (NM_007839.1,2265-2283).
ctgacgacaaagaattata

SEQ ID NO: 483518 - DNA, 19 bp, Mus musculus
  siRNA target sequence for Dhx15 (NM_007839.1,2286-2304).
cggacatgtacagatatca

SEQ ID NO: 483519 - DNA, 19 bp, Mus musculus
  siRNA target sequence for Dhx15 (NM_007839.1,2298-2316).
gatatcaagccagaatgtt

SEQ ID NO: 483520 - DNA, 19 bp, Mus musculus
  siRNA target sequence for Dhx16 (NM_026987.1,355-373).
cgagccctgctagagaaaa

SEQ ID NO: 483521 - DNA, 19 bp, Mus musculus
  siRNA target sequence for Dhx16 (NM_026987.1,367-385).
gagaaaaaccgttcttata

SEQ ID NO: 483522 - DNA, 19 bp, Mus musculus
  siRNA target sequence for Dhx16 (NM_026987.1,540-558).
ggcaggggggagtaaatca

SEQ ID NO: 483523 - DNA, 19 bp, Mus musculus
  siRNA target sequence for Dhx16 (NM_026987.1,688-706).
gtcctggaacggtcagata

SEQ ID NO: 483524 - DNA, 19 bp, Mus musculus
  siRNA target sequence for Dhx16 (NM_026987.1,691-709).
ctggaacggtcagataaga

SEQ ID NO: 483525 - DNA, 19 bp, Mus musculus
  siRNA target sequence for Dhx16 (NM_026987.1,809-827).
cgaagcgggagcgagaaaa

SEQ ID NO: 483526 - DNA, 19 bp, Mus musculus
  siRNA target sequence for Dhx16 (NM_026987.1,901-919).
cgcagggagctcaagtaca

SEQ ID NO: 483527 - DNA, 19 bp, Mus musculus
  siRNA target sequence for Dhx16 (NM_026987.1,972-990).
gaagctggaggccactaat

SEQ ID NO: 483528 - DNA, 19 bp, Mus musculus
  siRNA target sequence for Dhx16 (NM_026987.1,1410-1428).
ctttgaggagggttacaca

SEQ ID NO: 483529 - DNA, 19 bp, Mus musculus
  siRNA target sequence for Dhx16 (NM_026987.1,1414-1432).
gaggagggttacacaaaga

SEQ ID NO: 483530 - DNA, 19 bp, Mus musculus
  siRNA target sequence for Dhx16 (NM_026987.1,1688-1706).
cagacattctctttggatt

SEQ ID NO: 483531 - DNA, 19 bp, Mus musculus
  siRNA target sequence for Dhx16 (NM_026987.1,1798-1816).
gacgcccctgtcttcagaa

SEQ ID NO: 483532 - DNA, 19 bp, Mus musculus
  siRNA target sequence for Dhx16 (NM_026987.1,1826-1844).
gcaggtttccagttgacat

SEQ ID NO: 483533 - DNA, 19 bp, Mus musculus
  siRNA target sequence for Dhx16 (NM_026987.1,1834-1852).
ccagttgacatcttctata

SEQ ID NO: 483534 - DNA, 19 bp, Mus musculus
  siRNA target sequence for Dhx16 (NM_026987.1,1917-1935).
ccagccccctggagatata

SEQ ID NO: 483535 - DNA, 19 bp, Mus musculus
  siRNA target sequence for Dhx16 (NM_026987.1,2422-2440).
gacctgatgcactttgact

SEQ ID NO: 483536 - DNA, 19 bp, Mus musculus
  siRNA target sequence for Dhx16 (NM_026987.1,2475-2493).
ggctttggagcagctttat

SEQ ID NO: 483537 - DNA, 19 bp, Mus musculus
  siRNA target sequence for Dhx16 (NM_026987.1,2528-2546).
ccacgtctggtcgaaagat

SEQ ID NO: 483538 - DNA, 19 bp, Mus musculus
  siRNA target sequence for Dhx16 (NM_026987.1,2586-2604).
cttggcctccgagaagtat

SEQ ID NO: 483539 - DNA, 19 bp, Mus musculus
  siRNA target sequence for Dhx16 (NM_026987.1,2590-2608).
gcctccgagaagtatagct

SEQ ID NO: 483540 - DNA, 19 bp, Mus musculus
  siRNA target sequence for Dhx16 (NM_026987.1,2733-2751).
ccacctggttctgctaaat

SEQ ID NO: 483541 - DNA, 19 bp, Mus musculus
  siRNA target sequence for Dhx16 (NM_026987.1,2786-2804).
cccaatggtgctatgaaaa

SEQ ID NO: 483542 - DNA, 19 bp, Mus musculus
  siRNA target sequence for Dhx16 (NM_026987.1,2875-2893).
gtggaagttggcttgactt

SEQ ID NO: 483543 - DNA, 19 bp, Mus musculus
  siRNA target sequence for Dhx16 (NM_026987.1,2926-2944).
gccatcacttcgggttatt

SEQ ID NO: 483544 - DNA, 19 bp, Mus musculus
  siRNA target sequence for Dhx16 (NM_026987.1,2928-2946).
catcacttcgggttatttt

SEQ ID NO: 483545 - DNA, 19 bp, Mus musculus
  siRNA target sequence for Dhx16 (NM_026987.1,2933-2951).
cttcgggttatttttacca

SEQ ID NO: 483546 - DNA, 19 bp, Mus musculus
  siRNA target sequence for Dhx16 (NM_026987.1,3133-3151).
gtggctccccactactata

SEQ ID NO: 483547 - DNA, 19 bp, Mus musculus
  siRNA target sequence for Dhx16 (NM_026987.1,3169-3187).
gatccccatgctaagaaaa

SEQ ID NO: 483548 - DNA, 19 bp, Mus musculus
  siRNA target sequence for Dhx29 (NM_172594.1,511-529).
gtgaagcaaggtccaaaaa

SEQ ID NO: 483549 - DNA, 19 bp, Mus musculus
  siRNA target sequence for Dhx29 (NM_172594.1,557-575).
ccggtggctctgcaaatct

SEQ ID NO: 483550 - DNA, 19 bp, Mus musculus
  siRNA target sequence for Dhx29 (NM_172594.1,597-615).
ggtgattaacaataaacta

SEQ ID NO: 483551 - DNA, 19 bp, Mus musculus
  siRNA target sequence for Dhx29 (NM_172594.1,623-641).
ggattatcggagtgatcaa

SEQ ID NO: 483552 - DNA, 19 bp, Mus musculus
  siRNA target sequence for Dhx29 (NM_172594.1,624-642).
gattatcggagtgatcaat

SEQ ID NO: 483553 - DNA, 19 bp, Mus musculus
  siRNA target sequence for Dhx29 (NM_172594.1,683-701).
gaagactgtcggctaagaa

SEQ ID NO: 483554 - DNA, 19 bp, Mus musculus
  siRNA target sequence for Dhx29 (NM_172594.1,722-740).
ctttacaagcgttttcctt

SEQ ID NO: 483555 - DNA, 19 bp, Mus musculus
  siRNA target sequence for Dhx29 (NM_172594.1,810-828).
ggactggctctgcttaaat

SEQ ID NO: 483556 - DNA, 19 bp, Mus musculus
  siRNA target sequence for Dhx29 (NM_172594.1,884-902).
ctaaaagcaggccaaaatt

SEQ ID NO: 483557 - DNA, 19 bp, Mus musculus
  siRNA target sequence for Dhx29 (NM_172594.1,913-931).
caaatacaggctactcttt

SEQ ID NO: 483558 - DNA, 19 bp, Mus musculus
  siRNA target sequence for Dhx29 (NM_172594.1,1001-1019).
caaccgtggaggtgaatat

SEQ ID NO: 483559 - DNA, 19 bp, Mus musculus
  siRNA target sequence for Dhx29 (NM_172594.1,1026-1044).
gtggattttgagatatgct

SEQ ID NO: 483560 - DNA, 19 bp, Mus musculus
  siRNA target sequence for Dhx29 (NM_172594.1,1065-1083).
gaagggcgagggctctaaa

SEQ ID NO: 483561 - DNA, 19 bp, Mus musculus
  siRNA target sequence for Dhx33 (NM_178367.2,113-131).
ccgggagacgagtagtgat

SEQ ID NO: 483562 - DNA, 19 bp, Mus musculus
  siRNA target sequence for Dhx33 (NM_178367.2,550-568).
cttctgcgtgaagcaattt

SEQ ID NO: 483563 - DNA, 19 bp, Mus musculus
  siRNA target sequence for Dhx33 (NM_178367.2,616-634).
catgagcggactattcaca

SEQ ID NO: 483564 - DNA, 19 bp, Mus musculus
  siRNA target sequence for Dhx33 (NM_178367.2,729-747).
ggatgtcgacctgttttct

SEQ ID NO: 483565 - DNA, 19 bp, Mus musculus
  siRNA target sequence for Dhx33 (NM_178367.2,1064-1082).
gctatcgcaaagtgatcat

SEQ ID NO: 483566 - DNA, 19 bp, Mus musculus
  siRNA target sequence for Dhx33 (NM_178367.2,1065-1083).
ctatcgcaaagtgatcatt

SEQ ID NO: 483567 - DNA, 19 bp, Mus musculus
  siRNA target sequence for Dhx33 (NM_178367.2,1069-1087).
cgcaaagtgatcatttcaa

SEQ ID NO: 483568 - DNA, 19 bp, Mus musculus
  siRNA target sequence for Dhx33 (NM_178367.2,1099-1117).
gaaacctccataaccatta

SEQ ID NO: 483569 - DNA, 19 bp, Mus musculus
  siRNA target sequence for Dhx33 (NM_178367.2,1118-1136).
caggaataaaatatgtagt

SEQ ID NO: 483570 - DNA, 19 bp, Mus musculus
  siRNA target sequence for Dhx33 (NM_178367.2,1135-1153).
gttgacacgggcatggtta

SEQ ID NO: 483571 - DNA, 19 bp, Mus musculus
  siRNA target sequence for Dhx33 (NM_178367.2,1140-1158).
cacgggcatggttaaagca

SEQ ID NO: 483572 - DNA, 19 bp, Mus musculus
  siRNA target sequence for Dhx33 (NM_178367.2,1142-1160).
cgggcatggttaaagcaaa

SEQ ID NO: 483573 - DNA, 19 bp, Mus musculus
  siRNA target sequence for Dhx33 (NM_178367.2,1149-1167).
ggttaaagcaaagaagtat

SEQ ID NO: 483574 - DNA, 19 bp, Mus musculus
  siRNA target sequence for Dhx33 (NM_178367.2,1192-1210).
ctagctgtacagagagtat

SEQ ID NO: 483575 - DNA, 19 bp, Mus musculus
  siRNA target sequence for Dhx33 (NM_178367.2,1195-1213).
gctgtacagagagtatcaa

SEQ ID NO: 483576 - DNA, 19 bp, Mus musculus
  siRNA target sequence for Dhx33 (NM_178367.2,1341-1359).
cctggccagtgtaatactt

SEQ ID NO: 483577 - DNA, 19 bp, Mus musculus
  siRNA target sequence for Dhx33 (NM_178367.2,1370-1388).
caatgaaagtcccaaatgt

SEQ ID NO: 483578 - DNA, 19 bp, Mus musculus
  siRNA target sequence for Dhx33 (NM_178367.2,1399-1417).
gacttcatgtccaaacctt

SEQ ID NO: 483579 - DNA, 19 bp, Mus musculus
  siRNA target sequence for Dhx33 (NM_178367.2,1415-1433).
cttctccagatcacattga

SEQ ID NO: 483580 - DNA, 19 bp, Mus musculus
  siRNA target sequence for Dhx33 (NM_178367.2,1488-1506).
gcttaccctgactccaatt

SEQ ID NO: 483581 - DNA, 19 bp, Mus musculus
  siRNA target sequence for Dhx33 (NM_178367.2,1536-1554).
gcccagatttgccaaaact

SEQ ID NO: 483582 - DNA, 19 bp, Mus musculus
  siRNA target sequence for Dhx33 (NM_178367.2,1537-1555).
cccagatttgccaaaacta

SEQ ID NO: 483583 - DNA, 19 bp, Mus musculus
  siRNA target sequence for Dhx33 (NM_178367.2,1538-1556).
ccagatttgccaaaactat

SEQ ID NO: 483584 - DNA, 19 bp, Mus musculus
  siRNA target sequence for Dhx33 (NM_178367.2,1575-1593).
ccactgtaccgaagagatt

SEQ ID NO: 483585 - DNA, 19 bp, Mus musculus
  siRNA target sequence for Dhx33 (NM_178367.2,1588-1606).
gagattctgaccatagtct

SEQ ID NO: 483586 - DNA, 19 bp, Mus musculus
  siRNA target sequence for Dhx33 (NM_178367.2,1662-1680).
gcagagtgtccggaagaaa

SEQ ID NO: 483587 - DNA, 19 bp, Mus musculus
  siRNA target sequence for Dhx33 (NM_178367.2,1663-1681).
cagagtgtccggaagaaat

SEQ ID NO: 483588 - DNA, 19 bp, Mus musculus
  siRNA target sequence for Dhx33 (NM_178367.2,1667-1685).
gtgtccggaagaaattcat

SEQ ID NO: 483589 - DNA, 19 bp, Mus musculus
  siRNA target sequence for Dhx33 (NM_178367.2,1669-1687).
gtccggaagaaattcatat

SEQ ID NO: 483590 - DNA, 19 bp, Mus musculus
  siRNA target sequence for Dhx33 (NM_178367.2,1707-1725).
caccctgctcaatatctat

SEQ ID NO: 483591 - DNA, 19 bp, Mus musculus
  siRNA target sequence for Dhx33 (NM_178367.2,1760-1778).
ggtgcaaagagaattttgt

SEQ ID NO: 483592 - DNA, 19 bp, Mus musculus
  siRNA target sequence for Dhx33 (NM_178367.2,1763-1781).
gcaaagagaattttgtcaa

SEQ ID NO: 483593 - DNA, 19 bp, Mus musculus
  siRNA target sequence for Dhx33 (NM_178367.2,1822-1840).
ctgagagaaatctgcttaa

SEQ ID NO: 483594 - DNA, 19 bp, Mus musculus
  siRNA target sequence for Dhx33 (NM_178367.2,1903-1921).
cacagcctctttatgaata

SEQ ID NO: 483595 - DNA, 19 bp, Mus musculus
  siRNA target sequence for Dhx33 (NM_178367.2,1905-1923).
cagcctctttatgaatact

SEQ ID NO: 483596 - DNA, 19 bp, Mus musculus
  siRNA target sequence for Dhx33 (NM_178367.2,2038-2056).
ctgctctacaccaacaaat

SEQ ID NO: 483597 - DNA, 19 bp, Mus musculus
  siRNA target sequence for Dhx33 (NM_178367.2,2041-2059).
ctctacaccaacaaatgct

SEQ ID NO: 483598 - DNA, 19 bp, Mus musculus
  siRNA target sequence for Dhx33 (NM_178367.2,2104-2122).
gctgcccctgactacttca

SEQ ID NO: 483599 - DNA, 19 bp, Mus musculus
  siRNA target sequence for Dhx34 (NM_027883.1,372-390).
gaaatgggactggaattgt

SEQ ID NO: 483600 - DNA, 19 bp, Mus musculus
  siRNA target sequence for Dhx34 (NM_027883.1,423-441).
cttccgcgatgaggattat

SEQ ID NO: 483601 - DNA, 19 bp, Mus musculus
  siRNA target sequence for Dhx34 (NM_027883.1,575-593).
ctgacctacctctcactta

SEQ ID NO: 483602 - DNA, 19 bp, Mus musculus
  siRNA target sequence for Dhx34 (NM_027883.1,690-708).
gttccgccgtgcattgctt

SEQ ID NO: 483603 - DNA, 19 bp, Mus musculus
  siRNA target sequence for Dhx34 (NM_027883.1,1144-1162).
cgacacctgcacaatgact

SEQ ID NO: 483604 - DNA, 19 bp, Mus musculus
  siRNA target sequence for Dhx34 (NM_027883.1,1395-1413).
ggccatcgacaataagtat

SEQ ID NO: 483605 - DNA, 19 bp, Mus musculus
  siRNA target sequence for Dhx34 (NM_027883.1,1788-1806).
cgtctgctaccgtctctat

SEQ ID NO: 483606 - DNA, 19 bp, Mus musculus
  siRNA target sequence for Dhx34 (NM_027883.1,1803-1821).
ctatgccgagtctgactat

SEQ ID NO: 483607 - DNA, 19 bp, Mus musculus
  siRNA target sequence for Dhx34 (NM_027883.1,1876-1894).
ctggtgcttcagatgaaga

SEQ ID NO: 483608 - DNA, 19 bp, Mus musculus
  siRNA target sequence for Dhx34 (NM_027883.1,2041-2059).
ctgcctgtagatgttgtaa

SEQ ID NO: 483609 - DNA, 19 bp, Mus musculus
  siRNA target sequence for Dhx34 (NM_027883.1,2043-2061).
gcctgtagatgttgtaatt

SEQ ID NO: 483610 - DNA, 19 bp, Mus musculus
  siRNA target sequence for Dhx34 (NM_027883.1,2573-2591).
gggctgacagcgttgacat

SEQ ID NO: 483611 - DNA, 19 bp, Mus musculus
  siRNA target sequence for Dhx34 (NM_027883.1,2728-2746).
gtgcccgatgcgttcaaca

SEQ ID NO: 483612 - DNA, 19 bp, Mus musculus
  siRNA target sequence for Dhx34 (NM_027883.1,3416-3434).
gctacgctgtctctgatta

SEQ ID NO: 483613 - DNA, 19 bp, Mus musculus
  siRNA target sequence for Dhx34 (NM_027883.1,3417-3435).
ctacgctgtctctgattat

SEQ ID NO: 483614 - DNA, 19 bp, Mus musculus
  siRNA target sequence for Dhx34 (NM_027883.1,3430-3448).
gattatctcacctacaact

SEQ ID NO: 483615 - DNA, 19 bp, Mus musculus
  siRNA target sequence for Dhx35 (NM_145742.1,78-96).
gcccttgggaccagtgaaa

SEQ ID NO: 483616 - DNA, 19 bp, Mus musculus
  siRNA target sequence for Dhx35 (NM_145742.1,79-97).
cccttgggaccagtgaaat

SEQ ID NO: 483617 - DNA, 19 bp, Mus musculus
  siRNA target sequence for Dhx35 (NM_145742.1,167-185).
ctgggacaaccatcattta

SEQ ID NO: 483618 - DNA, 19 bp, Mus musculus
  siRNA target sequence for Dhx35 (NM_145742.1,190-208).
ccctacgctgccctttcta

SEQ ID NO: 483619 - DNA, 19 bp, Mus musculus
  siRNA target sequence for Dhx35 (NM_145742.1,191-209).
cctacgctgccctttctat

SEQ ID NO: 483620 - DNA, 19 bp, Mus musculus
  siRNA target sequence for Dhx35 (NM_145742.1,192-210).
ctacgctgccctttctata

SEQ ID NO: 483621 - DNA, 19 bp, Mus musculus
  siRNA target sequence for Dhx35 (NM_145742.1,229-247).
ctgcccgtgttcaagctta

SEQ ID NO: 483622 - DNA, 19 bp, Mus musculus
  siRNA target sequence for Dhx35 (NM_145742.1,233-251).
ccgtgttcaagcttaggaa

SEQ ID NO: 483623 - DNA, 19 bp, Mus musculus
  siRNA target sequence for Dhx35 (NM_145742.1,244-262).
cttaggaaccacattttgt

SEQ ID NO: 483624 - DNA, 19 bp, Mus musculus
  siRNA target sequence for Dhx35 (NM_145742.1,261-279).
gtacttggtagaaaactat

SEQ ID NO: 483625 - DNA, 19 bp, Mus musculus
  siRNA target sequence for Dhx35 (NM_145742.1,446-464).
cagtgctgggccatgaagt

SEQ ID NO: 483626 - DNA, 19 bp, Mus musculus
  siRNA target sequence for Dhx35 (NM_145742.1,457-475).
catgaagtgggctactgta

SEQ ID NO: 483627 - DNA, 19 bp, Mus musculus
  siRNA target sequence for Dhx35 (NM_145742.1,555-573).
ggtggatccgctgttaaca

SEQ ID NO: 483628 - DNA, 19 bp, Mus musculus
  siRNA target sequence for Dhx35 (NM_145742.1,556-574).
gtggatccgctgttaacaa

SEQ ID NO: 483629 - DNA, 19 bp, Mus musculus
  siRNA target sequence for Dhx35 (NM_145742.1,558-576).
ggatccgctgttaacaaaa

SEQ ID NO: 483630 - DNA, 19 bp, Mus musculus
  siRNA target sequence for Dhx35 (NM_145742.1,559-577).
gatccgctgttaacaaaat

SEQ ID NO: 483631 - DNA, 19 bp, Mus musculus
  siRNA target sequence for Dhx35 (NM_145742.1,562-580).
ccgctgttaacaaaatata

SEQ ID NO: 483632 - DNA, 19 bp, Mus musculus
  siRNA target sequence for Dhx35 (NM_145742.1,668-686).
gggatcttcgcttgattgt

SEQ ID NO: 483633 - DNA, 19 bp, Mus musculus
  siRNA target sequence for Dhx35 (NM_145742.1,783-801).
ggaaggacggacatttcca

SEQ ID NO: 483634 - DNA, 19 bp, Mus musculus
  siRNA target sequence for Dhx35 (NM_145742.1,791-809).
ggacatttccagtggatat

SEQ ID NO: 483635 - DNA, 19 bp, Mus musculus
  siRNA target sequence for Dhx35 (NM_145742.1,827-845).
ctgttccagattatatcaa

SEQ ID NO: 483636 - DNA, 19 bp, Mus musculus
  siRNA target sequence for Dhx35 (NM_145742.1,860-878).
ccgtggtaaaaattcatca

SEQ ID NO: 483637 - DNA, 19 bp, Mus musculus
  siRNA target sequence for Dhx35 (NM_145742.1,935-953).
ctgttgtgtccatgttgat

SEQ ID NO: 483638 - DNA, 19 bp, Mus musculus
  siRNA target sequence for Dhx35 (NM_145742.1,999-1017).
ccgggtcctccccatgtat

SEQ ID NO: 483639 - DNA, 19 bp, Mus musculus
  siRNA target sequence for Dhx35 (NM_145742.1,1105-1123).
gagacttccatcacaatca

SEQ ID NO: 483640 - DNA, 19 bp, Mus musculus
  siRNA target sequence for Dhx35 (NM_145742.1,1176-1194).
ccccaggacagctattgaa

SEQ ID NO: 483641 - DNA, 19 bp, Mus musculus
  siRNA target sequence for Dhx35 (NM_145742.1,1181-1199).
ggacagctattgaatgctt

SEQ ID NO: 483642 - DNA, 19 bp, Mus musculus
  siRNA target sequence for Dhx35 (NM_145742.1,1257-1275).
caaccgctcgggaaagtgt

SEQ ID NO: 483643 - DNA, 19 bp, Mus musculus
  siRNA target sequence for Dhx35 (NM_145742.1,1272-1290).
gtgttatcgcctttacaca

SEQ ID NO: 483644 - DNA, 19 bp, Mus musculus
  siRNA target sequence for Dhx35 (NM_145742.1,1330-1348).
gagatgcagcgcagcaatt

SEQ ID NO: 483645 - DNA, 19 bp, Mus musculus
  siRNA target sequence for Dhx35 (NM_145742.1,1355-1373).
ccgtcatcctgcagctaaa

SEQ ID NO: 483646 - DNA, 19 bp, Mus musculus
  siRNA target sequence for Dhx35 (NM_145742.1,1356-1374).
cgtcatcctgcagctaaaa

SEQ ID NO: 483647 - DNA, 19 bp, Mus musculus
  siRNA target sequence for Dhx35 (NM_145742.1,1376-1394).
ccctagggatagacaatgt

SEQ ID NO: 483648 - DNA, 19 bp, Mus musculus
  siRNA target sequence for Dhx35 (NM_145742.1,1498-1516).
gagcctcttggcatgagaa

SEQ ID NO: 483649 - DNA, 19 bp, Mus musculus
  siRNA target sequence for Dhx35 (NM_145742.1,1509-1527).
catgagaattgcagagttt

SEQ ID NO: 483650 - DNA, 19 bp, Mus musculus
  siRNA target sequence for Dhx35 (NM_145742.1,1664-1682).
ctcgagtgcaccggaaatt

SEQ ID NO: 483651 - DNA, 19 bp, Mus musculus
  siRNA target sequence for Dhx35 (NM_145742.1,1707-1725).
caccatgctcaatgtgtat

SEQ ID NO: 483652 - DNA, 19 bp, Mus musculus
  siRNA target sequence for Dhx35 (NM_145742.1,1720-1738).
gtgtatgaagcgtttatca

SEQ ID NO: 483653 - DNA, 19 bp, Mus musculus
  siRNA target sequence for Dhx35 (NM_145742.1,1722-1740).
gtatgaagcgtttatcaaa

SEQ ID NO: 483654 - DNA, 19 bp, Mus musculus
  siRNA target sequence for Dhx35 (NM_145742.1,1730-1748).
cgtttatcaaacacaacaa

SEQ ID NO: 483655 - DNA, 19 bp, Mus musculus
  siRNA target sequence for Dhx35 (NM_145742.1,1765-1783).
caggagcatttcctgaatt

SEQ ID NO: 483656 - DNA, 19 bp, Mus musculus
  siRNA target sequence for Dhx35 (NM_145742.1,1808-1826).
ccgtgagagaccagttgaa

SEQ ID NO: 483657 - DNA, 19 bp, Mus musculus
  siRNA target sequence for Dhx35 (NM_145742.1,1810-1828).
gtgagagaccagttgaaaa

SEQ ID NO: 483658 - DNA, 19 bp, Mus musculus
  siRNA target sequence for Dhx35 (NM_145742.1,1896-1914).
catcgtgtcggggttcttt

SEQ ID NO: 483659 - DNA, 19 bp, Mus musculus
  siRNA target sequence for Dhx35 (NM_145742.1,1943-1961).
gagcctatcgggttatcta

SEQ ID NO: 483660 - DNA, 19 bp, Mus musculus
  siRNA target sequence for Dhx35 (NM_145742.1,1946-1964).
cctatcgggttatctacaa

SEQ ID NO: 483661 - DNA, 19 bp, Mus musculus
  siRNA target sequence for Dhx35 (NM_145742.1,1947-1965).
ctatcgggttatctacaat

SEQ ID NO: 483662 - DNA, 19 bp, Mus musculus
  siRNA target sequence for Dhx35 (NM_145742.1,1952-1970).
gggttatctacaatgaagt

SEQ ID NO: 483663 - DNA, 19 bp, Mus musculus
  siRNA target sequence for Dhx35 (NM_145742.1,1953-1971).
ggttatctacaatgaagta

SEQ ID NO: 483664 - DNA, 19 bp, Mus musculus
  siRNA target sequence for Dhx35 (NM_145742.1,1975-1993).
cagacctccaagtattaca

SEQ ID NO: 483665 - DNA, 19 bp, Mus musculus
  siRNA target sequence for Dhx35 (NM_145742.1,2032-2050).
gagctggctccccactttt

SEQ ID NO: 483666 - DNA, 19 bp, Mus musculus
  siRNA target sequence for Dhx35 (NM_145742.1,2034-2052).
gctggctccccacttttat

SEQ ID NO: 483667 - DNA, 19 bp, Mus musculus
  siRNA target sequence for Dhx35 (NM_145742.1,2039-2057).
ctccccacttttatcaaca

SEQ ID NO: 483668 - DNA, 19 bp, Mus musculus
  siRNA target sequence for Dhx36 (NM_028136.1,338-356).
gctaagactgacaaagatt

SEQ ID NO: 483669 - DNA, 19 bp, Mus musculus
  siRNA target sequence for Dhx36 (NM_028136.1,343-361).
gactgacaaagattcagaa

SEQ ID NO: 483670 - DNA, 19 bp, Mus musculus
  siRNA target sequence for Dhx36 (NM_028136.1,353-371).
gattcagaagcgcagatat

SEQ ID NO: 483671 - DNA, 19 bp, Mus musculus
  siRNA target sequence for Dhx36 (NM_028136.1,386-404).
gaggatcatgggtatggta

SEQ ID NO: 483672 - DNA, 19 bp, Mus musculus
  siRNA target sequence for Dhx36 (NM_028136.1,395-413).
gggtatggtactgaagttt

SEQ ID NO: 483673 - DNA, 19 bp, Mus musculus
  siRNA target sequence for Dhx36 (NM_028136.1,495-513).
ggatcacagacaaatcata

SEQ ID NO: 483674 - DNA, 19 bp, Mus musculus
  siRNA target sequence for Dhx36 (NM_028136.1,530-548).
gagtatttattgcaagaaa

SEQ ID NO: 483675 - DNA, 19 bp, Mus musculus
  siRNA target sequence for Dhx36 (NM_028136.1,545-563).
gaaaatgagccaaacctaa

SEQ ID NO: 483676 - DNA, 19 bp, Mus musculus
  siRNA target sequence for Dhx36 (NM_028136.1,553-571).
gccaaacctaagcttagat

SEQ ID NO: 483677 - DNA, 19 bp, Mus musculus
  siRNA target sequence for Dhx36 (NM_028136.1,559-577).
cctaagcttagatcaacat

SEQ ID NO: 483678 - DNA, 19 bp, Mus musculus
  siRNA target sequence for Dhx36 (NM_028136.1,560-578).
ctaagcttagatcaacatt

SEQ ID NO: 483679 - DNA, 19 bp, Mus musculus
  siRNA target sequence for Dhx36 (NM_028136.1,572-590).
caacatttactggaagatt

SEQ ID NO: 483680 - DNA, 19 bp, Mus musculus
  siRNA target sequence for Dhx36 (NM_028136.1,606-624).
ctgaccctcgatatataga

SEQ ID NO: 483681 - DNA, 19 bp, Mus musculus
  siRNA target sequence for Dhx36 (NM_028136.1,608-626).
gaccctcgatatatagaga

SEQ ID NO: 483682 - DNA, 19 bp, Mus musculus
  siRNA target sequence for Dhx36 (NM_028136.1,639-657).
gaaaaaagctgccttcata

SEQ ID NO: 483683 - DNA, 19 bp, Mus musculus
  siRNA target sequence for Dhx36 (NM_028136.1,667-685).
gaaggagctggtaaatcta

SEQ ID NO: 483684 - DNA, 19 bp, Mus musculus
  siRNA target sequence for Dhx36 (NM_028136.1,674-692).
ctggtaaatctaatcaata

SEQ ID NO: 483685 - DNA, 19 bp, Mus musculus
  siRNA target sequence for Dhx36 (NM_028136.1,741-759).
ctcaggttacgcagttcat

SEQ ID NO: 483686 - DNA, 19 bp, Mus musculus
  siRNA target sequence for Dhx36 (NM_028136.1,743-761).
caggttacgcagttcatct

SEQ ID NO: 483687 - DNA, 19 bp, Mus musculus
  siRNA target sequence for Dhx36 (NM_028136.1,789-807).
ggtctgcctgcagaatagt

SEQ ID NO: 483688 - DNA, 19 bp, Mus musculus
  siRNA target sequence for Dhx36 (NM_028136.1,872-890).
gagtcttgtggcaatggta

SEQ ID NO: 483689 - DNA, 19 bp, Mus musculus
  siRNA target sequence for Dhx36 (NM_028136.1,904-922).
ccagattcgtcttcaaagt

SEQ ID NO: 483690 - DNA, 19 bp, Mus musculus
  siRNA target sequence for Dhx36 (NM_028136.1,934-952).
gaaacaaggttctatctta

SEQ ID NO: 483691 - DNA, 19 bp, Mus musculus
  siRNA target sequence for Dhx36 (NM_028136.1,938-956).
caaggttctatcttatact

SEQ ID NO: 483692 - DNA, 19 bp, Mus musculus
  siRNA target sequence for Dhx36 (NM_028136.1,957-975).
gcacaacaggaatcattct

SEQ ID NO: 483693 - DNA, 19 bp, Mus musculus
  siRNA target sequence for Dhx36 (NM_028136.1,1003-1021).
gtccagtgttagtcatatt

SEQ ID NO: 483694 - DNA, 19 bp, Mus musculus
  siRNA target sequence for Dhx36 (NM_028136.1,1005-1023).
ccagtgttagtcatattgt

SEQ ID NO: 483695 - DNA, 19 bp, Mus musculus
  siRNA target sequence for Dhx36 (NM_028136.1,1008-1026).
gtgttagtcatattgtact

SEQ ID NO: 483696 - DNA, 19 bp, Mus musculus
  siRNA target sequence for Dhx36 (NM_028136.1,1049-1067).
ctacagtcggatgttttaa

SEQ ID NO: 483697 - DNA, 19 bp, Mus musculus
  siRNA target sequence for Dhx36 (NM_028136.1,1052-1070).
cagtcggatgttttaatga

SEQ ID NO: 483698 - DNA, 19 bp, Mus musculus
  siRNA target sequence for Dhx36 (NM_028136.1,1054-1072).
gtcggatgttttaatgact

SEQ ID NO: 483699 - DNA, 19 bp, Mus musculus
  siRNA target sequence for Dhx36 (NM_028136.1,1082-1100).
gatcttctccattttcgat

SEQ ID NO: 483700 - DNA, 19 bp, Mus musculus
  siRNA target sequence for Dhx36 (NM_028136.1,1098-1116).
gatctgatctcaaagtaat

SEQ ID NO: 483701 - DNA, 19 bp, Mus musculus
  siRNA target sequence for Dhx36 (NM_028136.1,1101-1119).
ctgatctcaaagtaatatt

SEQ ID NO: 483702 - DNA, 19 bp, Mus musculus
  siRNA target sequence for Dhx36 (NM_028136.1,1120-1138).
gatgagtgcaactttgaat

SEQ ID NO: 483703 - DNA, 19 bp, Mus musculus
  siRNA target sequence for Dhx36 (NM_028136.1,1135-1153).
gaatgctgagaaattttca

SEQ ID NO: 483704 - DNA, 19 bp, Mus musculus
  siRNA target sequence for Dhx36 (NM_028136.1,1139-1157).
gctgagaaattttcagaat

SEQ ID NO: 483705 - DNA, 19 bp, Mus musculus
  siRNA target sequence for Dhx36 (NM_028136.1,1164-1182).
gtaactgtccaatgataca

SEQ ID NO: 483706 - DNA, 19 bp, Mus musculus
  siRNA target sequence for Dhx36 (NM_028136.1,1181-1199).
catatacccgggtttactt

SEQ ID NO: 483707 - DNA, 19 bp, Mus musculus
  siRNA target sequence for Dhx36 (NM_028136.1,1268-1286).
catagatcccagttcaaga

SEQ ID NO: 483708 - DNA, 19 bp, Mus musculus
  siRNA target sequence for Dhx36 (NM_028136.1,1300-1318).
gggtcatgtaaatagacaa

SEQ ID NO: 483709 - DNA, 19 bp, Mus musculus
  siRNA target sequence for Dhx36 (NM_028136.1,1352-1370).
cgctggccagcgtatataa

SEQ ID NO: 483710 - DNA, 19 bp, Mus musculus
  siRNA target sequence for Dhx36 (NM_028136.1,1353-1371).
gctggccagcgtatataaa

SEQ ID NO: 483711 - DNA, 19 bp, Mus musculus
  siRNA target sequence for Dhx36 (NM_028136.1,1373-1391).
gaactgcggacaagatact

SEQ ID NO: 483712 - DNA, 19 bp, Mus musculus
  siRNA target sequence for Dhx36 (NM_028136.1,1392-1410).
ctgcaagtaccgtagatgt

SEQ ID NO: 483713 - DNA, 19 bp, Mus musculus
  siRNA target sequence for Dhx36 (NM_028136.1,1394-1412).
gcaagtaccgtagatgttt

SEQ ID NO: 483714 - DNA, 19 bp, Mus musculus
  siRNA target sequence for Dhx36 (NM_028136.1,1395-1413).
caagtaccgtagatgtttt

SEQ ID NO: 483715 - DNA, 19 bp, Mus musculus
  siRNA target sequence for Dhx36 (NM_028136.1,1398-1416).
gtaccgtagatgttttgca

SEQ ID NO: 483716 - DNA, 19 bp, Mus musculus
  siRNA target sequence for Dhx36 (NM_028136.1,1455-1473).
ctgcccttattcgatacat

SEQ ID NO: 483717 - DNA, 19 bp, Mus musculus
  siRNA target sequence for Dhx36 (NM_028136.1,1458-1476).
cccttattcgatacattgt

SEQ ID NO: 483718 - DNA, 19 bp, Mus musculus
  siRNA target sequence for Dhx36 (NM_028136.1,1459-1477).
ccttattcgatacattgtt

SEQ ID NO: 483719 - DNA, 19 bp, Mus musculus
  siRNA target sequence for Dhx36 (NM_028136.1,1521-1539).
gggacaatatcagtacttt

SEQ ID NO: 483720 - DNA, 19 bp, Mus musculus
  siRNA target sequence for Dhx36 (NM_028136.1,1567-1585).
gtttaaatcagataagttt

SEQ ID NO: 483721 - DNA, 19 bp, Mus musculus
  siRNA target sequence for Dhx36 (NM_028136.1,1575-1593).
cagataagtttctcattat

SEQ ID NO: 483722 - DNA, 19 bp, Mus musculus
  siRNA target sequence for Dhx36 (NM_028136.1,1621-1639).
caaccagacacaggtattt

SEQ ID NO: 483723 - DNA, 19 bp, Mus musculus
  siRNA target sequence for Dhx36 (NM_028136.1,1650-1668).
ctcccggtgttcggaaaat

SEQ ID NO: 483724 - DNA, 19 bp, Mus musculus
  siRNA target sequence for Dhx36 (NM_028136.1,1653-1671).
ccggtgttcggaaaatagt

SEQ ID NO: 483725 - DNA, 19 bp, Mus musculus
  siRNA target sequence for Dhx36 (NM_028136.1,1654-1672).
cggtgttcggaaaatagta

SEQ ID NO: 483726 - DNA, 19 bp, Mus musculus
  siRNA target sequence for Dhx36 (NM_028136.1,1655-1673).
ggtgttcggaaaatagtaa

SEQ ID NO: 483727 - DNA, 19 bp, Mus musculus
  siRNA target sequence for Dhx36 (NM_028136.1,1656-1674).
gtgttcggaaaatagtaat

SEQ ID NO: 483728 - DNA, 19 bp, Mus musculus
  siRNA target sequence for Dhx36 (NM_028136.1,1661-1679).
cggaaaatagtaattgcta

SEQ ID NO: 483729 - DNA, 19 bp, Mus musculus
  siRNA target sequence for Dhx36 (NM_028136.1,1693-1711).
gactagcatcaccatagat

SEQ ID NO: 483730 - DNA, 19 bp, Mus musculus
  siRNA target sequence for Dhx36 (NM_028136.1,1695-1713).
ctagcatcaccatagatga

SEQ ID NO: 483731 - DNA, 19 bp, Mus musculus
  siRNA target sequence for Dhx36 (NM_028136.1,1795-1813).
gtgggttagtaaagctaat

SEQ ID NO: 483732 - DNA, 19 bp, Mus musculus
  siRNA target sequence for Dhx36 (NM_028136.1,1844-1862).
gttcagcctggtcattgtt

SEQ ID NO: 483733 - DNA, 19 bp, Mus musculus
  siRNA target sequence for Dhx36 (NM_028136.1,1854-1872).
gtcattgttatcatctgta

SEQ ID NO: 483734 - DNA, 19 bp, Mus musculus
  siRNA target sequence for Dhx36 (NM_028136.1,1884-1902).
gagcaagtcttctagatga

SEQ ID NO: 483735 - DNA, 19 bp, Mus musculus
  siRNA target sequence for Dhx36 (NM_028136.1,1887-1905).
caagtcttctagatgacta

SEQ ID NO: 483736 - DNA, 19 bp, Mus musculus
  siRNA target sequence for Dhx36 (NM_028136.1,1910-1928).
ctaccagaaattttgagaa

SEQ ID NO: 483737 - DNA, 19 bp, Mus musculus
  siRNA target sequence for Dhx36 (NM_028136.1,1943-1961).
ctctgtttgcaaataaaga

SEQ ID NO: 483738 - DNA, 19 bp, Mus musculus
  siRNA target sequence for Dhx36 (NM_028136.1,1963-1981).
cttgaggctgggtggaatt

SEQ ID NO: 483739 - DNA, 19 bp, Mus musculus
  siRNA target sequence for Dhx36 (NM_028136.1,1969-1987).
gctgggtggaattgcttat

SEQ ID NO: 483740 - DNA, 19 bp, Mus musculus
  siRNA target sequence for Dhx36 (NM_028136.1,1970-1988).
ctgggtggaattgcttatt

SEQ ID NO: 483741 - DNA, 19 bp, Mus musculus
  siRNA target sequence for Dhx36 (NM_028136.1,2024-2042).
gcagtggtgctctccataa

SEQ ID NO: 483742 - DNA, 19 bp, Mus musculus
  siRNA target sequence for Dhx36 (NM_028136.1,2053-2071).
ggaactgagtgctttggat

SEQ ID NO: 483743 - DNA, 19 bp, Mus musculus
  siRNA target sequence for Dhx36 (NM_028136.1,2059-2077).
gagtgctttggataagcaa

SEQ ID NO: 483744 - DNA, 19 bp, Mus musculus
  siRNA target sequence for Dhx36 (NM_028136.1,2120-2138).
gttgagccacatattggaa

SEQ ID NO: 483745 - DNA, 19 bp, Mus musculus
  siRNA target sequence for Dhx36 (NM_028136.1,2123-2141).
gagccacatattggaaaaa

SEQ ID NO: 483746 - DNA, 19 bp, Mus musculus
  siRNA target sequence for Dhx36 (NM_028136.1,2213-2231).
gatccctttgtcattccat

SEQ ID NO: 483747 - DNA, 19 bp, Mus musculus
  siRNA target sequence for Dhx36 (NM_028136.1,2224-2242).
cattccattgggaaaagaa

SEQ ID NO: 483748 - DNA, 19 bp, Mus musculus
  siRNA target sequence for Dhx36 (NM_028136.1,2267-2285).
gaactggcaaaggaaacta

SEQ ID NO: 483749 - DNA, 19 bp, Mus musculus
  siRNA target sequence for Dhx36 (NM_028136.1,2299-2317).
gacagttgtgaatgcattt

SEQ ID NO: 483750 - DNA, 19 bp, Mus musculus
  siRNA target sequence for Dhx36 (NM_028136.1,2342-2360).
cgtggtttcaggtatgaaa

SEQ ID NO: 483751 - DNA, 19 bp, Mus musculus
  siRNA target sequence for Dhx36 (NM_028136.1,2343-2361).
gtggtttcaggtatgaaaa

SEQ ID NO: 483752 - DNA, 19 bp, Mus musculus
  siRNA target sequence for Dhx36 (NM_028136.1,2346-2364).
gtttcaggtatgaaaagga

SEQ ID NO: 483753 - DNA, 19 bp, Mus musculus
  siRNA target sequence for Dhx36 (NM_028136.1,2464-2482).
cagtagaagtcccaaagat

SEQ ID NO: 483754 - DNA, 19 bp, Mus musculus
  siRNA target sequence for Dhx36 (NM_028136.1,2502-2520).
cagataatgagaagataat

SEQ ID NO: 483755 - DNA, 19 bp, Mus musculus
  siRNA target sequence for Dhx36 (NM_028136.1,2558-2576).
gctaaaatccgactaaatt

SEQ ID NO: 483756 - DNA, 19 bp, Mus musculus
  siRNA target sequence for Dhx36 (NM_028136.1,2567-2585).
cgactaaatttgggtaaaa

SEQ ID NO: 483757 - DNA, 19 bp, Mus musculus
  siRNA target sequence for Dhx36 (NM_028136.1,2568-2586).
gactaaatttgggtaaaaa

SEQ ID NO: 483758 - DNA, 19 bp, Mus musculus
  siRNA target sequence for Dhx36 (NM_028136.1,2570-2588).
ctaaatttgggtaaaaaga

SEQ ID NO: 483759 - DNA, 19 bp, Mus musculus
  siRNA target sequence for Dhx36 (NM_028136.1,2701-2719).
gatgagaacaagcagtata

SEQ ID NO: 483760 - DNA, 19 bp, Mus musculus
  siRNA target sequence for Dhx36 (NM_028136.1,2722-2740).
cttgtacgactgtacagaa

SEQ ID NO: 483761 - DNA, 19 bp, Mus musculus
  siRNA target sequence for Dhx36 (NM_028136.1,2797-2815).
ggatcaggaaattattgct

SEQ ID NO: 483762 - DNA, 19 bp, Mus musculus
  siRNA target sequence for Dhx36 (NM_028136.1,2850-2868).
gaattgcccatcttgttaa

SEQ ID NO: 483763 - DNA, 19 bp, Mus musculus
  siRNA target sequence for Dhx36 (NM_028136.1,2893-2911).
ccttctacaagagaagatt

SEQ ID NO: 483764 - DNA, 19 bp, Mus musculus
  siRNA target sequence for Dhx36 (NM_028136.1,2932-2950).
ctgggacgacactaagtca

SEQ ID NO: 483765 - DNA, 19 bp, Mus musculus
  siRNA target sequence for Dhx36 (NM_028136.1,2970-2988).
cagctattctagacttgat

SEQ ID NO: 483766 - DNA, 19 bp, Mus musculus
  siRNA target sequence for Dhx36 (NM_028136.1,2972-2990).
gctattctagacttgatca

SEQ ID NO: 483767 - DNA, 19 bp, Mus musculus
  siRNA target sequence for Dhx36 (NM_028136.1,2973-2991).
ctattctagacttgatcaa

SEQ ID NO: 483768 - DNA, 19 bp, Mus musculus
  siRNA target sequence for Dhx36 (NM_028136.1,3029-3047).
cggtcacaggacggatatt

SEQ ID NO: 483769 - DNA, 19 bp, Mus musculus
  siRNA target sequence for Dhx36 (NM_028136.1,3030-3048).
ggtcacaggacggatatta

SEQ ID NO: 483770 - DNA, 19 bp, Mus musculus
  siRNA target sequence for Dhx36 (NM_028136.1,3031-3049).
gtcacaggacggatattat

SEQ ID NO: 483771 - DNA, 19 bp, Mus musculus
  siRNA target sequence for Dhx36 (NM_028136.1,3035-3053).
caggacggatattatagct

SEQ ID NO: 483772 - DNA, 19 bp, Mus musculus
  siRNA target sequence for Dhx40 (NM_026191.1,400-418).
gactcagccacgaaaagta

SEQ ID NO: 483773 - DNA, 19 bp, Mus musculus
  siRNA target sequence for Dhx40 (NM_026191.1,462-480).
gcactttgggatctaaagt

SEQ ID NO: 483774 - DNA, 19 bp, Mus musculus
  siRNA target sequence for Dhx40 (NM_026191.1,535-553).
catgactgatggatgttta

SEQ ID NO: 483775 - DNA, 19 bp, Mus musculus
  siRNA target sequence for Dhx40 (NM_026191.1,570-588).
gagatccaaatcttagcaa

SEQ ID NO: 483776 - DNA, 19 bp, Mus musculus
  siRNA target sequence for Dhx40 (NM_026191.1,575-593).
ccaaatcttagcaaattca

SEQ ID NO: 483777 - DNA, 19 bp, Mus musculus
  siRNA target sequence for Dhx40 (NM_026191.1,614-632).
gcccatgaaagaactttaa

SEQ ID NO: 483778 - DNA, 19 bp, Mus musculus
  siRNA target sequence for Dhx40 (NM_026191.1,616-634).
ccatgaaagaactttaact

SEQ ID NO: 483779 - DNA, 19 bp, Mus musculus
  siRNA target sequence for Dhx40 (NM_026191.1,617-635).
catgaaagaactttaacta

SEQ ID NO: 483780 - DNA, 19 bp, Mus musculus
  siRNA target sequence for Dhx40 (NM_026191.1,759-777).
gaaattgccccatatttga

SEQ ID NO: 483781 - DNA, 19 bp, Mus musculus
  siRNA target sequence for Dhx40 (NM_026191.1,766-784).
ccccatatttgatatacct

SEQ ID NO: 483782 - DNA, 19 bp, Mus musculus
  siRNA target sequence for Dhx40 (NM_026191.1,827-845).
ggaccacgagacagagaaa

SEQ ID NO: 483783 - DNA, 19 bp, Mus musculus
  siRNA target sequence for Dhx40 (NM_026191.1,830-848).
ccacgagacagagaaaata

SEQ ID NO: 483784 - DNA, 19 bp, Mus musculus
  siRNA target sequence for Dhx40 (NM_026191.1,860-878).
caagcgattgtgaaagtga

SEQ ID NO: 483785 - DNA, 19 bp, Mus musculus
  siRNA target sequence for Dhx40 (NM_026191.1,928-946).
gactggccagtttgagata

SEQ ID NO: 483786 - DNA, 19 bp, Mus musculus
  siRNA target sequence for Dhx40 (NM_026191.1,930-948).
ctggccagtttgagataga

SEQ ID NO: 483787 - DNA, 19 bp, Mus musculus
  siRNA target sequence for Dhx40 (NM_026191.1,954-972).
gttgcgagctgctctttca

SEQ ID NO: 483788 - DNA, 19 bp, Mus musculus
  siRNA target sequence for Dhx40 (NM_026191.1,980-998).
gagtctgttgactatgatt

SEQ ID NO: 483789 - DNA, 19 bp, Mus musculus
  siRNA target sequence for Dhx40 (NM_026191.1,982-1000).
gtctgttgactatgattat

SEQ ID NO: 483790 - DNA, 19 bp, Mus musculus
  siRNA target sequence for Dhx40 (NM_026191.1,984-1002).
ctgttgactatgattatga

SEQ ID NO: 483791 - DNA, 19 bp, Mus musculus
  siRNA target sequence for Dhx40 (NM_026191.1,991-1009).
ctatgattatgatgtacaa

SEQ ID NO: 483792 - DNA, 19 bp, Mus musculus
  siRNA target sequence for Dhx40 (NM_026191.1,995-1013).
gattatgatgtacaagata

SEQ ID NO: 483793 - DNA, 19 bp, Mus musculus
  siRNA target sequence for Dhx40 (NM_026191.1,1048-1066).
cggctctatgacaacagat

SEQ ID NO: 483794 - DNA, 19 bp, Mus musculus
  siRNA target sequence for Dhx40 (NM_026191.1,1051-1069).
ctctatgacaacagatcaa

SEQ ID NO: 483795 - DNA, 19 bp, Mus musculus
  siRNA target sequence for Dhx40 (NM_026191.1,1053-1071).
ctatgacaacagatcaaca

SEQ ID NO: 483796 - DNA, 19 bp, Mus musculus
  siRNA target sequence for Dhx40 (NM_026191.1,1100-1118).
ggaattagaaaatgtgtta

SEQ ID NO: 483797 - DNA, 19 bp, Mus musculus
  siRNA target sequence for Dhx40 (NM_026191.1,1178-1196).
ggaggctttgtgaagcaat

SEQ ID NO: 483798 - DNA, 19 bp, Mus musculus
  siRNA target sequence for Dhx40 (NM_026191.1,1179-1197).
gaggctttgtgaagcaatt

SEQ ID NO: 483799 - DNA, 19 bp, Mus musculus
  siRNA target sequence for Dhx40 (NM_026191.1,1232-1250).
gaggtggttcctatttcaa

SEQ ID NO: 483800 - DNA, 19 bp, Mus musculus
  siRNA target sequence for Dhx40 (NM_026191.1,1235-1253).
gtggttcctatttcaaaaa

SEQ ID NO: 483801 - DNA, 19 bp, Mus musculus
  siRNA target sequence for Dhx40 (NM_026191.1,1306-1324).
ctttaggatttacagtaaa

SEQ ID NO: 483802 - DNA, 19 bp, Mus musculus
  siRNA target sequence for Dhx40 (NM_026191.1,1341-1359).
gtatgcctgaccatgtgat

SEQ ID NO: 483803 - DNA, 19 bp, Mus musculus
  siRNA target sequence for Dhx40 (NM_026191.1,1380-1398).
gtttgacatctgtagttct

SEQ ID NO: 483804 - DNA, 19 bp, Mus musculus
  siRNA target sequence for Dhx40 (NM_026191.1,1408-1426).
gtgccttgccatacatgat

SEQ ID NO: 483805 - DNA, 19 bp, Mus musculus
  siRNA target sequence for Dhx40 (NM_026191.1,1424-1442).
gatgtcataaggtttccat

SEQ ID NO: 483806 - DNA, 19 bp, Mus musculus
  siRNA target sequence for Dhx40 (NM_026191.1,1427-1445).
gtcataaggtttccatatt

SEQ ID NO: 483807 - DNA, 19 bp, Mus musculus
  siRNA target sequence for Dhx40 (NM_026191.1,1479-1497).
cacttaaacaactttatca

SEQ ID NO: 483808 - DNA, 19 bp, Mus musculus
  siRNA target sequence for Dhx40 (NM_026191.1,1530-1548).
caagattgggattatccat

SEQ ID NO: 483809 - DNA, 19 bp, Mus musculus
  siRNA target sequence for Dhx40 (NM_026191.1,1730-1748).
gctggaggatttaatgact

SEQ ID NO: 483810 - DNA, 19 bp, Mus musculus
  siRNA target sequence for Dhx40 (NM_026191.1,1752-1770).
caactttagctgtcatttt

SEQ ID NO: 483811 - DNA, 19 bp, Mus musculus
  siRNA target sequence for Dhx40 (NM_026191.1,1826-1844).
cactggcggtgcttattct

SEQ ID NO: 483812 - DNA, 19 bp, Mus musculus
  siRNA target sequence for Dhx40 (NM_026191.1,1828-1846).
ctggcggtgcttattctct

SEQ ID NO: 483813 - DNA, 19 bp, Mus musculus
  siRNA target sequence for Dhx40 (NM_026191.1,1909-1927).
cccaagagagacttttgaa

SEQ ID NO: 483814 - DNA, 19 bp, Mus musculus
  siRNA target sequence for Dhx40 (NM_026191.1,1965-1983).
caggctacttcaaaaatgt

SEQ ID NO: 483815 - DNA, 19 bp, Mus musculus
  siRNA target sequence for Dhx40 (NM_026191.1,2027-2045).
cgtggaagtccagttcata

SEQ ID NO: 483816 - DNA, 19 bp, Mus musculus
  siRNA target sequence for Dhx40 (NM_026191.1,2028-2046).
gtggaagtccagttcatat

SEQ ID NO: 483817 - DNA, 19 bp, Mus musculus
  siRNA target sequence for Dhx40 (NM_026191.1,2091-2109).
ggataatttttcatgaagt

SEQ ID NO: 483818 - DNA, 19 bp, Mus musculus
  siRNA target sequence for Dhx40 (NM_026191.1,2092-2110).
gataatttttcatgaagta

SEQ ID NO: 483819 - DNA, 19 bp, Mus musculus
  siRNA target sequence for Dhx40 (NM_026191.1,2143-2161).
gtgcccaatccgttatgaa

SEQ ID NO: 483820 - DNA, 19 bp, Mus musculus
  siRNA target sequence for Dhx40 (NM_026191.1,2182-2200).
caagttgcatgaacttaat

SEQ ID NO: 483821 - DNA, 19 bp, Mus musculus
  siRNA target sequence for Dhx40 (NM_026191.1,2192-2210).
gaacttaatgcgcatgatt

SEQ ID NO: 483822 - DNA, 19 bp, Mus musculus
  siRNA target sequence for Dhx40 (NM_026191.1,2217-2235).
gtgtggctagacgtgaaat

SEQ ID NO: 483823 - DNA, 19 bp, Mus musculus
  siRNA target sequence for Dhx40 (NM_026191.1,2219-2237).
gtggctagacgtgaaatga

SEQ ID NO: 483824 - DNA, 19 bp, Mus musculus
  siRNA target sequence for Dhx40 (NM_026191.1,2221-2239).
ggctagacgtgaaatgaga

SEQ ID NO: 483825 - DNA, 19 bp, Mus musculus
  siRNA target sequence for Dhx40 (NM_026191.1,2284-2302).
gctaaaggatggaatatca

SEQ ID NO: 483826 - DNA, 19 bp, Mus musculus
  siRNA target sequence for Diap3 (NM_019670.1,105-123).
gcgacccaagttgcattta

SEQ ID NO: 483827 - DNA, 19 bp, Mus musculus
  siRNA target sequence for Diap3 (NM_019670.1,106-124).
cgacccaagttgcatttaa

SEQ ID NO: 483828 - DNA, 19 bp, Mus musculus
  siRNA target sequence for Diap3 (NM_019670.1,109-127).
cccaagttgcatttaaata

SEQ ID NO: 483829 - DNA, 19 bp, Mus musculus
  siRNA target sequence for Diap3 (NM_019670.1,142-160).
gatgatatgctggacaaat

SEQ ID NO: 483830 - DNA, 19 bp, Mus musculus
  siRNA target sequence for Diap3 (NM_019670.1,154-172).
gacaaatttgccagtataa

SEQ ID NO: 483831 - DNA, 19 bp, Mus musculus
  siRNA target sequence for Diap3 (NM_019670.1,327-345).
ggaagatatgaatttaaat

SEQ ID NO: 483832 - DNA, 19 bp, Mus musculus
  siRNA target sequence for Diap3 (NM_019670.1,399-417).
ggtgatgcagtacattaat

SEQ ID NO: 483833 - DNA, 19 bp, Mus musculus
  siRNA target sequence for Diap3 (NM_019670.1,400-418).
gtgatgcagtacattaata

SEQ ID NO: 483834 - DNA, 19 bp, Mus musculus
  siRNA target sequence for Diap3 (NM_019670.1,402-420).
gatgcagtacattaatact

SEQ ID NO: 483835 - DNA, 19 bp, Mus musculus
  siRNA target sequence for Diap3 (NM_019670.1,429-447).
gacaggaagtcttagaagt

SEQ ID NO: 483836 - DNA, 19 bp, Mus musculus
  siRNA target sequence for Diap3 (NM_019670.1,525-543).
ggagtcactccgagtatca

SEQ ID NO: 483837 - DNA, 19 bp, Mus musculus
  siRNA target sequence for Diap3 (NM_019670.1,526-544).
gagtcactccgagtatcat

SEQ ID NO: 483838 - DNA, 19 bp, Mus musculus
  siRNA target sequence for Diap3 (NM_019670.1,583-601).
cacgagggactcggattat

SEQ ID NO: 483839 - DNA, 19 bp, Mus musculus
  siRNA target sequence for Diap3 (NM_019670.1,595-613).
ggattattgctggacattt

SEQ ID NO: 483840 - DNA, 19 bp, Mus musculus
  siRNA target sequence for Diap3 (NM_019670.1,596-614).
gattattgctggacatttt

SEQ ID NO: 483841 - DNA, 19 bp, Mus musculus
  siRNA target sequence for Diap3 (NM_019670.1,702-720).
cacacagtatggcttagaa

SEQ ID NO: 483842 - DNA, 19 bp, Mus musculus
  siRNA target sequence for Diap3 (NM_019670.1,714-732).
cttagaaaggattatgagt

SEQ ID NO: 483843 - DNA, 19 bp, Mus musculus
  siRNA target sequence for Diap3 (NM_019670.1,843-861).
catccttgaagaagtgtta

SEQ ID NO: 483844 - DNA, 19 bp, Mus musculus
  siRNA target sequence for Diap3 (NM_019670.1,919-937).
gaaggcctccggcataact

SEQ ID NO: 483845 - DNA, 19 bp, Mus musculus
  siRNA target sequence for Diap3 (NM_019670.1,955-973).
gcttgtatgcagctcataa

SEQ ID NO: 483846 - DNA, 19 bp, Mus musculus
  siRNA target sequence for Diap3 (NM_019670.1,956-974).
cttgtatgcagctcataaa

SEQ ID NO: 483847 - DNA, 19 bp, Mus musculus
  siRNA target sequence for Diap3 (NM_019670.1,981-999).
cgttacatctcctgatgat

SEQ ID NO: 483848 - DNA, 19 bp, Mus musculus
  siRNA target sequence for Diap3 (NM_019670.1,1036-1054).
cgttgtggattgaaagaga

SEQ ID NO: 483849 - DNA, 19 bp, Mus musculus
  siRNA target sequence for Diap3 (NM_019670.1,1037-1055).
gttgtggattgaaagagat

SEQ ID NO: 483850 - DNA, 19 bp, Mus musculus
  siRNA target sequence for Diap3 (NM_019670.1,1040-1058).
gtggattgaaagagatatt

SEQ ID NO: 483851 - DNA, 19 bp, Mus musculus
  siRNA target sequence for Diap3 (NM_019670.1,1061-1079).
caaacttaaagggcattaa

SEQ ID NO: 483852 - DNA, 19 bp, Mus musculus
  siRNA target sequence for Diap3 (NM_019670.1,1065-1083).
cttaaagggcattaagaat

SEQ ID NO: 483853 - DNA, 19 bp, Mus musculus
  siRNA target sequence for Diap3 (NM_019670.1,1080-1098).
gaatgatggcctggatata

SEQ ID NO: 483854 - DNA, 19 bp, Mus musculus
  siRNA target sequence for Diap3 (NM_019670.1,1150-1168).
catcgccttgaagacatta

SEQ ID NO: 483855 - DNA, 19 bp, Mus musculus
  siRNA target sequence for Diap3 (NM_019670.1,1164-1182).
cattagagctgaacttgat

SEQ ID NO: 483856 - DNA, 19 bp, Mus musculus
  siRNA target sequence for Diap3 (NM_019670.1,1603-1621).
cctggtacaaaaattcctt

SEQ ID NO: 483857 - DNA, 19 bp, Mus musculus
  siRNA target sequence for Diap3 (NM_019670.1,1604-1622).
ctggtacaaaaattccttt

SEQ ID NO: 483858 - DNA, 19 bp, Mus musculus
  siRNA target sequence for Diap3 (NM_019670.1,1801-1819).
gggcaaagctctattccat

SEQ ID NO: 483859 - DNA, 19 bp, Mus musculus
  siRNA target sequence for Diap3 (NM_019670.1,1803-1821).
gcaaagctctattccatta

SEQ ID NO: 483860 - DNA, 19 bp, Mus musculus
  siRNA target sequence for Diap3 (NM_019670.1,1804-1822).
caaagctctattccattaa

SEQ ID NO: 483861 - DNA, 19 bp, Mus musculus
  siRNA target sequence for Diap3 (NM_019670.1,1828-1846).
ccatttggtttgaaaccaa

SEQ ID NO: 483862 - DNA, 19 bp, Mus musculus
  siRNA target sequence for Diap3 (NM_019670.1,1877-1895).
gaagattgaattggttaaa

SEQ ID NO: 483863 - DNA, 19 bp, Mus musculus
  siRNA target sequence for Diap3 (NM_019670.1,1890-1908).
gttaaagatcggaccaaat

SEQ ID NO: 483864 - DNA, 19 bp, Mus musculus
  siRNA target sequence for Diap3 (NM_019670.1,1899-1917).
cggaccaaatgaaatgtct

SEQ ID NO: 483865 - DNA, 19 bp, Mus musculus
  siRNA target sequence for Diap3 (NM_019670.1,1925-1943).
gcttctggatcaaagtaaa

SEQ ID NO: 483866 - DNA, 19 bp, Mus musculus
  siRNA target sequence for Diap3 (NM_019670.1,1931-1949).
ggatcaaagtaaatgaaaa

SEQ ID NO: 483867 - DNA, 19 bp, Mus musculus
  siRNA target sequence for Diap3 (NM_019670.1,2095-2113).
gctcagaacctttcaatct

SEQ ID NO: 483868 - DNA, 19 bp, Mus musculus
  siRNA target sequence for Diap3 (NM_019670.1,2096-2114).
ctcagaacctttcaatctt

SEQ ID NO: 483869 - DNA, 19 bp, Mus musculus
  siRNA target sequence for Diap3 (NM_019670.1,2123-2141).
ccttccgggtgccatatga

SEQ ID NO: 483870 - DNA, 19 bp, Mus musculus
  siRNA target sequence for Diap3 (NM_019670.1,2127-2145).
ccgggtgccatatgagaaa

SEQ ID NO: 483871 - DNA, 19 bp, Mus musculus
  siRNA target sequence for Diap3 (NM_019670.1,2128-2146).
cgggtgccatatgagaaaa

SEQ ID NO: 483872 - DNA, 19 bp, Mus musculus
  siRNA target sequence for Diap3 (NM_019670.1,2129-2147).
gggtgccatatgagaaaat

SEQ ID NO: 483873 - DNA, 19 bp, Mus musculus
  siRNA target sequence for Diap3 (NM_019670.1,2131-2149).
gtgccatatgagaaaatca

SEQ ID NO: 483874 - DNA, 19 bp, Mus musculus
  siRNA target sequence for Diap3 (NM_019670.1,2181-2199).
gttgtcagagtccatgatt

SEQ ID NO: 483875 - DNA, 19 bp, Mus musculus
  siRNA target sequence for Diap3 (NM_019670.1,2241-2259).
gtcattgtcccagtttaga

SEQ ID NO: 483876 - DNA, 19 bp, Mus musculus
  siRNA target sequence for Diap3 (NM_019670.1,2258-2276).
gaagtgactataacagttt

SEQ ID NO: 483877 - DNA, 19 bp, Mus musculus
  siRNA target sequence for Diap3 (NM_019670.1,2328-2346).
gccacggctcagtgctatt

SEQ ID NO: 483878 - DNA, 19 bp, Mus musculus
  siRNA target sequence for Diap3 (NM_019670.1,2330-2348).
cacggctcagtgctattct

SEQ ID NO: 483879 - DNA, 19 bp, Mus musculus
  siRNA target sequence for Diap3 (NM_019670.1,2339-2357).
gtgctattctctttaagct

SEQ ID NO: 483880 - DNA, 19 bp, Mus musculus
  siRNA target sequence for Diap3 (NM_019670.1,2349-2367).
ctttaagcttcaatttgaa

SEQ ID NO: 483881 - DNA, 19 bp, Mus musculus
  siRNA target sequence for Diap3 (NM_019670.1,2507-2525).
ctcaaaccttcggatttga

SEQ ID NO: 483882 - DNA, 19 bp, Mus musculus
  siRNA target sequence for Diap3 (NM_019670.1,2587-2605).
catttcctggtagatgtat

SEQ ID NO: 483883 - DNA, 19 bp, Mus musculus
  siRNA target sequence for Diap3 (NM_019670.1,2672-2690).
gagtctctgtagaaatgct

SEQ ID NO: 483884 - DNA, 19 bp, Mus musculus
  siRNA target sequence for Diap3 (NM_019670.1,2762-2780).
ctgaggacttgcatgacaa

SEQ ID NO: 483885 - DNA, 19 bp, Mus musculus
  siRNA target sequence for Diap3 (NM_019670.1,2766-2784).
ggacttgcatgacaagttt

SEQ ID NO: 483886 - DNA, 19 bp, Mus musculus
  siRNA target sequence for Diap3 (NM_019670.1,2772-2790).
gcatgacaagtttgtgata

SEQ ID NO: 483887 - DNA, 19 bp, Mus musculus
  siRNA target sequence for Diap3 (NM_019670.1,2773-2791).
catgacaagtttgtgataa

SEQ ID NO: 483888 - DNA, 19 bp, Mus musculus
  siRNA target sequence for Diap3 (NM_019670.1,2813-2831).
gtgcgaacgagcagtatga

SEQ ID NO: 483889 - DNA, 19 bp, Mus musculus
  siRNA target sequence for Diap3 (NM_019670.1,2816-2834).
cgaacgagcagtatgaaaa

SEQ ID NO: 483890 - DNA, 19 bp, Mus musculus
  siRNA target sequence for Diap3 (NM_019670.1,2861-2879).
cacaattgtaccagagtat

SEQ ID NO: 483891 - DNA, 19 bp, Mus musculus
  siRNA target sequence for Diap3 (NM_019670.1,2874-2892).
gagtataatgggctactat

SEQ ID NO: 483892 - DNA, 19 bp, Mus musculus
  siRNA target sequence for Diap3 (NM_019670.1,2915-2933).
ccgtggaagagttttttaa

SEQ ID NO: 483893 - DNA, 19 bp, Mus musculus
  siRNA target sequence for Diap3 (NM_019670.1,2916-2934).
cgtggaagagttttttaat

SEQ ID NO: 483894 - DNA, 19 bp, Mus musculus
  siRNA target sequence for Diap3 (NM_019670.1,2976-2994).
ggaaaacatcaaaaaacga

SEQ ID NO: 483895 - DNA, 19 bp, Mus musculus
  siRNA target sequence for Diap3 (NM_019670.1,3079-3097).
cgcttactagaaatgaaaa

SEQ ID NO: 483896 - DNA, 19 bp, Mus musculus
  siRNA target sequence for Diap3 (NM_019670.1,3157-3175).
gccttccgcgacagaagaa

SEQ ID NO: 483897 - DNA, 19 bp, Mus musculus
  siRNA target sequence for Diap3 (NM_019670.1,3158-3176).
ccttccgcgacagaagaaa

SEQ ID NO: 483898 - DNA, 19 bp, Mus musculus
  siRNA target sequence for Diap3 (NM_019670.1,3231-3249).
gcctgttctcaaagtttgt

SEQ ID NO: 483899 - DNA, 19 bp, Mus musculus
  siRNA target sequence for Diap3 (NM_019670.1,3287-3305).
cacgtccacaccacagtat

SEQ ID NO: 483900 - DNA, 19 bp, Mus musculus
  siRNA target sequence for Diap3 (NM_019670.1,3290-3308).
gtccacaccacagtatcaa

SEQ ID NO: 483901 - DNA, 19 bp, Mus musculus
  siRNA target sequence for Diap3 (NM_019670.1,3295-3313).
caccacagtatcaattgca

SEQ ID NO: 483902 - DNA, 19 bp, Mus musculus
  siRNA target sequence for Diap3 (NM_019670.1,3380-3398).
ggatcaaggcagttgagaa

SEQ ID NO: 483903 - DNA, 19 bp, Mus musculus
  siRNA target sequence for Diap3 (NM_019670.1,3396-3414).
gaaggaagcctgtaatgca

SEQ ID NO: 483904 - DNA, 19 bp, Mus musculus
  siRNA target sequence for Diap3 (NM_019670.1,3489-3507).
cctgctggcaagattacga

SEQ ID NO: 483905 - DNA, 19 bp, Mus musculus
  siRNA target sequence for Dnd1 (NM_173383.1,499-517).
gtaaccaacaaaatccttt

SEQ ID NO: 483906 - DNA, 19 bp, Mus musculus
  siRNA target sequence for Dnd1 (NM_173383.1,550-568).
cagggtccgaggtgtatat

SEQ ID NO: 483907 - DNA, 19 bp, Mus musculus
  siRNA target sequence for Dnd1 (NM_173383.1,639-657).
gagttccgcctaatgatga

SEQ ID NO: 483908 - DNA, 19 bp, Mus musculus
  siRNA target sequence for Dnd1 (NM_173383.1,812-830).
cgggctgcctcttagctta

SEQ ID NO: 483909 - DNA, 19 bp, Mus musculus
  siRNA target sequence for Dnd1 (NM_173383.1,813-831).
gggctgcctcttagcttaa

SEQ ID NO: 483910 - DNA, 19 bp, Mus musculus
  siRNA target sequence for Dnd1 (NM_173383.1,927-945).
gcgctgctcaagttcagta

SEQ ID NO: 483911 - DNA, 19 bp, Mus musculus
  siRNA target sequence for Dnd1 (NM_173383.1,1027-1045).
ggctcaagccagacctaaa

SEQ ID NO: 483912 - DNA, 19 bp, Mus musculus
  siRNA target sequence for Dnd1 (NM_173383.1,1095-1113).
ccagatgtcagccaactaa

SEQ ID NO: 483913 - DNA, 19 bp, Mus musculus
  siRNA target sequence for Dnd1 (NM_173383.1,1199-1217).
gttcctgaccaagtgttta

SEQ ID NO: 483914 - DNA, 19 bp, Mus musculus
  siRNA target sequence for Dnd1 (NM_173383.1,1233-1251).
ggctggcatcgcttttggt

SEQ ID NO: 483915 - DNA, 19 bp, Mus musculus
  siRNA target sequence for Dnd1 (NM_173383.1,1234-1252).
gctggcatcgcttttggta

SEQ ID NO: 483916 - DNA, 19 bp, Mus musculus
  siRNA target sequence for Dnd1 (NM_173383.1,1271-1289).
gcatccagtgcctttcagt

SEQ ID NO: 483917 - DNA, 19 bp, Mus musculus
  siRNA target sequence for Dnd1 (NM_173383.1,1302-1320).
gttgtgttggcctctgatt

SEQ ID NO: 483918 - DNA, 19 bp, Mus musculus
  siRNA target sequence for Dnd1 (NM_173383.1,1411-1429).
gggctgaagcaggtactat

SEQ ID NO: 483919 - DNA, 19 bp, Mus musculus
  siRNA target sequence for Dnd1 (NM_173383.1,1416-1434).
gaagcaggtactatggtta

SEQ ID NO: 483920 - DNA, 19 bp, Mus musculus
  siRNA target sequence for Drbp1 (NM_153405.1,130-148).
gcccaacagccgcattttt

SEQ ID NO: 483921 - DNA, 19 bp, Mus musculus
  siRNA target sequence for Drbp1 (NM_153405.1,132-150).
ccaacagccgcatttttct

SEQ ID NO: 483922 - DNA, 19 bp, Mus musculus
  siRNA target sequence for Drbp1 (NM_153405.1,133-151).
caacagccgcatttttcta

SEQ ID NO: 483923 - DNA, 19 bp, Mus musculus
  siRNA target sequence for Drbp1 (NM_153405.1,261-279).
gcgtggccttcgtcaagtt

SEQ ID NO: 483924 - DNA, 19 bp, Mus musculus
  siRNA target sequence for Drbp1 (NM_153405.1,352-370).
gcccatcaaggttttcatt

SEQ ID NO: 483925 - DNA, 19 bp, Mus musculus
  siRNA target sequence for Drbp1 (NM_153405.1,423-441).
cgagaatctttgttatgat

SEQ ID NO: 483926 - DNA, 19 bp, Mus musculus
  siRNA target sequence for Drbp1 (NM_153405.1,439-457).
gataccaaagtcctataca

SEQ ID NO: 483927 - DNA, 19 bp, Mus musculus
  siRNA target sequence for Drbp1 (NM_153405.1,491-509).
ggagatatcgagtattgca

SEQ ID NO: 483928 - DNA, 19 bp, Mus musculus
  siRNA target sequence for Drbp1 (NM_153405.1,499-517).
cgagtattgcagcattatt

SEQ ID NO: 483929 - DNA, 19 bp, Mus musculus
  siRNA target sequence for Drbp1 (NM_153405.1,508-526).
cagcattattaagaataaa

SEQ ID NO: 483930 - DNA, 19 bp, Mus musculus
  siRNA target sequence for Drbp1 (NM_153405.1,550-568).
gggctacgtgcgctattta

SEQ ID NO: 483931 - DNA, 19 bp, Mus musculus
  siRNA target sequence for Drbp1 (NM_153405.1,551-569).
ggctacgtgcgctatttaa

SEQ ID NO: 483932 - DNA, 19 bp, Mus musculus
  siRNA target sequence for Drbp1 (NM_153405.1,552-570).
gctacgtgcgctatttaaa

SEQ ID NO: 483933 - DNA, 19 bp, Mus musculus
  siRNA target sequence for Drbp1 (NM_153405.1,553-571).
ctacgtgcgctatttaaaa

SEQ ID NO: 483934 - DNA, 19 bp, Mus musculus
  siRNA target sequence for Drbp1 (NM_153405.1,556-574).
cgtgcgctatttaaaacca

SEQ ID NO: 483935 - DNA, 19 bp, Mus musculus
  siRNA target sequence for Drbp1 (NM_153405.1,557-575).
gtgcgctatttaaaaccat

SEQ ID NO: 483936 - DNA, 19 bp, Mus musculus
  siRNA target sequence for Drbp1 (NM_153405.1,584-602).
gcccaggcaatagaaaact

SEQ ID NO: 483937 - DNA, 19 bp, Mus musculus
  siRNA target sequence for Drbp1 (NM_153405.1,623-641).
ctcttggctgaacctaaaa

SEQ ID NO: 483938 - DNA, 19 bp, Mus musculus
  siRNA target sequence for Drbp1 (NM_153405.1,632-650).
gaacctaaaaataaagtgt

SEQ ID NO: 483939 - DNA, 19 bp, Mus musculus
  siRNA target sequence for Drbp1 (NM_153405.1,657-675).
ccccagaacaagatgatta

SEQ ID NO: 483940 - DNA, 19 bp, Mus musculus
  siRNA target sequence for Drbp1 (NM_153405.1,707-725).
gaacccagagcaaatctgt

SEQ ID NO: 483941 - DNA, 19 bp, Mus musculus
  siRNA target sequence for Drbp1 (NM_153405.1,738-756).
gagaacagcaatctgaatt

SEQ ID NO: 483942 - DNA, 19 bp, Mus musculus
  siRNA target sequence for Drbp1 (NM_153405.1,745-763).
gcaatctgaattttcaact

SEQ ID NO: 483943 - DNA, 19 bp, Mus musculus
  siRNA target sequence for Drbp1 (NM_153405.1,873-891).
caggcctggagtattgtga

SEQ ID NO: 483944 - DNA, 19 bp, Mus musculus
  siRNA target sequence for Drbp1 (NM_153405.1,892-910).
ggttccgcgagatccttat

SEQ ID NO: 483945 - DNA, 19 bp, Mus musculus
  siRNA target sequence for Drbp1 (NM_153405.1,893-911).
gttccgcgagatccttatt

SEQ ID NO: 483946 - DNA, 19 bp, Mus musculus
  siRNA target sequence for Drbp1 (NM_153405.1,896-914).
ccgcgagatccttattcaa

SEQ ID NO: 483947 - DNA, 19 bp, Mus musculus
  siRNA target sequence for Drbp1 (NM_153405.1,897-915).
cgcgagatccttattcaaa

SEQ ID NO: 483948 - DNA, 19 bp, Mus musculus
  siRNA target sequence for Drbp1 (NM_153405.1,898-916).
gcgagatccttattcaaat

SEQ ID NO: 483949 - DNA, 19 bp, Mus musculus
  siRNA target sequence for Drbp1 (NM_153405.1,899-917).
cgagatccttattcaaatt

SEQ ID NO: 483950 - DNA, 19 bp, Mus musculus
  siRNA target sequence for Drbp1 (NM_153405.1,900-918).
gagatccttattcaaatta

SEQ ID NO: 483951 - DNA, 19 bp, Mus musculus
  siRNA target sequence for Drbp1 (NM_153405.1,931-949).
ggttcagtattttaacgta

SEQ ID NO: 483952 - DNA, 19 bp, Mus musculus
  siRNA target sequence for Drbp1 (NM_153405.1,946-964).
cgtagcatcagctatttat

SEQ ID NO: 483953 - DNA, 19 bp, Mus musculus
  siRNA target sequence for Drbp1 (NM_153405.1,950-968).
gcatcagctatttatgcaa

SEQ ID NO: 483954 - DNA, 19 bp, Mus musculus
  siRNA target sequence for Drbp1 (NM_153405.1,956-974).
gctatttatgcaaaataca

SEQ ID NO: 483955 - DNA, 19 bp, Mus musculus
  siRNA target sequence for Drbp1 (NM_153405.1,1024-1042).
cctggatgacgggagtaat

SEQ ID NO: 483956 - DNA, 19 bp, Mus musculus
  siRNA target sequence for Drbp1 (NM_153405.1,1025-1043).
ctggatgacgggagtaata

SEQ ID NO: 483957 - DNA, 19 bp, Mus musculus
  siRNA target sequence for Drbp1 (NM_153405.1,1028-1046).
gatgacgggagtaatatga

SEQ ID NO: 483958 - DNA, 19 bp, Mus musculus
  siRNA target sequence for Drbp1 (NM_153405.1,1155-1173).
cctcacaggcgcctcaaat

SEQ ID NO: 483959 - DNA, 19 bp, Mus musculus
  siRNA target sequence for Drbp1 (NM_153405.1,1187-1205).
gtacttccgtcgtgcaaaa

SEQ ID NO: 483960 - DNA, 19 bp, Mus musculus
  siRNA target sequence for Drbp1 (NM_153405.1,1277-1295).
gacgtgttggaggatatat

SEQ ID NO: 483961 - DNA, 19 bp, Mus musculus
  siRNA target sequence for Drbp1 (NM_153405.1,1280-1298).
gtgttggaggatatattct

SEQ ID NO: 483962 - DNA, 19 bp, Mus musculus
  siRNA target sequence for Drbp1 (NM_153405.1,1355-1373).
gtcaagtatgccgatagaa

SEQ ID NO: 483963 - DNA, 19 bp, Mus musculus
  siRNA target sequence for Drbp1 (NM_153405.1,1398-1416).
ctctgcacgggaagattct

SEQ ID NO: 483964 - DNA, 19 bp, Mus musculus
  siRNA target sequence for Drbp1 (NM_153405.1,1400-1418).
ctgcacgggaagattctga

SEQ ID NO: 483965 - DNA, 19 bp, Mus musculus
  siRNA target sequence for Drbp1 (NM_153405.1,1402-1420).
gcacgggaagattctgaat

SEQ ID NO: 483966 - DNA, 19 bp, Mus musculus
  siRNA target sequence for Drbp1 (NM_153405.1,1415-1433).
ctgaatggggtcagactta

SEQ ID NO: 483967 - DNA, 19 bp, Mus musculus
  siRNA target sequence for Drbp1 (NM_153405.1,1448-1466).
gattccccaagagaagaat

SEQ ID NO: 483968 - DNA, 19 bp, Mus musculus
  siRNA target sequence for Drbp1 (NM_153405.1,1452-1470).
ccccaagagaagaatccaa

SEQ ID NO: 483969 - DNA, 19 bp, Mus musculus
  siRNA target sequence for Drbp1 (NM_153405.1,1453-1471).
cccaagagaagaatccaaa

SEQ ID NO: 483970 - DNA, 19 bp, Mus musculus
  siRNA target sequence for Drbp1 (NM_153405.1,1454-1472).
ccaagagaagaatccaaaa

SEQ ID NO: 483971 - DNA, 19 bp, Mus musculus
  siRNA target sequence for DXImx41e (NM_173747.2,591-609).
ccccgagtcaactctataa

SEQ ID NO: 483972 - DNA, 19 bp, Mus musculus
  siRNA target sequence for E030041M21Rik (NM_029166.1,276-294).
cttatctcctgacaaaata

SEQ ID NO: 483973 - DNA, 19 bp, Mus musculus
  siRNA target sequence for E030041M21Rik (NM_029166.1,395-413).
gcaaggtgttctgcaataa

SEQ ID NO: 483974 - DNA, 19 bp, Mus musculus
  siRNA target sequence for E030041M21Rik (NM_029166.1,486-504).
ggagatgagtacatgtgaa

SEQ ID NO: 483975 - DNA, 19 bp, Mus musculus
  siRNA target sequence for E030041M21Rik (NM_029166.1,523-541).
ggtccgtcaccgattgcaa

SEQ ID NO: 483976 - DNA, 19 bp, Mus musculus
  siRNA target sequence for E030041M21Rik (NM_029166.1,579-597).
ggttgttgagggaattact

SEQ ID NO: 483977 - DNA, 19 bp, Mus musculus
  siRNA target sequence for E030041M21Rik (NM_029166.1,623-641).
gaattggagcgaaagcttt

SEQ ID NO: 483978 - DNA, 19 bp, Mus musculus
  siRNA target sequence for E030041M21Rik (NM_029166.1,631-649).
gcgaaagctttcaatgctt

SEQ ID NO: 483979 - DNA, 19 bp, Mus musculus
  siRNA target sequence for E030041M21Rik (NM_029166.1,669-687).
ccgtatctacagtgtcaat

SEQ ID NO: 483980 - DNA, 19 bp, Mus musculus
  siRNA target sequence for E030041M21Rik (NM_029166.1,699-717).
gcacggagacctgagattt

SEQ ID NO: 483981 - DNA, 19 bp, Mus musculus
  siRNA target sequence for E030041M21Rik (NM_029166.1,702-720).
cggagacctgagatttact

SEQ ID NO: 483982 - DNA, 19 bp, Mus musculus
  siRNA target sequence for E030041M21Rik (NM_029166.1,734-752).
cgcagagaggagaggtttt

SEQ ID NO: 483983 - DNA, 19 bp, Mus musculus
  siRNA target sequence for E030041M21Rik (NM_029166.1,804-822).
ccaaagttcacatcttgaa

SEQ ID NO: 483984 - DNA, 19 bp, Mus musculus
  siRNA target sequence for E030041M21Rik (NM_029166.1,830-848).
gtgctcctgttcgattaat

SEQ ID NO: 483985 - DNA, 19 bp, Mus musculus
  siRNA target sequence for E030041M21Rik (NM_029166.1,832-850).
gctcctgttcgattaataa

SEQ ID NO: 483986 - DNA, 19 bp, Mus musculus
  siRNA target sequence for E030041M21Rik (NM_029166.1,835-853).
cctgttcgattaataacta

SEQ ID NO: 483987 - DNA, 19 bp, Mus musculus
  siRNA target sequence for E030041M21Rik (NM_029166.1,841-859).
cgattaataactaatcagt

SEQ ID NO: 483988 - DNA, 19 bp, Mus musculus
  siRNA target sequence for E030041M21Rik (NM_029166.1,906-924).
cattgcaacaaagttagtt

SEQ ID NO: 483989 - DNA, 19 bp, Mus musculus
  siRNA target sequence for E030041M21Rik (NM_029166.1,922-940).
gttctaattctggatgatt

SEQ ID NO: 483990 - DNA, 19 bp, Mus musculus
  siRNA target sequence for E030041M21Rik (NM_029166.1,969-987).
gaaggctatggtgcaatat

SEQ ID NO: 483991 - DNA, 19 bp, Mus musculus
  siRNA target sequence for E030041M21Rik (NM_029166.1,978-996).
ggtgcaatatgcaaagtct

SEQ ID NO: 483992 - DNA, 19 bp, Mus musculus
  siRNA target sequence for E030041M21Rik (NM_029166.1,1172-1190).
cctcccatcatctagtgat

SEQ ID NO: 483993 - DNA, 19 bp, Mus musculus
  siRNA target sequence for E030041M21Rik (NM_029166.1,1173-1191).
ctcccatcatctagtgatt

SEQ ID NO: 483994 - DNA, 19 bp, Mus musculus
  siRNA target sequence for E030041M21Rik (NM_029166.1,1193-1211).
cccatctagatctacacat

SEQ ID NO: 483995 - DNA, 19 bp, Mus musculus
  siRNA target sequence for E030041M21Rik (NM_029166.1,1204-1222).
ctacacatctgtgatgata

SEQ ID NO: 483996 - DNA, 19 bp, Mus musculus
  siRNA target sequence for E030041M21Rik (NM_029166.1,1265-1283).
gtgctatgcaactctcttt

SEQ ID NO: 483997 - DNA, 19 bp, Mus musculus
  siRNA target sequence for E030041M21Rik (NM_029166.1,1288-1306).
cagctgaccatagactatt

SEQ ID NO: 483998 - DNA, 19 bp, Mus musculus
  siRNA target sequence for E030041M21Rik (NM_029166.1,1293-1311).
gaccatagactattatcct

SEQ ID NO: 483999 - DNA, 19 bp, Mus musculus
  siRNA target sequence for E030041M21Rik (NM_029166.1,1295-1313).
ccatagactattatcctta

SEQ ID NO: 484000 - DNA, 19 bp, Mus musculus
  siRNA target sequence for E030041M21Rik (NM_029166.1,1302-1320).
ctattatccttatcataaa

SEQ ID NO: 484001 - DNA, 19 bp, Mus musculus
  siRNA target sequence for E030041M21Rik (NM_029166.1,1379-1397).
gatgggctaatgagttgtt

SEQ ID NO: 484002 - DNA, 19 bp, Mus musculus
  siRNA target sequence for E030041M21Rik (NM_029166.1,1382-1400).
gggctaatgagttgttaca

SEQ ID NO: 484003 - DNA, 19 bp, Mus musculus
  siRNA target sequence for E030041M21Rik (NM_029166.1,1383-1401).
ggctaatgagttgttacat

SEQ ID NO: 484004 - DNA, 19 bp, Mus musculus
  siRNA target sequence for E030041M21Rik (NM_029166.1,1385-1403).
ctaatgagttgttacatga

SEQ ID NO: 484005 - DNA, 19 bp, Mus musculus
  siRNA target sequence for E030041M21Rik (NM_029166.1,1412-1430).
gcaacgtggaaatgcttaa

SEQ ID NO: 484006 - DNA, 19 bp, Mus musculus
  siRNA target sequence for E030041M21Rik (NM_029166.1,1435-1453).
gccatgaaggaccgtaatt

SEQ ID NO: 484007 - DNA, 19 bp, Mus musculus
  siRNA target sequence for E030041M21Rik (NM_029166.1,1436-1454).
ccatgaaggaccgtaattt

SEQ ID NO: 484008 - DNA, 19 bp, Mus musculus
  siRNA target sequence for E030041M21Rik (NM_029166.1,1437-1455).
catgaaggaccgtaattta

SEQ ID NO: 484009 - DNA, 19 bp, Mus musculus
  siRNA target sequence for E030041M21Rik (NM_029166.1,1440-1458).
gaaggaccgtaatttaggt

SEQ ID NO: 484010 - DNA, 19 bp, Mus musculus
  siRNA target sequence for E030041M21Rik (NM_029166.1,1534-1552).
cctaaaacaccttcagtat

SEQ ID NO: 484011 - DNA, 19 bp, Mus musculus
  siRNA target sequence for E030041M21Rik (NM_029166.1,1556-1574).
ctcaaccgtcaaaagctaa

SEQ ID NO: 484012 - DNA, 19 bp, Mus musculus
  siRNA target sequence for E030041M21Rik (NM_029166.1,1575-1593).
gctcatgtctagttctgtt

SEQ ID NO: 484013 - DNA, 19 bp, Mus musculus
  siRNA target sequence for E030041M21Rik (NM_029166.1,1627-1645).
gtctctacagcagaacaat

SEQ ID NO: 484014 - DNA, 19 bp, Mus musculus
  siRNA target sequence for E030041M21Rik (NM_029166.1,1690-1708).
ctgtatcttccacaagaaa

SEQ ID NO: 484015 - DNA, 19 bp, Mus musculus
  siRNA target sequence for E030041M21Rik (NM_029166.1,1705-1723).
gaaatgtcagctatctata

SEQ ID NO: 484016 - DNA, 19 bp, Mus musculus
  siRNA target sequence for E030041M21Rik (NM_029166.1,1714-1732).
gctatctatatagaattca

SEQ ID NO: 484017 - DNA, 19 bp, Mus musculus
  siRNA target sequence for E030041M21Rik (NM_029166.1,1731-1749).
cacagaatattattatcca

SEQ ID NO: 484018 - DNA, 19 bp, Mus musculus
  siRNA target sequence for E030041M21Rik (NM_029166.1,1771-1789).
ccatctcccaacctatata

SEQ ID NO: 484019 - DNA, 19 bp, Mus musculus
  siRNA target sequence for E030041M21Rik (NM_029166.1,1826-1844).
ggagcattctgtggttaaa

SEQ ID NO: 484020 - DNA, 19 bp, Mus musculus
  siRNA target sequence for E030041M21Rik (NM_029166.1,1829-1847).
gcattctgtggttaaacca

SEQ ID NO: 484021 - DNA, 19 bp, Mus musculus
  siRNA target sequence for E030041M21Rik (NM_029166.1,1887-1905).
ggctgtgtacaagttgaat

SEQ ID NO: 484022 - DNA, 19 bp, Mus musculus
  siRNA target sequence for E030041M21Rik (NM_029166.1,1889-1907).
ctgtgtacaagttgaatga

SEQ ID NO: 484023 - DNA, 19 bp, Mus musculus
  siRNA target sequence for E030041M21Rik (NM_029166.1,1891-1909).
gtgtacaagttgaatgaca

SEQ ID NO: 484024 - DNA, 19 bp, Mus musculus
  siRNA target sequence for E030041M21Rik (NM_029166.1,1940-1958).
gagttgacggcttaatgct

SEQ ID NO: 484025 - DNA, 19 bp, Mus musculus
  siRNA target sequence for E030041M21Rik (NM_029166.1,1942-1960).
gttgacggcttaatgctaa

SEQ ID NO: 484026 - DNA, 19 bp, Mus musculus
  siRNA target sequence for E030041M21Rik (NM_029166.1,1945-1963).
gacggcttaatgctaaagt

SEQ ID NO: 484027 - DNA, 19 bp, Mus musculus
  siRNA target sequence for E030041M21Rik (NM_029166.1,1947-1965).
cggcttaatgctaaagttt

SEQ ID NO: 484028 - DNA, 19 bp, Mus musculus
  siRNA target sequence for E030041M21Rik (NM_029166.1,2007-2025).
gcctcacacggtgtctatt

SEQ ID NO: 484029 - DNA, 19 bp, Mus musculus
  siRNA target sequence for E030041M21Rik (NM_029166.1,2011-2029).
cacacggtgtctattcaga

SEQ ID NO: 484030 - DNA, 19 bp, Mus musculus
  siRNA target sequence for E030041M21Rik (NM_029166.1,2070-2088).
ctgccgccattctgatcta

SEQ ID NO: 484031 - DNA, 19 bp, Mus musculus
  siRNA target sequence for E030041M21Rik (NM_029166.1,2072-2090).
gccgccattctgatctaga

SEQ ID NO: 484032 - DNA, 19 bp, Mus musculus
  siRNA target sequence for E030041M21Rik (NM_029166.1,2073-2091).
ccgccattctgatctagaa

SEQ ID NO: 484033 - DNA, 19 bp, Mus musculus
  siRNA target sequence for E030041M21Rik (NM_029166.1,2113-2131).
gagtgtgacttttttagca

SEQ ID NO: 484034 - DNA, 19 bp, Mus musculus
  siRNA target sequence for E030041M21Rik (NM_029166.1,2115-2133).
gtgtgacttttttagcaaa

SEQ ID NO: 484035 - DNA, 19 bp, Mus musculus
  siRNA target sequence for E030041M21Rik (NM_029166.1,2129-2147).
gcaaaacttatactagatt

SEQ ID NO: 484036 - DNA, 19 bp, Mus musculus
  siRNA target sequence for E030041M21Rik (NM_029166.1,2197-2215).
catgcccacgaacaagata

SEQ ID NO: 484037 - DNA, 19 bp, Mus musculus
  siRNA target sequence for E030041M21Rik (NM_029166.1,2202-2220).
ccacgaacaagataccaaa

SEQ ID NO: 484038 - DNA, 19 bp, Mus musculus
  siRNA target sequence for E030041M21Rik (NM_029166.1,2203-2221).
cacgaacaagataccaaaa

SEQ ID NO: 484039 - DNA, 19 bp, Mus musculus
  siRNA target sequence for E030041M21Rik (NM_029166.1,2239-2257).
gggaatattatccctaaat

SEQ ID NO: 484040 - DNA, 19 bp, Mus musculus
  siRNA target sequence for E030041M21Rik (NM_029166.1,2315-2333).
cccagttttggatagacta

SEQ ID NO: 484041 - DNA, 19 bp, Mus musculus
  siRNA target sequence for E030041M21Rik (NM_029166.1,2316-2334).
ccagttttggatagactat

SEQ ID NO: 484042 - DNA, 19 bp, Mus musculus
  siRNA target sequence for E030041M21Rik (NM_029166.1,2319-2337).
gttttggatagactatgaa

SEQ ID NO: 484043 - DNA, 19 bp, Mus musculus
  siRNA target sequence for E030041M21Rik (NM_029166.1,2360-2378).
ggccagtaagctttgtaga

SEQ ID NO: 484044 - DNA, 19 bp, Mus musculus
  siRNA target sequence for E030041M21Rik (NM_029166.1,2386-2404).
cctctgtctatctggattt

SEQ ID NO: 484045 - DNA, 19 bp, Mus musculus
  siRNA target sequence for E030041M21Rik (NM_029166.1,2439-2457).
gttccagacttgtgatcaa

SEQ ID NO: 484046 - DNA, 19 bp, Mus musculus
  siRNA target sequence for E030041M21Rik (NM_029166.1,2452-2470).
gatcaagtgacccttaata

SEQ ID NO: 484047 - DNA, 19 bp, Mus musculus
  siRNA target sequence for E030041M21Rik (NM_029166.1,2463-2481).
ccttaatacctcacaaagt

SEQ ID NO: 484048 - DNA, 19 bp, Mus musculus
  siRNA target sequence for E030041M21Rik (NM_029166.1,2494-2512).
ctggctggccgaatgaaga

SEQ ID NO: 484049 - DNA, 19 bp, Mus musculus
  siRNA target sequence for E030041M21Rik (NM_029166.1,2521-2539).
ctcttgaaggagtattaca

SEQ ID NO: 484050 - DNA, 19 bp, Mus musculus
  siRNA target sequence for E030041M21Rik (NM_029166.1,2523-2541).
cttgaaggagtattacagt

SEQ ID NO: 484051 - DNA, 19 bp, Mus musculus
  siRNA target sequence for E030041M21Rik (NM_029166.1,2547-2565).
gtctgagcctctgacaaat

SEQ ID NO: 484052 - DNA, 19 bp, Mus musculus
  siRNA target sequence for E030041M21Rik (NM_029166.1,2635-2653).
gtcttggtccgtgttcata

SEQ ID NO: 484053 - DNA, 19 bp, Mus musculus
  siRNA target sequence for E030041M21Rik (NM_029166.1,2637-2655).
cttggtccgtgttcataaa

SEQ ID NO: 484054 - DNA, 19 bp, Mus musculus
  siRNA target sequence for E030041M21Rik (NM_029166.1,2640-2658).
ggtccgtgttcataaacat

SEQ ID NO: 484055 - DNA, 19 bp, Mus musculus
  siRNA target sequence for E030041M21Rik (NM_029166.1,2663-2681).
gtatgcagatcaatcacta

SEQ ID NO: 484056 - DNA, 19 bp, Mus musculus
  siRNA target sequence for E030041M21Rik (NM_029166.1,2668-2686).
cagatcaatcactaccaat

SEQ ID NO: 484057 - DNA, 19 bp, Mus musculus
  siRNA target sequence for E030041M21Rik (NM_029166.1,2670-2688).
gatcaatcactaccaatat

SEQ ID NO: 484058 - DNA, 19 bp, Mus musculus
  siRNA target sequence for E030041M21Rik (NM_029166.1,2862-2880).
gcgctctcctgcttctgaa

SEQ ID NO: 484059 - DNA, 19 bp, Mus musculus
  siRNA target sequence for E030041M21Rik (NM_029166.1,2863-2881).
cgctctcctgcttctgaaa

SEQ ID NO: 484060 - DNA, 19 bp, Mus musculus
  siRNA target sequence for E030041M21Rik (NM_029166.1,2962-2980).
ggtatacaccgaattagaa

SEQ ID NO: 484061 - DNA, 19 bp, Mus musculus
  siRNA target sequence for E030041M21Rik (NM_029166.1,2963-2981).
gtatacaccgaattagaaa

SEQ ID NO: 484062 - DNA, 19 bp, Mus musculus
  siRNA target sequence for E030041M21Rik (NM_029166.1,2968-2986).
caccgaattagaaatgcta

SEQ ID NO: 484063 - DNA, 19 bp, Mus musculus
  siRNA target sequence for E030041M21Rik (NM_029166.1,2978-2996).
gaaatgctactctcaatca

SEQ ID NO: 484064 - DNA, 19 bp, Mus musculus
  siRNA target sequence for E030041M21Rik (NM_029166.1,3028-3046).
ctcagccacgcccctttaa

SEQ ID NO: 484065 - DNA, 19 bp, Mus musculus
  siRNA target sequence for E030041M21Rik (NM_029166.1,3032-3050).
gccacgcccctttaaagga

SEQ ID NO: 484066 - DNA, 19 bp, Mus musculus
  siRNA target sequence for E030041M21Rik (NM_029166.1,3098-3116).
cttcttttctagactactt

SEQ ID NO: 484067 - DNA, 19 bp, Mus musculus
  siRNA target sequence for E030041M21Rik (NM_029166.1,3111-3129).
ctacttatcagataaacat

SEQ ID NO: 484068 - DNA, 19 bp, Mus musculus
  siRNA target sequence for E030041M21Rik (NM_029166.1,3331-3349).
ggaattgacgccatacact

SEQ ID NO: 484069 - DNA, 19 bp, Mus musculus
  siRNA target sequence for E030041M21Rik (NM_029166.1,3399-3417).
gaacccggagagcagtaaa

SEQ ID NO: 484070 - DNA, 19 bp, Mus musculus
  siRNA target sequence for E030041M21Rik (NM_029166.1,3430-3448).
ccagccagagcacctaaat

SEQ ID NO: 484071 - DNA, 19 bp, Mus musculus
  siRNA target sequence for E030041M21Rik (NM_029166.1,3458-3476).
ccttaagtgctaaatctaa

SEQ ID NO: 484072 - DNA, 19 bp, Mus musculus
  siRNA target sequence for E030041M21Rik (NM_029166.1,3570-3588).
ggacagcatggtattggaa

SEQ ID NO: 484073 - DNA, 19 bp, Mus musculus
  siRNA target sequence for E030041M21Rik (NM_029166.1,3785-3803).
cagtcgtggtgtttagaat

SEQ ID NO: 484074 - DNA, 19 bp, Mus musculus
  siRNA target sequence for E030041M21Rik (NM_029166.1,3787-3805).
gtcgtggtgtttagaatca

SEQ ID NO: 484075 - DNA, 19 bp, Mus musculus
  siRNA target sequence for E030041M21Rik (NM_029166.1,3789-3807).
cgtggtgtttagaatcact

SEQ ID NO: 484076 - DNA, 19 bp, Mus musculus
  siRNA target sequence for E030041M21Rik (NM_029166.1,3811-3829).
gttaatggagaaattgaca

SEQ ID NO: 484077 - DNA, 19 bp, Mus musculus
  siRNA target sequence for E030041M21Rik (NM_029166.1,3870-3888).
ggtgacgccaagtcagtta

SEQ ID NO: 484078 - DNA, 19 bp, Mus musculus
  siRNA target sequence for E030041M21Rik (NM_029166.1,3931-3949).
ggttctgaccagaaagcta

SEQ ID NO: 484079 - DNA, 19 bp, Mus musculus
  siRNA target sequence for E030041M21Rik (NM_029166.1,3932-3950).
gttctgaccagaaagctat

SEQ ID NO: 484080 - DNA, 19 bp, Mus musculus
  siRNA target sequence for E030041M21Rik (NM_029166.1,3965-3983).
cctcgcctgagatttctct

SEQ ID NO: 484081 - DNA, 19 bp, Mus musculus
  siRNA target sequence for E030041M21Rik (NM_029166.1,3975-3993).
gatttctctgaggtttgaa

SEQ ID NO: 484082 - DNA, 19 bp, Mus musculus
  siRNA target sequence for E030041M21Rik (NM_029166.1,4108-4126).
cactttctggaggatgaaa

SEQ ID NO: 484083 - DNA, 19 bp, Mus musculus
  siRNA target sequence for E030041M21Rik (NM_029166.1,4123-4141).
gaaactgttgcaacagtaa

SEQ ID NO: 484084 - DNA, 19 bp, Mus musculus
  siRNA target sequence for E030041M21Rik (NM_029166.1,4136-4154).
cagtaatgccaatgaaaat

SEQ ID NO: 484085 - DNA, 19 bp, Mus musculus
  siRNA target sequence for E030041M21Rik (NM_029166.1,4163-4181).
ctaacacaaagataaactt

SEQ ID NO: 484086 - DNA, 19 bp, Mus musculus
  siRNA target sequence for E030041M21Rik (NM_029166.1,4311-4329).
cactgggactgatttcaaa

SEQ ID NO: 484087 - DNA, 19 bp, Mus musculus
  siRNA target sequence for E030041M21Rik (NM_029166.1,4415-4433).
cgagcccagaggttccttt

SEQ ID NO: 484088 - DNA, 19 bp, Mus musculus
  siRNA target sequence for E030041M21Rik (NM_029166.1,4439-4457).
cacagtcagccaactttct

SEQ ID NO: 484089 - DNA, 19 bp, Mus musculus
  siRNA target sequence for E030041M21Rik (NM_029166.1,4447-4465).
gccaactttctcgacatta

SEQ ID NO: 484090 - DNA, 19 bp, Mus musculus
  siRNA target sequence for E030041M21Rik (NM_029166.1,4449-4467).
caactttctcgacattaca

SEQ ID NO: 484091 - DNA, 19 bp, Mus musculus
  siRNA target sequence for E030041M21Rik (NM_029166.1,4506-4524).
gagactagctcaagctaaa

SEQ ID NO: 484092 - DNA, 19 bp, Mus musculus
  siRNA target sequence for E030041M21Rik (NM_029166.1,4508-4526).
gactagctcaagctaaaat

SEQ ID NO: 484093 - DNA, 19 bp, Mus musculus
  siRNA target sequence for E130311K13 (NM_177856.2,149-167).
gccatagctgggataatgt

SEQ ID NO: 484094 - DNA, 19 bp, Mus musculus
  siRNA target sequence for E130311K13 (NM_177856.2,150-168).
ccatagctgggataatgtt

SEQ ID NO: 484095 - DNA, 19 bp, Mus musculus
  siRNA target sequence for E130311K13 (NM_177856.2,158-176).
gggataatgttgctgataa

SEQ ID NO: 484096 - DNA, 19 bp, Mus musculus
  siRNA target sequence for E130311K13 (NM_177856.2,184-202).
ccggctgacctcaaaattt

SEQ ID NO: 484097 - DNA, 19 bp, Mus musculus
  siRNA target sequence for E130311K13 (NM_177856.2,185-203).
cggctgacctcaaaattta

SEQ ID NO: 484098 - DNA, 19 bp, Mus musculus
  siRNA target sequence for E130311K13 (NM_177856.2,213-231).
cagatattccagtagaatt

SEQ ID NO: 484099 - DNA, 19 bp, Mus musculus
  siRNA target sequence for E130311K13 (NM_177856.2,221-239).
ccagtagaatttataagaa

SEQ ID NO: 484100 - DNA, 19 bp, Mus musculus
  siRNA target sequence for E130311K13 (NM_177856.2,259-277).
ccgattacagcggataact

SEQ ID NO: 484101 - DNA, 19 bp, Mus musculus
  siRNA target sequence for E130311K13 (NM_177856.2,261-279).
gattacagcggataactga

SEQ ID NO: 484102 - DNA, 19 bp, Mus musculus
  siRNA target sequence for E130311K13 (NM_177856.2,276-294).
ctgagtgtggtctagaaat

SEQ ID NO: 484103 - DNA, 19 bp, Mus musculus
  siRNA target sequence for E130311K13 (NM_177856.2,282-300).
gtggtctagaaattgaaca

SEQ ID NO: 484104 - DNA, 19 bp, Mus musculus
  siRNA target sequence for E130311K13 (NM_177856.2,285-303).
gtctagaaattgaacatat

SEQ ID NO: 484105 - DNA, 19 bp, Mus musculus
  siRNA target sequence for E130311K13 (NM_177856.2,290-308).
gaaattgaacatataccta

SEQ ID NO: 484106 - DNA, 19 bp, Mus musculus
  siRNA target sequence for E130311K13 (NM_177856.2,491-509).
gtgaacaagggcggatatt

SEQ ID NO: 484107 - DNA, 19 bp, Mus musculus
  siRNA target sequence for E130311K13 (NM_177856.2,493-511).
gaacaagggcggatatttt

SEQ ID NO: 484108 - DNA, 19 bp, Mus musculus
  siRNA target sequence for E130311K13 (NM_177856.2,521-539).
ctgaatgaggagattttga

SEQ ID NO: 484109 - DNA, 19 bp, Mus musculus
  siRNA target sequence for E130311K13 (NM_177856.2,551-569).
ggcaaaaccgtccttgtta

SEQ ID NO: 484110 - DNA, 19 bp, Mus musculus
  siRNA target sequence for E130311K13 (NM_177856.2,563-581).
cttgttaaagggctaaatt

SEQ ID NO: 484111 - DNA, 19 bp, Mus musculus
  siRNA target sequence for E130311K13 (NM_177856.2,627-645).
ctgaattgacggccttaaa

SEQ ID NO: 484112 - DNA, 19 bp, Mus musculus
  siRNA target sequence for E130311K13 (NM_177856.2,768-786).
gctccaccaaagacagtta

SEQ ID NO: 484113 - DNA, 19 bp, Mus musculus
  siRNA target sequence for E130311K13 (NM_177856.2,769-787).
ctccaccaaagacagttat

SEQ ID NO: 484114 - DNA, 19 bp, Mus musculus
  siRNA target sequence for E130311K13 (NM_177856.2,824-842).
gacagcgtgagcaactact

SEQ ID NO: 484115 - DNA, 19 bp, Mus musculus
  siRNA target sequence for E130311K13 (NM_177856.2,828-846).
gcgtgagcaactactcttt

SEQ ID NO: 484116 - DNA, 19 bp, Mus musculus
  siRNA target sequence for Ear11 (NM_053113.2,133-151).
ccctcccggtggtttgaca

SEQ ID NO: 484117 - DNA, 19 bp, Mus musculus
  siRNA target sequence for Ear11 (NM_053113.2,134-152).
cctcccggtggtttgacat

SEQ ID NO: 484118 - DNA, 19 bp, Mus musculus
  siRNA target sequence for Ear11 (NM_053113.2,212-230).
gttacacaggagtgtgtaa

SEQ ID NO: 484119 - DNA, 19 bp, Mus musculus
  siRNA target sequence for Ear11 (NM_053113.2,218-236).
caggagtgtgtaaagacat

SEQ ID NO: 484120 - DNA, 19 bp, Mus musculus
  siRNA target sequence for Ear11 (NM_053113.2,289-307).
ccacgtaagatctgcaaaa

SEQ ID NO: 484121 - DNA, 19 bp, Mus musculus
  siRNA target sequence for Ear11 (NM_053113.2,290-308).
cacgtaagatctgcaaaaa

SEQ ID NO: 484122 - DNA, 19 bp, Mus musculus
  siRNA target sequence for Ear11 (NM_053113.2,303-321).
caaaaatgggataagtaga

SEQ ID NO: 484123 - DNA, 19 bp, Mus musculus
  siRNA target sequence for Ear11 (NM_053113.2,311-329).
ggataagtagaaattgtca

SEQ ID NO: 484124 - DNA, 19 bp, Mus musculus
  siRNA target sequence for Ear11 (NM_053113.2,312-330).
gataagtagaaattgtcat

SEQ ID NO: 484125 - DNA, 19 bp, Mus musculus
  siRNA target sequence for Ear11 (NM_053113.2,335-353).
gttcaaatcgggtacaagt

SEQ ID NO: 484126 - DNA, 19 bp, Mus musculus
  siRNA target sequence for Ear11 (NM_053113.2,343-361).
cgggtacaagtaactatct

SEQ ID NO: 484127 - DNA, 19 bp, Mus musculus
  siRNA target sequence for Ear11 (NM_053113.2,346-364).
gtacaagtaactatctgta

SEQ ID NO: 484128 - DNA, 19 bp, Mus musculus
  siRNA target sequence for Ear11 (NM_053113.2,371-389).
caactccggccagtcatta

SEQ ID NO: 484129 - DNA, 19 bp, Mus musculus
  siRNA target sequence for Ear11 (NM_053113.2,376-394).
ccggccagtcattattcca

SEQ ID NO: 484130 - DNA, 19 bp, Mus musculus
  siRNA target sequence for Ear11 (NM_053113.2,377-395).
cggccagtcattattccaa

SEQ ID NO: 484131 - DNA, 19 bp, Mus musculus
  siRNA target sequence for Ear11 (NM_053113.2,413-431).
caagatcaatgaagtacta

SEQ ID NO: 484132 - DNA, 19 bp, Mus musculus
  siRNA target sequence for Ear6 (NM_053111.2,155-173).
gcatcccagtggtttgcta

SEQ ID NO: 484133 - DNA, 19 bp, Mus musculus
  siRNA target sequence for Ear6 (NM_053111.2,170-188).
gctacccagcatatcactt

SEQ ID NO: 484134 - DNA, 19 bp, Mus musculus
  siRNA target sequence for Ear6 (NM_053111.2,221-239).
caggctattaacatgcata

SEQ ID NO: 484135 - DNA, 19 bp, Mus musculus
  siRNA target sequence for Ear6 (NM_053111.2,389-407).
ctcacaactccgagaagaa

SEQ ID NO: 484136 - DNA, 19 bp, Mus musculus
  siRNA target sequence for Ear6 (NM_053111.2,391-409).
cacaactccgagaagaaat

SEQ ID NO: 484137 - DNA, 19 bp, Mus musculus
  siRNA target sequence for Endog (NM_007931.1,593-611).
gcagcttgacgcgaactta

SEQ ID NO: 484138 - DNA, 19 bp, Mus musculus
  siRNA target sequence for Endog (NM_007931.1,597-615).
cttgacgcgaacttaccaa

SEQ ID NO: 484139 - DNA, 19 bp, Mus musculus
  siRNA target sequence for Endog (NM_007931.1,600-618).
gacgcgaacttaccaaaat

SEQ ID NO: 484140 - DNA, 19 bp, Mus musculus
  siRNA target sequence for Endog (NM_007931.1,602-620).
cgcgaacttaccaaaatgt

SEQ ID NO: 484141 - DNA, 19 bp, Mus musculus
  siRNA target sequence for Endog (NM_007931.1,605-623).
gaacttaccaaaatgtcta

SEQ ID NO: 484142 - DNA, 19 bp, Mus musculus
  siRNA target sequence for Endog (NM_007931.1,668-686).
ggaagtcctatgtgaagta

SEQ ID NO: 484143 - DNA, 19 bp, Mus musculus
  siRNA target sequence for Endog (NM_007931.1,870-888).
gctcttcgtgcccaatatt

SEQ ID NO: 484144 - DNA, 19 bp, Mus musculus
  siRNA target sequence for Enpp1 (NM_008813.2,288-306).
gctgtcgctggttttgtca

SEQ ID NO: 484145 - DNA, 19 bp, Mus musculus
  siRNA target sequence for Enpp1 (NM_008813.2,361-379).
gccaaagaagtaaaaagtt

SEQ ID NO: 484146 - DNA, 19 bp, Mus musculus
  siRNA target sequence for Enpp1 (NM_008813.2,476-494).
gtgtggaaccaacacatat

SEQ ID NO: 484147 - DNA, 19 bp, Mus musculus
  siRNA target sequence for Enpp1 (NM_008813.2,481-499).
gaaccaacacatatatgga

SEQ ID NO: 484148 - DNA, 19 bp, Mus musculus
  siRNA target sequence for Enpp1 (NM_008813.2,580-598).
gactgttgcatcaactaca

SEQ ID NO: 484149 - DNA, 19 bp, Mus musculus
  siRNA target sequence for Enpp1 (NM_008813.2,621-639).
gagttgggtagaagaaaca

SEQ ID NO: 484150 - DNA, 19 bp, Mus musculus
  siRNA target sequence for Enpp1 (NM_008813.2,663-681).
gtgtccagcagagtttgaa

SEQ ID NO: 484151 - DNA, 19 bp, Mus musculus
  siRNA target sequence for Enpp1 (NM_008813.2,745-763).
ggacttcttcctgtcatta

SEQ ID NO: 484152 - DNA, 19 bp, Mus musculus
  siRNA target sequence for Enpp1 (NM_008813.2,757-775).
gtcattagcaagctgaaaa

SEQ ID NO: 484153 - DNA, 19 bp, Mus musculus
  siRNA target sequence for Enpp1 (NM_008813.2,819-837).
caagacgtttcccaatcat

SEQ ID NO: 484154 - DNA, 19 bp, Mus musculus
  siRNA target sequence for Enpp1 (NM_008813.2,863-881).
cggaatcccatggcataat

SEQ ID NO: 484155 - DNA, 19 bp, Mus musculus
  siRNA target sequence for Enpp1 (NM_008813.2,864-882).
ggaatcccatggcataatt

SEQ ID NO: 484156 - DNA, 19 bp, Mus musculus
  siRNA target sequence for Enpp1 (NM_008813.2,869-887).
cccatggcataattgataa

SEQ ID NO: 484157 - DNA, 19 bp, Mus musculus
  siRNA target sequence for Enpp1 (NM_008813.2,875-893).
gcataattgataacaagat

SEQ ID NO: 484158 - DNA, 19 bp, Mus musculus
  siRNA target sequence for Enpp1 (NM_008813.2,913-931).
gcttctttctcgcttaaaa

SEQ ID NO: 484159 - DNA, 19 bp, Mus musculus
  siRNA target sequence for Enpp1 (NM_008813.2,917-935).
ctttctcgcttaaaagtaa

SEQ ID NO: 484160 - DNA, 19 bp, Mus musculus
  siRNA target sequence for Enpp1 (NM_008813.2,923-941).
cgcttaaaagtaaagagaa

SEQ ID NO: 484161 - DNA, 19 bp, Mus musculus
  siRNA target sequence for Enpp1 (NM_008813.2,945-963).
caaccctttgtggtacaaa

SEQ ID NO: 484162 - DNA, 19 bp, Mus musculus
  siRNA target sequence for Enpp1 (NM_008813.2,977-995).
gggtgaccgctaatcatca

SEQ ID NO: 484163 - DNA, 19 bp, Mus musculus
  siRNA target sequence for Enpp1 (NM_008813.2,1000-1018).
gtcaagtccggcacatact

SEQ ID NO: 484164 - DNA, 19 bp, Mus musculus
  siRNA target sequence for Enpp1 (NM_008813.2,1002-1020).
caagtccggcacatacttt

SEQ ID NO: 484165 - DNA, 19 bp, Mus musculus
  siRNA target sequence for Enpp1 (NM_008813.2,1038-1056).
ggagattgacgggattcta

SEQ ID NO: 484166 - DNA, 19 bp, Mus musculus
  siRNA target sequence for Enpp1 (NM_008813.2,1048-1066).
gggattctaccagatatct

SEQ ID NO: 484167 - DNA, 19 bp, Mus musculus
  siRNA target sequence for Enpp1 (NM_008813.2,1049-1067).
ggattctaccagatatcta

SEQ ID NO: 484168 - DNA, 19 bp, Mus musculus
  siRNA target sequence for Enpp1 (NM_008813.2,1057-1075).
ccagatatctacaaagtgt

SEQ ID NO: 484169 - DNA, 19 bp, Mus musculus
  siRNA target sequence for Enpp1 (NM_008813.2,1141-1159).
catgaaagaccacactttt

SEQ ID NO: 484170 - DNA, 19 bp, Mus musculus
  siRNA target sequence for Enpp1 (NM_008813.2,1339-1357).
caaggcagctgtaagaagt

SEQ ID NO: 484171 - DNA, 19 bp, Mus musculus
  siRNA target sequence for Enpp1 (NM_008813.2,1360-1378).
gtgtacctgaataagtact

SEQ ID NO: 484172 - DNA, 19 bp, Mus musculus
  siRNA target sequence for Enpp1 (NM_008813.2,1381-1399).
ggggatgtgaacaatgtga

SEQ ID NO: 484173 - DNA, 19 bp, Mus musculus
  siRNA target sequence for Enpp1 (NM_008813.2,1444-1462).
ccagagacatactattcat

SEQ ID NO: 484174 - DNA, 19 bp, Mus musculus
  siRNA target sequence for Enpp1 (NM_008813.2,1447-1465).
gagacatactattcattta

SEQ ID NO: 484175 - DNA, 19 bp, Mus musculus
  siRNA target sequence for Enpp1 (NM_008813.2,1455-1473).
ctattcatttaactatgaa

SEQ ID NO: 484176 - DNA, 19 bp, Mus musculus
  siRNA target sequence for Enpp1 (NM_008813.2,1499-1517).
gggagccaaaccagcattt

SEQ ID NO: 484177 - DNA, 19 bp, Mus musculus
  siRNA target sequence for Enpp1 (NM_008813.2,1549-1567).
cgcttacacttcgctaaaa

SEQ ID NO: 484178 - DNA, 19 bp, Mus musculus
  siRNA target sequence for Enpp1 (NM_008813.2,1608-1626).
gtggcaacttgcgttgaat

SEQ ID NO: 484179 - DNA, 19 bp, Mus musculus
  siRNA target sequence for Enpp1 (NM_008813.2,1612-1630).
caacttgcgttgaatccat

SEQ ID NO: 484180 - DNA, 19 bp, Mus musculus
  siRNA target sequence for Enpp1 (NM_008813.2,1660-1678).
catggctctgacaacttgt

SEQ ID NO: 484181 - DNA, 19 bp, Mus musculus
  siRNA target sequence for Enpp1 (NM_008813.2,1665-1683).
ctctgacaacttgttttca

SEQ ID NO: 484182 - DNA, 19 bp, Mus musculus
  siRNA target sequence for Enpp1 (NM_008813.2,1686-1704).
catgcaagctctttttatt

SEQ ID NO: 484183 - DNA, 19 bp, Mus musculus
  siRNA target sequence for Enpp1 (NM_008813.2,1851-1869).
catttacaacccaagtcat

SEQ ID NO: 484184 - DNA, 19 bp, Mus musculus
  siRNA target sequence for Enpp1 (NM_008813.2,1860-1878).
cccaagtcatcccaaagaa

SEQ ID NO: 484185 - DNA, 19 bp, Mus musculus
  siRNA target sequence for Enpp1 (NM_008813.2,1890-1908).
gtctcagtgtccaatcaaa

SEQ ID NO: 484186 - DNA, 19 bp, Mus musculus
  siRNA target sequence for Enpp1 (NM_008813.2,1894-1912).
cagtgtccaatcaaatcaa

SEQ ID NO: 484187 - DNA, 19 bp, Mus musculus
  siRNA target sequence for Enpp1 (NM_008813.2,1932-1950).
cacatgtgacccttggatt

SEQ ID NO: 484188 - DNA, 19 bp, Mus musculus
  siRNA target sequence for Enpp1 (NM_008813.2,1943-1961).
cttggattgtgccaatcaa

SEQ ID NO: 484189 - DNA, 19 bp, Mus musculus
  siRNA target sequence for Enpp1 (NM_008813.2,1954-1972).
ccaatcaaggactttgaga

SEQ ID NO: 484190 - DNA, 19 bp, Mus musculus
  siRNA target sequence for Enpp1 (NM_008813.2,1996-2014).
gatgatgacatttaccata

SEQ ID NO: 484191 - DNA, 19 bp, Mus musculus
  siRNA target sequence for Enpp1 (NM_008813.2,2119-2137).
cccctctgggcgtcttaca

SEQ ID NO: 484192 - DNA, 19 bp, Mus musculus
  siRNA target sequence for Enpp1 (NM_008813.2,2232-2250).
ctattacaaaagcaattct

SEQ ID NO: 484193 - DNA, 19 bp, Mus musculus
  siRNA target sequence for Enpp1 (NM_008813.2,2269-2287).
ctcacgccaccgagactaa

SEQ ID NO: 484194 - DNA, 19 bp, Mus musculus
  siRNA target sequence for Enpp1 (NM_008813.2,2271-2289).
cacgccaccgagactaaat

SEQ ID NO: 484195 - DNA, 19 bp, Mus musculus
  siRNA target sequence for Enpp1 (NM_008813.2,2274-2292).
gccaccgagactaaataga

SEQ ID NO: 484196 - DNA, 19 bp, Mus musculus
  siRNA target sequence for Enpp1 (NM_008813.2,2276-2294).
caccgagactaaatagagt

SEQ ID NO: 484197 - DNA, 19 bp, Mus musculus
  siRNA target sequence for Enpp1 (NM_008813.2,2314-2332).
gaagcgctgcttacatcta

SEQ ID NO: 484198 - DNA, 19 bp, Mus musculus
  siRNA target sequence for Enpp1 (NM_008813.2,2317-2335).
gcgctgcttacatctaata

SEQ ID NO: 484199 - DNA, 19 bp, Mus musculus
  siRNA target sequence for Enpp1 (NM_008813.2,2318-2336).
cgctgcttacatctaatat

SEQ ID NO: 484200 - DNA, 19 bp, Mus musculus
  siRNA target sequence for Enpp1 (NM_008813.2,2330-2348).
ctaatatagtgccaatgta

SEQ ID NO: 484201 - DNA, 19 bp, Mus musculus
  siRNA target sequence for Enpp1 (NM_008813.2,2340-2358).
gccaatgtatcagagtttt

SEQ ID NO: 484202 - DNA, 19 bp, Mus musculus
  siRNA target sequence for Enpp1 (NM_008813.2,2342-2360).
caatgtatcagagttttca

SEQ ID NO: 484203 - DNA, 19 bp, Mus musculus
  siRNA target sequence for Enpp1 (NM_008813.2,2346-2364).
gtatcagagttttcaagtt

SEQ ID NO: 484204 - DNA, 19 bp, Mus musculus
  siRNA target sequence for Enpp1 (NM_008813.2,2399-2417).
ggtatgcccatgaaaggaa

SEQ ID NO: 484205 - DNA, 19 bp, Mus musculus
  siRNA target sequence for Enpp1 (NM_008813.2,2414-2432).
ggaacggcatcaatgttgt

SEQ ID NO: 484206 - DNA, 19 bp, Mus musculus
  siRNA target sequence for Enpp1 (NM_008813.2,2435-2453).
gcggtcccgtgtttgactt

SEQ ID NO: 484207 - DNA, 19 bp, Mus musculus
  siRNA target sequence for Enpp1 (NM_008813.2,2436-2454).
cggtcccgtgtttgacttt

SEQ ID NO: 484208 - DNA, 19 bp, Mus musculus
  siRNA target sequence for Enpp1 (NM_008813.2,2440-2458).
cccgtgtttgactttgatt

SEQ ID NO: 484209 - DNA, 19 bp, Mus musculus
  siRNA target sequence for Enpp1 (NM_008813.2,2441-2459).
ccgtgtttgactttgatta

SEQ ID NO: 484210 - DNA, 19 bp, Mus musculus
  siRNA target sequence for Enpp1 (NM_008813.2,2463-2481).
cggacgctatgattcctta

SEQ ID NO: 484211 - DNA, 19 bp, Mus musculus
  siRNA target sequence for Enpp1 (NM_008813.2,2468-2486).
gctatgattccttagagat

SEQ ID NO: 484212 - DNA, 19 bp, Mus musculus
  siRNA target sequence for Enpp1 (NM_008813.2,2508-2526).
catccgaagccaggaaatt

SEQ ID NO: 484213 - DNA, 19 bp, Mus musculus
  siRNA target sequence for Enpp1 (NM_008813.2,2590-2608).
gagtgctccgccttagagt

SEQ ID NO: 484214 - DNA, 19 bp, Mus musculus
  siRNA target sequence for Enpp1 (NM_008813.2,2626-2644).
cctcataggcctgataaca

SEQ ID NO: 484215 - DNA, 19 bp, Mus musculus
  siRNA target sequence for Enpp1 (NM_008813.2,2627-2645).
ctcataggcctgataacat

SEQ ID NO: 484216 - DNA, 19 bp, Mus musculus
  siRNA target sequence for Enpp1 (NM_008813.2,2758-2776).
gaccgacaagagtcagttt

SEQ ID NO: 484217 - DNA, 19 bp, Mus musculus
  siRNA target sequence for Enpp2 (NM_015744.1,62-80).
cgggtcataccaggtaata

SEQ ID NO: 484218 - DNA, 19 bp, Mus musculus
  siRNA target sequence for Enpp2 (NM_015744.1,63-81).
gggtcataccaggtaatat

SEQ ID NO: 484219 - DNA, 19 bp, Mus musculus
  siRNA target sequence for Enpp2 (NM_015744.1,96-114).
gccatcggcgtcaatctct

SEQ ID NO: 484220 - DNA, 19 bp, Mus musculus
  siRNA target sequence for Enpp2 (NM_015744.1,105-123).
gtcaatctctgcttaggat

SEQ ID NO: 484221 - DNA, 19 bp, Mus musculus
  siRNA target sequence for Enpp2 (NM_015744.1,212-230).
ctgcaaaggtagatgcttt

SEQ ID NO: 484222 - DNA, 19 bp, Mus musculus
  siRNA target sequence for Enpp2 (NM_015744.1,261-279).
cggtgtgacaacctatgta

SEQ ID NO: 484223 - DNA, 19 bp, Mus musculus
  siRNA target sequence for Enpp2 (NM_015744.1,289-307).
gcagctgctgccatgattt

SEQ ID NO: 484224 - DNA, 19 bp, Mus musculus
  siRNA target sequence for Enpp2 (NM_015744.1,446-464).
ggtctgcaaaggagaatca

SEQ ID NO: 484225 - DNA, 19 bp, Mus musculus
  siRNA target sequence for Enpp2 (NM_015744.1,522-540).
gtccgccctccgttaatca

SEQ ID NO: 484226 - DNA, 19 bp, Mus musculus
  siRNA target sequence for Enpp2 (NM_015744.1,525-543).
cgccctccgttaatcatct

SEQ ID NO: 484227 - DNA, 19 bp, Mus musculus
  siRNA target sequence for Enpp2 (NM_015744.1,526-544).
gccctccgttaatcatctt

SEQ ID NO: 484228 - DNA, 19 bp, Mus musculus
  siRNA target sequence for Enpp2 (NM_015744.1,528-546).
cctccgttaatcatcttct

SEQ ID NO: 484229 - DNA, 19 bp, Mus musculus
  siRNA target sequence for Enpp2 (NM_015744.1,561-579).
cgtgcatcgtacatgaaga

SEQ ID NO: 484230 - DNA, 19 bp, Mus musculus
  siRNA target sequence for Enpp2 (NM_015744.1,562-580).
gtgcatcgtacatgaagaa

SEQ ID NO: 484231 - DNA, 19 bp, Mus musculus
  siRNA target sequence for Enpp2 (NM_015744.1,587-605).
caaggttatgcccaacatt

SEQ ID NO: 484232 - DNA, 19 bp, Mus musculus
  siRNA target sequence for Enpp2 (NM_015744.1,591-609).
gttatgcccaacattgaga

SEQ ID NO: 484233 - DNA, 19 bp, Mus musculus
  siRNA target sequence for Enpp2 (NM_015744.1,651-669).
gtgtaccctacaaaaacct

SEQ ID NO: 484234 - DNA, 19 bp, Mus musculus
  siRNA target sequence for Enpp2 (NM_015744.1,685-703).
cgctggccactggtttata

SEQ ID NO: 484235 - DNA, 19 bp, Mus musculus
  siRNA target sequence for Enpp2 (NM_015744.1,686-704).
gctggccactggtttatat

SEQ ID NO: 484236 - DNA, 19 bp, Mus musculus
  siRNA target sequence for Enpp2 (NM_015744.1,689-707).
ggccactggtttatatcca

SEQ ID NO: 484237 - DNA, 19 bp, Mus musculus
  siRNA target sequence for Enpp2 (NM_015744.1,718-736).
gaatcgttggcaattcaat

SEQ ID NO: 484238 - DNA, 19 bp, Mus musculus
  siRNA target sequence for Enpp2 (NM_015744.1,722-740).
cgttggcaattcaatgtat

SEQ ID NO: 484239 - DNA, 19 bp, Mus musculus
  siRNA target sequence for Enpp2 (NM_015744.1,737-755).
gtatgaccctgtctttgat

SEQ ID NO: 484240 - DNA, 19 bp, Mus musculus
  siRNA target sequence for Enpp2 (NM_015744.1,771-789).
cgagggcgagagaagttta

SEQ ID NO: 484241 - DNA, 19 bp, Mus musculus
  siRNA target sequence for Enpp2 (NM_015744.1,772-790).
gagggcgagagaagtttaa

SEQ ID NO: 484242 - DNA, 19 bp, Mus musculus
  siRNA target sequence for Enpp2 (NM_015744.1,775-793).
ggcgagagaagtttaacca

SEQ ID NO: 484243 - DNA, 19 bp, Mus musculus
  siRNA target sequence for Enpp2 (NM_015744.1,776-794).
gcgagagaagtttaaccat

SEQ ID NO: 484244 - DNA, 19 bp, Mus musculus
  siRNA target sequence for Enpp2 (NM_015744.1,777-795).
cgagagaagtttaaccata

SEQ ID NO: 484245 - DNA, 19 bp, Mus musculus
  siRNA target sequence for Enpp2 (NM_015744.1,805-823).
gaggccaaccgctatggat

SEQ ID NO: 484246 - DNA, 19 bp, Mus musculus
  siRNA target sequence for Enpp2 (NM_015744.1,807-825).
ggccaaccgctatggatta

SEQ ID NO: 484247 - DNA, 19 bp, Mus musculus
  siRNA target sequence for Enpp2 (NM_015744.1,809-827).
ccaaccgctatggattaca

SEQ ID NO: 484248 - DNA, 19 bp, Mus musculus
  siRNA target sequence for Enpp2 (NM_015744.1,843-861).
gtgagagccgggacattct

SEQ ID NO: 484249 - DNA, 19 bp, Mus musculus
  siRNA target sequence for Enpp2 (NM_015744.1,845-863).
gagagccgggacattcttt

SEQ ID NO: 484250 - DNA, 19 bp, Mus musculus
  siRNA target sequence for Enpp2 (NM_015744.1,849-867).
gccgggacattcttttggt

SEQ ID NO: 484251 - DNA, 19 bp, Mus musculus
  siRNA target sequence for Enpp2 (NM_015744.1,882-900).
cacgagcggagaatcctaa

SEQ ID NO: 484252 - DNA, 19 bp, Mus musculus
  siRNA target sequence for Enpp2 (NM_015744.1,885-903).
gagcggagaatcctaacta

SEQ ID NO: 484253 - DNA, 19 bp, Mus musculus
  siRNA target sequence for Enpp2 (NM_015744.1,890-908).
gagaatcctaactatcctt

SEQ ID NO: 484254 - DNA, 19 bp, Mus musculus
  siRNA target sequence for Enpp2 (NM_015744.1,929-947).
caatgagaggccttcagtt

SEQ ID NO: 484255 - DNA, 19 bp, Mus musculus
  siRNA target sequence for Enpp2 (NM_015744.1,959-977).
ctccgagcagcctgatttt

SEQ ID NO: 484256 - DNA, 19 bp, Mus musculus
  siRNA target sequence for Enpp2 (NM_015744.1,962-980).
cgagcagcctgatttttct

SEQ ID NO: 484257 - DNA, 19 bp, Mus musculus
  siRNA target sequence for Enpp2 (NM_015744.1,1042-1060).
ccgtggggcagttaatgga

SEQ ID NO: 484258 - DNA, 19 bp, Mus musculus
  siRNA target sequence for Enpp2 (NM_015744.1,1052-1070).
gttaatggacggactgaaa

SEQ ID NO: 484259 - DNA, 19 bp, Mus musculus
  siRNA target sequence for Enpp2 (NM_015744.1,1079-1097).
gctgcaccgttgtgtgaat

SEQ ID NO: 484260 - DNA, 19 bp, Mus musculus
  siRNA target sequence for Enpp2 (NM_015744.1,1083-1101).
caccgttgtgtgaatgtta

SEQ ID NO: 484261 - DNA, 19 bp, Mus musculus
  siRNA target sequence for Enpp2 (NM_015744.1,1086-1104).
cgttgtgtgaatgttatct

SEQ ID NO: 484262 - DNA, 19 bp, Mus musculus
  siRNA target sequence for Enpp2 (NM_015744.1,1140-1158).
gacagaactgagttcttga

SEQ ID NO: 484263 - DNA, 19 bp, Mus musculus
  siRNA target sequence for Enpp2 (NM_015744.1,1167-1185).
ctgactaacgtggatgata

SEQ ID NO: 484264 - DNA, 19 bp, Mus musculus
  siRNA target sequence for Enpp2 (NM_015744.1,1169-1187).
gactaacgtggatgatatt

SEQ ID NO: 484265 - DNA, 19 bp, Mus musculus
  siRNA target sequence for Enpp2 (NM_015744.1,1175-1193).
cgtggatgatattacttta

SEQ ID NO: 484266 - DNA, 19 bp, Mus musculus
  siRNA target sequence for Enpp2 (NM_015744.1,1178-1196).
ggatgatattactttagta

SEQ ID NO: 484267 - DNA, 19 bp, Mus musculus
  siRNA target sequence for Enpp2 (NM_015744.1,1222-1240).
ccaagattcccaataatct

SEQ ID NO: 484268 - DNA, 19 bp, Mus musculus
  siRNA target sequence for Enpp2 (NM_015744.1,1250-1268).
ccctaaagccattattgct

SEQ ID NO: 484269 - DNA, 19 bp, Mus musculus
  siRNA target sequence for Enpp2 (NM_015744.1,1266-1284).
gctaacctcacgtgtaaaa

SEQ ID NO: 484270 - DNA, 19 bp, Mus musculus
  siRNA target sequence for Enpp2 (NM_015744.1,1267-1285).
ctaacctcacgtgtaaaaa

SEQ ID NO: 484271 - DNA, 19 bp, Mus musculus
  siRNA target sequence for Enpp2 (NM_015744.1,1271-1289).
cctcacgtgtaaaaaacca

SEQ ID NO: 484272 - DNA, 19 bp, Mus musculus
  siRNA target sequence for Enpp2 (NM_015744.1,1296-1314).
cactttaagccttacatga

SEQ ID NO: 484273 - DNA, 19 bp, Mus musculus
  siRNA target sequence for Enpp2 (NM_015744.1,1298-1316).
ctttaagccttacatgaaa

SEQ ID NO: 484274 - DNA, 19 bp, Mus musculus
  siRNA target sequence for Enpp2 (NM_015744.1,1317-1335).
cagcaccttcccaaacgtt

SEQ ID NO: 484275 - DNA, 19 bp, Mus musculus
  siRNA target sequence for Enpp2 (NM_015744.1,1357-1375).
gaatcgaggatctccattt

SEQ ID NO: 484276 - DNA, 19 bp, Mus musculus
  siRNA target sequence for Enpp2 (NM_015744.1,1395-1413).
catgttgcaaggaaacctt

SEQ ID NO: 484277 - DNA, 19 bp, Mus musculus
  siRNA target sequence for Enpp2 (NM_015744.1,1512-1530).
ggcccaacttttaagtaca

SEQ ID NO: 484278 - DNA, 19 bp, Mus musculus
  siRNA target sequence for Enpp2 (NM_015744.1,1532-1550).
gactaaagtgcctccattt

SEQ ID NO: 484279 - DNA, 19 bp, Mus musculus
  siRNA target sequence for Enpp2 (NM_015744.1,1539-1557).
gtgcctccatttgaaaaca

SEQ ID NO: 484280 - DNA, 19 bp, Mus musculus
  siRNA target sequence for Enpp2 (NM_015744.1,1541-1559).
gcctccatttgaaaacatt

SEQ ID NO: 484281 - DNA, 19 bp, Mus musculus
  siRNA target sequence for Enpp2 (NM_015744.1,1556-1574).
cattgaactttataatgtt

SEQ ID NO: 484282 - DNA, 19 bp, Mus musculus
  siRNA target sequence for Enpp2 (NM_015744.1,1618-1636).
cacatggaagtttgaatca

SEQ ID NO: 484283 - DNA, 19 bp, Mus musculus
  siRNA target sequence for Enpp2 (NM_015744.1,1635-1653).
cacctgctacgcacaaata

SEQ ID NO: 484284 - DNA, 19 bp, Mus musculus
  siRNA target sequence for Enpp2 (NM_015744.1,1690-1708).
ccaattacccagggattat

SEQ ID NO: 484285 - DNA, 19 bp, Mus musculus
  siRNA target sequence for Enpp2 (NM_015744.1,1837-1855).
gacgacctgcagtgcttta

SEQ ID NO: 484286 - DNA, 19 bp, Mus musculus
  siRNA target sequence for Enpp2 (NM_015744.1,1850-1868).
gctttatcggactagctat

SEQ ID NO: 484287 - DNA, 19 bp, Mus musculus
  siRNA target sequence for Enpp2 (NM_015744.1,1858-1876).
ggactagctatgatatctt

SEQ ID NO: 484288 - DNA, 19 bp, Mus musculus
  siRNA target sequence for Enpp2 (NM_015744.1,1864-1882).
gctatgatatcttatacca

SEQ ID NO: 484289 - DNA, 19 bp, Mus musculus
  siRNA target sequence for Enpp2 (NM_015744.1,1865-1883).
ctatgatatcttataccat

SEQ ID NO: 484290 - DNA, 19 bp, Mus musculus
  siRNA target sequence for Enpp2 (NM_015744.1,1880-1898).
ccatacggactttgaaagt

SEQ ID NO: 484291 - DNA, 19 bp, Mus musculus
  siRNA target sequence for Enpp2 (NM_015744.1,1897-1915).
gtggttacagtgaaatatt

SEQ ID NO: 484292 - DNA, 19 bp, Mus musculus
  siRNA target sequence for Enpp2 (NM_015744.1,1922-1940).
gcctctctggacttcttat

SEQ ID NO: 484293 - DNA, 19 bp, Mus musculus
  siRNA target sequence for Enpp2 (NM_015744.1,1923-1941).
cctctctggacttcttata

SEQ ID NO: 484294 - DNA, 19 bp, Mus musculus
  siRNA target sequence for Enpp2 (NM_015744.1,1926-1944).
ctctggacttcttatacca

SEQ ID NO: 484295 - DNA, 19 bp, Mus musculus
  siRNA target sequence for Enpp2 (NM_015744.1,2000-2018).
ccctgatgtccgtgtatct

SEQ ID NO: 484296 - DNA, 19 bp, Mus musculus
  siRNA target sequence for Enpp2 (NM_015744.1,2022-2040).
ggattcagtcagaactgtt

SEQ ID NO: 484297 - DNA, 19 bp, Mus musculus
  siRNA target sequence for Enpp2 (NM_015744.1,2063-2081).
gatgtcctatggattcctt

SEQ ID NO: 484298 - DNA, 19 bp, Mus musculus
  siRNA target sequence for Enpp2 (NM_015744.1,2104-2122).
ccccagaagcgaaatatga

SEQ ID NO: 484299 - DNA, 19 bp, Mus musculus
  siRNA target sequence for Enpp2 (NM_015744.1,2137-2155).
ccaacatggttccaatgta

SEQ ID NO: 484300 - DNA, 19 bp, Mus musculus
  siRNA target sequence for Enpp2 (NM_015744.1,2165-2183).
caaacgtgtttggacttat

SEQ ID NO: 484301 - DNA, 19 bp, Mus musculus
  siRNA target sequence for Enpp2 (NM_015744.1,2172-2190).
gtttggacttatttccaaa

SEQ ID NO: 484302 - DNA, 19 bp, Mus musculus
  siRNA target sequence for Enpp2 (NM_015744.1,2191-2209).
gggtcttggtgaagaaata

SEQ ID NO: 484303 - DNA, 19 bp, Mus musculus
  siRNA target sequence for Enpp2 (NM_015744.1,2221-2239).
ggaatggggtcaacgtaat

SEQ ID NO: 484304 - DNA, 19 bp, Mus musculus
  siRNA target sequence for Enpp2 (NM_015744.1,2222-2240).
gaatggggtcaacgtaata

SEQ ID NO: 484305 - DNA, 19 bp, Mus musculus
  siRNA target sequence for Enpp2 (NM_015744.1,2267-2285).
caatggcttacgtgacatt

SEQ ID NO: 484306 - DNA, 19 bp, Mus musculus
  siRNA target sequence for Enpp2 (NM_015744.1,2277-2295).
cgtgacattgaggatgaaa

SEQ ID NO: 484307 - DNA, 19 bp, Mus musculus
  siRNA target sequence for Enpp2 (NM_015744.1,2328-2346).
gtccctacccactactaca

SEQ ID NO: 484308 - DNA, 19 bp, Mus musculus
  siRNA target sequence for Enpp2 (NM_015744.1,2337-2355).
cactactacagcatcatca

SEQ ID NO: 484309 - DNA, 19 bp, Mus musculus
  siRNA target sequence for Enpp2 (NM_015744.1,2428-2446).
ctcaccgacctgacaatga

SEQ ID NO: 484310 - DNA, 19 bp, Mus musculus
  siRNA target sequence for Enpp2 (NM_015744.1,2445-2463).
gatgagagctgtaatagtt

SEQ ID NO: 484311 - DNA, 19 bp, Mus musculus
  siRNA target sequence for Enpp2 (NM_015744.1,2547-2565).
gatttctaccggaagacta

SEQ ID NO: 484312 - DNA, 19 bp, Mus musculus
  siRNA target sequence for Enpp2 (NM_015744.1,2558-2576).
gaagactagccgtagctat

SEQ ID NO: 484313 - DNA, 19 bp, Mus musculus
  siRNA target sequence for Enpp2 (NM_015744.1,2567-2585).
ccgtagctattcggaaatt

SEQ ID NO: 484314 - DNA, 19 bp, Mus musculus
  siRNA target sequence for Enpp2 (NM_015744.1,2569-2587).
gtagctattcggaaattct

SEQ ID NO: 484315 - DNA, 19 bp, Mus musculus
  siRNA target sequence for Eral1 (NM_022313.1,346-364).
cctgggagccccaaatgca

SEQ ID NO: 484316 - DNA, 19 bp, Mus musculus
  siRNA target sequence for Eral1 (NM_022313.1,356-374).
ccaaatgcagggaagtcaa

SEQ ID NO: 484317 - DNA, 19 bp, Mus musculus
  siRNA target sequence for Eral1 (NM_022313.1,362-380).
gcagggaagtcaacacttt

SEQ ID NO: 484318 - DNA, 19 bp, Mus musculus
  siRNA target sequence for Eral1 (NM_022313.1,366-384).
ggaagtcaacactttccaa

SEQ ID NO: 484319 - DNA, 19 bp, Mus musculus
  siRNA target sequence for Eral1 (NM_022313.1,427-445).
gcacaccactcgatgtcaa

SEQ ID NO: 484320 - DNA, 19 bp, Mus musculus
  siRNA target sequence for Eral1 (NM_022313.1,491-509).
gacacacctggcatcatca

SEQ ID NO: 484321 - DNA, 19 bp, Mus musculus
  siRNA target sequence for Eral1 (NM_022313.1,501-519).
gcatcatcagtcctgttaa

SEQ ID NO: 484322 - DNA, 19 bp, Mus musculus
  siRNA target sequence for Eral1 (NM_022313.1,502-520).
catcatcagtcctgttaaa

SEQ ID NO: 484323 - DNA, 19 bp, Mus musculus
  siRNA target sequence for Eral1 (NM_022313.1,680-698).
cctagcatcctcgtcttaa

SEQ ID NO: 484324 - DNA, 19 bp, Mus musculus
  siRNA target sequence for Eral1 (NM_022313.1,684-702).
gcatcctcgtcttaaacaa

SEQ ID NO: 484325 - DNA, 19 bp, Mus musculus
  siRNA target sequence for Eral1 (NM_022313.1,767-785).
gtcaatggcaagaagctta

SEQ ID NO: 484326 - DNA, 19 bp, Mus musculus
  siRNA target sequence for Eral1 (NM_022313.1,773-791).
ggcaagaagcttaatatca

SEQ ID NO: 484327 - DNA, 19 bp, Mus musculus
  siRNA target sequence for Eral1 (NM_022313.1,774-792).
gcaagaagcttaatatcaa

SEQ ID NO: 484328 - DNA, 19 bp, Mus musculus
  siRNA target sequence for Eral1 (NM_022313.1,1014-1032).
gccagacacccgaagagat

SEQ ID NO: 484329 - DNA, 19 bp, Mus musculus
  siRNA target sequence for Eral1 (NM_022313.1,1050-1068).
gagagaagctcttagagta

SEQ ID NO: 484330 - DNA, 19 bp, Mus musculus
  siRNA target sequence for Eral1 (NM_022313.1,1242-1260).
gggacctcatggacatctt

SEQ ID NO: 484331 - DNA, 19 bp, Mus musculus
  siRNA target sequence for Ercc4 (NM_015769.1,323-341).
gaccggctcctctaccatt

SEQ ID NO: 484332 - DNA, 19 bp, Mus musculus
  siRNA target sequence for Ercc4 (NM_015769.1,398-416).
gccgaggaggaatatttta

SEQ ID NO: 484333 - DNA, 19 bp, Mus musculus
  siRNA target sequence for Ercc4 (NM_015769.1,407-425).
gaatattttatcaatcagt

SEQ ID NO: 484334 - DNA, 19 bp, Mus musculus
  siRNA target sequence for Ercc4 (NM_015769.1,430-448).
gatagaaggagttgaacat

SEQ ID NO: 484335 - DNA, 19 bp, Mus musculus
  siRNA target sequence for Ercc4 (NM_015769.1,451-469).
ccctcgacgagtgacaaat

SEQ ID NO: 484336 - DNA, 19 bp, Mus musculus
  siRNA target sequence for Ercc4 (NM_015769.1,453-471).
ctcgacgagtgacaaatga

SEQ ID NO: 484337 - DNA, 19 bp, Mus musculus
  siRNA target sequence for Ercc4 (NM_015769.1,455-473).
cgacgagtgacaaatgaaa

SEQ ID NO: 484338 - DNA, 19 bp, Mus musculus
  siRNA target sequence for Ercc4 (NM_015769.1,480-498).
gtaacagtcgctatgaagt

SEQ ID NO: 484339 - DNA, 19 bp, Mus musculus
  siRNA target sequence for Ercc4 (NM_015769.1,499-517).
ctacacgcagggtggtatt

SEQ ID NO: 484340 - DNA, 19 bp, Mus musculus
  siRNA target sequence for Ercc4 (NM_015769.1,502-520).
cacgcagggtggtattata

SEQ ID NO: 484341 - DNA, 19 bp, Mus musculus
  siRNA target sequence for Ercc4 (NM_015769.1,504-522).
cgcagggtggtattatatt

SEQ ID NO: 484342 - DNA, 19 bp, Mus musculus
  siRNA target sequence for Ercc4 (NM_015769.1,509-527).
ggtggtattatatttgcaa

SEQ ID NO: 484343 - DNA, 19 bp, Mus musculus
  siRNA target sequence for Ercc4 (NM_015769.1,533-551).
cgaatactcgtggttgatt

SEQ ID NO: 484344 - DNA, 19 bp, Mus musculus
  siRNA target sequence for Ercc4 (NM_015769.1,534-552).
gaatactcgtggttgattt

SEQ ID NO: 484345 - DNA, 19 bp, Mus musculus
  siRNA target sequence for Ercc4 (NM_015769.1,564-582).
gaataccttcagatttaat

SEQ ID NO: 484346 - DNA, 19 bp, Mus musculus
  siRNA target sequence for Ercc4 (NM_015769.1,650-668).
ctcttccgccagaaaaaca

SEQ ID NO: 484347 - DNA, 19 bp, Mus musculus
  siRNA target sequence for Ercc4 (NM_015769.1,788-806).
catgtagcagtcaactcat

SEQ ID NO: 484348 - DNA, 19 bp, Mus musculus
  siRNA target sequence for Ercc4 (NM_015769.1,871-889).
cattcagacggccatacta

SEQ ID NO: 484349 - DNA, 19 bp, Mus musculus
  siRNA target sequence for Ercc4 (NM_015769.1,879-897).
cggccatactagacatctt

SEQ ID NO: 484350 - DNA, 19 bp, Mus musculus
  siRNA target sequence for Ercc4 (NM_015769.1,880-898).
ggccatactagacatctta

SEQ ID NO: 484351 - DNA, 19 bp, Mus musculus
  siRNA target sequence for Ercc4 (NM_015769.1,881-899).
gccatactagacatcttaa

SEQ ID NO: 484352 - DNA, 19 bp, Mus musculus
  siRNA target sequence for Ercc4 (NM_015769.1,928-946).
caacccgtcacttgaagta

SEQ ID NO: 484353 - DNA, 19 bp, Mus musculus
  siRNA target sequence for Ercc4 (NM_015769.1,931-949).
cccgtcacttgaagtagaa

SEQ ID NO: 484354 - DNA, 19 bp, Mus musculus
  siRNA target sequence for Ercc4 (NM_015769.1,933-951).
cgtcacttgaagtagaaga

SEQ ID NO: 484355 - DNA, 19 bp, Mus musculus
  siRNA target sequence for Ercc4 (NM_015769.1,934-952).
gtcacttgaagtagaagat

SEQ ID NO: 484356 - DNA, 19 bp, Mus musculus
  siRNA target sequence for Ercc4 (NM_015769.1,936-954).
cacttgaagtagaagattt

SEQ ID NO: 484357 - DNA, 19 bp, Mus musculus
  siRNA target sequence for Ercc4 (NM_015769.1,1025-1043).
cagcttggagccaagacta

SEQ ID NO: 484358 - DNA, 19 bp, Mus musculus
  siRNA target sequence for Ercc4 (NM_015769.1,1047-1065).
ccttggtgcaggatttaaa

SEQ ID NO: 484359 - DNA, 19 bp, Mus musculus
  siRNA target sequence for Ercc4 (NM_015769.1,1074-1092).
gaaccttactgcagtatct

SEQ ID NO: 484360 - DNA, 19 bp, Mus musculus
  siRNA target sequence for Ercc4 (NM_015769.1,1087-1105).
gtatctctctcagtatgat

SEQ ID NO: 484361 - DNA, 19 bp, Mus musculus
  siRNA target sequence for Ercc4 (NM_015769.1,1099-1117).
gtatgattgtgttacattt

SEQ ID NO: 484362 - DNA, 19 bp, Mus musculus
  siRNA target sequence for Ercc4 (NM_015769.1,1235-1253).
gttccagatgtcaaactga

SEQ ID NO: 484363 - DNA, 19 bp, Mus musculus
  siRNA target sequence for Ercc4 (NM_015769.1,1279-1297).
gacgtcgagtccagaagtt

SEQ ID NO: 484364 - DNA, 19 bp, Mus musculus
  siRNA target sequence for Ercc4 (NM_015769.1,1282-1300).
gtcgagtccagaagttcaa

SEQ ID NO: 484365 - DNA, 19 bp, Mus musculus
  siRNA target sequence for Ercc4 (NM_015769.1,1351-1369).
gactgacgtcctgaaagaa

SEQ ID NO: 484366 - DNA, 19 bp, Mus musculus
  siRNA target sequence for Ercc4 (NM_015769.1,1353-1371).
ctgacgtcctgaaagaaat

SEQ ID NO: 484367 - DNA, 19 bp, Mus musculus
  siRNA target sequence for Ercc4 (NM_015769.1,1493-1511).
ctgctgcgactttatagga

SEQ ID NO: 484368 - DNA, 19 bp, Mus musculus
  siRNA target sequence for Ercc4 (NM_015769.1,1498-1516).
gcgactttataggaaaact

SEQ ID NO: 484369 - DNA, 19 bp, Mus musculus
  siRNA target sequence for Ercc4 (NM_015769.1,1544-1562).
gtgtgggtaaatgttagaa

SEQ ID NO: 484370 - DNA, 19 bp, Mus musculus
  siRNA target sequence for Ercc4 (NM_015769.1,1573-1591).
cccgaagagaactacaaaa

SEQ ID NO: 484371 - DNA, 19 bp, Mus musculus
  siRNA target sequence for Ercc4 (NM_015769.1,1574-1592).
ccgaagagaactacaaaat

SEQ ID NO: 484372 - DNA, 19 bp, Mus musculus
  siRNA target sequence for Ercc4 (NM_015769.1,1605-1623).
caaaagccgctccaaacaa

SEQ ID NO: 484373 - DNA, 19 bp, Mus musculus
  siRNA target sequence for Ercc4 (NM_015769.1,1772-1790).
ggctgcggggtagagatta

SEQ ID NO: 484374 - DNA, 19 bp, Mus musculus
  siRNA target sequence for Ercc4 (NM_015769.1,1773-1791).
gctgcggggtagagattaa

SEQ ID NO: 484375 - DNA, 19 bp, Mus musculus
  siRNA target sequence for Ercc4 (NM_015769.1,1784-1802).
gagattaagcgtgaatcat

SEQ ID NO: 484376 - DNA, 19 bp, Mus musculus
  siRNA target sequence for Ercc4 (NM_015769.1,1786-1804).
gattaagcgtgaatcattt

SEQ ID NO: 484377 - DNA, 19 bp, Mus musculus
  siRNA target sequence for Ercc4 (NM_015769.1,1792-1810).
gcgtgaatcatttgattta

SEQ ID NO: 484378 - DNA, 19 bp, Mus musculus
  siRNA target sequence for Ercc4 (NM_015769.1,1793-1811).
cgtgaatcatttgatttaa

SEQ ID NO: 484379 - DNA, 19 bp, Mus musculus
  siRNA target sequence for Ercc4 (NM_015769.1,1926-1944).
ccagatacgtggttctgta

SEQ ID NO: 484380 - DNA, 19 bp, Mus musculus
  siRNA target sequence for Ercc4 (NM_015769.1,1927-1945).
cagatacgtggttctgtat

SEQ ID NO: 484381 - DNA, 19 bp, Mus musculus
  siRNA target sequence for Ercc4 (NM_015769.1,2089-2107).
ctttgaaaagctcataaga

SEQ ID NO: 484382 - DNA, 19 bp, Mus musculus
  siRNA target sequence for Ercc4 (NM_015769.1,2368-2386).
gtgtgtggagcgcaaaagt

SEQ ID NO: 484383 - DNA, 19 bp, Mus musculus
  siRNA target sequence for Ercc4 (NM_015769.1,2370-2388).
gtgtggagcgcaaaagtgt

SEQ ID NO: 484384 - DNA, 19 bp, Mus musculus
  siRNA target sequence for Ercc4 (NM_015769.1,2549-2567).
gatgtgagctccaagctta

SEQ ID NO: 484385 - DNA, 19 bp, Mus musculus
  siRNA target sequence for Ercc4 (NM_015769.1,2716-2734).
gcctgagtcggacagatat

SEQ ID NO: 484386 - DNA, 19 bp, Mus musculus
  siRNA target sequence for Ercc4 (NM_015769.1,2718-2736).
ctgagtcggacagatataa

SEQ ID NO: 484387 - DNA, 19 bp, Mus musculus
  siRNA target sequence for Ercc4 (NM_015769.1,2771-2789).
ggggtcaacgccaagaact

SEQ ID NO: 484388 - DNA, 19 bp, Mus musculus
  siRNA target sequence for Ggcx (NM_019802.1,102-120).
gttgctcccgcctcagata

SEQ ID NO: 484389 - DNA, 19 bp, Mus musculus
  siRNA target sequence for Ggcx (NM_019802.1,106-124).
ctcccgcctcagataaagt

SEQ ID NO: 484390 - DNA, 19 bp, Mus musculus
  siRNA target sequence for Ggcx (NM_019802.1,109-127).
ccgcctcagataaagtaca

SEQ ID NO: 484391 - DNA, 19 bp, Mus musculus
  siRNA target sequence for Ggcx (NM_019802.1,112-130).
cctcagataaagtacagaa

SEQ ID NO: 484392 - DNA, 19 bp, Mus musculus
  siRNA target sequence for Ggcx (NM_019802.1,165-183).
ggcagccgaatggagaaaa

SEQ ID NO: 484393 - DNA, 19 bp, Mus musculus
  siRNA target sequence for Ggcx (NM_019802.1,167-185).
cagccgaatggagaaaatt

SEQ ID NO: 484394 - DNA, 19 bp, Mus musculus
  siRNA target sequence for Ggcx (NM_019802.1,169-187).
gccgaatggagaaaatttt

SEQ ID NO: 484395 - DNA, 19 bp, Mus musculus
  siRNA target sequence for Ggcx (NM_019802.1,189-207).
gggtttgaatggacagatt

SEQ ID NO: 484396 - DNA, 19 bp, Mus musculus
  siRNA target sequence for Ggcx (NM_019802.1,190-208).
ggtttgaatggacagattt

SEQ ID NO: 484397 - DNA, 19 bp, Mus musculus
  siRNA target sequence for Ggcx (NM_019802.1,195-213).
gaatggacagatttatcta

SEQ ID NO: 484398 - DNA, 19 bp, Mus musculus
  siRNA target sequence for Ggcx (NM_019802.1,331-349).
gctccctggaccgaaaata

SEQ ID NO: 484399 - DNA, 19 bp, Mus musculus
  siRNA target sequence for Ggcx (NM_019802.1,334-352).
ccctggaccgaaaatactt

SEQ ID NO: 484400 - DNA, 19 bp, Mus musculus
  siRNA target sequence for Ggcx (NM_019802.1,508-526).
cgtactggtacgtgtttct

SEQ ID NO: 484401 - DNA, 19 bp, Mus musculus
  siRNA target sequence for Ggcx (NM_019802.1,552-570).
cactcctatctgtatggtt

SEQ ID NO: 484402 - DNA, 19 bp, Mus musculus
  siRNA target sequence for Ggcx (NM_019802.1,556-574).
cctatctgtatggtttgtt

SEQ ID NO: 484403 - DNA, 19 bp, Mus musculus
  siRNA target sequence for Ggcx (NM_019802.1,567-585).
ggtttgttggcctttcagt

SEQ ID NO: 484404 - DNA, 19 bp, Mus musculus
  siRNA target sequence for Ggcx (NM_019802.1,630-648).
ctgaatgcccgaaagaaga

SEQ ID NO: 484405 - DNA, 19 bp, Mus musculus
  siRNA target sequence for Ggcx (NM_019802.1,657-675).
gtgcccctttggaactaca

SEQ ID NO: 484406 - DNA, 19 bp, Mus musculus
  siRNA target sequence for Ggcx (NM_019802.1,823-841).
caagcctgctggtagtaca

SEQ ID NO: 484407 - DNA, 19 bp, Mus musculus
  siRNA target sequence for Ggcx (NM_019802.1,953-971).
cttcagcatcgggatgttt

SEQ ID NO: 484408 - DNA, 19 bp, Mus musculus
  siRNA target sequence for Ggcx (NM_019802.1,964-982).
ggatgtttccctatgtcat

SEQ ID NO: 484409 - DNA, 19 bp, Mus musculus
  siRNA target sequence for Ggcx (NM_019802.1,1221-1239).
ctgacccagggttacaata

SEQ ID NO: 484410 - DNA, 19 bp, Mus musculus
  siRNA target sequence for Ggcx (NM_019802.1,1251-1269).
gggctgtatggctattcct

SEQ ID NO: 484411 - DNA, 19 bp, Mus musculus
  siRNA target sequence for Ggcx (NM_019802.1,1291-1309).
gctcccaccagcacgtaaa

SEQ ID NO: 484412 - DNA, 19 bp, Mus musculus
  siRNA target sequence for Ggcx (NM_019802.1,1294-1312).
cccaccagcacgtaaagat

SEQ ID NO: 484413 - DNA, 19 bp, Mus musculus
  siRNA target sequence for Ggcx (NM_019802.1,1296-1314).
caccagcacgtaaagatca

SEQ ID NO: 484414 - DNA, 19 bp, Mus musculus
  siRNA target sequence for Ggcx (NM_019802.1,1350-1368).
cttaaccctggggtattca

SEQ ID NO: 484415 - DNA, 19 bp, Mus musculus
  siRNA target sequence for Ggcx (NM_019802.1,1456-1474).
ctgagccccagatctactt

SEQ ID NO: 484416 - DNA, 19 bp, Mus musculus
  siRNA target sequence for Ggcx (NM_019802.1,1460-1478).
gccccagatctactttgat

SEQ ID NO: 484417 - DNA, 19 bp, Mus musculus
  siRNA target sequence for Ggcx (NM_019802.1,1461-1479).
ccccagatctactttgata

SEQ ID NO: 484418 - DNA, 19 bp, Mus musculus
  siRNA target sequence for Ggcx (NM_019802.1,1462-1480).
cccagatctactttgatat

SEQ ID NO: 484419 - DNA, 19 bp, Mus musculus
  siRNA target sequence for Ggcx (NM_019802.1,1576-1594).
gggtgcagccactcttgat

SEQ ID NO: 484420 - DNA, 19 bp, Mus musculus
  siRNA target sequence for Ggcx (NM_019802.1,1581-1599).
cagccactcttgatggatt

SEQ ID NO: 484421 - DNA, 19 bp, Mus musculus
  siRNA target sequence for Ggcx (NM_019802.1,1583-1601).
gccactcttgatggattta

SEQ ID NO: 484422 - DNA, 19 bp, Mus musculus
  siRNA target sequence for Ggcx (NM_019802.1,1606-1624).
cctggaggaccaagttaca

SEQ ID NO: 484423 - DNA, 19 bp, Mus musculus
  siRNA target sequence for Ggcx (NM_019802.1,1683-1701).
gggcttcacttggagaatt

SEQ ID NO: 484424 - DNA, 19 bp, Mus musculus
  siRNA target sequence for Ggcx (NM_019802.1,1685-1703).
gcttcacttggagaatttt

SEQ ID NO: 484425 - DNA, 19 bp, Mus musculus
  siRNA target sequence for Ggcx (NM_019802.1,1689-1707).
cacttggagaattttgtga

SEQ ID NO: 484426 - DNA, 19 bp, Mus musculus
  siRNA target sequence for Ggcx (NM_019802.1,1818-1836).
cctgctggagagtaccata

SEQ ID NO: 484427 - DNA, 19 bp, Mus musculus
  siRNA target sequence for Ggcx (NM_019802.1,1819-1837).
ctgctggagagtaccataa

SEQ ID NO: 484428 - DNA, 19 bp, Mus musculus
  siRNA target sequence for Ggcx (NM_019802.1,1822-1840).
ctggagagtaccataaagt

SEQ ID NO: 484429 - DNA, 19 bp, Mus musculus
  siRNA target sequence for Ggcx (NM_019802.1,1824-1842).
ggagagtaccataaagtct

SEQ ID NO: 484430 - DNA, 19 bp, Mus musculus
  siRNA target sequence for Ggcx (NM_019802.1,1825-1843).
gagagtaccataaagtcta

SEQ ID NO: 484431 - DNA, 19 bp, Mus musculus
  siRNA target sequence for Ggcx (NM_019802.1,1827-1845).
gagtaccataaagtctata

SEQ ID NO: 484432 - DNA, 19 bp, Mus musculus
  siRNA target sequence for Ggcx (NM_019802.1,1829-1847).
gtaccataaagtctatact

SEQ ID NO: 484433 - DNA, 19 bp, Mus musculus
  siRNA target sequence for Ggcx (NM_019802.1,1832-1850).
ccataaagtctatactgta

SEQ ID NO: 484434 - DNA, 19 bp, Mus musculus
  siRNA target sequence for Ggcx (NM_019802.1,1833-1851).
cataaagtctatactgtat

SEQ ID NO: 484435 - DNA, 19 bp, Mus musculus
  siRNA target sequence for Ggcx (NM_019802.1,1839-1857).
gtctatactgtatcatcta

SEQ ID NO: 484436 - DNA, 19 bp, Mus musculus
  siRNA target sequence for Ggcx (NM_019802.1,1841-1859).
ctatactgtatcatctagt

SEQ ID NO: 484437 - DNA, 19 bp, Mus musculus
  siRNA target sequence for Ggcx (NM_019802.1,1919-1937).
ggcatatctgcaagaatta

SEQ ID NO: 484438 - DNA, 19 bp, Mus musculus
  siRNA target sequence for Ggcx (NM_019802.1,2063-2081).
gaggaagctccaagaaatt

SEQ ID NO: 484439 - DNA, 19 bp, Mus musculus
  siRNA target sequence for Ggcx (NM_019802.1,2090-2108).
gcgaaatagccctttccat

SEQ ID NO: 484440 - DNA, 19 bp, Mus musculus
  siRNA target sequence for Ggcx (NM_019802.1,2101-2119).
ctttccatgagcgatttct

SEQ ID NO: 484441 - DNA, 19 bp, Mus musculus
  siRNA target sequence for Ggcx (NM_019802.1,2179-2197).
cactccgaaacctgctatt

SEQ ID NO: 484442 - DNA, 19 bp, Mus musculus
  siRNA target sequence for Ggcx (NM_019802.1,2226-2244).
caagaggtgacatatgcaa

SEQ ID NO: 484443 - DNA, 19 bp, Mus musculus
  siRNA target sequence for Ggcx (NM_019802.1,2254-2272).
catttgaaccagttgatga

SEQ ID NO: 484444 - DNA, 19 bp, Mus musculus
  siRNA target sequence for Grsf1 (NM_178700.2,488-506).
gacgaggtggatgatgttt

SEQ ID NO: 484445 - DNA, 19 bp, Mus musculus
  siRNA target sequence for Grsf1 (NM_178700.2,496-514).
ggatgatgtttatctcatt

SEQ ID NO: 484446 - DNA, 19 bp, Mus musculus
  siRNA target sequence for Grsf1 (NM_178700.2,574-592).
ctgcagaatccgaaacagt

SEQ ID NO: 484447 - DNA, 19 bp, Mus musculus
  siRNA target sequence for Grsf1 (NM_178700.2,584-602).
cgaaacagtgagaatggaa

SEQ ID NO: 484448 - DNA, 19 bp, Mus musculus
  siRNA target sequence for Grsf1 (NM_178700.2,589-607).
cagtgagaatggaatacat

SEQ ID NO: 484449 - DNA, 19 bp, Mus musculus
  siRNA target sequence for Grsf1 (NM_178700.2,633-651).
ggaggggcgatgccttaat

SEQ ID NO: 484450 - DNA, 19 bp, Mus musculus
  siRNA target sequence for Grsf1 (NM_178700.2,634-652).
gaggggcgatgccttaata

SEQ ID NO: 484451 - DNA, 19 bp, Mus musculus
  siRNA target sequence for Grsf1 (NM_178700.2,636-654).
ggggcgatgccttaataga

SEQ ID NO: 484452 - DNA, 19 bp, Mus musculus
  siRNA target sequence for Grsf1 (NM_178700.2,638-656).
ggcgatgccttaatagaga

SEQ ID NO: 484453 - DNA, 19 bp, Mus musculus
  siRNA target sequence for Grsf1 (NM_178700.2,639-657).
gcgatgccttaatagagat

SEQ ID NO: 484454 - DNA, 19 bp, Mus musculus
  siRNA target sequence for Grsf1 (NM_178700.2,663-681).
ccgagcaggatgtacagaa

SEQ ID NO: 484455 - DNA, 19 bp, Mus musculus
  siRNA target sequence for Grsf1 (NM_178700.2,715-733).
gcggtatgtggaagtgtat

SEQ ID NO: 484456 - DNA, 19 bp, Mus musculus
  siRNA target sequence for Grsf1 (NM_178700.2,718-736).
gtatgtggaagtgtatgaa

SEQ ID NO: 484457 - DNA, 19 bp, Mus musculus
  siRNA target sequence for Grsf1 (NM_178700.2,830-848).
ccttacagctgcaatgaaa

SEQ ID NO: 484458 - DNA, 19 bp, Mus musculus
  siRNA target sequence for Grsf1 (NM_178700.2,877-895).
gaacatagtagacattact

SEQ ID NO: 484459 - DNA, 19 bp, Mus musculus
  siRNA target sequence for Grsf1 (NM_178700.2,907-925).
ctatagagggagaagaaaa

SEQ ID NO: 484460 - DNA, 19 bp, Mus musculus
  siRNA target sequence for Grsf1 (NM_178700.2,927-945).
cgggggaagcctatgtaca

SEQ ID NO: 484461 - DNA, 19 bp, Mus musculus
  siRNA target sequence for Grsf1 (NM_178700.2,930-948).
gggaagcctatgtacagtt

SEQ ID NO: 484462 - DNA, 19 bp, Mus musculus
  siRNA target sequence for Grsf1 (NM_178700.2,1001-1019).
ggtaaccgatacatagaga

SEQ ID NO: 484463 - DNA, 19 bp, Mus musculus
  siRNA target sequence for Grsf1 (NM_178700.2,1002-1020).
gtaaccgatacatagagat

SEQ ID NO: 484464 - DNA, 19 bp, Mus musculus
  siRNA target sequence for Grsf1 (NM_178700.2,1036-1054).
gaatgaagttcgaacacat

SEQ ID NO: 484465 - DNA, 19 bp, Mus musculus
  siRNA target sequence for Grsf1 (NM_178700.2,1083-1101).
catcgtctcctcctactaa

SEQ ID NO: 484466 - DNA, 19 bp, Mus musculus
  siRNA target sequence for Grsf1 (NM_178700.2,1086-1104).
cgtctcctcctactaaata

SEQ ID NO: 484467 - DNA, 19 bp, Mus musculus
  siRNA target sequence for Grsf1 (NM_178700.2,1087-1105).
gtctcctcctactaaatat

SEQ ID NO: 484468 - DNA, 19 bp, Mus musculus
  siRNA target sequence for Grsf1 (NM_178700.2,1091-1109).
cctcctactaaatatataa

SEQ ID NO: 484469 - DNA, 19 bp, Mus musculus
  siRNA target sequence for Grsf1 (NM_178700.2,1158-1176).
ggcctatgacggcttttga

SEQ ID NO: 484470 - DNA, 19 bp, Mus musculus
  siRNA target sequence for Grsf1 (NM_178700.2,1160-1178).
cctatgacggcttttgaga

SEQ ID NO: 484471 - DNA, 19 bp, Mus musculus
  siRNA target sequence for Grsf1 (NM_178700.2,1204-1222).
ggagatgtcagaaaaactt

SEQ ID NO: 484472 - DNA, 19 bp, Mus musculus
  siRNA target sequence for Grsf1 (NM_178700.2,1226-1244).
gaggctgtcgattttggaa

SEQ ID NO: 484473 - DNA, 19 bp, Mus musculus
  siRNA target sequence for Grsf1 (NM_178700.2,1292-1310).
gccaatgcccaagacatta

SEQ ID NO: 484474 - DNA, 19 bp, Mus musculus
  siRNA target sequence for Grsf1 (NM_178700.2,1293-1311).
ccaatgcccaagacattat

SEQ ID NO: 484475 - DNA, 19 bp, Mus musculus
  siRNA target sequence for Grsf1 (NM_178700.2,1326-1344).
ccctgaagcctgtgagaat

SEQ ID NO: 484476 - DNA, 19 bp, Mus musculus
  siRNA target sequence for Grsf1 (NM_178700.2,1385-1403).
gctgacgtgcactttgata

SEQ ID NO: 484477 - DNA, 19 bp, Mus musculus
  siRNA target sequence for Grsf1 (NM_178700.2,1439-1457).
cggtcccatgtccaacata

SEQ ID NO: 484478 - DNA, 19 bp, Mus musculus
  siRNA target sequence for Grsf1 (NM_178700.2,1466-1484).
gagctgttcctaaattcat

SEQ ID NO: 484479 - DNA, 19 bp, Mus musculus
  siRNA target sequence for Grsf1 (NM_178700.2,1474-1492).
cctaaattcatgtcctaaa

SEQ ID NO: 484480 - DNA, 19 bp, Mus musculus
  siRNA target sequence for Hdlbp (NM_133808.2,255-273).
ggctggttccacaacaaat

SEQ ID NO: 484481 - DNA, 19 bp, Mus musculus
  siRNA target sequence for Hdlbp (NM_133808.2,383-401).
gccggagcctggagtaaca

SEQ ID NO: 484482 - DNA, 19 bp, Mus musculus
  siRNA target sequence for Hdlbp (NM_133808.2,427-445).
catcactcaggtgtttcat

SEQ ID NO: 484483 - DNA, 19 bp, Mus musculus
  siRNA target sequence for Hdlbp (NM_133808.2,484-502).
gtttggagagggtgaacaa

SEQ ID NO: 484484 - DNA, 19 bp, Mus musculus
  siRNA target sequence for Hdlbp (NM_133808.2,494-512).
ggtgaacaagcaaaaatct

SEQ ID NO: 484485 - DNA, 19 bp, Mus musculus
  siRNA target sequence for Hdlbp (NM_133808.2,598-616).
gctggatgccgtcatgaaa

SEQ ID NO: 484486 - DNA, 19 bp, Mus musculus
  siRNA target sequence for Hdlbp (NM_133808.2,659-677).
gcaactgttcccattccta

SEQ ID NO: 484487 - DNA, 19 bp, Mus musculus
  siRNA target sequence for Hdlbp (NM_133808.2,660-678).
caactgttcccattcctaa

SEQ ID NO: 484488 - DNA, 19 bp, Mus musculus
  siRNA target sequence for Hdlbp (NM_133808.2,715-733).
gaaactgcaagacttagaa

SEQ ID NO: 484489 - DNA, 19 bp, Mus musculus
  siRNA target sequence for Hdlbp (NM_133808.2,719-737).
ctgcaagacttagaactaa

SEQ ID NO: 484490 - DNA, 19 bp, Mus musculus
  siRNA target sequence for Hdlbp (NM_133808.2,721-739).
gcaagacttagaactaaaa

SEQ ID NO: 484491 - DNA, 19 bp, Mus musculus
  siRNA target sequence for Hdlbp (NM_133808.2,734-752).
ctaaaaactgcaaccaaaa

SEQ ID NO: 484492 - DNA, 19 bp, Mus musculus
  siRNA target sequence for Hdlbp (NM_133808.2,766-784).
cccagatgaccccagtaat

SEQ ID NO: 484493 - DNA, 19 bp, Mus musculus
  siRNA target sequence for Hdlbp (NM_133808.2,770-788).
gatgaccccagtaatcaga

SEQ ID NO: 484494 - DNA, 19 bp, Mus musculus
  siRNA target sequence for Hdlbp (NM_133808.2,776-794).
cccagtaatcagatcaaga

SEQ ID NO: 484495 - DNA, 19 bp, Mus musculus
  siRNA target sequence for Hdlbp (NM_133808.2,777-795).
ccagtaatcagatcaagat

SEQ ID NO: 484496 - DNA, 19 bp, Mus musculus
  siRNA target sequence for Hdlbp (NM_133808.2,793-811).
gatcactggcaccaaagaa

SEQ ID NO: 484497 - DNA, 19 bp, Mus musculus
  siRNA target sequence for Hdlbp (NM_133808.2,828-846).
gccatgaagtcctcctaat

SEQ ID NO: 484498 - DNA, 19 bp, Mus musculus
  siRNA target sequence for Hdlbp (NM_133808.2,930-948).
gacttgtgggtgaaatcat

SEQ ID NO: 484499 - DNA, 19 bp, Mus musculus
  siRNA target sequence for Hdlbp (NM_133808.2,957-975).
cagggacgcgaatcaacat

SEQ ID NO: 484500 - DNA, 19 bp, Mus musculus
  siRNA target sequence for Hdlbp (NM_133808.2,1040-1058).
gctgtggctcgcattaaga

SEQ ID NO: 484501 - DNA, 19 bp, Mus musculus
  siRNA target sequence for Hdlbp (NM_133808.2,1041-1059).
ctgtggctcgcattaagaa

SEQ ID NO: 484502 - DNA, 19 bp, Mus musculus
  siRNA target sequence for Hdlbp (NM_133808.2,1043-1061).
gtggctcgcattaagaaga

SEQ ID NO: 484503 - DNA, 19 bp, Mus musculus
  siRNA target sequence for Hdlbp (NM_133808.2,1046-1064).
gctcgcattaagaagattt

SEQ ID NO: 484504 - DNA, 19 bp, Mus musculus
  siRNA target sequence for Hdlbp (NM_133808.2,1145-1163).
ggcaattcactgcaagaaa

SEQ ID NO: 484505 - DNA, 19 bp, Mus musculus
  siRNA target sequence for Hdlbp (NM_133808.2,1146-1164).
gcaattcactgcaagaaat

SEQ ID NO: 484506 - DNA, 19 bp, Mus musculus
  siRNA target sequence for Hdlbp (NM_133808.2,1210-1228).
catctctgagactgtgata

SEQ ID NO: 484507 - DNA, 19 bp, Mus musculus
  siRNA target sequence for Hdlbp (NM_133808.2,1213-1231).
ctctgagactgtgatactt

SEQ ID NO: 484508 - DNA, 19 bp, Mus musculus
  siRNA target sequence for Hdlbp (NM_133808.2,1277-1295).
gccaaggccaacagtttta

SEQ ID NO: 484509 - DNA, 19 bp, Mus musculus
  siRNA target sequence for Hdlbp (NM_133808.2,1323-1341).
ggcttcatcgtttcatcat

SEQ ID NO: 484510 - DNA, 19 bp, Mus musculus
  siRNA target sequence for Hdlbp (NM_133808.2,1357-1375).
gaacctggccaaaatcact

SEQ ID NO: 484511 - DNA, 19 bp, Mus musculus
  siRNA target sequence for Hdlbp (NM_133808.2,1385-1403).
ccaaaggttcacattgagt

SEQ ID NO: 484512 - DNA, 19 bp, Mus musculus
  siRNA target sequence for Hdlbp (NM_133808.2,1483-1501).
ggtcaaagacctgattaat

SEQ ID NO: 484513 - DNA, 19 bp, Mus musculus
  siRNA target sequence for Hdlbp (NM_133808.2,1484-1502).
gtcaaagacctgattaata

SEQ ID NO: 484514 - DNA, 19 bp, Mus musculus
  siRNA target sequence for Hdlbp (NM_133808.2,1510-1528).
ctatgtagagatcaacatt

SEQ ID NO: 484515 - DNA, 19 bp, Mus musculus
  siRNA target sequence for Hdlbp (NM_133808.2,1569-1587).
ccaacatcaacagaatcaa

SEQ ID NO: 484516 - DNA, 19 bp, Mus musculus
  siRNA target sequence for Hdlbp (NM_133808.2,1581-1599).
gaatcaaagaccagtacaa

SEQ ID NO: 484517 - DNA, 19 bp, Mus musculus
  siRNA target sequence for Hdlbp (NM_133808.2,1619-1637).
cctgacagtgaaaagagta

SEQ ID NO: 484518 - DNA, 19 bp, Mus musculus
  siRNA target sequence for Hdlbp (NM_133808.2,1635-1653).
gtaacctgatccgaattga

SEQ ID NO: 484519 - DNA, 19 bp, Mus musculus
  siRNA target sequence for Hdlbp (NM_133808.2,1721-1739).
gagcgcaccaaggatctaa

SEQ ID NO: 484520 - DNA, 19 bp, Mus musculus
  siRNA target sequence for Hdlbp (NM_133808.2,1724-1742).
cgcaccaaggatctaatca

SEQ ID NO: 484521 - DNA, 19 bp, Mus musculus
  siRNA target sequence for Hdlbp (NM_133808.2,1725-1743).
gcaccaaggatctaatcat

SEQ ID NO: 484522 - DNA, 19 bp, Mus musculus
  siRNA target sequence for Hdlbp (NM_133808.2,1736-1754).
ctaatcatcgagcaaagat

SEQ ID NO: 484523 - DNA, 19 bp, Mus musculus
  siRNA target sequence for Hdlbp (NM_133808.2,1741-1759).
catcgagcaaagatttcat

SEQ ID NO: 484524 - DNA, 19 bp, Mus musculus
  siRNA target sequence for Hdlbp (NM_133808.2,1752-1770).
gatttcatcgcacaatcat

SEQ ID NO: 484525 - DNA, 19 bp, Mus musculus
  siRNA target sequence for Hdlbp (NM_133808.2,1782-1800).
gtgaacggattcgagaaat

SEQ ID NO: 484526 - DNA, 19 bp, Mus musculus
  siRNA target sequence for Hdlbp (NM_133808.2,1793-1811).
cgagaaattcgtgacaaat

SEQ ID NO: 484527 - DNA, 19 bp, Mus musculus
  siRNA target sequence for Hdlbp (NM_133808.2,1794-1812).
gagaaattcgtgacaaatt

SEQ ID NO: 484528 - DNA, 19 bp, Mus musculus
  siRNA target sequence for Hdlbp (NM_133808.2,1842-1860).
cagcacaaaaaagtgatat

SEQ ID NO: 484529 - DNA, 19 bp, Mus musculus
  siRNA target sequence for Hdlbp (NM_133808.2,1892-1910).
gagaagtgcactaagtata

SEQ ID NO: 484530 - DNA, 19 bp, Mus musculus
  siRNA target sequence for Hdlbp (NM_133808.2,1902-1920).
ctaagtatatgcagaagat

SEQ ID NO: 484531 - DNA, 19 bp, Mus musculus
  siRNA target sequence for Hdlbp (NM_133808.2,1924-1942).
cgcagacctggtggaaaat

SEQ ID NO: 484532 - DNA, 19 bp, Mus musculus
  siRNA target sequence for Hdlbp (NM_133808.2,1930-1948).
cctggtggaaaatagctat

SEQ ID NO: 484533 - DNA, 19 bp, Mus musculus
  siRNA target sequence for Hdlbp (NM_133808.2,1931-1949).
ctggtggaaaatagctatt

SEQ ID NO: 484534 - DNA, 19 bp, Mus musculus
  siRNA target sequence for Hdlbp (NM_133808.2,1933-1951).
ggtggaaaatagctattca

SEQ ID NO: 484535 - DNA, 19 bp, Mus musculus
  siRNA target sequence for Hdlbp (NM_133808.2,1950-1968).
caatttctgtaccaatctt

SEQ ID NO: 484536 - DNA, 19 bp, Mus musculus
  siRNA target sequence for Hdlbp (NM_133808.2,1958-1976).
gtaccaatcttcaaacagt

SEQ ID NO: 484537 - DNA, 19 bp, Mus musculus
  siRNA target sequence for Hdlbp (NM_133808.2,1969-1987).
caaacagtttcacaagaat

SEQ ID NO: 484538 - DNA, 19 bp, Mus musculus
  siRNA target sequence for Hdlbp (NM_133808.2,1973-1991).
cagtttcacaagaatatca

SEQ ID NO: 484539 - DNA, 19 bp, Mus musculus
  siRNA target sequence for Hdlbp (NM_133808.2,1995-2013).
ggaaaggaggcgcaaacat

SEQ ID NO: 484540 - DNA, 19 bp, Mus musculus
  siRNA target sequence for Hdlbp (NM_133808.2,1996-2014).
gaaaggaggcgcaaacatt

SEQ ID NO: 484541 - DNA, 19 bp, Mus musculus
  siRNA target sequence for Hdlbp (NM_133808.2,2000-2018).
ggaggcgcaaacattaaaa

SEQ ID NO: 484542 - DNA, 19 bp, Mus musculus
  siRNA target sequence for Hdlbp (NM_133808.2,2001-2019).
gaggcgcaaacattaaaaa

SEQ ID NO: 484543 - DNA, 19 bp, Mus musculus
  siRNA target sequence for Hdlbp (NM_133808.2,2003-2021).
ggcgcaaacattaaaaaga

SEQ ID NO: 484544 - DNA, 19 bp, Mus musculus
  siRNA target sequence for Hdlbp (NM_133808.2,2067-2085).
gcaactctgagaccattat

SEQ ID NO: 484545 - DNA, 19 bp, Mus musculus
  siRNA target sequence for Hdlbp (NM_133808.2,2068-2086).
caactctgagaccattatt

SEQ ID NO: 484546 - DNA, 19 bp, Mus musculus
  siRNA target sequence for Hdlbp (NM_133808.2,2117-2135).
gcccgcagccggattctgt

SEQ ID NO: 484547 - DNA, 19 bp, Mus musculus
  siRNA target sequence for Hdlbp (NM_133808.2,2121-2139).
gcagccggattctgtctat

SEQ ID NO: 484548 - DNA, 19 bp, Mus musculus
  siRNA target sequence for Hdlbp (NM_133808.2,2143-2161).
gaaagatctggccaacata

SEQ ID NO: 484549 - DNA, 19 bp, Mus musculus
  siRNA target sequence for Hdlbp (NM_133808.2,2163-2181).
ctgaagtggaggtctcaat

SEQ ID NO: 484550 - DNA, 19 bp, Mus musculus
  siRNA target sequence for Hdlbp (NM_133808.2,2176-2194).
ctcaattcctgccaaacta

SEQ ID NO: 484551 - DNA, 19 bp, Mus musculus
  siRNA target sequence for Hdlbp (NM_133808.2,2178-2196).
caattcctgccaaactaca

SEQ ID NO: 484552 - DNA, 19 bp, Mus musculus
  siRNA target sequence for Hdlbp (NM_133808.2,2250-2268).
gtggtggcgtccatattca

SEQ ID NO: 484553 - DNA, 19 bp, Mus musculus
  siRNA target sequence for Hdlbp (NM_133808.2,2289-2307).
gaagcgacactgttgtcat

SEQ ID NO: 484554 - DNA, 19 bp, Mus musculus
  siRNA target sequence for Hdlbp (NM_133808.2,2633-2651).
caccaccgccattttgtca

SEQ ID NO: 484555 - DNA, 19 bp, Mus musculus
  siRNA target sequence for Hdlbp (NM_133808.2,2650-2668).
catccgaagaggacaagtt

SEQ ID NO: 484556 - DNA, 19 bp, Mus musculus
  siRNA target sequence for Hdlbp (NM_133808.2,2721-2739).
ctggcacgcagagtgataa

SEQ ID NO: 484557 - DNA, 19 bp, Mus musculus
  siRNA target sequence for Hdlbp (NM_133808.2,2724-2742).
gcacgcagagtgataaagt

SEQ ID NO: 484558 - DNA, 19 bp, Mus musculus
  siRNA target sequence for Hdlbp (NM_133808.2,2835-2853).
gtgctataccccagaagtt

SEQ ID NO: 484559 - DNA, 19 bp, Mus musculus
  siRNA target sequence for Hdlbp (NM_133808.2,2869-2887).
gggtcccaaaggttcaaga

SEQ ID NO: 484560 - DNA, 19 bp, Mus musculus
  siRNA target sequence for Hdlbp (NM_133808.2,2871-2889).
gtcccaaaggttcaagaat

SEQ ID NO: 484561 - DNA, 19 bp, Mus musculus
  siRNA target sequence for Hdlbp (NM_133808.2,2896-2914).
gatcactcgggactacaat

SEQ ID NO: 484562 - DNA, 19 bp, Mus musculus
  siRNA target sequence for Hdlbp (NM_133808.2,2899-2917).
cactcgggactacaatgtt

SEQ ID NO: 484563 - DNA, 19 bp, Mus musculus
  siRNA target sequence for Hdlbp (NM_133808.2,2903-2921).
cgggactacaatgttcaaa

SEQ ID NO: 484564 - DNA, 19 bp, Mus musculus
  siRNA target sequence for Hdlbp (NM_133808.2,3039-3057).
ggaggtgtgacatcataat

SEQ ID NO: 484565 - DNA, 19 bp, Mus musculus
  siRNA target sequence for Hdlbp (NM_133808.2,3042-3060).
ggtgtgacatcataatcat

SEQ ID NO: 484566 - DNA, 19 bp, Mus musculus
  siRNA target sequence for Hdlbp (NM_133808.2,3130-3148).
ggtagaggtaccctttgat

SEQ ID NO: 484567 - DNA, 19 bp, Mus musculus
  siRNA target sequence for Hdlbp (NM_133808.2,3146-3164).
gatcttcaccgctacatca

SEQ ID NO: 484568 - DNA, 19 bp, Mus musculus
  siRNA target sequence for Hdlbp (NM_133808.2,3300-3318).
ggctactggatcgagtaaa

SEQ ID NO: 484569 - DNA, 19 bp, Mus musculus
  siRNA target sequence for Hdlbp (NM_133808.2,3344-3362).
cgggctttaaggagtttta

SEQ ID NO: 484570 - DNA, 19 bp, Mus musculus
  siRNA target sequence for Hdlbp (NM_133808.2,3397-3415).
caaaattatcgggagaaaa

SEQ ID NO: 484571 - DNA, 19 bp, Mus musculus
  siRNA target sequence for Hdlbp (NM_133808.2,3446-3464).
catgaagtgaacatccaat

SEQ ID NO: 484572 - DNA, 19 bp, Mus musculus
  siRNA target sequence for Hdlbp (NM_133808.2,3460-3478).
ccaatttcctgataaggat

SEQ ID NO: 484573 - DNA, 19 bp, Mus musculus
  siRNA target sequence for Hdlbp (NM_133808.2,3542-3560).
cgtgatgctatcctgaaaa

SEQ ID NO: 484574 - DNA, 19 bp, Mus musculus
  siRNA target sequence for Hdlbp (NM_133808.2,3543-3561).
gtgatgctatcctgaaaat

SEQ ID NO: 484575 - DNA, 19 bp, Mus musculus
  siRNA target sequence for Hdlbp (NM_133808.2,3569-3587).
gagcttgagcagatggttt

SEQ ID NO: 484576 - DNA, 19 bp, Mus musculus
  siRNA target sequence for Hdlbp (NM_133808.2,3643-3661).
caaagccatccggaaaata

SEQ ID NO: 484577 - DNA, 19 bp, Mus musculus
  siRNA target sequence for Hdlbp (NM_133808.2,3813-3831).
gtgaggcactgcaagttta

SEQ ID NO: 484578 - DNA, 19 bp, Mus musculus
  siRNA target sequence for Hdlbp (NM_133808.2,3819-3837).
cactgcaagtttacatgaa

SEQ ID NO: 484579 - DNA, 19 bp, Mus musculus
  siRNA target sequence for Hdlbp (NM_133808.2,3915-3933).
gtgagaaggctcctgatat

SEQ ID NO: 484580 - DNA, 19 bp, Mus musculus
  siRNA target sequence for Hnrpdl (NM_016690.2,87-105).
gaatgagtacagcaacata

SEQ ID NO: 484581 - DNA, 19 bp, Mus musculus
  siRNA target sequence for Hnrpdl (NM_016690.2,151-169).
caggatgacggtaaaatgt

SEQ ID NO: 484582 - DNA, 19 bp, Mus musculus
  siRNA target sequence for Hnrpdl (NM_016690.2,153-171).
ggatgacggtaaaatgttt

SEQ ID NO: 484583 - DNA, 19 bp, Mus musculus
  siRNA target sequence for Hnrpdl (NM_016690.2,154-172).
gatgacggtaaaatgttta

SEQ ID NO: 484584 - DNA, 19 bp, Mus musculus
  siRNA target sequence for Hnrpdl (NM_016690.2,264-282).
cccagtcacgggaagatca

SEQ ID NO: 484585 - DNA, 19 bp, Mus musculus
  siRNA target sequence for Hnrpdl (NM_016690.2,316-334).
gctagtgtggataaggttt

SEQ ID NO: 484586 - DNA, 19 bp, Mus musculus
  siRNA target sequence for Hnrpdl (NM_016690.2,320-338).
gtgtggataaggttttgga

SEQ ID NO: 484587 - DNA, 19 bp, Mus musculus
  siRNA target sequence for Hnrpdl (NM_016690.2,410-428).
cccctaaaaaggtctttgt

SEQ ID NO: 484588 - DNA, 19 bp, Mus musculus
  siRNA target sequence for Hnrpdl (NM_016690.2,433-451).
ggattgagcccagatactt

SEQ ID NO: 484589 - DNA, 19 bp, Mus musculus
  siRNA target sequence for Hnrpdl (NM_016690.2,588-606).
gttagaaagcagataccat

SEQ ID NO: 484590 - DNA, 19 bp, Mus musculus
  siRNA target sequence for Hnrpdl (NM_016690.2,617-635).
ctgggaagtgcgaaatcaa

SEQ ID NO: 484591 - DNA, 19 bp, Mus musculus
  siRNA target sequence for Hnrpdl (NM_016690.2,620-638).
ggaagtgcgaaatcaaagt

SEQ ID NO: 484592 - DNA, 19 bp, Mus musculus
  siRNA target sequence for Hnrpdl (NM_016690.2,755-773).
ggaaccaaggatttaataa

SEQ ID NO: 484593 - DNA, 19 bp, Mus musculus
  siRNA target sequence for Hnrpdl (NM_016690.2,809-827).
cctatggtggtgatcagaa

SEQ ID NO: 484594 - DNA, 19 bp, Mus musculus
  siRNA target sequence for Hnrpdl (NM_016690.2,850-868).
gattatactgggtataact

SEQ ID NO: 484595 - DNA, 19 bp, Mus musculus
  siRNA target sequence for Hnrpdl (NM_016690.2,861-879).
gtataactatgggaactat

SEQ ID NO: 484596 - DNA, 19 bp, Mus musculus
  siRNA target sequence for Hnrpdl (NM_016690.2,948-966).
cggcaatcaccagaacaat

SEQ ID NO: 484597 - DNA, 19 bp, Mus musculus
  siRNA target sequence for Hnrph1 (NM_021510.1,144-162).
cctgctccgcggatgaagt

SEQ ID NO: 484598 - DNA, 19 bp, Mus musculus
  siRNA target sequence for Hnrph1 (NM_021510.1,197-215).
ggggctcaaggtattcgtt

SEQ ID NO: 484599 - DNA, 19 bp, Mus musculus
  siRNA target sequence for Hnrph1 (NM_021510.1,198-216).
gggctcaaggtattcgttt

SEQ ID NO: 484600 - DNA, 19 bp, Mus musculus
  siRNA target sequence for Hnrph1 (NM_021510.1,201-219).
ctcaaggtattcgtttcat

SEQ ID NO: 484601 - DNA, 19 bp, Mus musculus
  siRNA target sequence for Hnrph1 (NM_021510.1,240-258).
caagtggcgaggcttttgt

SEQ ID NO: 484602 - DNA, 19 bp, Mus musculus
  siRNA target sequence for Hnrph1 (NM_021510.1,640-658).
cagtcgagctgaagttaga

SEQ ID NO: 484603 - DNA, 19 bp, Mus musculus
  siRNA target sequence for Hnrph1 (NM_021510.1,647-665).
gctgaagttagaactcatt

SEQ ID NO: 484604 - DNA, 19 bp, Mus musculus
  siRNA target sequence for Hnrph1 (NM_021510.1,668-686).
gacccaccacgaaaactta

SEQ ID NO: 484605 - DNA, 19 bp, Mus musculus
  siRNA target sequence for Hnrph1 (NM_021510.1,698-716).
cggccaggtccctatgaca

SEQ ID NO: 484606 - DNA, 19 bp, Mus musculus
  siRNA target sequence for Hnrph1 (NM_021510.1,772-790).
gatgaggcgtggtgcttat

SEQ ID NO: 484607 - DNA, 19 bp, Mus musculus
  siRNA target sequence for Hnrph1 (NM_021510.1,842-860).
ggatttggttcagatagat

SEQ ID NO: 484608 - DNA, 19 bp, Mus musculus
  siRNA target sequence for Hnrph1 (NM_021510.1,863-881).
ggaagagacctcaattatt

SEQ ID NO: 484609 - DNA, 19 bp, Mus musculus
  siRNA target sequence for Hnrph1 (NM_021510.1,869-887).
gacctcaattattgttttt

SEQ ID NO: 484610 - DNA, 19 bp, Mus musculus
  siRNA target sequence for Hnrph1 (NM_021510.1,871-889).
cctcaattattgtttttca

SEQ ID NO: 484611 - DNA, 19 bp, Mus musculus
  siRNA target sequence for Hnrph1 (NM_021510.1,942-960).
ccggacactgtgtacacat

SEQ ID NO: 484612 - DNA, 19 bp, Mus musculus
  siRNA target sequence for Hnrph1 (NM_021510.1,980-998).
gctactgagaatgacattt

SEQ ID NO: 484613 - DNA, 19 bp, Mus musculus
  siRNA target sequence for Hnrph1 (NM_021510.1,1191-1209).
gtgcttacgaacacagata

SEQ ID NO: 484614 - DNA, 19 bp, Mus musculus
  siRNA target sequence for Hnrph1 (NM_021510.1,1198-1216).
cgaacacagatatgtagaa

SEQ ID NO: 484615 - DNA, 19 bp, Mus musculus
  siRNA target sequence for Hnrph1 (NM_021510.1,1375-1393).
cggatatgaccaagtttta

SEQ ID NO: 484616 - DNA, 19 bp, Mus musculus
  siRNA target sequence for Hnrpm (NM_029804.1,63-81).
cgacagaacccaaaatgga

SEQ ID NO: 484617 - DNA, 19 bp, Mus musculus
  siRNA target sequence for Hnrpm (NM_029804.1,146-164).
cgacctactcagaatgaga

SEQ ID NO: 484618 - DNA, 19 bp, Mus musculus
  siRNA target sequence for Hnrpm (NM_029804.1,147-165).
gacctactcagaatgagaa

SEQ ID NO: 484619 - DNA, 19 bp, Mus musculus
  siRNA target sequence for Hnrpm (NM_029804.1,200-218).
cgctttgagccatattcca

SEQ ID NO: 484620 - DNA, 19 bp, Mus musculus
  siRNA target sequence for Hnrpm (NM_029804.1,201-219).
gctttgagccatattccaa

SEQ ID NO: 484621 - DNA, 19 bp, Mus musculus
  siRNA target sequence for Hnrpm (NM_029804.1,210-228).
catattccaacccaactaa

SEQ ID NO: 484622 - DNA, 19 bp, Mus musculus
  siRNA target sequence for Hnrpm (NM_029804.1,266-284).
gtgaaatggcagtcactta

SEQ ID NO: 484623 - DNA, 19 bp, Mus musculus
  siRNA target sequence for Hnrpm (NM_029804.1,279-297).
cacttaaagacctggttaa

SEQ ID NO: 484624 - DNA, 19 bp, Mus musculus
  siRNA target sequence for Hnrpm (NM_029804.1,410-428).
gaagttctaaacaagcata

SEQ ID NO: 484625 - DNA, 19 bp, Mus musculus
  siRNA target sequence for Hnrpm (NM_029804.1,437-455).
ggaaggccactgaaagtca

SEQ ID NO: 484626 - DNA, 19 bp, Mus musculus
  siRNA target sequence for Hnrpm (NM_029804.1,479-497).
gcaaggagagcaatgcaaa

SEQ ID NO: 484627 - DNA, 19 bp, Mus musculus
  siRNA target sequence for Hnrpm (NM_029804.1,536-554).
ggtggcccaggaatgatta

SEQ ID NO: 484628 - DNA, 19 bp, Mus musculus
  siRNA target sequence for Hnrpm (NM_029804.1,540-558).
gcccaggaatgattaatat

SEQ ID NO: 484629 - DNA, 19 bp, Mus musculus
  siRNA target sequence for Hnrpm (NM_029804.1,561-579).
cacccagtatcctaaataa

SEQ ID NO: 484630 - DNA, 19 bp, Mus musculus
  siRNA target sequence for Hnrpm (NM_029804.1,565-583).
cagtatcctaaataatcct

SEQ ID NO: 484631 - DNA, 19 bp, Mus musculus
  siRNA target sequence for Hnrpm (NM_029804.1,567-585).
gtatcctaaataatcctaa

SEQ ID NO: 484632 - DNA, 19 bp, Mus musculus
  siRNA target sequence for Hnrpm (NM_029804.1,582-600).
ctaacatcccaaatgagat

SEQ ID NO: 484633 - DNA, 19 bp, Mus musculus
  siRNA target sequence for Hnrpm (NM_029804.1,589-607).
cccaaatgagattatccat

SEQ ID NO: 484634 - DNA, 19 bp, Mus musculus
  siRNA target sequence for Hnrpm (NM_029804.1,624-642).
gacttggaagcacagtatt

SEQ ID NO: 484635 - DNA, 19 bp, Mus musculus
  siRNA target sequence for Hnrpm (NM_029804.1,633-651).
gcacagtatttgtagcaaa

SEQ ID NO: 484636 - DNA, 19 bp, Mus musculus
  siRNA target sequence for Hnrpm (NM_029804.1,644-662).
gtagcaaatctggattata

SEQ ID NO: 484637 - DNA, 19 bp, Mus musculus
  siRNA target sequence for Hnrpm (NM_029804.1,791-809).
gctgtgcaagcaatatcta

SEQ ID NO: 484638 - DNA, 19 bp, Mus musculus
  siRNA target sequence for Hnrpm (NM_029804.1,794-812).
gtgcaagcaatatctatgt

SEQ ID NO: 484639 - DNA, 19 bp, Mus musculus
  siRNA target sequence for Hnrpm (NM_029804.1,796-814).
gcaagcaatatctatgttt

SEQ ID NO: 484640 - DNA, 19 bp, Mus musculus
  siRNA target sequence for Hnrpm (NM_029804.1,818-836).
ggccagttgctgtttgata

SEQ ID NO: 484641 - DNA, 19 bp, Mus musculus
  siRNA target sequence for Hnrpm (NM_029804.1,837-855).
gaccgatgcacgtcaagat

SEQ ID NO: 484642 - DNA, 19 bp, Mus musculus
  siRNA target sequence for Hnrpm (NM_029804.1,857-875).
gatgagagggctttaccaa

SEQ ID NO: 484643 - DNA, 19 bp, Mus musculus
  siRNA target sequence for Hnrpm (NM_029804.1,1034-1052).
ggcataggatttggaataa

SEQ ID NO: 484644 - DNA, 19 bp, Mus musculus
  siRNA target sequence for Hnrpm (NM_029804.1,1035-1053).
gcataggatttggaataaa

SEQ ID NO: 484645 - DNA, 19 bp, Mus musculus
  siRNA target sequence for Hnrpm (NM_029804.1,1131-1149).
gccgaataaatgaaatcct

SEQ ID NO: 484646 - DNA, 19 bp, Mus musculus
  siRNA target sequence for Hnrpm (NM_029804.1,1132-1150).
ccgaataaatgaaatccta

SEQ ID NO: 484647 - DNA, 19 bp, Mus musculus
  siRNA target sequence for Hnrpm (NM_029804.1,1411-1429).
ccacatggcctccagtatt

SEQ ID NO: 484648 - DNA, 19 bp, Mus musculus
  siRNA target sequence for Hnrpm (NM_029804.1,1779-1797).
ccaacagcctggaacgtat

SEQ ID NO: 484649 - DNA, 19 bp, Mus musculus
  siRNA target sequence for Hnrpm (NM_029804.1,1818-1836).
cattgggcgctggtattga

SEQ ID NO: 484650 - DNA, 19 bp, Mus musculus
  siRNA target sequence for Hnrpm (NM_029804.1,1993-2011).
gagaaatctcccatttgat

SEQ ID NO: 484651 - DNA, 19 bp, Mus musculus
  siRNA target sequence for Hnrpm (NM_029804.1,2000-2018).
ctcccatttgattttacat

SEQ ID NO: 484652 - DNA, 19 bp, Mus musculus
  siRNA target sequence for Hnrpm (NM_029804.1,2032-2050).
ggacaagttcaatgaatgt

SEQ ID NO: 484653 - DNA, 19 bp, Mus musculus
  siRNA target sequence for Hnrpm (NM_029804.1,2099-2117).
gggtgcggtgtggttaagt

SEQ ID NO: 484654 - DNA, 19 bp, Mus musculus
  siRNA target sequence for Hnrpm (NM_029804.1,2100-2118).
ggtgcggtgtggttaagtt

SEQ ID NO: 484655 - DNA, 19 bp, Mus musculus
  siRNA target sequence for Hnrpm (NM_029804.1,2101-2119).
gtgcggtgtggttaagttt

SEQ ID NO: 484656 - DNA, 19 bp, Mus musculus
  siRNA target sequence for Hnrpm (NM_029804.1,2105-2123).
ggtgtggttaagtttgagt

SEQ ID NO: 484657 - DNA, 19 bp, Mus musculus
  siRNA target sequence for Hnrpm (NM_029804.1,2175-2193).
gtggccgagagattgatgt

SEQ ID NO: 484658 - DNA, 19 bp, Mus musculus
  siRNA target sequence for Hnrpm (NM_029804.1,2181-2199).
gagagattgatgttcgaat

SEQ ID NO: 484659 - DNA, 19 bp, Mus musculus
  siRNA target sequence for Hnrpm (NM_029804.1,2189-2207).
gatgttcgaattgatagaa

SEQ ID NO: 484660 - DNA, 19 bp, Mus musculus
  siRNA target sequence for Hnrpr (NM_028871.1,142-160).
ctaatcaggtgaatggtaa

SEQ ID NO: 484661 - DNA, 19 bp, Mus musculus
  siRNA target sequence for Hnrpr (NM_028871.1,156-174).
ggtaatgcggtacagttaa

SEQ ID NO: 484662 - DNA, 19 bp, Mus musculus
  siRNA target sequence for Hnrpr (NM_028871.1,157-175).
gtaatgcggtacagttaaa

SEQ ID NO: 484663 - DNA, 19 bp, Mus musculus
  siRNA target sequence for Hnrpr (NM_028871.1,213-231).
cacacagaacactacaaga

SEQ ID NO: 484664 - DNA, 19 bp, Mus musculus
  siRNA target sequence for Hnrpr (NM_028871.1,290-308).
gacaggattggtagcttat

SEQ ID NO: 484665 - DNA, 19 bp, Mus musculus
  siRNA target sequence for Hnrpr (NM_028871.1,292-310).
caggattggtagcttatgt

SEQ ID NO: 484666 - DNA, 19 bp, Mus musculus
  siRNA target sequence for Hnrpr (NM_028871.1,337-355).
ctctcagggagtttaatga

SEQ ID NO: 484667 - DNA, 19 bp, Mus musculus
  siRNA target sequence for Hnrpr (NM_028871.1,370-388).
ctgtactgcagcagttcaa

SEQ ID NO: 484668 - DNA, 19 bp, Mus musculus
  siRNA target sequence for Hnrpr (NM_028871.1,528-546).
cttgagaggactggttata

SEQ ID NO: 484669 - DNA, 19 bp, Mus musculus
  siRNA target sequence for Hnrpr (NM_028871.1,536-554).
gactggttatactttggat

SEQ ID NO: 484670 - DNA, 19 bp, Mus musculus
  siRNA target sequence for Hnrpr (NM_028871.1,712-730).
gggatctacggctcatgat

SEQ ID NO: 484671 - DNA, 19 bp, Mus musculus
  siRNA target sequence for Hnrpr (NM_028871.1,790-808).
ctgcgcaggaagcagttaa

SEQ ID NO: 484672 - DNA, 19 bp, Mus musculus
  siRNA target sequence for Hnrpr (NM_028871.1,1823-1841).
caatcgagggggcaatgta

SEQ ID NO: 484673 - DNA, 19 bp, Mus musculus
  siRNA target sequence for Hrb2 (NM_178610.2,296-314).
ggtagcatgactgtttgta

SEQ ID NO: 484674 - DNA, 19 bp, Mus musculus
  siRNA target sequence for Hrb2 (NM_178610.2,301-319).
catgactgtttgtacaaca

SEQ ID NO: 484675 - DNA, 19 bp, Mus musculus
  siRNA target sequence for Hrb2 (NM_178610.2,327-345).
cgtttgacccttacatcat

SEQ ID NO: 484676 - DNA, 19 bp, Mus musculus
  siRNA target sequence for Hrb2 (NM_178610.2,332-350).
gacccttacatcatcatta

SEQ ID NO: 484677 - DNA, 19 bp, Mus musculus
  siRNA target sequence for Hrb2 (NM_178610.2,381-399).
ggagcgtttcctttgaaca

SEQ ID NO: 484678 - DNA, 19 bp, Mus musculus
  siRNA target sequence for Hrb2 (NM_178610.2,425-443).
gttgcgtgtgacatcatta

SEQ ID NO: 484679 - DNA, 19 bp, Mus musculus
  siRNA target sequence for Hrb2 (NM_178610.2,448-466).
cggctctctagtgagaaat

SEQ ID NO: 484680 - DNA, 19 bp, Mus musculus
  siRNA target sequence for Hrb2 (NM_178610.2,453-471).
ctctagtgagaaataaaga

SEQ ID NO: 484681 - DNA, 19 bp, Mus musculus
  siRNA target sequence for Hrb2 (NM_178610.2,497-515).
cttattggtcccaaaggat

SEQ ID NO: 484682 - DNA, 19 bp, Mus musculus
  siRNA target sequence for Hrb2 (NM_178610.2,528-546).
cactggagctcctgacaaa

SEQ ID NO: 484683 - DNA, 19 bp, Mus musculus
  siRNA target sequence for Hrb2 (NM_178610.2,600-618).
gcctcaaagaggttcgaaa

SEQ ID NO: 484684 - DNA, 19 bp, Mus musculus
  siRNA target sequence for Hrb2 (NM_178610.2,604-622).
caaagaggttcgaaaagta

SEQ ID NO: 484685 - DNA, 19 bp, Mus musculus
  siRNA target sequence for Hrb2 (NM_178610.2,614-632).
cgaaaagtagtccttgata

SEQ ID NO: 484686 - DNA, 19 bp, Mus musculus
  siRNA target sequence for Hrb2 (NM_178610.2,623-641).
gtccttgataccatgaaga

SEQ ID NO: 484687 - DNA, 19 bp, Mus musculus
  siRNA target sequence for Hrb2 (NM_178610.2,637-655).
gaagaatatccatccaatt

SEQ ID NO: 484688 - DNA, 19 bp, Mus musculus
  siRNA target sequence for Hrb2 (NM_178610.2,640-658).
gaatatccatccaatttat

SEQ ID NO: 484689 - DNA, 19 bp, Mus musculus
  siRNA target sequence for Hrb2 (NM_178610.2,646-664).
ccatccaatttataacatt

SEQ ID NO: 484690 - DNA, 19 bp, Mus musculus
  siRNA target sequence for Hrb2 (NM_178610.2,647-665).
catccaatttataacatta

SEQ ID NO: 484691 - DNA, 19 bp, Mus musculus
  siRNA target sequence for Hrb2 (NM_178610.2,683-701).
cgggagttggcaaaagatt

SEQ ID NO: 484692 - DNA, 19 bp, Mus musculus
  siRNA target sequence for Hrb2 (NM_178610.2,703-721).
cgagttacgatcacaaagt

SEQ ID NO: 484693 - DNA, 19 bp, Mus musculus
  siRNA target sequence for Hrb2 (NM_178610.2,827-845).
ccagagagtcagattgata

SEQ ID NO: 484694 - DNA, 19 bp, Mus musculus
  siRNA target sequence for Hrb2 (NM_178610.2,853-871).
ggccagtggtgaatacttt

SEQ ID NO: 484695 - DNA, 19 bp, Mus musculus
  siRNA target sequence for Hrb2 (NM_178610.2,1007-1025).
gaagcttctaccgaaacta

SEQ ID NO: 484696 - DNA, 19 bp, Mus musculus
  siRNA target sequence for Hrb2 (NM_178610.2,1010-1028).
gcttctaccgaaactaaga

SEQ ID NO: 484697 - DNA, 19 bp, Mus musculus
  siRNA target sequence for Hrb2 (NM_178610.2,1011-1029).
cttctaccgaaactaagat

SEQ ID NO: 484698 - DNA, 19 bp, Mus musculus
  siRNA target sequence for Hrb2 (NM_178610.2,1014-1032).
ctaccgaaactaagattga

SEQ ID NO: 484699 - DNA, 19 bp, Mus musculus
  siRNA target sequence for Hrb2 (NM_178610.2,1017-1035).
ccgaaactaagattgatgt

SEQ ID NO: 484700 - DNA, 19 bp, Mus musculus
  siRNA target sequence for Hrb2 (NM_178610.2,1041-1059).
ctatcaaggaaaaggttaa

SEQ ID NO: 484701 - DNA, 19 bp, Mus musculus
  siRNA target sequence for Igf2bp1 (NM_009951.2,322-340).
ccgcagacttggagaaagt

SEQ ID NO: 484702 - DNA, 19 bp, Mus musculus
  siRNA target sequence for Igf2bp1 (NM_009951.2,514-532).
ggagtcggaaaatacagat

SEQ ID NO: 484703 - DNA, 19 bp, Mus musculus
  siRNA target sequence for Igf2bp1 (NM_009951.2,673-691).
ccaggcaagctatcatgaa

SEQ ID NO: 484704 - DNA, 19 bp, Mus musculus
  siRNA target sequence for Igf2bp1 (NM_009951.2,881-899).
ggtgcctacgcagtatgta

SEQ ID NO: 484705 - DNA, 19 bp, Mus musculus
  siRNA target sequence for Igf2bp1 (NM_009951.2,893-911).
gtatgtaggcgctatcatt

SEQ ID NO: 484706 - DNA, 19 bp, Mus musculus
  siRNA target sequence for Igf2bp1 (NM_009951.2,1039-1057).
cctccgcgtgcaagatgat

SEQ ID NO: 484707 - DNA, 19 bp, Mus musculus
  siRNA target sequence for Igf2bp1 (NM_009951.2,1042-1060).
ccgcgtgcaagatgatctt

SEQ ID NO: 484708 - DNA, 19 bp, Mus musculus
  siRNA target sequence for Igf2bp1 (NM_009951.2,1091-1109).
caaaacggcagatgaagtt

SEQ ID NO: 484709 - DNA, 19 bp, Mus musculus
  siRNA target sequence for Igf2bp1 (NM_009951.2,1136-1154).
cttcgtcgggcgactcatt

SEQ ID NO: 484710 - DNA, 19 bp, Mus musculus
  siRNA target sequence for Igf2bp1 (NM_009951.2,1224-1242).
caggacctcacgctctata

SEQ ID NO: 484711 - DNA, 19 bp, Mus musculus
  siRNA target sequence for Igf2bp1 (NM_009951.2,1291-1309).
gggccgagcaggagatcat

SEQ ID NO: 484712 - DNA, 19 bp, Mus musculus
  siRNA target sequence for Igf2bp1 (NM_009951.2,1598-1616).
gattgcaccaccagaaaca

SEQ ID NO: 484713 - DNA, 19 bp, Mus musculus
  siRNA target sequence for Igf2bp1 (NM_009951.2,1618-1636).
ctgactccaaagttcgaat

SEQ ID NO: 484714 - DNA, 19 bp, Mus musculus
  siRNA target sequence for Igf2bp1 (NM_009951.2,1684-1702).
gaatctatggcaaactaaa

SEQ ID NO: 484715 - DNA, 19 bp, Mus musculus
  siRNA target sequence for Igf2bp1 (NM_009951.2,1871-1889).
gaacgaccaagtcattgtt

SEQ ID NO: 484716 - DNA, 19 bp, Mus musculus
  siRNA target sequence for Igf2bp1 (NM_009951.2,1875-1893).
gaccaagtcattgttaaga

SEQ ID NO: 484717 - DNA, 19 bp, Mus musculus
  siRNA target sequence for Igf2bp1 (NM_009951.2,1878-1896).
caagtcattgttaagatca

SEQ ID NO: 484718 - DNA, 19 bp, Mus musculus
  siRNA target sequence for Igf2bp1 (NM_009951.2,1946-1964).
cctggctcaagttaagcaa

SEQ ID NO: 484719 - DNA, 19 bp, Mus musculus
  siRNA target sequence for Igf2bp3 (NM_023670.2,404-422).
cgaggcgctttcaggtaaa

SEQ ID NO: 484720 - DNA, 19 bp, Mus musculus
  siRNA target sequence for Igf2bp3 (NM_023670.2,405-423).
gaggcgctttcaggtaaaa

SEQ ID NO: 484721 - DNA, 19 bp, Mus musculus
  siRNA target sequence for Igf2bp3 (NM_023670.2,409-427).
cgctttcaggtaaaatgga

SEQ ID NO: 484722 - DNA, 19 bp, Mus musculus
  siRNA target sequence for Igf2bp3 (NM_023670.2,415-433).
caggtaaaatggaactaca

SEQ ID NO: 484723 - DNA, 19 bp, Mus musculus
  siRNA target sequence for Igf2bp3 (NM_023670.2,472-490).
ggcagaggattcgtaaact

SEQ ID NO: 484724 - DNA, 19 bp, Mus musculus
  siRNA target sequence for Igf2bp3 (NM_023670.2,473-491).
gcagaggattcgtaaactt

SEQ ID NO: 484725 - DNA, 19 bp, Mus musculus
  siRNA target sequence for Igf2bp3 (NM_023670.2,478-496).
ggattcgtaaacttcagat

SEQ ID NO: 484726 - DNA, 19 bp, Mus musculus
  siRNA target sequence for Igf2bp3 (NM_023670.2,479-497).
gattcgtaaacttcagata

SEQ ID NO: 484727 - DNA, 19 bp, Mus musculus
  siRNA target sequence for Igf2bp3 (NM_023670.2,527-545).
ggtgctggatagtttacta

SEQ ID NO: 484728 - DNA, 19 bp, Mus musculus
  siRNA target sequence for Igf2bp3 (NM_023670.2,601-619).
cagttgtaaatgtaaccta

SEQ ID NO: 484729 - DNA, 19 bp, Mus musculus
  siRNA target sequence for Igf2bp3 (NM_023670.2,603-621).
gttgtaaatgtaacctatt

SEQ ID NO: 484730 - DNA, 19 bp, Mus musculus
  siRNA target sequence for Igf2bp3 (NM_023670.2,637-655).
ctagacaagccttagacaa

SEQ ID NO: 484731 - DNA, 19 bp, Mus musculus
  siRNA target sequence for Igf2bp3 (NM_023670.2,640-658).
gacaagccttagacaaact

SEQ ID NO: 484732 - DNA, 19 bp, Mus musculus
  siRNA target sequence for Igf2bp3 (NM_023670.2,664-682).
gattccagttagagaactt

SEQ ID NO: 484733 - DNA, 19 bp, Mus musculus
  siRNA target sequence for Igf2bp3 (NM_023670.2,696-714).
gcctacatcccagatgaaa

SEQ ID NO: 484734 - DNA, 19 bp, Mus musculus
  siRNA target sequence for Igf2bp3 (NM_023670.2,698-716).
ctacatcccagatgaaact

SEQ ID NO: 484735 - DNA, 19 bp, Mus musculus
  siRNA target sequence for Igf2bp3 (NM_023670.2,865-883).
gagccattataggaaaaga

SEQ ID NO: 484736 - DNA, 19 bp, Mus musculus
  siRNA target sequence for Igf2bp3 (NM_023670.2,888-906).
gctaccattcgcaacatca

SEQ ID NO: 484737 - DNA, 19 bp, Mus musculus
  siRNA target sequence for Igf2bp3 (NM_023670.2,914-932).
gacccagtctaaaatcgat

SEQ ID NO: 484738 - DNA, 19 bp, Mus musculus
  siRNA target sequence for Igf2bp3 (NM_023670.2,1108-1126).
gccgtctcattggtaaaga

SEQ ID NO: 484739 - DNA, 19 bp, Mus musculus
  siRNA target sequence for Igf2bp3 (NM_023670.2,1190-1208).
ggaactgacgctgtacaat

SEQ ID NO: 484740 - DNA, 19 bp, Mus musculus
  siRNA target sequence for Igf2bp3 (NM_023670.2,1210-1228).
cggaacgcaccattacagt

SEQ ID NO: 484741 - DNA, 19 bp, Mus musculus
  siRNA target sequence for Igf2bp3 (NM_023670.2,1337-1355).
ccctggattaaatctgaat

SEQ ID NO: 484742 - DNA, 19 bp, Mus musculus
  siRNA target sequence for Igf2bp3 (NM_023670.2,1426-1444).
ctccctacccacaatttga

SEQ ID NO: 484743 - DNA, 19 bp, Mus musculus
  siRNA target sequence for Igf2bp3 (NM_023670.2,1435-1453).
cacaatttgagcaatcaga

SEQ ID NO: 484744 - DNA, 19 bp, Mus musculus
  siRNA target sequence for Igf2bp3 (NM_023670.2,1541-1559).
ctttgcgggagcttcgatt

SEQ ID NO: 484745 - DNA, 19 bp, Mus musculus
  siRNA target sequence for Igf2bp3 (NM_023670.2,1545-1563).
gcgggagcttcgattaaga

SEQ ID NO: 484746 - DNA, 19 bp, Mus musculus
  siRNA target sequence for Igf2bp3 (NM_023670.2,1573-1591).
ccgaagcaccagatgctaa

SEQ ID NO: 484747 - DNA, 19 bp, Mus musculus
  siRNA target sequence for Igf2bp3 (NM_023670.2,1574-1592).
cgaagcaccagatgctaaa

SEQ ID NO: 484748 - DNA, 19 bp, Mus musculus
  siRNA target sequence for Igf2bp3 (NM_023670.2,1595-1613).
gcggatggtgattatcact

SEQ ID NO: 484749 - DNA, 19 bp, Mus musculus
  siRNA target sequence for Igf2bp3 (NM_023670.2,1645-1663).
gaagaatttatggaaaaat

SEQ ID NO: 484750 - DNA, 19 bp, Mus musculus
  siRNA target sequence for Igf2bp3 (NM_023670.2,1772-1790).
gaatgagctccagagttta

SEQ ID NO: 484751 - DNA, 19 bp, Mus musculus
  siRNA target sequence for Igf2bp3 (NM_023670.2,1825-1843).
cacctgatgagaatgatca

SEQ ID NO: 484752 - DNA, 19 bp, Mus musculus
  siRNA target sequence for Igf2bp3 (NM_023670.2,1839-1857).
gatcaagtagttgtcaaaa

SEQ ID NO: 484753 - DNA, 19 bp, Mus musculus
  siRNA target sequence for Igf2bp3 (NM_023670.2,1883-1901).
ggttgcccagaggaaaatt

SEQ ID NO: 484754 - DNA, 19 bp, Mus musculus
  siRNA target sequence for Kars (NM_053092.1,222-240).
ctacaagatccgaagtcaa

SEQ ID NO: 484755 - DNA, 19 bp, Mus musculus
  siRNA target sequence for Kars (NM_053092.1,315-333).
gttcatccaagaatatagt

SEQ ID NO: 484756 - DNA, 19 bp, Mus musculus
  siRNA target sequence for Kars (NM_053092.1,471-489).
ctccaggaattacaaatca

SEQ ID NO: 484757 - DNA, 19 bp, Mus musculus
  siRNA target sequence for Kars (NM_053092.1,483-501).
caaatcagaggaggaattt

SEQ ID NO: 484758 - DNA, 19 bp, Mus musculus
  siRNA target sequence for Kars (NM_053092.1,490-508).
gaggaggaatttgttcata

SEQ ID NO: 484759 - DNA, 19 bp, Mus musculus
  siRNA target sequence for Kars (NM_053092.1,495-513).
ggaatttgttcatatcaat

SEQ ID NO: 484760 - DNA, 19 bp, Mus musculus
  siRNA target sequence for Kars (NM_053092.1,550-568).
ggcaatcccgggaaaacca

SEQ ID NO: 484761 - DNA, 19 bp, Mus musculus
  siRNA target sequence for Kars (NM_053092.1,551-569).
gcaatcccgggaaaaccaa

SEQ ID NO: 484762 - DNA, 19 bp, Mus musculus
  siRNA target sequence for Kars (NM_053092.1,624-642).
gcacatgctgcctcatctt

SEQ ID NO: 484763 - DNA, 19 bp, Mus musculus
  siRNA target sequence for Kars (NM_053092.1,649-667).
ggcctcaaagacaaggaaa

SEQ ID NO: 484764 - DNA, 19 bp, Mus musculus
  siRNA target sequence for Kars (NM_053092.1,668-686).
cacggtatcgtcaaagata

SEQ ID NO: 484765 - DNA, 19 bp, Mus musculus
  siRNA target sequence for Kars (NM_053092.1,670-688).
cggtatcgtcaaagatact

SEQ ID NO: 484766 - DNA, 19 bp, Mus musculus
  siRNA target sequence for Kars (NM_053092.1,671-689).
ggtatcgtcaaagatactt

SEQ ID NO: 484767 - DNA, 19 bp, Mus musculus
  siRNA target sequence for Kars (NM_053092.1,734-752).
gctctaagatcatcacata

SEQ ID NO: 484768 - DNA, 19 bp, Mus musculus
  siRNA target sequence for Kars (NM_053092.1,741-759).
gatcatcacatacataaga

SEQ ID NO: 484769 - DNA, 19 bp, Mus musculus
  siRNA target sequence for Kars (NM_053092.1,778-796).
ggcttcctagagatcgaaa

SEQ ID NO: 484770 - DNA, 19 bp, Mus musculus
  siRNA target sequence for Kars (NM_053092.1,793-811).
gaaactcccatgatgaaca

SEQ ID NO: 484771 - DNA, 19 bp, Mus musculus
  siRNA target sequence for Kars (NM_053092.1,839-857).
ctttcatcacctatcacaa

SEQ ID NO: 484772 - DNA, 19 bp, Mus musculus
  siRNA target sequence for Kars (NM_053092.1,926-944).
gcattgaccgggtttatga

SEQ ID NO: 484773 - DNA, 19 bp, Mus musculus
  siRNA target sequence for Kars (NM_053092.1,927-945).
cattgaccgggtttatgaa

SEQ ID NO: 484774 - DNA, 19 bp, Mus musculus
  siRNA target sequence for Kars (NM_053092.1,972-990).
gattgatttgactcacaat

SEQ ID NO: 484775 - DNA, 19 bp, Mus musculus
  siRNA target sequence for Kars (NM_053092.1,1017-1035).
catggcctatgcagactat

SEQ ID NO: 484776 - DNA, 19 bp, Mus musculus
  siRNA target sequence for Kars (NM_053092.1,1020-1038).
ggcctatgcagactatcat

SEQ ID NO: 484777 - DNA, 19 bp, Mus musculus
  siRNA target sequence for Kars (NM_053092.1,1022-1040).
cctatgcagactatcatga

SEQ ID NO: 484778 - DNA, 19 bp, Mus musculus
  siRNA target sequence for Kars (NM_053092.1,1085-1103).
gcattacaggcagttacaa

SEQ ID NO: 484779 - DNA, 19 bp, Mus musculus
  siRNA target sequence for Kars (NM_053092.1,1250-1268).
ctcggaaaattcttgatga

SEQ ID NO: 484780 - DNA, 19 bp, Mus musculus
  siRNA target sequence for Kars (NM_053092.1,1252-1270).
cggaaaattcttgatgata

SEQ ID NO: 484781 - DNA, 19 bp, Mus musculus
  siRNA target sequence for Kars (NM_053092.1,1313-1331).
cagccaggctccttgataa

SEQ ID NO: 484782 - DNA, 19 bp, Mus musculus
  siRNA target sequence for Kars (NM_053092.1,1382-1400).
gtgatcacccacagatcat

SEQ ID NO: 484783 - DNA, 19 bp, Mus musculus
  siRNA target sequence for Kars (NM_053092.1,1384-1402).
gatcacccacagatcatga

SEQ ID NO: 484784 - DNA, 19 bp, Mus musculus
  siRNA target sequence for Kars (NM_053092.1,1447-1465).
cgctttgagctgtttgtca

SEQ ID NO: 484785 - DNA, 19 bp, Mus musculus
  siRNA target sequence for Kars (NM_053092.1,1476-1494).
gatatgcaatgcctatact

SEQ ID NO: 484786 - DNA, 19 bp, Mus musculus
  siRNA target sequence for Kars (NM_053092.1,1666-1684).
ctcaccgattccaacaata

SEQ ID NO: 484787 - DNA, 19 bp, Mus musculus
  siRNA target sequence for Khdrbs1 (NM_011317.2,478-496).
cagctgctgtccgtagaaa

SEQ ID NO: 484788 - DNA, 19 bp, Mus musculus
  siRNA target sequence for Khdrbs1 (NM_011317.2,480-498).
gctgctgtccgtagaaatt

SEQ ID NO: 484789 - DNA, 19 bp, Mus musculus
  siRNA target sequence for Khdrbs1 (NM_011317.2,484-502).
ctgtccgtagaaattgaga

SEQ ID NO: 484790 - DNA, 19 bp, Mus musculus
  siRNA target sequence for Khdrbs1 (NM_011317.2,529-547).
gatgacgaggagaattatt

SEQ ID NO: 484791 - DNA, 19 bp, Mus musculus
  siRNA target sequence for Khdrbs1 (NM_011317.2,534-552).
cgaggagaattatttggat

SEQ ID NO: 484792 - DNA, 19 bp, Mus musculus
  siRNA target sequence for Khdrbs1 (NM_011317.2,537-555).
ggagaattatttggattta

SEQ ID NO: 484793 - DNA, 19 bp, Mus musculus
  siRNA target sequence for Khdrbs1 (NM_011317.2,538-556).
gagaattatttggatttat

SEQ ID NO: 484794 - DNA, 19 bp, Mus musculus
  siRNA target sequence for Khdrbs1 (NM_011317.2,646-664).
ccacaaggaaatacaatca

SEQ ID NO: 484795 - DNA, 19 bp, Mus musculus
  siRNA target sequence for Khdrbs1 (NM_011317.2,705-723).
ggggaagggttcaatgaga

SEQ ID NO: 484796 - DNA, 19 bp, Mus musculus
  siRNA target sequence for Khdrbs1 (NM_011317.2,753-771).
gggtggagaccccaaatat

SEQ ID NO: 484797 - DNA, 19 bp, Mus musculus
  siRNA target sequence for Khdrbs1 (NM_011317.2,763-781).
cccaaatatgcccatttaa

SEQ ID NO: 484798 - DNA, 19 bp, Mus musculus
  siRNA target sequence for Khdrbs1 (NM_011317.2,764-782).
ccaaatatgcccatttaaa

SEQ ID NO: 484799 - DNA, 19 bp, Mus musculus
  siRNA target sequence for Khdrbs1 (NM_011317.2,819-837).
cccgtgtgaagcttatgct

SEQ ID NO: 484800 - DNA, 19 bp, Mus musculus
  siRNA target sequence for Khdrbs1 (NM_011317.2,845-863).
cccatgctatggaagaagt

SEQ ID NO: 484801 - DNA, 19 bp, Mus musculus
  siRNA target sequence for Khdrbs1 (NM_011317.2,900-918).
ctgtcaggagcagtttcta

SEQ ID NO: 484802 - DNA, 19 bp, Mus musculus
  siRNA target sequence for Khdrbs1 (NM_011317.2,916-934).
ctagaattgtcctacttga

SEQ ID NO: 484803 - DNA, 19 bp, Mus musculus
  siRNA target sequence for Khdrbs1 (NM_011317.2,1163-1181).
ggattcagagaataccttt

SEQ ID NO: 484804 - DNA, 19 bp, Mus musculus
  siRNA target sequence for Khdrbs1 (NM_011317.2,1335-1353).
cgaagcctacggacaagat

SEQ ID NO: 484805 - DNA, 19 bp, Mus musculus
  siRNA target sequence for Khdrbs2 (NM_133235.2,159-177).
gcctggatccatcttttgt

SEQ ID NO: 484806 - DNA, 19 bp, Mus musculus
  siRNA target sequence for Khdrbs2 (NM_133235.2,188-206).
cgccttctggcggaagaaa

SEQ ID NO: 484807 - DNA, 19 bp, Mus musculus
  siRNA target sequence for Khdrbs2 (NM_133235.2,189-207).
gccttctggcggaagaaat

SEQ ID NO: 484808 - DNA, 19 bp, Mus musculus
  siRNA target sequence for Khdrbs2 (NM_133235.2,197-215).
gcggaagaaattgagaaat

SEQ ID NO: 484809 - DNA, 19 bp, Mus musculus
  siRNA target sequence for Khdrbs2 (NM_133235.2,262-280).
cgatgtcatcagcaacaaa

SEQ ID NO: 484810 - DNA, 19 bp, Mus musculus
  siRNA target sequence for Khdrbs2 (NM_133235.2,307-325).
gattcctgtgaaacagtat

SEQ ID NO: 484811 - DNA, 19 bp, Mus musculus
  siRNA target sequence for Khdrbs2 (NM_133235.2,392-410).
gaaacgggtgctaaaatgt

SEQ ID NO: 484812 - DNA, 19 bp, Mus musculus
  siRNA target sequence for Khdrbs2 (NM_133235.2,396-414).
cgggtgctaaaatgtctat

SEQ ID NO: 484813 - DNA, 19 bp, Mus musculus
  siRNA target sequence for Khdrbs2 (NM_133235.2,425-443).
gggtccatgcgagataaga

SEQ ID NO: 484814 - DNA, 19 bp, Mus musculus
  siRNA target sequence for Khdrbs2 (NM_133235.2,427-445).
gtccatgcgagataagaca

SEQ ID NO: 484815 - DNA, 19 bp, Mus musculus
  siRNA target sequence for Khdrbs2 (NM_133235.2,429-447).
ccatgcgagataagacaaa

SEQ ID NO: 484816 - DNA, 19 bp, Mus musculus
  siRNA target sequence for Khdrbs2 (NM_133235.2,466-484).
gagtggggaggccaagtat

SEQ ID NO: 484817 - DNA, 19 bp, Mus musculus
  siRNA target sequence for Khdrbs2 (NM_133235.2,497-515).
gatgagctgcatgtattaa

SEQ ID NO: 484818 - DNA, 19 bp, Mus musculus
  siRNA target sequence for Khdrbs2 (NM_133235.2,589-607).
ggttcctgactacaatgat

SEQ ID NO: 484819 - DNA, 19 bp, Mus musculus
  siRNA target sequence for Khdrbs2 (NM_133235.2,598-616).
ctacaatgatgaaattcgt

SEQ ID NO: 484820 - DNA, 19 bp, Mus musculus
  siRNA target sequence for Khdrbs2 (NM_133235.2,623-641).
caactccgggagttgtctt

SEQ ID NO: 484821 - DNA, 19 bp, Mus musculus
  siRNA target sequence for Khdrbs2 (NM_133235.2,629-647).
cgggagttgtcttacttga

SEQ ID NO: 484822 - DNA, 19 bp, Mus musculus
  siRNA target sequence for Khdrbs2 (NM_133235.2,630-648).
gggagttgtcttacttgaa

SEQ ID NO: 484823 - DNA, 19 bp, Mus musculus
  siRNA target sequence for Khdrbs2 (NM_133235.2,631-649).
ggagttgtcttacttgaat

SEQ ID NO: 484824 - DNA, 19 bp, Mus musculus
  siRNA target sequence for Khdrbs2 (NM_133235.2,812-830).
ccagtgcccccaatagcaa

SEQ ID NO: 484825 - DNA, 19 bp, Mus musculus
  siRNA target sequence for Khdrbs2 (NM_133235.2,961-979).
gacctatgaggcttatgat

SEQ ID NO: 484826 - DNA, 19 bp, Mus musculus
  siRNA target sequence for Khdrbs2 (NM_133235.2,963-981).
cctatgaggcttatgataa

SEQ ID NO: 484827 - DNA, 19 bp, Mus musculus
  siRNA target sequence for Khdrbs2 (NM_133235.2,999-1017).
cacaaagtgtgcctgaata

SEQ ID NO: 484828 - DNA, 19 bp, Mus musculus
  siRNA target sequence for Khdrbs2 (NM_133235.2,1005-1023).
gtgtgcctgaatactatga

SEQ ID NO: 484829 - DNA, 19 bp, Mus musculus
  siRNA target sequence for Khdrbs2 (NM_133235.2,1007-1025).
gtgcctgaatactatgact

SEQ ID NO: 484830 - DNA, 19 bp, Mus musculus
  siRNA target sequence for Khdrbs2 (NM_133235.2,1141-1159).
gcacccctatggtagatat

SEQ ID NO: 484831 - DNA, 19 bp, Mus musculus
  siRNA target sequence for Khdrbs2 (NM_133235.2,1142-1160).
cacccctatggtagatatt

SEQ ID NO: 484832 - DNA, 19 bp, Mus musculus
  siRNA target sequence for Khdrbs3 (NM_010158.1,408-426).
gcttggtgaaccgagaaat

SEQ ID NO: 484833 - DNA, 19 bp, Mus musculus
  siRNA target sequence for Khdrbs3 (NM_010158.1,409-427).
cttggtgaaccgagaaata

SEQ ID NO: 484834 - DNA, 19 bp, Mus musculus
  siRNA target sequence for Khdrbs3 (NM_010158.1,412-430).
ggtgaaccgagaaatagaa

SEQ ID NO: 484835 - DNA, 19 bp, Mus musculus
  siRNA target sequence for Khdrbs3 (NM_010158.1,582-600).
ccctgaagcgcttacaaga

SEQ ID NO: 484836 - DNA, 19 bp, Mus musculus
  siRNA target sequence for Khdrbs3 (NM_010158.1,583-601).
cctgaagcgcttacaagaa

SEQ ID NO: 484837 - DNA, 19 bp, Mus musculus
  siRNA target sequence for Khdrbs3 (NM_010158.1,591-609).
gcttacaagaagaaacgtt

SEQ ID NO: 484838 - DNA, 19 bp, Mus musculus
  siRNA target sequence for Khdrbs3 (NM_010158.1,596-614).
caagaagaaacgttgacaa

SEQ ID NO: 484839 - DNA, 19 bp, Mus musculus
  siRNA target sequence for Khdrbs3 (NM_010158.1,678-696).
gtggagaagcgaagtactt

SEQ ID NO: 484840 - DNA, 19 bp, Mus musculus
  siRNA target sequence for Khdrbs3 (NM_010158.1,712-730).
cctgcacgtgctcattgaa

SEQ ID NO: 484841 - DNA, 19 bp, Mus musculus
  siRNA target sequence for Khdrbs3 (NM_010158.1,839-857).
caggagttaacatatttga

SEQ ID NO: 484842 - DNA, 19 bp, Mus musculus
  siRNA target sequence for Khdrbs3 (NM_010158.1,841-859).
ggagttaacatatttgaat

SEQ ID NO: 484843 - DNA, 19 bp, Mus musculus
  siRNA target sequence for Khdrbs3 (NM_010158.1,887-905).
gtggttcgagggaaatcta

SEQ ID NO: 484844 - DNA, 19 bp, Mus musculus
  siRNA target sequence for Khdrbs3 (NM_010158.1,889-907).
ggttcgagggaaatctact

SEQ ID NO: 484845 - DNA, 19 bp, Mus musculus
  siRNA target sequence for Khdrbs3 (NM_010158.1,890-908).
gttcgagggaaatctactt

SEQ ID NO: 484846 - DNA, 19 bp, Mus musculus
  siRNA target sequence for Khdrbs3 (NM_010158.1,910-928).
gcgtacgagaggtgtaact

SEQ ID NO: 484847 - DNA, 19 bp, Mus musculus
  siRNA target sequence for Khdrbs3 (NM_010158.1,911-929).
cgtacgagaggtgtaacta

SEQ ID NO: 484848 - DNA, 19 bp, Mus musculus
  siRNA target sequence for Khdrbs3 (NM_010158.1,1081-1099).
ccccccaaccggatacaga

SEQ ID NO: 484849 - DNA, 19 bp, Mus musculus
  siRNA target sequence for Khdrbs3 (NM_010158.1,1156-1174).
gtacggtactgcctatgat

SEQ ID NO: 484850 - DNA, 19 bp, Mus musculus
  siRNA target sequence for Khdrbs3 (NM_010158.1,1226-1244).
gcagctgattactacgatt

SEQ ID NO: 484851 - DNA, 19 bp, Mus musculus
  siRNA target sequence for Khdrbs3 (NM_010158.1,1227-1245).
cagctgattactacgatta

SEQ ID NO: 484852 - DNA, 19 bp, Mus musculus
  siRNA target sequence for Khdrbs3 (NM_010158.1,1286-1304).
caagaggaatggactaact

SEQ ID NO: 484853 - DNA, 19 bp, Mus musculus
  siRNA target sequence for Khdrbs3 (NM_010158.1,1289-1307).
gaggaatggactaactcaa

SEQ ID NO: 484854 - DNA, 19 bp, Mus musculus
  siRNA target sequence for Khdrbs3 (NM_010158.1,1355-1373).
cagccatatggcagatact

SEQ ID NO: 484855 - DNA, 19 bp, Mus musculus
  siRNA target sequence for Lbr (NM_133815.1,118-136).
cctgggagctccctttatt

SEQ ID NO: 484856 - DNA, 19 bp, Mus musculus
  siRNA target sequence for Lbr (NM_133815.1,119-137).
ctgggagctccctttatta

SEQ ID NO: 484857 - DNA, 19 bp, Mus musculus
  siRNA target sequence for Lbr (NM_133815.1,128-146).
ccctttattatgaagtaga

SEQ ID NO: 484858 - DNA, 19 bp, Mus musculus
  siRNA target sequence for Lbr (NM_133815.1,151-169).
ctgagccacgacaacaaat

SEQ ID NO: 484859 - DNA, 19 bp, Mus musculus
  siRNA target sequence for Lbr (NM_133815.1,211-229).
gaactgaaggagagtgata

SEQ ID NO: 484860 - DNA, 19 bp, Mus musculus
  siRNA target sequence for Lbr (NM_133815.1,226-244).
gatatcaagcctttaaaat

SEQ ID NO: 484861 - DNA, 19 bp, Mus musculus
  siRNA target sequence for Lbr (NM_133815.1,309-327).
ccgcagccgctcaagatca

SEQ ID NO: 484862 - DNA, 19 bp, Mus musculus
  siRNA target sequence for Lbr (NM_133815.1,352-370).
ccgaaaggctccagaagat

SEQ ID NO: 484863 - DNA, 19 bp, Mus musculus
  siRNA target sequence for Lbr (NM_133815.1,428-446).
gggaaattctgcaagttaa

SEQ ID NO: 484864 - DNA, 19 bp, Mus musculus
  siRNA target sequence for Lbr (NM_133815.1,522-540).
gaacgctacgccgtataaa

SEQ ID NO: 484865 - DNA, 19 bp, Mus musculus
  siRNA target sequence for Lbr (NM_133815.1,526-544).
gctacgccgtataaagaca

SEQ ID NO: 484866 - DNA, 19 bp, Mus musculus
  siRNA target sequence for Lbr (NM_133815.1,527-545).
ctacgccgtataaagacaa

SEQ ID NO: 484867 - DNA, 19 bp, Mus musculus
  siRNA target sequence for Lbr (NM_133815.1,642-660).
gtctgaggaacaaaacctt

SEQ ID NO: 484868 - DNA, 19 bp, Mus musculus
  siRNA target sequence for Lbr (NM_133815.1,740-758).
ctggtgcggtcctcatcat

SEQ ID NO: 484869 - DNA, 19 bp, Mus musculus
  siRNA target sequence for Lbr (NM_133815.1,872-890).
gggtgtgcggcgtttacct

SEQ ID NO: 484870 - DNA, 19 bp, Mus musculus
  siRNA target sequence for Lbr (NM_133815.1,1192-1210).
gctgtctacgacttcttca

SEQ ID NO: 484871 - DNA, 19 bp, Mus musculus
  siRNA target sequence for Lbr (NM_133815.1,1230-1248).
gcgacttggtgctttcgat

SEQ ID NO: 484872 - DNA, 19 bp, Mus musculus
  siRNA target sequence for Lbr (NM_133815.1,1238-1256).
gtgctttcgatctcaagtt

SEQ ID NO: 484873 - DNA, 19 bp, Mus musculus
  siRNA target sequence for Lbr (NM_133815.1,1245-1263).
cgatctcaagttcttttgt

SEQ ID NO: 484874 - DNA, 19 bp, Mus musculus
  siRNA target sequence for Lbr (NM_133815.1,1266-1284).
gttgcgccctggattgatt

SEQ ID NO: 484875 - DNA, 19 bp, Mus musculus
  siRNA target sequence for Lbr (NM_133815.1,1270-1288).
cgccctggattgattggat

SEQ ID NO: 484876 - DNA, 19 bp, Mus musculus
  siRNA target sequence for Lbr (NM_133815.1,1286-1304).
gatgggtggttattaactt

SEQ ID NO: 484877 - DNA, 19 bp, Mus musculus
  siRNA target sequence for Lbr (NM_133815.1,1346-1364).
ctccgtccttggcaatgat

SEQ ID NO: 484878 - DNA, 19 bp, Mus musculus
  siRNA target sequence for Lbr (NM_133815.1,1348-1366).
ccgtccttggcaatgatct

SEQ ID NO: 484879 - DNA, 19 bp, Mus musculus
  siRNA target sequence for Lbr (NM_133815.1,1357-1375).
gcaatgatcttggttaaca

SEQ ID NO: 484880 - DNA, 19 bp, Mus musculus
  siRNA target sequence for Lbr (NM_133815.1,1376-1394).
gtttccagctcttatatgt

SEQ ID NO: 484881 - DNA, 19 bp, Mus musculus
  siRNA target sequence for Lbr (NM_133815.1,1508-1526).
gcctccaggccttttacct

SEQ ID NO: 484882 - DNA, 19 bp, Mus musculus
  siRNA target sequence for Lbr (NM_133815.1,1602-1620).
cttccgttgtgcaaactct

SEQ ID NO: 484883 - DNA, 19 bp, Mus musculus
  siRNA target sequence for Lbr (NM_133815.1,1666-1684).
catttgaagaccattcata

SEQ ID NO: 484884 - DNA, 19 bp, Mus musculus
  siRNA target sequence for Lbr (NM_133815.1,1685-1703).
cttccacggggaaaagtct

SEQ ID NO: 484885 - DNA, 19 bp, Mus musculus
  siRNA target sequence for Lbr (NM_133815.1,1713-1731).
cggatggtggggctttgtt

SEQ ID NO: 484886 - DNA, 19 bp, Mus musculus
  siRNA target sequence for Lbr (NM_133815.1,1729-1747).
gttcgccatcccaattact

SEQ ID NO: 484887 - DNA, 19 bp, Mus musculus
  siRNA target sequence for Lbr (NM_133815.1,1778-1796).
ccctcccatgtggtttcaa

SEQ ID NO: 484888 - DNA, 19 bp, Mus musculus
  siRNA target sequence for Lbr (NM_133815.1,1804-1822).
ctgccatacttctacatta

SEQ ID NO: 484889 - DNA, 19 bp, Mus musculus
  siRNA target sequence for Lbr (NM_133815.1,1807-1825).
ccatacttctacattatct

SEQ ID NO: 484890 - DNA, 19 bp, Mus musculus
  siRNA target sequence for Lbr (NM_133815.1,1830-1848).
caccgccttgcttatccat

SEQ ID NO: 484891 - DNA, 19 bp, Mus musculus
  siRNA target sequence for Lbr (NM_133815.1,1916-1934).
gagtgccctaccgcatatt

SEQ ID NO: 484892 - DNA, 19 bp, Mus musculus
  siRNA target sequence for Lbr (NM_133815.1,1927-1945).
cgcatattcccctacattt

SEQ ID NO: 484893 - DNA, 19 bp, Mus musculus
  siRNA target sequence for LOC170938 (NM_133358.1,173-191).
ccttcacaggaaaatcttt

SEQ ID NO: 484894 - DNA, 19 bp, Mus musculus
  siRNA target sequence for LOC170938 (NM_133358.1,174-192).
cttcacaggaaaatcttta

SEQ ID NO: 484895 - DNA, 19 bp, Mus musculus
  siRNA target sequence for LOC170938 (NM_133358.1,198-216).
cggtgatgagagaaaccat

SEQ ID NO: 484896 - DNA, 19 bp, Mus musculus
  siRNA target sequence for LOC170938 (NM_133358.1,220-238).
gaacctgcatgatatagga

SEQ ID NO: 484897 - DNA, 19 bp, Mus musculus
  siRNA target sequence for LOC170938 (NM_133358.1,226-244).
gcatgatataggacagaaa

SEQ ID NO: 484898 - DNA, 19 bp, Mus musculus
  siRNA target sequence for LOC170938 (NM_133358.1,227-245).
catgatataggacagaaat

SEQ ID NO: 484899 - DNA, 19 bp, Mus musculus
  siRNA target sequence for LOC170938 (NM_133358.1,282-300).
ctgggggaaatctaagata

SEQ ID NO: 484900 - DNA, 19 bp, Mus musculus
  siRNA target sequence for LOC170938 (NM_133358.1,325-343).
gtatgaagaagatagtcaa

SEQ ID NO: 484901 - DNA, 19 bp, Mus musculus
  siRNA target sequence for LOC170938 (NM_133358.1,436-454).
cactggtcattcatctcta

SEQ ID NO: 484902 - DNA, 19 bp, Mus musculus
  siRNA target sequence for LOC170938 (NM_133358.1,438-456).
ctggtcattcatctctaaa

SEQ ID NO: 484903 - DNA, 19 bp, Mus musculus
  siRNA target sequence for LOC170938 (NM_133358.1,464-482).
ctcagaggtcagactagat

SEQ ID NO: 484904 - DNA, 19 bp, Mus musculus
  siRNA target sequence for LOC170938 (NM_133358.1,475-493).
gactagatgcaaaacacat

SEQ ID NO: 484905 - DNA, 19 bp, Mus musculus
  siRNA target sequence for LOC170938 (NM_133358.1,659-677).
cataaaaggatccataata

SEQ ID NO: 484906 - DNA, 19 bp, Mus musculus
  siRNA target sequence for LOC170938 (NM_133358.1,684-702).
gaaaccatgcgtgtaaaca

SEQ ID NO: 484907 - DNA, 19 bp, Mus musculus
  siRNA target sequence for LOC170938 (NM_133358.1,1553-1571).
gcctttactcattctaatt

SEQ ID NO: 484908 - DNA, 19 bp, Mus musculus
  siRNA target sequence for LOC233987 (NM_145591.2,704-722).
ctattatttacgaatacat

SEQ ID NO: 484909 - DNA, 19 bp, Mus musculus
  siRNA target sequence for LOC233987 (NM_145591.2,874-892).
gtaatcttaaacgacataa

SEQ ID NO: 484910 - DNA, 19 bp, Mus musculus
  siRNA target sequence for LOC233987 (NM_145591.2,956-974).
ccatactctccgaatacat

SEQ ID NO: 484911 - DNA, 19 bp, Mus musculus
  siRNA target sequence for LOC233987 (NM_145591.2,1120-1138).
gtcccagtagtttccaaaa

SEQ ID NO: 484912 - DNA, 19 bp, Mus musculus
  siRNA target sequence for LOC235907 (NM_145622.1,219-237).
gaggaggagctccatttat

SEQ ID NO: 484913 - DNA, 19 bp, Mus musculus
  siRNA target sequence for LOC235907 (NM_145622.1,222-240).
gaggagctccatttatgct

SEQ ID NO: 484914 - DNA, 19 bp, Mus musculus
  siRNA target sequence for LOC235907 (NM_145622.1,313-331).
ccagatgcttgatttacga

SEQ ID NO: 484915 - DNA, 19 bp, Mus musculus
  siRNA target sequence for LOC235907 (NM_145622.1,314-332).
cagatgcttgatttacgaa

SEQ ID NO: 484916 - DNA, 19 bp, Mus musculus
  siRNA target sequence for LOC235907 (NM_145622.1,1127-1145).
catttttcctcacaactta

SEQ ID NO: 484917 - DNA, 19 bp, Mus musculus
  siRNA target sequence for LOC268670 (NM_172392.2,310-328).
catgcaaagaagtttctga

SEQ ID NO: 484918 - DNA, 19 bp, Mus musculus
  siRNA target sequence for LOC268670 (NM_172392.2,325-343).
ctgagagggaaaaagtact

SEQ ID NO: 484919 - DNA, 19 bp, Mus musculus
  siRNA target sequence for LOC268670 (NM_172392.2,369-387).
ggtttgaagccatatagtt

SEQ ID NO: 484920 - DNA, 19 bp, Mus musculus
  siRNA target sequence for LOC268670 (NM_172392.2,395-413).
ggttggcaagtccttttgt

SEQ ID NO: 484921 - DNA, 19 bp, Mus musculus
  siRNA target sequence for LOC268670 (NM_172392.2,1339-1357).
ctccatcatcacttattct

SEQ ID NO: 484922 - DNA, 19 bp, Mus musculus
  siRNA target sequence for LOC268670 (NM_172392.2,1342-1360).
catcatcacttattctaca

SEQ ID NO: 484923 - DNA, 19 bp, Mus musculus
  siRNA target sequence for LOC268670 (NM_172392.2,1345-1363).
catcacttattctacacaa

SEQ ID NO: 484924 - DNA, 19 bp, Mus musculus
  siRNA target sequence for LOC268670 (NM_172392.2,1681-1699).
cttcactttggcaacacaa

SEQ ID NO: 484925 - DNA, 19 bp, Mus musculus
  siRNA target sequence for LOC268670 (NM_172392.2,2171-2189).
cttccgcactacatcatca

SEQ ID NO: 484926 - DNA, 19 bp, Mus musculus
  siRNA target sequence for LOC268670 (NM_172392.2,2177-2195).
cactacatcatcacttcat

SEQ ID NO: 484927 - DNA, 19 bp, Mus musculus
  siRNA target sequence for LOC268670 (NM_172392.2,2179-2197).
ctacatcatcacttcatat

SEQ ID NO: 484928 - DNA, 19 bp, Mus musculus
  siRNA target sequence for Mbnl2 (NM_175341.2,664-682).
cccgtgagagacacaaagt

SEQ ID NO: 484929 - DNA, 19 bp, Mus musculus
  siRNA target sequence for Mbnl2 (NM_175341.2,731-749).
gctccgacgaagaatgcaa

SEQ ID NO: 484930 - DNA, 19 bp, Mus musculus
  siRNA target sequence for Mbnl2 (NM_175341.2,735-753).
cgacgaagaatgcaagttt

SEQ ID NO: 484931 - DNA, 19 bp, Mus musculus
  siRNA target sequence for Mbnl2 (NM_175341.2,885-903).
gattaatgggaggaacaat

SEQ ID NO: 484932 - DNA, 19 bp, Mus musculus
  siRNA target sequence for Mbnl2 (NM_175341.2,900-918).
caatttgatccagcaaaaa

SEQ ID NO: 484933 - DNA, 19 bp, Mus musculus
  siRNA target sequence for Mbnl2 (NM_175341.2,937-955).
gcccagcagatgcaattta

SEQ ID NO: 484934 - DNA, 19 bp, Mus musculus
  siRNA target sequence for Mbnl2 (NM_175341.2,938-956).
cccagcagatgcaatttat

SEQ ID NO: 484935 - DNA, 19 bp, Mus musculus
  siRNA target sequence for Mbnl2 (NM_175341.2,942-960).
gcagatgcaatttatgttt

SEQ ID NO: 484936 - DNA, 19 bp, Mus musculus
  siRNA target sequence for Mbnl2 (NM_175341.2,975-993).
ccatcctgtgcccactttt

SEQ ID NO: 484937 - DNA, 19 bp, Mus musculus
  siRNA target sequence for Mbnl2 (NM_175341.2,1012-1030).
gggacaaatgcggctatta

SEQ ID NO: 484938 - DNA, 19 bp, Mus musculus
  siRNA target sequence for Mbnl2 (NM_175341.2,1016-1034).
caaatgcggctattagctt

SEQ ID NO: 484939 - DNA, 19 bp, Mus musculus
  siRNA target sequence for Mbnl2 (NM_175341.2,1094-1112).
ccactacaccggtcattgt

SEQ ID NO: 484940 - DNA, 19 bp, Mus musculus
  siRNA target sequence for Mbnl2 (NM_175341.2,1095-1113).
cactacaccggtcattgtt

SEQ ID NO: 484941 - DNA, 19 bp, Mus musculus
  siRNA target sequence for Mbnl2 (NM_175341.2,1148-1166).
ctgcaactcagaaacttct

SEQ ID NO: 484942 - DNA, 19 bp, Mus musculus
  siRNA target sequence for Mbnl2 (NM_175341.2,1197-1215).
gttccagcgaggaaactgt

SEQ ID NO: 484943 - DNA, 19 bp, Mus musculus
  siRNA target sequence for Mbnl2 (NM_175341.2,1287-1305).
cgtaaccgtttgtatggat

SEQ ID NO: 484944 - DNA, 19 bp, Mus musculus
  siRNA target sequence for Mbnl2 (NM_175341.2,1293-1311).
cgtttgtatggattacata

SEQ ID NO: 484945 - DNA, 19 bp, Mus musculus
  siRNA target sequence for Mbnl2 (NM_175341.2,1294-1312).
gtttgtatggattacataa

SEQ ID NO: 484946 - DNA, 19 bp, Mus musculus
  siRNA target sequence for Mbnl2 (NM_175341.2,1318-1336).
cgttgcatgagggagaaat

SEQ ID NO: 484947 - DNA, 19 bp, Mus musculus
  siRNA target sequence for Mbnl2 (NM_175341.2,1740-1758).
cacagccaatcagataatt

SEQ ID NO: 484948 - DNA, 19 bp, Mus musculus
  siRNA target sequence for Mbnl3 (NM_134163.3,387-405).
ctctaatccgtgataccaa

SEQ ID NO: 484949 - DNA, 19 bp, Mus musculus
  siRNA target sequence for Mbnl3 (NM_134163.3,403-421).
caagtggctgactttagaa

SEQ ID NO: 484950 - DNA, 19 bp, Mus musculus
  siRNA target sequence for Mbnl3 (NM_134163.3,422-440).
gtctgtagagaatttcaga

SEQ ID NO: 484951 - DNA, 19 bp, Mus musculus
  siRNA target sequence for Mbnl3 (NM_134163.3,479-497).
gcccatccgccaagagttt

SEQ ID NO: 484952 - DNA, 19 bp, Mus musculus
  siRNA target sequence for Mbnl3 (NM_134163.3,514-532).
ccgagtggtggcctgtttt

SEQ ID NO: 484953 - DNA, 19 bp, Mus musculus
  siRNA target sequence for Mbnl3 (NM_134163.3,523-541).
ggcctgttttgattcacta

SEQ ID NO: 484954 - DNA, 19 bp, Mus musculus
  siRNA target sequence for Mbnl3 (NM_134163.3,578-596).
caccctccaccgcacttaa

SEQ ID NO: 484955 - DNA, 19 bp, Mus musculus
  siRNA target sequence for Mbnl3 (NM_134163.3,581-599).
cctccaccgcacttaaagt

SEQ ID NO: 484956 - DNA, 19 bp, Mus musculus
  siRNA target sequence for Mbnl3 (NM_134163.3,598-616).
gtcgcagctagaagttaat

SEQ ID NO: 484957 - DNA, 19 bp, Mus musculus
  siRNA target sequence for Mbnl3 (NM_134163.3,608-626).
gaagttaatgggagaaaca

SEQ ID NO: 484958 - DNA, 19 bp, Mus musculus
  siRNA target sequence for Mbnl3 (NM_134163.3,618-636).
ggagaaacaatctgattca

SEQ ID NO: 484959 - DNA, 19 bp, Mus musculus
  siRNA target sequence for Mbnl3 (NM_134163.3,619-637).
gagaaacaatctgattcaa

SEQ ID NO: 484960 - DNA, 19 bp, Mus musculus
  siRNA target sequence for Mbnl3 (NM_134163.3,621-639).
gaaacaatctgattcaaca

SEQ ID NO: 484961 - DNA, 19 bp, Mus musculus
  siRNA target sequence for Mbnl3 (NM_134163.3,755-773).
gctttcaatccttacatga

SEQ ID NO: 484962 - DNA, 19 bp, Mus musculus
  siRNA target sequence for Mbnl3 (NM_134163.3,813-831).
caaatggtccggttctgat

SEQ ID NO: 484963 - DNA, 19 bp, Mus musculus
  siRNA target sequence for Mbnl3 (NM_134163.3,869-887).
ggtccaaagccaattcgta

SEQ ID NO: 484964 - DNA, 19 bp, Mus musculus
  siRNA target sequence for Mbnl3 (NM_134163.3,877-895).
gccaattcgtacagataga

SEQ ID NO: 484965 - DNA, 19 bp, Mus musculus
  siRNA target sequence for Mbnl3 (NM_134163.3,879-897).
caattcgtacagatagact

SEQ ID NO: 484966 - DNA, 19 bp, Mus musculus
  siRNA target sequence for Mbnl3 (NM_134163.3,911-929).
gaatttcagcgtggaaatt

SEQ ID NO: 484967 - DNA, 19 bp, Mus musculus
  siRNA target sequence for Mbnl3 (NM_134163.3,959-977).
gctcaccctacggatgttt

SEQ ID NO: 484968 - DNA, 19 bp, Mus musculus
  siRNA target sequence for Mbnl3 (NM_134163.3,982-1000).
gattgaagtcactgataat

SEQ ID NO: 484969 - DNA, 19 bp, Mus musculus
  siRNA target sequence for Mbnl3 (NM_134163.3,995-1013).
gataattctgtgacaatct

SEQ ID NO: 484970 - DNA, 19 bp, Mus musculus
  siRNA target sequence for Mbnl3 (NM_134163.3,1004-1022).
gtgacaatctgcatggatt

SEQ ID NO: 484971 - DNA, 19 bp, Mus musculus
  siRNA target sequence for Mbnl3 (NM_134163.3,1038-1056).
gctcccgggagaaatgcaa

SEQ ID NO: 484972 - DNA, 19 bp, Mus musculus
  siRNA target sequence for Mbnl3 (NM_134163.3,1118-1136).
cattctgctgccaatgcaa

SEQ ID NO: 484973 - DNA, 19 bp, Mus musculus
  siRNA target sequence for Mbnl3 (NM_134163.3,1144-1162).
gccgcatggtgcacttcaa

SEQ ID NO: 484974 - DNA, 19 bp, Mus musculus
  siRNA target sequence for Mbnl3 (NM_134163.3,1146-1164).
cgcatggtgcacttcaact

SEQ ID NO: 484975 - DNA, 19 bp, Mus musculus
  siRNA target sequence for Mbnl3 (NM_134163.3,1154-1172).
gcacttcaactgataccaa

SEQ ID NO: 484976 - DNA, 19 bp, Mus musculus
  siRNA target sequence for Mbnl3 (NM_134163.3,1155-1173).
cacttcaactgataccaaa

SEQ ID NO: 484977 - DNA, 19 bp, Mus musculus
  siRNA target sequence for Mbnl3 (NM_134163.3,1355-1373).
ccctacgttccaacaacta

SEQ ID NO: 484978 - DNA, 19 bp, Mus musculus
  siRNA target sequence for Mbnl3 (NM_134163.3,1371-1389).
ctacaggcaaccagttgaa

SEQ ID NO: 484979 - DNA, 19 bp, Mus musculus
  siRNA target sequence for Mbnl3 (NM_134163.3,1374-1392).
caggcaaccagttgaaata

SEQ ID NO: 484980 - DNA, 19 bp, Mus musculus
  siRNA target sequence for MGC19022 (NM_172789.1,41-59).
gcgtaaaggaaaaaatgga

SEQ ID NO: 484981 - DNA, 19 bp, Mus musculus
  siRNA target sequence for MGC19022 (NM_172789.1,491-509).
gtggctcaacatcttctat

SEQ ID NO: 484982 - DNA, 19 bp, Mus musculus
  siRNA target sequence for MGC19022 (NM_172789.1,555-573).
ctctaagctcagcgatata

SEQ ID NO: 484983 - DNA, 19 bp, Mus musculus
  siRNA target sequence for MGC19022 (NM_172789.1,557-575).
ctaagctcagcgatatatt

SEQ ID NO: 484984 - DNA, 19 bp, Mus musculus
  siRNA target sequence for MGC19022 (NM_172789.1,562-580).
ctcagcgatatattacaga

SEQ ID NO: 484985 - DNA, 19 bp, Mus musculus
  siRNA target sequence for MGC19022 (NM_172789.1,566-584).
gcgatatattacagaaagt

SEQ ID NO: 484986 - DNA, 19 bp, Mus musculus
  siRNA target sequence for MGC19022 (NM_172789.1,645-663).
gtcttctcttgagatactt

SEQ ID NO: 484987 - DNA, 19 bp, Mus musculus
  siRNA target sequence for MGC19022 (NM_172789.1,652-670).
cttgagatactttacacta

SEQ ID NO: 484988 - DNA, 19 bp, Mus musculus
  siRNA target sequence for MGC19022 (NM_172789.1,719-737).
cacctactaggacttttga

SEQ ID NO: 484989 - DNA, 19 bp, Mus musculus
  siRNA target sequence for MGC19022 (NM_172789.1,721-739).
cctactaggacttttgagt

SEQ ID NO: 484990 - DNA, 19 bp, Mus musculus
  siRNA target sequence for MGC19022 (NM_172789.1,974-992).
ggccatgcctgcttatcta

SEQ ID NO: 484991 - DNA, 19 bp, Mus musculus
  siRNA target sequence for MGC19022 (NM_172789.1,1044-1062).
gcatcttggattcagatta

SEQ ID NO: 484992 - DNA, 19 bp, Mus musculus
  siRNA target sequence for MGC19022 (NM_172789.1,1048-1066).
cttggattcagattacaaa

SEQ ID NO: 484993 - DNA, 19 bp, Mus musculus
  siRNA target sequence for MGC19022 (NM_172789.1,1181-1199).
gtcctagtcctagaaattt

SEQ ID NO: 484994 - DNA, 19 bp, Mus musculus
  siRNA target sequence for MGC19022 (NM_172789.1,1291-1309).
gccaaagactatgaattct

SEQ ID NO: 484995 - DNA, 19 bp, Mus musculus
  siRNA target sequence for MGC19022 (NM_172789.1,1389-1407).
ctctgccttaacatatcca

SEQ ID NO: 484996 - DNA, 19 bp, Mus musculus
  siRNA target sequence for MGC19022 (NM_172789.1,1419-1437).
caaggaacctaaaacacta

SEQ ID NO: 484997 - DNA, 19 bp, Mus musculus
  siRNA target sequence for MGC19022 (NM_172789.1,1474-1492).
gacagtcatcatagaacaa

SEQ ID NO: 484998 - DNA, 19 bp, Mus musculus
  siRNA target sequence for MGC19022 (NM_172789.1,1497-1515).
gggtctgtcaagcagaatt

SEQ ID NO: 484999 - DNA, 19 bp, Mus musculus
  siRNA target sequence for MGC19022 (NM_172789.1,1499-1517).
gtctgtcaagcagaattga

SEQ ID NO: 485000 - DNA, 19 bp, Mus musculus
  siRNA target sequence for MGC38585 (NM_153538.1,263-281).
ggattgaagaattctcatt

SEQ ID NO: 485001 - DNA, 19 bp, Mus musculus
  siRNA target sequence for MGC38585 (NM_153538.1,418-436).
gtgccattgacatttaata

SEQ ID NO: 485002 - DNA, 19 bp, Mus musculus
  siRNA target sequence for MGC38585 (NM_153538.1,420-438).
gccattgacatttaatata

SEQ ID NO: 485003 - DNA, 19 bp, Mus musculus
  siRNA target sequence for MGC38585 (NM_153538.1,464-482).
ggcaactctgggtggaatt

SEQ ID NO: 485004 - DNA, 19 bp, Mus musculus
  siRNA target sequence for MGC38585 (NM_153538.1,477-495).
ggaattgctgcggttctat

SEQ ID NO: 485005 - DNA, 19 bp, Mus musculus
  siRNA target sequence for MGC38585 (NM_153538.1,483-501).
gctgcggttctatgcttta

SEQ ID NO: 485006 - DNA, 19 bp, Mus musculus
  siRNA target sequence for MGC38585 (NM_153538.1,487-505).
cggttctatgctttagagt

SEQ ID NO: 485007 - DNA, 19 bp, Mus musculus
  siRNA target sequence for MGC38585 (NM_153538.1,488-506).
ggttctatgctttagagtt

SEQ ID NO: 485008 - DNA, 19 bp, Mus musculus
  siRNA target sequence for MGC38585 (NM_153538.1,492-510).
ctatgctttagagtttaat

SEQ ID NO: 485009 - DNA, 19 bp, Mus musculus
  siRNA target sequence for MGC38585 (NM_153538.1,514-532).
gctgatttagtgatcagta

SEQ ID NO: 485010 - DNA, 19 bp, Mus musculus
  siRNA target sequence for MGC38585 (NM_153538.1,515-533).
ctgatttagtgatcagtat

SEQ ID NO: 485011 - DNA, 19 bp, Mus musculus
  siRNA target sequence for MGC38585 (NM_153538.1,528-546).
cagtattcgtgtcaaagaa

SEQ ID NO: 485012 - DNA, 19 bp, Mus musculus
  siRNA target sequence for MGC38585 (NM_153538.1,535-553).
cgtgtcaaagaattaatat

SEQ ID NO: 485013 - DNA, 19 bp, Mus musculus
  siRNA target sequence for MGC38585 (NM_153538.1,595-613).
gaagacccctattctgtta

SEQ ID NO: 485014 - DNA, 19 bp, Mus musculus
  siRNA target sequence for MGC38585 (NM_153538.1,600-618).
cccctattctgttaaaaga

SEQ ID NO: 485015 - DNA, 19 bp, Mus musculus
  siRNA target sequence for MGC38585 (NM_153538.1,622-640).
gtggcaaggaccctgaata

SEQ ID NO: 485016 - DNA, 19 bp, Mus musculus
  siRNA target sequence for MGC38585 (NM_153538.1,645-663).
gcctgtgtttgagtatata

SEQ ID NO: 485017 - DNA, 19 bp, Mus musculus
  siRNA target sequence for MGC38585 (NM_153538.1,647-665).
ctgtgtttgagtatatact

SEQ ID NO: 485018 - DNA, 19 bp, Mus musculus
  siRNA target sequence for MGC38585 (NM_153538.1,671-689).
gtttgaggacaacatataa

SEQ ID NO: 485019 - DNA, 19 bp, Mus musculus
  siRNA target sequence for MGC38585 (NM_153538.1,696-714).
cgctcttccacacaaagtt

SEQ ID NO: 485020 - DNA, 19 bp, Mus musculus
  siRNA target sequence for MGC38585 (NM_153538.1,794-812).
cagaaccccaagcaacaaa

SEQ ID NO: 485021 - DNA, 19 bp, Mus musculus
  siRNA target sequence for MGC38585 (NM_153538.1,876-894).
cagagcacagctagttact

SEQ ID NO: 485022 - DNA, 19 bp, Mus musculus
  siRNA target sequence for MGC38585 (NM_153538.1,878-896).
gagcacagctagttactct

SEQ ID NO: 485023 - DNA, 19 bp, Mus musculus
  siRNA target sequence for MGC38585 (NM_153538.1,880-898).
gcacagctagttactctta

SEQ ID NO: 485024 - DNA, 19 bp, Mus musculus
  siRNA target sequence for MGC38585 (NM_153538.1,881-899).
cacagctagttactcttaa

SEQ ID NO: 485025 - DNA, 19 bp, Mus musculus
  siRNA target sequence for MGC38585 (NM_153538.1,883-901).
cagctagttactcttaaga

SEQ ID NO: 485026 - DNA, 19 bp, Mus musculus
  siRNA target sequence for MGC38585 (NM_153538.1,889-907).
gttactcttaagaatacca

SEQ ID NO: 485027 - DNA, 19 bp, Mus musculus
  siRNA target sequence for MGC38585 (NM_153538.1,1091-1109).
gcactgatgaccaaggttt

SEQ ID NO: 485028 - DNA, 19 bp, Mus musculus
  siRNA target sequence for MGC38585 (NM_153538.1,1092-1110).
cactgatgaccaaggttta

SEQ ID NO: 485029 - DNA, 19 bp, Mus musculus
  siRNA target sequence for MGC38585 (NM_153538.1,1170-1188).
caacactctggagttagta

SEQ ID NO: 485030 - DNA, 19 bp, Mus musculus
  siRNA target sequence for MGC38585 (NM_153538.1,1322-1340).
ctgcagccatgcactttga

SEQ ID NO: 485031 - DNA, 19 bp, Mus musculus
  siRNA target sequence for MGC38585 (NM_153538.1,1378-1396).
gagcccaggctcagcatta

SEQ ID NO: 485032 - DNA, 19 bp, Mus musculus
  siRNA target sequence for MGC38585 (NM_153538.1,1382-1400).
ccaggctcagcattaacct

SEQ ID NO: 485033 - DNA, 19 bp, Mus musculus
  siRNA target sequence for MGC38585 (NM_153538.1,1392-1410).
cattaaccttacagaagat

SEQ ID NO: 485034 - DNA, 19 bp, Mus musculus
  siRNA target sequence for MGC38585 (NM_153538.1,1547-1565).
gtgggactctgctcataga

SEQ ID NO: 485035 - DNA, 19 bp, Mus musculus
  siRNA target sequence for MGC38585 (NM_153538.1,1553-1571).
ctctgctcatagacctaaa

SEQ ID NO: 485036 - DNA, 19 bp, Mus musculus
  siRNA target sequence for MGC38585 (NM_153538.1,1574-1592).
gaataacacttaaagaaga

SEQ ID NO: 485037 - DNA, 19 bp, Mus musculus
  siRNA target sequence for MGC38585 (NM_153538.1,1630-1648).
gagttcttctacgaattta

SEQ ID NO: 485038 - DNA, 19 bp, Mus musculus
  siRNA target sequence for MGC38585 (NM_153538.1,1632-1650).
gttcttctacgaatttaga

SEQ ID NO: 485039 - DNA, 19 bp, Mus musculus
  siRNA target sequence for MGC38585 (NM_153538.1,1705-1723).
cgagaaggtcacctaaaga

SEQ ID NO: 485040 - DNA, 19 bp, Mus musculus
  siRNA target sequence for MGC38585 (NM_153538.1,1706-1724).
gagaaggtcacctaaagaa

SEQ ID NO: 485041 - DNA, 19 bp, Mus musculus
  siRNA target sequence for MGC38585 (NM_153538.1,1815-1833).
ccagtgttacaaggatttt

SEQ ID NO: 485042 - DNA, 19 bp, Mus musculus
  siRNA target sequence for MGC38585 (NM_153538.1,1818-1836).
gtgttacaaggatttttct

SEQ ID NO: 485043 - DNA, 19 bp, Mus musculus
  siRNA target sequence for MGC38585 (NM_153538.1,1835-1853).
ctccaactattgtagaaga

SEQ ID NO: 485044 - DNA, 19 bp, Mus musculus
  siRNA target sequence for MGC38585 (NM_153538.1,1838-1856).
caactattgtagaagatca

SEQ ID NO: 485045 - DNA, 19 bp, Mus musculus
  siRNA target sequence for MGC38585 (NM_153538.1,1852-1870).
gatcaggctcgtgaacata

SEQ ID NO: 485046 - DNA, 19 bp, Mus musculus
  siRNA target sequence for MGC38585 (NM_153538.1,1873-1891).
cggcaaaatctagaaagtt

SEQ ID NO: 485047 - DNA, 19 bp, Mus musculus
  siRNA target sequence for MGC38585 (NM_153538.1,1933-1951).
ggctcctccaaaaatggat

SEQ ID NO: 485048 - DNA, 19 bp, Mus musculus
  siRNA target sequence for MGC38585 (NM_153538.1,1948-1966).
ggatttgggttcaaacaga

SEQ ID NO: 485049 - DNA, 19 bp, Mus musculus
  siRNA target sequence for MGC38585 (NM_153538.1,1967-1985).
gtgaccttgacgtctgtat

SEQ ID NO: 485050 - DNA, 19 bp, Mus musculus
  siRNA target sequence for MGC38585 (NM_153538.1,1969-1987).
gaccttgacgtctgtatga

SEQ ID NO: 485051 - DNA, 19 bp, Mus musculus
  siRNA target sequence for MGC38585 (NM_153538.1,1975-1993).
gacgtctgtatgacgatta

SEQ ID NO: 485052 - DNA, 19 bp, Mus musculus
  siRNA target sequence for MGC38585 (NM_153538.1,2016-2034).
gctggactgtgtaagaact

SEQ ID NO: 485053 - DNA, 19 bp, Mus musculus
  siRNA target sequence for MGC38585 (NM_153538.1,2017-2035).
ctggactgtgtaagaacta

SEQ ID NO: 485054 - DNA, 19 bp, Mus musculus
  siRNA target sequence for MGC38585 (NM_153538.1,2019-2037).
ggactgtgtaagaactatt

SEQ ID NO: 485055 - DNA, 19 bp, Mus musculus
  siRNA target sequence for MGC38585 (NM_153538.1,2065-2083).
cactcagggttgaggaata

SEQ ID NO: 485056 - DNA, 19 bp, Mus musculus
  siRNA target sequence for MGC38585 (NM_153538.1,2079-2097).
gaatatccttcctatcaca

SEQ ID NO: 485057 - DNA, 19 bp, Mus musculus
  siRNA target sequence for MGC38585 (NM_153538.1,2152-2170).
gacatcagcttgtataaca

SEQ ID NO: 485058 - DNA, 19 bp, Mus musculus
  siRNA target sequence for MGC38585 (NM_153538.1,2154-2172).
catcagcttgtataacaca

SEQ ID NO: 485059 - DNA, 19 bp, Mus musculus
  siRNA target sequence for MGC38585 (NM_153538.1,2173-2191).
ctggcgcttcataacacaa

SEQ ID NO: 485060 - DNA, 19 bp, Mus musculus
  siRNA target sequence for MGC38585 (NM_153538.1,2221-2239).
cccagagtgaagtatctgt

SEQ ID NO: 485061 - DNA, 19 bp, Mus musculus
  siRNA target sequence for MGC38585 (NM_153538.1,2240-2258).
gctacaccatgaaagtgtt

SEQ ID NO: 485062 - DNA, 19 bp, Mus musculus
  siRNA target sequence for MGC38585 (NM_153538.1,2301-2319).
gtcatcctacgcttacact

SEQ ID NO: 485063 - DNA, 19 bp, Mus musculus
  siRNA target sequence for MGC38585 (NM_153538.1,2306-2324).
cctacgcttacactcttat

SEQ ID NO: 485064 - DNA, 19 bp, Mus musculus
  siRNA target sequence for MGC38585 (NM_153538.1,2365-2383).
cccgtgcttcaagagatat

SEQ ID NO: 485065 - DNA, 19 bp, Mus musculus
  siRNA target sequence for MGC38585 (NM_153538.1,2366-2384).
ccgtgcttcaagagatata

SEQ ID NO: 485066 - DNA, 19 bp, Mus musculus
  siRNA target sequence for MGC38585 (NM_153538.1,2459-2477).
ccacttgttggccagaata

SEQ ID NO: 485067 - DNA, 19 bp, Mus musculus
  siRNA target sequence for MGC38585 (NM_153538.1,2515-2533).
ggacttctgcgcttctaca

SEQ ID NO: 485068 - DNA, 19 bp, Mus musculus
  siRNA target sequence for MGC38585 (NM_153538.1,2557-2575).
cacgtgatcagcatcagaa

SEQ ID NO: 485069 - DNA, 19 bp, Mus musculus
  siRNA target sequence for MGC38585 (NM_153538.1,2605-2623).
cagtggacctcaaaataca

SEQ ID NO: 485070 - DNA, 19 bp, Mus musculus
  siRNA target sequence for MGC38585 (NM_153538.1,2607-2625).
gtggacctcaaaatacatt

SEQ ID NO: 485071 - DNA, 19 bp, Mus musculus
  siRNA target sequence for MGC38585 (NM_153538.1,2615-2633).
caaaatacattgttattga

SEQ ID NO: 485072 - DNA, 19 bp, Mus musculus
  siRNA target sequence for MGC38585 (NM_153538.1,2632-2650).
gaagatcccttcgatttga

SEQ ID NO: 485073 - DNA, 19 bp, Mus musculus
  siRNA target sequence for MGC38585 (NM_153538.1,2638-2656).
cccttcgatttgaatcaca

SEQ ID NO: 485074 - DNA, 19 bp, Mus musculus
  siRNA target sequence for MGC38585 (NM_153538.1,2639-2657).
ccttcgatttgaatcacaa

SEQ ID NO: 485075 - DNA, 19 bp, Mus musculus
  siRNA target sequence for MGC38585 (NM_153538.1,2643-2661).
cgatttgaatcacaatctt

SEQ ID NO: 485076 - DNA, 19 bp, Mus musculus
  siRNA target sequence for MGC38585 (NM_153538.1,2655-2673).
caatcttggtgctggatta

SEQ ID NO: 485077 - DNA, 19 bp, Mus musculus
  siRNA target sequence for MGC38585 (NM_153538.1,2665-2683).
gctggattatcgaggaaaa

SEQ ID NO: 485078 - DNA, 19 bp, Mus musculus
  siRNA target sequence for MGC38585 (NM_153538.1,2712-2730).
caatggtagaagagtattt

SEQ ID NO: 485079 - DNA, 19 bp, Mus musculus
  siRNA target sequence for MGC38585 (NM_153538.1,2731-2749).
ggaattccagtcaaaggat

SEQ ID NO: 485080 - DNA, 19 bp, Mus musculus
  siRNA target sequence for MGC38585 (NM_153538.1,2732-2750).
gaattccagtcaaaggatt

SEQ ID NO: 485081 - DNA, 19 bp, Mus musculus
  siRNA target sequence for MGC38585 (NM_153538.1,2765-2783).
cctcaaaactggcatactt

SEQ ID NO: 485082 - DNA, 19 bp, Mus musculus
  siRNA target sequence for MGC38585 (NM_153538.1,2810-2828).
gagaactggccccaaatga

SEQ ID NO: 485083 - DNA, 19 bp, Mus musculus
  siRNA target sequence for MGC38585 (NM_153538.1,2812-2830).
gaactggccccaaatgaca

SEQ ID NO: 485084 - DNA, 19 bp, Mus musculus
  siRNA target sequence for MGC38585 (NM_153538.1,2827-2845).
gacaggtgctgccgaattt

SEQ ID NO: 485085 - DNA, 19 bp, Mus musculus
  siRNA target sequence for MGC38585 (NM_153538.1,2837-2855).
gccgaatttgtgggaaaat

SEQ ID NO: 485086 - DNA, 19 bp, Mus musculus
  siRNA target sequence for MGC38585 (NM_153538.1,2849-2867).
ggaaaatcgggcacttcat

SEQ ID NO: 485087 - DNA, 19 bp, Mus musculus
  siRNA target sequence for MGC38585 (NM_153538.1,2902-2920).
cggagagaccaggaagata

SEQ ID NO: 485088 - DNA, 19 bp, Mus musculus
  siRNA target sequence for MGC38585 (NM_153538.1,2914-2932).
gaagataccccaaaccaaa

SEQ ID NO: 485089 - DNA, 19 bp, Mus musculus
  siRNA target sequence for MGC38585 (NM_153538.1,3145-3163).
gaaaagcgttgtttcatct

SEQ ID NO: 485090 - DNA, 19 bp, Mus musculus
  siRNA target sequence for MGC38585 (NM_153538.1,3167-3185).
gaagagaaggacacattaa

SEQ ID NO: 485091 - DNA, 19 bp, Mus musculus
  siRNA target sequence for MGC38585 (NM_153538.1,3217-3235).
ggtagcctttccagtaaat

SEQ ID NO: 485092 - DNA, 19 bp, Mus musculus
  siRNA target sequence for MGC38585 (NM_153538.1,3218-3236).
gtagcctttccagtaaata

SEQ ID NO: 485093 - DNA, 19 bp, Mus musculus
  siRNA target sequence for MGC38585 (NM_153538.1,3221-3239).
gcctttccagtaaatatat

SEQ ID NO: 485094 - DNA, 19 bp, Mus musculus
  siRNA target sequence for MGC39058 (NM_138949.2,190-208).
ggccgaagtgcctcagaaa

SEQ ID NO: 485095 - DNA, 19 bp, Mus musculus
  siRNA target sequence for MGC39058 (NM_138949.2,193-211).
cgaagtgcctcagaaaaga

SEQ ID NO: 485096 - DNA, 19 bp, Mus musculus
  siRNA target sequence for MGC39058 (NM_138949.2,426-444).
ccaaacccgataactataa

SEQ ID NO: 485097 - DNA, 19 bp, Mus musculus
  siRNA target sequence for MGC39058 (NM_138949.2,427-445).
caaacccgataactataat

SEQ ID NO: 485098 - DNA, 19 bp, Mus musculus
  siRNA target sequence for MGC39058 (NM_138949.2,534-552).
caacttcagtgctagactt

SEQ ID NO: 485099 - DNA, 19 bp, Mus musculus
  siRNA target sequence for MGC39058 (NM_138949.2,624-642).
gtgagcgttggctagaaca

SEQ ID NO: 485100 - DNA, 19 bp, Mus musculus
  siRNA target sequence for MGC39058 (NM_138949.2,634-652).
gctagaacatcgtcaaaga

SEQ ID NO: 485101 - DNA, 19 bp, Mus musculus
  siRNA target sequence for MGC39058 (NM_138949.2,635-653).
ctagaacatcgtcaaagaa

SEQ ID NO: 485102 - DNA, 19 bp, Mus musculus
  siRNA target sequence for MGC39058 (NM_138949.2,658-676).
ggagaggtacccaagacaa

SEQ ID NO: 485103 - DNA, 19 bp, Mus musculus
  siRNA target sequence for MGC39058 (NM_138949.2,716-734).
ggtgaacgtgatgtatatt

SEQ ID NO: 485104 - DNA, 19 bp, Mus musculus
  siRNA target sequence for MGC39058 (NM_138949.2,749-767).
cagaaacctctccttacaa

SEQ ID NO: 485105 - DNA, 19 bp, Mus musculus
  siRNA target sequence for MGC39058 (NM_138949.2,894-912).
gtggcgaactcttcactta

SEQ ID NO: 485106 - DNA, 19 bp, Mus musculus
  siRNA target sequence for MGC39058 (NM_138949.2,909-927).
cttaccgttcggtacttat

SEQ ID NO: 485107 - DNA, 19 bp, Mus musculus
  siRNA target sequence for MGC39058 (NM_138949.2,1021-1039).
gagaacccacactaggatt

SEQ ID NO: 485108 - DNA, 19 bp, Mus musculus
  siRNA target sequence for MGC39058 (NM_138949.2,1052-1070).
ggcgagtgcaagaaaacct

SEQ ID NO: 485109 - DNA, 19 bp, Mus musculus
  siRNA target sequence for MGC39058 (NM_138949.2,1057-1075).
gtgcaagaaaaccttcata

SEQ ID NO: 485110 - DNA, 19 bp, Mus musculus
  siRNA target sequence for MGC39058 (NM_138949.2,1059-1077).
gcaagaaaaccttcataga

SEQ ID NO: 485111 - DNA, 19 bp, Mus musculus
  siRNA target sequence for MGC39058 (NM_138949.2,1083-1101).
catcccttgaggtacatca

SEQ ID NO: 485112 - DNA, 19 bp, Mus musculus
  siRNA target sequence for MGC39058 (NM_138949.2,1495-1513).
ccggagctcaaattttgca

SEQ ID NO: 485113 - DNA, 19 bp, Mus musculus
  siRNA target sequence for MGC39058 (NM_138949.2,1496-1514).
cggagctcaaattttgcaa

SEQ ID NO: 485114 - DNA, 19 bp, Mus musculus
  siRNA target sequence for MGC39058 (NM_138949.2,1497-1515).
ggagctcaaattttgcaaa

SEQ ID NO: 485115 - DNA, 19 bp, Mus musculus
  siRNA target sequence for MGC39058 (NM_138949.2,1584-1602).
cgtcagctcttattcaaca

SEQ ID NO: 485116 - DNA, 19 bp, Mus musculus
  siRNA target sequence for MGC39058 (NM_138949.2,1672-1690).
ctccctcatccgacatcaa

SEQ ID NO: 485117 - DNA, 19 bp, Mus musculus
  siRNA target sequence for MGC62423 (NM_183177.1,189-207).
ggtttccataggagacata

SEQ ID NO: 485118 - DNA, 19 bp, Mus musculus
  siRNA target sequence for MGC62423 (NM_183177.1,216-234).
ccaaaagattgacaataaa

SEQ ID NO: 485119 - DNA, 19 bp, Mus musculus
  siRNA target sequence for MGC62423 (NM_183177.1,313-331).
gagatcttcaaattctcta

SEQ ID NO: 485120 - DNA, 19 bp, Mus musculus
  siRNA target sequence for MGC62423 (NM_183177.1,362-380).
caggagtacatatatgtaa

SEQ ID NO: 485121 - DNA, 19 bp, Mus musculus
  siRNA target sequence for MGC62423 (NM_183177.1,389-407).
ggtttgtcaatgtactcat

SEQ ID NO: 485122 - DNA, 19 bp, Mus musculus
  siRNA target sequence for MGC62423 (NM_183177.1,390-408).
gtttgtcaatgtactcatt

SEQ ID NO: 485123 - DNA, 19 bp, Mus musculus
  siRNA target sequence for MGC62423 (NM_183177.1,483-501).
gaatgtgtatactaaggaa

SEQ ID NO: 485124 - DNA, 19 bp, Mus musculus
  siRNA target sequence for MGC62423 (NM_183177.1,557-575).
ctgcagagaaatctgataa

SEQ ID NO: 485125 - DNA, 19 bp, Mus musculus
  siRNA target sequence for MGC62423 (NM_183177.1,903-921).
gtgtaaactgtgcaagaaa

SEQ ID NO: 485126 - DNA, 19 bp, Mus musculus
  siRNA target sequence for MGC62423 (NM_183177.1,1095-1113).
cattacctctacttaccta

SEQ ID NO: 485127 - DNA, 19 bp, Mus musculus
  siRNA target sequence for MGC62423 (NM_183177.1,1100-1118).
cctctacttacctacaagt

SEQ ID NO: 485128 - DNA, 19 bp, Mus musculus
  siRNA target sequence for MGC62423 (NM_183177.1,1183-1201).
ctttggactcaattccaaa

SEQ ID NO: 485129 - DNA, 19 bp, Mus musculus
  siRNA target sequence for MGC62423 (NM_183177.1,1221-1239).
cggtgtgaatccctttgtt

SEQ ID NO: 485130 - DNA, 19 bp, Mus musculus
  siRNA target sequence for MGC62423 (NM_183177.1,1222-1240).
ggtgtgaatccctttgttt

SEQ ID NO: 485131 - DNA, 19 bp, Mus musculus
  siRNA target sequence for MGC62423 (NM_183177.1,1268-1286).
gtcttggtaccctacagat

SEQ ID NO: 485132 - DNA, 19 bp, Mus musculus
  siRNA target sequence for MGC62423 (NM_183177.1,1367-1385).
gacgacatgaaataatcca

SEQ ID NO: 485133 - DNA, 19 bp, Mus musculus
  siRNA target sequence for MGC62423 (NM_183177.1,1428-1446).
gtttctctgctctactact

SEQ ID NO: 485134 - DNA, 19 bp, Mus musculus
  siRNA target sequence for MGC62423 (NM_183177.1,1476-1494).
cagtaacccgtatgtatgt

SEQ ID NO: 485135 - DNA, 19 bp, Mus musculus
  siRNA target sequence for MGC62423 (NM_183177.1,1482-1500).
cccgtatgtatgttctcaa

SEQ ID NO: 485136 - DNA, 19 bp, Mus musculus
  siRNA target sequence for MGC62423 (NM_183177.1,1567-1585).
ccttgtgtctgtaagcaat

SEQ ID NO: 485137 - DNA, 19 bp, Mus musculus
  siRNA target sequence for MGC62423 (NM_183177.1,1599-1617).
cactcatttaagttctctt

SEQ ID NO: 485138 - DNA, 19 bp, Mus musculus
  siRNA target sequence for MGC62423 (NM_183177.1,1679-1697).
gctttcggtctcttagtca

SEQ ID NO: 485139 - DNA, 19 bp, Mus musculus
  siRNA target sequence for MGC62423 (NM_183177.1,1686-1704).
gtctcttagtcaccttaaa

SEQ ID NO: 485140 - DNA, 19 bp, Mus musculus
  siRNA target sequence for MGC62423 (NM_183177.1,1688-1706).
ctcttagtcaccttaaaaa

SEQ ID NO: 485141 - DNA, 19 bp, Mus musculus
  siRNA target sequence for Mki67ip (NM_026472.2,143-161).
cgaagaagcctcagcaaaa

SEQ ID NO: 485142 - DNA, 19 bp, Mus musculus
  siRNA target sequence for Mki67ip (NM_026472.2,175-193).
cttaaccgtggagtagttt

SEQ ID NO: 485143 - DNA, 19 bp, Mus musculus
  siRNA target sequence for Mki67ip (NM_026472.2,198-216).
gggccacctaccttcaaca

SEQ ID NO: 485144 - DNA, 19 bp, Mus musculus
  siRNA target sequence for Mki67ip (NM_026472.2,201-219).
ccacctaccttcaacactt

SEQ ID NO: 485145 - DNA, 19 bp, Mus musculus
  siRNA target sequence for Mki67ip (NM_026472.2,221-239).
ctgaaagccacatctataa

SEQ ID NO: 485146 - DNA, 19 bp, Mus musculus
  siRNA target sequence for Mki67ip (NM_026472.2,223-241).
gaaagccacatctataact

SEQ ID NO: 485147 - DNA, 19 bp, Mus musculus
  siRNA target sequence for Mki67ip (NM_026472.2,256-274).
ggcgacattagcagattca

SEQ ID NO: 485148 - DNA, 19 bp, Mus musculus
  siRNA target sequence for Mki67ip (NM_026472.2,258-276).
cgacattagcagattcaga

SEQ ID NO: 485149 - DNA, 19 bp, Mus musculus
  siRNA target sequence for Mki67ip (NM_026472.2,348-366).
caagatagttgcagaaaca

SEQ ID NO: 485150 - DNA, 19 bp, Mus musculus
  siRNA target sequence for Mki67ip (NM_026472.2,369-387).
ggataactacctttttggt

SEQ ID NO: 485151 - DNA, 19 bp, Mus musculus
  siRNA target sequence for Mki67ip (NM_026472.2,375-393).
ctacctttttggtgaaaga

SEQ ID NO: 485152 - DNA, 19 bp, Mus musculus
  siRNA target sequence for Mki67ip (NM_026472.2,385-403).
ggtgaaagacttctatcat

SEQ ID NO: 485153 - DNA, 19 bp, Mus musculus
  siRNA target sequence for Mki67ip (NM_026472.2,392-410).
gacttctatcatgtaaatt

SEQ ID NO: 485154 - DNA, 19 bp, Mus musculus
  siRNA target sequence for Mki67ip (NM_026472.2,416-434).
cacgaaaaaaagtccataa

SEQ ID NO: 485155 - DNA, 19 bp, Mus musculus
  siRNA target sequence for Mki67ip (NM_026472.2,482-500).
cagcagtgaagcgctataa

SEQ ID NO: 485156 - DNA, 19 bp, Mus musculus
  siRNA target sequence for Mki67ip (NM_026472.2,511-529).
ggacatttgcagatgttga

SEQ ID NO: 485157 - DNA, 19 bp, Mus musculus
  siRNA target sequence for Mki67ip (NM_026472.2,528-546).
gaagatggagtataggttt

SEQ ID NO: 485158 - DNA, 19 bp, Mus musculus
  siRNA target sequence for Mki67ip (NM_026472.2,580-598).
gctgcaaaggggattgatt

SEQ ID NO: 485159 - DNA, 19 bp, Mus musculus
  siRNA target sequence for Mki67ip (NM_026472.2,583-601).
gcaaaggggattgattata

SEQ ID NO: 485160 - DNA, 19 bp, Mus musculus
  siRNA target sequence for Mki67ip (NM_026472.2,588-606).
ggggattgattatagtttt

SEQ ID NO: 485161 - DNA, 19 bp, Mus musculus
  siRNA target sequence for Mki67ip (NM_026472.2,619-637).
ctacctaagccaaagaaca

SEQ ID NO: 485162 - DNA, 19 bp, Mus musculus
  siRNA target sequence for Mki67ip (NM_026472.2,640-658).
gctgtcgctcatagagatt

SEQ ID NO: 485163 - DNA, 19 bp, Mus musculus
  siRNA target sequence for Mki67ip (NM_026472.2,659-677).
ctgagggtaaccaggtttt

SEQ ID NO: 485164 - DNA, 19 bp, Mus musculus
  siRNA target sequence for Mki67ip (NM_026472.2,672-690).
ggttttacctgaccaaaaa

SEQ ID NO: 485165 - DNA, 19 bp, Mus musculus
  siRNA target sequence for Mki67ip (NM_026472.2,820-838).
gtttgtacaccgacgtttt

SEQ ID NO: 485166 - DNA, 19 bp, Mus musculus
  siRNA target sequence for Mki67ip (NM_026472.2,824-842).
gtacaccgacgtttttgga

SEQ ID NO: 485167 - DNA, 19 bp, Mus musculus
  siRNA target sequence for Mki67ip (NM_026472.2,870-888).
cggtggcgataaagatgat

SEQ ID NO: 485168 - DNA, 19 bp, Mus musculus
  siRNA target sequence for Mkrn1 (NM_018810.1,722-740).
caactacggtggagacaaa

SEQ ID NO: 485169 - DNA, 19 bp, Mus musculus
  siRNA target sequence for Mkrn1 (NM_018810.1,785-803).
gggaaaactgtgtgtatct

SEQ ID NO: 485170 - DNA, 19 bp, Mus musculus
  siRNA target sequence for Mkrn1 (NM_018810.1,873-891).
gcacataaaatcttgcatt

SEQ ID NO: 485171 - DNA, 19 bp, Mus musculus
  siRNA target sequence for Mkrn1 (NM_018810.1,906-924).
ggacatggagctctctttt

SEQ ID NO: 485172 - DNA, 19 bp, Mus musculus
  siRNA target sequence for Mkrn1 (NM_018810.1,1105-1123).
cccgaatgccggatcacat

SEQ ID NO: 485173 - DNA, 19 bp, Mus musculus
  siRNA target sequence for Mkrn1 (NM_018810.1,1108-1126).
gaatgccggatcacatcta

SEQ ID NO: 485174 - DNA, 19 bp, Mus musculus
  siRNA target sequence for Mkrn1 (NM_018810.1,1112-1130).
gccggatcacatctaactt

SEQ ID NO: 485175 - DNA, 19 bp, Mus musculus
  siRNA target sequence for Mkrn1 (NM_018810.1,1115-1133).
ggatcacatctaactttgt

SEQ ID NO: 485176 - DNA, 19 bp, Mus musculus
  siRNA target sequence for Mkrn1 (NM_018810.1,1252-1270).
ccatttggagggaactgtt

SEQ ID NO: 485177 - DNA, 19 bp, Mus musculus
  siRNA target sequence for Mkrn1 (NM_018810.1,1438-1456).
ctgggcgagatgttgctta

SEQ ID NO: 485178 - DNA, 19 bp, Mus musculus
  siRNA target sequence for Mkrn1 (NM_018810.1,1442-1460).
gcgagatgttgcttatgct

SEQ ID NO: 485179 - DNA, 19 bp, Mus musculus
  siRNA target sequence for Mkrn1 (NM_018810.1,1443-1461).
cgagatgttgcttatgctt

SEQ ID NO: 485180 - DNA, 19 bp, Mus musculus
  siRNA target sequence for Mkrn1 (NM_018810.1,1500-1518).
ggacgagtgggacttgttt

SEQ ID NO: 485181 - DNA, 19 bp, Mus musculus
  siRNA target sequence for Mkrn1 (NM_018810.1,1528-1546).
ctggaggacttttatgact

SEQ ID NO: 485182 - DNA, 19 bp, Mus musculus
  siRNA target sequence for Mkrn3 (NM_011746.1,384-402).
gcagctggacgaagcaaat

SEQ ID NO: 485183 - DNA, 19 bp, Mus musculus
  siRNA target sequence for Mkrn3 (NM_011746.1,387-405).
gctggacgaagcaaatcct

SEQ ID NO: 485184 - DNA, 19 bp, Mus musculus
  siRNA target sequence for Mkrn3 (NM_011746.1,999-1017).
catacccccatggagaaat

SEQ ID NO: 485185 - DNA, 19 bp, Mus musculus
  siRNA target sequence for Mkrn3 (NM_011746.1,1107-1125).
gagatatggaactctcttt

SEQ ID NO: 485186 - DNA, 19 bp, Mus musculus
  siRNA target sequence for Mkrn3 (NM_011746.1,1205-1223).
cgctttggcattcttttca

SEQ ID NO: 485187 - DNA, 19 bp, Mus musculus
  siRNA target sequence for Mkrn3 (NM_011746.1,1266-1284).
gaagtgccacacagtttga

SEQ ID NO: 485188 - DNA, 19 bp, Mus musculus
  siRNA target sequence for Mkrn3 (NM_011746.1,1542-1560).
gcgcatactggcatcaagt

SEQ ID NO: 485189 - DNA, 19 bp, Mus musculus
  siRNA target sequence for Mkrn3 (NM_011746.1,1543-1561).
cgcatactggcatcaagtt

SEQ ID NO: 485190 - DNA, 19 bp, Mus musculus
  siRNA target sequence for Mkrn3 (NM_011746.1,1544-1562).
gcatactggcatcaagttt

SEQ ID NO: 485191 - DNA, 19 bp, Mus musculus
  siRNA target sequence for Mkrn3 (NM_011746.1,1595-1613).
ctgtttaaaagccgtaaaa

SEQ ID NO: 485192 - DNA, 19 bp, Mus musculus
  siRNA target sequence for Mkrn3 (NM_011746.1,1608-1626).
gtaaaaaagagcattctgt

SEQ ID NO: 485193 - DNA, 19 bp, Mus musculus
  siRNA target sequence for Mkrn3 (NM_011746.1,1634-1652).
ctggccaatcagttgctta

SEQ ID NO: 485194 - DNA, 19 bp, Mus musculus
  siRNA target sequence for Mkrn3 (NM_011746.1,1637-1655).
gccaatcagttgcttaaga

SEQ ID NO: 485195 - DNA, 19 bp, Mus musculus
  siRNA target sequence for Mkrn3 (NM_011746.1,1698-1716).
gttggctcttgcttcagta

SEQ ID NO: 485196 - DNA, 19 bp, Mus musculus
  siRNA target sequence for Mkrn3 (NM_011746.1,1712-1730).
cagtaccagctggaagaat

SEQ ID NO: 485197 - DNA, 19 bp, Mus musculus
  siRNA target sequence for Mkrn3 (NM_011746.1,1714-1732).
gtaccagctggaagaatat

SEQ ID NO: 485198 - DNA, 19 bp, Mus musculus
  siRNA target sequence for Myef2 (NM_010852.1,265-283).
ggttgtggcgtggttgaat

SEQ ID NO: 485199 - DNA, 19 bp, Mus musculus
  siRNA target sequence for Myef2 (NM_010852.1,266-284).
gttgtggcgtggttgaatt

SEQ ID NO: 485200 - DNA, 19 bp, Mus musculus
  siRNA target sequence for Myef2 (NM_010852.1,986-1004).
gccgaatgggagagctata

SEQ ID NO: 485201 - DNA, 19 bp, Mus musculus
  siRNA target sequence for Myef2 (NM_010852.1,1022-1040).
gtagcatggagcgagattt

SEQ ID NO: 485202 - DNA, 19 bp, Mus musculus
  siRNA target sequence for Myef2 (NM_010852.1,1041-1059).
cggacgtggtgatattgga

SEQ ID NO: 485203 - DNA, 19 bp, Mus musculus
  siRNA target sequence for Myef2 (NM_010852.1,1042-1060).
ggacgtggtgatattggat

SEQ ID NO: 485204 - DNA, 19 bp, Mus musculus
  siRNA target sequence for Myef2 (NM_010852.1,1043-1061).
gacgtggtgatattggatt

SEQ ID NO: 485205 - DNA, 19 bp, Mus musculus
  siRNA target sequence for Myef2 (NM_010852.1,1045-1063).
cgtggtgatattggattaa

SEQ ID NO: 485206 - DNA, 19 bp, Mus musculus
  siRNA target sequence for Myef2 (NM_010852.1,1067-1085).
gaggctttggcgattcctt

SEQ ID NO: 485207 - DNA, 19 bp, Mus musculus
  siRNA target sequence for Myef2 (NM_010852.1,1077-1095).
cgattcctttggtagactt

SEQ ID NO: 485208 - DNA, 19 bp, Mus musculus
  siRNA target sequence for Myef2 (NM_010852.1,1112-1130).
gagggtttgcaggaagaat

SEQ ID NO: 485209 - DNA, 19 bp, Mus musculus
  siRNA target sequence for Myef2 (NM_010852.1,1116-1134).
gtttgcaggaagaatagga

SEQ ID NO: 485210 - DNA, 19 bp, Mus musculus
  siRNA target sequence for Myef2 (NM_010852.1,1127-1145).
gaataggagcttctaacat

SEQ ID NO: 485211 - DNA, 19 bp, Mus musculus
  siRNA target sequence for Myef2 (NM_010852.1,1419-1437).
cagccaatgtggtcatgta

SEQ ID NO: 485212 - DNA, 19 bp, Mus musculus
  siRNA target sequence for Myef2 (NM_010852.1,1421-1439).
gccaatgtggtcatgtaat

SEQ ID NO: 485213 - DNA, 19 bp, Mus musculus
  siRNA target sequence for Myef2 (NM_010852.1,1485-1503).
gacagtcaggtttgaatct

SEQ ID NO: 485214 - DNA, 19 bp, Mus musculus
  siRNA target sequence for Myef2 (NM_010852.1,1551-1569).
cagcggcagggaaatcgat

SEQ ID NO: 485215 - DNA, 19 bp, Mus musculus
  siRNA target sequence for Nars (NM_027350.1,116-134).
ggttctagagctgtatgta

SEQ ID NO: 485216 - DNA, 19 bp, Mus musculus
  siRNA target sequence for Nars (NM_027350.1,117-135).
gttctagagctgtatgtat

SEQ ID NO: 485217 - DNA, 19 bp, Mus musculus
  siRNA target sequence for Nars (NM_027350.1,195-213).
ggcctaaaggctttgatga

SEQ ID NO: 485218 - DNA, 19 bp, Mus musculus
  siRNA target sequence for Nars (NM_027350.1,229-247).
catttcccaccatttatgt

SEQ ID NO: 485219 - DNA, 19 bp, Mus musculus
  siRNA target sequence for Nars (NM_027350.1,341-359).
cgactctagggagaagaaa

SEQ ID NO: 485220 - DNA, 19 bp, Mus musculus
  siRNA target sequence for Nars (NM_027350.1,517-535).
ggttgcgcaggcaaggaaa

SEQ ID NO: 485221 - DNA, 19 bp, Mus musculus
  siRNA target sequence for Nars (NM_027350.1,521-539).
gcgcaggcaaggaaagaat

SEQ ID NO: 485222 - DNA, 19 bp, Mus musculus
  siRNA target sequence for Nars (NM_027350.1,559-577).
gagatggtacgggttatct

SEQ ID NO: 485223 - DNA, 19 bp, Mus musculus
  siRNA target sequence for Nars (NM_027350.1,583-601).
gtgtcttgtcagatgactt

SEQ ID NO: 485224 - DNA, 19 bp, Mus musculus
  siRNA target sequence for Nars (NM_027350.1,599-617).
cttgtgtcagtgttacaat

SEQ ID NO: 485225 - DNA, 19 bp, Mus musculus
  siRNA target sequence for Nars (NM_027350.1,647-665).
ggcggtgtacggaacacta

SEQ ID NO: 485226 - DNA, 19 bp, Mus musculus
  siRNA target sequence for Nars (NM_027350.1,648-666).
gcggtgtacggaacactaa

SEQ ID NO: 485227 - DNA, 19 bp, Mus musculus
  siRNA target sequence for Nars (NM_027350.1,649-667).
cggtgtacggaacactaaa

SEQ ID NO: 485228 - DNA, 19 bp, Mus musculus
  siRNA target sequence for Nars (NM_027350.1,653-671).
gtacggaacactaaaccta

SEQ ID NO: 485229 - DNA, 19 bp, Mus musculus
  siRNA target sequence for Nars (NM_027350.1,754-772).
gagctgataacctgatcaa

SEQ ID NO: 485230 - DNA, 19 bp, Mus musculus
  siRNA target sequence for Nars (NM_027350.1,874-892).
gtttccgggaccacttctt

SEQ ID NO: 485231 - DNA, 19 bp, Mus musculus
  siRNA target sequence for Nars (NM_027350.1,958-976).
cgctcttcaagcttgacta

SEQ ID NO: 485232 - DNA, 19 bp, Mus musculus
  siRNA target sequence for Nars (NM_027350.1,959-977).
gctcttcaagcttgactat

SEQ ID NO: 485233 - DNA, 19 bp, Mus musculus
  siRNA target sequence for Nars (NM_027350.1,960-978).
ctcttcaagcttgactatt

SEQ ID NO: 485234 - DNA, 19 bp, Mus musculus
  siRNA target sequence for Nars (NM_027350.1,1041-1059).
ctgggagatgttttttgta

SEQ ID NO: 485235 - DNA, 19 bp, Mus musculus
  siRNA target sequence for Nars (NM_027350.1,1216-1234).
cagtggcaagcatagtgta

SEQ ID NO: 485236 - DNA, 19 bp, Mus musculus
  siRNA target sequence for Nars (NM_027350.1,1238-1256).
gctcaacccgaactttaaa

SEQ ID NO: 485237 - DNA, 19 bp, Mus musculus
  siRNA target sequence for Nars (NM_027350.1,1472-1490).
ggatcctcgacttactgaa

SEQ ID NO: 485238 - DNA, 19 bp, Mus musculus
  siRNA target sequence for Nars (NM_027350.1,1473-1491).
gatcctcgacttactgaat

SEQ ID NO: 485239 - DNA, 19 bp, Mus musculus
  siRNA target sequence for Nars (NM_027350.1,1477-1495).
ctcgacttactgaatctgt

SEQ ID NO: 485240 - DNA, 19 bp, Mus musculus
  siRNA target sequence for Nars (NM_027350.1,1508-1526).
gcccaacgttggtgagatt

SEQ ID NO: 485241 - DNA, 19 bp, Mus musculus
  siRNA target sequence for Nars (NM_027350.1,1510-1528).
ccaacgttggtgagattgt

SEQ ID NO: 485242 - DNA, 19 bp, Mus musculus
  siRNA target sequence for Nars (NM_027350.1,1511-1529).
caacgttggtgagattgta

SEQ ID NO: 485243 - DNA, 19 bp, Mus musculus
  siRNA target sequence for Nars (NM_027350.1,1599-1617).
gctccttactactggtata

SEQ ID NO: 485244 - DNA, 19 bp, Mus musculus
  siRNA target sequence for Nars (NM_027350.1,1603-1621).
cttactactggtatacaga

SEQ ID NO: 485245 - DNA, 19 bp, Mus musculus
  siRNA target sequence for Nars (NM_027350.1,1612-1630).
ggtatacagatcagagaaa

SEQ ID NO: 485246 - DNA, 19 bp, Mus musculus
  siRNA target sequence for Nars (NM_027350.1,1660-1678).
gcttgggcttggaacgatt

SEQ ID NO: 485247 - DNA, 19 bp, Mus musculus
  siRNA target sequence for Nars (NM_027350.1,1661-1679).
cttgggcttggaacgattt

SEQ ID NO: 485248 - DNA, 19 bp, Mus musculus
  siRNA target sequence for Nars (NM_027350.1,1718-1736).
gtgcctgtaccctcgattt

SEQ ID NO: 485249 - DNA, 19 bp, Mus musculus
  siRNA target sequence for Ncbp2 (NM_026554.2,123-141).
gaaaagctgtacgttgtat

SEQ ID NO: 485250 - DNA, 19 bp, Mus musculus
  siRNA target sequence for Ncbp2 (NM_026554.2,164-182).
caactgaagaacagattta

SEQ ID NO: 485251 - DNA, 19 bp, Mus musculus
  siRNA target sequence for Ncbp2 (NM_026554.2,192-210).
cagcaaaagtggtgatata

SEQ ID NO: 485252 - DNA, 19 bp, Mus musculus
  siRNA target sequence for Ncbp2 (NM_026554.2,219-237).
catcatgggtctggataaa

SEQ ID NO: 485253 - DNA, 19 bp, Mus musculus
  siRNA target sequence for Ncbp2 (NM_026554.2,297-315).
gaacgcaatgcggtacata

SEQ ID NO: 485254 - DNA, 19 bp, Mus musculus
  siRNA target sequence for Ncl (NM_010880.2,314-332).
gttgtcatccctcagaaaa

SEQ ID NO: 485255 - DNA, 19 bp, Mus musculus
  siRNA target sequence for Ncl (NM_010880.2,364-382).
gaaggtggttgtttcacaa

SEQ ID NO: 485256 - DNA, 19 bp, Mus musculus
  siRNA target sequence for Ncl (NM_010880.2,508-526).
gggagctgcacaagcaaaa

SEQ ID NO: 485257 - DNA, 19 bp, Mus musculus
  siRNA target sequence for Ncl (NM_010880.2,532-550).
ggtaccaactcctggtaaa

SEQ ID NO: 485258 - DNA, 19 bp, Mus musculus
  siRNA target sequence for Ncl (NM_010880.2,567-585).
cagctaagggggctaagaa

SEQ ID NO: 485259 - DNA, 19 bp, Mus musculus
  siRNA target sequence for Ncl (NM_010880.2,576-594).
gggctaagaacggtaagaa

SEQ ID NO: 485260 - DNA, 19 bp, Mus musculus
  siRNA target sequence for Ncl (NM_010880.2,577-595).
ggctaagaacggtaagaat

SEQ ID NO: 485261 - DNA, 19 bp, Mus musculus
  siRNA target sequence for Ncl (NM_010880.2,682-700).
gtttgagccaccaatagta

SEQ ID NO: 485262 - DNA, 19 bp, Mus musculus
  siRNA target sequence for Ncl (NM_010880.2,688-706).
gccaccaatagtaaaagga

SEQ ID NO: 485263 - DNA, 19 bp, Mus musculus
  siRNA target sequence for Ncl (NM_010880.2,821-839).
gaagttatggagatcacaa

SEQ ID NO: 485264 - DNA, 19 bp, Mus musculus
  siRNA target sequence for Ncl (NM_010880.2,861-879).
ctgcaaaagttgttcctat

SEQ ID NO: 485265 - DNA, 19 bp, Mus musculus
  siRNA target sequence for Ncl (NM_010880.2,1092-1110).
caactacacctttcaatct

SEQ ID NO: 485266 - DNA, 19 bp, Mus musculus
  siRNA target sequence for Ncl (NM_010880.2,1095-1113).
ctacacctttcaatctgtt

SEQ ID NO: 485267 - DNA, 19 bp, Mus musculus
  siRNA target sequence for Ncl (NM_010880.2,1131-1149).
caaacaagtctgttaatga

SEQ ID NO: 485268 - DNA, 19 bp, Mus musculus
  siRNA target sequence for Ncl (NM_010880.2,1135-1153).
caagtctgttaatgaatta

SEQ ID NO: 485269 - DNA, 19 bp, Mus musculus
  siRNA target sequence for Ncl (NM_010880.2,1138-1156).
gtctgttaatgaattaaaa

SEQ ID NO: 485270 - DNA, 19 bp, Mus musculus
  siRNA target sequence for Ncl (NM_010880.2,1365-1383).
cacttctagccaaaaacct

SEQ ID NO: 485271 - DNA, 19 bp, Mus musculus
  siRNA target sequence for Ncl (NM_010880.2,1427-1445).
gacgccatggagatcagat

SEQ ID NO: 485272 - DNA, 19 bp, Mus musculus
  siRNA target sequence for Ncl (NM_010880.2,1429-1447).
cgccatggagatcagatta

SEQ ID NO: 485273 - DNA, 19 bp, Mus musculus
  siRNA target sequence for Ncl (NM_010880.2,1431-1449).
ccatggagatcagattagt

SEQ ID NO: 485274 - DNA, 19 bp, Mus musculus
  siRNA target sequence for Ncl (NM_010880.2,1554-1572).
gatctgtttcactctacta

SEQ ID NO: 485275 - DNA, 19 bp, Mus musculus
  siRNA target sequence for Ncl (NM_010880.2,1618-1636).
cacttggagtggtgaatca

SEQ ID NO: 485276 - DNA, 19 bp, Mus musculus
  siRNA target sequence for Ncl (NM_010880.2,1620-1638).
cttggagtggtgaatcaaa

SEQ ID NO: 485277 - DNA, 19 bp, Mus musculus
  siRNA target sequence for Ncl (NM_010880.2,1624-1642).
gagtggtgaatcaaagact

SEQ ID NO: 485278 - DNA, 19 bp, Mus musculus
  siRNA target sequence for Ncl (NM_010880.2,1691-1709).
gaagtatttgagaaagcaa

SEQ ID NO: 485279 - DNA, 19 bp, Mus musculus
  siRNA target sequence for Ncl (NM_010880.2,1745-1763).
cctaaagggtatgcattta

SEQ ID NO: 485280 - DNA, 19 bp, Mus musculus
  siRNA target sequence for Ncl (NM_010880.2,1746-1764).
ctaaagggtatgcatttat

SEQ ID NO: 485281 - DNA, 19 bp, Mus musculus
  siRNA target sequence for Ncl (NM_010880.2,1751-1769).
gggtatgcatttatagaat

SEQ ID NO: 485282 - DNA, 19 bp, Mus musculus
  siRNA target sequence for Ncl (NM_010880.2,1752-1770).
ggtatgcatttatagaatt

SEQ ID NO: 485283 - DNA, 19 bp, Mus musculus
  siRNA target sequence for Ncl (NM_010880.2,1846-1864).
ggagttgcaaggatccaat

SEQ ID NO: 485284 - DNA, 19 bp, Mus musculus
  siRNA target sequence for Ncl (NM_010880.2,1847-1865).
gagttgcaaggatccaatt

SEQ ID NO: 485285 - DNA, 19 bp, Mus musculus
  siRNA target sequence for Ncl (NM_010880.2,1872-1890).
gtcaaccatccaaaactct

SEQ ID NO: 485286 - DNA, 19 bp, Mus musculus
  siRNA target sequence for Ncl (NM_010880.2,1917-1935).
ccactgaagagaccttaaa

SEQ ID NO: 485287 - DNA, 19 bp, Mus musculus
  siRNA target sequence for Ncl (NM_010880.2,1950-1968).
gctctgttcgtgcaagaat

SEQ ID NO: 485288 - DNA, 19 bp, Mus musculus
  siRNA target sequence for Ncl (NM_010880.2,1951-1969).
ctctgttcgtgcaagaata

SEQ ID NO: 485289 - DNA, 19 bp, Mus musculus
  siRNA target sequence for Ncl (NM_010880.2,1953-1971).
ctgttcgtgcaagaatagt

SEQ ID NO: 485290 - DNA, 19 bp, Mus musculus
  siRNA target sequence for Ncl (NM_010880.2,1992-2010).
cttccaaagggtttggttt

SEQ ID NO: 485291 - DNA, 19 bp, Mus musculus
  siRNA target sequence for Nono (NM_023144.1,1420-1438).
caccaacaactgaacgttt

SEQ ID NO: 485292 - DNA, 19 bp, Mus musculus
  siRNA target sequence for Npm2 (NM_181345.1,380-398).
gaaaaccaccaatcactat

SEQ ID NO: 485293 - DNA, 19 bp, Mus musculus
  siRNA target sequence for Npm2 (NM_181345.1,385-403).
ccaccaatcactattgcta

SEQ ID NO: 485294 - DNA, 19 bp, Mus musculus
  siRNA target sequence for Npm2 (NM_181345.1,506-524).
gtggcctggaatgttatga

SEQ ID NO: 485295 - DNA, 19 bp, Mus musculus
  siRNA target sequence for Npm2 (NM_181345.1,508-526).
ggcctggaatgttatgaga

SEQ ID NO: 485296 - DNA, 19 bp, Mus musculus
  siRNA target sequence for Nupl2 (NM_153092.1,278-296).
caccattcggctcttttga

SEQ ID NO: 485297 - DNA, 19 bp, Mus musculus
  siRNA target sequence for Nupl2 (NM_153092.1,319-337).
ggctttgggtcatctcaaa

SEQ ID NO: 485298 - DNA, 19 bp, Mus musculus
  siRNA target sequence for Nupl2 (NM_153092.1,400-418).
gttaaggacgtagaagttt

SEQ ID NO: 485299 - DNA, 19 bp, Mus musculus
  siRNA target sequence for Nupl2 (NM_153092.1,453-471).
ctcgccagtgagaaagaaa

SEQ ID NO: 485300 - DNA, 19 bp, Mus musculus
  siRNA target sequence for Pabpc5 (NM_053114.1,263-281).
gagtggggagcctaatact

SEQ ID NO: 485301 - DNA, 19 bp, Mus musculus
  siRNA target sequence for Pabpc5 (NM_053114.1,305-323).
caaggctgccctgtatgta

SEQ ID NO: 485302 - DNA, 19 bp, Mus musculus
  siRNA target sequence for Pabpc5 (NM_053114.1,346-364).
cagaggacatgctctataa

SEQ ID NO: 485303 - DNA, 19 bp, Mus musculus
  siRNA target sequence for Pabpc5 (NM_053114.1,348-366).
gaggacatgctctataaga

SEQ ID NO: 485304 - DNA, 19 bp, Mus musculus
  siRNA target sequence for Pabpc5 (NM_053114.1,381-399).
ggccctctgcgcttcacta

SEQ ID NO: 485305 - DNA, 19 bp, Mus musculus
  siRNA target sequence for Pabpc5 (NM_053114.1,384-402).
cctctgcgcttcactagaa

SEQ ID NO: 485306 - DNA, 19 bp, Mus musculus
  siRNA target sequence for Pabpc5 (NM_053114.1,385-403).
ctctgcgcttcactagaat

SEQ ID NO: 485307 - DNA, 19 bp, Mus musculus
  siRNA target sequence for Pabpc5 (NM_053114.1,387-405).
ctgcgcttcactagaatct

SEQ ID NO: 485308 - DNA, 19 bp, Mus musculus
  siRNA target sequence for Pabpc5 (NM_053114.1,389-407).
gcgcttcactagaatctgt

SEQ ID NO: 485309 - DNA, 19 bp, Mus musculus
  siRNA target sequence for Pabpc5 (NM_053114.1,427-445).
gccccctgggttatggtta

SEQ ID NO: 485310 - DNA, 19 bp, Mus musculus
  siRNA target sequence for Pabpc5 (NM_053114.1,428-446).
ccccctgggttatggttat

SEQ ID NO: 485311 - DNA, 19 bp, Mus musculus
  siRNA target sequence for Pabpc5 (NM_053114.1,434-452).
gggttatggttatgttaat

SEQ ID NO: 485312 - DNA, 19 bp, Mus musculus
  siRNA target sequence for Pabpc5 (NM_053114.1,478-496).
gggcattgaacacaatgaa

SEQ ID NO: 485313 - DNA, 19 bp, Mus musculus
  siRNA target sequence for Pabpc5 (NM_053114.1,479-497).
ggcattgaacacaatgaat

SEQ ID NO: 485314 - DNA, 19 bp, Mus musculus
  siRNA target sequence for Pabpc5 (NM_053114.1,540-558).
cagccagatgaccgtttaa

SEQ ID NO: 485315 - DNA, 19 bp, Mus musculus
  siRNA target sequence for Pabpc5 (NM_053114.1,542-560).
gccagatgaccgtttaaga

SEQ ID NO: 485316 - DNA, 19 bp, Mus musculus
  siRNA target sequence for Pabpc5 (NM_053114.1,567-585).
ggagttggaaatatattca

SEQ ID NO: 485317 - DNA, 19 bp, Mus musculus
  siRNA target sequence for Pabpc5 (NM_053114.1,596-614).
ggataagaccatagacaat

SEQ ID NO: 485318 - DNA, 19 bp, Mus musculus
  siRNA target sequence for Pabpc5 (NM_053114.1,597-615).
gataagaccatagacaata

SEQ ID NO: 485319 - DNA, 19 bp, Mus musculus
  siRNA target sequence for Pabpc5 (NM_053114.1,637-655).
cggcttttgggaacattct

SEQ ID NO: 485320 - DNA, 19 bp, Mus musculus
  siRNA target sequence for Pabpc5 (NM_053114.1,658-676).
cctgtaaagtcgtatgtga

SEQ ID NO: 485321 - DNA, 19 bp, Mus musculus
  siRNA target sequence for Pabpc5 (NM_053114.1,659-677).
ctgtaaagtcgtatgtgat

SEQ ID NO: 485322 - DNA, 19 bp, Mus musculus
  siRNA target sequence for Pabpc5 (NM_053114.1,699-717).
gcttatgtccacttcgata

SEQ ID NO: 485323 - DNA, 19 bp, Mus musculus
  siRNA target sequence for Pabpc5 (NM_053114.1,736-754).
gggctatctggcacatgaa

SEQ ID NO: 485324 - DNA, 19 bp, Mus musculus
  siRNA target sequence for Pabpc5 (NM_053114.1,737-755).
ggctatctggcacatgaat

SEQ ID NO: 485325 - DNA, 19 bp, Mus musculus
  siRNA target sequence for Pabpc5 (NM_053114.1,767-785).
caataaccgccaggtatat

SEQ ID NO: 485326 - DNA, 19 bp, Mus musculus
  siRNA target sequence for Pabpc5 (NM_053114.1,847-865).
catttaccaatgttttcgt

SEQ ID NO: 485327 - DNA, 19 bp, Mus musculus
  siRNA target sequence for Pabpc5 (NM_053114.1,926-944).
gccaactgagagtgttaaa

SEQ ID NO: 485328 - DNA, 19 bp, Mus musculus
  siRNA target sequence for Pabpc5 (NM_053114.1,928-946).
caactgagagtgttaaagt

SEQ ID NO: 485329 - DNA, 19 bp, Mus musculus
  siRNA target sequence for Pabpc5 (NM_053114.1,935-953).
gagtgttaaagtcataaga

SEQ ID NO: 485330 - DNA, 19 bp, Mus musculus
  siRNA target sequence for Pabpc5 (NM_053114.1,1156-1174).
caggagtgcctatctatat

SEQ ID NO: 485331 - DNA, 19 bp, Mus musculus
  siRNA target sequence for Pabpc5 (NM_053114.1,1165-1183).
ctatctatattaagaactt

SEQ ID NO: 485332 - DNA, 19 bp, Mus musculus
  siRNA target sequence for Pabpc5 (NM_053114.1,1181-1199).
cttggatgagaccatcaat

SEQ ID NO: 485333 - DNA, 19 bp, Mus musculus
  siRNA target sequence for Pabpc5 (NM_053114.1,1192-1210).
ccatcaatgatgagaaact

SEQ ID NO: 485334 - DNA, 19 bp, Mus musculus
  siRNA target sequence for Pabpn1 (NM_019402.1,454-472).
gctggcccagtgatcatgt

SEQ ID NO: 485335 - DNA, 19 bp, Mus musculus
  siRNA target sequence for Pabpn1 (NM_019402.1,493-511).
gctgatgcccgctctatct

SEQ ID NO: 485336 - DNA, 19 bp, Mus musculus
  siRNA target sequence for Pabpn1 (NM_019402.1,494-512).
ctgatgcccgctctatcta

SEQ ID NO: 485337 - DNA, 19 bp, Mus musculus
  siRNA target sequence for Pabpn1 (NM_019402.1,578-596).
cagtcaaccgtgttactat

SEQ ID NO: 485338 - DNA, 19 bp, Mus musculus
  siRNA target sequence for Pabpn1 (NM_019402.1,593-611).
ctatactctgtgacaaatt

SEQ ID NO: 485339 - DNA, 19 bp, Mus musculus
  siRNA target sequence for Pabpn1 (NM_019402.1,619-637).
catcccaaagggtttgcat

SEQ ID NO: 485340 - DNA, 19 bp, Mus musculus
  siRNA target sequence for Pabpn1 (NM_019402.1,622-640).
cccaaagggtttgcatata

SEQ ID NO: 485341 - DNA, 19 bp, Mus musculus
  siRNA target sequence for Pabpn1 (NM_019402.1,624-642).
caaagggtttgcatatata

SEQ ID NO: 485342 - DNA, 19 bp, Mus musculus
  siRNA target sequence for Pabpn1 (NM_019402.1,643-661).
gagttctcggacaaagagt

SEQ ID NO: 485343 - DNA, 19 bp, Mus musculus
  siRNA target sequence for Pabpn1 (NM_019402.1,790-808).
gcccggactaccaactaca

SEQ ID NO: 485344 - DNA, 19 bp, Mus musculus
  siRNA target sequence for Pabpn1 (NM_019402.1,812-830).
gctcccgatctcgattcta

SEQ ID NO: 485345 - DNA, 19 bp, Mus musculus
  siRNA target sequence for Pabpn1 (NM_019402.1,823-841).
cgattctacagtggtttta

SEQ ID NO: 485346 - DNA, 19 bp, Mus musculus
  siRNA target sequence for Pmscl2 (NM_016699.1,101-119).
gatgcagacagcttcgtaa

SEQ ID NO: 485347 - DNA, 19 bp, Mus musculus
  siRNA target sequence for Pmscl2 (NM_016699.1,104-122).
gcagacagcttcgtaaagt

SEQ ID NO: 485348 - DNA, 19 bp, Mus musculus
  siRNA target sequence for Pmscl2 (NM_016699.1,180-198).
gtgacgagtatgattttta

SEQ ID NO: 485349 - DNA, 19 bp, Mus musculus
  siRNA target sequence for Pmscl2 (NM_016699.1,182-200).
gacgagtatgatttttaca

SEQ ID NO: 485350 - DNA, 19 bp, Mus musculus
  siRNA target sequence for Pmscl2 (NM_016699.1,184-202).
cgagtatgatttttacaga

SEQ ID NO: 485351 - DNA, 19 bp, Mus musculus
  siRNA target sequence for Pmscl2 (NM_016699.1,185-203).
gagtatgatttttacagaa

SEQ ID NO: 485352 - DNA, 19 bp, Mus musculus
  siRNA target sequence for Pmscl2 (NM_016699.1,258-276).
gcatgagtcgggtaatgca

SEQ ID NO: 485353 - DNA, 19 bp, Mus musculus
  siRNA target sequence for Pmscl2 (NM_016699.1,285-303).
gctgtcgcagcaacatcaa

SEQ ID NO: 485354 - DNA, 19 bp, Mus musculus
  siRNA target sequence for Pmscl2 (NM_016699.1,286-304).
ctgtcgcagcaacatcaaa

SEQ ID NO: 485355 - DNA, 19 bp, Mus musculus
  siRNA target sequence for Pmscl2 (NM_016699.1,288-306).
gtcgcagcaacatcaaaga

SEQ ID NO: 485356 - DNA, 19 bp, Mus musculus
  siRNA target sequence for Pmscl2 (NM_016699.1,308-326).
cgaagtaaagtgactgaat

SEQ ID NO: 485357 - DNA, 19 bp, Mus musculus
  siRNA target sequence for Pmscl2 (NM_016699.1,328-346).
ggaggacaagtttgattta

SEQ ID NO: 485358 - DNA, 19 bp, Mus musculus
  siRNA target sequence for Pmscl2 (NM_016699.1,353-371).
gataccaatgacgtgatat

SEQ ID NO: 485359 - DNA, 19 bp, Mus musculus
  siRNA target sequence for Pmscl2 (NM_016699.1,528-546).
gactgctgcatgcaaaaaa

SEQ ID NO: 485360 - DNA, 19 bp, Mus musculus
  siRNA target sequence for Pmscl2 (NM_016699.1,572-590).
cgagagaagatcgacaatt

SEQ ID NO: 485361 - DNA, 19 bp, Mus musculus
  siRNA target sequence for Pmscl2 (NM_016699.1,575-593).
gagaagatcgacaattcta

SEQ ID NO: 485362 - DNA, 19 bp, Mus musculus
  siRNA target sequence for Pmscl2 (NM_016699.1,600-618).
catttctcccgaagatctt

SEQ ID NO: 485363 - DNA, 19 bp, Mus musculus
  siRNA target sequence for Pmscl2 (NM_016699.1,646-664).
ccctctggctctctcaaaa

SEQ ID NO: 485364 - DNA, 19 bp, Mus musculus
  siRNA target sequence for Pmscl2 (NM_016699.1,774-792).
cacacccttaccagtatga

SEQ ID NO: 485365 - DNA, 19 bp, Mus musculus
  siRNA target sequence for Pmscl2 (NM_016699.1,831-849).
ggccgaagccccagttgta

SEQ ID NO: 485366 - DNA, 19 bp, Mus musculus
  siRNA target sequence for Pmscl2 (NM_016699.1,1005-1023).
ccacccggacagaagactt

SEQ ID NO: 485367 - DNA, 19 bp, Mus musculus
  siRNA target sequence for Pmscl2 (NM_016699.1,1009-1027).
ccggacagaagacttcatt

SEQ ID NO: 485368 - DNA, 19 bp, Mus musculus
  siRNA target sequence for Pmscl2 (NM_016699.1,1043-1061).
cttcgcagtgacatgtaca

SEQ ID NO: 485369 - DNA, 19 bp, Mus musculus
  siRNA target sequence for Pmscl2 (NM_016699.1,1080-1098).
cggacccagccatcgttaa

SEQ ID NO: 485370 - DNA, 19 bp, Mus musculus
  siRNA target sequence for Pmscl2 (NM_016699.1,1138-1156).
gaaagacttcggactctat

SEQ ID NO: 485371 - DNA, 19 bp, Mus musculus
  siRNA target sequence for Pmscl2 (NM_016699.1,1149-1167).
gactctatgtggtgaacat

SEQ ID NO: 485372 - DNA, 19 bp, Mus musculus
  siRNA target sequence for Pmscl2 (NM_016699.1,1242-1260).
gcggtgtggaatcaaacaa

SEQ ID NO: 485373 - DNA, 19 bp, Mus musculus
  siRNA target sequence for Pmscl2 (NM_016699.1,1323-1341).
gggatgacacccattacct

SEQ ID NO: 485374 - DNA, 19 bp, Mus musculus
  siRNA target sequence for Pmscl2 (NM_016699.1,1431-1449).
gggacatctgcctcaagaa

SEQ ID NO: 485375 - DNA, 19 bp, Mus musculus
  siRNA target sequence for Pmscl2 (NM_016699.1,1490-1508).
ctctatcgaaagcaaaaga

SEQ ID NO: 485376 - DNA, 19 bp, Mus musculus
  siRNA target sequence for Pmscl2 (NM_016699.1,1588-1606).
gagctacggatatgttcta

SEQ ID NO: 485377 - DNA, 19 bp, Mus musculus
  siRNA target sequence for Pmscl2 (NM_016699.1,1594-1612).
cggatatgttctaccaaat

SEQ ID NO: 485378 - DNA, 19 bp, Mus musculus
  siRNA target sequence for Pmscl2 (NM_016699.1,1596-1614).
gatatgttctaccaaatca

SEQ ID NO: 485379 - DNA, 19 bp, Mus musculus
  siRNA target sequence for Pmscl2 (NM_016699.1,1607-1625).
ccaaatcacatgatgctaa

SEQ ID NO: 485380 - DNA, 19 bp, Mus musculus
  siRNA target sequence for Pmscl2 (NM_016699.1,1648-1666).
ggagcctcaaggcatcata

SEQ ID NO: 485381 - DNA, 19 bp, Mus musculus
  siRNA target sequence for Pmscl2 (NM_016699.1,1652-1670).
cctcaaggcatcatagctt

SEQ ID NO: 485382 - DNA, 19 bp, Mus musculus
  siRNA target sequence for Pmscl2 (NM_016699.1,1697-1715).
cggcagcagatcaatgaga

SEQ ID NO: 485383 - DNA, 19 bp, Mus musculus
  siRNA target sequence for Pmscl2 (NM_016699.1,1806-1824).
ccgagagattggagaatga

SEQ ID NO: 485384 - DNA, 19 bp, Mus musculus
  siRNA target sequence for Pmscl2 (NM_016699.1,1807-1825).
cgagagattggagaatgat

SEQ ID NO: 485385 - DNA, 19 bp, Mus musculus
  siRNA target sequence for Pmscl2 (NM_016699.1,1812-1830).
gattggagaatgatctctt

SEQ ID NO: 485386 - DNA, 19 bp, Mus musculus
  siRNA target sequence for Pmscl2 (NM_016699.1,1848-1866).
cccacgcccctccagataa

SEQ ID NO: 485387 - DNA, 19 bp, Mus musculus
  siRNA target sequence for Pmscl2 (NM_016699.1,1850-1868).
cacgcccctccagataact

SEQ ID NO: 485388 - DNA, 19 bp, Mus musculus
  siRNA target sequence for Pmscl2 (NM_016699.1,1890-1908).
ggaccctgccacttcagaa

SEQ ID NO: 485389 - DNA, 19 bp, Mus musculus
  siRNA target sequence for Pmscl2 (NM_016699.1,1909-1927).
gcagccaagcctattcact

SEQ ID NO: 485390 - DNA, 19 bp, Mus musculus
  siRNA target sequence for Pmscl2 (NM_016699.1,1986-2004).
ctctgttcagtgaacctaa

SEQ ID NO: 485391 - DNA, 19 bp, Mus musculus
  siRNA target sequence for Pmscl2 (NM_016699.1,1990-2008).
gttcagtgaacctaacact

SEQ ID NO: 485392 - DNA, 19 bp, Mus musculus
  siRNA target sequence for Pmscl2 (NM_016699.1,2044-2062).
gaaaaaagcccagaacata

SEQ ID NO: 485393 - DNA, 19 bp, Mus musculus
  siRNA target sequence for Pmscl2 (NM_016699.1,2125-2143).
ctctcaagcagcaaagttt

SEQ ID NO: 485394 - DNA, 19 bp, Mus musculus
  siRNA target sequence for Pmscl2 (NM_016699.1,2127-2145).
ctcaagcagcaaagtttga

SEQ ID NO: 485395 - DNA, 19 bp, Mus musculus
  siRNA target sequence for Pmscl2 (NM_016699.1,2151-2169).
cttcgaaaatctatgaaat

SEQ ID NO: 485396 - DNA, 19 bp, Mus musculus
  siRNA target sequence for Pmscl2 (NM_016699.1,2333-2351).
ctagaaaatgctactaaga

SEQ ID NO: 485397 - DNA, 19 bp, Mus musculus
  siRNA target sequence for Pmscl2 (NM_016699.1,2456-2474).
gacttcagtccctatgact

SEQ ID NO: 485398 - DNA, 19 bp, Mus musculus
  siRNA target sequence for Pmscl2 (NM_016699.1,2497-2515).
ctttgctggggacagtaaa

SEQ ID NO: 485399 - DNA, 19 bp, Mus musculus
  siRNA target sequence for Pmscl2 (NM_016699.1,2551-2569).
ggcaccttccggcaagaaa

SEQ ID NO: 485400 - DNA, 19 bp, Mus musculus
  siRNA target sequence for Pnma3 (NM_153169.1,160-178).
ctgtagtgaggatgagttt

SEQ ID NO: 485401 - DNA, 19 bp, Mus musculus
  siRNA target sequence for Pnma3 (NM_153169.1,223-241).
gatcatcggcaggatgttt

SEQ ID NO: 485402 - DNA, 19 bp, Mus musculus
  siRNA target sequence for Pnma3 (NM_153169.1,274-292).
ggaacttgcacgtgatttt

SEQ ID NO: 485403 - DNA, 19 bp, Mus musculus
  siRNA target sequence for Pnma3 (NM_153169.1,278-296).
cttgcacgtgattttgact

SEQ ID NO: 485404 - DNA, 19 bp, Mus musculus
  siRNA target sequence for Pnma3 (NM_153169.1,304-322).
ggtgcccagggaaatagaa

SEQ ID NO: 485405 - DNA, 19 bp, Mus musculus
  siRNA target sequence for Pnma3 (NM_153169.1,380-398).
cttaatagactgaatcact

SEQ ID NO: 485406 - DNA, 19 bp, Mus musculus
  siRNA target sequence for Pnma3 (NM_153169.1,387-405).
gactgaatcacttcttaga

SEQ ID NO: 485407 - DNA, 19 bp, Mus musculus
  siRNA target sequence for Pnma3 (NM_153169.1,417-435).
gaacagtgtcagacatgaa

SEQ ID NO: 485408 - DNA, 19 bp, Mus musculus
  siRNA target sequence for Pnma3 (NM_153169.1,446-464).
gggacacactctaatcatt

SEQ ID NO: 485409 - DNA, 19 bp, Mus musculus
  siRNA target sequence for Pnma3 (NM_153169.1,448-466).
gacacactctaatcattca

SEQ ID NO: 485410 - DNA, 19 bp, Mus musculus
  siRNA target sequence for Pnma3 (NM_153169.1,461-479).
cattcacctaccaaaacga

SEQ ID NO: 485411 - DNA, 19 bp, Mus musculus
  siRNA target sequence for Pnma3 (NM_153169.1,467-485).
cctaccaaaacgactatat

SEQ ID NO: 485412 - DNA, 19 bp, Mus musculus
  siRNA target sequence for Pnma3 (NM_153169.1,477-495).
cgactatatcagcagattt

SEQ ID NO: 485413 - DNA, 19 bp, Mus musculus
  siRNA target sequence for Pnma3 (NM_153169.1,529-547).
gcagcctctgctagaacaa

SEQ ID NO: 485414 - DNA, 19 bp, Mus musculus
  siRNA target sequence for Pnma3 (NM_153169.1,550-568).
gttgtaccgagaactaaga

SEQ ID NO: 485415 - DNA, 19 bp, Mus musculus
  siRNA target sequence for Pnma3 (NM_153169.1,556-574).
ccgagaactaagagtcttt

SEQ ID NO: 485416 - DNA, 19 bp, Mus musculus
  siRNA target sequence for Pnma3 (NM_153169.1,557-575).
cgagaactaagagtctttt

SEQ ID NO: 485417 - DNA, 19 bp, Mus musculus
  siRNA target sequence for Pnma3 (NM_153169.1,599-617).
gggttattggccttcgatt

SEQ ID NO: 485418 - DNA, 19 bp, Mus musculus
  siRNA target sequence for Pnma3 (NM_153169.1,656-674).
caggtacctgaggtagaaa

SEQ ID NO: 485419 - DNA, 19 bp, Mus musculus
  siRNA target sequence for Pnma3 (NM_153169.1,685-703).
gctgatggaatgcttaaga

SEQ ID NO: 485420 - DNA, 19 bp, Mus musculus
  siRNA target sequence for Pnma3 (NM_153169.1,708-726).
ctgctctacaggttgtcaa

SEQ ID NO: 485421 - DNA, 19 bp, Mus musculus
  siRNA target sequence for Pnma3 (NM_153169.1,739-757).
caataacgctgccattaca

SEQ ID NO: 485422 - DNA, 19 bp, Mus musculus
  siRNA target sequence for Pnma3 (NM_153169.1,818-836).
gcccagctgaagttttgca

SEQ ID NO: 485423 - DNA, 19 bp, Mus musculus
  siRNA target sequence for Pnma3 (NM_153169.1,907-925).
cctagagaaaaatgcaata

SEQ ID NO: 485424 - DNA, 19 bp, Mus musculus
  siRNA target sequence for Pnma3 (NM_153169.1,948-966).
cccgcctgaaacgaatttt

SEQ ID NO: 485425 - DNA, 19 bp, Mus musculus
  siRNA target sequence for Pnma3 (NM_153169.1,949-967).
ccgcctgaaacgaatttta

SEQ ID NO: 485426 - DNA, 19 bp, Mus musculus
  siRNA target sequence for Pnma3 (NM_153169.1,1135-1153).
cccaagtccctctaacata

SEQ ID NO: 485427 - DNA, 19 bp, Mus musculus
  siRNA target sequence for Pnma3 (NM_153169.1,1158-1176).
gtgaggagagagaactatt

SEQ ID NO: 485428 - DNA, 19 bp, Mus musculus
  siRNA target sequence for Pnma3 (NM_153169.1,1268-1286).
ggtgtgcccagggatgatt

SEQ ID NO: 485429 - DNA, 19 bp, Mus musculus
  siRNA target sequence for Pnma3 (NM_153169.1,1273-1291).
gcccagggatgattctcaa

SEQ ID NO: 485430 - DNA, 19 bp, Mus musculus
  siRNA target sequence for Pnma3 (NM_153169.1,1313-1331).
gacacattctgctatagtt

SEQ ID NO: 485431 - DNA, 19 bp, Mus musculus
  siRNA target sequence for Pnma3 (NM_153169.1,1379-1397).
cggaccttggtgaaacaga

SEQ ID NO: 485432 - DNA, 19 bp, Mus musculus
  siRNA target sequence for Pnma3 (NM_153169.1,1380-1398).
ggaccttggtgaaacagaa

SEQ ID NO: 485433 - DNA, 19 bp, Mus musculus
  siRNA target sequence for Ppil4 (NM_026141.2,64-82).
gtggtcatcgacttgtaca

SEQ ID NO: 485434 - DNA, 19 bp, Mus musculus
  siRNA target sequence for Ppil4 (NM_026141.2,159-177).
caatgtacagagggatttt

SEQ ID NO: 485435 - DNA, 19 bp, Mus musculus
  siRNA target sequence for Ppil4 (NM_026141.2,212-230).
gcggaggagagtctatatt

SEQ ID NO: 485436 - DNA, 19 bp, Mus musculus
  siRNA target sequence for Ppil4 (NM_026141.2,244-262).
ggtgatcaagcaagctttt

SEQ ID NO: 485437 - DNA, 19 bp, Mus musculus
  siRNA target sequence for Ppil4 (NM_026141.2,245-263).
gtgatcaagcaagcttttt

SEQ ID NO: 485438 - DNA, 19 bp, Mus musculus
  siRNA target sequence for Ppil4 (NM_026141.2,339-357).
gcacgggtctcagtttctt

SEQ ID NO: 485439 - DNA, 19 bp, Mus musculus
  siRNA target sequence for Ppil4 (NM_026141.2,340-358).
cacgggtctcagtttctta

SEQ ID NO: 485440 - DNA, 19 bp, Mus musculus
  siRNA target sequence for Ppil4 (NM_026141.2,343-361).
gggtctcagtttcttatca

SEQ ID NO: 485441 - DNA, 19 bp, Mus musculus
  siRNA target sequence for Ppil4 (NM_026141.2,345-363).
gtctcagtttcttatcact

SEQ ID NO: 485442 - DNA, 19 bp, Mus musculus
  siRNA target sequence for Ppil4 (NM_026141.2,365-383).
caggagaaaacttagatta

SEQ ID NO: 485443 - DNA, 19 bp, Mus musculus
  siRNA target sequence for Ppil4 (NM_026141.2,368-386).
gagaaaacttagattacct

SEQ ID NO: 485444 - DNA, 19 bp, Mus musculus
  siRNA target sequence for Ppil4 (NM_026141.2,390-408).
cggtgttcatacagtgttt

SEQ ID NO: 485445 - DNA, 19 bp, Mus musculus
  siRNA target sequence for Ppil4 (NM_026141.2,419-437).
cagaaggcatggacatagt

SEQ ID NO: 485446 - DNA, 19 bp, Mus musculus
  siRNA target sequence for Ppil4 (NM_026141.2,424-442).
ggcatggacatagttaaga

SEQ ID NO: 485447 - DNA, 19 bp, Mus musculus
  siRNA target sequence for Ppil4 (NM_026141.2,465-483).
caaggattttgtaccatat

SEQ ID NO: 485448 - DNA, 19 bp, Mus musculus
  siRNA target sequence for Ppil4 (NM_026141.2,468-486).
ggattttgtaccatatcaa

SEQ ID NO: 485449 - DNA, 19 bp, Mus musculus
  siRNA target sequence for Ppil4 (NM_026141.2,487-505).
gatataaggataaatcata

SEQ ID NO: 485450 - DNA, 19 bp, Mus musculus
  siRNA target sequence for Ppil4 (NM_026141.2,510-528).
gattttagatgatccattt

SEQ ID NO: 485451 - DNA, 19 bp, Mus musculus
  siRNA target sequence for Ppil4 (NM_026141.2,529-547).
gatgaccctcctgatttat

SEQ ID NO: 485452 - DNA, 19 bp, Mus musculus
  siRNA target sequence for Ppil4 (NM_026141.2,532-550).
gaccctcctgatttattaa

SEQ ID NO: 485453 - DNA, 19 bp, Mus musculus
  siRNA target sequence for Ppil4 (NM_026141.2,560-578).
gatcacccgagcctacaaa

SEQ ID NO: 485454 - DNA, 19 bp, Mus musculus
  siRNA target sequence for Ppil4 (NM_026141.2,570-588).
gcctacaaaggaacaatta

SEQ ID NO: 485455 - DNA, 19 bp, Mus musculus
  siRNA target sequence for Ppil4 (NM_026141.2,867-885).
gtccctctgttatgctttt

SEQ ID NO: 485456 - DNA, 19 bp, Mus musculus
  siRNA target sequence for Ppil4 (NM_026141.2,919-937).
gcattcttcaaaatggata

SEQ ID NO: 485457 - DNA, 19 bp, Mus musculus
  siRNA target sequence for Ppil4 (NM_026141.2,920-938).
cattcttcaaaatggataa

SEQ ID NO: 485458 - DNA, 19 bp, Mus musculus
  siRNA target sequence for Ppil4 (NM_026141.2,933-951).
ggataatgtgcttatagat

SEQ ID NO: 485459 - DNA, 19 bp, Mus musculus
  siRNA target sequence for Ppil4 (NM_026141.2,1067-1085).
cagccaatttggttctgaa

SEQ ID NO: 485460 - DNA, 19 bp, Mus musculus
  siRNA target sequence for Ppil4 (NM_026141.2,1070-1088).
ccaatttggttctgaaaga

SEQ ID NO: 485461 - DNA, 19 bp, Mus musculus
  siRNA target sequence for Ppil4 (NM_026141.2,1071-1089).
caatttggttctgaaagaa

SEQ ID NO: 485462 - DNA, 19 bp, Mus musculus
  siRNA target sequence for Ppil4 (NM_026141.2,1098-1116).
gcccaaacaggatgcaaaa

SEQ ID NO: 485463 - DNA, 19 bp, Mus musculus
  siRNA target sequence for Ppil4 (NM_026141.2,1099-1117).
cccaaacaggatgcaaaat

SEQ ID NO: 485464 - DNA, 19 bp, Mus musculus
  siRNA target sequence for Ppil4 (NM_026141.2,1100-1118).
ccaaacaggatgcaaaata

SEQ ID NO: 485465 - DNA, 19 bp, Mus musculus
  siRNA target sequence for Ppil4 (NM_026141.2,1107-1125).
ggatgcaaaatatgatctt

SEQ ID NO: 485466 - DNA, 19 bp, Mus musculus
  siRNA target sequence for Ppil4 (NM_026141.2,1140-1158).
gggagaagactccaaatca

SEQ ID NO: 485467 - DNA, 19 bp, Mus musculus
  siRNA target sequence for Ppil4 (NM_026141.2,1249-1267).
cctaatcaggatatctaca

SEQ ID NO: 485468 - DNA, 19 bp, Mus musculus
  siRNA target sequence for Ppil4 (NM_026141.2,1372-1390).
gaaagggatggtcactata

SEQ ID NO: 485469 - DNA, 19 bp, Mus musculus
  siRNA target sequence for Ppil4 (NM_026141.2,1376-1394).
gggatggtcactatagcaa

SEQ ID NO: 485470 - DNA, 19 bp, Mus musculus
  siRNA target sequence for Ppil4 (NM_026141.2,1410-1428).
gtaccagacagaaccttat

SEQ ID NO: 485471 - DNA, 19 bp, Mus musculus
  siRNA target sequence for Ppil4 (NM_026141.2,1414-1432).
cagacagaaccttatgaga

SEQ ID NO: 485472 - DNA, 19 bp, Mus musculus
  siRNA target sequence for Ppil4 (NM_026141.2,1463-1481).
ggagtccaaagaaatccaa

SEQ ID NO: 485473 - DNA, 19 bp, Mus musculus
  siRNA target sequence for Ppil4 (NM_026141.2,1489-1507).
gaaaaatccaagtacagat

SEQ ID NO: 485474 - DNA, 19 bp, Mus musculus
  siRNA target sequence for Ppp1r1c (NM_033264.1,419-437).
caccaggatcaggaatcaa

SEQ ID NO: 485475 - DNA, 19 bp, Mus musculus
  siRNA target sequence for Ppp1r1c (NM_033264.1,421-439).
ccaggatcaggaatcaatt

SEQ ID NO: 485476 - DNA, 19 bp, Mus musculus
  siRNA target sequence for Ppp1r1c (NM_033264.1,466-484).
cctgcaagaggaggataaa

SEQ ID NO: 485477 - DNA, 19 bp, Mus musculus
  siRNA target sequence for Ppp1r1c (NM_033264.1,596-614).
gattctacaggcatagact

SEQ ID NO: 485478 - DNA, 19 bp, Mus musculus
  siRNA target sequence for Ppp1r1c (NM_033264.1,611-629).
gacttacatgggtttctaa

SEQ ID NO: 485479 - DNA, 19 bp, Mus musculus
  siRNA target sequence for Ppp1r1c (NM_033264.1,613-631).
cttacatgggtttctaatt

SEQ ID NO: 485480 - DNA, 19 bp, Mus musculus
  siRNA target sequence for Ppp1r1c (NM_033264.1,617-635).
catgggtttctaattaaca

SEQ ID NO: 485481 - DNA, 19 bp, Mus musculus
  siRNA target sequence for Ppp1r1c (NM_033264.1,654-672).
gggacaggatgatactctt

SEQ ID NO: 485482 - DNA, 19 bp, Mus musculus
  siRNA target sequence for Ppp1r1c (NM_033264.1,733-751).
cccccagatgtcatcctat

SEQ ID NO: 485483 - DNA, 19 bp, Mus musculus
  siRNA target sequence for Ppp1r1c (NM_033264.1,736-754).
ccagatgtcatcctatcaa

SEQ ID NO: 485484 - DNA, 19 bp, Mus musculus
  siRNA target sequence for Ppp1r1c (NM_033264.1,796-814).
ccacaacgtggatcaaact

SEQ ID NO: 485485 - DNA, 19 bp, Mus musculus
  siRNA target sequence for Ppp1r1c (NM_033264.1,852-870).
ggataccagagcaaaggtt

SEQ ID NO: 485486 - DNA, 19 bp, Mus musculus
  siRNA target sequence for Ppp1r1c (NM_033264.1,922-940).
cttgaagcgagataactct

SEQ ID NO: 485487 - DNA, 19 bp, Mus musculus
  siRNA target sequence for Ppp1r1c (NM_033264.1,928-946).
gcgagataactctagtatt

SEQ ID NO: 485488 - DNA, 19 bp, Mus musculus
  siRNA target sequence for Ppp1r1c (NM_033264.1,932-950).
gataactctagtattgata

SEQ ID NO: 485489 - DNA, 19 bp, Mus musculus
  siRNA target sequence for Ppp1r1c (NM_033264.1,967-985).
cagaatgcacccatttaga

SEQ ID NO: 485490 - DNA, 19 bp, Mus musculus
  siRNA target sequence for Ppp1r1c (NM_033264.1,969-987).
gaatgcacccatttagaga

SEQ ID NO: 485491 - DNA, 19 bp, Mus musculus
  siRNA target sequence for Ppp1r1c (NM_033264.1,984-1002).
gagatgacagacgaagtaa

SEQ ID NO: 485492 - DNA, 19 bp, Mus musculus
  siRNA target sequence for Ppp1r1c (NM_033264.1,989-1007).
gacagacgaagtaaatcaa

SEQ ID NO: 485493 - DNA, 19 bp, Mus musculus
  siRNA target sequence for Ppp1r1c (NM_033264.1,991-1009).
cagacgaagtaaatcaatt

SEQ ID NO: 485494 - DNA, 19 bp, Mus musculus
  siRNA target sequence for Ppp1r1c (NM_033264.1,993-1011).
gacgaagtaaatcaattga

SEQ ID NO: 485495 - DNA, 19 bp, Mus musculus
  siRNA target sequence for Ppp1r1c (NM_033264.1,996-1014).
gaagtaaatcaattgaaga

SEQ ID NO: 485496 - DNA, 19 bp, Mus musculus
  siRNA target sequence for Ppp1r1c (NM_033264.1,1101-1119).
gtaggctccaggaagacat

SEQ ID NO: 485497 - DNA, 19 bp, Mus musculus
  siRNA target sequence for Ppp1r1c (NM_033264.1,1128-1146).
gcaatgagacctataagaa

SEQ ID NO: 485498 - DNA, 19 bp, Mus musculus
  siRNA target sequence for Ppp1r1c (NM_033264.1,1172-1190).
gacagctcaggaagaactt

SEQ ID NO: 485499 - DNA, 19 bp, Mus musculus
  siRNA target sequence for Ppp1r1c (NM_033264.1,1300-1318).
gaccaagacggcaagtttt

SEQ ID NO: 485500 - DNA, 19 bp, Mus musculus
  siRNA target sequence for Ppp1r1c (NM_033264.1,1370-1388).
gctgggaaactgtccaaaa

SEQ ID NO: 485501 - DNA, 19 bp, Mus musculus
  siRNA target sequence for Ppp1r1c (NM_033264.1,1491-1509).
gctgtatggcctattcaga

SEQ ID NO: 485502 - DNA, 19 bp, Mus musculus
  siRNA target sequence for Ppp1r1c (NM_033264.1,1499-1517).
gcctattcagagaatggaa

SEQ ID NO: 485503 - DNA, 19 bp, Mus musculus
  siRNA target sequence for Ppp1r1c (NM_033264.1,1500-1518).
cctattcagagaatggaat

SEQ ID NO: 485504 - DNA, 19 bp, Mus musculus
  siRNA target sequence for Ppp1r1c (NM_033264.1,1589-1607).
cccggaagcatccttctta

SEQ ID NO: 485505 - DNA, 19 bp, Mus musculus
  siRNA target sequence for Ppp1r1c (NM_033264.1,1590-1608).
ccggaagcatccttcttaa

SEQ ID NO: 485506 - DNA, 19 bp, Mus musculus
  siRNA target sequence for Ppp1r1c (NM_033264.1,1643-1661).
ggaacgcctgcgatataca

SEQ ID NO: 485507 - DNA, 19 bp, Mus musculus
  siRNA target sequence for Ppp1r1c (NM_033264.1,1644-1662).
gaacgcctgcgatatacaa

SEQ ID NO: 485508 - DNA, 19 bp, Mus musculus
  siRNA target sequence for Ppp1r1c (NM_033264.1,2023-2041).
ctctccccagggatttgta

SEQ ID NO: 485509 - DNA, 19 bp, Mus musculus
  siRNA target sequence for Ppp1r1c (NM_033264.1,2058-2076).
cacagatgtccgtctatta

SEQ ID NO: 485510 - DNA, 19 bp, Mus musculus
  siRNA target sequence for Ppp1r1c (NM_033264.1,2060-2078).
cagatgtccgtctattact

SEQ ID NO: 485511 - DNA, 19 bp, Mus musculus
  siRNA target sequence for Ppp1r1c (NM_033264.1,2148-2166).
ctcagcggagtcagcaaat

SEQ ID NO: 485512 - DNA, 19 bp, Mus musculus
  siRNA target sequence for Ppp1r1c (NM_033264.1,2152-2170).
gcggagtcagcaaatacca

SEQ ID NO: 485513 - DNA, 19 bp, Mus musculus
  siRNA target sequence for Ppp1r1c (NM_033264.1,2439-2457).
gaatgcctgtgtactgtaa

SEQ ID NO: 485514 - DNA, 19 bp, Mus musculus
  siRNA target sequence for Ppp1r1c (NM_033264.1,2466-2484).
cgccaaaccctcagaacaa

SEQ ID NO: 485515 - DNA, 19 bp, Mus musculus
  siRNA target sequence for Ppp1r1c (NM_033264.1,2475-2493).
ctcagaacaacctaaggtt

SEQ ID NO: 485516 - DNA, 19 bp, Mus musculus
  siRNA target sequence for Ppp1r1c (NM_033264.1,2535-2553).
ccgctagttgcagaacaaa

SEQ ID NO: 485517 - DNA, 19 bp, Mus musculus
  siRNA target sequence for Ppp1r1c (NM_033264.1,2537-2555).
gctagttgcagaacaaact

SEQ ID NO: 485518 - DNA, 19 bp, Mus musculus
  siRNA target sequence for Pspc1 (NM_025682.1,182-200).
gcaagtacgtattgagaaa

SEQ ID NO: 485519 - DNA, 19 bp, Mus musculus
  siRNA target sequence for Pspc1 (NM_025682.1,183-201).
caagtacgtattgagaaaa

SEQ ID NO: 485520 - DNA, 19 bp, Mus musculus
  siRNA target sequence for Pspc1 (NM_025682.1,538-556).
cactggctgaaattgcaaa

SEQ ID NO: 485521 - DNA, 19 bp, Mus musculus
  siRNA target sequence for Pspc1 (NM_025682.1,594-612).
ctccgaattcgctttgcta

SEQ ID NO: 485522 - DNA, 19 bp, Mus musculus
  siRNA target sequence for Pspc1 (NM_025682.1,622-640).
cagccctaacggtcaagaa

SEQ ID NO: 485523 - DNA, 19 bp, Mus musculus
  siRNA target sequence for Pspc1 (NM_025682.1,627-645).
ctaacggtcaagaaccttt

SEQ ID NO: 485524 - DNA, 19 bp, Mus musculus
  siRNA target sequence for Pspc1 (NM_025682.1,810-828).
ggggcgttcttgctaacaa

SEQ ID NO: 485525 - DNA, 19 bp, Mus musculus
  siRNA target sequence for Pspc1 (NM_025682.1,812-830).
ggcgttcttgctaacaaca

SEQ ID NO: 485526 - DNA, 19 bp, Mus musculus
  siRNA target sequence for Pspc1 (NM_025682.1,813-831).
gcgttcttgctaacaacaa

SEQ ID NO: 485527 - DNA, 19 bp, Mus musculus
  siRNA target sequence for Pspc1 (NM_025682.1,910-928).
ctcaacagtaccataagga

SEQ ID NO: 485528 - DNA, 19 bp, Mus musculus
  siRNA target sequence for Pspc1 (NM_025682.1,952-970).
ctcaacctgggacatttga

SEQ ID NO: 485529 - DNA, 19 bp, Mus musculus
  siRNA target sequence for Pspc1 (NM_025682.1,1016-1034).
gcagcagcgggaacaagtt

SEQ ID NO: 485530 - DNA, 19 bp, Mus musculus
  siRNA target sequence for Pspc1 (NM_025682.1,1019-1037).
gcagcgggaacaagttgat

SEQ ID NO: 485531 - DNA, 19 bp, Mus musculus
  siRNA target sequence for Pspc1 (NM_025682.1,1020-1038).
cagcgggaacaagttgata

SEQ ID NO: 485532 - DNA, 19 bp, Mus musculus
  siRNA target sequence for Pspc1 (NM_025682.1,1022-1040).
gcgggaacaagttgataga

SEQ ID NO: 485533 - DNA, 19 bp, Mus musculus
  siRNA target sequence for Pspc1 (NM_025682.1,1023-1041).
cgggaacaagttgatagaa

SEQ ID NO: 485534 - DNA, 19 bp, Mus musculus
  siRNA target sequence for Pspc1 (NM_025682.1,1076-1094).
gatggaagcagctagacat

SEQ ID NO: 485535 - DNA, 19 bp, Mus musculus
  siRNA target sequence for Pspc1 (NM_025682.1,1090-1108).
gacatgaacaccagttaat

SEQ ID NO: 485536 - DNA, 19 bp, Mus musculus
  siRNA target sequence for Pspc1 (NM_025682.1,1109-1127).
gctaatgaggcaagatcta

SEQ ID NO: 485537 - DNA, 19 bp, Mus musculus
  siRNA target sequence for Pspc1 (NM_025682.1,1220-1238).
gcatcgtcgtcgtgaagaa

SEQ ID NO: 485538 - DNA, 19 bp, Mus musculus
  siRNA target sequence for Pspc1 (NM_025682.1,1224-1242).
cgtcgtcgtgaagaagaaa

SEQ ID NO: 485539 - DNA, 19 bp, Mus musculus
  siRNA target sequence for Pspc1 (NM_025682.1,1225-1243).
gtcgtcgtgaagaagaaat

SEQ ID NO: 485540 - DNA, 19 bp, Mus musculus
  siRNA target sequence for Pspc1 (NM_025682.1,1289-1307).
cggctttaaaccaaactat

SEQ ID NO: 485541 - DNA, 19 bp, Mus musculus
  siRNA target sequence for Pspc1 (NM_025682.1,1304-1322).
ctatatggaaaatagagaa

SEQ ID NO: 485542 - DNA, 19 bp, Mus musculus
  siRNA target sequence for Pspc1 (NM_025682.1,1346-1364).
gggtccccgtggagcaata

SEQ ID NO: 485543 - DNA, 19 bp, Mus musculus
  siRNA target sequence for Pspc1 (NM_025682.1,1350-1368).
ccccgtggagcaataaaca

SEQ ID NO: 485544 - DNA, 19 bp, Mus musculus
  siRNA target sequence for Pspc1 (NM_025682.1,1351-1369).
cccgtggagcaataaacat

SEQ ID NO: 485545 - DNA, 19 bp, Mus musculus
  siRNA target sequence for Pspc1 (NM_025682.1,1416-1434).
ccaatgatgggtatgaata

SEQ ID NO: 485546 - DNA, 19 bp, Mus musculus
  siRNA target sequence for Pspc1 (NM_025682.1,1417-1435).
caatgatgggtatgaatat

SEQ ID NO: 485547 - DNA, 19 bp, Mus musculus
  siRNA target sequence for Pspc1 (NM_025682.1,1536-1554).
ggcgcagtgcacaatgata

SEQ ID NO: 485548 - DNA, 19 bp, Mus musculus
  siRNA target sequence for Pspc1 (NM_025682.1,1584-1602).
ggttcacccatgggaaata

SEQ ID NO: 485549 - DNA, 19 bp, Mus musculus
  siRNA target sequence for Qk (NM_021881.1,680-698).
cgaagcccaccccagatta

SEQ ID NO: 485550 - DNA, 19 bp, Mus musculus
  siRNA target sequence for Qk (NM_021881.1,681-699).
gaagcccaccccagattat

SEQ ID NO: 485551 - DNA, 19 bp, Mus musculus
  siRNA target sequence for Qk (NM_021881.1,776-794).
ggctgctggacgaagaaat

SEQ ID NO: 485552 - DNA, 19 bp, Mus musculus
  siRNA target sequence for Qk (NM_021881.1,800-818).
gagtacggaaagacatgta

SEQ ID NO: 485553 - DNA, 19 bp, Mus musculus
  siRNA target sequence for Qk (NM_021881.1,802-820).
gtacggaaagacatgtaca

SEQ ID NO: 485554 - DNA, 19 bp, Mus musculus
  siRNA target sequence for Qk (NM_021881.1,816-834).
gtacaatgacacgttaaat

SEQ ID NO: 485555 - DNA, 19 bp, Mus musculus
  siRNA target sequence for Qk (NM_021881.1,870-888).
cgcggtgggacccattgtt

SEQ ID NO: 485556 - DNA, 19 bp, Mus musculus
  siRNA target sequence for Qk (NM_021881.1,872-890).
cggtgggacccattgttca

SEQ ID NO: 485557 - DNA, 19 bp, Mus musculus
  siRNA target sequence for Qk (NM_021881.1,878-896).
gacccattgttcagttaca

SEQ ID NO: 485558 - DNA, 19 bp, Mus musculus
  siRNA target sequence for Qk (NM_021881.1,889-907).
cagttacaagagaaacttt

SEQ ID NO: 485559 - DNA, 19 bp, Mus musculus
  siRNA target sequence for Qk (NM_021881.1,965-983).
gaggacttacagctaaaca

SEQ ID NO: 485560 - DNA, 19 bp, Mus musculus
  siRNA target sequence for Qk (NM_021881.1,968-986).
gacttacagctaaacaact

SEQ ID NO: 485561 - DNA, 19 bp, Mus musculus
  siRNA target sequence for Qk (NM_021881.1,991-1009).
gcagaaacgggatgtaaaa

SEQ ID NO: 485562 - DNA, 19 bp, Mus musculus
  siRNA target sequence for Qk (NM_021881.1,992-1010).
cagaaacgggatgtaaaat

SEQ ID NO: 485563 - DNA, 19 bp, Mus musculus
  siRNA target sequence for Qk (NM_021881.1,998-1016).
cgggatgtaaaataatggt

SEQ ID NO: 485564 - DNA, 19 bp, Mus musculus
  siRNA target sequence for Qk (NM_021881.1,1027-1045).
ggctcaatgagggataaaa

SEQ ID NO: 485565 - DNA, 19 bp, Mus musculus
  siRNA target sequence for Qk (NM_021881.1,1072-1090).
cccaattgggagcatctaa

SEQ ID NO: 485566 - DNA, 19 bp, Mus musculus
  siRNA target sequence for Qk (NM_021881.1,1083-1101).
gcatctaaatgaagactta

SEQ ID NO: 485567 - DNA, 19 bp, Mus musculus
  siRNA target sequence for Qk (NM_021881.1,1096-1114).
gacttacatgtactaatca

SEQ ID NO: 485568 - DNA, 19 bp, Mus musculus
  siRNA target sequence for Qk (NM_021881.1,1098-1116).
cttacatgtactaatcact

SEQ ID NO: 485569 - DNA, 19 bp, Mus musculus
  siRNA target sequence for Qk (NM_021881.1,1152-1170).
gaagagagcggttgaagaa

SEQ ID NO: 485570 - DNA, 19 bp, Mus musculus
  siRNA target sequence for Qk (NM_021881.1,1227-1245).
gctgatggagcttgcaatt

SEQ ID NO: 485571 - DNA, 19 bp, Mus musculus
  siRNA target sequence for Qk (NM_021881.1,1318-1336).
gctgctccaaggatcatca

SEQ ID NO: 485572 - DNA, 19 bp, Mus musculus
  siRNA target sequence for Qk (NM_021881.1,1383-1401).
gccagctggccctaccata

SEQ ID NO: 485573 - DNA, 19 bp, Mus musculus
  siRNA target sequence for Qk (NM_021881.1,1385-1403).
cagctggccctaccataat

SEQ ID NO: 485574 - DNA, 19 bp, Mus musculus
  siRNA target sequence for Qk (NM_021881.1,1394-1412).
ctaccataatgcctttgat

SEQ ID NO: 485575 - DNA, 19 bp, Mus musculus
  siRNA target sequence for Qk (NM_021881.1,1404-1422).
gcctttgatcagacaaata

SEQ ID NO: 485576 - DNA, 19 bp, Mus musculus
  siRNA target sequence for Qk (NM_021881.1,1406-1424).
ctttgatcagacaaataca

SEQ ID NO: 485577 - DNA, 19 bp, Mus musculus
  siRNA target sequence for Qk (NM_021881.1,1483-1501).
cctgaagctgggttaatct

SEQ ID NO: 485578 - DNA, 19 bp, Mus musculus
  siRNA target sequence for Qk (NM_021881.1,1484-1502).
ctgaagctgggttaatcta

SEQ ID NO: 485579 - DNA, 19 bp, Mus musculus
  siRNA target sequence for Qk (NM_021881.1,1538-1556).
ctacatcaatccttgagta

SEQ ID NO: 485580 - DNA, 19 bp, Mus musculus
  siRNA target sequence for Qk (NM_021881.1,1576-1594).
gtgttagagtggattgaaa

SEQ ID NO: 485581 - DNA, 19 bp, Mus musculus
  siRNA target sequence for Qk (NM_021881.1,1596-1614).
gccagtcatgcctgatatt

SEQ ID NO: 485582 - DNA, 19 bp, Mus musculus
  siRNA target sequence for Qk (NM_021881.1,1597-1615).
ccagtcatgcctgatattt

SEQ ID NO: 485583 - DNA, 19 bp, Mus musculus
  siRNA target sequence for R3hdm (NM_181750.1,412-430).
gaggatgtctgatattgtt

SEQ ID NO: 485584 - DNA, 19 bp, Mus musculus
  siRNA target sequence for R3hdm (NM_181750.1,414-432).
ggatgtctgatattgttat

SEQ ID NO: 485585 - DNA, 19 bp, Mus musculus
  siRNA target sequence for R3hdm (NM_181750.1,418-436).
gtctgatattgttattata

SEQ ID NO: 485586 - DNA, 19 bp, Mus musculus
  siRNA target sequence for R3hdm (NM_181750.1,447-465).
ctgaaacaatgaaggattt

SEQ ID NO: 485587 - DNA, 19 bp, Mus musculus
  siRNA target sequence for R3hdm (NM_181750.1,482-500).
gatacaaccagagttgaaa

SEQ ID NO: 485588 - DNA, 19 bp, Mus musculus
  siRNA target sequence for R3hdm (NM_181750.1,515-533).
gaaaactatgggaagattt

SEQ ID NO: 485589 - DNA, 19 bp, Mus musculus
  siRNA target sequence for R3hdm (NM_181750.1,529-547).
gatttcggcagagaagaat

SEQ ID NO: 485590 - DNA, 19 bp, Mus musculus
  siRNA target sequence for R3hdm (NM_181750.1,551-569).
cattgtattgacaacaata

SEQ ID NO: 485591 - DNA, 19 bp, Mus musculus
  siRNA target sequence for R3hdm (NM_181750.1,599-617).
ggacagacaggaaaaaggt

SEQ ID NO: 485592 - DNA, 19 bp, Mus musculus
  siRNA target sequence for R3hdm (NM_181750.1,608-626).
ggaaaaaggtctaagtcaa

SEQ ID NO: 485593 - DNA, 19 bp, Mus musculus
  siRNA target sequence for R3hdm (NM_181750.1,618-636).
ctaagtcaagctcaaagtt

SEQ ID NO: 485594 - DNA, 19 bp, Mus musculus
  siRNA target sequence for R3hdm (NM_181750.1,624-642).
caagctcaaagttaaagct

SEQ ID NO: 485595 - DNA, 19 bp, Mus musculus
  siRNA target sequence for R3hdm (NM_181750.1,680-698).
ccccctgcagcagagatat

SEQ ID NO: 485596 - DNA, 19 bp, Mus musculus
  siRNA target sequence for R3hdm (NM_181750.1,722-740).
cagatacagttaacacaat

SEQ ID NO: 485597 - DNA, 19 bp, Mus musculus
  siRNA target sequence for R3hdm (NM_181750.1,730-748).
gttaacacaatcatttgaa

SEQ ID NO: 485598 - DNA, 19 bp, Mus musculus
  siRNA target sequence for R3hdm (NM_181750.1,735-753).
cacaatcatttgaaaaaga

SEQ ID NO: 485599 - DNA, 19 bp, Mus musculus
  siRNA target sequence for R3hdm (NM_181750.1,806-824).
cccagaaaaatgttatcaa

SEQ ID NO: 485600 - DNA, 19 bp, Mus musculus
  siRNA target sequence for R3hdm (NM_181750.1,932-950).
gaacaagaaattttagatt

SEQ ID NO: 485601 - DNA, 19 bp, Mus musculus
  siRNA target sequence for R3hdm (NM_181750.1,965-983).
gagtccccacgtaagaagt

SEQ ID NO: 485602 - DNA, 19 bp, Mus musculus
  siRNA target sequence for R3hdm (NM_181750.1,967-985).
gtccccacgtaagaagttt

SEQ ID NO: 485603 - DNA, 19 bp, Mus musculus
  siRNA target sequence for R3hdm (NM_181750.1,1041-1059).
gattagaccacaatgttga

SEQ ID NO: 485604 - DNA, 19 bp, Mus musculus
  siRNA target sequence for R3hdm (NM_181750.1,1067-1085).
gggaagtctgtcatagtga

SEQ ID NO: 485605 - DNA, 19 bp, Mus musculus
  siRNA target sequence for R3hdm (NM_181750.1,1104-1122).
gaatacctgatcagaaatt

SEQ ID NO: 485606 - DNA, 19 bp, Mus musculus
  siRNA target sequence for R3hdm (NM_181750.1,1151-1169).
gaagactttcagaaacgat

SEQ ID NO: 485607 - DNA, 19 bp, Mus musculus
  siRNA target sequence for R3hdm (NM_181750.1,1160-1178).
cagaaacgatacatcctta

SEQ ID NO: 485608 - DNA, 19 bp, Mus musculus
  siRNA target sequence for R3hdm (NM_181750.1,1180-1198).
gagagataactctagcttt

SEQ ID NO: 485609 - DNA, 19 bp, Mus musculus
  siRNA target sequence for R3hdm (NM_181750.1,1284-1302).
gagctagagaccgaatatt

SEQ ID NO: 485610 - DNA, 19 bp, Mus musculus
  siRNA target sequence for R3hdm (NM_181750.1,1286-1304).
gctagagaccgaatatttt

SEQ ID NO: 485611 - DNA, 19 bp, Mus musculus
  siRNA target sequence for R3hdm (NM_181750.1,1295-1313).
cgaatattttcccaagatt

SEQ ID NO: 485612 - DNA, 19 bp, Mus musculus
  siRNA target sequence for R3hdm (NM_181750.1,1328-1346).
gaaaactacattattgaca

SEQ ID NO: 485613 - DNA, 19 bp, Mus musculus
  siRNA target sequence for R3hdm (NM_181750.1,1333-1351).
ctacattattgacaaaaga

SEQ ID NO: 485614 - DNA, 19 bp, Mus musculus
  siRNA target sequence for R3hdm (NM_181750.1,1358-1376).
gatgaggacactattggta

SEQ ID NO: 485615 - DNA, 19 bp, Mus musculus
  siRNA target sequence for R3hdm (NM_181750.1,1379-1397).
cagcagaggcgccagatat

SEQ ID NO: 485616 - DNA, 19 bp, Mus musculus
  siRNA target sequence for R3hdm (NM_181750.1,1384-1402).
gaggcgccagatatttaga

SEQ ID NO: 485617 - DNA, 19 bp, Mus musculus
  siRNA target sequence for R3hdm (NM_181750.1,1386-1404).
ggcgccagatatttagagt

SEQ ID NO: 485618 - DNA, 19 bp, Mus musculus
  siRNA target sequence for R3hdm (NM_181750.1,1387-1405).
gcgccagatatttagagtt

SEQ ID NO: 485619 - DNA, 19 bp, Mus musculus
  siRNA target sequence for R3hdm (NM_181750.1,1549-1567).
cagctttagcggaatctca

SEQ ID NO: 485620 - DNA, 19 bp, Mus musculus
  siRNA target sequence for R3hdm (NM_181750.1,1659-1677).
ctacaggctctctttctca

SEQ ID NO: 485621 - DNA, 19 bp, Mus musculus
  siRNA target sequence for R3hdm (NM_181750.1,1750-1768).
cagcaatcacagttctctt

SEQ ID NO: 485622 - DNA, 19 bp, Mus musculus
  siRNA target sequence for R3hdm (NM_181750.1,1850-1868).
ccacctggcagtattctga

SEQ ID NO: 485623 - DNA, 19 bp, Mus musculus
  siRNA target sequence for R3hdm (NM_181750.1,1851-1869).
cacctggcagtattctgat

SEQ ID NO: 485624 - DNA, 19 bp, Mus musculus
  siRNA target sequence for R3hdm (NM_181750.1,1908-1926).
gaagtccagttgtgtacaa

SEQ ID NO: 485625 - DNA, 19 bp, Mus musculus
  siRNA target sequence for R3hdm (NM_181750.1,1921-1939).
gtacaatcctcctatgact

SEQ ID NO: 485626 - DNA, 19 bp, Mus musculus
  siRNA target sequence for Rbak (NM_021326.1,381-399).
caaagggcccactgtcatt

SEQ ID NO: 485627 - DNA, 19 bp, Mus musculus
  siRNA target sequence for Rbak (NM_021326.1,530-548).
ccaaacatgattattaagt

SEQ ID NO: 485628 - DNA, 19 bp, Mus musculus
  siRNA target sequence for Rbak (NM_021326.1,600-618).
ggcatttggaaatcagtaa

SEQ ID NO: 485629 - DNA, 19 bp, Mus musculus
  siRNA target sequence for Rbak (NM_021326.1,706-724).
gggggctgcttttgatgaa

SEQ ID NO: 485630 - DNA, 19 bp, Mus musculus
  siRNA target sequence for Rbak (NM_021326.1,734-752).
ctcgaaacagccctcattt

SEQ ID NO: 485631 - DNA, 19 bp, Mus musculus
  siRNA target sequence for Rbak (NM_021326.1,806-824).
gtttcagaactgattagca

SEQ ID NO: 485632 - DNA, 19 bp, Mus musculus
  siRNA target sequence for Rbak (NM_021326.1,924-942).
cctctcaacacgatgaaaa

SEQ ID NO: 485633 - DNA, 19 bp, Mus musculus
  siRNA target sequence for Rbak (NM_021326.1,927-945).
ctcaacacgatgaaaatat

SEQ ID NO: 485634 - DNA, 19 bp, Mus musculus
  siRNA target sequence for Rbak (NM_021326.1,1004-1022).
gacagtgaaagtgttttca

SEQ ID NO: 485635 - DNA, 19 bp, Mus musculus
  siRNA target sequence for Rbak (NM_021326.1,1096-1114).
gtcggacttcagtacatat

SEQ ID NO: 485636 - DNA, 19 bp, Mus musculus
  siRNA target sequence for Rbak (NM_021326.1,1110-1128).
catatccgagatcacaaat

SEQ ID NO: 485637 - DNA, 19 bp, Mus musculus
  siRNA target sequence for Rbak (NM_021326.1,1119-1137).
gatcacaaatggaactgaa

SEQ ID NO: 485638 - DNA, 19 bp, Mus musculus
  siRNA target sequence for Rbak (NM_021326.1,1173-1191).
gtaagaagtccaaattcat

SEQ ID NO: 485639 - DNA, 19 bp, Mus musculus
  siRNA target sequence for Rbak (NM_021326.1,1219-1237).
gaagccgtacgcttgtagt

SEQ ID NO: 485640 - DNA, 19 bp, Mus musculus
  siRNA target sequence for Rbak (NM_021326.1,1333-1351).
gaccttttgtcagaagtta

SEQ ID NO: 485641 - DNA, 19 bp, Mus musculus
  siRNA target sequence for Rbak (NM_021326.1,1471-1489).
gaggccctacccgtgtaat

SEQ ID NO: 485642 - DNA, 19 bp, Mus musculus
  siRNA target sequence for Rbak (NM_021326.1,1473-1491).
ggccctacccgtgtaatga

SEQ ID NO: 485643 - DNA, 19 bp, Mus musculus
  siRNA target sequence for Rbak (NM_021326.1,1595-1613).
cggaagtccaccctcatta

SEQ ID NO: 485644 - DNA, 19 bp, Mus musculus
  siRNA target sequence for Rbak (NM_021326.1,1597-1615).
gaagtccaccctcattaca

SEQ ID NO: 485645 - DNA, 19 bp, Mus musculus
  siRNA target sequence for Rbak (NM_021326.1,1687-1705).
gtacctcaccatacactat

SEQ ID NO: 485646 - DNA, 19 bp, Mus musculus
  siRNA target sequence for Rbak (NM_021326.1,1702-1720).
ctatcggagccatttagaa

SEQ ID NO: 485647 - DNA, 19 bp, Mus musculus
  siRNA target sequence for Rbak (NM_021326.1,1707-1725).
ggagccatttagaagagaa

SEQ ID NO: 485648 - DNA, 19 bp, Mus musculus
  siRNA target sequence for Rbak (NM_021326.1,1708-1726).
gagccatttagaagagaaa

SEQ ID NO: 485649 - DNA, 19 bp, Mus musculus
  siRNA target sequence for Rbak (NM_021326.1,1748-1766).
gggaaaaccttcaatctaa

SEQ ID NO: 485650 - DNA, 19 bp, Mus musculus
  siRNA target sequence for Rbak (NM_021326.1,1763-1781).
ctaaactctgctttcatta

SEQ ID NO: 485651 - DNA, 19 bp, Mus musculus
  siRNA target sequence for Rbak (NM_021326.1,1957-1975).
ccctgaaggggagaaaact

SEQ ID NO: 485652 - DNA, 19 bp, Mus musculus
  siRNA target sequence for Rbak (NM_021326.1,1959-1977).
ctgaaggggagaaaactta

SEQ ID NO: 485653 - DNA, 19 bp, Mus musculus
  siRNA target sequence for Rbak (NM_021326.1,2363-2381).
gtgcattaccggactcatt

SEQ ID NO: 485654 - DNA, 19 bp, Mus musculus
  siRNA target sequence for Rbak (NM_021326.1,2429-2447).
cacagatcagccttcaata

SEQ ID NO: 485655 - DNA, 19 bp, Mus musculus
  siRNA target sequence for Rbak (NM_021326.1,2469-2487).
gaggcactgtaaatgtact

SEQ ID NO: 485656 - DNA, 19 bp, Mus musculus
  siRNA target sequence for Rbm10 (NM_145627.1,579-597).
ccggctgatgcggaacaaa

SEQ ID NO: 485657 - DNA, 19 bp, Mus musculus
  siRNA target sequence for Rbm10 (NM_145627.1,580-598).
cggctgatgcggaacaaat

SEQ ID NO: 485658 - DNA, 19 bp, Mus musculus
  siRNA target sequence for Rbm10 (NM_145627.1,621-639).
cgccttcgtcgagtttagt

SEQ ID NO: 485659 - DNA, 19 bp, Mus musculus
  siRNA target sequence for Rbm10 (NM_145627.1,623-641).
ccttcgtcgagtttagtca

SEQ ID NO: 485660 - DNA, 19 bp, Mus musculus
  siRNA target sequence for Rbm10 (NM_145627.1,700-718).
cagaaggtatccatgcatt

SEQ ID NO: 485661 - DNA, 19 bp, Mus musculus
  siRNA target sequence for Rbm10 (NM_145627.1,724-742).
gaccccaagcccaagatca

SEQ ID NO: 485662 - DNA, 19 bp, Mus musculus
  siRNA target sequence for Rbm10 (NM_145627.1,726-744).
ccccaagcccaagatcaat

SEQ ID NO: 485663 - DNA, 19 bp, Mus musculus
  siRNA target sequence for Rbm10 (NM_145627.1,789-807).
ccgagagaagtgcttcaaa

SEQ ID NO: 485664 - DNA, 19 bp, Mus musculus
  siRNA target sequence for Rbm10 (NM_145627.1,809-827).
gtggtgtgcccaaatcaga

SEQ ID NO: 485665 - DNA, 19 bp, Mus musculus
  siRNA target sequence for Rbm10 (NM_145627.1,993-1011).
cgccaatgacaccattatt

SEQ ID NO: 485666 - DNA, 19 bp, Mus musculus
  siRNA target sequence for Rbm10 (NM_145627.1,1085-1103).
cttccaatgtgcgtgttat

SEQ ID NO: 485667 - DNA, 19 bp, Mus musculus
  siRNA target sequence for Rbm10 (NM_145627.1,1088-1106).
ccaatgtgcgtgttatcaa

SEQ ID NO: 485668 - DNA, 19 bp, Mus musculus
  siRNA target sequence for Rbm10 (NM_145627.1,1097-1115).
gtgttatcaaggacaaaca

SEQ ID NO: 485669 - DNA, 19 bp, Mus musculus
  siRNA target sequence for Rbm10 (NM_145627.1,1263-1281).
ggatatggcctccaatgaa

SEQ ID NO: 485670 - DNA, 19 bp, Mus musculus
  siRNA target sequence for Rbm10 (NM_145627.1,1674-1692).
gtcatacaccatcatatca

SEQ ID NO: 485671 - DNA, 19 bp, Mus musculus
  siRNA target sequence for Rbm10 (NM_145627.1,1804-1822).
gatgtctctacttaccaat

SEQ ID NO: 485672 - DNA, 19 bp, Mus musculus
  siRNA target sequence for Rbm10 (NM_145627.1,1828-1846).
gagacatctggctactact

SEQ ID NO: 485673 - DNA, 19 bp, Mus musculus
  siRNA target sequence for Rbm10 (NM_145627.1,1830-1848).
gacatctggctactactat

SEQ ID NO: 485674 - DNA, 19 bp, Mus musculus
  siRNA target sequence for Rbm10 (NM_145627.1,1852-1870).
ccccagactggtctatact

SEQ ID NO: 485675 - DNA, 19 bp, Mus musculus
  siRNA target sequence for Rbm10 (NM_145627.1,1853-1871).
cccagactggtctatacta

SEQ ID NO: 485676 - DNA, 19 bp, Mus musculus
  siRNA target sequence for Rbm10 (NM_145627.1,1857-1875).
gactggtctatactatgat

SEQ ID NO: 485677 - DNA, 19 bp, Mus musculus
  siRNA target sequence for Rbm10 (NM_145627.1,1876-1894).
cccaattcccagtattact

SEQ ID NO: 485678 - DNA, 19 bp, Mus musculus
  siRNA target sequence for Rbm10 (NM_145627.1,1877-1895).
ccaattcccagtattacta

SEQ ID NO: 485679 - DNA, 19 bp, Mus musculus
  siRNA target sequence for Rbm10 (NM_145627.1,2073-2091).
gtgggcacgcagtctcaat

SEQ ID NO: 485680 - DNA, 19 bp, Mus musculus
  siRNA target sequence for Rbm10 (NM_145627.1,2075-2093).
gggcacgcagtctcaataa

SEQ ID NO: 485681 - DNA, 19 bp, Mus musculus
  siRNA target sequence for Rbm10 (NM_145627.1,2078-2096).
cacgcagtctcaataagca

SEQ ID NO: 485682 - DNA, 19 bp, Mus musculus
  siRNA target sequence for Rbm11 (NM_198302.1,127-145).
ctgacaggaccgtgtttgt

SEQ ID NO: 485683 - DNA, 19 bp, Mus musculus
  siRNA target sequence for Rbm11 (NM_198302.1,169-187).
gggaagagattctttacga

SEQ ID NO: 485684 - DNA, 19 bp, Mus musculus
  siRNA target sequence for Rbm11 (NM_198302.1,200-218).
ggctgggccactaaccaaa

SEQ ID NO: 485685 - DNA, 19 bp, Mus musculus
  siRNA target sequence for Rbm11 (NM_198302.1,210-228).
ctaaccaaagtgactcttt

SEQ ID NO: 485686 - DNA, 19 bp, Mus musculus
  siRNA target sequence for Rbm11 (NM_198302.1,214-232).
ccaaagtgactctttgcaa

SEQ ID NO: 485687 - DNA, 19 bp, Mus musculus
  siRNA target sequence for Rbm11 (NM_198302.1,314-332).
gaatggaattcgtttgtat

SEQ ID NO: 485688 - DNA, 19 bp, Mus musculus
  siRNA target sequence for Rbm11 (NM_198302.1,329-347).
gtatgggagaccaattaat

SEQ ID NO: 485689 - DNA, 19 bp, Mus musculus
  siRNA target sequence for Rbm11 (NM_198302.1,365-383).
gagttctcgctcttctgaa

SEQ ID NO: 485690 - DNA, 19 bp, Mus musculus
  siRNA target sequence for Rbm11 (NM_198302.1,402-420).
gagagctgtgctaagatta

SEQ ID NO: 485691 - DNA, 19 bp, Mus musculus
  siRNA target sequence for Rbm11 (NM_198302.1,471-489).
gtgccgtttttcccaatta

SEQ ID NO: 485692 - DNA, 19 bp, Mus musculus
  siRNA target sequence for Rbm11 (NM_198302.1,474-492).
ccgtttttcccaattacga

SEQ ID NO: 485693 - DNA, 19 bp, Mus musculus
  siRNA target sequence for Rbm11 (NM_198302.1,496-514).
ccgccttacctcaagagta

SEQ ID NO: 485694 - DNA, 19 bp, Mus musculus
  siRNA target sequence for Rbm11 (NM_198302.1,497-515).
cgccttacctcaagagtat

SEQ ID NO: 485695 - DNA, 19 bp, Mus musculus
  siRNA target sequence for Rbm11 (NM_198302.1,498-516).
gccttacctcaagagtatt

SEQ ID NO: 485696 - DNA, 19 bp, Mus musculus
  siRNA target sequence for Rbm11 (NM_198302.1,499-517).
ccttacctcaagagtattt

SEQ ID NO: 485697 - DNA, 19 bp, Mus musculus
  siRNA target sequence for Rbm11 (NM_198302.1,557-575).
gctgcaaccgcctttctgt

SEQ ID NO: 485698 - DNA, 19 bp, Mus musculus
  siRNA target sequence for Rbm11 (NM_198302.1,607-625).
ctgggtcttgcgccttaaa

SEQ ID NO: 485699 - DNA, 19 bp, Mus musculus
  siRNA target sequence for Rbm11 (NM_198302.1,610-628).
ggtcttgcgccttaaatca

SEQ ID NO: 485700 - DNA, 19 bp, Mus musculus
  siRNA target sequence for Rbm11 (NM_198302.1,648-666).
ggacccagctcctatgagt

SEQ ID NO: 485701 - DNA, 19 bp, Mus musculus
  siRNA target sequence for Rbm11 (NM_198302.1,687-705).
gaccctgacctgtatccta

SEQ ID NO: 485702 - DNA, 19 bp, Mus musculus
  siRNA target sequence for Rbm11 (NM_198302.1,693-711).
gacctgtatcctaggaata

SEQ ID NO: 485703 - DNA, 19 bp, Mus musculus
  siRNA target sequence for Rbm11 (NM_198302.1,790-808).
gccgcaagtgtaaaaagaa

SEQ ID NO: 485704 - DNA, 19 bp, Mus musculus
  siRNA target sequence for Rbm14 (NM_019869.1,166-184).
gctgcgccgtcatgaaaca

SEQ ID NO: 485705 - DNA, 19 bp, Mus musculus
  siRNA target sequence for Rbm14 (NM_019869.1,169-187).
gcgccgtcatgaaacagtt

SEQ ID NO: 485706 - DNA, 19 bp, Mus musculus
  siRNA target sequence for Rbm14 (NM_019869.1,170-188).
cgccgtcatgaaacagttt

SEQ ID NO: 485707 - DNA, 19 bp, Mus musculus
  siRNA target sequence for Rbm14 (NM_019869.1,330-348).
gtatcggctgcatgtacaa

SEQ ID NO: 485708 - DNA, 19 bp, Mus musculus
  siRNA target sequence for Rbm14 (NM_019869.1,392-410).
cgagtgtgacgtggtaaaa

SEQ ID NO: 485709 - DNA, 19 bp, Mus musculus
  siRNA target sequence for Rbm14 (NM_019869.1,397-415).
gtgacgtggtaaaagacta

SEQ ID NO: 485710 - DNA, 19 bp, Mus musculus
  siRNA target sequence for Rbm14 (NM_019869.1,514-532).
caaccaaggggcagaagaa

SEQ ID NO: 485711 - DNA, 19 bp, Mus musculus
  siRNA target sequence for Rbm14 (NM_019869.1,686-704).
gcccacaccaccattcttt

SEQ ID NO: 485712 - DNA, 19 bp, Mus musculus
  siRNA target sequence for Rbm14 (NM_019869.1,974-992).
ctcgcttggcccatatggt

SEQ ID NO: 485713 - DNA, 19 bp, Mus musculus
  siRNA target sequence for Rbm14 (NM_019869.1,1044-1062).
gcagcttcttcgcttaatt

SEQ ID NO: 485714 - DNA, 19 bp, Mus musculus
  siRNA target sequence for Rbm14 (NM_019869.1,1047-1065).
gcttcttcgcttaattcct

SEQ ID NO: 485715 - DNA, 19 bp, Mus musculus
  siRNA target sequence for Rbm14 (NM_019869.1,1048-1066).
cttcttcgcttaattccta

SEQ ID NO: 485716 - DNA, 19 bp, Mus musculus
  siRNA target sequence for Rbm14 (NM_019869.1,1084-1102).
cccttgcttcctatggtaa

SEQ ID NO: 485717 - DNA, 19 bp, Mus musculus
  siRNA target sequence for Rbm14 (NM_019869.1,1152-1170).
gcggctgcttcttcctata

SEQ ID NO: 485718 - DNA, 19 bp, Mus musculus
  siRNA target sequence for Rbm14 (NM_019869.1,1155-1173).
gctgcttcttcctataaca

SEQ ID NO: 485719 - DNA, 19 bp, Mus musculus
  siRNA target sequence for Rbm14 (NM_019869.1,1263-1281).
gcccaggcagcgtcttaca

SEQ ID NO: 485720 - DNA, 19 bp, Mus musculus
  siRNA target sequence for Rbm14 (NM_019869.1,1310-1328).
ccagtctgccccatatgct

SEQ ID NO: 485721 - DNA, 19 bp, Mus musculus
  siRNA target sequence for Rbm14 (NM_019869.1,1354-1372).
cccagcctgctgcttatgt

SEQ ID NO: 485722 - DNA, 19 bp, Mus musculus
  siRNA target sequence for Rbm14 (NM_019869.1,1735-1753).
cagcagcctacctgtctat

SEQ ID NO: 485723 - DNA, 19 bp, Mus musculus
  siRNA target sequence for Rbm16 (NM_134123.2,290-308).
gccgtgaagaccttcaaca

SEQ ID NO: 485724 - DNA, 19 bp, Mus musculus
  siRNA target sequence for Rbm16 (NM_134123.2,300-318).
ccttcaacagcgagttgta

SEQ ID NO: 485725 - DNA, 19 bp, Mus musculus
  siRNA target sequence for Rbm16 (NM_134123.2,301-319).
cttcaacagcgagttgtat

SEQ ID NO: 485726 - DNA, 19 bp, Mus musculus
  siRNA target sequence for Rbm16 (NM_134123.2,310-328).
cgagttgtattcactgaat

SEQ ID NO: 485727 - DNA, 19 bp, Mus musculus
  siRNA target sequence for Rbm16 (NM_134123.2,420-438).
gtgttgagaaattcattca

SEQ ID NO: 485728 - DNA, 19 bp, Mus musculus
  siRNA target sequence for Rbm16 (NM_134123.2,433-451).
cattcagaaatgtaaacca

SEQ ID NO: 485729 - DNA, 19 bp, Mus musculus
  siRNA target sequence for Rbm16 (NM_134123.2,460-478).
ggtacctggactatatgtt

SEQ ID NO: 485730 - DNA, 19 bp, Mus musculus
  siRNA target sequence for Rbm16 (NM_134123.2,467-485).
ggactatatgttattgact

SEQ ID NO: 485731 - DNA, 19 bp, Mus musculus
  siRNA target sequence for Rbm16 (NM_134123.2,495-513).
gacaatcccggcatcagtt

SEQ ID NO: 485732 - DNA, 19 bp, Mus musculus
  siRNA target sequence for Rbm16 (NM_134123.2,537-555).
cacccagatttagtaataa

SEQ ID NO: 485733 - DNA, 19 bp, Mus musculus
  siRNA target sequence for Rbm16 (NM_134123.2,543-561).
gatttagtaataacatcat

SEQ ID NO: 485734 - DNA, 19 bp, Mus musculus
  siRNA target sequence for Rbm16 (NM_134123.2,559-577).
cattagcacttttcagaat

SEQ ID NO: 485735 - DNA, 19 bp, Mus musculus
  siRNA target sequence for Rbm16 (NM_134123.2,590-608).
cctggggatgacaagagta

SEQ ID NO: 485736 - DNA, 19 bp, Mus musculus
  siRNA target sequence for Rbm16 (NM_134123.2,599-617).
gacaagagtaaaatagtga

SEQ ID NO: 485737 - DNA, 19 bp, Mus musculus
  siRNA target sequence for Rbm16 (NM_134123.2,614-632).
gtgagagtattaaacttat

SEQ ID NO: 485738 - DNA, 19 bp, Mus musculus
  siRNA target sequence for Rbm16 (NM_134123.2,807-825).
ctgatccatgggtatctca

SEQ ID NO: 485739 - DNA, 19 bp, Mus musculus
  siRNA target sequence for Rbm16 (NM_134123.2,1043-1061).
gatcagggagtctctttca

SEQ ID NO: 485740 - DNA, 19 bp, Mus musculus
  siRNA target sequence for Rbm16 (NM_134123.2,1056-1074).
ctttcaacaagaagttgat

SEQ ID NO: 485741 - DNA, 19 bp, Mus musculus
  siRNA target sequence for Rbm16 (NM_134123.2,1069-1087).
gttgatggatagatttgat

SEQ ID NO: 485742 - DNA, 19 bp, Mus musculus
  siRNA target sequence for Rbm16 (NM_134123.2,1261-1279).
gaaggtaactcctcaagat

SEQ ID NO: 485743 - DNA, 19 bp, Mus musculus
  siRNA target sequence for Rbm16 (NM_134123.2,1329-1347).
ggagtagccaacagcattt

SEQ ID NO: 485744 - DNA, 19 bp, Mus musculus
  siRNA target sequence for Rbm16 (NM_134123.2,1349-1367).
ctggaacctgaagcaaatt

SEQ ID NO: 485745 - DNA, 19 bp, Mus musculus
  siRNA target sequence for Rbm16 (NM_134123.2,1358-1376).
gaagcaaatttagatgatt

SEQ ID NO: 485746 - DNA, 19 bp, Mus musculus
  siRNA target sequence for Rbm16 (NM_134123.2,1362-1380).
caaatttagatgattccat

SEQ ID NO: 485747 - DNA, 19 bp, Mus musculus
  siRNA target sequence for Rbm16 (NM_134123.2,1388-1406).
cagcaacaggatatggata

SEQ ID NO: 485748 - DNA, 19 bp, Mus musculus
  siRNA target sequence for Rbm16 (NM_134123.2,1463-1481).
gtagctgttcgctcaagat

SEQ ID NO: 485749 - DNA, 19 bp, Mus musculus
  siRNA target sequence for Rbm16 (NM_134123.2,1466-1484).
gctgttcgctcaagatcaa

SEQ ID NO: 485750 - DNA, 19 bp, Mus musculus
  siRNA target sequence for Rbm16 (NM_134123.2,1469-1487).
gttcgctcaagatcaagaa

SEQ ID NO: 485751 - DNA, 19 bp, Mus musculus
  siRNA target sequence for Rbm16 (NM_134123.2,1579-1597).
gtcccactcgagagagaaa

SEQ ID NO: 485752 - DNA, 19 bp, Mus musculus
  siRNA target sequence for Rbm16 (NM_134123.2,1675-1693).
gcctcctgtcaggtcaaaa

SEQ ID NO: 485753 - DNA, 19 bp, Mus musculus
  siRNA target sequence for Rbm16 (NM_134123.2,1682-1700).
gtcaggtcaaaaacactaa

SEQ ID NO: 485754 - DNA, 19 bp, Mus musculus
  siRNA target sequence for Rbm16 (NM_134123.2,1686-1704).
ggtcaaaaacactaagtgt

SEQ ID NO: 485755 - DNA, 19 bp, Mus musculus
  siRNA target sequence for Rbm16 (NM_134123.2,1785-1803).
gacaaattgaatccattaa

SEQ ID NO: 485756 - DNA, 19 bp, Mus musculus
  siRNA target sequence for Rbm16 (NM_134123.2,2408-2426).
ccggtagtaccaacatctt

SEQ ID NO: 485757 - DNA, 19 bp, Mus musculus
  siRNA target sequence for Rbm16 (NM_134123.2,2409-2427).
cggtagtaccaacatcttt

SEQ ID NO: 485758 - DNA, 19 bp, Mus musculus
  siRNA target sequence for Rbm16 (NM_134123.2,3084-3102).
ggccacgattccctttact

SEQ ID NO: 485759 - DNA, 19 bp, Mus musculus
  siRNA target sequence for Rbm16 (NM_134123.2,3085-3103).
gccacgattccctttacta

SEQ ID NO: 485760 - DNA, 19 bp, Mus musculus
  siRNA target sequence for Rbm16 (NM_134123.2,3087-3105).
cacgattccctttactaca

SEQ ID NO: 485761 - DNA, 19 bp, Mus musculus
  siRNA target sequence for Rbm16 (NM_134123.2,3257-3275).
gttcccaacccagataaaa

SEQ ID NO: 485762 - DNA, 19 bp, Mus musculus
  siRNA target sequence for Rbm16 (NM_134123.2,3281-3299).
ccacttgggaatgacaata

SEQ ID NO: 485763 - DNA, 19 bp, Mus musculus
  siRNA target sequence for Rbm16 (NM_134123.2,3326-3344).
cgctttcctcctatagaaa

SEQ ID NO: 485764 - DNA, 19 bp, Mus musculus
  siRNA target sequence for Rbm16 (NM_134123.2,3365-3383).
cctcctcaggtggatgtta

SEQ ID NO: 485765 - DNA, 19 bp, Mus musculus
  siRNA target sequence for Rbm16 (NM_134123.2,3391-3409).
ggttgggcgacgtctagat

SEQ ID NO: 485766 - DNA, 19 bp, Mus musculus
  siRNA target sequence for Rbm16 (NM_134123.2,3443-3461).
gctagggatcattttggaa

SEQ ID NO: 485767 - DNA, 19 bp, Mus musculus
  siRNA target sequence for Rbm16 (NM_134123.2,3558-3576).
ggcctagagattttgatga

SEQ ID NO: 485768 - DNA, 19 bp, Mus musculus
  siRNA target sequence for Rbm16 (NM_134123.2,3609-3627).
gtccaaaaggcttacatga

SEQ ID NO: 485769 - DNA, 19 bp, Mus musculus
  siRNA target sequence for Rbm16 (NM_134123.2,3648-3666).
ctggaaattaccgatttga

SEQ ID NO: 485770 - DNA, 19 bp, Mus musculus
  siRNA target sequence for Rbm16 (NM_134123.2,3658-3676).
ccgatttgatcctagaagt

SEQ ID NO: 485771 - DNA, 19 bp, Mus musculus
  siRNA target sequence for Rbm16 (NM_134123.2,3755-3773).
gatagggatgacagagatt

SEQ ID NO: 485772 - DNA, 19 bp, Mus musculus
  siRNA target sequence for Rbm16 (NM_134123.2,3803-3821).
cgtcttggacgagatagaa

SEQ ID NO: 485773 - DNA, 19 bp, Mus musculus
  siRNA target sequence for Rbm16 (NM_134123.2,3809-3827).
ggacgagatagaattcaaa

SEQ ID NO: 485774 - DNA, 19 bp, Mus musculus
  siRNA target sequence for Rbm16 (NM_134123.2,3810-3828).
gacgagatagaattcaaaa

SEQ ID NO: 485775 - DNA, 19 bp, Mus musculus
  siRNA target sequence for Rbm16 (NM_134123.2,3815-3833).
gatagaattcaaaacactt

SEQ ID NO: 485776 - DNA, 19 bp, Mus musculus
  siRNA target sequence for Rbm16 (NM_134123.2,3846-3864).
ctcatgctcgggtttttga

SEQ ID NO: 485777 - DNA, 19 bp, Mus musculus
  siRNA target sequence for Rbm16 (NM_134123.2,3851-3869).
gctcgggtttttgattatt

SEQ ID NO: 485778 - DNA, 19 bp, Mus musculus
  siRNA target sequence for Rbm16 (NM_134123.2,3852-3870).
ctcgggtttttgattattt

SEQ ID NO: 485779 - DNA, 19 bp, Mus musculus
  siRNA target sequence for Rbm16 (NM_134123.2,3855-3873).
gggtttttgattatttcga

SEQ ID NO: 485780 - DNA, 19 bp, Mus musculus
  siRNA target sequence for Rbm16 (NM_134123.2,3856-3874).
ggtttttgattatttcgaa

SEQ ID NO: 485781 - DNA, 19 bp, Mus musculus
  siRNA target sequence for Rbm16 (NM_134123.2,3899-3917).
gataatgtgcctcaagtta

SEQ ID NO: 485782 - DNA, 19 bp, Mus musculus
  siRNA target sequence for Rbm16 (NM_134123.2,3967-3985).
gaaggaccctgaactctat

SEQ ID NO: 485783 - DNA, 19 bp, Mus musculus
  siRNA target sequence for Rbm17 (NM_152824.1,157-175).
ggagaccagtgactcaaaa

SEQ ID NO: 485784 - DNA, 19 bp, Mus musculus
  siRNA target sequence for Rbm17 (NM_152824.1,158-176).
gagaccagtgactcaaaaa

SEQ ID NO: 485785 - DNA, 19 bp, Mus musculus
  siRNA target sequence for Rbm17 (NM_152824.1,177-195).
ctgaaggctggtccaaaaa

SEQ ID NO: 485786 - DNA, 19 bp, Mus musculus
  siRNA target sequence for Rbm17 (NM_152824.1,179-197).
gaaggctggtccaaaaact

SEQ ID NO: 485787 - DNA, 19 bp, Mus musculus
  siRNA target sequence for Rbm17 (NM_152824.1,183-201).
gctggtccaaaaacttcaa

SEQ ID NO: 485788 - DNA, 19 bp, Mus musculus
  siRNA target sequence for Rbm17 (NM_152824.1,285-303).
ctccggtcatcgacctaaa

SEQ ID NO: 485789 - DNA, 19 bp, Mus musculus
  siRNA target sequence for Rbm17 (NM_152824.1,414-432).
ccttagctgatgaatatga

SEQ ID NO: 485790 - DNA, 19 bp, Mus musculus
  siRNA target sequence for Rbm17 (NM_152824.1,434-452).
cctatgttccccaatgact

SEQ ID NO: 485791 - DNA, 19 bp, Mus musculus
  siRNA target sequence for Rbm17 (NM_152824.1,435-453).
ctatgttccccaatgacta

SEQ ID NO: 485792 - DNA, 19 bp, Mus musculus
  siRNA target sequence for Rbm17 (NM_152824.1,533-551).
gaaaagaggcgtaaagaca

SEQ ID NO: 485793 - DNA, 19 bp, Mus musculus
  siRNA target sequence for Rbm17 (NM_152824.1,556-574).
cgaagccagtgggttttca

SEQ ID NO: 485794 - DNA, 19 bp, Mus musculus
  siRNA target sequence for Rbm17 (NM_152824.1,658-676).
cccaccgacgtctcttgta

SEQ ID NO: 485795 - DNA, 19 bp, Mus musculus
  siRNA target sequence for Rbm17 (NM_152824.1,660-678).
caccgacgtctcttgtaga

SEQ ID NO: 485796 - DNA, 19 bp, Mus musculus
  siRNA target sequence for Rbm17 (NM_152824.1,663-681).
cgacgtctcttgtagagaa

SEQ ID NO: 485797 - DNA, 19 bp, Mus musculus
  siRNA target sequence for Rbm17 (NM_152824.1,666-684).
cgtctcttgtagagaaaga

SEQ ID NO: 485798 - DNA, 19 bp, Mus musculus
  siRNA target sequence for Rbm17 (NM_152824.1,778-796).
gccggacagaccaagatct

SEQ ID NO: 485799 - DNA, 19 bp, Mus musculus
  siRNA target sequence for Rbm17 (NM_152824.1,810-828).
gcaactccttccttgctaa

SEQ ID NO: 485800 - DNA, 19 bp, Mus musculus
  siRNA target sequence for Rbm17 (NM_152824.1,837-855).
gcacagtggctcataagat

SEQ ID NO: 485801 - DNA, 19 bp, Mus musculus
  siRNA target sequence for Rbm17 (NM_152824.1,840-858).
cagtggctcataagattat

SEQ ID NO: 485802 - DNA, 19 bp, Mus musculus
  siRNA target sequence for Rbm17 (NM_152824.1,948-966).
gtggcggcaagatcattgt

SEQ ID NO: 485803 - DNA, 19 bp, Mus musculus
  siRNA target sequence for Rbm17 (NM_152824.1,995-1013).
caggatgcatccaagaagt

SEQ ID NO: 485804 - DNA, 19 bp, Mus musculus
  siRNA target sequence for Rbm17 (NM_152824.1,1005-1023).
ccaagaagtcggattcaaa

SEQ ID NO: 485805 - DNA, 19 bp, Mus musculus
  siRNA target sequence for Rbm17 (NM_152824.1,1006-1024).
caagaagtcggattcaaat

SEQ ID NO: 485806 - DNA, 19 bp, Mus musculus
  siRNA target sequence for Rbm17 (NM_152824.1,1009-1027).
gaagtcggattcaaatcca

SEQ ID NO: 485807 - DNA, 19 bp, Mus musculus
  siRNA target sequence for Rbm17 (NM_152824.1,1112-1130).
gttgaaaccaaggaagaat

SEQ ID NO: 485808 - DNA, 19 bp, Mus musculus
  siRNA target sequence for Rbm17 (NM_152824.1,1148-1166).
gttgggaaatgtgtgatat

SEQ ID NO: 485809 - DNA, 19 bp, Mus musculus
  siRNA target sequence for Rbm17 (NM_152824.1,1199-1217).
gtacggatatttttagaat

SEQ ID NO: 485810 - DNA, 19 bp, Mus musculus
  siRNA target sequence for Rbm17 (NM_152824.1,1228-1246).
cgaatcagcaattaaagct

SEQ ID NO: 485811 - DNA, 19 bp, Mus musculus
  siRNA target sequence for Rbm17 (NM_152824.1,1277-1295).
ggacgggtggtaaaagcat

SEQ ID NO: 485812 - DNA, 19 bp, Mus musculus
  siRNA target sequence for Rbm5 (NM_148930.2,167-185).
caaaagagtgagtagaaca

SEQ ID NO: 485813 - DNA, 19 bp, Mus musculus
  siRNA target sequence for Rbm5 (NM_148930.2,199-217).
gatatggttccatcataga

SEQ ID NO: 485814 - DNA, 19 bp, Mus musculus
  siRNA target sequence for Rbm5 (NM_148930.2,227-245).
ccgtgatgagcgtgaatct

SEQ ID NO: 485815 - DNA, 19 bp, Mus musculus
  siRNA target sequence for Rbm5 (NM_148930.2,228-246).
cgtgatgagcgtgaatcta

SEQ ID NO: 485816 - DNA, 19 bp, Mus musculus
  siRNA target sequence for Rbm5 (NM_148930.2,258-276).
cgggactcagattacaaaa

SEQ ID NO: 485817 - DNA, 19 bp, Mus musculus
  siRNA target sequence for Rbm5 (NM_148930.2,260-278).
ggactcagattacaaaaga

SEQ ID NO: 485818 - DNA, 19 bp, Mus musculus
  siRNA target sequence for Rbm5 (NM_148930.2,288-306).
gatcggagaggtgatagat

SEQ ID NO: 485819 - DNA, 19 bp, Mus musculus
  siRNA target sequence for Rbm5 (NM_148930.2,298-316).
gtgatagatatgatgacta

SEQ ID NO: 485820 - DNA, 19 bp, Mus musculus
  siRNA target sequence for Rbm5 (NM_148930.2,482-500).
caccgagagcgatattcga

SEQ ID NO: 485821 - DNA, 19 bp, Mus musculus
  siRNA target sequence for Rbm5 (NM_148930.2,490-508).
gcgatattcgagaaatgat

SEQ ID NO: 485822 - DNA, 19 bp, Mus musculus
  siRNA target sequence for Rbm5 (NM_148930.2,583-601).
ccttcgtggagttttatca

SEQ ID NO: 485823 - DNA, 19 bp, Mus musculus
  siRNA target sequence for Rbm5 (NM_148930.2,631-649).
ccaatcagaaaaaattggt

SEQ ID NO: 485824 - DNA, 19 bp, Mus musculus
  siRNA target sequence for Rbm5 (NM_148930.2,682-700).
gcaatcccagacctaaatt

SEQ ID NO: 485825 - DNA, 19 bp, Mus musculus
  siRNA target sequence for Rbm5 (NM_148930.2,683-701).
caatcccagacctaaattt

SEQ ID NO: 485826 - DNA, 19 bp, Mus musculus
  siRNA target sequence for Rbm5 (NM_148930.2,689-707).
cagacctaaatttgaagat

SEQ ID NO: 485827 - DNA, 19 bp, Mus musculus
  siRNA target sequence for Rbm5 (NM_148930.2,702-720).
gaagattggctttgtaaca

SEQ ID NO: 485828 - DNA, 19 bp, Mus musculus
  siRNA target sequence for Rbm5 (NM_148930.2,734-752).
caatttcaggaaaagacta

SEQ ID NO: 485829 - DNA, 19 bp, Mus musculus
  siRNA target sequence for Rbm5 (NM_148930.2,766-784).
gtggagcagacaagtttga

SEQ ID NO: 485830 - DNA, 19 bp, Mus musculus
  siRNA target sequence for Rbm5 (NM_148930.2,833-851).
ggattactactgtgatact

SEQ ID NO: 485831 - DNA, 19 bp, Mus musculus
  siRNA target sequence for Rbm5 (NM_148930.2,834-852).
gattactactgtgatacta

SEQ ID NO: 485832 - DNA, 19 bp, Mus musculus
  siRNA target sequence for Rbm5 (NM_148930.2,919-937).
cttccttagctgtcaataa

SEQ ID NO: 485833 - DNA, 19 bp, Mus musculus
  siRNA target sequence for Rbm5 (NM_148930.2,923-941).
cttagctgtcaataacatt

SEQ ID NO: 485834 - DNA, 19 bp, Mus musculus
  siRNA target sequence for Rbm5 (NM_148930.2,995-1013).
gctatcttctgcaatggat

SEQ ID NO: 485835 - DNA, 19 bp, Mus musculus
  siRNA target sequence for Rbm5 (NM_148930.2,1046-1064).
ccatcctccattgaaaatt

SEQ ID NO: 485836 - DNA, 19 bp, Mus musculus
  siRNA target sequence for Rbm5 (NM_148930.2,1099-1117).
gtgccagaaaagatttggt

SEQ ID NO: 485837 - DNA, 19 bp, Mus musculus
  siRNA target sequence for Rbm5 (NM_148930.2,1145-1163).
cttctctgtagctagtaca

SEQ ID NO: 485838 - DNA, 19 bp, Mus musculus
  siRNA target sequence for Rbm5 (NM_148930.2,1270-1288).
ctcaatactcacaggatta

SEQ ID NO: 485839 - DNA, 19 bp, Mus musculus
  siRNA target sequence for Rbm5 (NM_148930.2,1283-1301).
ggattaccagcagttttat

SEQ ID NO: 485840 - DNA, 19 bp, Mus musculus
  siRNA target sequence for Rbm5 (NM_148930.2,1319-1337).
gctggagtctgatacatca

SEQ ID NO: 485841 - DNA, 19 bp, Mus musculus
  siRNA target sequence for Rbm5 (NM_148930.2,1364-1382).
cacctcagcagctgtagta

SEQ ID NO: 485842 - DNA, 19 bp, Mus musculus
  siRNA target sequence for Rbm5 (NM_148930.2,1390-1408).
gtccccaactctataatca

SEQ ID NO: 485843 - DNA, 19 bp, Mus musculus
  siRNA target sequence for Rbm5 (NM_148930.2,1449-1467).
cctagcactagcacaagta

SEQ ID NO: 485844 - DNA, 19 bp, Mus musculus
  siRNA target sequence for Rbm5 (NM_148930.2,1521-1539).
gtacctgacacgtctactt

SEQ ID NO: 485845 - DNA, 19 bp, Mus musculus
  siRNA target sequence for Rbm5 (NM_148930.2,1529-1547).
cacgtctacttatcaatat

SEQ ID NO: 485846 - DNA, 19 bp, Mus musculus
  siRNA target sequence for Rbm5 (NM_148930.2,1531-1549).
cgtctacttatcaatatga

SEQ ID NO: 485847 - DNA, 19 bp, Mus musculus
  siRNA target sequence for Rbm5 (NM_148930.2,1551-1569).
gaatcatcaggatattatt

SEQ ID NO: 485848 - DNA, 19 bp, Mus musculus
  siRNA target sequence for Rbm5 (NM_148930.2,1576-1594).
ctacaacagggctctacta

SEQ ID NO: 485849 - DNA, 19 bp, Mus musculus
  siRNA target sequence for Rbm5 (NM_148930.2,1579-1597).
caacagggctctactatga

SEQ ID NO: 485850 - DNA, 19 bp, Mus musculus
  siRNA target sequence for Rbm5 (NM_148930.2,1600-1618).
ctaactcacagtactacta

SEQ ID NO: 485851 - DNA, 19 bp, Mus musculus
  siRNA target sequence for Rbm5 (NM_148930.2,1624-1642).
ccttaacacagcagtactt

SEQ ID NO: 485852 - DNA, 19 bp, Mus musculus
  siRNA target sequence for Rbm5 (NM_148930.2,1838-1856).
ctttcaacctgtcaattca

SEQ ID NO: 485853 - DNA, 19 bp, Mus musculus
  siRNA target sequence for Rbm5 (NM_148930.2,1842-1860).
caacctgtcaattcattga

SEQ ID NO: 485854 - DNA, 19 bp, Mus musculus
  siRNA target sequence for Rbm5 (NM_148930.2,2015-2033).
cagtggtgacagtgacaat

SEQ ID NO: 485855 - DNA, 19 bp, Mus musculus
  siRNA target sequence for Rbm5 (NM_148930.2,2154-2172).
cagctctccgacttacaca

SEQ ID NO: 485856 - DNA, 19 bp, Mus musculus
  siRNA target sequence for Rbm5 (NM_148930.2,2162-2180).
cgacttacacaagcaaaat

SEQ ID NO: 485857 - DNA, 19 bp, Mus musculus
  siRNA target sequence for Rbm5 (NM_148930.2,2163-2181).
gacttacacaagcaaaata

SEQ ID NO: 485858 - DNA, 19 bp, Mus musculus
  siRNA target sequence for Rbm5 (NM_148930.2,2338-2356).
ctggcactgtgaattacga

SEQ ID NO: 485859 - DNA, 19 bp, Mus musculus
  siRNA target sequence for Rbm5 (NM_148930.2,2374-2392).
gcattgaccacagtaacat

SEQ ID NO: 485860 - DNA, 19 bp, Mus musculus
  siRNA target sequence for Rbm5 (NM_148930.2,2477-2495).
ggctcaagtccgactaaaa

SEQ ID NO: 485861 - DNA, 19 bp, Mus musculus
  siRNA target sequence for Rbm6 (NM_011251.1,268-286).
gattcacttccctttgatt

SEQ ID NO: 485862 - DNA, 19 bp, Mus musculus
  siRNA target sequence for Rbm6 (NM_011251.1,1230-1248).
gctttctggaggtgaacaa

SEQ ID NO: 485863 - DNA, 19 bp, Mus musculus
  siRNA target sequence for Rbm6 (NM_011251.1,1315-1333).
gattacagaagcattgaat

SEQ ID NO: 485864 - DNA, 19 bp, Mus musculus
  siRNA target sequence for Rbm6 (NM_011251.1,1381-1399).
ggccagagcaagtcatttt

SEQ ID NO: 485865 - DNA, 19 bp, Mus musculus
  siRNA target sequence for Rbm6 (NM_011251.1,1434-1452).
ccttcaggatcaagattat

SEQ ID NO: 485866 - DNA, 19 bp, Mus musculus
  siRNA target sequence for Rbm6 (NM_011251.1,1438-1456).
caggatcaagattatagga

SEQ ID NO: 485867 - DNA, 19 bp, Mus musculus
  siRNA target sequence for Rbm6 (NM_011251.1,1462-1480).
ccaagcgaggagaaaccta

SEQ ID NO: 485868 - DNA, 19 bp, Mus musculus
  siRNA target sequence for Rbm6 (NM_011251.1,1463-1481).
caagcgaggagaaacctaa

SEQ ID NO: 485869 - DNA, 19 bp, Mus musculus
  siRNA target sequence for Rbm6 (NM_011251.1,1770-1788).
gcatcagtcttcttgttca

SEQ ID NO: 485870 - DNA, 19 bp, Mus musculus
  siRNA target sequence for Rbm6 (NM_011251.1,1892-1910).
cacgacctgctgataagga

SEQ ID NO: 485871 - DNA, 19 bp, Mus musculus
  siRNA target sequence for Rbm6 (NM_011251.1,2037-2055).
gccatggtctggagattca

SEQ ID NO: 485872 - DNA, 19 bp, Mus musculus
  siRNA target sequence for Rbm6 (NM_011251.1,2297-2315).
ggaagatggtagctgtaaa

SEQ ID NO: 485873 - DNA, 19 bp, Mus musculus
  siRNA target sequence for Rbm6 (NM_011251.1,2316-2334).
cctggccactggaaaacga

SEQ ID NO: 485874 - DNA, 19 bp, Mus musculus
  siRNA target sequence for Rbm6 (NM_011251.1,2317-2335).
ctggccactggaaaacgaa

SEQ ID NO: 485875 - DNA, 19 bp, Mus musculus
  siRNA target sequence for Rbm6 (NM_011251.1,2357-2375).
ctgaccacatgcattacta

SEQ ID NO: 485876 - DNA, 19 bp, Mus musculus
  siRNA target sequence for Rbm6 (NM_011251.1,2379-2397).
gggtaaaaaatattttcga

SEQ ID NO: 485877 - DNA, 19 bp, Mus musculus
  siRNA target sequence for Rbm6 (NM_011251.1,2427-2445).
ctggtcttcagatacaaat

SEQ ID NO: 485878 - DNA, 19 bp, Mus musculus
  siRNA target sequence for Rbm6 (NM_011251.1,2430-2448).
gtcttcagatacaaatcga

SEQ ID NO: 485879 - DNA, 19 bp, Mus musculus
  siRNA target sequence for Rbm6 (NM_011251.1,2449-2467).
caagggcaacagtcatcat

SEQ ID NO: 485880 - DNA, 19 bp, Mus musculus
  siRNA target sequence for Rbm6 (NM_011251.1,2465-2483).
catctgactgctacatata

SEQ ID NO: 485881 - DNA, 19 bp, Mus musculus
  siRNA target sequence for Rbm6 (NM_011251.1,2472-2490).
ctgctacatatatgattct

SEQ ID NO: 485882 - DNA, 19 bp, Mus musculus
  siRNA target sequence for Rbm6 (NM_011251.1,2478-2496).
catatatgattctactact

SEQ ID NO: 485883 - DNA, 19 bp, Mus musculus
  siRNA target sequence for Rbm6 (NM_011251.1,2492-2510).
ctactggctactattatga

SEQ ID NO: 485884 - DNA, 19 bp, Mus musculus
  siRNA target sequence for Rbm6 (NM_011251.1,3109-3127).
gagcgggagggaaggttta

SEQ ID NO: 485885 - DNA, 19 bp, Mus musculus
  siRNA target sequence for Rbm6 (NM_011251.1,3111-3129).
gcgggagggaaggtttaaa

SEQ ID NO: 485886 - DNA, 19 bp, Mus musculus
  siRNA target sequence for Rbm6 (NM_011251.1,3145-3163).
cgaagggaaaaactacaat

SEQ ID NO: 485887 - DNA, 19 bp, Mus musculus
  siRNA target sequence for Rbm6 (NM_011251.1,3149-3167).
gggaaaaactacaatcttt

SEQ ID NO: 485888 - DNA, 19 bp, Mus musculus
  siRNA target sequence for Rbm6 (NM_011251.1,3176-3194).
cagaaaggaaacggattaa

SEQ ID NO: 485889 - DNA, 19 bp, Mus musculus
  siRNA target sequence for Rbm6 (NM_011251.1,3217-3235).
gatcgtaaccctgttgata

SEQ ID NO: 485890 - DNA, 19 bp, Mus musculus
  siRNA target sequence for Rbm6 (NM_011251.1,3332-3350).
gttcatcagaggagattga

SEQ ID NO: 485891 - DNA, 19 bp, Mus musculus
  siRNA target sequence for Rbm6 (NM_011251.1,3428-3446).
ctgttcgaagagtcatgtt

SEQ ID NO: 485892 - DNA, 19 bp, Mus musculus
  siRNA target sequence for Rbm6 (NM_011251.1,3439-3457).
gtcatgtttgctcgatata

SEQ ID NO: 485893 - DNA, 19 bp, Mus musculus
  siRNA target sequence for Rbmx (NM_011252.2,326-344).
gaaggaccgagaaacgaat

SEQ ID NO: 485894 - DNA, 19 bp, Mus musculus
  siRNA target sequence for Rbmx (NM_011252.2,330-348).
gaccgagaaacgaataagt

SEQ ID NO: 485895 - DNA, 19 bp, Mus musculus
  siRNA target sequence for Rbmx (NM_011252.2,332-350).
ccgagaaacgaataagtca

SEQ ID NO: 485896 - DNA, 19 bp, Mus musculus
  siRNA target sequence for Rbmx (NM_011252.2,333-351).
cgagaaacgaataagtcaa

SEQ ID NO: 485897 - DNA, 19 bp, Mus musculus
  siRNA target sequence for Rbmx (NM_011252.2,637-655).
gaggacctctgccagtaaa

SEQ ID NO: 485898 - DNA, 19 bp, Mus musculus
  siRNA target sequence for Rbmx (NM_011252.2,889-907).
ctcgagatacacgagatta

SEQ ID NO: 485899 - DNA, 19 bp, Mus musculus
  siRNA target sequence for Rbmx (NM_011252.2,1151-1169).
ctcacgtgacggatatggt

SEQ ID NO: 485900 - DNA, 19 bp, Mus musculus
  siRNA target sequence for Recql4 (NM_058214.1,39-57).
gtgggaacgcgcttttgca

SEQ ID NO: 485901 - DNA, 19 bp, Mus musculus
  siRNA target sequence for Recql4 (NM_058214.1,126-144).
ccgtgagtaccgtaaccta

SEQ ID NO: 485902 - DNA, 19 bp, Mus musculus
  siRNA target sequence for Recql4 (NM_058214.1,127-145).
cgtgagtaccgtaacctaa

SEQ ID NO: 485903 - DNA, 19 bp, Mus musculus
  siRNA target sequence for Recql4 (NM_058214.1,253-271).
cgagctgcaacgcagaata

SEQ ID NO: 485904 - DNA, 19 bp, Mus musculus
  siRNA target sequence for Recql4 (NM_058214.1,263-281).
cgcagaatacgcagtctat

SEQ ID NO: 485905 - DNA, 19 bp, Mus musculus
  siRNA target sequence for Recql4 (NM_058214.1,272-290).
cgcagtctatgccaaaaca

SEQ ID NO: 485906 - DNA, 19 bp, Mus musculus
  siRNA target sequence for Recql4 (NM_058214.1,300-318).
gagttctgtacaagactat

SEQ ID NO: 485907 - DNA, 19 bp, Mus musculus
  siRNA target sequence for Recql4 (NM_058214.1,538-556).
ctcagccggaggttgactt

SEQ ID NO: 485908 - DNA, 19 bp, Mus musculus
  siRNA target sequence for Recql4 (NM_058214.1,558-576).
cctagaccctggttggtta

SEQ ID NO: 485909 - DNA, 19 bp, Mus musculus
  siRNA target sequence for Recql4 (NM_058214.1,769-787).
cccaaatccatcaacagta

SEQ ID NO: 485910 - DNA, 19 bp, Mus musculus
  siRNA target sequence for Recql4 (NM_058214.1,928-946).
gtccctcagccatgcaatt

SEQ ID NO: 485911 - DNA, 19 bp, Mus musculus
  siRNA target sequence for Recql4 (NM_058214.1,1018-1036).
ctagacagagggaactata

SEQ ID NO: 485912 - DNA, 19 bp, Mus musculus
  siRNA target sequence for Recql4 (NM_058214.1,1039-1057).
cgactcaacatgaaaaaca

SEQ ID NO: 485913 - DNA, 19 bp, Mus musculus
  siRNA target sequence for Recql4 (NM_058214.1,1502-1520).
ggcaagagcgtgcaatcat

SEQ ID NO: 485914 - DNA, 19 bp, Mus musculus
  siRNA target sequence for Recql4 (NM_058214.1,1513-1531).
gcaatcatgcggattcttt

SEQ ID NO: 485915 - DNA, 19 bp, Mus musculus
  siRNA target sequence for Recql4 (NM_058214.1,1674-1692).
gtccgatctgccttcatgt

SEQ ID NO: 485916 - DNA, 19 bp, Mus musculus
  siRNA target sequence for Recql4 (NM_058214.1,1929-1947).
cctacgtgtttgcaaagtt

SEQ ID NO: 485917 - DNA, 19 bp, Mus musculus
  siRNA target sequence for Recql4 (NM_058214.1,2036-2054).
gcatagctggcgagtttga

SEQ ID NO: 485918 - DNA, 19 bp, Mus musculus
  siRNA target sequence for Recql4 (NM_058214.1,2096-2114).
ccgtgtccatggatagaga

SEQ ID NO: 485919 - DNA, 19 bp, Mus musculus
  siRNA target sequence for Recql4 (NM_058214.1,2142-2160).
gcaaggggaccgttttcgt

SEQ ID NO: 485920 - DNA, 19 bp, Mus musculus
  siRNA target sequence for Recql4 (NM_058214.1,2143-2161).
caaggggaccgttttcgta

SEQ ID NO: 485921 - DNA, 19 bp, Mus musculus
  siRNA target sequence for Recql4 (NM_058214.1,2158-2176).
cgtaccctggattcagtta

SEQ ID NO: 485922 - DNA, 19 bp, Mus musculus
  siRNA target sequence for Recql4 (NM_058214.1,2159-2177).
gtaccctggattcagttat

SEQ ID NO: 485923 - DNA, 19 bp, Mus musculus
  siRNA target sequence for Recql4 (NM_058214.1,2319-2337).
ggaacggcgacgagtacaa

SEQ ID NO: 485924 - DNA, 19 bp, Mus musculus
  siRNA target sequence for Recql4 (NM_058214.1,2500-2518).
gcccattgccacctattca

SEQ ID NO: 485925 - DNA, 19 bp, Mus musculus
  siRNA target sequence for Recql4 (NM_058214.1,2633-2651).
gccagagacctgtttccaa

SEQ ID NO: 485926 - DNA, 19 bp, Mus musculus
  siRNA target sequence for Recql4 (NM_058214.1,2970-2988).
caggagctccttagagttt

SEQ ID NO: 485927 - DNA, 19 bp, Mus musculus
  siRNA target sequence for Recql4 (NM_058214.1,3098-3116).
ccggagtgcttgtgaagtt

SEQ ID NO: 485928 - DNA, 19 bp, Mus musculus
  siRNA target sequence for Recql4 (NM_058214.1,3229-3247).
gcccacctacaccaaatgt

SEQ ID NO: 485929 - DNA, 19 bp, Mus musculus
  siRNA target sequence for Recql4 (NM_058214.1,3278-3296).
gttgtggaccctgtttaga

SEQ ID NO: 485930 - DNA, 19 bp, Mus musculus
  siRNA target sequence for Recql4 (NM_058214.1,3609-3627).
gatgcacctagctacagaa

SEQ ID NO: 485931 - DNA, 19 bp, Mus musculus
  siRNA target sequence for Recql5 (NM_130454.1,151-169).
gaaagtctttgggtttgat

SEQ ID NO: 485932 - DNA, 19 bp, Mus musculus
  siRNA target sequence for Recql5 (NM_130454.1,219-237).
gtgccgaggatgtgtttgt

SEQ ID NO: 485933 - DNA, 19 bp, Mus musculus
  siRNA target sequence for Recql5 (NM_130454.1,297-315).
gtgggatcaccattgtagt

SEQ ID NO: 485934 - DNA, 19 bp, Mus musculus
  siRNA target sequence for Recql5 (NM_130454.1,321-339).
ctctcattgccttgattca

SEQ ID NO: 485935 - DNA, 19 bp, Mus musculus
  siRNA target sequence for Recql5 (NM_130454.1,362-380).
gccttgaaggtacaagtta

SEQ ID NO: 485936 - DNA, 19 bp, Mus musculus
  siRNA target sequence for Recql5 (NM_130454.1,364-382).
cttgaaggtacaagttagt

SEQ ID NO: 485937 - DNA, 19 bp, Mus musculus
  siRNA target sequence for Recql5 (NM_130454.1,445-463).
caaacctcggaccaaactt

SEQ ID NO: 485938 - DNA, 19 bp, Mus musculus
  siRNA target sequence for Recql5 (NM_130454.1,450-468).
ctcggaccaaacttttgta

SEQ ID NO: 485939 - DNA, 19 bp, Mus musculus
  siRNA target sequence for Recql5 (NM_130454.1,452-470).
cggaccaaacttttgtaca

SEQ ID NO: 485940 - DNA, 19 bp, Mus musculus
  siRNA target sequence for Recql5 (NM_130454.1,576-594).
cccagtggggacatgactt

SEQ ID NO: 485941 - DNA, 19 bp, Mus musculus
  siRNA target sequence for Recql5 (NM_130454.1,590-608).
gacttccgtcctgactatt

SEQ ID NO: 485942 - DNA, 19 bp, Mus musculus
  siRNA target sequence for Recql5 (NM_130454.1,682-700).
ggttcaagaggatgtgttt

SEQ ID NO: 485943 - DNA, 19 bp, Mus musculus
  siRNA target sequence for Recql5 (NM_130454.1,722-740).
ccagtcgcctctttcaaga

SEQ ID NO: 485944 - DNA, 19 bp, Mus musculus
  siRNA target sequence for Recql5 (NM_130454.1,797-815).
gacgtctatggcaatctga

SEQ ID NO: 485945 - DNA, 19 bp, Mus musculus
  siRNA target sequence for Recql5 (NM_130454.1,867-885).
ctggctgtggcattgtcta

SEQ ID NO: 485946 - DNA, 19 bp, Mus musculus
  siRNA target sequence for Recql5 (NM_130454.1,892-910).
gactagagaagcttgtgaa

SEQ ID NO: 485947 - DNA, 19 bp, Mus musculus
  siRNA target sequence for Recql5 (NM_130454.1,967-985).
cctgaaggcatctgataga

SEQ ID NO: 485948 - DNA, 19 bp, Mus musculus
  siRNA target sequence for Recql5 (NM_130454.1,1054-1072).
gggagtagacaaagctaat

SEQ ID NO: 485949 - DNA, 19 bp, Mus musculus
  siRNA target sequence for Recql5 (NM_130454.1,1056-1074).
gagtagacaaagctaatgt

SEQ ID NO: 485950 - DNA, 19 bp, Mus musculus
  siRNA target sequence for Recql5 (NM_130454.1,1161-1179).
cttggtgccgcctgtatta

SEQ ID NO: 485951 - DNA, 19 bp, Mus musculus
  siRNA target sequence for Recql5 (NM_130454.1,1165-1183).
gtgccgcctgtattactct

SEQ ID NO: 485952 - DNA, 19 bp, Mus musculus
  siRNA target sequence for Recql5 (NM_130454.1,1250-1268).
gggaacaaaccgtctgata

SEQ ID NO: 485953 - DNA, 19 bp, Mus musculus
  siRNA target sequence for Recql5 (NM_130454.1,1251-1269).
ggaacaaaccgtctgataa

SEQ ID NO: 485954 - DNA, 19 bp, Mus musculus
  siRNA target sequence for Recql5 (NM_130454.1,1325-1343).
cgccatgctgccattgcta

SEQ ID NO: 485955 - DNA, 19 bp, Mus musculus
  siRNA target sequence for Recql5 (NM_130454.1,1326-1344).
gccatgctgccattgctaa

SEQ ID NO: 485956 - DNA, 19 bp, Mus musculus
  siRNA target sequence for Recql5 (NM_130454.1,1332-1350).
ctgccattgctaagtactt

SEQ ID NO: 485957 - DNA, 19 bp, Mus musculus
  siRNA target sequence for Recql5 (NM_130454.1,1587-1605).
cccacaagcgggaatggaa

SEQ ID NO: 485958 - DNA, 19 bp, Mus musculus
  siRNA target sequence for Recql5 (NM_130454.1,1588-1606).
ccacaagcgggaatggaat

SEQ ID NO: 485959 - DNA, 19 bp, Mus musculus
  siRNA target sequence for Recql5 (NM_130454.1,1595-1613).
cgggaatggaatcttttct

SEQ ID NO: 485960 - DNA, 19 bp, Mus musculus
  siRNA target sequence for Recql5 (NM_130454.1,1603-1621).
gaatcttttctatcagaaa

SEQ ID NO: 485961 - DNA, 19 bp, Mus musculus
  siRNA target sequence for Recql5 (NM_130454.1,1862-1880).
gccaagatggtcaatctgt

SEQ ID NO: 485962 - DNA, 19 bp, Mus musculus
  siRNA target sequence for Recql5 (NM_130454.1,1863-1881).
ccaagatggtcaatctgta

SEQ ID NO: 485963 - DNA, 19 bp, Mus musculus
  siRNA target sequence for Recql5 (NM_130454.1,2016-2034).
cgccaacctcacatgtgta

SEQ ID NO: 485964 - DNA, 19 bp, Mus musculus
  siRNA target sequence for Recql5 (NM_130454.1,2178-2196).
gggtctgtgaccttcaaga

SEQ ID NO: 485965 - DNA, 19 bp, Mus musculus
  siRNA target sequence for Recql5 (NM_130454.1,2179-2197).
ggtctgtgaccttcaagat

SEQ ID NO: 485966 - DNA, 19 bp, Mus musculus
  siRNA target sequence for Recql5 (NM_130454.1,2216-2234).
caccctgggtaccaagaaa

SEQ ID NO: 485967 - DNA, 19 bp, Mus musculus
  siRNA target sequence for Recql5 (NM_130454.1,2240-2258).
ctaggaagcagtgttaatt

SEQ ID NO: 485968 - DNA, 19 bp, Mus musculus
  siRNA target sequence for Recql5 (NM_130454.1,2316-2334).
ctagagccagcaagaaaca

SEQ ID NO: 485969 - DNA, 19 bp, Mus musculus
  siRNA target sequence for Recql5 (NM_130454.1,2357-2375).
cgcaaggattcccagaata

SEQ ID NO: 485970 - DNA, 19 bp, Mus musculus
  siRNA target sequence for Recql5 (NM_130454.1,2358-2376).
gcaaggattcccagaatat

SEQ ID NO: 485971 - DNA, 19 bp, Mus musculus
  siRNA target sequence for Recql5 (NM_130454.1,2362-2380).
ggattcccagaatatcact

SEQ ID NO: 485972 - DNA, 19 bp, Mus musculus
  siRNA target sequence for Recql5 (NM_130454.1,2591-2609).
cctagccctctaaaggaaa

SEQ ID NO: 485973 - DNA, 19 bp, Mus musculus
  siRNA target sequence for Recql5 (NM_130454.1,2730-2748).
gtgatcgcagcactgaaaa

SEQ ID NO: 485974 - DNA, 19 bp, Mus musculus
  siRNA target sequence for Recql5 (NM_130454.1,2799-2817).
gggaggccgcagacattgt

SEQ ID NO: 485975 - DNA, 19 bp, Mus musculus
  siRNA target sequence for Recql5 (NM_130454.1,2846-2864).
gagggcaggtttatatcca

SEQ ID NO: 485976 - DNA, 19 bp, Mus musculus
  siRNA target sequence for Rnase1 (NM_011271.2,226-244).
ccacctactgcaaccaaat

SEQ ID NO: 485977 - DNA, 19 bp, Mus musculus
  siRNA target sequence for Rnase1 (NM_011271.2,233-251).
ctgcaaccaaatgatgaaa

SEQ ID NO: 485978 - DNA, 19 bp, Mus musculus
  siRNA target sequence for Rnase1 (NM_011271.2,416-434).
gaagggcaactccaagtat

SEQ ID NO: 485979 - DNA, 19 bp, Mus musculus
  siRNA target sequence for Rnase1 (NM_011271.2,435-453).
cccaactgtgactacaaga

SEQ ID NO: 485980 - DNA, 19 bp, Mus musculus
  siRNA target sequence for Rnase1 (NM_011271.2,444-462).
gactacaagaccactcaat

SEQ ID NO: 485981 - DNA, 19 bp, Mus musculus
  siRNA target sequence for Rnase1 (NM_011271.2,503-521).
cgtaccagtccactttgat

SEQ ID NO: 485982 - DNA, 19 bp, Mus musculus
  siRNA target sequence for Rnase9 (NM_183032.1,195-213).
gaagcttcaggggaactat

SEQ ID NO: 485983 - DNA, 19 bp, Mus musculus
  siRNA target sequence for Rnase9 (NM_183032.1,240-258).
cccagaagtacgtgacttt

SEQ ID NO: 485984 - DNA, 19 bp, Mus musculus
  siRNA target sequence for Rnase9 (NM_183032.1,241-259).
ccagaagtacgtgacttta

SEQ ID NO: 485985 - DNA, 19 bp, Mus musculus
  siRNA target sequence for Rnase9 (NM_183032.1,242-260).
cagaagtacgtgactttat

SEQ ID NO: 485986 - DNA, 19 bp, Mus musculus
  siRNA target sequence for Rnase9 (NM_183032.1,244-262).
gaagtacgtgactttatta

SEQ ID NO: 485987 - DNA, 19 bp, Mus musculus
  siRNA target sequence for Rnase9 (NM_183032.1,288-306).
caaaccacctaccgtaaaa

SEQ ID NO: 485988 - DNA, 19 bp, Mus musculus
  siRNA target sequence for Rnase9 (NM_183032.1,292-310).
ccacctaccgtaaaaagaa

SEQ ID NO: 485989 - DNA, 19 bp, Mus musculus
  siRNA target sequence for Rnase9 (NM_183032.1,293-311).
cacctaccgtaaaaagaat

SEQ ID NO: 485990 - DNA, 19 bp, Mus musculus
  siRNA target sequence for Rnase9 (NM_183032.1,295-313).
cctaccgtaaaaagaatca

SEQ ID NO: 485991 - DNA, 19 bp, Mus musculus
  siRNA target sequence for Rnase9 (NM_183032.1,296-314).
ctaccgtaaaaagaatcat

SEQ ID NO: 485992 - DNA, 19 bp, Mus musculus
  siRNA target sequence for Rnase9 (NM_183032.1,300-318).
cgtaaaaagaatcatagaa

SEQ ID NO: 485993 - DNA, 19 bp, Mus musculus
  siRNA target sequence for Rnase9 (NM_183032.1,326-344).
ccattggtgaccaaccttt

SEQ ID NO: 485994 - DNA, 19 bp, Mus musculus
  siRNA target sequence for Rnase9 (NM_183032.1,334-352).
gaccaacctttcaatgact

SEQ ID NO: 485995 - DNA, 19 bp, Mus musculus
  siRNA target sequence for Rnase9 (NM_183032.1,340-358).
cctttcaatgactacgatt

SEQ ID NO: 485996 - DNA, 19 bp, Mus musculus
  siRNA target sequence for Rnase9 (NM_183032.1,341-359).
ctttcaatgactacgatta

SEQ ID NO: 485997 - DNA, 19 bp, Mus musculus
  siRNA target sequence for Rnase9 (NM_183032.1,377-395).
ggactaaacagattcacta

SEQ ID NO: 485998 - DNA, 19 bp, Mus musculus
  siRNA target sequence for Rnase9 (NM_183032.1,378-396).
gactaaacagattcactat

SEQ ID NO: 485999 - DNA, 19 bp, Mus musculus
  siRNA target sequence for Rnase9 (NM_183032.1,404-422).
gctgttacccagaacacta

SEQ ID NO: 486000 - DNA, 19 bp, Mus musculus
  siRNA target sequence for Rnase9 (NM_183032.1,407-425).
gttacccagaacactacat

SEQ ID NO: 486001 - DNA, 19 bp, Mus musculus
  siRNA target sequence for Rnase9 (NM_183032.1,436-454).
ccctatggtgagctagtaa

SEQ ID NO: 486002 - DNA, 19 bp, Mus musculus
  siRNA target sequence for Rnase9 (NM_183032.1,437-455).
cctatggtgagctagtaaa

SEQ ID NO: 486003 - DNA, 19 bp, Mus musculus
  siRNA target sequence for Rnase9 (NM_183032.1,438-456).
ctatggtgagctagtaaaa

SEQ ID NO: 486004 - DNA, 19 bp, Mus musculus
  siRNA target sequence for Rnase9 (NM_183032.1,467-485).
gtgaagaagtgcaatgtaa

SEQ ID NO: 486005 - DNA, 19 bp, Mus musculus
  siRNA target sequence for Rnase9 (NM_183032.1,509-527).
gaagcatgaatctaatcga

SEQ ID NO: 486006 - DNA, 19 bp, Mus musculus
  siRNA target sequence for Rnaseh1 (NM_011275.1,208-226).
cctgctgccaggtttaaga

SEQ ID NO: 486007 - DNA, 19 bp, Mus musculus
  siRNA target sequence for Rnaseh1 (NM_011275.1,209-227).
ctgctgccaggtttaagaa

SEQ ID NO: 486008 - DNA, 19 bp, Mus musculus
  siRNA target sequence for Rnaseh1 (NM_011275.1,212-230).
ctgccaggtttaagaaatt

SEQ ID NO: 486009 - DNA, 19 bp, Mus musculus
  siRNA target sequence for Rnaseh1 (NM_011275.1,517-535).
gcaggaattggcgtttact

SEQ ID NO: 486010 - DNA, 19 bp, Mus musculus
  siRNA target sequence for Rnaseh1 (NM_011275.1,539-557).
gcccaggccaccccttaaa

SEQ ID NO: 486011 - DNA, 19 bp, Mus musculus
  siRNA target sequence for Rnaseh1 (NM_011275.1,542-560).
caggccaccccttaaatgt

SEQ ID NO: 486012 - DNA, 19 bp, Mus musculus
  siRNA target sequence for Rnaseh1 (NM_011275.1,686-704).
ccatcaatgggataactaa

SEQ ID NO: 486013 - DNA, 19 bp, Mus musculus
  siRNA target sequence for Rnaseh1 (NM_011275.1,842-860).
gatttgtgggcaatgaaga

SEQ ID NO: 486014 - DNA, 19 bp, Mus musculus
  siRNA target sequence for Rod1 (NM_144904.1,231-249).
gcagctaatgggaatgaca

SEQ ID NO: 486015 - DNA, 19 bp, Mus musculus
  siRNA target sequence for Rod1 (NM_144904.1,235-253).
ctaatgggaatgacaacaa

SEQ ID NO: 486016 - DNA, 19 bp, Mus musculus
  siRNA target sequence for Rod1 (NM_144904.1,299-317).
ccatcttcgaaaaattcca

SEQ ID NO: 486017 - DNA, 19 bp, Mus musculus
  siRNA target sequence for Rod1 (NM_144904.1,300-318).
catcttcgaaaaattccat

SEQ ID NO: 486018 - DNA, 19 bp, Mus musculus
  siRNA target sequence for Rod1 (NM_144904.1,329-347).
cgaagcagaggtcatatca

SEQ ID NO: 486019 - DNA, 19 bp, Mus musculus
  siRNA target sequence for Rod1 (NM_144904.1,330-348).
gaagcagaggtcatatcat

SEQ ID NO: 486020 - DNA, 19 bp, Mus musculus
  siRNA target sequence for Rod1 (NM_144904.1,358-376).
catttggcaaagtaactaa

SEQ ID NO: 486021 - DNA, 19 bp, Mus musculus
  siRNA target sequence for Rod1 (NM_144904.1,369-387).
gtaactaatcttttgatgt

SEQ ID NO: 486022 - DNA, 19 bp, Mus musculus
  siRNA target sequence for Rod1 (NM_144904.1,432-450).
gctgctgttactatgataa

SEQ ID NO: 486023 - DNA, 19 bp, Mus musculus
  siRNA target sequence for Rod1 (NM_144904.1,480-498).
cgaagtcagcctgtttata

SEQ ID NO: 486024 - DNA, 19 bp, Mus musculus
  siRNA target sequence for Rod1 (NM_144904.1,508-526).
ccaatcaccgagaacttaa

SEQ ID NO: 486025 - DNA, 19 bp, Mus musculus
  siRNA target sequence for Rod1 (NM_144904.1,529-547).
ctgacaatctgcctaatca

SEQ ID NO: 486026 - DNA, 19 bp, Mus musculus
  siRNA target sequence for Rod1 (NM_144904.1,610-628).
ctggagctactgcaaatga

SEQ ID NO: 486027 - DNA, 19 bp, Mus musculus
  siRNA target sequence for Rod1 (NM_144904.1,653-671).
ccctgtgctccggataatt

SEQ ID NO: 486028 - DNA, 19 bp, Mus musculus
  siRNA target sequence for Rod1 (NM_144904.1,654-672).
cctgtgctccggataatta

SEQ ID NO: 486029 - DNA, 19 bp, Mus musculus
  siRNA target sequence for Rod1 (NM_144904.1,659-677).
gctccggataattattgaa

SEQ ID NO: 486030 - DNA, 19 bp, Mus musculus
  siRNA target sequence for Rod1 (NM_144904.1,660-678).
ctccggataattattgaaa

SEQ ID NO: 486031 - DNA, 19 bp, Mus musculus
  siRNA target sequence for Rod1 (NM_144904.1,708-726).
ctccatcagatattttcta

SEQ ID NO: 486032 - DNA, 19 bp, Mus musculus
  siRNA target sequence for Rod1 (NM_144904.1,732-750).
ggcacggtgttgaagatta

SEQ ID NO: 486033 - DNA, 19 bp, Mus musculus
  siRNA target sequence for Rod1 (NM_144904.1,733-751).
gcacggtgttgaagattat

SEQ ID NO: 486034 - DNA, 19 bp, Mus musculus
  siRNA target sequence for Rod1 (NM_144904.1,791-809).
gtatgccgacccagtgaat

SEQ ID NO: 486035 - DNA, 19 bp, Mus musculus
  siRNA target sequence for Rod1 (NM_144904.1,859-877).
gctgcactctccgtattga

SEQ ID NO: 486036 - DNA, 19 bp, Mus musculus
  siRNA target sequence for Rod1 (NM_144904.1,862-880).
gcactctccgtattgactt

SEQ ID NO: 486037 - DNA, 19 bp, Mus musculus
  siRNA target sequence for Rod1 (NM_144904.1,892-910).
ccagccttaatgtgaaata

SEQ ID NO: 486038 - DNA, 19 bp, Mus musculus
  siRNA target sequence for Rod1 (NM_144904.1,895-913).
gccttaatgtgaaatacaa

SEQ ID NO: 486039 - DNA, 19 bp, Mus musculus
  siRNA target sequence for Rod1 (NM_144904.1,962-980).
cggccagccatctcttgaa

SEQ ID NO: 486040 - DNA, 19 bp, Mus musculus
  siRNA target sequence for Rod1 (NM_144904.1,1002-1020).
ggtgcaccgggtataatgt

SEQ ID NO: 486041 - DNA, 19 bp, Mus musculus
  siRNA target sequence for Rod1 (NM_144904.1,1052-1070).
cccagccatcgcatttcct

SEQ ID NO: 486042 - DNA, 19 bp, Mus musculus
  siRNA target sequence for Rod1 (NM_144904.1,1110-1128).
cttggtcctctcacactta

SEQ ID NO: 486043 - DNA, 19 bp, Mus musculus
  siRNA target sequence for Rod1 (NM_144904.1,1209-1227).
ctcaatcctgactttatca

SEQ ID NO: 486044 - DNA, 19 bp, Mus musculus
  siRNA target sequence for Rod1 (NM_144904.1,1228-1246).
caccacatgggctttttat

SEQ ID NO: 486045 - DNA, 19 bp, Mus musculus
  siRNA target sequence for Rod1 (NM_144904.1,1233-1251).
catgggctttttatcctat

SEQ ID NO: 486046 - DNA, 19 bp, Mus musculus
  siRNA target sequence for Rod1 (NM_144904.1,1238-1256).
gctttttatcctatttgga

SEQ ID NO: 486047 - DNA, 19 bp, Mus musculus
  siRNA target sequence for Rod1 (NM_144904.1,1269-1287).
gtacatcgagtgaagatta

SEQ ID NO: 486048 - DNA, 19 bp, Mus musculus
  siRNA target sequence for Rod1 (NM_144904.1,1394-1412).
ggctacactgtccaaacat

SEQ ID NO: 486049 - DNA, 19 bp, Mus musculus
  siRNA target sequence for Rod1 (NM_144904.1,1477-1495).
gtcccctgcatcgctttaa

SEQ ID NO: 486050 - DNA, 19 bp, Mus musculus
  siRNA target sequence for Rod1 (NM_144904.1,1502-1520).
cggctcaaagaatttccaa

SEQ ID NO: 486051 - DNA, 19 bp, Mus musculus
  siRNA target sequence for Rod1 (NM_144904.1,1615-1633).
gctcagtgaaggcttttaa

SEQ ID NO: 486052 - DNA, 19 bp, Mus musculus
  siRNA target sequence for Rod1 (NM_144904.1,1649-1667).
ccgtaagatggctctcatt

SEQ ID NO: 486053 - DNA, 19 bp, Mus musculus
  siRNA target sequence for Rp9h (NM_018739.1,252-270).
ctggagtccttttatgaga

SEQ ID NO: 486054 - DNA, 19 bp, Mus musculus
  siRNA target sequence for Rp9h (NM_018739.1,362-380).
ggctcacgctccgactaaa

SEQ ID NO: 486055 - DNA, 19 bp, Mus musculus
  siRNA target sequence for Rp9h (NM_018739.1,398-416).
ggggagagaggtcaaagtt

SEQ ID NO: 486056 - DNA, 19 bp, Mus musculus
  siRNA target sequence for Rp9h (NM_018739.1,400-418).
ggagagaggtcaaagttat

SEQ ID NO: 486057 - DNA, 19 bp, Mus musculus
  siRNA target sequence for Rp9h (NM_018739.1,405-423).
gaggtcaaagttatgcaat

SEQ ID NO: 486058 - DNA, 19 bp, Mus musculus
  siRNA target sequence for Rp9h (NM_018739.1,419-437).
gcaatgttggcgttgcaaa

SEQ ID NO: 486059 - DNA, 19 bp, Mus musculus
  siRNA target sequence for Rp9h (NM_018739.1,450-468).
cgaacaggcgacaaagaat

SEQ ID NO: 486060 - DNA, 19 bp, Mus musculus
  siRNA target sequence for Rp9h (NM_018739.1,506-524).
gttccgagtcgcacatgaa

SEQ ID NO: 486061 - DNA, 19 bp, Mus musculus
  siRNA target sequence for Rp9h (NM_018739.1,509-527).
ccgagtcgcacatgaagat

SEQ ID NO: 486062 - DNA, 19 bp, Mus musculus
  siRNA target sequence for Rp9h (NM_018739.1,517-535).
cacatgaagatcctatgta

SEQ ID NO: 486063 - DNA, 19 bp, Mus musculus
  siRNA target sequence for Rp9h (NM_018739.1,539-557).
catcattcgcgagaataaa

SEQ ID NO: 486064 - DNA, 19 bp, Mus musculus
  siRNA target sequence for Rp9h (NM_018739.1,542-560).
cattcgcgagaataaaaga

SEQ ID NO: 486065 - DNA, 19 bp, Mus musculus
  siRNA target sequence for Rp9h (NM_018739.1,573-591).
gtaaggatccagcagttaa

SEQ ID NO: 486066 - DNA, 19 bp, Mus musculus
  siRNA target sequence for Rpa2 (NM_011284.2,99-117).
gtggaatagcggattcgaa

SEQ ID NO: 486067 - DNA, 19 bp, Mus musculus
  siRNA target sequence for Rpa2 (NM_011284.2,191-209).
cgtcgcaggcggagaagaa

SEQ ID NO: 486068 - DNA, 19 bp, Mus musculus
  siRNA target sequence for Rpa2 (NM_011284.2,192-210).
gtcgcaggcggagaagaaa

SEQ ID NO: 486069 - DNA, 19 bp, Mus musculus
  siRNA target sequence for Rpa2 (NM_011284.2,196-214).
caggcggagaagaaatcga

SEQ ID NO: 486070 - DNA, 19 bp, Mus musculus
  siRNA target sequence for Rpa2 (NM_011284.2,275-293).
ctgatgaagtgttcagaat

SEQ ID NO: 486071 - DNA, 19 bp, Mus musculus
  siRNA target sequence for Rpa2 (NM_011284.2,296-314).
gagatgtcgagatttcaca

SEQ ID NO: 486072 - DNA, 19 bp, Mus musculus
  siRNA target sequence for Rpa2 (NM_011284.2,348-366).
gaaggctccaaccaacatt

SEQ ID NO: 486073 - DNA, 19 bp, Mus musculus
  siRNA target sequence for Rpa2 (NM_011284.2,351-369).
ggctccaaccaacattgtt

SEQ ID NO: 486074 - DNA, 19 bp, Mus musculus
  siRNA target sequence for Rpa2 (NM_011284.2,352-370).
gctccaaccaacattgttt

SEQ ID NO: 486075 - DNA, 19 bp, Mus musculus
  siRNA target sequence for Rpa2 (NM_011284.2,356-374).
caaccaacattgtttacaa

SEQ ID NO: 486076 - DNA, 19 bp, Mus musculus
  siRNA target sequence for Rpa2 (NM_011284.2,359-377).
ccaacattgtttacaagat

SEQ ID NO: 486077 - DNA, 19 bp, Mus musculus
  siRNA target sequence for Rpa2 (NM_011284.2,372-390).
caagatagacgatatgaca

SEQ ID NO: 486078 - DNA, 19 bp, Mus musculus
  siRNA target sequence for Rpa2 (NM_011284.2,451-469).
gtggttcctcccgaaacat

SEQ ID NO: 486079 - DNA, 19 bp, Mus musculus
  siRNA target sequence for Rpa2 (NM_011284.2,671-689).
ggaacttcagcgggaataa

SEQ ID NO: 486080 - DNA, 19 bp, Mus musculus
  siRNA target sequence for Rpa2 (NM_011284.2,758-776).
gacctgaaggcctgaactt

SEQ ID NO: 486081 - DNA, 19 bp, Mus musculus
  siRNA target sequence for Rpa2 (NM_011284.2,822-840).
caagcaagcagtggatttt

SEQ ID NO: 486082 - DNA, 19 bp, Mus musculus
  siRNA target sequence for Rpa2 (NM_011284.2,845-863).
gcaacgagggccacattta

SEQ ID NO: 486083 - DNA, 19 bp, Mus musculus
  siRNA target sequence for Rpa2 (NM_011284.2,850-868).
gagggccacatttactcta

SEQ ID NO: 486084 - DNA, 19 bp, Mus musculus
  siRNA target sequence for Rpa2 (NM_011284.2,871-889).
gtggacgacgatcacttta

SEQ ID NO: 486085 - DNA, 19 bp, Mus musculus
  siRNA target sequence for Rpa2 (NM_011284.2,874-892).
gacgacgatcactttaagt

SEQ ID NO: 486086 - DNA, 19 bp, Mus musculus
  siRNA target sequence for Rpa2 (NM_011284.2,877-895).
gacgatcactttaagtcta

SEQ ID NO: 486087 - DNA, 19 bp, Mus musculus
  siRNA target sequence for Rps3 (NM_012052.1,61-79).
ctgagctgaatgaatttct

SEQ ID NO: 486088 - DNA, 19 bp, Mus musculus
  siRNA target sequence for Rps3 (NM_012052.1,366-384).
ggtgtgcttcggttcatta

SEQ ID NO: 486089 - DNA, 19 bp, Mus musculus
  siRNA target sequence for Rps3 (NM_012052.1,367-385).
gtgtgcttcggttcattat

SEQ ID NO: 486090 - DNA, 19 bp, Mus musculus
  siRNA target sequence for Rps3 (NM_012052.1,465-483).
gatggtctgatgattcaca

SEQ ID NO: 486091 - DNA, 19 bp, Mus musculus
  siRNA target sequence for Rps3 (NM_012052.1,484-502).
gtggagaccctgttaacta

SEQ ID NO: 486092 - DNA, 19 bp, Mus musculus
  siRNA target sequence for Rsn (NM_019765.2,189-207).
gcccctaccaagatcctta

SEQ ID NO: 486093 - DNA, 19 bp, Mus musculus
  siRNA target sequence for Rsn (NM_019765.2,190-208).
cccctaccaagatccttaa

SEQ ID NO: 486094 - DNA, 19 bp, Mus musculus
  siRNA target sequence for Rsn (NM_019765.2,250-268).
ctccagtggagaagacaat

SEQ ID NO: 486095 - DNA, 19 bp, Mus musculus
  siRNA target sequence for Rsn (NM_019765.2,371-389).
cggatttatccagtttctt

SEQ ID NO: 486096 - DNA, 19 bp, Mus musculus
  siRNA target sequence for Rsn (NM_019765.2,419-437).
ggctgggattgttttagat

SEQ ID NO: 486097 - DNA, 19 bp, Mus musculus
  siRNA target sequence for Rsn (NM_019765.2,469-487).
cgggagtgcggtatttcca

SEQ ID NO: 486098 - DNA, 19 bp, Mus musculus
  siRNA target sequence for Rsn (NM_019765.2,512-530).
cacccgaccttcaaagcta

SEQ ID NO: 486099 - DNA, 19 bp, Mus musculus
  siRNA target sequence for Rsn (NM_019765.2,637-655).
cagccactccctcaaatat

SEQ ID NO: 486100 - DNA, 19 bp, Mus musculus
  siRNA target sequence for Rsn (NM_019765.2,670-688).
cccagtcaacggcaaaaga

SEQ ID NO: 486101 - DNA, 19 bp, Mus musculus
  siRNA target sequence for Rsn (NM_019765.2,671-689).
ccagtcaacggcaaaagaa

SEQ ID NO: 486102 - DNA, 19 bp, Mus musculus
  siRNA target sequence for Rsn (NM_019765.2,697-715).
ctacacctcaaattagcaa

SEQ ID NO: 486103 - DNA, 19 bp, Mus musculus
  siRNA target sequence for Rsn (NM_019765.2,926-944).
ggccggaacaaggtatttt

SEQ ID NO: 486104 - DNA, 19 bp, Mus musculus
  siRNA target sequence for Rsn (NM_019765.2,928-946).
ccggaacaaggtattttca

SEQ ID NO: 486105 - DNA, 19 bp, Mus musculus
  siRNA target sequence for Rsn (NM_019765.2,1148-1166).
ccggacaggactattgact

SEQ ID NO: 486106 - DNA, 19 bp, Mus musculus
  siRNA target sequence for Rsn (NM_019765.2,1301-1319).
cagccacgtgggggaaata

SEQ ID NO: 486107 - DNA, 19 bp, Mus musculus
  siRNA target sequence for Rsn (NM_019765.2,1475-1493).
ccttcagttccgagttgaa

SEQ ID NO: 486108 - DNA, 19 bp, Mus musculus
  siRNA target sequence for Rsn (NM_019765.2,1527-1545).
gctaccgtctcagaaaagt

SEQ ID NO: 486109 - DNA, 19 bp, Mus musculus
  siRNA target sequence for Rsn (NM_019765.2,1537-1555).
cagaaaagtcccgaataat

SEQ ID NO: 486110 - DNA, 19 bp, Mus musculus
  siRNA target sequence for Rsn (NM_019765.2,1546-1564).
cccgaataatggaactaga

SEQ ID NO: 486111 - DNA, 19 bp, Mus musculus
  siRNA target sequence for Rsn (NM_019765.2,1547-1565).
ccgaataatggaactagaa

SEQ ID NO: 486112 - DNA, 19 bp, Mus musculus
  siRNA target sequence for Rsn (NM_019765.2,1658-1676).
ccttttgcaagaaataagt

SEQ ID NO: 486113 - DNA, 19 bp, Mus musculus
  siRNA target sequence for Rsn (NM_019765.2,1716-1734).
cagggcgagatgacttctt

SEQ ID NO: 486114 - DNA, 19 bp, Mus musculus
  siRNA target sequence for Rsn (NM_019765.2,1719-1737).
ggcgagatgacttctttga

SEQ ID NO: 486115 - DNA, 19 bp, Mus musculus
  siRNA target sequence for Rsn (NM_019765.2,1755-1773).
cgagaggaggcgtttcaga

SEQ ID NO: 486116 - DNA, 19 bp, Mus musculus
  siRNA target sequence for Rsn (NM_019765.2,1859-1877).
ggagaactccgatgtgata

SEQ ID NO: 486117 - DNA, 19 bp, Mus musculus
  siRNA target sequence for Rsn (NM_019765.2,1940-1958).
gaaggtgtcctttagcaaa

SEQ ID NO: 486118 - DNA, 19 bp, Mus musculus
  siRNA target sequence for Rsn (NM_019765.2,1966-1984).
gaacggactccgctgaatt

SEQ ID NO: 486119 - DNA, 19 bp, Mus musculus
  siRNA target sequence for Rsn (NM_019765.2,1970-1988).
ggactccgctgaatttgct

SEQ ID NO: 486120 - DNA, 19 bp, Mus musculus
  siRNA target sequence for Rsn (NM_019765.2,1976-1994).
cgctgaatttgctgagtta

SEQ ID NO: 486121 - DNA, 19 bp, Mus musculus
  siRNA target sequence for Rsn (NM_019765.2,2011-2029).
gactgagactagattacca

SEQ ID NO: 486122 - DNA, 19 bp, Mus musculus
  siRNA target sequence for Rsn (NM_019765.2,2028-2046).
cagcacgaaatagaaagtt

SEQ ID NO: 486123 - DNA, 19 bp, Mus musculus
  siRNA target sequence for Rsn (NM_019765.2,2030-2048).
gcacgaaatagaaagttta

SEQ ID NO: 486124 - DNA, 19 bp, Mus musculus
  siRNA target sequence for Rsn (NM_019765.2,2069-2087).
gcggtctgctcatgctaaa

SEQ ID NO: 486125 - DNA, 19 bp, Mus musculus
  siRNA target sequence for Rsn (NM_019765.2,2230-2248).
cggagattaaggtaaagga

SEQ ID NO: 486126 - DNA, 19 bp, Mus musculus
  siRNA target sequence for Rsn (NM_019765.2,2280-2298).
caaagcgaggtcattggta

SEQ ID NO: 486127 - DNA, 19 bp, Mus musculus
  siRNA target sequence for Rsn (NM_019765.2,2284-2302).
gcgaggtcattggtaattt

SEQ ID NO: 486128 - DNA, 19 bp, Mus musculus
  siRNA target sequence for Rsn (NM_019765.2,2285-2303).
cgaggtcattggtaatttt

SEQ ID NO: 486129 - DNA, 19 bp, Mus musculus
  siRNA target sequence for Rsn (NM_019765.2,2381-2399).
ggagctcgagacacttaga

SEQ ID NO: 486130 - DNA, 19 bp, Mus musculus
  siRNA target sequence for Rsn (NM_019765.2,2457-2475).
gaaagtagcaaggctaata

SEQ ID NO: 486131 - DNA, 19 bp, Mus musculus
  siRNA target sequence for Rsn (NM_019765.2,2461-2479).
gtagcaaggctaatagcat

SEQ ID NO: 486132 - DNA, 19 bp, Mus musculus
  siRNA target sequence for Rsn (NM_019765.2,2528-2546).
cagtttgaatcaagtcaat

SEQ ID NO: 486133 - DNA, 19 bp, Mus musculus
  siRNA target sequence for Rsn (NM_019765.2,2530-2548).
gtttgaatcaagtcaatca

SEQ ID NO: 486134 - DNA, 19 bp, Mus musculus
  siRNA target sequence for Rsn (NM_019765.2,2628-2646).
cagacaaggatgcaagata

SEQ ID NO: 486135 - DNA, 19 bp, Mus musculus
  siRNA target sequence for Rsn (NM_019765.2,2636-2654).
gatgcaagataccgtaaat

SEQ ID NO: 486136 - DNA, 19 bp, Mus musculus
  siRNA target sequence for Rsn (NM_019765.2,2898-2916).
ctccagctcaagcttacaa

SEQ ID NO: 486137 - DNA, 19 bp, Mus musculus
  siRNA target sequence for Rsn (NM_019765.2,2921-2939).
caatgaaaacgccagtttt

SEQ ID NO: 486138 - DNA, 19 bp, Mus musculus
  siRNA target sequence for Rsn (NM_019765.2,2957-2975).
cgaagtgactcttaaagct

SEQ ID NO: 486139 - DNA, 19 bp, Mus musculus
  siRNA target sequence for Rsn (NM_019765.2,3130-3148).
caaagcatgaagaaatcct

SEQ ID NO: 486140 - DNA, 19 bp, Mus musculus
  siRNA target sequence for Rsn (NM_019765.2,3356-3374).
gcaaacaaatgcaagacta

SEQ ID NO: 486141 - DNA, 19 bp, Mus musculus
  siRNA target sequence for Rsn (NM_019765.2,3391-3409).
cacttaaggaaaacaactt

SEQ ID NO: 486142 - DNA, 19 bp, Mus musculus
  siRNA target sequence for Rsn (NM_019765.2,3447-3465).
ctgagtgtagagaaccaaa

SEQ ID NO: 486143 - DNA, 19 bp, Mus musculus
  siRNA target sequence for Rsn (NM_019765.2,3451-3469).
gtgtagagaaccaaaaaat

SEQ ID NO: 486144 - DNA, 19 bp, Mus musculus
  siRNA target sequence for Rsn (NM_019765.2,3545-3563).
ggaagagaacgtcaaactt

SEQ ID NO: 486145 - DNA, 19 bp, Mus musculus
  siRNA target sequence for Rsn (NM_019765.2,3614-3632).
ggaagaagaacgatctgta

SEQ ID NO: 486146 - DNA, 19 bp, Mus musculus
  siRNA target sequence for Rsn (NM_019765.2,3621-3639).
gaacgatctgtactcaata

SEQ ID NO: 486147 - DNA, 19 bp, Mus musculus
  siRNA target sequence for Rsn (NM_019765.2,3635-3653).
caataatcagttgttagaa

SEQ ID NO: 486148 - DNA, 19 bp, Mus musculus
  siRNA target sequence for Rsn (NM_019765.2,3679-3697).
gaaaagacgccgatgaaga

SEQ ID NO: 486149 - DNA, 19 bp, Mus musculus
  siRNA target sequence for Rsn (NM_019765.2,3970-3988).
cccaggagagtcagattga

SEQ ID NO: 486150 - DNA, 19 bp, Mus musculus
  siRNA target sequence for Rsn (NM_019765.2,3971-3989).
ccaggagagtcagattgat

SEQ ID NO: 486151 - DNA, 19 bp, Mus musculus
  siRNA target sequence for Rsn (NM_019765.2,3972-3990).
caggagagtcagattgatt

SEQ ID NO: 486152 - DNA, 19 bp, Mus musculus
  siRNA target sequence for Rsn (NM_019765.2,4000-4018).
cggtaatagtggatcttca

SEQ ID NO: 486153 - DNA, 19 bp, Mus musculus
  siRNA target sequence for Rsn (NM_019765.2,4001-4019).
ggtaatagtggatcttcaa

SEQ ID NO: 486154 - DNA, 19 bp, Mus musculus
  siRNA target sequence for Rsn (NM_019765.2,4002-4020).
gtaatagtggatcttcaaa

SEQ ID NO: 486155 - DNA, 19 bp, Mus musculus
  siRNA target sequence for Rsn (NM_019765.2,4256-4274).
cgaggagcggccatactgt

SEQ ID NO: 486156 - DNA, 19 bp, Mus musculus
  siRNA target sequence for Rsn (NM_019765.2,4273-4291).
gtgagatctgtgagatgtt

SEQ ID NO: 486157 - DNA, 19 bp, Mus musculus
  siRNA target sequence for Sart3 (NM_016926.1,541-559).
gagccgtgaaggactacat

SEQ ID NO: 486158 - DNA, 19 bp, Mus musculus
  siRNA target sequence for Sart3 (NM_016926.1,543-561).
gccgtgaaggactacatct

SEQ ID NO: 486159 - DNA, 19 bp, Mus musculus
  siRNA target sequence for Sart3 (NM_016926.1,806-824).
ggccacctttgcagagtat

SEQ ID NO: 486160 - DNA, 19 bp, Mus musculus
  siRNA target sequence for Sart3 (NM_016926.1,808-826).
ccacctttgcagagtatga

SEQ ID NO: 486161 - DNA, 19 bp, Mus musculus
  siRNA target sequence for Sart3 (NM_016926.1,1080-1098).
gatcgacagctgaaagtta

SEQ ID NO: 486162 - DNA, 19 bp, Mus musculus
  siRNA target sequence for Sart3 (NM_016926.1,1195-1213).
gactggaccatcaaacgat

SEQ ID NO: 486163 - DNA, 19 bp, Mus musculus
  siRNA target sequence for Sart3 (NM_016926.1,1197-1215).
ctggaccatcaaacgattt

SEQ ID NO: 486164 - DNA, 19 bp, Mus musculus
  siRNA target sequence for Sart3 (NM_016926.1,1199-1217).
ggaccatcaaacgatttct

SEQ ID NO: 486165 - DNA, 19 bp, Mus musculus
  siRNA target sequence for Sart3 (NM_016926.1,1464-1482).
gctcgcctgtgcaataaca

SEQ ID NO: 486166 - DNA, 19 bp, Mus musculus
  siRNA target sequence for Sart3 (NM_016926.1,1465-1483).
ctcgcctgtgcaataacat

SEQ ID NO: 486167 - DNA, 19 bp, Mus musculus
  siRNA target sequence for Sart3 (NM_016926.1,1530-1548).
gccaagtacgccaacatgt

SEQ ID NO: 486168 - DNA, 19 bp, Mus musculus
  siRNA target sequence for Sart3 (NM_016926.1,1702-1720).
gggatctagccattcagaa

SEQ ID NO: 486169 - DNA, 19 bp, Mus musculus
  siRNA target sequence for Sart3 (NM_016926.1,1703-1721).
ggatctagccattcagaaa

SEQ ID NO: 486170 - DNA, 19 bp, Mus musculus
  siRNA target sequence for Sart3 (NM_016926.1,2007-2025).
gagctctccgggaaatgct

SEQ ID NO: 486171 - DNA, 19 bp, Mus musculus
  siRNA target sequence for Sart3 (NM_016926.1,2009-2027).
gctctccgggaaatgctta

SEQ ID NO: 486172 - DNA, 19 bp, Mus musculus
  siRNA target sequence for Sart3 (NM_016926.1,2044-2062).
ctccttccaagcagaaaga

SEQ ID NO: 486173 - DNA, 19 bp, Mus musculus
  siRNA target sequence for Sart3 (NM_016926.1,2324-2342).
ggagggcaggccgatgttt

SEQ ID NO: 486174 - DNA, 19 bp, Mus musculus
  siRNA target sequence for Sart3 (NM_016926.1,2365-2383).
gcaaaaaccctgattttaa

SEQ ID NO: 486175 - DNA, 19 bp, Mus musculus
  siRNA target sequence for Sart3 (NM_016926.1,2398-2416).
gtaccaccctggagaaaca

SEQ ID NO: 486176 - DNA, 19 bp, Mus musculus
  siRNA target sequence for Sart3 (NM_016926.1,2460-2478).
gagctcgaggacatttgta

SEQ ID NO: 486177 - DNA, 19 bp, Mus musculus
  siRNA target sequence for Sart3 (NM_016926.1,2543-2561).
ggcgtatgtggagtatgaa

SEQ ID NO: 486178 - DNA, 19 bp, Mus musculus
  siRNA target sequence for Sart3 (NM_016926.1,2544-2562).
gcgtatgtggagtatgaaa

SEQ ID NO: 486179 - DNA, 19 bp, Mus musculus
  siRNA target sequence for Sart3 (NM_016926.1,2545-2563).
cgtatgtggagtatgaaaa

SEQ ID NO: 486180 - DNA, 19 bp, Mus musculus
  siRNA target sequence for Sart3 (NM_016926.1,2575-2593).
cgtcccaggcagtgatgaa

SEQ ID NO: 486181 - DNA, 19 bp, Mus musculus
  siRNA target sequence for Sart3 (NM_016926.1,2845-2863).
ccacagaggctcctaagat

SEQ ID NO: 486182 - DNA, 19 bp, Mus musculus
  siRNA target sequence for Sart3 (NM_016926.1,2861-2879).
gatgtccaatgctgatttt

SEQ ID NO: 486183 - DNA, 19 bp, Mus musculus
  siRNA target sequence for Sf3a3 (NM_029157.2,237-255).
cctgagggatttgtatgat

SEQ ID NO: 486184 - DNA, 19 bp, Mus musculus
  siRNA target sequence for Sf3a3 (NM_029157.2,563-581).
ccatctttgaccagttgtt

SEQ ID NO: 486185 - DNA, 19 bp, Mus musculus
  siRNA target sequence for Sf3a3 (NM_029157.2,579-597).
gtttgacattcctaaagaa

SEQ ID NO: 486186 - DNA, 19 bp, Mus musculus
  siRNA target sequence for Sf3a3 (NM_029157.2,642-660).
gtacctacaggattacaca

SEQ ID NO: 486187 - DNA, 19 bp, Mus musculus
  siRNA target sequence for Sf3a3 (NM_029157.2,839-857).
ccctgggtctggataggtt

SEQ ID NO: 486188 - DNA, 19 bp, Mus musculus
  siRNA target sequence for Sf3a3 (NM_029157.2,844-862).
ggtctggataggttgaaat

SEQ ID NO: 486189 - DNA, 19 bp, Mus musculus
  siRNA target sequence for Sf3a3 (NM_029157.2,890-908).
gtggcgggaccctagaaga

SEQ ID NO: 486190 - DNA, 19 bp, Mus musculus
  siRNA target sequence for Sf3a3 (NM_029157.2,962-980).
cttctctgtttgccaaaaa

SEQ ID NO: 486191 - DNA, 19 bp, Mus musculus
  siRNA target sequence for Sf3a3 (NM_029157.2,984-1002).
caagtcaaagggcacaaaa

SEQ ID NO: 486192 - DNA, 19 bp, Mus musculus
  siRNA target sequence for Sf3a3 (NM_029157.2,1043-1061).
cccagatctatgaatacgt

SEQ ID NO: 486193 - DNA, 19 bp, Mus musculus
  siRNA target sequence for Sf3a3 (NM_029157.2,1080-1098).
gcgacagctcactcatgaa

SEQ ID NO: 486194 - DNA, 19 bp, Mus musculus
  siRNA target sequence for Sf3a3 (NM_029157.2,1081-1099).
cgacagctcactcatgaaa

SEQ ID NO: 486195 - DNA, 19 bp, Mus musculus
  siRNA target sequence for Sf3a3 (NM_029157.2,1267-1285).
cacggcctgaatatcaact

SEQ ID NO: 486196 - DNA, 19 bp, Mus musculus
  siRNA target sequence for Sf3a3 (NM_029157.2,1270-1288).
ggcctgaatatcaactaca

SEQ ID NO: 486197 - DNA, 19 bp, Mus musculus
  siRNA target sequence for Sf3a3 (NM_029157.2,1271-1289).
gcctgaatatcaactacaa

SEQ ID NO: 486198 - DNA, 19 bp, Mus musculus
  siRNA target sequence for Sf3a3 (NM_029157.2,1409-1427).
caaatgtgacacagattga

SEQ ID NO: 486199 - DNA, 19 bp, Mus musculus
  siRNA target sequence for Sf3a3 (NM_029157.2,1486-1504).
cctgacaccgaggaagaat

SEQ ID NO: 486200 - DNA, 19 bp, Mus musculus
  siRNA target sequence for Sf3a3 (NM_029157.2,1514-1532).
ccagtggaaatgttgtgaa

SEQ ID NO: 486201 - DNA, 19 bp, Mus musculus
  siRNA target sequence for Sf3b4 (NM_153053.3,77-95).
gcggtctggacgagaaagt

SEQ ID NO: 486202 - DNA, 19 bp, Mus musculus
  siRNA target sequence for Sf3b4 (NM_153053.3,79-97).
ggtctggacgagaaagtga

SEQ ID NO: 486203 - DNA, 19 bp, Mus musculus
  siRNA target sequence for Sf3b4 (NM_153053.3,224-242).
ccgactatgccattaagat

SEQ ID NO: 486204 - DNA, 19 bp, Mus musculus
  siRNA target sequence for Sf3b4 (NM_153053.3,225-243).
cgactatgccattaagatt

SEQ ID NO: 486205 - DNA, 19 bp, Mus musculus
  siRNA target sequence for Sf3b4 (NM_153053.3,226-244).
gactatgccattaagatta

SEQ ID NO: 486206 - DNA, 19 bp, Mus musculus
  siRNA target sequence for Sf3b4 (NM_153053.3,288-306).
ggcctcagctcacaacaaa

SEQ ID NO: 486207 - DNA, 19 bp, Mus musculus
  siRNA target sequence for Sfpq (NM_023603.1,806-824).
cgcacggaggagaagatct

SEQ ID NO: 486208 - DNA, 19 bp, Mus musculus
  siRNA target sequence for Sfpq (NM_023603.1,825-843).
ccgactcggagggatttaa

SEQ ID NO: 486209 - DNA, 19 bp, Mus musculus
  siRNA target sequence for Sfpq (NM_023603.1,826-844).
cgactcggagggatttaaa

SEQ ID NO: 486210 - DNA, 19 bp, Mus musculus
  siRNA target sequence for Sfpq (NM_023603.1,901-919).
gttgtttgtggggaatcta

SEQ ID NO: 486211 - DNA, 19 bp, Mus musculus
  siRNA target sequence for Sfpq (NM_023603.1,971-989).
gaacccggagaagttttta

SEQ ID NO: 486212 - DNA, 19 bp, Mus musculus
  siRNA target sequence for Sfpq (NM_023603.1,974-992).
cccggagaagtttttatca

SEQ ID NO: 486213 - DNA, 19 bp, Mus musculus
  siRNA target sequence for Sfpq (NM_023603.1,1005-1023).
ggttcgggttcattaagct

SEQ ID NO: 486214 - DNA, 19 bp, Mus musculus
  siRNA target sequence for Sfpq (NM_023603.1,1006-1024).
gttcgggttcattaagctt

SEQ ID NO: 486215 - DNA, 19 bp, Mus musculus
  siRNA target sequence for Sfpq (NM_023603.1,1010-1028).
gggttcattaagcttgaat

SEQ ID NO: 486216 - DNA, 19 bp, Mus musculus
  siRNA target sequence for Sfpq (NM_023603.1,1119-1137).
cagccctgtctgttcgaaa

SEQ ID NO: 486217 - DNA, 19 bp, Mus musculus
  siRNA target sequence for Sfpq (NM_023603.1,1182-1200).
gccagtttggtcctattga

SEQ ID NO: 486218 - DNA, 19 bp, Mus musculus
  siRNA target sequence for Sfpq (NM_023603.1,1219-1237).
ggatgatcgcggaagatct

SEQ ID NO: 486219 - DNA, 19 bp, Mus musculus
  siRNA target sequence for Sfpq (NM_023603.1,1220-1238).
gatgatcgcggaagatcta

SEQ ID NO: 486220 - DNA, 19 bp, Mus musculus
  siRNA target sequence for Sfpq (NM_023603.1,1266-1284).
ccaagccagcagcaagaaa

SEQ ID NO: 486221 - DNA, 19 bp, Mus musculus
  siRNA target sequence for Sfpq (NM_023603.1,1296-1314).
gatgcagtgaaggtgtttt

SEQ ID NO: 486222 - DNA, 19 bp, Mus musculus
  siRNA target sequence for Sfpq (NM_023603.1,1327-1345).
gactcctcgcccagtcatt

SEQ ID NO: 486223 - DNA, 19 bp, Mus musculus
  siRNA target sequence for Sfpq (NM_023603.1,1353-1371).
cacttgaacagttagatga

SEQ ID NO: 486224 - DNA, 19 bp, Mus musculus
  siRNA target sequence for Sfpq (NM_023603.1,1402-1420).
gaagaatccaatgtatcaa

SEQ ID NO: 486225 - DNA, 19 bp, Mus musculus
  siRNA target sequence for Sfpq (NM_023603.1,1453-1471).
gcatggcacatttgagtat

SEQ ID NO: 486226 - DNA, 19 bp, Mus musculus
  siRNA target sequence for Sfpq (NM_023603.1,1458-1476).
gcacatttgagtatgaata

SEQ ID NO: 486227 - DNA, 19 bp, Mus musculus
  siRNA target sequence for Sfpq (NM_023603.1,1459-1477).
cacatttgagtatgaatat

SEQ ID NO: 486228 - DNA, 19 bp, Mus musculus
  siRNA target sequence for Sfpq (NM_023603.1,1592-1610).
gaacaccaagcaaatcttt

SEQ ID NO: 486229 - DNA, 19 bp, Mus musculus
  siRNA target sequence for Sfpq (NM_023603.1,1722-1740).
gtagacgagaggaagagat

SEQ ID NO: 486230 - DNA, 19 bp, Mus musculus
  siRNA target sequence for Sfpq (NM_023603.1,1844-1862).
ggtggtggtggaacaatga

SEQ ID NO: 486231 - DNA, 19 bp, Mus musculus
  siRNA target sequence for Sfpq (NM_023603.1,1845-1863).
gtggtggtggaacaatgaa

SEQ ID NO: 486232 - DNA, 19 bp, Mus musculus
  siRNA target sequence for Sfpq (NM_023603.1,1847-1865).
ggtggtggaacaatgaaca

SEQ ID NO: 486233 - DNA, 19 bp, Mus musculus
  siRNA target sequence for Sfpq (NM_023603.1,1848-1866).
gtggtggaacaatgaacat

SEQ ID NO: 486234 - DNA, 19 bp, Mus musculus
  siRNA target sequence for Sfpq (NM_023603.1,1881-1899).
gttcaggaggccagaaatt

SEQ ID NO: 486235 - DNA, 19 bp, Mus musculus
  siRNA target sequence for Sfpq (NM_023603.1,1914-1932).
gtggtggtggcataggtta

SEQ ID NO: 486236 - DNA, 19 bp, Mus musculus
  siRNA target sequence for Sfpq (NM_023603.1,1917-1935).
gtggtggcataggttatga

SEQ ID NO: 486237 - DNA, 19 bp, Mus musculus
  siRNA target sequence for Sfpq (NM_023603.1,1923-1941).
gcataggttatgaagctaa

SEQ ID NO: 486238 - DNA, 19 bp, Mus musculus
  siRNA target sequence for Sfpq (NM_023603.1,2098-2116).
gtatgaagggccaaataaa

SEQ ID NO: 486239 - DNA, 19 bp, Mus musculus
  siRNA target sequence for Sfrs1 (NM_173374.2,189-207).
gacatcgaggacgtgtttt

SEQ ID NO: 486240 - DNA, 19 bp, Mus musculus
  siRNA target sequence for Sfrs1 (NM_173374.2,195-213).
gaggacgtgttttacaaat

SEQ ID NO: 486241 - DNA, 19 bp, Mus musculus
  siRNA target sequence for Sfrs1 (NM_173374.2,344-362).
ccggctgcgggtagagttt

SEQ ID NO: 486242 - DNA, 19 bp, Mus musculus
  siRNA target sequence for Sfrs1 (NM_173374.2,521-539).
gcgtgaggcaggtgatgta

SEQ ID NO: 486243 - DNA, 19 bp, Mus musculus
  siRNA target sequence for Sfrs1 (NM_173374.2,522-540).
cgtgaggcaggtgatgtat

SEQ ID NO: 486244 - DNA, 19 bp, Mus musculus
  siRNA target sequence for Sfrs1 (NM_173374.2,578-596).
ggagtttgtacggaaagaa

SEQ ID NO: 486245 - DNA, 19 bp, Mus musculus
  siRNA target sequence for Sfrs1 (NM_173374.2,581-599).
gtttgtacggaaagaagat

SEQ ID NO: 486246 - DNA, 19 bp, Mus musculus
  siRNA target sequence for Sfrs1 (NM_173374.2,602-620).
gacgtatgcagttcgaaaa

SEQ ID NO: 486247 - DNA, 19 bp, Mus musculus
  siRNA target sequence for Sfrs1 (NM_173374.2,604-622).
cgtatgcagttcgaaaact

SEQ ID NO: 486248 - DNA, 19 bp, Mus musculus
  siRNA target sequence for Sfrs1 (NM_173374.2,610-628).
cagttcgaaaactggataa

SEQ ID NO: 486249 - DNA, 19 bp, Mus musculus
  siRNA target sequence for Sfrs1 (NM_173374.2,612-630).
gttcgaaaactggataaca

SEQ ID NO: 486250 - DNA, 19 bp, Mus musculus
  siRNA target sequence for Sfrs1 (NM_173374.2,615-633).
cgaaaactggataacacta

SEQ ID NO: 486251 - DNA, 19 bp, Mus musculus
  siRNA target sequence for Sfrs1 (NM_173374.2,616-634).
gaaaactggataacactaa

SEQ ID NO: 486252 - DNA, 19 bp, Mus musculus
  siRNA target sequence for Sfrs1 (NM_173374.2,662-680).
ctacatccgggttaaagtt

SEQ ID NO: 486253 - DNA, 19 bp, Mus musculus
  siRNA target sequence for Sfrs1 (NM_173374.2,665-683).
catccgggttaaagttgat

SEQ ID NO: 486254 - DNA, 19 bp, Mus musculus
  siRNA target sequence for Sfrs6 (NM_026499.2,199-217).
gacatccagcgctttttca

SEQ ID NO: 486255 - DNA, 19 bp, Mus musculus
  siRNA target sequence for Sfrs6 (NM_026499.2,235-253).
ctcgagatcgacctcaaaa

SEQ ID NO: 486256 - DNA, 19 bp, Mus musculus
  siRNA target sequence for Sfrs6 (NM_026499.2,237-255).
cgagatcgacctcaaaaat

SEQ ID NO: 486257 - DNA, 19 bp, Mus musculus
  siRNA target sequence for Sfrs6 (NM_026499.2,587-605).
caaatgagggtgtgattga

SEQ ID NO: 486258 - DNA, 19 bp, Mus musculus
  siRNA target sequence for Sfrs6 (NM_026499.2,627-645).
gaagcgtgctttggataaa

SEQ ID NO: 486259 - DNA, 19 bp, Mus musculus
  siRNA target sequence for Sfrs6 (NM_026499.2,794-812).
gatctcgaagtatctcaaa

SEQ ID NO: 486260 - DNA, 19 bp, Mus musculus
  siRNA target sequence for Sfrs6 (NM_026499.2,868-886).
ggcaggaaatccagatcaa

SEQ ID NO: 486261 - DNA, 19 bp, Mus musculus
  siRNA target sequence for Sfrs6 (NM_026499.2,881-899).
gatcaaagagcaaatcgaa

SEQ ID NO: 486262 - DNA, 19 bp, Mus musculus
  siRNA target sequence for Sfrs6 (NM_026499.2,1009-1027).
ggagacataaagtcaaagt

SEQ ID NO: 486263 - DNA, 19 bp, Mus musculus
  siRNA target sequence for Sfrs7 (NM_146083.1,116-134).
ggaggagaaaccaaggtat

SEQ ID NO: 486264 - DNA, 19 bp, Mus musculus
  siRNA target sequence for Sfrs7 (NM_146083.1,120-138).
gagaaaccaaggtatatgt

SEQ ID NO: 486265 - DNA, 19 bp, Mus musculus
  siRNA target sequence for Sfrs7 (NM_146083.1,126-144).
ccaaggtatatgttggtaa

SEQ ID NO: 486266 - DNA, 19 bp, Mus musculus
  siRNA target sequence for Sfrs7 (NM_146083.1,172-190).
gttagaaagggcattcagt

SEQ ID NO: 486267 - DNA, 19 bp, Mus musculus
  siRNA target sequence for Sfrs7 (NM_146083.1,193-211).
ctatgggcccttaagaact

SEQ ID NO: 486268 - DNA, 19 bp, Mus musculus
  siRNA target sequence for Sfrs7 (NM_146083.1,291-309).
gattggatgggaaagtgat

SEQ ID NO: 486269 - DNA, 19 bp, Mus musculus
  siRNA target sequence for Sfrs7 (NM_146083.1,295-313).
ggatgggaaagtgatttgt

SEQ ID NO: 486270 - DNA, 19 bp, Mus musculus
  siRNA target sequence for Sfrs7 (NM_146083.1,318-336).
ctcgagtgagggttgaact

SEQ ID NO: 486271 - DNA, 19 bp, Mus musculus
  siRNA target sequence for Sfrs7 (NM_146083.1,320-338).
cgagtgagggttgaactat

SEQ ID NO: 486272 - DNA, 19 bp, Mus musculus
  siRNA target sequence for Sfrs7 (NM_146083.1,323-341).
gtgagggttgaactatcaa

SEQ ID NO: 486273 - DNA, 19 bp, Mus musculus
  siRNA target sequence for Sfrs7 (NM_146083.1,349-367).
gcctcggagatctcgtttt

SEQ ID NO: 486274 - DNA, 19 bp, Mus musculus
  siRNA target sequence for Sfrs7 (NM_146083.1,351-369).
ctcggagatctcgttttga

SEQ ID NO: 486275 - DNA, 19 bp, Mus musculus
  siRNA target sequence for Sfrs7 (NM_146083.1,353-371).
cggagatctcgttttgata

SEQ ID NO: 486276 - DNA, 19 bp, Mus musculus
  siRNA target sequence for Sfrs7 (NM_146083.1,384-402).
gtcgtccctttgatcctaa

SEQ ID NO: 486277 - DNA, 19 bp, Mus musculus
  siRNA target sequence for Sfrs7 (NM_146083.1,391-409).
ctttgatcctaatgataga

SEQ ID NO: 486278 - DNA, 19 bp, Mus musculus
  siRNA target sequence for Sfrs7 (NM_146083.1,411-429).
gctatgagtgtggtgaaaa

SEQ ID NO: 486279 - DNA, 19 bp, Mus musculus
  siRNA target sequence for Sfrs7 (NM_146083.1,431-449).
ggacattatgcttatgact

SEQ ID NO: 486280 - DNA, 19 bp, Mus musculus
  siRNA target sequence for Sfrs7 (NM_146083.1,457-475).
ctatagccgacgaagaaga

SEQ ID NO: 486281 - DNA, 19 bp, Mus musculus
  siRNA target sequence for Sfrs7 (NM_146083.1,508-526).
caggggaaggcgatactct

SEQ ID NO: 486282 - DNA, 19 bp, Mus musculus
  siRNA target sequence for Sfrs7 (NM_146083.1,590-608).
gtgtctcttcgtagatcaa

SEQ ID NO: 486283 - DNA, 19 bp, Mus musculus
  siRNA target sequence for Sfrs7 (NM_146083.1,650-668).
ggatcgaggtatttccaat

SEQ ID NO: 486284 - DNA, 19 bp, Mus musculus
  siRNA target sequence for Sfrs7 (NM_146083.1,786-804).
gtgcaagtccagaaagaat

SEQ ID NO: 486285 - DNA, 19 bp, Mus musculus
  siRNA target sequence for Sfrs9 (NM_025573.2,223-241).
ctcgaggacttgttctaca

SEQ ID NO: 486286 - DNA, 19 bp, Mus musculus
  siRNA target sequence for Sfrs9 (NM_025573.2,331-349).
gaggatgcgatctatggaa

SEQ ID NO: 486287 - DNA, 19 bp, Mus musculus
  siRNA target sequence for Sfrs9 (NM_025573.2,346-364).
ggaagaaacggttacgatt

SEQ ID NO: 486288 - DNA, 19 bp, Mus musculus
  siRNA target sequence for Sfrs9 (NM_025573.2,347-365).
gaagaaacggttacgatta

SEQ ID NO: 486289 - DNA, 19 bp, Mus musculus
  siRNA target sequence for Sfrs9 (NM_025573.2,438-456).
gaacgggcctcctacaaga

SEQ ID NO: 486290 - DNA, 19 bp, Mus musculus
  siRNA target sequence for Sfrs9 (NM_025573.2,448-466).
cctacaagacggtcagatt

SEQ ID NO: 486291 - DNA, 19 bp, Mus musculus
  siRNA target sequence for Sfrs9 (NM_025573.2,449-467).
ctacaagacggtcagattt

SEQ ID NO: 486292 - DNA, 19 bp, Mus musculus
  siRNA target sequence for Sfrs9 (NM_025573.2,548-566).
gttatgcagacgtacagaa

SEQ ID NO: 486293 - DNA, 19 bp, Mus musculus
  siRNA target sequence for Sfrs9 (NM_025573.2,579-597).
gatggttgaatatttgaga

SEQ ID NO: 486294 - DNA, 19 bp, Mus musculus
  siRNA target sequence for Sfrs9 (NM_025573.2,739-757).
cgcgactcgccataccaaa

SEQ ID NO: 486295 - DNA, 19 bp, Mus musculus
  siRNA target sequence for Sfrs9 (NM_025573.2,763-781).
ggctcgccacactacttct

SEQ ID NO: 486296 - DNA, 19 bp, Mus musculus
  siRNA target sequence for Skiv2l (NM_021337.1,208-226).
gagcactcagctcgaaaat

SEQ ID NO: 486297 - DNA, 19 bp, Mus musculus
  siRNA target sequence for Skiv2l (NM_021337.1,317-335).
gccatatactgggctataa

SEQ ID NO: 486298 - DNA, 19 bp, Mus musculus
  siRNA target sequence for Skiv2l (NM_021337.1,462-480).
ggatgagcccagcataact

SEQ ID NO: 486299 - DNA, 19 bp, Mus musculus
  siRNA target sequence for Skiv2l (NM_021337.1,555-573).
caagaaaggggtggatttt

SEQ ID NO: 486300 - DNA, 19 bp, Mus musculus
  siRNA target sequence for Skiv2l (NM_021337.1,731-749).
gcagcttggaggatctagt

SEQ ID NO: 486301 - DNA, 19 bp, Mus musculus
  siRNA target sequence for Skiv2l (NM_021337.1,760-778).
gctgccacagtcgtatcta

SEQ ID NO: 486302 - DNA, 19 bp, Mus musculus
  siRNA target sequence for Skiv2l (NM_021337.1,839-857).
cccctgtgggcgactttta

SEQ ID NO: 486303 - DNA, 19 bp, Mus musculus
  siRNA target sequence for Skiv2l (NM_021337.1,936-954).
gcagcacgactctgtcttt

SEQ ID NO: 486304 - DNA, 19 bp, Mus musculus
  siRNA target sequence for Skiv2l (NM_021337.1,1038-1056).
ctacacttctcctatcaaa

SEQ ID NO: 486305 - DNA, 19 bp, Mus musculus
  siRNA target sequence for Skiv2l (NM_021337.1,1078-1096).
cgggacttccggaacacat

SEQ ID NO: 486306 - DNA, 19 bp, Mus musculus
  siRNA target sequence for Skiv2l (NM_021337.1,1218-1236).
ggagtgggtcatctttgat

SEQ ID NO: 486307 - DNA, 19 bp, Mus musculus
  siRNA target sequence for Skiv2l (NM_021337.1,1234-1252).
gatgaagtccactatatca

SEQ ID NO: 486308 - DNA, 19 bp, Mus musculus
  siRNA target sequence for Skiv2l (NM_021337.1,1423-1441).
cccctggagcactatctct

SEQ ID NO: 486309 - DNA, 19 bp, Mus musculus
  siRNA target sequence for Skiv2l (NM_021337.1,1424-1442).
ccctggagcactatctctt

SEQ ID NO: 486310 - DNA, 19 bp, Mus musculus
  siRNA target sequence for Skiv2l (NM_021337.1,1506-1524).
ccacacccaggggtactat

SEQ ID NO: 486311 - DNA, 19 bp, Mus musculus
  siRNA target sequence for Skiv2l (NM_021337.1,1928-1946).
gcctggtcaaggtcttgtt

SEQ ID NO: 486312 - DNA, 19 bp, Mus musculus
  siRNA target sequence for Skiv2l (NM_021337.1,2004-2022).
ctccatgcgcaaacatgat

SEQ ID NO: 486313 - DNA, 19 bp, Mus musculus
  siRNA target sequence for Skiv2l (NM_021337.1,2149-2167).
gatctacaccgcatgatga

SEQ ID NO: 486314 - DNA, 19 bp, Mus musculus
  siRNA target sequence for Skiv2l (NM_021337.1,2193-2211).
ccagttccgcctcacatat

SEQ ID NO: 486315 - DNA, 19 bp, Mus musculus
  siRNA target sequence for Skiv2l (NM_021337.1,2194-2212).
cagttccgcctcacatata

SEQ ID NO: 486316 - DNA, 19 bp, Mus musculus
  siRNA target sequence for Skiv2l (NM_021337.1,2386-2404).
gacctacctgagtattaca

SEQ ID NO: 486317 - DNA, 19 bp, Mus musculus
  siRNA target sequence for Skiv2l (NM_021337.1,2492-2510).
gaagggtggtagttgtgaa

SEQ ID NO: 486318 - DNA, 19 bp, Mus musculus
  siRNA target sequence for Skiv2l (NM_021337.1,2570-2588).
gcagggtatttacaacatt

SEQ ID NO: 486319 - DNA, 19 bp, Mus musculus
  siRNA target sequence for Skiv2l (NM_021337.1,2658-2676).
ccacccagatgaccttata

SEQ ID NO: 486320 - DNA, 19 bp, Mus musculus
  siRNA target sequence for Skiv2l (NM_021337.1,2804-2822).
gcaagaggcagcaaccaaa

SEQ ID NO: 486321 - DNA, 19 bp, Mus musculus
  siRNA target sequence for Skiv2l (NM_021337.1,3053-3071).
gggagcgaatgcagattca

SEQ ID NO: 486322 - DNA, 19 bp, Mus musculus
  siRNA target sequence for Skiv2l (NM_021337.1,3275-3293).
ctctgcgaccagaggaaat

SEQ ID NO: 486323 - DNA, 19 bp, Mus musculus
  siRNA target sequence for Skiv2l (NM_021337.1,3369-3387).
gggggtagaacgagtcaaa

SEQ ID NO: 486324 - DNA, 19 bp, Mus musculus
  siRNA target sequence for Skiv2l (NM_021337.1,3474-3492).
gctggtagaggttgtgtat

SEQ ID NO: 486325 - DNA, 19 bp, Mus musculus
  siRNA target sequence for Skiv2l (NM_021337.1,3651-3669).
gacggcagccaccttgtta

SEQ ID NO: 486326 - DNA, 19 bp, Mus musculus
  siRNA target sequence for Slc6a8 (NM_133987.1,653-671).
gcgctgaaaacggtatcta

SEQ ID NO: 486327 - DNA, 19 bp, Mus musculus
  siRNA target sequence for Slc6a8 (NM_133987.1,654-672).
cgctgaaaacggtatctat

SEQ ID NO: 486328 - DNA, 19 bp, Mus musculus
  siRNA target sequence for Slc6a8 (NM_133987.1,655-673).
gctgaaaacggtatctata

SEQ ID NO: 486329 - DNA, 19 bp, Mus musculus
  siRNA target sequence for Slc6a8 (NM_133987.1,896-914).
gcggaggtgtgttccttat

SEQ ID NO: 486330 - DNA, 19 bp, Mus musculus
  siRNA target sequence for Slc6a8 (NM_133987.1,940-958).
ggaggaatccccattttct

SEQ ID NO: 486331 - DNA, 19 bp, Mus musculus
  siRNA target sequence for Slc6a8 (NM_133987.1,941-959).
gaggaatccccattttctt

SEQ ID NO: 486332 - DNA, 19 bp, Mus musculus
  siRNA target sequence for Slc6a8 (NM_133987.1,1045-1063).
gcctccatggtgattgtct

SEQ ID NO: 486333 - DNA, 19 bp, Mus musculus
  siRNA target sequence for Slc6a8 (NM_133987.1,1070-1088).
gcaacacttactacatcat

SEQ ID NO: 486334 - DNA, 19 bp, Mus musculus
  siRNA target sequence for Slc6a8 (NM_133987.1,1409-1427).
caggaaagatcgtgtactt

SEQ ID NO: 486335 - DNA, 19 bp, Mus musculus
  siRNA target sequence for Slc6a8 (NM_133987.1,1411-1429).
ggaaagatcgtgtacttca

SEQ ID NO: 486336 - DNA, 19 bp, Mus musculus
  siRNA target sequence for Slc6a8 (NM_133987.1,1542-1560).
gtcccctcaggtatggata

SEQ ID NO: 486337 - DNA, 19 bp, Mus musculus
  siRNA target sequence for Slc6a8 (NM_133987.1,1564-1582).
gctgggacccagattttct

SEQ ID NO: 486338 - DNA, 19 bp, Mus musculus
  siRNA target sequence for Slc6a8 (NM_133987.1,1782-1800).
gcctggtctagccttcatt

SEQ ID NO: 486339 - DNA, 19 bp, Mus musculus
  siRNA target sequence for Slc6a8 (NM_133987.1,2039-2057).
ggggtaagggtggaatgta

SEQ ID NO: 486340 - DNA, 19 bp, Mus musculus
  siRNA target sequence for Snrp70 (NM_009224.2,629-647).
gtgatggtcgagacatgta

SEQ ID NO: 486341 - DNA, 19 bp, Mus musculus
  siRNA target sequence for Snrp70 (NM_009224.2,631-649).
gatggtcgagacatgtaca

SEQ ID NO: 486342 - DNA, 19 bp, Mus musculus
  siRNA target sequence for Snrp70 (NM_009224.2,683-701).
cagagaatggatatctgat

SEQ ID NO: 486343 - DNA, 19 bp, Mus musculus
  siRNA target sequence for Snrpb2 (NM_021335.2,60-78).
gatatcagaccaaatcaca

SEQ ID NO: 486344 - DNA, 19 bp, Mus musculus
  siRNA target sequence for Snrpb2 (NM_021335.2,67-85).
gaccaaatcacacgattta

SEQ ID NO: 486345 - DNA, 19 bp, Mus musculus
  siRNA target sequence for Snrpb2 (NM_021335.2,70-88).
caaatcacacgatttatat

SEQ ID NO: 486346 - DNA, 19 bp, Mus musculus
  siRNA target sequence for Snrpb2 (NM_021335.2,160-178).
gacacgtggtagatattgt

SEQ ID NO: 486347 - DNA, 19 bp, Mus musculus
  siRNA target sequence for Snrpb2 (NM_021335.2,273-291).
ccattttatggtaaaccaa

SEQ ID NO: 486348 - DNA, 19 bp, Mus musculus
  siRNA target sequence for Snrpb2 (NM_021335.2,331-349).
ctaaaatgcgtggtacttt

SEQ ID NO: 486349 - DNA, 19 bp, Mus musculus
  siRNA target sequence for Snrpb2 (NM_021335.2,346-364).
ctttcgctgacaaggaaaa

SEQ ID NO: 486350 - DNA, 19 bp, Mus musculus
  siRNA target sequence for Snrpb2 (NM_021335.2,672-690).
gctctgcaggggtttaaga

SEQ ID NO: 486351 - DNA, 19 bp, Mus musculus
  siRNA target sequence for Snrpb2 (NM_021335.2,673-691).
ctctgcaggggtttaagat

SEQ ID NO: 486352 - DNA, 19 bp, Mus musculus
  siRNA target sequence for Spag7 (NM_172561.1,203-221).
ggacaggtcaagaaaaagt

SEQ ID NO: 486353 - DNA, 19 bp, Mus musculus
  siRNA target sequence for Spag7 (NM_172561.1,238-256).
gatagagcggagcatacta

SEQ ID NO: 486354 - DNA, 19 bp, Mus musculus
  siRNA target sequence for Spag7 (NM_172561.1,246-264).
ggagcatactacatgatgt

SEQ ID NO: 486355 - DNA, 19 bp, Mus musculus
  siRNA target sequence for Spag7 (NM_172561.1,308-326).
gatgactgtcgctatgtca

SEQ ID NO: 486356 - DNA, 19 bp, Mus musculus
  siRNA target sequence for Spag7 (NM_172561.1,315-333).
gtcgctatgtcatgatctt

SEQ ID NO: 486357 - DNA, 19 bp, Mus musculus
  siRNA target sequence for Spag7 (NM_172561.1,317-335).
cgctatgtcatgatcttca

SEQ ID NO: 486358 - DNA, 19 bp, Mus musculus
  siRNA target sequence for Spag7 (NM_172561.1,318-336).
gctatgtcatgatcttcaa

SEQ ID NO: 486359 - DNA, 19 bp, Mus musculus
  siRNA target sequence for Spag7 (NM_172561.1,506-524).
gacaagtatagccatctta

SEQ ID NO: 486360 - DNA, 19 bp, Mus musculus
  siRNA target sequence for Stk31 (NM_029916.1,60-78).
cggctgtggcgcaaagtgt

SEQ ID NO: 486361 - DNA, 19 bp, Mus musculus
  siRNA target sequence for Stk31 (NM_029916.1,61-79).
ggctgtggcgcaaagtgta

SEQ ID NO: 486362 - DNA, 19 bp, Mus musculus
  siRNA target sequence for Stk31 (NM_029916.1,62-80).
gctgtggcgcaaagtgtaa

SEQ ID NO: 486363 - DNA, 19 bp, Mus musculus
  siRNA target sequence for Stk31 (NM_029916.1,65-83).
gtggcgcaaagtgtaagtt

SEQ ID NO: 486364 - DNA, 19 bp, Mus musculus
  siRNA target sequence for Stk31 (NM_029916.1,67-85).
ggcgcaaagtgtaagtttt

SEQ ID NO: 486365 - DNA, 19 bp, Mus musculus
  siRNA target sequence for Stk31 (NM_029916.1,70-88).
gcaaagtgtaagttttcca

SEQ ID NO: 486366 - DNA, 19 bp, Mus musculus
  siRNA target sequence for Stk31 (NM_029916.1,107-125).
gaagatacacattacaata

SEQ ID NO: 486367 - DNA, 19 bp, Mus musculus
  siRNA target sequence for Stk31 (NM_029916.1,155-173).
gaagatgcagtaacatttt

SEQ ID NO: 486368 - DNA, 19 bp, Mus musculus
  siRNA target sequence for Stk31 (NM_029916.1,168-186).
cattttgggcccagaatgt

SEQ ID NO: 486369 - DNA, 19 bp, Mus musculus
  siRNA target sequence for Stk31 (NM_029916.1,174-192).
gggcccagaatgtcagtaa

SEQ ID NO: 486370 - DNA, 19 bp, Mus musculus
  siRNA target sequence for Stk31 (NM_029916.1,179-197).
cagaatgtcagtaaaaata

SEQ ID NO: 486371 - DNA, 19 bp, Mus musculus
  siRNA target sequence for Stk31 (NM_029916.1,185-203).
gtcagtaaaaataaggata

SEQ ID NO: 486372 - DNA, 19 bp, Mus musculus
  siRNA target sequence for Stk31 (NM_029916.1,200-218).
gatattatgaagattggtt

SEQ ID NO: 486373 - DNA, 19 bp, Mus musculus
  siRNA target sequence for Stk31 (NM_029916.1,237-255).
gtcctcttgctaattcagt

SEQ ID NO: 486374 - DNA, 19 bp, Mus musculus
  siRNA target sequence for Stk31 (NM_029916.1,355-373).
gtgcctggtgaggtacatt

SEQ ID NO: 486375 - DNA, 19 bp, Mus musculus
  siRNA target sequence for Stk31 (NM_029916.1,357-375).
gcctggtgaggtacattga

SEQ ID NO: 486376 - DNA, 19 bp, Mus musculus
  siRNA target sequence for Stk31 (NM_029916.1,359-377).
ctggtgaggtacattgact

SEQ ID NO: 486377 - DNA, 19 bp, Mus musculus
  siRNA target sequence for Stk31 (NM_029916.1,370-388).
cattgactatggaaatact

SEQ ID NO: 486378 - DNA, 19 bp, Mus musculus
  siRNA target sequence for Stk31 (NM_029916.1,400-418).
ccgatctgatatagtagaa

SEQ ID NO: 486379 - DNA, 19 bp, Mus musculus
  siRNA target sequence for Stk31 (NM_029916.1,401-419).
cgatctgatatagtagaaa

SEQ ID NO: 486380 - DNA, 19 bp, Mus musculus
  siRNA target sequence for Stk31 (NM_029916.1,402-420).
gatctgatatagtagaaat

SEQ ID NO: 486381 - DNA, 19 bp, Mus musculus
  siRNA target sequence for Stk31 (NM_029916.1,422-440).
cctccggagctacaatttt

SEQ ID NO: 486382 - DNA, 19 bp, Mus musculus
  siRNA target sequence for Stk31 (NM_029916.1,425-443).
ccggagctacaattttcta

SEQ ID NO: 486383 - DNA, 19 bp, Mus musculus
  siRNA target sequence for Stk31 (NM_029916.1,428-446).
gagctacaattttctagta

SEQ ID NO: 486384 - DNA, 19 bp, Mus musculus
  siRNA target sequence for Stk31 (NM_029916.1,441-459).
ctagtattgccaagaagta

SEQ ID NO: 486385 - DNA, 19 bp, Mus musculus
  siRNA target sequence for Stk31 (NM_029916.1,505-523).
gtttgatcagggtagaaca

SEQ ID NO: 486386 - DNA, 19 bp, Mus musculus
  siRNA target sequence for Stk31 (NM_029916.1,509-527).
gatcagggtagaacatttt

SEQ ID NO: 486387 - DNA, 19 bp, Mus musculus
  siRNA target sequence for Stk31 (NM_029916.1,522-540).
catttttggggagtttgat

SEQ ID NO: 486388 - DNA, 19 bp, Mus musculus
  siRNA target sequence for Stk31 (NM_029916.1,610-628).
gtatggcactgtcgatata

SEQ ID NO: 486389 - DNA, 19 bp, Mus musculus
  siRNA target sequence for Stk31 (NM_029916.1,811-829).
cgggaggctgactcttgat

SEQ ID NO: 486390 - DNA, 19 bp, Mus musculus
  siRNA target sequence for Stk31 (NM_029916.1,813-831).
ggaggctgactcttgatgt

SEQ ID NO: 486391 - DNA, 19 bp, Mus musculus
  siRNA target sequence for Stk31 (NM_029916.1,820-838).
gactcttgatgtgaagtat

SEQ ID NO: 486392 - DNA, 19 bp, Mus musculus
  siRNA target sequence for Stk31 (NM_029916.1,853-871).
caatcacgtgacatttcca

SEQ ID NO: 486393 - DNA, 19 bp, Mus musculus
  siRNA target sequence for Stk31 (NM_029916.1,859-877).
cgtgacatttccaaaggaa

SEQ ID NO: 486394 - DNA, 19 bp, Mus musculus
  siRNA target sequence for Stk31 (NM_029916.1,895-913).
ctttaatttagggtctaat

SEQ ID NO: 486395 - DNA, 19 bp, Mus musculus
  siRNA target sequence for Stk31 (NM_029916.1,914-932).
gtcagcttggcaaaaatta

SEQ ID NO: 486396 - DNA, 19 bp, Mus musculus
  siRNA target sequence for Stk31 (NM_029916.1,1062-1080).
ctaccatggatctgactaa

SEQ ID NO: 486397 - DNA, 19 bp, Mus musculus
  siRNA target sequence for Stk31 (NM_029916.1,1112-1130).
ggaaccaggctgaagaatt

SEQ ID NO: 486398 - DNA, 19 bp, Mus musculus
  siRNA target sequence for Stk31 (NM_029916.1,1113-1131).
gaaccaggctgaagaattt

SEQ ID NO: 486399 - DNA, 19 bp, Mus musculus
  siRNA target sequence for Stk31 (NM_029916.1,1132-1150).
ggcagctaaagtagaacta

SEQ ID NO: 486400 - DNA, 19 bp, Mus musculus
  siRNA target sequence for Stk31 (NM_029916.1,1133-1151).
gcagctaaagtagaactat

SEQ ID NO: 486401 - DNA, 19 bp, Mus musculus
  siRNA target sequence for Stk31 (NM_029916.1,1136-1154).
gctaaagtagaactattga

SEQ ID NO: 486402 - DNA, 19 bp, Mus musculus
  siRNA target sequence for Stk31 (NM_029916.1,1153-1171).
gaaagaaattaggcatatt

SEQ ID NO: 486403 - DNA, 19 bp, Mus musculus
  siRNA target sequence for Stk31 (NM_029916.1,1164-1182).
ggcatattaacatcagtat

SEQ ID NO: 486404 - DNA, 19 bp, Mus musculus
  siRNA target sequence for Stk31 (NM_029916.1,1165-1183).
gcatattaacatcagtatt

SEQ ID NO: 486405 - DNA, 19 bp, Mus musculus
  siRNA target sequence for Stk31 (NM_029916.1,1222-1240).
ggatgaagggtcctttact

SEQ ID NO: 486406 - DNA, 19 bp, Mus musculus
  siRNA target sequence for Stk31 (NM_029916.1,1223-1241).
gatgaagggtcctttacta

SEQ ID NO: 486407 - DNA, 19 bp, Mus musculus
  siRNA target sequence for Stk31 (NM_029916.1,1239-1257).
ctactctagcatctttgaa

SEQ ID NO: 486408 - DNA, 19 bp, Mus musculus
  siRNA target sequence for Stk31 (NM_029916.1,1242-1260).
ctctagcatctttgaatga

SEQ ID NO: 486409 - DNA, 19 bp, Mus musculus
  siRNA target sequence for Stk31 (NM_029916.1,1267-1285).
gaaaatttgggctgaatat

SEQ ID NO: 486410 - DNA, 19 bp, Mus musculus
  siRNA target sequence for Stk31 (NM_029916.1,1297-1315).
ggagaagatccaaacttgt

SEQ ID NO: 486411 - DNA, 19 bp, Mus musculus
  siRNA target sequence for Stk31 (NM_029916.1,1303-1321).
gatccaaacttgtcttaat

SEQ ID NO: 486412 - DNA, 19 bp, Mus musculus
  siRNA target sequence for Stk31 (NM_029916.1,1311-1329).
cttgtcttaatgagaatga

SEQ ID NO: 486413 - DNA, 19 bp, Mus musculus
  siRNA target sequence for Stk31 (NM_029916.1,1372-1390).
gctgttcgtggctgtagat

SEQ ID NO: 486414 - DNA, 19 bp, Mus musculus
  siRNA target sequence for Stk31 (NM_029916.1,1375-1393).
gttcgtggctgtagatgtt

SEQ ID NO: 486415 - DNA, 19 bp, Mus musculus
  siRNA target sequence for Stk31 (NM_029916.1,1419-1437).
cacttgataaacgcttaaa

SEQ ID NO: 486416 - DNA, 19 bp, Mus musculus
  siRNA target sequence for Stk31 (NM_029916.1,1421-1439).
cttgataaacgcttaaaaa

SEQ ID NO: 486417 - DNA, 19 bp, Mus musculus
  siRNA target sequence for Stk31 (NM_029916.1,1455-1473).
caacttctttagaatcagt

SEQ ID NO: 486418 - DNA, 19 bp, Mus musculus
  siRNA target sequence for Stk31 (NM_029916.1,1536-1554).
ggcagtgtaccaaaagaga

SEQ ID NO: 486419 - DNA, 19 bp, Mus musculus
  siRNA target sequence for Stk31 (NM_029916.1,1537-1555).
gcagtgtaccaaaagagaa

SEQ ID NO: 486420 - DNA, 19 bp, Mus musculus
  siRNA target sequence for Stk31 (NM_029916.1,1556-1574).
gagttcgccagtattagga

SEQ ID NO: 486421 - DNA, 19 bp, Mus musculus
  siRNA target sequence for Stk31 (NM_029916.1,1667-1685).
gaagacctgattggtaata

SEQ ID NO: 486422 - DNA, 19 bp, Mus musculus
  siRNA target sequence for Stk31 (NM_029916.1,1744-1762).
cattgagcaaggtgtcata

SEQ ID NO: 486423 - DNA, 19 bp, Mus musculus
  siRNA target sequence for Stk31 (NM_029916.1,1748-1766).
gagcaaggtgtcatagaca

SEQ ID NO: 486424 - DNA, 19 bp, Mus musculus
  siRNA target sequence for Stk31 (NM_029916.1,1763-1781).
gacaaggagattattttaa

SEQ ID NO: 486425 - DNA, 19 bp, Mus musculus
  siRNA target sequence for Stk31 (NM_029916.1,1791-1809).
gtcaagtgctgcaaaagat

SEQ ID NO: 486426 - DNA, 19 bp, Mus musculus
  siRNA target sequence for Stk31 (NM_029916.1,1796-1814).
gtgctgcaaaagatccatt

SEQ ID NO: 486427 - DNA, 19 bp, Mus musculus
  siRNA target sequence for Stk31 (NM_029916.1,1834-1852).
caccttgctgtccaagtat

SEQ ID NO: 486428 - DNA, 19 bp, Mus musculus
  siRNA target sequence for Stk31 (NM_029916.1,1855-1873).
ggacagtgttgagtttaaa

SEQ ID NO: 486429 - DNA, 19 bp, Mus musculus
  siRNA target sequence for Stk31 (NM_029916.1,1860-1878).
gtgttgagtttaaaaagca

SEQ ID NO: 486430 - DNA, 19 bp, Mus musculus
  siRNA target sequence for Stk31 (NM_029916.1,1876-1894).
gcagatgattgactgttta

SEQ ID NO: 486431 - DNA, 19 bp, Mus musculus
  siRNA target sequence for Stk31 (NM_029916.1,1877-1895).
cagatgattgactgtttaa

SEQ ID NO: 486432 - DNA, 19 bp, Mus musculus
  siRNA target sequence for Stk31 (NM_029916.1,1879-1897).
gatgattgactgtttaaat

SEQ ID NO: 486433 - DNA, 19 bp, Mus musculus
  siRNA target sequence for Stk31 (NM_029916.1,1913-1931).
gattacttgctttctatta

SEQ ID NO: 486434 - DNA, 19 bp, Mus musculus
  siRNA target sequence for Stk31 (NM_029916.1,2008-2026).
ccatgatggaactgaaatt

SEQ ID NO: 486435 - DNA, 19 bp, Mus musculus
  siRNA target sequence for Stk31 (NM_029916.1,2049-2067).
ctcaattgcgaaatagtgt

SEQ ID NO: 486436 - DNA, 19 bp, Mus musculus
  siRNA target sequence for Stk31 (NM_029916.1,2051-2069).
caattgcgaaatagtgttt

SEQ ID NO: 486437 - DNA, 19 bp, Mus musculus
  siRNA target sequence for Stk31 (NM_029916.1,2115-2133).
gcttgacccagaaatggtt

SEQ ID NO: 486438 - DNA, 19 bp, Mus musculus
  siRNA target sequence for Stk31 (NM_029916.1,2149-2167).
gctgtatcctgaaatagga

SEQ ID NO: 486439 - DNA, 19 bp, Mus musculus
  siRNA target sequence for Stk31 (NM_029916.1,2156-2174).
cctgaaataggattgctta

SEQ ID NO: 486440 - DNA, 19 bp, Mus musculus
  siRNA target sequence for Stk31 (NM_029916.1,2157-2175).
ctgaaataggattgcttaa

SEQ ID NO: 486441 - DNA, 19 bp, Mus musculus
  siRNA target sequence for Stk31 (NM_029916.1,2166-2184).
gattgcttaaatatatgaa

SEQ ID NO: 486442 - DNA, 19 bp, Mus musculus
  siRNA target sequence for Stk31 (NM_029916.1,2187-2205).
ctggtggtcttcttactat

SEQ ID NO: 486443 - DNA, 19 bp, Mus musculus
  siRNA target sequence for Stk31 (NM_029916.1,2189-2207).
ggtggtcttcttactatga

SEQ ID NO: 486444 - DNA, 19 bp, Mus musculus
  siRNA target sequence for Stk31 (NM_029916.1,2269-2287).
ggtgtgctccgaggttaat

SEQ ID NO: 486445 - DNA, 19 bp, Mus musculus
  siRNA target sequence for Stk31 (NM_029916.1,2310-2328).
gctattccgtggatgttga

SEQ ID NO: 486446 - DNA, 19 bp, Mus musculus
  siRNA target sequence for Stk31 (NM_029916.1,2373-2391).
cttgtggatatgctaaaga

SEQ ID NO: 486447 - DNA, 19 bp, Mus musculus
  siRNA target sequence for Stk31 (NM_029916.1,2455-2473).
gatggtcccatattatcct

SEQ ID NO: 486448 - DNA, 19 bp, Mus musculus
  siRNA target sequence for Stk31 (NM_029916.1,2592-2610).
gatcacttcatcagaacaa

SEQ ID NO: 486449 - DNA, 19 bp, Mus musculus
  siRNA target sequence for Stk31 (NM_029916.1,2597-2615).
cttcatcagaacaatgtat

SEQ ID NO: 486450 - DNA, 19 bp, Mus musculus
  siRNA target sequence for Stk31 (NM_029916.1,2716-2734).
gctctcacctgaattgaaa

SEQ ID NO: 486451 - DNA, 19 bp, Mus musculus
  siRNA target sequence for Stk31 (NM_029916.1,2751-2769).
ctgcaagttcagacttata

SEQ ID NO: 486452 - DNA, 19 bp, Mus musculus
  siRNA target sequence for Stk31 (NM_029916.1,2788-2806).
cttatggctttctgttcaa

SEQ ID NO: 486453 - DNA, 19 bp, Mus musculus
  siRNA target sequence for Stk31 (NM_029916.1,2873-2891).
gtcaagtccctcctttgta

SEQ ID NO: 486454 - DNA, 19 bp, Mus musculus
  siRNA target sequence for Stk31 (NM_029916.1,3037-3055).
gagtctggatagatatagt

SEQ ID NO: 486455 - DNA, 19 bp, Mus musculus
  siRNA target sequence for Stk31 (NM_029916.1,3039-3057).
gtctggatagatatagtga

SEQ ID NO: 486456 - DNA, 19 bp, Mus musculus
  siRNA target sequence for Stk31 (NM_029916.1,3041-3059).
ctggatagatatagtgaaa

SEQ ID NO: 486457 - DNA, 19 bp, Mus musculus
  siRNA target sequence for Stk31 (NM_029916.1,3044-3062).
gatagatatagtgaaaaga

SEQ ID NO: 486458 - DNA, 19 bp, Mus musculus
  siRNA target sequence for Supv3l1 (NM_181423.2,262-280).
ctcggcctctagacaagaa

SEQ ID NO: 486459 - DNA, 19 bp, Mus musculus
  siRNA target sequence for Supv3l1 (NM_181423.2,266-284).
gcctctagacaagaatgaa

SEQ ID NO: 486460 - DNA, 19 bp, Mus musculus
  siRNA target sequence for Supv3l1 (NM_181423.2,268-286).
ctctagacaagaatgaagt

SEQ ID NO: 486461 - DNA, 19 bp, Mus musculus
  siRNA target sequence for Supv3l1 (NM_181423.2,389-407).
caggaattacattatgcaa

SEQ ID NO: 486462 - DNA, 19 bp, Mus musculus
  siRNA target sequence for Supv3l1 (NM_181423.2,415-433).
ctctggacgtggacattca

SEQ ID NO: 486463 - DNA, 19 bp, Mus musculus
  siRNA target sequence for Supv3l1 (NM_181423.2,417-435).
ctggacgtggacattcaca

SEQ ID NO: 486464 - DNA, 19 bp, Mus musculus
  siRNA target sequence for Supv3l1 (NM_181423.2,419-437).
ggacgtggacattcacatt

SEQ ID NO: 486465 - DNA, 19 bp, Mus musculus
  siRNA target sequence for Supv3l1 (NM_181423.2,465-483).
gctcatgtggacgatttat

SEQ ID NO: 486466 - DNA, 19 bp, Mus musculus
  siRNA target sequence for Supv3l1 (NM_181423.2,466-484).
ctcatgtggacgatttatt

SEQ ID NO: 486467 - DNA, 19 bp, Mus musculus
  siRNA target sequence for Supv3l1 (NM_181423.2,471-489).
gtggacgatttatttccat

SEQ ID NO: 486468 - DNA, 19 bp, Mus musculus
  siRNA target sequence for Supv3l1 (NM_181423.2,494-512).
cttgagacatgccaaacaa

SEQ ID NO: 486469 - DNA, 19 bp, Mus musculus
  siRNA target sequence for Supv3l1 (NM_181423.2,532-550).
gcaaggatgatctacgtaa

SEQ ID NO: 486470 - DNA, 19 bp, Mus musculus
  siRNA target sequence for Supv3l1 (NM_181423.2,533-551).
caaggatgatctacgtaaa

SEQ ID NO: 486471 - DNA, 19 bp, Mus musculus
  siRNA target sequence for Supv3l1 (NM_181423.2,537-555).
gatgatctacgtaaaatca

SEQ ID NO: 486472 - DNA, 19 bp, Mus musculus
  siRNA target sequence for Supv3l1 (NM_181423.2,597-615).
gcgagacagcggaagataa

SEQ ID NO: 486473 - DNA, 19 bp, Mus musculus
  siRNA target sequence for Supv3l1 (NM_181423.2,598-616).
cgagacagcggaagataat

SEQ ID NO: 486474 - DNA, 19 bp, Mus musculus
  siRNA target sequence for Supv3l1 (NM_181423.2,599-617).
gagacagcggaagataata

SEQ ID NO: 486475 - DNA, 19 bp, Mus musculus
  siRNA target sequence for Supv3l1 (NM_181423.2,601-619).
gacagcggaagataatatt

SEQ ID NO: 486476 - DNA, 19 bp, Mus musculus
  siRNA target sequence for Supv3l1 (NM_181423.2,638-656).
cagtgggaagacttaccat

SEQ ID NO: 486477 - DNA, 19 bp, Mus musculus
  siRNA target sequence for Supv3l1 (NM_181423.2,692-710).
gtactgcggtcctctaaaa

SEQ ID NO: 486478 - DNA, 19 bp, Mus musculus
  siRNA target sequence for Supv3l1 (NM_181423.2,713-731).
gctggcgcacgagatcttt

SEQ ID NO: 486479 - DNA, 19 bp, Mus musculus
  siRNA target sequence for Supv3l1 (NM_181423.2,717-735).
gcgcacgagatctttgaga

SEQ ID NO: 486480 - DNA, 19 bp, Mus musculus
  siRNA target sequence for Supv3l1 (NM_181423.2,845-863).
caatgttgcaactccttat

SEQ ID NO: 486481 - DNA, 19 bp, Mus musculus
  siRNA target sequence for Supv3l1 (NM_181423.2,867-885).
gtggcagtgatagatgaaa

SEQ ID NO: 486482 - DNA, 19 bp, Mus musculus
  siRNA target sequence for Supv3l1 (NM_181423.2,948-966).
gccgaggaagtccatttat

SEQ ID NO: 486483 - DNA, 19 bp, Mus musculus
  siRNA target sequence for Supv3l1 (NM_181423.2,950-968).
cgaggaagtccatttatgt

SEQ ID NO: 486484 - DNA, 19 bp, Mus musculus
  siRNA target sequence for Supv3l1 (NM_181423.2,1046-1064).
gaggcttacccccatttct

SEQ ID NO: 486485 - DNA, 19 bp, Mus musculus
  siRNA target sequence for Supv3l1 (NM_181423.2,1048-1066).
ggcttacccccatttctgt

SEQ ID NO: 486486 - DNA, 19 bp, Mus musculus
  siRNA target sequence for Supv3l1 (NM_181423.2,1114-1132).
gcattgtctgctttagcaa

SEQ ID NO: 486487 - DNA, 19 bp, Mus musculus
  siRNA target sequence for Supv3l1 (NM_181423.2,1176-1194).
ctggaatccgcggtgatat

SEQ ID NO: 486488 - DNA, 19 bp, Mus musculus
  siRNA target sequence for Supv3l1 (NM_181423.2,1224-1242).
gctcaagcaagaaagttta

SEQ ID NO: 486489 - DNA, 19 bp, Mus musculus
  siRNA target sequence for Supv3l1 (NM_181423.2,1296-1314).
ggacttaatttgagcataa

SEQ ID NO: 486490 - DNA, 19 bp, Mus musculus
  siRNA target sequence for Supv3l1 (NM_181423.2,1307-1325).
gagcataaggagaattatt

SEQ ID NO: 486491 - DNA, 19 bp, Mus musculus
  siRNA target sequence for Supv3l1 (NM_181423.2,1424-1442).
cagattcagctcacacttt

SEQ ID NO: 486492 - DNA, 19 bp, Mus musculus
  siRNA target sequence for Supv3l1 (NM_181423.2,1471-1489).
gagacgacctggctttatt

SEQ ID NO: 486493 - DNA, 19 bp, Mus musculus
  siRNA target sequence for Supv3l1 (NM_181423.2,1473-1491).
gacgacctggctttattga

SEQ ID NO: 486494 - DNA, 19 bp, Mus musculus
  siRNA target sequence for Supv3l1 (NM_181423.2,1543-1561).
cgactgccgagcagattga

SEQ ID NO: 486495 - DNA, 19 bp, Mus musculus
  siRNA target sequence for Supv3l1 (NM_181423.2,1588-1606).
caacgctgtccaatctcat

SEQ ID NO: 486496 - DNA, 19 bp, Mus musculus
  siRNA target sequence for Supv3l1 (NM_181423.2,1595-1613).
gtccaatctcattgatatt

SEQ ID NO: 486497 - DNA, 19 bp, Mus musculus
  siRNA target sequence for Supv3l1 (NM_181423.2,1597-1615).
ccaatctcattgatatttt

SEQ ID NO: 486498 - DNA, 19 bp, Mus musculus
  siRNA target sequence for Supv3l1 (NM_181423.2,1635-1653).
gatgggcagtactttgtct

SEQ ID NO: 486499 - DNA, 19 bp, Mus musculus
  siRNA target sequence for Supv3l1 (NM_181423.2,1641-1659).
cagtactttgtctgcaata

SEQ ID NO: 486500 - DNA, 19 bp, Mus musculus
  siRNA target sequence for Supv3l1 (NM_181423.2,1650-1668).
gtctgcaatatggatgatt

SEQ ID NO: 486501 - DNA, 19 bp, Mus musculus
  siRNA target sequence for Supv3l1 (NM_181423.2,1652-1670).
ctgcaatatggatgatttt

SEQ ID NO: 486502 - DNA, 19 bp, Mus musculus
  siRNA target sequence for Supv3l1 (NM_181423.2,1710-1728).
ctccgggtgaggtatgtgt

SEQ ID NO: 486503 - DNA, 19 bp, Mus musculus
  siRNA target sequence for Supv3l1 (NM_181423.2,1732-1750).
gcacagcccccatcaataa

SEQ ID NO: 486504 - DNA, 19 bp, Mus musculus
  siRNA target sequence for Supv3l1 (NM_181423.2,1768-1786).
gctcgtcgttgttacagtt

SEQ ID NO: 486505 - DNA, 19 bp, Mus musculus
  siRNA target sequence for Supv3l1 (NM_181423.2,1828-1846).
ggctacgccggtacatcaa

SEQ ID NO: 486506 - DNA, 19 bp, Mus musculus
  siRNA target sequence for Supv3l1 (NM_181423.2,1830-1848).
ctacgccggtacatcaagt

SEQ ID NO: 486507 - DNA, 19 bp, Mus musculus
  siRNA target sequence for Supv3l1 (NM_181423.2,1852-1870).
ctctgcttccgcctaagaa

SEQ ID NO: 486508 - DNA, 19 bp, Mus musculus
  siRNA target sequence for Supv3l1 (NM_181423.2,1854-1872).
ctgcttccgcctaagaata

SEQ ID NO: 486509 - DNA, 19 bp, Mus musculus
  siRNA target sequence for Supv3l1 (NM_181423.2,1856-1874).
gcttccgcctaagaatatt

SEQ ID NO: 486510 - DNA, 19 bp, Mus musculus
  siRNA target sequence for Supv3l1 (NM_181423.2,1901-1919).
ccatgacgtctttgatctt

SEQ ID NO: 486511 - DNA, 19 bp, Mus musculus
  siRNA target sequence for Supv3l1 (NM_181423.2,1902-1920).
catgacgtctttgatcttt

SEQ ID NO: 486512 - DNA, 19 bp, Mus musculus
  siRNA target sequence for Supv3l1 (NM_181423.2,1927-1945).
ggctaagctaccgatttat

SEQ ID NO: 486513 - DNA, 19 bp, Mus musculus
  siRNA target sequence for Supv3l1 (NM_181423.2,1928-1946).
gctaagctaccgatttatt

SEQ ID NO: 486514 - DNA, 19 bp, Mus musculus
  siRNA target sequence for Supv3l1 (NM_181423.2,1933-1951).
gctaccgatttattgatat

SEQ ID NO: 486515 - DNA, 19 bp, Mus musculus
  siRNA target sequence for Supv3l1 (NM_181423.2,2047-2065).
ctgagtcacgcaagctttt

SEQ ID NO: 486516 - DNA, 19 bp, Mus musculus
  siRNA target sequence for Supv3l1 (NM_181423.2,2049-2067).
gagtcacgcaagcttttga

SEQ ID NO: 486517 - DNA, 19 bp, Mus musculus
  siRNA target sequence for Supv3l1 (NM_181423.2,2051-2069).
gtcacgcaagcttttgaat

SEQ ID NO: 486518 - DNA, 19 bp, Mus musculus
  siRNA target sequence for Supv3l1 (NM_181423.2,2146-2164).
ccaaaagtgcagggaataa

SEQ ID NO: 486519 - DNA, 19 bp, Mus musculus
  siRNA target sequence for Synj2 (NM_011523.1,399-417).
gagctcaggggtgttctat

SEQ ID NO: 486520 - DNA, 19 bp, Mus musculus
  siRNA target sequence for Synj2 (NM_011523.1,475-493).
ggtgatgacggctctgaat

SEQ ID NO: 486521 - DNA, 19 bp, Mus musculus
  siRNA target sequence for Synj2 (NM_011523.1,490-508).
gaatgggggacctctttct

SEQ ID NO: 486522 - DNA, 19 bp, Mus musculus
  siRNA target sequence for Synj2 (NM_011523.1,544-562).
caccaggtgaactgtcata

SEQ ID NO: 486523 - DNA, 19 bp, Mus musculus
  siRNA target sequence for Synj2 (NM_011523.1,594-612).
gaccatccgcacagtatat

SEQ ID NO: 486524 - DNA, 19 bp, Mus musculus
  siRNA target sequence for Synj2 (NM_011523.1,707-725).
gccacgtgtccaactttgt

SEQ ID NO: 486525 - DNA, 19 bp, Mus musculus
  siRNA target sequence for Synj2 (NM_011523.1,731-749).
cagagcagacgatttacat

SEQ ID NO: 486526 - DNA, 19 bp, Mus musculus
  siRNA target sequence for Synj2 (NM_011523.1,861-879).
ggccaacgctcctgctttt

SEQ ID NO: 486527 - DNA, 19 bp, Mus musculus
  siRNA target sequence for Synj2 (NM_011523.1,914-932).
gtaagcaggtggttgtgaa

SEQ ID NO: 486528 - DNA, 19 bp, Mus musculus
  siRNA target sequence for Synj2 (NM_011523.1,1007-1025).
cgggtgacacacctatgat

SEQ ID NO: 486529 - DNA, 19 bp, Mus musculus
  siRNA target sequence for Synj2 (NM_011523.1,1018-1036).
cctatgataaattttgact

SEQ ID NO: 486530 - DNA, 19 bp, Mus musculus
  siRNA target sequence for Synj2 (NM_011523.1,1019-1037).
ctatgataaattttgactt

SEQ ID NO: 486531 - DNA, 19 bp, Mus musculus
  siRNA target sequence for Synj2 (NM_011523.1,1039-1057).
catcagtttgccaaaggta

SEQ ID NO: 486532 - DNA, 19 bp, Mus musculus
  siRNA target sequence for Synj2 (NM_011523.1,1129-1147).
gcgaagggcgagaatgtaa

SEQ ID NO: 486533 - DNA, 19 bp, Mus musculus
  siRNA target sequence for Synj2 (NM_011523.1,1131-1149).
gaagggcgagaatgtaagt

SEQ ID NO: 486534 - DNA, 19 bp, Mus musculus
  siRNA target sequence for Synj2 (NM_011523.1,1186-1204).
ctcgactgtctggatagaa

SEQ ID NO: 486535 - DNA, 19 bp, Mus musculus
  siRNA target sequence for Synj2 (NM_011523.1,1229-1247).
ctcttgaggtccttcatct

SEQ ID NO: 486536 - DNA, 19 bp, Mus musculus
  siRNA target sequence for Synj2 (NM_011523.1,1257-1275).
gagcttggggctaaattca

SEQ ID NO: 486537 - DNA, 19 bp, Mus musculus
  siRNA target sequence for Synj2 (NM_011523.1,1485-1503).
cggagatgtctacaatgaa

SEQ ID NO: 486538 - DNA, 19 bp, Mus musculus
  siRNA target sequence for Synj2 (NM_011523.1,1582-1600).
gaacgccagtcggaattca

SEQ ID NO: 486539 - DNA, 19 bp, Mus musculus
  siRNA target sequence for Synj2 (NM_011523.1,1588-1606).
cagtcggaattcacgaatt

SEQ ID NO: 486540 - DNA, 19 bp, Mus musculus
  siRNA target sequence for Synj2 (NM_011523.1,1752-1770).
cagtcctgctgacgtattt

SEQ ID NO: 486541 - DNA, 19 bp, Mus musculus
  siRNA target sequence for Synj2 (NM_011523.1,1802-1820).
gtgcgggaaatattgtcaa

SEQ ID NO: 486542 - DNA, 19 bp, Mus musculus
  siRNA target sequence for Synj2 (NM_011523.1,1847-1865).
ggggcgagcagcttcagaa

SEQ ID NO: 486543 - DNA, 19 bp, Mus musculus
  siRNA target sequence for Synj2 (NM_011523.1,1848-1866).
gggcgagcagcttcagaaa

SEQ ID NO: 486544 - DNA, 19 bp, Mus musculus
  siRNA target sequence for Synj2 (NM_011523.1,1912-1930).
ctggtgggcgtctgtcttt

SEQ ID NO: 486545 - DNA, 19 bp, Mus musculus
  siRNA target sequence for Synj2 (NM_011523.1,1915-1933).
gtgggcgtctgtctttaca

SEQ ID NO: 486546 - DNA, 19 bp, Mus musculus
  siRNA target sequence for Synj2 (NM_011523.1,1918-1936).
ggcgtctgtctttacatct

SEQ ID NO: 486547 - DNA, 19 bp, Mus musculus
  siRNA target sequence for Synj2 (NM_011523.1,1919-1937).
gcgtctgtctttacatctt

SEQ ID NO: 486548 - DNA, 19 bp, Mus musculus
  siRNA target sequence for Synj2 (NM_011523.1,2129-2147).
gggagatcacgcacaaact

SEQ ID NO: 486549 - DNA, 19 bp, Mus musculus
  siRNA target sequence for Synj2 (NM_011523.1,2131-2149).
gagatcacgcacaaactct

SEQ ID NO: 486550 - DNA, 19 bp, Mus musculus
  siRNA target sequence for Synj2 (NM_011523.1,2154-2172).
cccttcggggagaaacata

SEQ ID NO: 486551 - DNA, 19 bp, Mus musculus
  siRNA target sequence for Synj2 (NM_011523.1,2155-2173).
ccttcggggagaaacatat

SEQ ID NO: 486552 - DNA, 19 bp, Mus musculus
  siRNA target sequence for Synj2 (NM_011523.1,2160-2178).
ggggagaaacatattttca

SEQ ID NO: 486553 - DNA, 19 bp, Mus musculus
  siRNA target sequence for Synj2 (NM_011523.1,2211-2229).
ctaccgtattgatcttact

SEQ ID NO: 486554 - DNA, 19 bp, Mus musculus
  siRNA target sequence for Synj2 (NM_011523.1,2228-2246).
cttacgaagaagtcttcta

SEQ ID NO: 486555 - DNA, 19 bp, Mus musculus
  siRNA target sequence for Synj2 (NM_011523.1,2335-2353).
catgaaggagccgttaact

SEQ ID NO: 486556 - DNA, 19 bp, Mus musculus
  siRNA target sequence for Synj2 (NM_011523.1,2355-2373).
cggacccacctacaagtat

SEQ ID NO: 486557 - DNA, 19 bp, Mus musculus
  siRNA target sequence for Synj2 (NM_011523.1,2448-2466).
gaggaagaagcatccatat

SEQ ID NO: 486558 - DNA, 19 bp, Mus musculus
  siRNA target sequence for Synj2 (NM_011523.1,2451-2469).
gaagaagcatccatatgat

SEQ ID NO: 486559 - DNA, 19 bp, Mus musculus
  siRNA target sequence for Synj2 (NM_011523.1,2509-2527).
gacggcgatccccaaatca

SEQ ID NO: 486560 - DNA, 19 bp, Mus musculus
  siRNA target sequence for Synj2 (NM_011523.1,2511-2529).
cggcgatccccaaatcaga

SEQ ID NO: 486561 - DNA, 19 bp, Mus musculus
  siRNA target sequence for Synj2 (NM_011523.1,2543-2561).
caggcactctgaaatacta

SEQ ID NO: 486562 - DNA, 19 bp, Mus musculus
  siRNA target sequence for Synj2 (NM_011523.1,2691-2709).
ggatgccaccgttgttgta

SEQ ID NO: 486563 - DNA, 19 bp, Mus musculus
  siRNA target sequence for Synj2 (NM_011523.1,2786-2804).
ggaattatgggacgattat

SEQ ID NO: 486564 - DNA, 19 bp, Mus musculus
  siRNA target sequence for Synj2 (NM_011523.1,2787-2805).
gaattatgggacgattatt

SEQ ID NO: 486565 - DNA, 19 bp, Mus musculus
  siRNA target sequence for Synj2 (NM_011523.1,2917-2935).
cgaccaaagaccaaagatt

SEQ ID NO: 486566 - DNA, 19 bp, Mus musculus
  siRNA target sequence for Synj2 (NM_011523.1,3054-3072).
gtccgaaggggatgttctt

SEQ ID NO: 486567 - DNA, 19 bp, Mus musculus
  siRNA target sequence for Synj2 (NM_011523.1,3056-3074).
ccgaaggggatgttcttga

SEQ ID NO: 486568 - DNA, 19 bp, Mus musculus
  siRNA target sequence for Synj2 (NM_011523.1,3235-3253).
gctcacctggtgaccttaa

SEQ ID NO: 486569 - DNA, 19 bp, Mus musculus
  siRNA target sequence for Synj2 (NM_011523.1,3410-3428).
ctggcactcatggacaata

SEQ ID NO: 486570 - DNA, 19 bp, Mus musculus
  siRNA target sequence for Synj2 (NM_011523.1,3491-3509).
ctggaataagtaaacctta

SEQ ID NO: 486571 - DNA, 19 bp, Mus musculus
  siRNA target sequence for Synj2 (NM_011523.1,3494-3512).
gaataagtaaaccttacaa

SEQ ID NO: 486572 - DNA, 19 bp, Mus musculus
  siRNA target sequence for Synj2 (NM_011523.1,3608-3626).
gtgccatacccctgagaaa

SEQ ID NO: 486573 - DNA, 19 bp, Mus musculus
  siRNA target sequence for Synj2 (NM_011523.1,3612-3630).
catacccctgagaaaccaa

SEQ ID NO: 486574 - DNA, 19 bp, Mus musculus
  siRNA target sequence for Synj2 (NM_011523.1,3623-3641).
gaaaccaagggtcttctaa

SEQ ID NO: 486575 - DNA, 19 bp, Mus musculus
  siRNA target sequence for Synj2 (NM_011523.1,3688-3706).
ccaagggttcccactatga

SEQ ID NO: 486576 - DNA, 19 bp, Mus musculus
  siRNA target sequence for Synj2 (NM_011523.1,3689-3707).
caagggttcccactatgaa

SEQ ID NO: 486577 - DNA, 19 bp, Mus musculus
  siRNA target sequence for Synj2 (NM_011523.1,3814-3832).
gactgcggagaccttaaca

SEQ ID NO: 486578 - DNA, 19 bp, Mus musculus
  siRNA target sequence for Synj2 (NM_011523.1,3847-3865).
ccacgtttctcgcactata

SEQ ID NO: 486579 - DNA, 19 bp, Mus musculus
  siRNA target sequence for Synj2 (NM_011523.1,3848-3866).
cacgtttctcgcactatat

SEQ ID NO: 486580 - DNA, 19 bp, Mus musculus
  siRNA target sequence for Synj2 (NM_011523.1,3851-3869).
gtttctcgcactatattca

SEQ ID NO: 486581 - DNA, 19 bp, Mus musculus
  siRNA target sequence for Synj2 (NM_011523.1,3857-3875).
cgcactatattcacacaaa

SEQ ID NO: 486582 - DNA, 19 bp, Mus musculus
  siRNA target sequence for Synj2 (NM_011523.1,3858-3876).
gcactatattcacacaaaa

SEQ ID NO: 486583 - DNA, 19 bp, Mus musculus
  siRNA target sequence for Synj2 (NM_011523.1,3888-3906).
cgtatctctcagttttcaa

SEQ ID NO: 486584 - DNA, 19 bp, Mus musculus
  siRNA target sequence for Synj2 (NM_011523.1,3893-3911).
ctctcagttttcaagatct

SEQ ID NO: 486585 - DNA, 19 bp, Mus musculus
  siRNA target sequence for Taf15 (NM_027427.1,99-117).
ggattctggaagttacagt

SEQ ID NO: 486586 - DNA, 19 bp, Mus musculus
  siRNA target sequence for Taf15 (NM_027427.1,124-142).
gggggtgagcagcaaagtt

SEQ ID NO: 486587 - DNA, 19 bp, Mus musculus
  siRNA target sequence for Taf15 (NM_027427.1,125-143).
ggggtgagcagcaaagtta

SEQ ID NO: 486588 - DNA, 19 bp, Mus musculus
  siRNA target sequence for Taf15 (NM_027427.1,127-145).
ggtgagcagcaaagttatt

SEQ ID NO: 486589 - DNA, 19 bp, Mus musculus
  siRNA target sequence for Taf15 (NM_027427.1,130-148).
gagcagcaaagttattctt

SEQ ID NO: 486590 - DNA, 19 bp, Mus musculus
  siRNA target sequence for Taf15 (NM_027427.1,135-153).
gcaaagttattcttcttat

SEQ ID NO: 486591 - DNA, 19 bp, Mus musculus
  siRNA target sequence for Taf15 (NM_027427.1,208-226).
gggcaaacgactgattctt

SEQ ID NO: 486592 - DNA, 19 bp, Mus musculus
  siRNA target sequence for Taf15 (NM_027427.1,224-242).
cttcgtatggacaaaacta

SEQ ID NO: 486593 - DNA, 19 bp, Mus musculus
  siRNA target sequence for Taf15 (NM_027427.1,252-270).
ctccggttatggacaaaat

SEQ ID NO: 486594 - DNA, 19 bp, Mus musculus
  siRNA target sequence for Taf15 (NM_027427.1,254-272).
ccggttatggacaaaatca

SEQ ID NO: 486595 - DNA, 19 bp, Mus musculus
  siRNA target sequence for Taf15 (NM_027427.1,255-273).
cggttatggacaaaatcaa

SEQ ID NO: 486596 - DNA, 19 bp, Mus musculus
  siRNA target sequence for Taf15 (NM_027427.1,284-302).
cacagtcgtatggtagtta

SEQ ID NO: 486597 - DNA, 19 bp, Mus musculus
  siRNA target sequence for Taf15 (NM_027427.1,295-313).
ggtagttatgagaatcaaa

SEQ ID NO: 486598 - DNA, 19 bp, Mus musculus
  siRNA target sequence for Taf15 (NM_027427.1,296-314).
gtagttatgagaatcaaaa

SEQ ID NO: 486599 - DNA, 19 bp, Mus musculus
  siRNA target sequence for Taf15 (NM_027427.1,299-317).
gttatgagaatcaaaagca

SEQ ID NO: 486600 - DNA, 19 bp, Mus musculus
  siRNA target sequence for Taf15 (NM_027427.1,415-433).
gactatggtcagcaagatt

SEQ ID NO: 486601 - DNA, 19 bp, Mus musculus
  siRNA target sequence for Taf15 (NM_027427.1,417-435).
ctatggtcagcaagattct

SEQ ID NO: 486602 - DNA, 19 bp, Mus musculus
  siRNA target sequence for Taf15 (NM_027427.1,422-440).
gtcagcaagattcttatga

SEQ ID NO: 486603 - DNA, 19 bp, Mus musculus
  siRNA target sequence for Taf15 (NM_027427.1,462-480).
gcatcaaggctcatatgat

SEQ ID NO: 486604 - DNA, 19 bp, Mus musculus
  siRNA target sequence for Taf15 (NM_027427.1,496-514).
cagcaacatgattcctata

SEQ ID NO: 486605 - DNA, 19 bp, Mus musculus
  siRNA target sequence for Taf15 (NM_027427.1,498-516).
gcaacatgattcctataat

SEQ ID NO: 486606 - DNA, 19 bp, Mus musculus
  siRNA target sequence for Taf15 (NM_027427.1,502-520).
catgattcctataatcaaa

SEQ ID NO: 486607 - DNA, 19 bp, Mus musculus
  siRNA target sequence for Taf15 (NM_027427.1,641-659).
gagggcgtgggggatatga

SEQ ID NO: 486608 - DNA, 19 bp, Mus musculus
  siRNA target sequence for Taf15 (NM_027427.1,644-662).
ggcgtgggggatatgacaa

SEQ ID NO: 486609 - DNA, 19 bp, Mus musculus
  siRNA target sequence for Taf15 (NM_027427.1,757-775).
gctgattcagagtctgata

SEQ ID NO: 486610 - DNA, 19 bp, Mus musculus
  siRNA target sequence for Taf15 (NM_027427.1,760-778).
gattcagagtctgataatt

SEQ ID NO: 486611 - DNA, 19 bp, Mus musculus
  siRNA target sequence for Taf15 (NM_027427.1,816-834).
gggtgtgtctacagatcaa

SEQ ID NO: 486612 - DNA, 19 bp, Mus musculus
  siRNA target sequence for Taf15 (NM_027427.1,837-855).
gggagagttctttaagcaa

SEQ ID NO: 486613 - DNA, 19 bp, Mus musculus
  siRNA target sequence for Taf15 (NM_027427.1,838-856).
ggagagttctttaagcaaa

SEQ ID NO: 486614 - DNA, 19 bp, Mus musculus
  siRNA target sequence for Taf15 (NM_027427.1,843-861).
gttctttaagcaaatagga

SEQ ID NO: 486615 - DNA, 19 bp, Mus musculus
  siRNA target sequence for Taf15 (NM_027427.1,853-871).
caaataggaattatcaaga

SEQ ID NO: 486616 - DNA, 19 bp, Mus musculus
  siRNA target sequence for Taf15 (NM_027427.1,1030-1048).
gtgtcatttgccactagaa

SEQ ID NO: 486617 - DNA, 19 bp, Mus musculus
  siRNA target sequence for Taf15 (NM_027427.1,1040-1058).
ccactagaaggcctgaatt

SEQ ID NO: 486618 - DNA, 19 bp, Mus musculus
  siRNA target sequence for Taf15 (NM_027427.1,1043-1061).
ctagaaggcctgaatttat

SEQ ID NO: 486619 - DNA, 19 bp, Mus musculus
  siRNA target sequence for Taf15 (NM_027427.1,1090-1108).
cgaggccgtggaggatata

SEQ ID NO: 486620 - DNA, 19 bp, Mus musculus
  siRNA target sequence for Taf15 (NM_027427.1,1174-1192).
ccgtcatgtggaaatatga

SEQ ID NO: 486621 - DNA, 19 bp, Mus musculus
  siRNA target sequence for Taf15 (NM_027427.1,1175-1193).
cgtcatgtggaaatatgaa

SEQ ID NO: 486622 - DNA, 19 bp, Mus musculus
  siRNA target sequence for Taf15 (NM_027427.1,1350-1368).
cagaagtgggggaggttat

SEQ ID NO: 486623 - DNA, 19 bp, Mus musculus
  siRNA target sequence for Taf15 (NM_027427.1,1727-1745).
gaaacgactacagaaatga

SEQ ID NO: 486624 - DNA, 19 bp, Mus musculus
  siRNA target sequence for Tdrd1 (NM_031387.2,186-204).
ggagataaagggtacagtt

SEQ ID NO: 486625 - DNA, 19 bp, Mus musculus
  siRNA target sequence for Tdrd1 (NM_031387.2,187-205).
gagataaagggtacagtta

SEQ ID NO: 486626 - DNA, 19 bp, Mus musculus
  siRNA target sequence for Tdrd1 (NM_031387.2,213-231).
caagcacccgagtaacttt

SEQ ID NO: 486627 - DNA, 19 bp, Mus musculus
  siRNA target sequence for Tdrd1 (NM_031387.2,221-239).
cgagtaacttttatatcca

SEQ ID NO: 486628 - DNA, 19 bp, Mus musculus
  siRNA target sequence for Tdrd1 (NM_031387.2,248-266).
cttcagaggttctagaaaa

SEQ ID NO: 486629 - DNA, 19 bp, Mus musculus
  siRNA target sequence for Tdrd1 (NM_031387.2,251-269).
cagaggttctagaaaacat

SEQ ID NO: 486630 - DNA, 19 bp, Mus musculus
  siRNA target sequence for Tdrd1 (NM_031387.2,312-330).
ggtgcctgaagatggttat

SEQ ID NO: 486631 - DNA, 19 bp, Mus musculus
  siRNA target sequence for Tdrd1 (NM_031387.2,381-399).
ctggaacagagccatagta

SEQ ID NO: 486632 - DNA, 19 bp, Mus musculus
  siRNA target sequence for Tdrd1 (NM_031387.2,426-444).
ggcccacgtcctgtacatt

SEQ ID NO: 486633 - DNA, 19 bp, Mus musculus
  siRNA target sequence for Tdrd1 (NM_031387.2,432-450).
cgtcctgtacattgactat

SEQ ID NO: 486634 - DNA, 19 bp, Mus musculus
  siRNA target sequence for Tdrd1 (NM_031387.2,460-478).
gagatgatcccgatagaca

SEQ ID NO: 486635 - DNA, 19 bp, Mus musculus
  siRNA target sequence for Tdrd1 (NM_031387.2,495-513).
cagaggccttgacttgttt

SEQ ID NO: 486636 - DNA, 19 bp, Mus musculus
  siRNA target sequence for Tdrd1 (NM_031387.2,514-532).
cctccttctgccataaagt

SEQ ID NO: 486637 - DNA, 19 bp, Mus musculus
  siRNA target sequence for Tdrd1 (NM_031387.2,665-683).
gtgccgttgaccttgttct

SEQ ID NO: 486638 - DNA, 19 bp, Mus musculus
  siRNA target sequence for Tdrd1 (NM_031387.2,668-686).
ccgttgaccttgttctaca

SEQ ID NO: 486639 - DNA, 19 bp, Mus musculus
  siRNA target sequence for Tdrd1 (NM_031387.2,811-829).
gttgagagcaagattgtga

SEQ ID NO: 486640 - DNA, 19 bp, Mus musculus
  siRNA target sequence for Tdrd1 (NM_031387.2,999-1017).
gattccacgctctgacttt

SEQ ID NO: 486641 - DNA, 19 bp, Mus musculus
  siRNA target sequence for Tdrd1 (NM_031387.2,1006-1024).
cgctctgacttttatccaa

SEQ ID NO: 486642 - DNA, 19 bp, Mus musculus
  siRNA target sequence for Tdrd1 (NM_031387.2,1089-1107).
ggcctacgcttctgaagaa

SEQ ID NO: 486643 - DNA, 19 bp, Mus musculus
  siRNA target sequence for Tdrd1 (NM_031387.2,1092-1110).
ctacgcttctgaagaatct

SEQ ID NO: 486644 - DNA, 19 bp, Mus musculus
  siRNA target sequence for Tdrd1 (NM_031387.2,1116-1134).
ggttggatatgtcgattat

SEQ ID NO: 486645 - DNA, 19 bp, Mus musculus
  siRNA target sequence for Tdrd1 (NM_031387.2,1165-1183).
ctttgtcccataattccaa

SEQ ID NO: 486646 - DNA, 19 bp, Mus musculus
  siRNA target sequence for Tdrd1 (NM_031387.2,1197-1215).
gccgatgcaagctctaaat

SEQ ID NO: 486647 - DNA, 19 bp, Mus musculus
  siRNA target sequence for Tdrd1 (NM_031387.2,1198-1216).
ccgatgcaagctctaaatt

SEQ ID NO: 486648 - DNA, 19 bp, Mus musculus
  siRNA target sequence for Tdrd1 (NM_031387.2,1200-1218).
gatgcaagctctaaattgt

SEQ ID NO: 486649 - DNA, 19 bp, Mus musculus
  siRNA target sequence for Tdrd1 (NM_031387.2,1226-1244).
caggcgtgaagccatcatt

SEQ ID NO: 486650 - DNA, 19 bp, Mus musculus
  siRNA target sequence for Tdrd1 (NM_031387.2,1230-1248).
cgtgaagccatcattagga

SEQ ID NO: 486651 - DNA, 19 bp, Mus musculus
  siRNA target sequence for Tdrd1 (NM_031387.2,1373-1391).
ctcacgtcagcgcttctaa

SEQ ID NO: 486652 - DNA, 19 bp, Mus musculus
  siRNA target sequence for Tdrd1 (NM_031387.2,1377-1395).
cgtcagcgcttctaaagct

SEQ ID NO: 486653 - DNA, 19 bp, Mus musculus
  siRNA target sequence for Tdrd1 (NM_031387.2,1404-1422).
ctcgggctttgccatcaaa

SEQ ID NO: 486654 - DNA, 19 bp, Mus musculus
  siRNA target sequence for Tdrd1 (NM_031387.2,1406-1424).
cgggctttgccatcaaaga

SEQ ID NO: 486655 - DNA, 19 bp, Mus musculus
  siRNA target sequence for Tdrd1 (NM_031387.2,1407-1425).
gggctttgccatcaaagaa

SEQ ID NO: 486656 - DNA, 19 bp, Mus musculus
  siRNA target sequence for Tdrd1 (NM_031387.2,1408-1426).
ggctttgccatcaaagaaa

SEQ ID NO: 486657 - DNA, 19 bp, Mus musculus
  siRNA target sequence for Tdrd1 (NM_031387.2,1586-1604).
gccactttcttaaagatga

SEQ ID NO: 486658 - DNA, 19 bp, Mus musculus
  siRNA target sequence for Tdrd1 (NM_031387.2,1618-1636).
ctcgatgacttgaatcagt

SEQ ID NO: 486659 - DNA, 19 bp, Mus musculus
  siRNA target sequence for Tdrd1 (NM_031387.2,1730-1748).
ggtaccgggctctagtcaa

SEQ ID NO: 486660 - DNA, 19 bp, Mus musculus
  siRNA target sequence for Tdrd1 (NM_031387.2,1739-1757).
ctctagtcaaggagatctt

SEQ ID NO: 486661 - DNA, 19 bp, Mus musculus
  siRNA target sequence for Tdrd1 (NM_031387.2,1788-1806).
ggattacggaaatgttgaa

SEQ ID NO: 486662 - DNA, 19 bp, Mus musculus
  siRNA target sequence for Tdrd1 (NM_031387.2,1832-1850).
cgatattaccacagttctt

SEQ ID NO: 486663 - DNA, 19 bp, Mus musculus
  siRNA target sequence for Tdrd1 (NM_031387.2,1833-1851).
gatattaccacagttctta

SEQ ID NO: 486664 - DNA, 19 bp, Mus musculus
  siRNA target sequence for Tdrd1 (NM_031387.2,1845-1863).
gttcttactacttccattt

SEQ ID NO: 486665 - DNA, 19 bp, Mus musculus
  siRNA target sequence for Tdrd1 (NM_031387.2,1872-1890).
gcagtgctggctagtagat

SEQ ID NO: 486666 - DNA, 19 bp, Mus musculus
  siRNA target sequence for Tdrd1 (NM_031387.2,1873-1891).
cagtgctggctagtagata

SEQ ID NO: 486667 - DNA, 19 bp, Mus musculus
  siRNA target sequence for Tdrd1 (NM_031387.2,1875-1893).
gtgctggctagtagatata

SEQ ID NO: 486668 - DNA, 19 bp, Mus musculus
  siRNA target sequence for Tdrd1 (NM_031387.2,1877-1895).
gctggctagtagatataca

SEQ ID NO: 486669 - DNA, 19 bp, Mus musculus
  siRNA target sequence for Tdrd1 (NM_031387.2,1969-1987).
gccagagttgtggaaatca

SEQ ID NO: 486670 - DNA, 19 bp, Mus musculus
  siRNA target sequence for Tdrd1 (NM_031387.2,2005-2023).
gtggagctcaccgatcttt

SEQ ID NO: 486671 - DNA, 19 bp, Mus musculus
  siRNA target sequence for Tdrd1 (NM_031387.2,2034-2052).
ccccaaaatcattagtgat

SEQ ID NO: 486672 - DNA, 19 bp, Mus musculus
  siRNA target sequence for Tdrd1 (NM_031387.2,2065-2083).
gagcagttggtcttaaggt

SEQ ID NO: 486673 - DNA, 19 bp, Mus musculus
  siRNA target sequence for Tdrd1 (NM_031387.2,2111-2129).
gcagacctgctaatcaaca

SEQ ID NO: 486674 - DNA, 19 bp, Mus musculus
  siRNA target sequence for Tdrd1 (NM_031387.2,2117-2135).
ctgctaatcaacataagca

SEQ ID NO: 486675 - DNA, 19 bp, Mus musculus
  siRNA target sequence for Tdrd1 (NM_031387.2,2154-2172).
gcaagccagcccttcaaca

SEQ ID NO: 486676 - DNA, 19 bp, Mus musculus
  siRNA target sequence for Tdrd1 (NM_031387.2,2171-2189).
cagagcagtggaagacaat

SEQ ID NO: 486677 - DNA, 19 bp, Mus musculus
  siRNA target sequence for Tdrd1 (NM_031387.2,2191-2209).
gaattgccagttaacaaga

SEQ ID NO: 486678 - DNA, 19 bp, Mus musculus
  siRNA target sequence for Tdrd1 (NM_031387.2,2196-2214).
gccagttaacaagactata

SEQ ID NO: 486679 - DNA, 19 bp, Mus musculus
  siRNA target sequence for Tdrd1 (NM_031387.2,2210-2228).
ctatagcagcaaatgtact

SEQ ID NO: 486680 - DNA, 19 bp, Mus musculus
  siRNA target sequence for Tdrd1 (NM_031387.2,2263-2281).
cccagtgaaatgtcagaaa

SEQ ID NO: 486681 - DNA, 19 bp, Mus musculus
  siRNA target sequence for Tdrd1 (NM_031387.2,2264-2282).
ccagtgaaatgtcagaaaa

SEQ ID NO: 486682 - DNA, 19 bp, Mus musculus
  siRNA target sequence for Tdrd1 (NM_031387.2,2297-2315).
gtgtgttagcagctgaatt

SEQ ID NO: 486683 - DNA, 19 bp, Mus musculus
  siRNA target sequence for Tdrd1 (NM_031387.2,2299-2317).
gtgttagcagctgaattgt

SEQ ID NO: 486684 - DNA, 19 bp, Mus musculus
  siRNA target sequence for Tdrd1 (NM_031387.2,2301-2319).
gttagcagctgaattgtta

SEQ ID NO: 486685 - DNA, 19 bp, Mus musculus
  siRNA target sequence for Tdrd1 (NM_031387.2,2306-2324).
cagctgaattgttagaaca

SEQ ID NO: 486686 - DNA, 19 bp, Mus musculus
  siRNA target sequence for Tdrd1 (NM_031387.2,2432-2450).
cgtcggaatctgatgtgaa

SEQ ID NO: 486687 - DNA, 19 bp, Mus musculus
  siRNA target sequence for Tdrd1 (NM_031387.2,2435-2453).
cggaatctgatgtgaaagt

SEQ ID NO: 486688 - DNA, 19 bp, Mus musculus
  siRNA target sequence for Tdrd1 (NM_031387.2,2436-2454).
ggaatctgatgtgaaagtt

SEQ ID NO: 486689 - DNA, 19 bp, Mus musculus
  siRNA target sequence for Tdrd1 (NM_031387.2,2455-2473).
ctctacgcagattatggaa

SEQ ID NO: 486690 - DNA, 19 bp, Mus musculus
  siRNA target sequence for Tdrd1 (NM_031387.2,2533-2551).
cccttccagatcattagat

SEQ ID NO: 486691 - DNA, 19 bp, Mus musculus
  siRNA target sequence for Tdrd1 (NM_031387.2,2566-2584).
ccgatggagctgaatggaa

SEQ ID NO: 486692 - DNA, 19 bp, Mus musculus
  siRNA target sequence for Tdrd1 (NM_031387.2,2582-2600).
gaagctgttcgcagttagt

SEQ ID NO: 486693 - DNA, 19 bp, Mus musculus
  siRNA target sequence for Tdrd1 (NM_031387.2,2652-2670).
gaaagccatttcaaagaat

SEQ ID NO: 486694 - DNA, 19 bp, Mus musculus
  siRNA target sequence for Tdrd1 (NM_031387.2,2673-2691).
ccacgcagtgtcagttgaa

SEQ ID NO: 486695 - DNA, 19 bp, Mus musculus
  siRNA target sequence for Tdrd1 (NM_031387.2,2676-2694).
cgcagtgtcagttgaaaaa

SEQ ID NO: 486696 - DNA, 19 bp, Mus musculus
  siRNA target sequence for Tdrd1 (NM_031387.2,2682-2700).
gtcagttgaaaaatgttct

SEQ ID NO: 486697 - DNA, 19 bp, Mus musculus
  siRNA target sequence for Tdrd1 (NM_031387.2,2696-2714).
gttctgagaacggaatgat

SEQ ID NO: 486698 - DNA, 19 bp, Mus musculus
  siRNA target sequence for Tdrd1 (NM_031387.2,2701-2719).
gagaacggaatgatcaata

SEQ ID NO: 486699 - DNA, 19 bp, Mus musculus
  siRNA target sequence for Tdrd1 (NM_031387.2,2703-2721).
gaacggaatgatcaatata

SEQ ID NO: 486700 - DNA, 19 bp, Mus musculus
  siRNA target sequence for Tdrd1 (NM_031387.2,2706-2724).
cggaatgatcaatatagct

SEQ ID NO: 486701 - DNA, 19 bp, Mus musculus
  siRNA target sequence for Tdrd1 (NM_031387.2,2752-2770).
gaaaacctcacttctaaaa

SEQ ID NO: 486702 - DNA, 19 bp, Mus musculus
  siRNA target sequence for Tdrd1 (NM_031387.2,2772-2790).
gaaaagtgcttccactaaa

SEQ ID NO: 486703 - DNA, 19 bp, Mus musculus
  siRNA target sequence for Tdrd1 (NM_031387.2,2811-2829).
ctgctgttgcacagagtta

SEQ ID NO: 486704 - DNA, 19 bp, Mus musculus
  siRNA target sequence for Tdrd1 (NM_031387.2,2813-2831).
gctgttgcacagagttaca

SEQ ID NO: 486705 - DNA, 19 bp, Mus musculus
  siRNA target sequence for Tdrd3 (NM_172605.2,423-441).
gacggatgggcatacaagt

SEQ ID NO: 486706 - DNA, 19 bp, Mus musculus
  siRNA target sequence for Tdrd3 (NM_172605.2,427-445).
gatgggcatacaagttgta

SEQ ID NO: 486707 - DNA, 19 bp, Mus musculus
  siRNA target sequence for Tdrd3 (NM_172605.2,446-464).
cggcagtagaattcagtta

SEQ ID NO: 486708 - DNA, 19 bp, Mus musculus
  siRNA target sequence for Tdrd3 (NM_172605.2,537-555).
cggattcctgctcttaagt

SEQ ID NO: 486709 - DNA, 19 bp, Mus musculus
  siRNA target sequence for Tdrd3 (NM_172605.2,558-576).
ctctaacaccacagttctt

SEQ ID NO: 486710 - DNA, 19 bp, Mus musculus
  siRNA target sequence for Tdrd3 (NM_172605.2,586-604).
gtggaacacctaattgaca

SEQ ID NO: 486711 - DNA, 19 bp, Mus musculus
  siRNA target sequence for Tdrd3 (NM_172605.2,620-638).
gaagcttattaaagcataa

SEQ ID NO: 486712 - DNA, 19 bp, Mus musculus
  siRNA target sequence for Tdrd3 (NM_172605.2,624-642).
cttattaaagcataacaga

SEQ ID NO: 486713 - DNA, 19 bp, Mus musculus
  siRNA target sequence for Tdrd3 (NM_172605.2,727-745).
gagcttgatcgaagaaaga

SEQ ID NO: 486714 - DNA, 19 bp, Mus musculus
  siRNA target sequence for Tdrd3 (NM_172605.2,766-784).
gccaagcctgcaaatgata

SEQ ID NO: 486715 - DNA, 19 bp, Mus musculus
  siRNA target sequence for Tdrd3 (NM_172605.2,767-785).
ccaagcctgcaaatgataa

SEQ ID NO: 486716 - DNA, 19 bp, Mus musculus
  siRNA target sequence for Tdrd3 (NM_172605.2,768-786).
caagcctgcaaatgataat

SEQ ID NO: 486717 - DNA, 19 bp, Mus musculus
  siRNA target sequence for Tdrd3 (NM_172605.2,869-887).
gtggtgccagaagtaatct

SEQ ID NO: 486718 - DNA, 19 bp, Mus musculus
  siRNA target sequence for Tdrd3 (NM_172605.2,872-890).
gtgccagaagtaatctcaa

SEQ ID NO: 486719 - DNA, 19 bp, Mus musculus
  siRNA target sequence for Tdrd3 (NM_172605.2,874-892).
gccagaagtaatctcaata

SEQ ID NO: 486720 - DNA, 19 bp, Mus musculus
  siRNA target sequence for Tdrd3 (NM_172605.2,898-916).
gctgctggtcaccgaaata

SEQ ID NO: 486721 - DNA, 19 bp, Mus musculus
  siRNA target sequence for Tdrd3 (NM_172605.2,909-927).
ccgaaatagggaggtttta

SEQ ID NO: 486722 - DNA, 19 bp, Mus musculus
  siRNA target sequence for Tdrd3 (NM_172605.2,911-929).
gaaatagggaggttttaca

SEQ ID NO: 486723 - DNA, 19 bp, Mus musculus
  siRNA target sequence for Tdrd3 (NM_172605.2,960-978).
gaacgaaggtgtctataga

SEQ ID NO: 486724 - DNA, 19 bp, Mus musculus
  siRNA target sequence for Tdrd3 (NM_172605.2,968-986).
gtgtctatagagaattggt

SEQ ID NO: 486725 - DNA, 19 bp, Mus musculus
  siRNA target sequence for Tdrd3 (NM_172605.2,1013-1031).
cagaaatgggcttcagtaa

SEQ ID NO: 486726 - DNA, 19 bp, Mus musculus
  siRNA target sequence for Tdrd3 (NM_172605.2,1043-1061).
ggcaagcgctgatggataa

SEQ ID NO: 486727 - DNA, 19 bp, Mus musculus
  siRNA target sequence for Tdrd3 (NM_172605.2,1044-1062).
gcaagcgctgatggataat

SEQ ID NO: 486728 - DNA, 19 bp, Mus musculus
  siRNA target sequence for Tdrd3 (NM_172605.2,1211-1229).
caccaagcacgttatttga

SEQ ID NO: 486729 - DNA, 19 bp, Mus musculus
  siRNA target sequence for Tdrd3 (NM_172605.2,1213-1231).
ccaagcacgttatttgatt

SEQ ID NO: 486730 - DNA, 19 bp, Mus musculus
  siRNA target sequence for Tdrd3 (NM_172605.2,1403-1421).
cacctcgctttcaaaaaga

SEQ ID NO: 486731 - DNA, 19 bp, Mus musculus
  siRNA target sequence for Tdrd3 (NM_172605.2,1405-1423).
cctcgctttcaaaaagaca

SEQ ID NO: 486732 - DNA, 19 bp, Mus musculus
  siRNA target sequence for Tdrd3 (NM_172605.2,1444-1462).
gtagaaaacagcgtattat

SEQ ID NO: 486733 - DNA, 19 bp, Mus musculus
  siRNA target sequence for Tdrd3 (NM_172605.2,1452-1470).
cagcgtattatctagaaat

SEQ ID NO: 486734 - DNA, 19 bp, Mus musculus
  siRNA target sequence for Tdrd3 (NM_172605.2,1539-1557).
caggccatattctaggtat

SEQ ID NO: 486735 - DNA, 19 bp, Mus musculus
  siRNA target sequence for Tdrd3 (NM_172605.2,1543-1561).
ccatattctaggtatgaca

SEQ ID NO: 486736 - DNA, 19 bp, Mus musculus
  siRNA target sequence for Tdrd3 (NM_172605.2,1550-1568).
ctaggtatgacagaactaa

SEQ ID NO: 486737 - DNA, 19 bp, Mus musculus
  siRNA target sequence for Tdrd3 (NM_172605.2,1596-1614).
gcacaacgatggtgctttt

SEQ ID NO: 486738 - DNA, 19 bp, Mus musculus
  siRNA target sequence for Tdrd3 (NM_172605.2,1597-1615).
cacaacgatggtgctttta

SEQ ID NO: 486739 - DNA, 19 bp, Mus musculus
  siRNA target sequence for Tdrd3 (NM_172605.2,1620-1638).
gagagagaactctatgcaa

SEQ ID NO: 486740 - DNA, 19 bp, Mus musculus
  siRNA target sequence for Tdrd3 (NM_172605.2,1622-1640).
gagagaactctatgcaaaa

SEQ ID NO: 486741 - DNA, 19 bp, Mus musculus
  siRNA target sequence for Tdrd3 (NM_172605.2,1690-1708).
cctccagaattcgtagatt

SEQ ID NO: 486742 - DNA, 19 bp, Mus musculus
  siRNA target sequence for Tdrd3 (NM_172605.2,1691-1709).
ctccagaattcgtagatta

SEQ ID NO: 486743 - DNA, 19 bp, Mus musculus
  siRNA target sequence for Tdrd3 (NM_172605.2,1693-1711).
ccagaattcgtagattaca

SEQ ID NO: 486744 - DNA, 19 bp, Mus musculus
  siRNA target sequence for Tdrd3 (NM_172605.2,1694-1712).
cagaattcgtagattacaa

SEQ ID NO: 486745 - DNA, 19 bp, Mus musculus
  siRNA target sequence for Tdrd3 (NM_172605.2,1701-1719).
cgtagattacaataatcaa

SEQ ID NO: 486746 - DNA, 19 bp, Mus musculus
  siRNA target sequence for Tdrd3 (NM_172605.2,1721-1739).
gacgtgggagaagagaaaa

SEQ ID NO: 486747 - DNA, 19 bp, Mus musculus
  siRNA target sequence for Tdrd3 (NM_172605.2,1773-1791).
gaaaccacggacaatgaat

SEQ ID NO: 486748 - DNA, 19 bp, Mus musculus
  siRNA target sequence for Tdrd3 (NM_172605.2,1778-1796).
cacggacaatgaatagtga

SEQ ID NO: 486749 - DNA, 19 bp, Mus musculus
  siRNA target sequence for Tdrd3 (NM_172605.2,1805-1823).
gtggtctaaaaattgagaa

SEQ ID NO: 486750 - DNA, 19 bp, Mus musculus
  siRNA target sequence for Tdrd3 (NM_172605.2,1893-1911).
gacagctccgcctctgaaa

SEQ ID NO: 486751 - DNA, 19 bp, Mus musculus
  siRNA target sequence for Tdrd3 (NM_172605.2,1916-1934).
ggcgcgtaggaccgattaa

SEQ ID NO: 486752 - DNA, 19 bp, Mus musculus
  siRNA target sequence for Tdrd3 (NM_172605.2,1918-1936).
cgcgtaggaccgattaagt

SEQ ID NO: 486753 - DNA, 19 bp, Mus musculus
  siRNA target sequence for Tdrd3 (NM_172605.2,1920-1938).
cgtaggaccgattaagtca

SEQ ID NO: 486754 - DNA, 19 bp, Mus musculus
  siRNA target sequence for Tdrd3 (NM_172605.2,1955-1973).
ctgtgccctacgatgataa

SEQ ID NO: 486755 - DNA, 19 bp, Mus musculus
  siRNA target sequence for Tdrd3 (NM_172605.2,1957-1975).
gtgccctacgatgataaaa

SEQ ID NO: 486756 - DNA, 19 bp, Mus musculus
  siRNA target sequence for Tdrd3 (NM_172605.2,1959-1977).
gccctacgatgataaaata

SEQ ID NO: 486757 - DNA, 19 bp, Mus musculus
  siRNA target sequence for Tdrd3 (NM_172605.2,1960-1978).
ccctacgatgataaaatat

SEQ ID NO: 486758 - DNA, 19 bp, Mus musculus
  siRNA target sequence for Tdrd3 (NM_172605.2,1961-1979).
cctacgatgataaaatatt

SEQ ID NO: 486759 - DNA, 19 bp, Mus musculus
  siRNA target sequence for Tdrd3 (NM_172605.2,1962-1980).
ctacgatgataaaatattt

SEQ ID NO: 486760 - DNA, 19 bp, Mus musculus
  siRNA target sequence for Tdrd3 (NM_172605.2,2009-2027).
ggccaattaagcctgaaaa

SEQ ID NO: 486761 - DNA, 19 bp, Mus musculus
  siRNA target sequence for Tdrd3 (NM_172605.2,2012-2030).
caattaagcctgaaaaggt

SEQ ID NO: 486762 - DNA, 19 bp, Mus musculus
  siRNA target sequence for Tdrd3 (NM_172605.2,2020-2038).
cctgaaaaggtgatagaat

SEQ ID NO: 486763 - DNA, 19 bp, Mus musculus
  siRNA target sequence for Tdrd3 (NM_172605.2,2028-2046).
ggtgatagaatcatctatt

SEQ ID NO: 486764 - DNA, 19 bp, Mus musculus
  siRNA target sequence for Tdrd3 (NM_172605.2,2115-2133).
gttttaccgagcagaagtt

SEQ ID NO: 486765 - DNA, 19 bp, Mus musculus
  siRNA target sequence for Tdrd3 (NM_172605.2,2142-2160).
gcattcttcgggtatgaca

SEQ ID NO: 486766 - DNA, 19 bp, Mus musculus
  siRNA target sequence for Tdrd3 (NM_172605.2,2153-2171).
gtatgacagcggtcgttaa

SEQ ID NO: 486767 - DNA, 19 bp, Mus musculus
  siRNA target sequence for Tdrd3 (NM_172605.2,2175-2193).
cacggactacggcaactat

SEQ ID NO: 486768 - DNA, 19 bp, Mus musculus
  siRNA target sequence for Tdrd3 (NM_172605.2,2177-2195).
cggactacggcaactatga

SEQ ID NO: 486769 - DNA, 19 bp, Mus musculus
  siRNA target sequence for Tdrd3 (NM_172605.2,2178-2196).
ggactacggcaactatgaa

SEQ ID NO: 486770 - DNA, 19 bp, Mus musculus
  siRNA target sequence for Tdrd3 (NM_172605.2,2314-2332).
cggccaacgcagcagtttt

SEQ ID NO: 486771 - DNA, 19 bp, Mus musculus
  siRNA target sequence for Tdrd3 (NM_172605.2,2315-2333).
ggccaacgcagcagtttta

SEQ ID NO: 486772 - DNA, 19 bp, Mus musculus
  siRNA target sequence for Tfip11 (NM_018783.3,357-375).
cgatgagagggagaacttt

SEQ ID NO: 486773 - DNA, 19 bp, Mus musculus
  siRNA target sequence for Tfip11 (NM_018783.3,527-545).
ctgcacctgtcaacttcat

SEQ ID NO: 486774 - DNA, 19 bp, Mus musculus
  siRNA target sequence for Tfip11 (NM_018783.3,529-547).
gcacctgtcaacttcatca

SEQ ID NO: 486775 - DNA, 19 bp, Mus musculus
  siRNA target sequence for Tfip11 (NM_018783.3,627-645).
ggacttcccgaaggattta

SEQ ID NO: 486776 - DNA, 19 bp, Mus musculus
  siRNA target sequence for Tfip11 (NM_018783.3,630-648).
cttcccgaaggatttagga

SEQ ID NO: 486777 - DNA, 19 bp, Mus musculus
  siRNA target sequence for Tfip11 (NM_018783.3,1009-1027).
ccaaagtactcttacaaga

SEQ ID NO: 486778 - DNA, 19 bp, Mus musculus
  siRNA target sequence for Tfip11 (NM_018783.3,1124-1142).
gggagcagaaggtgtacta

SEQ ID NO: 486779 - DNA, 19 bp, Mus musculus
  siRNA target sequence for Tfip11 (NM_018783.3,1399-1417).
gaggagcgtgtcatctcta

SEQ ID NO: 486780 - DNA, 19 bp, Mus musculus
  siRNA target sequence for Tfip11 (NM_018783.3,1518-1536).
gacactacaggacaagtat

SEQ ID NO: 486781 - DNA, 19 bp, Mus musculus
  siRNA target sequence for Tfip11 (NM_018783.3,1520-1538).
cactacaggacaagtatta

SEQ ID NO: 486782 - DNA, 19 bp, Mus musculus
  siRNA target sequence for Tfip11 (NM_018783.3,1592-1610).
cgctcgtgaaggactactt

SEQ ID NO: 486783 - DNA, 19 bp, Mus musculus
  siRNA target sequence for Tfip11 (NM_018783.3,1593-1611).
gctcgtgaaggactacttt

SEQ ID NO: 486784 - DNA, 19 bp, Mus musculus
  siRNA target sequence for Tfip11 (NM_018783.3,1599-1617).
gaaggactactttaaggat

SEQ ID NO: 486785 - DNA, 19 bp, Mus musculus
  siRNA target sequence for Tfip11 (NM_018783.3,1752-1770).
ggtctggatgcctttcgtt

SEQ ID NO: 486786 - DNA, 19 bp, Mus musculus
  siRNA target sequence for Tfip11 (NM_018783.3,1805-1823).
gtgagccgatggtggattt

SEQ ID NO: 486787 - DNA, 19 bp, Mus musculus
  siRNA target sequence for Tfip11 (NM_018783.3,2008-2026).
cctgtgcgcagcaagttgt

SEQ ID NO: 486788 - DNA, 19 bp, Mus musculus
  siRNA target sequence for Tfip11 (NM_018783.3,2194-2212).
cacatggacgccttctact

SEQ ID NO: 486789 - DNA, 19 bp, Mus musculus
  siRNA target sequence for Tfip11 (NM_018783.3,2221-2239).
gactgggaggggatgatct

SEQ ID NO: 486790 - DNA, 19 bp, Mus musculus
  siRNA target sequence for Tfip11 (NM_018783.3,2304-2322).
ctcctggctcagtaacagt

SEQ ID NO: 486791 - DNA, 19 bp, Mus musculus
  siRNA target sequence for Tfip11 (NM_018783.3,2315-2333).
gtaacagtcccaattacga

SEQ ID NO: 486792 - DNA, 19 bp, Mus musculus
  siRNA target sequence for Tfip11 (NM_018783.3,2356-2374).
ggctggaagtctatgttct

SEQ ID NO: 486793 - DNA, 19 bp, Mus musculus
  siRNA target sequence for Tfip11 (NM_018783.3,2396-2414).
cttctgtcaaggacaagtt

SEQ ID NO: 486794 - DNA, 19 bp, Mus musculus
  siRNA target sequence for Tfip11 (NM_018783.3,2419-2437).
gaagcgctcgacataatga

SEQ ID NO: 486795 - DNA, 19 bp, Mus musculus
  siRNA target sequence for Tfip11 (NM_018783.3,2422-2440).
gcgctcgacataatgaaca

SEQ ID NO: 486796 - DNA, 19 bp, Mus musculus
  siRNA target sequence for Tfip11 (NM_018783.3,2477-2495).
cgggtgcgagagagaacat

SEQ ID NO: 486797 - DNA, 19 bp, Mus musculus
  siRNA target sequence for Tfip11 (NM_018783.3,2478-2496).
gggtgcgagagagaacatt

SEQ ID NO: 486798 - DNA, 19 bp, Mus musculus
  siRNA target sequence for Tfip11 (NM_018783.3,2603-2621).
gctccgtgcccatgaactt

SEQ ID NO: 486799 - DNA, 19 bp, Mus musculus
  siRNA target sequence for Tfip11 (NM_018783.3,2606-2624).
ccgtgcccatgaactttaa

SEQ ID NO: 486800 - DNA, 19 bp, Mus musculus
  siRNA target sequence for Tiparp (NM_178892.3,392-410).
gatccttgaggccaatatt

SEQ ID NO: 486801 - DNA, 19 bp, Mus musculus
  siRNA target sequence for Tiparp (NM_178892.3,395-413).
ccttgaggccaatattaaa

SEQ ID NO: 486802 - DNA, 19 bp, Mus musculus
  siRNA target sequence for Tiparp (NM_178892.3,482-500).
gcttacatgaacatatagt

SEQ ID NO: 486803 - DNA, 19 bp, Mus musculus
  siRNA target sequence for Tiparp (NM_178892.3,527-545).
cgtgtccaccagcagaaaa

SEQ ID NO: 486804 - DNA, 19 bp, Mus musculus
  siRNA target sequence for Tiparp (NM_178892.3,532-550).
ccaccagcagaaaacagta

SEQ ID NO: 486805 - DNA, 19 bp, Mus musculus
  siRNA target sequence for Tiparp (NM_178892.3,623-641).
cagaacagggggttccaat

SEQ ID NO: 486806 - DNA, 19 bp, Mus musculus
  siRNA target sequence for Tiparp (NM_178892.3,708-726).
ccaaactgaccttttgcat

SEQ ID NO: 486807 - DNA, 19 bp, Mus musculus
  siRNA target sequence for Tiparp (NM_178892.3,761-779).
gcgtagataaagttatgga

SEQ ID NO: 486808 - DNA, 19 bp, Mus musculus
  siRNA target sequence for Tiparp (NM_178892.3,793-811).
gctttccaagacaatagtt

SEQ ID NO: 486809 - DNA, 19 bp, Mus musculus
  siRNA target sequence for Tiparp (NM_178892.3,794-812).
ctttccaagacaatagttt

SEQ ID NO: 486810 - DNA, 19 bp, Mus musculus
  siRNA target sequence for Tiparp (NM_178892.3,809-827).
gttttacaatccagtacat

SEQ ID NO: 486811 - DNA, 19 bp, Mus musculus
  siRNA target sequence for Tiparp (NM_178892.3,856-874).
gagctcttccaagacaaaa

SEQ ID NO: 486812 - DNA, 19 bp, Mus musculus
  siRNA target sequence for Tiparp (NM_178892.3,858-876).
gctcttccaagacaaaagt

SEQ ID NO: 486813 - DNA, 19 bp, Mus musculus
  siRNA target sequence for Tiparp (NM_178892.3,927-945).
ccatactcaccaagagaat

SEQ ID NO: 486814 - DNA, 19 bp, Mus musculus
  siRNA target sequence for Tiparp (NM_178892.3,970-988).
ctgcaaggcacttgcattt

SEQ ID NO: 486815 - DNA, 19 bp, Mus musculus
  siRNA target sequence for Tiparp (NM_178892.3,972-990).
gcaaggcacttgcatttat

SEQ ID NO: 486816 - DNA, 19 bp, Mus musculus
  siRNA target sequence for Tiparp (NM_178892.3,992-1010).
gcagggattgtttgaaaca

SEQ ID NO: 486817 - DNA, 19 bp, Mus musculus
  siRNA target sequence for Tiparp (NM_178892.3,1014-1032).
caccgtattgccctatcat

SEQ ID NO: 486818 - DNA, 19 bp, Mus musculus
  siRNA target sequence for Tiparp (NM_178892.3,1025-1043).
cctatcattggcagatcaa

SEQ ID NO: 486819 - DNA, 19 bp, Mus musculus
  siRNA target sequence for Tiparp (NM_178892.3,1026-1044).
ctatcattggcagatcaaa

SEQ ID NO: 486820 - DNA, 19 bp, Mus musculus
  siRNA target sequence for Tiparp (NM_178892.3,1066-1084).
cagagtgtttccaatgatt

SEQ ID NO: 486821 - DNA, 19 bp, Mus musculus
  siRNA target sequence for Tiparp (NM_178892.3,1089-1107).
ggagcacttggaaagattt

SEQ ID NO: 486822 - DNA, 19 bp, Mus musculus
  siRNA target sequence for Tiparp (NM_178892.3,1231-1249).
ccaccctgtagtaattcaa

SEQ ID NO: 486823 - DNA, 19 bp, Mus musculus
  siRNA target sequence for Tiparp (NM_178892.3,1308-1326).
gtatcctgagtctgttgtt

SEQ ID NO: 486824 - DNA, 19 bp, Mus musculus
  siRNA target sequence for Tiparp (NM_178892.3,1317-1335).
gtctgttgttcgactaatt

SEQ ID NO: 486825 - DNA, 19 bp, Mus musculus
  siRNA target sequence for Tiparp (NM_178892.3,1319-1337).
ctgttgttcgactaattga

SEQ ID NO: 486826 - DNA, 19 bp, Mus musculus
  siRNA target sequence for Tiparp (NM_178892.3,1344-1362).
caactctcggggtctgaaa

SEQ ID NO: 486827 - DNA, 19 bp, Mus musculus
  siRNA target sequence for Tiparp (NM_178892.3,1349-1367).
ctcggggtctgaaagaagt

SEQ ID NO: 486828 - DNA, 19 bp, Mus musculus
  siRNA target sequence for Tiparp (NM_178892.3,1351-1369).
cggggtctgaaagaagtta

SEQ ID NO: 486829 - DNA, 19 bp, Mus musculus
  siRNA target sequence for Tiparp (NM_178892.3,1354-1372).
ggtctgaaagaagttagat

SEQ ID NO: 486830 - DNA, 19 bp, Mus musculus
  siRNA target sequence for Tiparp (NM_178892.3,1377-1395).
gatgtggaacaaccattat

SEQ ID NO: 486831 - DNA, 19 bp, Mus musculus
  siRNA target sequence for Tiparp (NM_178892.3,1409-1427).
cattcttccggagagaaat

SEQ ID NO: 486832 - DNA, 19 bp, Mus musculus
  siRNA target sequence for Tiparp (NM_178892.3,1454-1472).
gtttcatactgattccata

SEQ ID NO: 486833 - DNA, 19 bp, Mus musculus
  siRNA target sequence for Tiparp (NM_178892.3,1462-1480).
ctgattccatatttacaga

SEQ ID NO: 486834 - DNA, 19 bp, Mus musculus
  siRNA target sequence for Tiparp (NM_178892.3,1522-1540).
gcaacttcatcacaaatca

SEQ ID NO: 486835 - DNA, 19 bp, Mus musculus
  siRNA target sequence for Tiparp (NM_178892.3,1545-1563).
cccagatggagtaacttca

SEQ ID NO: 486836 - DNA, 19 bp, Mus musculus
  siRNA target sequence for Tiparp (NM_178892.3,1555-1573).
gtaacttcagccaactttt

SEQ ID NO: 486837 - DNA, 19 bp, Mus musculus
  siRNA target sequence for Tiparp (NM_178892.3,1646-1664).
gttatcgaatcatttacaa

SEQ ID NO: 486838 - DNA, 19 bp, Mus musculus
  siRNA target sequence for Tiparp (NM_178892.3,1651-1669).
cgaatcatttacaaccttt

SEQ ID NO: 486839 - DNA, 19 bp, Mus musculus
  siRNA target sequence for Tiparp (NM_178892.3,1782-1800).
gtctggccgtgacagaata

SEQ ID NO: 486840 - DNA, 19 bp, Mus musculus
  siRNA target sequence for Tiparp (NM_178892.3,1784-1802).
ctggccgtgacagaataat

SEQ ID NO: 486841 - DNA, 19 bp, Mus musculus
  siRNA target sequence for Tiparp (NM_178892.3,1786-1804).
ggccgtgacagaataataa

SEQ ID NO: 486842 - DNA, 19 bp, Mus musculus
  siRNA target sequence for Tiparp (NM_178892.3,1787-1805).
gccgtgacagaataataaa

SEQ ID NO: 486843 - DNA, 19 bp, Mus musculus
  siRNA target sequence for Tiparp (NM_178892.3,1826-1844).
gaacatcccaagatgtagt

SEQ ID NO: 486844 - DNA, 19 bp, Mus musculus
  siRNA target sequence for Tiparp (NM_178892.3,1840-1858).
gtagtagatggaatttgca

SEQ ID NO: 486845 - DNA, 19 bp, Mus musculus
  siRNA target sequence for Tiparp (NM_178892.3,1883-1901).
gtggaaagcatgctacaat

SEQ ID NO: 486846 - DNA, 19 bp, Mus musculus
  siRNA target sequence for Tiparp (NM_178892.3,1902-1920).
gtttggacaaggcagttat

SEQ ID NO: 486847 - DNA, 19 bp, Mus musculus
  siRNA target sequence for Tiparp (NM_178892.3,1933-1951).
gcaagctactctcataact

SEQ ID NO: 486848 - DNA, 19 bp, Mus musculus
  siRNA target sequence for Tiparp (NM_178892.3,1938-1956).
ctactctcataacttttct

SEQ ID NO: 486849 - DNA, 19 bp, Mus musculus
  siRNA target sequence for Tiparp (NM_178892.3,1943-1961).
ctcataacttttctaagaa

SEQ ID NO: 486850 - DNA, 19 bp, Mus musculus
  siRNA target sequence for Tiparp (NM_178892.3,1999-2017).
gtgttaactggcagataca

SEQ ID NO: 486851 - DNA, 19 bp, Mus musculus
  siRNA target sequence for Tiparp (NM_178892.3,2066-2084).
gtgtcaccagtgacttata

SEQ ID NO: 486852 - DNA, 19 bp, Mus musculus
  siRNA target sequence for Tiparp (NM_178892.3,2086-2104).
gactcttgtgtggataatt

SEQ ID NO: 486853 - DNA, 19 bp, Mus musculus
  siRNA target sequence for Tiparp (NM_178892.3,2140-2158).
gaccagagttacccttatt

SEQ ID NO: 486854 - DNA, 19 bp, Mus musculus
  siRNA target sequence for Tiparp (NM_178892.3,2142-2160).
ccagagttacccttatttt

SEQ ID NO: 486855 - DNA, 19 bp, Mus musculus
  siRNA target sequence for Tiparp (NM_178892.3,2151-2169).
cccttattttgttatccaa

SEQ ID NO: 486856 - DNA, 19 bp, Mus musculus
  siRNA target sequence for Tiparp (NM_178892.3,2152-2170).
ccttattttgttatccaat

SEQ ID NO: 486857 - DNA, 19 bp, Mus musculus
  siRNA target sequence for Tlr5 (NM_016928.1,1043-1061).
cagccccgtgttggtaata

SEQ ID NO: 486858 - DNA, 19 bp, Mus musculus
  siRNA target sequence for Tlr5 (NM_016928.1,1046-1064).
ccccgtgttggtaatatct

SEQ ID NO: 486859 - DNA, 19 bp, Mus musculus
  siRNA target sequence for Tlr5 (NM_016928.1,1155-1173).
ctgctcagcttcaactata

SEQ ID NO: 486860 - DNA, 19 bp, Mus musculus
  siRNA target sequence for Tlr5 (NM_016928.1,1184-1202).
ggttgccacatcatttcca

SEQ ID NO: 486861 - DNA, 19 bp, Mus musculus
  siRNA target sequence for Tlr5 (NM_016928.1,1230-1248).
ctggggacccagtatgcta

SEQ ID NO: 486862 - DNA, 19 bp, Mus musculus
  siRNA target sequence for Tlr5 (NM_016928.1,1234-1252).
ggacccagtatgctaactt

SEQ ID NO: 486863 - DNA, 19 bp, Mus musculus
  siRNA target sequence for Tlr5 (NM_016928.1,1316-1334).
ccagatcgaagtcttgaat

SEQ ID NO: 486864 - DNA, 19 bp, Mus musculus
  siRNA target sequence for Tlr5 (NM_016928.1,1415-1433).
cggttacttcagaaatcta

SEQ ID NO: 486865 - DNA, 19 bp, Mus musculus
  siRNA target sequence for Tlr5 (NM_016928.1,1421-1439).
cttcagaaatctatattca

SEQ ID NO: 486866 - DNA, 19 bp, Mus musculus
  siRNA target sequence for Tlr5 (NM_016928.1,1499-1517).
ccgggaactgaattcctta

SEQ ID NO: 486867 - DNA, 19 bp, Mus musculus
  siRNA target sequence for Tlr5 (NM_016928.1,1513-1531).
ccttaagcgacgtaaattt

SEQ ID NO: 486868 - DNA, 19 bp, Mus musculus
  siRNA target sequence for Tlr5 (NM_016928.1,1514-1532).
cttaagcgacgtaaatttt

SEQ ID NO: 486869 - DNA, 19 bp, Mus musculus
  siRNA target sequence for Tlr5 (NM_016928.1,1519-1537).
gcgacgtaaattttgcttt

SEQ ID NO: 486870 - DNA, 19 bp, Mus musculus
  siRNA target sequence for Tlr5 (NM_016928.1,1550-1568).
cactatatgtgaagatgaa

SEQ ID NO: 486871 - DNA, 19 bp, Mus musculus
  siRNA target sequence for Tlr5 (NM_016928.1,1576-1594).
ctctgcagggcaaaacact

SEQ ID NO: 486872 - DNA, 19 bp, Mus musculus
  siRNA target sequence for Tlr5 (NM_016928.1,1679-1697).
gaggctagaaactctagat

SEQ ID NO: 486873 - DNA, 19 bp, Mus musculus
  siRNA target sequence for Tlr5 (NM_016928.1,1681-1699).
ggctagaaactctagatct

SEQ ID NO: 486874 - DNA, 19 bp, Mus musculus
  siRNA target sequence for Tlr5 (NM_016928.1,1682-1700).
gctagaaactctagatctt

SEQ ID NO: 486875 - DNA, 19 bp, Mus musculus
  siRNA target sequence for Tlr5 (NM_016928.1,1683-1701).
ctagaaactctagatcttt

SEQ ID NO: 486876 - DNA, 19 bp, Mus musculus
  siRNA target sequence for Tlr5 (NM_016928.1,1848-1866).
gccagcctggccagaagtt

SEQ ID NO: 486877 - DNA, 19 bp, Mus musculus
  siRNA target sequence for Tlr5 (NM_016928.1,1884-1902).
ctttcgcacggctttatct

SEQ ID NO: 486878 - DNA, 19 bp, Mus musculus
  siRNA target sequence for Tlr5 (NM_016928.1,1907-1925).
cttgaatcctcgactgttt

SEQ ID NO: 486879 - DNA, 19 bp, Mus musculus
  siRNA target sequence for Tlr5 (NM_016928.1,1955-1973).
ccttgccttcaacaagata

SEQ ID NO: 486880 - DNA, 19 bp, Mus musculus
  siRNA target sequence for Tlr5 (NM_016928.1,1956-1974).
cttgccttcaacaagataa

SEQ ID NO: 486881 - DNA, 19 bp, Mus musculus
  siRNA target sequence for Tlr5 (NM_016928.1,2018-2036).
ggttctcaatctatcctat

SEQ ID NO: 486882 - DNA, 19 bp, Mus musculus
  siRNA target sequence for Tlr5 (NM_016928.1,2019-2037).
gttctcaatctatcctata

SEQ ID NO: 486883 - DNA, 19 bp, Mus musculus
  siRNA target sequence for Tlr5 (NM_016928.1,2046-2064).
ggggaactctataattcca

SEQ ID NO: 486884 - DNA, 19 bp, Mus musculus
  siRNA target sequence for Tlr5 (NM_016928.1,2047-2065).
gggaactctataattccaa

SEQ ID NO: 486885 - DNA, 19 bp, Mus musculus
  siRNA target sequence for Tlr5 (NM_016928.1,2088-2106).
gcctacgttgaccttcaaa

SEQ ID NO: 486886 - DNA, 19 bp, Mus musculus
  siRNA target sequence for Tlr5 (NM_016928.1,2141-2159).
cagattattaaaaacgtta

SEQ ID NO: 486887 - DNA, 19 bp, Mus musculus
  siRNA target sequence for Tlr5 (NM_016928.1,2155-2173).
cgttacaaaccttagatct

SEQ ID NO: 486888 - DNA, 19 bp, Mus musculus
  siRNA target sequence for Tlr5 (NM_016928.1,2165-2183).
cttagatctccgtgacaat

SEQ ID NO: 486889 - DNA, 19 bp, Mus musculus
  siRNA target sequence for Tlr5 (NM_016928.1,2187-2205).
cttaaggccattggtttta

SEQ ID NO: 486890 - DNA, 19 bp, Mus musculus
  siRNA target sequence for Tlr5 (NM_016928.1,2236-2254).
gcaataagctggtccattt

SEQ ID NO: 486891 - DNA, 19 bp, Mus musculus
  siRNA target sequence for Tlr5 (NM_016928.1,2255-2273).
gccacacatccactttact

SEQ ID NO: 486892 - DNA, 19 bp, Mus musculus
  siRNA target sequence for Tlr5 (NM_016928.1,2274-2292).
gccaacttcctagagttat

SEQ ID NO: 486893 - DNA, 19 bp, Mus musculus
  siRNA target sequence for Tlr5 (NM_016928.1,2408-2426).
ctcggagaacccaagctta

SEQ ID NO: 486894 - DNA, 19 bp, Mus musculus
  siRNA target sequence for Tlr5 (NM_016928.1,2506-2524).
cccgcctccagattcttta

SEQ ID NO: 486895 - DNA, 19 bp, Mus musculus
  siRNA target sequence for Tlr5 (NM_016928.1,2528-2546).
gagtaataactaccttaat

SEQ ID NO: 486896 - DNA, 19 bp, Mus musculus
  siRNA target sequence for Tlr5 (NM_016928.1,2549-2567).
ccttccacctgggatattt

SEQ ID NO: 486897 - DNA, 19 bp, Mus musculus
  siRNA target sequence for Tlr5 (NM_016928.1,2554-2572).
cacctgggatatttaacga

SEQ ID NO: 486898 - DNA, 19 bp, Mus musculus
  siRNA target sequence for Tlr5 (NM_016928.1,2577-2595).
gttgcattacggatgctta

SEQ ID NO: 486899 - DNA, 19 bp, Mus musculus
  siRNA target sequence for Tlr5 (NM_016928.1,2581-2599).
cattacggatgcttagtct

SEQ ID NO: 486900 - DNA, 19 bp, Mus musculus
  siRNA target sequence for Tlr5 (NM_016928.1,2621-2639).
gctctctccgggcagttta

SEQ ID NO: 486901 - DNA, 19 bp, Mus musculus
  siRNA target sequence for Tlr5 (NM_016928.1,2624-2642).
ctctccgggcagtttacct

SEQ ID NO: 486902 - DNA, 19 bp, Mus musculus
  siRNA target sequence for Tlr5 (NM_016928.1,2630-2648).
gggcagtttacctgctaat

SEQ ID NO: 486903 - DNA, 19 bp, Mus musculus
  siRNA target sequence for Tlr5 (NM_016928.1,2631-2649).
ggcagtttacctgctaatt

SEQ ID NO: 486904 - DNA, 19 bp, Mus musculus
  siRNA target sequence for Tlr5 (NM_016928.1,2632-2650).
gcagtttacctgctaattt

SEQ ID NO: 486905 - DNA, 19 bp, Mus musculus
  siRNA target sequence for Tlr5 (NM_016928.1,2718-2736).
gttttggacataactcata

SEQ ID NO: 486906 - DNA, 19 bp, Mus musculus
  siRNA target sequence for Tlr5 (NM_016928.1,2744-2762).
cgtctgcaactgtgaactt

SEQ ID NO: 486907 - DNA, 19 bp, Mus musculus
  siRNA target sequence for Tlr5 (NM_016928.1,2755-2773).
gtgaacttagcacttttat

SEQ ID NO: 486908 - DNA, 19 bp, Mus musculus
  siRNA target sequence for Tlr5 (NM_016928.1,2814-2832).
cctgcagacgtgtattgca

SEQ ID NO: 486909 - DNA, 19 bp, Mus musculus
  siRNA target sequence for Tlr5 (NM_016928.1,2854-2872).
ggggctccctctacaacat

SEQ ID NO: 486910 - DNA, 19 bp, Mus musculus
  siRNA target sequence for Tlr5 (NM_016928.1,2936-2954).
gtgcacggtcactttgact

SEQ ID NO: 486911 - DNA, 19 bp, Mus musculus
  siRNA target sequence for Tlr5 (NM_016928.1,2941-2959).
cggtcactttgactctatt

SEQ ID NO: 486912 - DNA, 19 bp, Mus musculus
  siRNA target sequence for Tlr5 (NM_016928.1,2966-2984).
catcacccttgtagtcata

SEQ ID NO: 486913 - DNA, 19 bp, Mus musculus
  siRNA target sequence for Tlr5 (NM_016928.1,3064-3082).
ctggtgcatatagatatga

SEQ ID NO: 486914 - DNA, 19 bp, Mus musculus
  siRNA target sequence for Tlr5 (NM_016928.1,3094-3112).
gcttcagcagcaaagactt

SEQ ID NO: 486915 - DNA, 19 bp, Mus musculus
  siRNA target sequence for Tlr5 (NM_016928.1,3379-3397).
gatcgctgtcccagtatca

SEQ ID NO: 486916 - DNA, 19 bp, Mus musculus
  siRNA target sequence for Tlr5 (NM_016928.1,3421-3439).
gagggtttctgcaaaagca

SEQ ID NO: 486917 - DNA, 19 bp, Mus musculus
  siRNA target sequence for Tlr5 (NM_016928.1,3478-3496).
gctggtttctcgataaact

SEQ ID NO: 486918 - DNA, 19 bp, Mus musculus
  siRNA target sequence for Tlr5 (NM_016928.1,3495-3513).
ctctccggatgcattctaa

SEQ ID NO: 486919 - DNA, 19 bp, Mus musculus
  siRNA target sequence for Tlr5 (NM_016928.1,3545-3563).
catccagttgcgaaccata

SEQ ID NO: 486920 - DNA, 19 bp, Mus musculus
  siRNA target sequence for Tlr5 (NM_016928.1,3549-3567).
cagttgcgaaccatagcaa

SEQ ID NO: 486921 - DNA, 19 bp, Mus musculus
  siRNA target sequence for Tlr5 (NM_016928.1,3554-3572).
gcgaaccatagcaaccatt

SEQ ID NO: 486922 - DNA, 19 bp, Mus musculus
  siRNA target sequence for Tlr5 (NM_016928.1,3555-3573).
cgaaccatagcaaccattt

SEQ ID NO: 486923 - DNA, 19 bp, Mus musculus
  siRNA target sequence for Tnrc4 (NM_172434.1,551-569).
gagaccggaagctctttgt

SEQ ID NO: 486924 - DNA, 19 bp, Mus musculus
  siRNA target sequence for Tnrc4 (NM_172434.1,1499-1517).
cagccaaagtctttgttga

SEQ ID NO: 486925 - DNA, 19 bp, Mus musculus
  siRNA target sequence for Tnrc6 (NM_144925.2,731-749).
gtgcctcctccattactct

SEQ ID NO: 486926 - DNA, 19 bp, Mus musculus
  siRNA target sequence for Tnrc6 (NM_144925.2,753-771).
ctcaggttccagtttcatt

SEQ ID NO: 486927 - DNA, 19 bp, Mus musculus
  siRNA target sequence for Tnrc6 (NM_144925.2,876-894).
cccagttacagcgattgtt

SEQ ID NO: 486928 - DNA, 19 bp, Mus musculus
  siRNA target sequence for Tnrc6 (NM_144925.2,877-895).
ccagttacagcgattgtta

SEQ ID NO: 486929 - DNA, 19 bp, Mus musculus
  siRNA target sequence for Tnrc6 (NM_144925.2,997-1015).
gcaacagtctcgtcaactt

SEQ ID NO: 486930 - DNA, 19 bp, Mus musculus
  siRNA target sequence for Tnrc6 (NM_144925.2,1135-1153).
gccatcgccagtaaatgct

SEQ ID NO: 486931 - DNA, 19 bp, Mus musculus
  siRNA target sequence for Tnrc6 (NM_144925.2,1136-1154).
ccatcgccagtaaatgctt

SEQ ID NO: 486932 - DNA, 19 bp, Mus musculus
  siRNA target sequence for Tnrc6 (NM_144925.2,1137-1155).
catcgccagtaaatgcttt

SEQ ID NO: 486933 - DNA, 19 bp, Mus musculus
  siRNA target sequence for Tnrc6 (NM_144925.2,1174-1192).
cttgaactcaaacttgaat

SEQ ID NO: 486934 - DNA, 19 bp, Mus musculus
  siRNA target sequence for Tnrc6 (NM_144925.2,1294-1312).
cagcaaacatggtgctatt

SEQ ID NO: 486935 - DNA, 19 bp, Mus musculus
  siRNA target sequence for Tnrc6 (NM_144925.2,1297-1315).
caaacatggtgctatttca

SEQ ID NO: 486936 - DNA, 19 bp, Mus musculus
  siRNA target sequence for Tnrc6 (NM_144925.2,1307-1325).
gctatttcaagtggtttta

SEQ ID NO: 486937 - DNA, 19 bp, Mus musculus
  siRNA target sequence for Tnrc6 (NM_144925.2,1436-1454).
ggctctagcagtgttaact

SEQ ID NO: 486938 - DNA, 19 bp, Mus musculus
  siRNA target sequence for Tnrc6 (NM_144925.2,1476-1494).
gtgaaccatggaaaggtta

SEQ ID NO: 486939 - DNA, 19 bp, Mus musculus
  siRNA target sequence for Tnrc6 (NM_144925.2,1482-1500).
catggaaaggttatccaaa

SEQ ID NO: 486940 - DNA, 19 bp, Mus musculus
  siRNA target sequence for Tnrc6 (NM_144925.2,1528-1546).
cactcctggcagtgtcata

SEQ ID NO: 486941 - DNA, 19 bp, Mus musculus
  siRNA target sequence for Tnrc6 (NM_144925.2,1530-1548).
ctcctggcagtgtcataaa

SEQ ID NO: 486942 - DNA, 19 bp, Mus musculus
  siRNA target sequence for Tnrc6 (NM_144925.2,1532-1550).
cctggcagtgtcataaaca

SEQ ID NO: 486943 - DNA, 19 bp, Mus musculus
  siRNA target sequence for Tnrc6 (NM_144925.2,1541-1559).
gtcataaacagtctttcaa

SEQ ID NO: 486944 - DNA, 19 bp, Mus musculus
  siRNA target sequence for Tnrc6 (NM_144925.2,1627-1645).
cacgctgccttcaactagt

SEQ ID NO: 486945 - DNA, 19 bp, Mus musculus
  siRNA target sequence for Tnrc6 (NM_144925.2,1662-1680).
gtgcctccaactacaatgt

SEQ ID NO: 486946 - DNA, 19 bp, Mus musculus
  siRNA target sequence for Tnrc6 (NM_144925.2,1713-1731).
ccagaaatagtgattccaa

SEQ ID NO: 486947 - DNA, 19 bp, Mus musculus
  siRNA target sequence for Tnrc6 (NM_144925.2,1738-1756).
gtggtctcctggttcagtt

SEQ ID NO: 486948 - DNA, 19 bp, Mus musculus
  siRNA target sequence for Tnrc6 (NM_144925.2,1743-1761).
ctcctggttcagttacaaa

SEQ ID NO: 486949 - DNA, 19 bp, Mus musculus
  siRNA target sequence for Tnrc6 (NM_144925.2,1745-1763).
cctggttcagttacaaaca

SEQ ID NO: 486950 - DNA, 19 bp, Mus musculus
  siRNA target sequence for Tnrc6 (NM_144925.2,1861-1879).
cttgtctacgtgggataat

SEQ ID NO: 486951 - DNA, 19 bp, Mus musculus
  siRNA target sequence for Tnrc6 (NM_144925.2,1864-1882).
gtctacgtgggataattct

SEQ ID NO: 486952 - DNA, 19 bp, Mus musculus
  siRNA target sequence for Tnrc6 (NM_144925.2,1993-2011).
cctcacacctcagattgat

SEQ ID NO: 486953 - DNA, 19 bp, Mus musculus
  siRNA target sequence for Tnrc6 (NM_144925.2,2087-2105).
gctctggtccgttacagtt

SEQ ID NO: 486954 - DNA, 19 bp, Mus musculus
  siRNA target sequence for Tnrc6 (NM_144925.2,2092-2110).
ggtccgttacagttcaaaa

SEQ ID NO: 486955 - DNA, 19 bp, Mus musculus
  siRNA target sequence for Tnrc6 (NM_144925.2,2095-2113).
ccgttacagttcaaaagaa

SEQ ID NO: 486956 - DNA, 19 bp, Mus musculus
  siRNA target sequence for Tnrc6 (NM_144925.2,2150-2168).
gtgctggggaacactacta

SEQ ID NO: 486957 - DNA, 19 bp, Mus musculus
  siRNA target sequence for Tnrc6 (NM_144925.2,2152-2170).
gctggggaacactactatt

SEQ ID NO: 486958 - DNA, 19 bp, Mus musculus
  siRNA target sequence for Tnrc6 (NM_144925.2,2194-2212).
ggagatcagtcgcttcttt

SEQ ID NO: 486959 - DNA, 19 bp, Mus musculus
  siRNA target sequence for Tnrc6 (NM_144925.2,2308-2326).
cagccggactgatgtcaat

SEQ ID NO: 486960 - DNA, 19 bp, Mus musculus
  siRNA target sequence for Tnrc6 (NM_144925.2,2310-2328).
gccggactgatgtcaatca

SEQ ID NO: 486961 - DNA, 19 bp, Mus musculus
  siRNA target sequence for Tnrc6 (NM_144925.2,2312-2330).
cggactgatgtcaatcact

SEQ ID NO: 486962 - DNA, 19 bp, Mus musculus
  siRNA target sequence for Traf6 (NM_009424.2,681-699).
cctgcatcatcaaatccat

SEQ ID NO: 486963 - DNA, 19 bp, Mus musculus
  siRNA target sequence for Traf6 (NM_009424.2,682-700).
ctgcatcatcaaatccata

SEQ ID NO: 486964 - DNA, 19 bp, Mus musculus
  siRNA target sequence for Traf6 (NM_009424.2,715-733).
caagtgcccagttgacaat

SEQ ID NO: 486965 - DNA, 19 bp, Mus musculus
  siRNA target sequence for Traf6 (NM_009424.2,721-739).
cccagttgacaatgaaata

SEQ ID NO: 486966 - DNA, 19 bp, Mus musculus
  siRNA target sequence for Traf6 (NM_009424.2,799-817).
ggtaaagtgcccaaataaa

SEQ ID NO: 486967 - DNA, 19 bp, Mus musculus
  siRNA target sequence for Traf6 (NM_009424.2,843-861).
gacatctcgaggatcatca

SEQ ID NO: 486968 - DNA, 19 bp, Mus musculus
  siRNA target sequence for Traf6 (NM_009424.2,851-869).
gaggatcatcaagtacatt

SEQ ID NO: 486969 - DNA, 19 bp, Mus musculus
  siRNA target sequence for Traf6 (NM_009424.2,872-890).
gaatttgctctagtgaatt

SEQ ID NO: 486970 - DNA, 19 bp, Mus musculus
  siRNA target sequence for Traf6 (NM_009424.2,914-932).
cagaagtgccaggttaata

SEQ ID NO: 486971 - DNA, 19 bp, Mus musculus
  siRNA target sequence for Traf6 (NM_009424.2,922-940).
ccaggttaatacacacatt

SEQ ID NO: 486972 - DNA, 19 bp, Mus musculus
  siRNA target sequence for Traf6 (NM_009424.2,923-941).
caggttaatacacacatta

SEQ ID NO: 486973 - DNA, 19 bp, Mus musculus
  siRNA target sequence for Traf6 (NM_009424.2,960-978).
ggcaggtttcttgtgtaaa

SEQ ID NO: 486974 - DNA, 19 bp, Mus musculus
  siRNA target sequence for Traf6 (NM_009424.2,962-980).
caggtttcttgtgtaaact

SEQ ID NO: 486975 - DNA, 19 bp, Mus musculus
  siRNA target sequence for Traf6 (NM_009424.2,1006-1024).
gaaagagatccatgatcaa

SEQ ID NO: 486976 - DNA, 19 bp, Mus musculus
  siRNA target sequence for Traf6 (NM_009424.2,1031-1049).
cctctggcaaatatcatct

SEQ ID NO: 486977 - DNA, 19 bp, Mus musculus
  siRNA target sequence for Traf6 (NM_009424.2,1050-1068).
gtgaatactgtggtacaat

SEQ ID NO: 486978 - DNA, 19 bp, Mus musculus
  siRNA target sequence for Traf6 (NM_009424.2,1079-1097).
gaacagatgcctaatcatt

SEQ ID NO: 486979 - DNA, 19 bp, Mus musculus
  siRNA target sequence for Traf6 (NM_009424.2,1121-1139).
ccaatcccttgcacattca

SEQ ID NO: 486980 - DNA, 19 bp, Mus musculus
  siRNA target sequence for Traf6 (NM_009424.2,1182-1200).
cacgacacttgcaagagaa

SEQ ID NO: 486981 - DNA, 19 bp, Mus musculus
  siRNA target sequence for Traf6 (NM_009424.2,1184-1202).
cgacacttgcaagagaata

SEQ ID NO: 486982 - DNA, 19 bp, Mus musculus
  siRNA target sequence for Traf6 (NM_009424.2,1222-1240).
gttggcccaggctgttcat

SEQ ID NO: 486983 - DNA, 19 bp, Mus musculus
  siRNA target sequence for Traf6 (NM_009424.2,1225-1243).
ggcccaggctgttcataat

SEQ ID NO: 486984 - DNA, 19 bp, Mus musculus
  siRNA target sequence for Traf6 (NM_009424.2,1228-1246).
ccaggctgttcataatgtt

SEQ ID NO: 486985 - DNA, 19 bp, Mus musculus
  siRNA target sequence for Traf6 (NM_009424.2,1229-1247).
caggctgttcataatgtta

SEQ ID NO: 486986 - DNA, 19 bp, Mus musculus
  siRNA target sequence for Traf6 (NM_009424.2,1299-1317).
cagaggacccaaattatga

SEQ ID NO: 486987 - DNA, 19 bp, Mus musculus
  siRNA target sequence for Traf6 (NM_009424.2,1307-1325).
ccaaattatgaggaaacta

SEQ ID NO: 486988 - DNA, 19 bp, Mus musculus
  siRNA target sequence for Traf6 (NM_009424.2,1336-1354).
ggagagtcgcctagtaaga

SEQ ID NO: 486989 - DNA, 19 bp, Mus musculus
  siRNA target sequence for Traf6 (NM_009424.2,1375-1393).
gctgactgccaaaatggaa

SEQ ID NO: 486990 - DNA, 19 bp, Mus musculus
  siRNA target sequence for Traf6 (NM_009424.2,1380-1398).
ctgccaaaatggaaactca

SEQ ID NO: 486991 - DNA, 19 bp, Mus musculus
  siRNA target sequence for Traf6 (NM_009424.2,1472-1490).
cagtgtaacgggatctaca

SEQ ID NO: 486992 - DNA, 19 bp, Mus musculus
  siRNA target sequence for Traf6 (NM_009424.2,1474-1492).
gtgtaacgggatctacatt

SEQ ID NO: 486993 - DNA, 19 bp, Mus musculus
  siRNA target sequence for Traf6 (NM_009424.2,1603-1621).
gcgcctgcatcttcagtta

SEQ ID NO: 486994 - DNA, 19 bp, Mus musculus
  siRNA target sequence for Traf6 (NM_009424.2,1629-1647).
ctcagcgctgtgcaaacta

SEQ ID NO: 486995 - DNA, 19 bp, Mus musculus
  siRNA target sequence for Traf6 (NM_009424.2,1631-1649).
cagcgctgtgcaaactata

SEQ ID NO: 486996 - DNA, 19 bp, Mus musculus
  siRNA target sequence for Traf6 (NM_009424.2,1633-1651).
gcgctgtgcaaactatata

SEQ ID NO: 486997 - DNA, 19 bp, Mus musculus
  siRNA target sequence for Traf6 (NM_009424.2,1666-1684).
cacaatgcaaggagaatat

SEQ ID NO: 486998 - DNA, 19 bp, Mus musculus
  siRNA target sequence for Traf6 (NM_009424.2,1668-1686).
caatgcaaggagaatatga

SEQ ID NO: 486999 - DNA, 19 bp, Mus musculus
  siRNA target sequence for Traf6 (NM_009424.2,1701-1719).
ggcccttccagggtacaat

SEQ ID NO: 487000 - DNA, 19 bp, Mus musculus
  siRNA target sequence for Traf6 (NM_009424.2,1702-1720).
gcccttccagggtacaata

SEQ ID NO: 487001 - DNA, 19 bp, Mus musculus
  siRNA target sequence for Traf6 (NM_009424.2,1712-1730).
ggtacaatacgccttacaa

SEQ ID NO: 487002 - DNA, 19 bp, Mus musculus
  siRNA target sequence for Traf6 (NM_009424.2,1713-1731).
gtacaatacgccttacaat

SEQ ID NO: 487003 - DNA, 19 bp, Mus musculus
  siRNA target sequence for Traf6 (NM_009424.2,1716-1734).
caatacgccttacaattct

SEQ ID NO: 487004 - DNA, 19 bp, Mus musculus
  siRNA target sequence for Traf6 (NM_009424.2,1738-1756).
ccagtctgaagcacttata

SEQ ID NO: 487005 - DNA, 19 bp, Mus musculus
  siRNA target sequence for Traf6 (NM_009424.2,1739-1757).
cagtctgaagcacttataa

SEQ ID NO: 487006 - DNA, 19 bp, Mus musculus
  siRNA target sequence for Traf6 (NM_009424.2,1823-1841).
ccacggaaccccaaaggtt

SEQ ID NO: 487007 - DNA, 19 bp, Mus musculus
  siRNA target sequence for Traf6 (NM_009424.2,1824-1842).
cacggaaccccaaaggttt

SEQ ID NO: 487008 - DNA, 19 bp, Mus musculus
  siRNA target sequence for Traf6 (NM_009424.2,1838-1856).
ggttttggctatgtaacat

SEQ ID NO: 487009 - DNA, 19 bp, Mus musculus
  siRNA target sequence for Traf6 (NM_009424.2,1839-1857).
gttttggctatgtaacatt

SEQ ID NO: 487010 - DNA, 19 bp, Mus musculus
  siRNA target sequence for Traf6 (NM_009424.2,1891-1909).
cattaaggatgatacatta

SEQ ID NO: 487011 - DNA, 19 bp, Mus musculus
  siRNA target sequence for Traf6 (NM_009424.2,1925-1943).
gtctctacccgctttgaca

SEQ ID NO: 487012 - DNA, 19 bp, Mus musculus
  siRNA target sequence for Traf6 (NM_009424.2,1969-1987).
ccagccacgaagtactgat

SEQ ID NO: 487013 - DNA, 19 bp, Mus musculus
  siRNA target sequence for U2af1l4 (NM_170760.2,23-41).
gaatatttagcttcgatat

SEQ ID NO: 487014 - DNA, 19 bp, Mus musculus
  siRNA target sequence for U2af1l4 (NM_170760.2,50-68).
gagaaggacaaggttaact

SEQ ID NO: 487015 - DNA, 19 bp, Mus musculus
  siRNA target sequence for U2af1l4 (NM_170760.2,58-76).
caaggttaactgctctttt

SEQ ID NO: 487016 - DNA, 19 bp, Mus musculus
  siRNA target sequence for U2af1l4 (NM_170760.2,62-80).
gttaactgctctttttact

SEQ ID NO: 487017 - DNA, 19 bp, Mus musculus
  siRNA target sequence for U2af1l4 (NM_170760.2,111-129).
ggtgctcccgacttcacaa

SEQ ID NO: 487018 - DNA, 19 bp, Mus musculus
  siRNA target sequence for U2af1l4 (NM_170760.2,114-132).
gctcccgacttcacaacaa

SEQ ID NO: 487019 - DNA, 19 bp, Mus musculus
  siRNA target sequence for U2af1l4 (NM_170760.2,115-133).
ctcccgacttcacaacaaa

SEQ ID NO: 487020 - DNA, 19 bp, Mus musculus
  siRNA target sequence for U2af1l4 (NM_170760.2,150-168).
ccatagtcctgctcaactt

SEQ ID NO: 487021 - DNA, 19 bp, Mus musculus
  siRNA target sequence for U2af1l4 (NM_170760.2,232-250).
ggaggtgcaagaacactat

SEQ ID NO: 487022 - DNA, 19 bp, Mus musculus
  siRNA target sequence for U2af1l4 (NM_170760.2,235-253).
ggtgcaagaacactatgat

SEQ ID NO: 487023 - DNA, 19 bp, Mus musculus
  siRNA target sequence for U2af1l4 (NM_170760.2,236-254).
gtgcaagaacactatgata

SEQ ID NO: 487024 - DNA, 19 bp, Mus musculus
  siRNA target sequence for U2af1l4 (NM_170760.2,239-257).
caagaacactatgataact

SEQ ID NO: 487025 - DNA, 19 bp, Mus musculus
  siRNA target sequence for U2af1l4 (NM_170760.2,242-260).
gaacactatgataacttct

SEQ ID NO: 487026 - DNA, 19 bp, Mus musculus
  siRNA target sequence for U2af1l4 (NM_170760.2,532-550).
gcacctacggcccatatct

SEQ ID NO: 487027 - DNA, 19 bp, Mus musculus
  siRNA target sequence for Wdr9 (NM_145125.1,173-191).
cgagtcggagctgtacttt

SEQ ID NO: 487028 - DNA, 19 bp, Mus musculus
  siRNA target sequence for Wdr9 (NM_145125.1,313-331).
ggagctacgaggaattggt

SEQ ID NO: 487029 - DNA, 19 bp, Mus musculus
  siRNA target sequence for Wdr9 (NM_145125.1,329-347).
ggtcttgtccaataaacat

SEQ ID NO: 487030 - DNA, 19 bp, Mus musculus
  siRNA target sequence for Wdr9 (NM_145125.1,388-406).
gtccgatgctggataagga

SEQ ID NO: 487031 - DNA, 19 bp, Mus musculus
  siRNA target sequence for Wdr9 (NM_145125.1,465-483).
ctacgaacagcaaaagact

SEQ ID NO: 487032 - DNA, 19 bp, Mus musculus
  siRNA target sequence for Wdr9 (NM_145125.1,541-559).
ctgaaatgcccgtcaatta

SEQ ID NO: 487033 - DNA, 19 bp, Mus musculus
  siRNA target sequence for Wdr9 (NM_145125.1,571-589).
cgagtcttgtggagataca

SEQ ID NO: 487034 - DNA, 19 bp, Mus musculus
  siRNA target sequence for Wdr9 (NM_145125.1,609-627).
gggtgttccacttttagca

SEQ ID NO: 487035 - DNA, 19 bp, Mus musculus
  siRNA target sequence for Wdr9 (NM_145125.1,630-648).
gcgttcccaggaactatgt

SEQ ID NO: 487036 - DNA, 19 bp, Mus musculus
  siRNA target sequence for Wdr9 (NM_145125.1,631-649).
cgttcccaggaactatgta

SEQ ID NO: 487037 - DNA, 19 bp, Mus musculus
  siRNA target sequence for Wdr9 (NM_145125.1,640-658).
gaactatgtaccagcatat

SEQ ID NO: 487038 - DNA, 19 bp, Mus musculus
  siRNA target sequence for Wdr9 (NM_145125.1,718-736).
ggacaggacatagaatctt

SEQ ID NO: 487039 - DNA, 19 bp, Mus musculus
  siRNA target sequence for Wdr9 (NM_145125.1,750-768).
gattgcttggtaaagattt

SEQ ID NO: 487040 - DNA, 19 bp, Mus musculus
  siRNA target sequence for Wdr9 (NM_145125.1,777-795).
cataatggccgcttgttgt

SEQ ID NO: 487041 - DNA, 19 bp, Mus musculus
  siRNA target sequence for Wdr9 (NM_145125.1,786-804).
cgcttgttgtctacgttaa

SEQ ID NO: 487042 - DNA, 19 bp, Mus musculus
  siRNA target sequence for Wdr9 (NM_145125.1,809-827).
ccattctgcagagatttca

SEQ ID NO: 487043 - DNA, 19 bp, Mus musculus
  siRNA target sequence for Wdr9 (NM_145125.1,933-951).
ggacacacggggtcaatca

SEQ ID NO: 487044 - DNA, 19 bp, Mus musculus
  siRNA target sequence for Wdr9 (NM_145125.1,936-954).
cacacggggtcaatcacat

SEQ ID NO: 487045 - DNA, 19 bp, Mus musculus
  siRNA target sequence for Wdr9 (NM_145125.1,987-1005).
cagcggtacatggtttcta

SEQ ID NO: 487046 - DNA, 19 bp, Mus musculus
  siRNA target sequence for Wdr9 (NM_145125.1,1012-1030).
ctgatggcactgtttgctt

SEQ ID NO: 487047 - DNA, 19 bp, Mus musculus
  siRNA target sequence for Wdr9 (NM_145125.1,1093-1111).
caaggcctggtgttcagat

SEQ ID NO: 487048 - DNA, 19 bp, Mus musculus
  siRNA target sequence for Wdr9 (NM_145125.1,1109-1127).
gatgctgtgttcttcattt

SEQ ID NO: 487049 - DNA, 19 bp, Mus musculus
  siRNA target sequence for Wdr9 (NM_145125.1,1134-1152).
ggtggtatgtttttagcta

SEQ ID NO: 487050 - DNA, 19 bp, Mus musculus
  siRNA target sequence for Wdr9 (NM_145125.1,1170-1188).
gtaatcagaatgtattttt

SEQ ID NO: 487051 - DNA, 19 bp, Mus musculus
  siRNA target sequence for Wdr9 (NM_145125.1,1192-1210).
gattcgacgcacctgaaaa

SEQ ID NO: 487052 - DNA, 19 bp, Mus musculus
  siRNA target sequence for Wdr9 (NM_145125.1,1228-1246).
gccacactgacaaagttga

SEQ ID NO: 487053 - DNA, 19 bp, Mus musculus
  siRNA target sequence for Wdr9 (NM_145125.1,1229-1247).
ccacactgacaaagttgat

SEQ ID NO: 487054 - DNA, 19 bp, Mus musculus
  siRNA target sequence for Wdr9 (NM_145125.1,1265-1283).
caatggtgaccggttctta

SEQ ID NO: 487055 - DNA, 19 bp, Mus musculus
  siRNA target sequence for Wdr9 (NM_145125.1,1370-1388).
ctcgggagacacatcttca

SEQ ID NO: 487056 - DNA, 19 bp, Mus musculus
  siRNA target sequence for Wdr9 (NM_145125.1,1400-1418).
gtttatgaaacccaaagtt

SEQ ID NO: 487057 - DNA, 19 bp, Mus musculus
  siRNA target sequence for Wdr9 (NM_145125.1,1428-1446).
gcttggaaccaggatgata

SEQ ID NO: 487058 - DNA, 19 bp, Mus musculus
  siRNA target sequence for Wdr9 (NM_145125.1,1454-1472).
ggtcacagccgtgaatgat

SEQ ID NO: 487059 - DNA, 19 bp, Mus musculus
  siRNA target sequence for Wdr9 (NM_145125.1,1457-1475).
cacagccgtgaatgatcat

SEQ ID NO: 487060 - DNA, 19 bp, Mus musculus
  siRNA target sequence for Wdr9 (NM_145125.1,1459-1477).
cagccgtgaatgatcatgt

SEQ ID NO: 487061 - DNA, 19 bp, Mus musculus
  siRNA target sequence for Wdr9 (NM_145125.1,1564-1582).
cctttgattccagaattat

SEQ ID NO: 487062 - DNA, 19 bp, Mus musculus
  siRNA target sequence for Wdr9 (NM_145125.1,1593-1611).
ggacacgatggcagcatat

SEQ ID NO: 487063 - DNA, 19 bp, Mus musculus
  siRNA target sequence for Wdr9 (NM_145125.1,1598-1616).
cgatggcagcatatttata

SEQ ID NO: 487064 - DNA, 19 bp, Mus musculus
  siRNA target sequence for Wdr9 (NM_145125.1,1607-1625).
catatttatatgggatatt

SEQ ID NO: 487065 - DNA, 19 bp, Mus musculus
  siRNA target sequence for Wdr9 (NM_145125.1,1633-1651).
gcatcaagatgaagcatta

SEQ ID NO: 487066 - DNA, 19 bp, Mus musculus
  siRNA target sequence for Wdr9 (NM_145125.1,1640-1658).
gatgaagcattactttaat

SEQ ID NO: 487067 - DNA, 19 bp, Mus musculus
  siRNA target sequence for Wdr9 (NM_145125.1,1738-1756).
ctcacgggcatcttctgat

SEQ ID NO: 487068 - DNA, 19 bp, Mus musculus
  siRNA target sequence for Wdr9 (NM_145125.1,1771-1789).
gcagcaagccatatgaaaa

SEQ ID NO: 487069 - DNA, 19 bp, Mus musculus
  siRNA target sequence for Wdr9 (NM_145125.1,1818-1836).
gactaccgaccactgataa

SEQ ID NO: 487070 - DNA, 19 bp, Mus musculus
  siRNA target sequence for Wdr9 (NM_145125.1,1820-1838).
ctaccgaccactgataaga

SEQ ID NO: 487071 - DNA, 19 bp, Mus musculus
  siRNA target sequence for Wdr9 (NM_145125.1,1823-1841).
ccgaccactgataagagat

SEQ ID NO: 487072 - DNA, 19 bp, Mus musculus
  siRNA target sequence for Wdr9 (NM_145125.1,1824-1842).
cgaccactgataagagatt

SEQ ID NO: 487073 - DNA, 19 bp, Mus musculus
  siRNA target sequence for Wdr9 (NM_145125.1,2017-2035).
gtgatggggaggtgattga

SEQ ID NO: 487074 - DNA, 19 bp, Mus musculus
  siRNA target sequence for Wdr9 (NM_145125.1,2023-2041).
gggaggtgattgaacagat

SEQ ID NO: 487075 - DNA, 19 bp, Mus musculus
  siRNA target sequence for Wdr9 (NM_145125.1,2193-2211).
ccccgaagagggagtttta

SEQ ID NO: 487076 - DNA, 19 bp, Mus musculus
  siRNA target sequence for Wdr9 (NM_145125.1,2195-2213).
ccgaagagggagttttaga

SEQ ID NO: 487077 - DNA, 19 bp, Mus musculus
  siRNA target sequence for Wdr9 (NM_145125.1,2196-2214).
cgaagagggagttttagaa

SEQ ID NO: 487078 - DNA, 19 bp, Mus musculus
  siRNA target sequence for Wdr9 (NM_145125.1,2215-2233).
gactgagtttagacattca

SEQ ID NO: 487079 - DNA, 19 bp, Mus musculus
  siRNA target sequence for Wdr9 (NM_145125.1,2304-2322).
cctcggagtcagattgcta

SEQ ID NO: 487080 - DNA, 19 bp, Mus musculus
  siRNA target sequence for Wdr9 (NM_145125.1,2344-2362).
ggaagcggagagtagttgt

SEQ ID NO: 487081 - DNA, 19 bp, Mus musculus
  siRNA target sequence for Wdr9 (NM_145125.1,2345-2363).
gaagcggagagtagttgtt

SEQ ID NO: 487082 - DNA, 19 bp, Mus musculus
  siRNA target sequence for Wdr9 (NM_145125.1,2397-2415).
gaagacattcgcatagaga

SEQ ID NO: 487083 - DNA, 19 bp, Mus musculus
  siRNA target sequence for Wdr9 (NM_145125.1,2426-2444).
ggagaggaacctgtatgta

SEQ ID NO: 487084 - DNA, 19 bp, Mus musculus
  siRNA target sequence for Wdr9 (NM_145125.1,2427-2445).
gagaggaacctgtatgtaa

SEQ ID NO: 487085 - DNA, 19 bp, Mus musculus
  siRNA target sequence for Wdr9 (NM_145125.1,2429-2447).
gaggaacctgtatgtaata

SEQ ID NO: 487086 - DNA, 19 bp, Mus musculus
  siRNA target sequence for Wdr9 (NM_145125.1,2442-2460).
gtaatagggagaaagaaga

SEQ ID NO: 487087 - DNA, 19 bp, Mus musculus
  siRNA target sequence for Wdr9 (NM_145125.1,2472-2490).
gtcccacaaaagtccaatt

SEQ ID NO: 487088 - DNA, 19 bp, Mus musculus
  siRNA target sequence for Wdr9 (NM_145125.1,2475-2493).
ccacaaaagtccaattcga

SEQ ID NO: 487089 - DNA, 19 bp, Mus musculus
  siRNA target sequence for Wdr9 (NM_145125.1,2476-2494).
cacaaaagtccaattcgat

SEQ ID NO: 487090 - DNA, 19 bp, Mus musculus
  siRNA target sequence for Wdr9 (NM_145125.1,2485-2503).
ccaattcgatggttttggt

SEQ ID NO: 487091 - DNA, 19 bp, Mus musculus
  siRNA target sequence for Wdr9 (NM_145125.1,2501-2519).
ggtgtcccagtctagacaa

SEQ ID NO: 487092 - DNA, 19 bp, Mus musculus
  siRNA target sequence for Wdr9 (NM_145125.1,2520-2538).
cggacgtgtaggcgtaaat

SEQ ID NO: 487093 - DNA, 19 bp, Mus musculus
  siRNA target sequence for Wdr9 (NM_145125.1,2521-2539).
ggacgtgtaggcgtaaata

SEQ ID NO: 487094 - DNA, 19 bp, Mus musculus
  siRNA target sequence for Wdr9 (NM_145125.1,2522-2540).
gacgtgtaggcgtaaatat

SEQ ID NO: 487095 - DNA, 19 bp, Mus musculus
  siRNA target sequence for Wdr9 (NM_145125.1,2530-2548).
ggcgtaaatatgcaaatta

SEQ ID NO: 487096 - DNA, 19 bp, Mus musculus
  siRNA target sequence for Wdr9 (NM_145125.1,2531-2549).
gcgtaaatatgcaaattat

SEQ ID NO: 487097 - DNA, 19 bp, Mus musculus
  siRNA target sequence for Wdr9 (NM_145125.1,2565-2583).
gaccagtgtgaattatctt

SEQ ID NO: 487098 - DNA, 19 bp, Mus musculus
  siRNA target sequence for Wdr9 (NM_145125.1,2592-2610).
gaatcttcaggctctgtta

SEQ ID NO: 487099 - DNA, 19 bp, Mus musculus
  siRNA target sequence for Wdr9 (NM_145125.1,2607-2625).
gttagacatgagacatctt

SEQ ID NO: 487100 - DNA, 19 bp, Mus musculus
  siRNA target sequence for Wdr9 (NM_145125.1,2611-2629).
gacatgagacatcttatga

SEQ ID NO: 487101 - DNA, 19 bp, Mus musculus
  siRNA target sequence for Wdr9 (NM_145125.1,2661-2679).
gacgagtggagaaatgaca

SEQ ID NO: 487102 - DNA, 19 bp, Mus musculus
  siRNA target sequence for Wdr9 (NM_145125.1,2742-2760).
gctgacacggggatcaact

SEQ ID NO: 487103 - DNA, 19 bp, Mus musculus
  siRNA target sequence for Wdr9 (NM_145125.1,2743-2761).
ctgacacggggatcaactt

SEQ ID NO: 487104 - DNA, 19 bp, Mus musculus
  siRNA target sequence for Wdr9 (NM_145125.1,2831-2849).
gtccatggagaacatatca

SEQ ID NO: 487105 - DNA, 19 bp, Mus musculus
  siRNA target sequence for Wdr9 (NM_145125.1,2840-2858).
gaacatatcacctcctaaa

SEQ ID NO: 487106 - DNA, 19 bp, Mus musculus
  siRNA target sequence for Wdr9 (NM_145125.1,2917-2935).
ctccagcagaacttgcaaa

SEQ ID NO: 487107 - DNA, 19 bp, Mus musculus
  siRNA target sequence for Wdr9 (NM_145125.1,2939-2957).
ggaacacctatatgagttt

SEQ ID NO: 487108 - DNA, 19 bp, Mus musculus
  siRNA target sequence for Wdr9 (NM_145125.1,2958-2976).
caccctcctgtgtggataa

SEQ ID NO: 487109 - DNA, 19 bp, Mus musculus
  siRNA target sequence for Wdr9 (NM_145125.1,3135-3153).
gatcaagaactggtcaaaa

SEQ ID NO: 487110 - DNA, 19 bp, Mus musculus
  siRNA target sequence for Wdr9 (NM_145125.1,3196-3214).
gcctcaaactagcatttat

SEQ ID NO: 487111 - DNA, 19 bp, Mus musculus
  siRNA target sequence for Wdr9 (NM_145125.1,3197-3215).
cctcaaactagcatttata

SEQ ID NO: 487112 - DNA, 19 bp, Mus musculus
  siRNA target sequence for Wdr9 (NM_145125.1,3236-3254).
gacggataaatctttctct

SEQ ID NO: 487113 - DNA, 19 bp, Mus musculus
  siRNA target sequence for Wdr9 (NM_145125.1,3238-3256).
cggataaatctttctctat

SEQ ID NO: 487114 - DNA, 19 bp, Mus musculus
  siRNA target sequence for Wdr9 (NM_145125.1,3240-3258).
gataaatctttctctatta

SEQ ID NO: 487115 - DNA, 19 bp, Mus musculus
  siRNA target sequence for Wdr9 (NM_145125.1,3343-3361).
gtgacagatttcgatctat

SEQ ID NO: 487116 - DNA, 19 bp, Mus musculus
  siRNA target sequence for Wdr9 (NM_145125.1,3345-3363).
gacagatttcgatctataa

SEQ ID NO: 487117 - DNA, 19 bp, Mus musculus
  siRNA target sequence for Wdr9 (NM_145125.1,3347-3365).
cagatttcgatctataatt

SEQ ID NO: 487118 - DNA, 19 bp, Mus musculus
  siRNA target sequence for Wdr9 (NM_145125.1,3349-3367).
gatttcgatctataattga

SEQ ID NO: 487119 - DNA, 19 bp, Mus musculus
  siRNA target sequence for Wdr9 (NM_145125.1,3464-3482).
caccgagactgaaaagctt

SEQ ID NO: 487120 - DNA, 19 bp, Mus musculus
  siRNA target sequence for Wdr9 (NM_145125.1,3497-3515).
ggaaccgattcctgacaat

SEQ ID NO: 487121 - DNA, 19 bp, Mus musculus
  siRNA target sequence for Wdr9 (NM_145125.1,3502-3520).
cgattcctgacaatgttga

SEQ ID NO: 487122 - DNA, 19 bp, Mus musculus
  siRNA target sequence for Wdr9 (NM_145125.1,3503-3521).
gattcctgacaatgttgat

SEQ ID NO: 487123 - DNA, 19 bp, Mus musculus
  siRNA target sequence for Wdr9 (NM_145125.1,3559-3577).
cagatgagctagagaaatt

SEQ ID NO: 487124 - DNA, 19 bp, Mus musculus
  siRNA target sequence for Wdr9 (NM_145125.1,3605-3623).
gggccagaggtcaagagat

SEQ ID NO: 487125 - DNA, 19 bp, Mus musculus
  siRNA target sequence for Wdr9 (NM_145125.1,3646-3664).
gtggcatagaccagctttt

SEQ ID NO: 487126 - DNA, 19 bp, Mus musculus
  siRNA target sequence for Wdr9 (NM_145125.1,3648-3666).
ggcatagaccagcttttaa

SEQ ID NO: 487127 - DNA, 19 bp, Mus musculus
  siRNA target sequence for Wdr9 (NM_145125.1,3649-3667).
gcatagaccagcttttaaa

SEQ ID NO: 487128 - DNA, 19 bp, Mus musculus
  siRNA target sequence for Wdr9 (NM_145125.1,3728-3746).
cacagtagtggcttatcca

SEQ ID NO: 487129 - DNA, 19 bp, Mus musculus
  siRNA target sequence for Wdr9 (NM_145125.1,3770-3788).
gaggcttgttaatcgattt

SEQ ID NO: 487130 - DNA, 19 bp, Mus musculus
  siRNA target sequence for Wdr9 (NM_145125.1,3772-3790).
ggcttgttaatcgatttta

SEQ ID NO: 487131 - DNA, 19 bp, Mus musculus
  siRNA target sequence for Wdr9 (NM_145125.1,3774-3792).
cttgttaatcgattttaca

SEQ ID NO: 487132 - DNA, 19 bp, Mus musculus
  siRNA target sequence for Wdr9 (NM_145125.1,3793-3811).
ggcggttatctgcattaat

SEQ ID NO: 487133 - DNA, 19 bp, Mus musculus
  siRNA target sequence for Wdr9 (NM_145125.1,3794-3812).
gcggttatctgcattaatt

SEQ ID NO: 487134 - DNA, 19 bp, Mus musculus
  siRNA target sequence for Wdr9 (NM_145125.1,3833-3851).
gcataatgcaagaacgttt

SEQ ID NO: 487135 - DNA, 19 bp, Mus musculus
  siRNA target sequence for Wdr9 (NM_145125.1,3834-3852).
cataatgcaagaacgttta

SEQ ID NO: 487136 - DNA, 19 bp, Mus musculus
  siRNA target sequence for Wdr9 (NM_145125.1,3858-3876).
ccggaaagtgtaattgcaa

SEQ ID NO: 487137 - DNA, 19 bp, Mus musculus
  siRNA target sequence for Wdr9 (NM_145125.1,3900-3918).
cagcttctgaagtttatca

SEQ ID NO: 487138 - DNA, 19 bp, Mus musculus
  siRNA target sequence for Wdr9 (NM_145125.1,3917-3935).
caagaatcaagattgtaca

SEQ ID NO: 487139 - DNA, 19 bp, Mus musculus
  siRNA target sequence for Wdr9 (NM_145125.1,3924-3942).
caagattgtacaaatatat

SEQ ID NO: 487140 - DNA, 19 bp, Mus musculus
  siRNA target sequence for Wdr9 (NM_145125.1,3974-3992).
ggacgacagtgctgatgat

SEQ ID NO: 487141 - DNA, 19 bp, Mus musculus
  siRNA target sequence for Wdr9 (NM_145125.1,3975-3993).
gacgacagtgctgatgatt

SEQ ID NO: 487142 - DNA, 19 bp, Mus musculus
  siRNA target sequence for Wdr9 (NM_145125.1,4065-4083).
gccagtggctgtattgaga

SEQ ID NO: 487143 - DNA, 19 bp, Mus musculus
  siRNA target sequence for Wdr9 (NM_145125.1,4136-4154).
ggactcggagccctttaga

SEQ ID NO: 487144 - DNA, 19 bp, Mus musculus
  siRNA target sequence for Wdr9 (NM_145125.1,4179-4197).
ccagattaccgagatatta

SEQ ID NO: 487145 - DNA, 19 bp, Mus musculus
  siRNA target sequence for Wdr9 (NM_145125.1,4180-4198).
cagattaccgagatattat

SEQ ID NO: 487146 - DNA, 19 bp, Mus musculus
  siRNA target sequence for Wdr9 (NM_145125.1,4273-4291).
gcaaagacattcgattgat

SEQ ID NO: 487147 - DNA, 19 bp, Mus musculus
  siRNA target sequence for Wdr9 (NM_145125.1,4298-4316).
caatgcaaaggcatataca

SEQ ID NO: 487148 - DNA, 19 bp, Mus musculus
  siRNA target sequence for Wdr9 (NM_145125.1,4307-4325).
ggcatatacaccgaacaaa

SEQ ID NO: 487149 - DNA, 19 bp, Mus musculus
  siRNA target sequence for Wdr9 (NM_145125.1,4308-4326).
gcatatacaccgaacaaaa

SEQ ID NO: 487150 - DNA, 19 bp, Mus musculus
  siRNA target sequence for Wdr9 (NM_145125.1,4434-4452).
cgtagaagccaaagattca

SEQ ID NO: 487151 - DNA, 19 bp, Mus musculus
  siRNA target sequence for Wdr9 (NM_145125.1,4539-4557).
gtaattccacagttgatgt

SEQ ID NO: 487152 - DNA, 19 bp, Mus musculus
  siRNA target sequence for Wdr9 (NM_145125.1,4571-4589).
gtctacctcaagtaaggta

SEQ ID NO: 487153 - DNA, 19 bp, Mus musculus
  siRNA target sequence for Wdr9 (NM_145125.1,4576-4594).
cctcaagtaaggtaccttt

SEQ ID NO: 487154 - DNA, 19 bp, Mus musculus
  siRNA target sequence for Wdr9 (NM_145125.1,4713-4731).
ggttctgtgctgtttggaa

SEQ ID NO: 487155 - DNA, 19 bp, Mus musculus
  siRNA target sequence for Wdr9 (NM_145125.1,4748-4766).
cttagctacctcttcatct

SEQ ID NO: 487156 - DNA, 19 bp, Mus musculus
  siRNA target sequence for Wdr9 (NM_145125.1,4857-4875).
ctcggggtgaccagaacaa

SEQ ID NO: 487157 - DNA, 19 bp, Mus musculus
  siRNA target sequence for Wdr9 (NM_145125.1,4934-4952).
cactcggaagagagtctat

SEQ ID NO: 487158 - DNA, 19 bp, Mus musculus
  siRNA target sequence for Wdr9 (NM_145125.1,4938-4956).
cggaagagagtctatttaa

SEQ ID NO: 487159 - DNA, 19 bp, Mus musculus
  siRNA target sequence for Wdr9 (NM_145125.1,4940-4958).
gaagagagtctatttaagt

SEQ ID NO: 487160 - DNA, 19 bp, Mus musculus
  siRNA target sequence for Wdr9 (NM_145125.1,5014-5032).
gaagtagccggaaagttct

SEQ ID NO: 487161 - DNA, 19 bp, Mus musculus
  siRNA target sequence for Wdr9 (NM_145125.1,5049-5067).
gttgctgccagcaagataa

SEQ ID NO: 487162 - DNA, 19 bp, Mus musculus
  siRNA target sequence for Wdr9 (NM_145125.1,5053-5071).
ctgccagcaagataaagct

SEQ ID NO: 487163 - DNA, 19 bp, Mus musculus
  siRNA target sequence for Wdr9 (NM_145125.1,5165-5183).
gctacacaactctgatgat

SEQ ID NO: 487164 - DNA, 19 bp, Mus musculus
  siRNA target sequence for Wdr9 (NM_145125.1,5178-5196).
gatgatcagagccttaagt

SEQ ID NO: 487165 - DNA, 19 bp, Mus musculus
  siRNA target sequence for Wdr9 (NM_145125.1,5307-5325).
cggaagacctggaatgcta

SEQ ID NO: 487166 - DNA, 19 bp, Mus musculus
  siRNA target sequence for Wdr9 (NM_145125.1,5362-5380).
ccaagtcacgtccaataga

SEQ ID NO: 487167 - DNA, 19 bp, Mus musculus
  siRNA target sequence for Wdr9 (NM_145125.1,5399-5417).
cagatgtcatggatctgat

SEQ ID NO: 487168 - DNA, 19 bp, Mus musculus
  siRNA target sequence for Wdr9 (NM_145125.1,5432-5450).
cactggggacccttcaaca

SEQ ID NO: 487169 - DNA, 19 bp, Mus musculus
  siRNA target sequence for Wdr9 (NM_145125.1,5510-5528).
cagtgtactatgcaagaat

SEQ ID NO: 487170 - DNA, 19 bp, Mus musculus
  siRNA target sequence for Wdr9 (NM_145125.1,5735-5753).
caatgaaaacggatctgta

SEQ ID NO: 487171 - DNA, 19 bp, Mus musculus
  siRNA target sequence for Wdr9 (NM_145125.1,5797-5815).
ccagtgacaaggaaagtaa

SEQ ID NO: 487172 - DNA, 19 bp, Mus musculus
  siRNA target sequence for Wdr9 (NM_145125.1,5800-5818).
gtgacaaggaaagtaatct

SEQ ID NO: 487173 - DNA, 19 bp, Mus musculus
  siRNA target sequence for Wdr9 (NM_145125.1,5854-5872).
gcccctcgaggattactca

SEQ ID NO: 487174 - DNA, 19 bp, Mus musculus
  siRNA target sequence for Wdr9 (NM_145125.1,5877-5895).
gctagtgtggctactgata

SEQ ID NO: 487175 - DNA, 19 bp, Mus musculus
  siRNA target sequence for Wdr9 (NM_145125.1,5878-5896).
ctagtgtggctactgataa

SEQ ID NO: 487176 - DNA, 19 bp, Mus musculus
  siRNA target sequence for Wdr9 (NM_145125.1,5881-5899).
gtgtggctactgataaaat

SEQ ID NO: 487177 - DNA, 19 bp, Mus musculus
  siRNA target sequence for Wdr9 (NM_145125.1,5940-5958).
gtgtgtactcgaagcaaaa

SEQ ID NO: 487178 - DNA, 19 bp, Mus musculus
  siRNA target sequence for Wdr9 (NM_145125.1,6145-6163).
gagggggttccagttttga

SEQ ID NO: 487179 - DNA, 19 bp, Mus musculus
  siRNA target sequence for Wdr9 (NM_145125.1,6206-6224).
cgtaaggccacctcctaaa

SEQ ID NO: 487180 - DNA, 19 bp, Mus musculus
  siRNA target sequence for Wdr9 (NM_145125.1,6207-6225).
gtaaggccacctcctaaaa

SEQ ID NO: 487181 - DNA, 19 bp, Mus musculus
  siRNA target sequence for Wdr9 (NM_145125.1,6268-6286).
gccaaaccctagatagtga

SEQ ID NO: 487182 - DNA, 19 bp, Mus musculus
  siRNA target sequence for Wdr9 (NM_145125.1,6297-6315).
ccttctgagtcggttttga

SEQ ID NO: 487183 - DNA, 19 bp, Mus musculus
  siRNA target sequence for Wdr9 (NM_145125.1,6314-6332).
gacccagaaagctactgta

SEQ ID NO: 487184 - DNA, 19 bp, Mus musculus
  siRNA target sequence for Wdr9 (NM_145125.1,6324-6342).
gctactgtagagagtaact

SEQ ID NO: 487185 - DNA, 19 bp, Mus musculus
  siRNA target sequence for Wdr9 (NM_145125.1,6354-6372).
ctgaactatggattaagaa

SEQ ID NO: 487186 - DNA, 19 bp, Mus musculus
  siRNA target sequence for Wdr9 (NM_145125.1,6416-6434).
cagtaggacagcacaagtt

SEQ ID NO: 487187 - DNA, 19 bp, Mus musculus
  siRNA target sequence for Wdr9 (NM_145125.1,6594-6612).
gttgactgtaccgataaca

SEQ ID NO: 487188 - DNA, 19 bp, Mus musculus
  siRNA target sequence for Wdr9 (NM_145125.1,6661-6679).
gcaaagaatctgttcgtaa

SEQ ID NO: 487189 - DNA, 19 bp, Mus musculus
  siRNA target sequence for Wdr9 (NM_145125.1,6662-6680).
caaagaatctgttcgtaaa

SEQ ID NO: 487190 - DNA, 19 bp, Mus musculus
  siRNA target sequence for Wdr9 (NM_145125.1,6681-6699).
gacagagaaccccatacaa

SEQ ID NO: 487191 - DNA, 19 bp, Mus musculus
  siRNA target sequence for Wdr9 (NM_145125.1,6709-6727).
catgtatgcttaatgagaa

SEQ ID NO: 487192 - DNA, 19 bp, Mus musculus
  siRNA target sequence for Wdr9 (NM_145125.1,6750-6768).
gacaccctgaaagcaaaaa

SEQ ID NO: 487193 - DNA, 19 bp, Mus musculus
  siRNA target sequence for Wdr9 (NM_145125.1,6798-6816).
gctaccgttgctgcaaata

SEQ ID NO: 487194 - DNA, 19 bp, Mus musculus
  siRNA target sequence for Wdr9 (NM_145125.1,6799-6817).
ctaccgttgctgcaaataa

SEQ ID NO: 487195 - DNA, 19 bp, Mus musculus
  siRNA target sequence for Wdr9 (NM_145125.1,6877-6895).
ggacgatcagcagaaaact

SEQ ID NO: 487196 - DNA, 19 bp, Mus musculus
  siRNA target sequence for Wdr9 (NM_145125.1,6919-6937).
cagctaagaaaaagttact

SEQ ID NO: 487197 - DNA, 19 bp, Mus musculus
  siRNA target sequence for Zc3hav1 (NM_028864.1,389-407).
gatcccgaggtattctgtt

SEQ ID NO: 487198 - DNA, 19 bp, Mus musculus
  siRNA target sequence for Zc3hav1 (NM_028864.1,392-410).
cccgaggtattctgtttca

SEQ ID NO: 487199 - DNA, 19 bp, Mus musculus
  siRNA target sequence for Zc3hav1 (NM_028864.1,519-537).
ccgatcgctttgtgctatt

SEQ ID NO: 487200 - DNA, 19 bp, Mus musculus
  siRNA target sequence for Zc3hav1 (NM_028864.1,568-586).
gtcggtggtggctactact

SEQ ID NO: 487201 - DNA, 19 bp, Mus musculus
  siRNA target sequence for Zc3hav1 (NM_028864.1,635-653).
ctgcacctttgcaagctta

SEQ ID NO: 487202 - DNA, 19 bp, Mus musculus
  siRNA target sequence for Zc3hav1 (NM_028864.1,689-707).
cggaacctctgcaaatatt

SEQ ID NO: 487203 - DNA, 19 bp, Mus musculus
  siRNA target sequence for Zc3hav1 (NM_028864.1,691-709).
gaacctctgcaaatattct

SEQ ID NO: 487204 - DNA, 19 bp, Mus musculus
  siRNA target sequence for Zc3hav1 (NM_028864.1,757-775).
gctctccgggcttaaccaa

SEQ ID NO: 487205 - DNA, 19 bp, Mus musculus
  siRNA target sequence for Zc3hav1 (NM_028864.1,800-818).
caaagcgaccctttcttca

SEQ ID NO: 487206 - DNA, 19 bp, Mus musculus
  siRNA target sequence for Zc3hav1 (NM_028864.1,821-839).
cctgagatatgcaagagtt

SEQ ID NO: 487207 - DNA, 19 bp, Mus musculus
  siRNA target sequence for Zc3hav1 (NM_028864.1,994-1012).
gcatgggctgagttctgat

SEQ ID NO: 487208 - DNA, 19 bp, Mus musculus
  siRNA target sequence for Zc3hav1 (NM_028864.1,1131-1149).
gagaccgcttccatcacaa

SEQ ID NO: 487209 - DNA, 19 bp, Mus musculus
  siRNA target sequence for Zc3hav1 (NM_028864.1,1245-1263).
cagatgtcacccagaagtt

SEQ ID NO: 487210 - DNA, 19 bp, Mus musculus
  siRNA target sequence for Zc3hav1 (NM_028864.1,1250-1268).
gtcacccagaagttcaagt

SEQ ID NO: 487211 - DNA, 19 bp, Mus musculus
  siRNA target sequence for Zc3hav1 (NM_028864.1,1295-1313).
ctttcctccgtctcatcta

SEQ ID NO: 487212 - DNA, 19 bp, Mus musculus
  siRNA target sequence for Zc3hav1 (NM_028864.1,1448-1466).
ctcgttgcggcacaaagaa

SEQ ID NO: 487213 - DNA, 19 bp, Mus musculus
  siRNA target sequence for Zc3hav1 (NM_028864.1,1450-1468).
cgttgcggcacaaagaaat

SEQ ID NO: 487214 - DNA, 19 bp, Mus musculus
  siRNA target sequence for Zc3hav1 (NM_028864.1,1541-1559).
gatcgcgtcccgtttttaa

SEQ ID NO: 487215 - DNA, 19 bp, Mus musculus
  siRNA target sequence for Zc3hav1 (NM_028864.1,1544-1562).
cgcgtcccgtttttaaata

SEQ ID NO: 487216 - DNA, 19 bp, Mus musculus
  siRNA target sequence for Zc3hav1 (NM_028864.1,1546-1564).
cgtcccgtttttaaatagt

SEQ ID NO: 487217 - DNA, 19 bp, Mus musculus
  siRNA target sequence for Zc3hav1 (NM_028864.1,1547-1565).
gtcccgtttttaaatagtt

SEQ ID NO: 487218 - DNA, 19 bp, Mus musculus
  siRNA target sequence for Zc3hav1 (NM_028864.1,1549-1567).
cccgtttttaaatagttat

SEQ ID NO: 487219 - DNA, 19 bp, Mus musculus
  siRNA target sequence for Zc3hav1 (NM_028864.1,1550-1568).
ccgtttttaaatagttata

SEQ ID NO: 487220 - DNA, 19 bp, Mus musculus
  siRNA target sequence for Zc3hav1 (NM_028864.1,1628-1646).
gacaacggtctggaagaaa

SEQ ID NO: 487221 - DNA, 19 bp, Mus musculus
  siRNA target sequence for Zc3hav1 (NM_028864.1,1633-1651).
cggtctggaagaaatgata

SEQ ID NO: 487222 - DNA, 19 bp, Mus musculus
  siRNA target sequence for Zc3hav1 (NM_028864.1,1734-1752).
cggcattcctgcatagtaa

SEQ ID NO: 487223 - DNA, 19 bp, Mus musculus
  siRNA target sequence for Zc3hav1 (NM_028864.1,1735-1753).
ggcattcctgcatagtaaa

SEQ ID NO: 487224 - DNA, 19 bp, Mus musculus
  siRNA target sequence for Zc3hav1 (NM_028864.1,1736-1754).
gcattcctgcatagtaaat

SEQ ID NO: 487225 - DNA, 19 bp, Mus musculus
  siRNA target sequence for Zc3hav1 (NM_028864.1,1737-1755).
cattcctgcatagtaaata

SEQ ID NO: 487226 - DNA, 19 bp, Mus musculus
  siRNA target sequence for Zc3hav1 (NM_028864.1,1795-1813).
cggcccaaatggctttagt

SEQ ID NO: 487227 - DNA, 19 bp, Mus musculus
  siRNA target sequence for Zc3hav1 (NM_028864.1,1807-1825).
ctttagtcaaattatggat

SEQ ID NO: 487228 - DNA, 19 bp, Mus musculus
  siRNA target sequence for Zc3hav1 (NM_028864.1,1823-1841).
gatgaaacgcctaatgtct

SEQ ID NO: 487229 - DNA, 19 bp, Mus musculus
  siRNA target sequence for Zc3hav1 (NM_028864.1,1831-1849).
gcctaatgtctctaaaagt

SEQ ID NO: 487230 - DNA, 19 bp, Mus musculus
  siRNA target sequence for Zc3hav1 (NM_028864.1,1832-1850).
cctaatgtctctaaaagta

SEQ ID NO: 487231 - DNA, 19 bp, Mus musculus
  siRNA target sequence for Zc3hav1 (NM_028864.1,1854-1872).
ccactggttttggcataaa

SEQ ID NO: 487232 - DNA, 19 bp, Mus musculus
  siRNA target sequence for Zc3hav1 (NM_028864.1,1855-1873).
cactggttttggcataaaa

SEQ ID NO: 487233 - DNA, 19 bp, Mus musculus
  siRNA target sequence for Zc3hav1 (NM_028864.1,2084-2102).
gagccctcgaggatgatga

SEQ ID NO: 487234 - DNA, 19 bp, Mus musculus
  siRNA target sequence for Zc3hav1 (NM_028864.1,2261-2279).
cggtggcagctgttcatat

SEQ ID NO: 487235 - DNA, 19 bp, Mus musculus
  siRNA target sequence for Zc3hav1 (NM_028864.1,2283-2301).
ccacttggatggactttca

SEQ ID NO: 487236 - DNA, 19 bp, Mus musculus
  siRNA target sequence for Zc3hav1 (NM_028864.1,2331-2349).
gtgatccccaaattgaaat

SEQ ID NO: 487237 - DNA, 19 bp, Mus musculus
  siRNA target sequence for Zc3hav1 (NM_028864.1,2360-2378).
gaaaaacatcggatcaatt

SEQ ID NO: 487238 - DNA, 19 bp, Mus musculus
  siRNA target sequence for Zc3hav1 (NM_028864.1,2369-2387).
cggatcaatttcaagaaaa

SEQ ID NO: 487239 - DNA, 19 bp, Mus musculus
  siRNA target sequence for Zc3hav1 (NM_028864.1,2437-2455).
cgaaaaaacacttaattct

SEQ ID NO: 487240 - DNA, 19 bp, Mus musculus
  siRNA target sequence for Zc3hav1 (NM_028864.1,2463-2481).
ccaccaagtggctttggta

SEQ ID NO: 487241 - DNA, 19 bp, Mus musculus
  siRNA target sequence for Zc3hav1 (NM_028864.1,2464-2482).
caccaagtggctttggtat

SEQ ID NO: 487242 - DNA, 19 bp, Mus musculus
  siRNA target sequence for Zc3hav1 (NM_028864.1,2533-2551).
ccataccagctccgaaatt

SEQ ID NO: 487243 - DNA, 19 bp, Mus musculus
  siRNA target sequence for Zc3hav1 (NM_028864.1,2539-2557).
cagctccgaaattaattct

SEQ ID NO: 487244 - DNA, 19 bp, Mus musculus
  siRNA target sequence for Zc3hav1 (NM_028864.1,2556-2574).
ctgcatacctggagtcttt

SEQ ID NO: 487245 - DNA, 19 bp, Mus musculus
  siRNA target sequence for Zc3hav1 (NM_028864.1,2586-2604).
gtcccaggggagttttgca

SEQ ID NO: 487246 - DNA, 19 bp, Mus musculus
  siRNA target sequence for Zc3hav1 (NM_028864.1,2608-2626).
ccacgctggttcacagaat

SEQ ID NO: 487247 - DNA, 19 bp, Mus musculus
  siRNA target sequence for Zc3hav1 (NM_028864.1,2609-2627).
cacgctggttcacagaatt

SEQ ID NO: 487248 - DNA, 19 bp, Mus musculus
  siRNA target sequence for Zc3hav1 (NM_028864.1,2621-2639).
cagaattacgagttaagct

SEQ ID NO: 487249 - DNA, 19 bp, Mus musculus
  siRNA target sequence for Zc3hav1 (NM_028864.1,2637-2655).
gctttcaagggatgattca

SEQ ID NO: 487250 - DNA, 19 bp, Mus musculus
  siRNA target sequence for Zc3hav1 (NM_028864.1,2645-2663).
gggatgattcagacgaata

SEQ ID NO: 487251 - DNA, 19 bp, Mus musculus
  siRNA target sequence for Zc3hdc1 (NM_172893.1,555-573).
gtaggaatggtcacaactt

SEQ ID NO: 487252 - DNA, 19 bp, Mus musculus
  siRNA target sequence for Zc3hdc1 (NM_172893.1,558-576).
ggaatggtcacaacttgaa

SEQ ID NO: 487253 - DNA, 19 bp, Mus musculus
  siRNA target sequence for Zc3hdc1 (NM_172893.1,643-661).
ccaactcttgcttcagaat

SEQ ID NO: 487254 - DNA, 19 bp, Mus musculus
  siRNA target sequence for Zc3hdc1 (NM_172893.1,678-696).
cagatatatgcctacacta

SEQ ID NO: 487255 - DNA, 19 bp, Mus musculus
  siRNA target sequence for Zc3hdc1 (NM_172893.1,814-832).
ccatgagttcactaactct

SEQ ID NO: 487256 - DNA, 19 bp, Mus musculus
  siRNA target sequence for Zc3hdc1 (NM_172893.1,894-912).
ctacttaccggaatgcata

SEQ ID NO: 487257 - DNA, 19 bp, Mus musculus
  siRNA target sequence for Zc3hdc1 (NM_172893.1,897-915).
cttaccggaatgcatatga

SEQ ID NO: 487258 - DNA, 19 bp, Mus musculus
  siRNA target sequence for Zc3hdc1 (NM_172893.1,903-921).
ggaatgcatatgacatcaa

SEQ ID NO: 487259 - DNA, 19 bp, Mus musculus
  siRNA target sequence for Zc3hdc1 (NM_172893.1,908-926).
gcatatgacatcaagaata

SEQ ID NO: 487260 - DNA, 19 bp, Mus musculus
  siRNA target sequence for Zc3hdc1 (NM_172893.1,968-986).
ccacaggggagttctgaaa

SEQ ID NO: 487261 - DNA, 19 bp, Mus musculus
  siRNA target sequence for Zc3hdc1 (NM_172893.1,1043-1061).
cagatttgcttgtaccata

SEQ ID NO: 487262 - DNA, 19 bp, Mus musculus
  siRNA target sequence for Zc3hdc1 (NM_172893.1,1058-1076).
catattcggaagagttgta

SEQ ID NO: 487263 - DNA, 19 bp, Mus musculus
  siRNA target sequence for Zc3hdc1 (NM_172893.1,1092-1110).
gccatcgagttcattttca

SEQ ID NO: 487264 - DNA, 19 bp, Mus musculus
  siRNA target sequence for Zc3hdc1 (NM_172893.1,1093-1111).
ccatcgagttcattttcat

SEQ ID NO: 487265 - DNA, 19 bp, Mus musculus
  siRNA target sequence for Zc3hdc1 (NM_172893.1,1115-1133).
ccatatcggtggcaattct

SEQ ID NO: 487266 - DNA, 19 bp, Mus musculus
  siRNA target sequence for Zc3hdc1 (NM_172893.1,1233-1251).
ctggctttcactttgataa

SEQ ID NO: 487267 - DNA, 19 bp, Mus musculus
  siRNA target sequence for Zc3hdc1 (NM_172893.1,1235-1253).
ggctttcactttgataatt

SEQ ID NO: 487268 - DNA, 19 bp, Mus musculus
  siRNA target sequence for Zc3hdc1 (NM_172893.1,1237-1255).
ctttcactttgataattta

SEQ ID NO: 487269 - DNA, 19 bp, Mus musculus
  siRNA target sequence for Zc3hdc1 (NM_172893.1,1243-1261).
ctttgataatttagacttt

SEQ ID NO: 487270 - DNA, 19 bp, Mus musculus
  siRNA target sequence for Zc3hdc1 (NM_172893.1,1256-1274).
gactttaattccatgaagt

SEQ ID NO: 487271 - DNA, 19 bp, Mus musculus
  siRNA target sequence for Zc3hdc1 (NM_172893.1,1267-1285).
catgaagtttggtaatact

SEQ ID NO: 487272 - DNA, 19 bp, Mus musculus
  siRNA target sequence for Zc3hdc1 (NM_172893.1,1325-1343).
cccccacatttcatcctta

SEQ ID NO: 487273 - DNA, 19 bp, Mus musculus
  siRNA target sequence for Zc3hdc1 (NM_172893.1,1340-1358).
cttactactgactggattt

SEQ ID NO: 487274 - DNA, 19 bp, Mus musculus
  siRNA target sequence for Zc3hdc1 (NM_172893.1,1359-1377).
ggtactggatggatgagtt

SEQ ID NO: 487275 - DNA, 19 bp, Mus musculus
  siRNA target sequence for Zc3hdc1 (NM_172893.1,1517-1535).
ggaaaacacaactatgagt

SEQ ID NO: 487276 - DNA, 19 bp, Mus musculus
  siRNA target sequence for Zc3hdc1 (NM_172893.1,1523-1541).
cacaactatgagttacact

SEQ ID NO: 487277 - DNA, 19 bp, Mus musculus
  siRNA target sequence for Zc3hdc1 (NM_172893.1,1528-1546).
ctatgagttacacttcaaa

SEQ ID NO: 487278 - DNA, 19 bp, Mus musculus
  siRNA target sequence for Zc3hdc1 (NM_172893.1,1532-1550).
gagttacacttcaaagctt

SEQ ID NO: 487279 - DNA, 19 bp, Mus musculus
  siRNA target sequence for Zc3hdc1 (NM_172893.1,1593-1611).
gtcgcagacccaagtatgt

SEQ ID NO: 487280 - DNA, 19 bp, Mus musculus
  siRNA target sequence for Zc3hdc1 (NM_172893.1,1595-1613).
cgcagacccaagtatgtgt

SEQ ID NO: 487281 - DNA, 19 bp, Mus musculus
  siRNA target sequence for Zc3hdc1 (NM_172893.1,1639-1657).
gtcctgcaatactaagtta

SEQ ID NO: 487282 - DNA, 19 bp, Mus musculus
  siRNA target sequence for Zc3hdc1 (NM_172893.1,1641-1659).
cctgcaatactaagttaca

SEQ ID NO: 487283 - DNA, 19 bp, Mus musculus
  siRNA target sequence for Zc3hdc1 (NM_172893.1,1700-1718).
ctgcctgacctgggattta

SEQ ID NO: 487284 - DNA, 19 bp, Mus musculus
  siRNA target sequence for Zc3hdc1 (NM_172893.1,1768-1786).
catcttcaaccgtacacta

SEQ ID NO: 487285 - DNA, 19 bp, Mus musculus
  siRNA target sequence for Zc3hdc1 (NM_172893.1,1778-1796).
cgtacactacctttctact

SEQ ID NO: 487286 - DNA, 19 bp, Mus musculus
  siRNA target sequence for Zc3hdc1 (NM_172893.1,1779-1797).
gtacactacctttctactt

SEQ ID NO: 487287 - DNA, 19 bp, Mus musculus
  siRNA target sequence for Zc3hdc1 (NM_172893.1,1841-1859).
gtctaccagtggcaaaaat

SEQ ID NO: 487288 - DNA, 19 bp, Mus musculus
  siRNA target sequence for Zc3hdc1 (NM_172893.1,1906-1924).
gctgtttcatggtactagt

SEQ ID NO: 487289 - DNA, 19 bp, Mus musculus
  siRNA target sequence for Zc3hdc1 (NM_172893.1,2085-2103).
gggtgctggtcggagattt

SEQ ID NO: 487290 - DNA, 19 bp, Mus musculus
  siRNA target sequence for Zc3hdc1 (NM_172893.1,2188-2206).
gtccgacccaaccatcttt

SEQ ID NO: 487291 - DNA, 19 bp, Mus musculus
  siRNA target sequence for Zc3hdc1 (NM_172893.1,2190-2208).
ccgacccaaccatctttgt

SEQ ID NO: 487292 - DNA, 19 bp, Mus musculus
  siRNA target sequence for Zc3hdc1 (NM_172893.1,2191-2209).
cgacccaaccatctttgta

SEQ ID NO: 487293 - DNA, 19 bp, Mus musculus
  siRNA target sequence for Zc3hdc1 (NM_172893.1,2195-2213).
ccaaccatctttgtagttt

SEQ ID NO: 487294 - DNA, 19 bp, Mus musculus
  siRNA target sequence for Zc3hdc1 (NM_172893.1,2233-2251).
ccccgagtacctcattcaa

SEQ ID NO: 487295 - DNA, 19 bp, Mus musculus
  siRNA target sequence for Zc3hdc1 (NM_172893.1,2234-2252).
cccgagtacctcattcaat

SEQ ID NO: 487296 - DNA, 19 bp, Mus musculus
  siRNA target sequence for Zc3hdc1 (NM_172893.1,2235-2253).
ccgagtacctcattcaata

SEQ ID NO: 487297 - DNA, 19 bp, Mus musculus
  siRNA target sequence for Zc3hdc1 (NM_172893.1,2239-2257).
gtacctcattcaatactct

SEQ ID NO: 487298 - DNA, 19 bp, Mus musculus
  siRNA target sequence for Zc3hdc1 (NM_172893.1,2294-2312).
gttgccctaggtaacttgt

SEQ ID NO: 487299 - DNA, 19 bp, Mus musculus
  siRNA target sequence for Zc3hdc1 (NM_172893.1,2300-2318).
ctaggtaacttgttcacta

SEQ ID NO: 487300 - DNA, 19 bp, Mus musculus
  siRNA target sequence for Zfp101 (NM_009542.1,258-276).
gttgaagaggactaccaaa

SEQ ID NO: 487301 - DNA, 19 bp, Mus musculus
  siRNA target sequence for Zfp101 (NM_009542.1,321-339).
ggttgtcaatgtgaacaaa

SEQ ID NO: 487302 - DNA, 19 bp, Mus musculus
  siRNA target sequence for Zfp101 (NM_009542.1,345-363).
gcacagagtccggagtata

SEQ ID NO: 487303 - DNA, 19 bp, Mus musculus
  siRNA target sequence for Zfp101 (NM_009542.1,346-364).
cacagagtccggagtatat

SEQ ID NO: 487304 - DNA, 19 bp, Mus musculus
  siRNA target sequence for Zfp101 (NM_009542.1,352-370).
gtccggagtatattgttaa

SEQ ID NO: 487305 - DNA, 19 bp, Mus musculus
  siRNA target sequence for Zfp101 (NM_009542.1,355-373).
cggagtatattgttaatga

SEQ ID NO: 487306 - DNA, 19 bp, Mus musculus
  siRNA target sequence for Zfp101 (NM_009542.1,397-415).
gatgtggaagcagtttgta

SEQ ID NO: 487307 - DNA, 19 bp, Mus musculus
  siRNA target sequence for Zfp101 (NM_009542.1,419-437).
gagaaacgtcattggtaat

SEQ ID NO: 487308 - DNA, 19 bp, Mus musculus
  siRNA target sequence for Zfp101 (NM_009542.1,455-473).
cctcagtggtcaaactcaa

SEQ ID NO: 487309 - DNA, 19 bp, Mus musculus
  siRNA target sequence for Zfp101 (NM_009542.1,533-551).
ggaagatatgggtcattct

SEQ ID NO: 487310 - DNA, 19 bp, Mus musculus
  siRNA target sequence for Zfp101 (NM_009542.1,534-552).
gaagatatgggtcattcta

SEQ ID NO: 487311 - DNA, 19 bp, Mus musculus
  siRNA target sequence for Zfp101 (NM_009542.1,544-562).
gtcattctaaggcatttca

SEQ ID NO: 487312 - DNA, 19 bp, Mus musculus
  siRNA target sequence for Zfp101 (NM_009542.1,570-588).
ggaagttctcgagagaaat

SEQ ID NO: 487313 - DNA, 19 bp, Mus musculus
  siRNA target sequence for Zfp101 (NM_009542.1,678-696).
gagaatacctttatgaagt

SEQ ID NO: 487314 - DNA, 19 bp, Mus musculus
  siRNA target sequence for Zfp101 (NM_009542.1,703-721).
ctgaccagatcgatgaaaa

SEQ ID NO: 487315 - DNA, 19 bp, Mus musculus
  siRNA target sequence for Zfp101 (NM_009542.1,730-748).
gtgaagtaaagccatttgt

SEQ ID NO: 487316 - DNA, 19 bp, Mus musculus
  siRNA target sequence for Zfp101 (NM_009542.1,1030-1048).
ccagtgtccataatgttca

SEQ ID NO: 487317 - DNA, 19 bp, Mus musculus
  siRNA target sequence for Zfp101 (NM_009542.1,1031-1049).
cagtgtccataatgttcat

SEQ ID NO: 487318 - DNA, 19 bp, Mus musculus
  siRNA target sequence for Zfp101 (NM_009542.1,1033-1051).
gtgtccataatgttcatga

SEQ ID NO: 487319 - DNA, 19 bp, Mus musculus
  siRNA target sequence for Zfp101 (NM_009542.1,1062-1080).
gatggagacaagccatatt

SEQ ID NO: 487320 - DNA, 19 bp, Mus musculus
  siRNA target sequence for Zfp101 (NM_009542.1,1065-1083).
ggagacaagccatattcat

SEQ ID NO: 487321 - DNA, 19 bp, Mus musculus
  siRNA target sequence for Zfp101 (NM_009542.1,1074-1092).
ccatattcatgcacacatt

SEQ ID NO: 487322 - DNA, 19 bp, Mus musculus
  siRNA target sequence for Zfp101 (NM_009542.1,1108-1126).
ctagtcccagtgactataa

SEQ ID NO: 487323 - DNA, 19 bp, Mus musculus
  siRNA target sequence for Zfp101 (NM_009542.1,1115-1133).
cagtgactataatagttgt

SEQ ID NO: 487324 - DNA, 19 bp, Mus musculus
  siRNA target sequence for Zfp101 (NM_009542.1,1194-1212).
cgtttggggcattttatga

SEQ ID NO: 487325 - DNA, 19 bp, Mus musculus
  siRNA target sequence for Zfp101 (NM_009542.1,1195-1213).
gtttggggcattttatgaa

SEQ ID NO: 487326 - DNA, 19 bp, Mus musculus
  siRNA target sequence for Zfp101 (NM_009542.1,1355-1373).
cttcagtcgttctgattat

SEQ ID NO: 487327 - DNA, 19 bp, Mus musculus
  siRNA target sequence for Zfp101 (NM_009542.1,1358-1376).
cagtcgttctgattatctt

SEQ ID NO: 487328 - DNA, 19 bp, Mus musculus
  siRNA target sequence for Zfp101 (NM_009542.1,1360-1378).
gtcgttctgattatcttat

SEQ ID NO: 487329 - DNA, 19 bp, Mus musculus
  siRNA target sequence for Zfp101 (NM_009542.1,1366-1384).
ctgattatcttatcaatca

SEQ ID NO: 487330 - DNA, 19 bp, Mus musculus
  siRNA target sequence for Zfp101 (NM_009542.1,1368-1386).
gattatcttatcaatcata

SEQ ID NO: 487331 - DNA, 19 bp, Mus musculus
  siRNA target sequence for Zfp101 (NM_009542.1,1410-1428).
ccttatccgtgtaagtatt

SEQ ID NO: 487332 - DNA, 19 bp, Mus musculus
  siRNA target sequence for Zfp101 (NM_009542.1,1513-1531).
gtgggaaagtgttcattct

SEQ ID NO: 487333 - DNA, 19 bp, Mus musculus
  siRNA target sequence for Zfp101 (NM_009542.1,1526-1544).
cattctttctggtgatcta

SEQ ID NO: 487334 - DNA, 19 bp, Mus musculus
  siRNA target sequence for Zfp101 (NM_009542.1,1745-1763).
gcattttgcgtgtaacctt

SEQ ID NO: 487335 - DNA, 19 bp, Mus musculus
  siRNA target sequence for Zfp101 (NM_009542.1,1873-1891).
gtggtaatttccttaagca

SEQ ID NO: 487336 - DNA, 19 bp, Mus musculus
  siRNA target sequence for Zfp101 (NM_009542.1,1907-1925).
catggaaacattatccata

SEQ ID NO: 487337 - DNA, 19 bp, Mus musculus
  siRNA target sequence for Zfp108 (NM_018791.1,521-539).
cagcaaccattctggtatt

SEQ ID NO: 487338 - DNA, 19 bp, Mus musculus
  siRNA target sequence for Zfp108 (NM_018791.1,527-545).
ccattctggtattactgaa

SEQ ID NO: 487339 - DNA, 19 bp, Mus musculus
  siRNA target sequence for Zfp108 (NM_018791.1,573-591).
caaagctcttcgagtaaat

SEQ ID NO: 487340 - DNA, 19 bp, Mus musculus
  siRNA target sequence for Zfp108 (NM_018791.1,609-627).
catgaccaatggaaacact

SEQ ID NO: 487341 - DNA, 19 bp, Mus musculus
  siRNA target sequence for Zfp108 (NM_018791.1,762-780).
gtcatcaatcccatgtcat

SEQ ID NO: 487342 - DNA, 19 bp, Mus musculus
  siRNA target sequence for Zfp108 (NM_018791.1,781-799).
ccctcacccaggattgtga

SEQ ID NO: 487343 - DNA, 19 bp, Mus musculus
  siRNA target sequence for Zfp108 (NM_018791.1,788-806).
ccaggattgtgattacaca

SEQ ID NO: 487344 - DNA, 19 bp, Mus musculus
  siRNA target sequence for Zfp108 (NM_018791.1,1601-1619).
cacctggagccttcacaat

SEQ ID NO: 487345 - DNA, 19 bp, Mus musculus
  siRNA target sequence for Zfp108 (NM_018791.1,2028-2046).
cacttccacacacatttga

SEQ ID NO: 487346 - DNA, 19 bp, Mus musculus
  siRNA target sequence for Zfp111 (NM_019940.1,294-312).
gggagaaacaagccataat

SEQ ID NO: 487347 - DNA, 19 bp, Mus musculus
  siRNA target sequence for Zfp111 (NM_019940.1,296-314).
gagaaacaagccataatat

SEQ ID NO: 487348 - DNA, 19 bp, Mus musculus
  siRNA target sequence for Zfp111 (NM_019940.1,302-320).
caagccataatatcaacaa

SEQ ID NO: 487349 - DNA, 19 bp, Mus musculus
  siRNA target sequence for Zfp111 (NM_019940.1,334-352).
ctagaagctgtaatcaaca

SEQ ID NO: 487350 - DNA, 19 bp, Mus musculus
  siRNA target sequence for Zfp111 (NM_019940.1,348-366).
caacactcagggaaagtgt

SEQ ID NO: 487351 - DNA, 19 bp, Mus musculus
  siRNA target sequence for Zfp111 (NM_019940.1,359-377).
gaaagtgttctcactcatt

SEQ ID NO: 487352 - DNA, 19 bp, Mus musculus
  siRNA target sequence for Zfp111 (NM_019940.1,513-531).
gggttcttggggtaaaaga

SEQ ID NO: 487353 - DNA, 19 bp, Mus musculus
  siRNA target sequence for Zfp111 (NM_019940.1,524-542).
gtaaaagacgtcttaggaa

SEQ ID NO: 487354 - DNA, 19 bp, Mus musculus
  siRNA target sequence for Zfp111 (NM_019940.1,609-627).
gcattctcctgtacatagt

SEQ ID NO: 487355 - DNA, 19 bp, Mus musculus
  siRNA target sequence for Zfp111 (NM_019940.1,610-628).
cattctcctgtacatagta

SEQ ID NO: 487356 - DNA, 19 bp, Mus musculus
  siRNA target sequence for Zfp111 (NM_019940.1,651-669).
cttcagtgtgccagttcaa

SEQ ID NO: 487357 - DNA, 19 bp, Mus musculus
  siRNA target sequence for Zfp111 (NM_019940.1,916-934).
gctcacaagaggattcaca

SEQ ID NO: 487358 - DNA, 19 bp, Mus musculus
  siRNA target sequence for Zfp111 (NM_019940.1,978-996).
cagctgtatctcgaacttt

SEQ ID NO: 487359 - DNA, 19 bp, Mus musculus
  siRNA target sequence for Zfp111 (NM_019940.1,980-998).
gctgtatctcgaactttca

SEQ ID NO: 487360 - DNA, 19 bp, Mus musculus
  siRNA target sequence for Zfp111 (NM_019940.1,983-1001).
gtatctcgaactttcacat

SEQ ID NO: 487361 - DNA, 19 bp, Mus musculus
  siRNA target sequence for Zfp111 (NM_019940.1,1222-1240).
ggcttcagtcggacttcat

SEQ ID NO: 487362 - DNA, 19 bp, Mus musculus
  siRNA target sequence for Zfp111 (NM_019940.1,1223-1241).
gcttcagtcggacttcata

SEQ ID NO: 487363 - DNA, 19 bp, Mus musculus
  siRNA target sequence for Zfp111 (NM_019940.1,1227-1245).
cagtcggacttcatacctt

SEQ ID NO: 487364 - DNA, 19 bp, Mus musculus
  siRNA target sequence for Zfp111 (NM_019940.1,1352-1370).
cagatcagaagccatataa

SEQ ID NO: 487365 - DNA, 19 bp, Mus musculus
  siRNA target sequence for Zfp111 (NM_019940.1,1734-1752).
cttgaattccgggcttatt

SEQ ID NO: 487366 - DNA, 19 bp, Mus musculus
  siRNA target sequence for Zfp111 (NM_019940.1,1737-1755).
gaattccgggcttattgct

SEQ ID NO: 487367 - DNA, 19 bp, Mus musculus
  siRNA target sequence for Zfp111 (NM_019940.1,1994-2012).
ctgggctccaagtccataa

SEQ ID NO: 487368 - DNA, 19 bp, Mus musculus
  siRNA target sequence for Zfp111 (NM_019940.1,2089-2107).
gctcaccggaaggttcata

SEQ ID NO: 487369 - DNA, 19 bp, Mus musculus
  siRNA target sequence for Zfp112 (NM_021307.1,272-290).
ggcacatcagcccttcaaa

SEQ ID NO: 487370 - DNA, 19 bp, Mus musculus
  siRNA target sequence for Zfp112 (NM_021307.1,284-302).
cttcaaaccgggtctgata

SEQ ID NO: 487371 - DNA, 19 bp, Mus musculus
  siRNA target sequence for Zfp112 (NM_021307.1,461-479).
gtggggtgcatgcacatta

SEQ ID NO: 487372 - DNA, 19 bp, Mus musculus
  siRNA target sequence for Zfp112 (NM_021307.1,484-502).
gtggtcaagagttcataaa

SEQ ID NO: 487373 - DNA, 19 bp, Mus musculus
  siRNA target sequence for Zfp112 (NM_021307.1,567-585).
ggaatgcccatgcagattt

SEQ ID NO: 487374 - DNA, 19 bp, Mus musculus
  siRNA target sequence for Zfp112 (NM_021307.1,624-642).
gactctgcttctatgaaaa

SEQ ID NO: 487375 - DNA, 19 bp, Mus musculus
  siRNA target sequence for Zfp112 (NM_021307.1,626-644).
ctctgcttctatgaaaaat

SEQ ID NO: 487376 - DNA, 19 bp, Mus musculus
  siRNA target sequence for Zfp112 (NM_021307.1,628-646).
ctgcttctatgaaaaatca

SEQ ID NO: 487377 - DNA, 19 bp, Mus musculus
  siRNA target sequence for Zfp112 (NM_021307.1,674-692).
gtctcagggggaaccatat

SEQ ID NO: 487378 - DNA, 19 bp, Mus musculus
  siRNA target sequence for Zfp112 (NM_021307.1,726-744).
ggtcagcaaacatccataa

SEQ ID NO: 487379 - DNA, 19 bp, Mus musculus
  siRNA target sequence for Zfp112 (NM_021307.1,782-800).
cccctaccacagtgacaat

SEQ ID NO: 487380 - DNA, 19 bp, Mus musculus
  siRNA target sequence for Zfp112 (NM_021307.1,806-824).
gctatacagcaaaggaaaa

SEQ ID NO: 487381 - DNA, 19 bp, Mus musculus
  siRNA target sequence for Zfp112 (NM_021307.1,807-825).
ctatacagcaaaggaaaaa

SEQ ID NO: 487382 - DNA, 19 bp, Mus musculus
  siRNA target sequence for Zfp112 (NM_021307.1,849-867).
ggaaagacggtgaaggtat

SEQ ID NO: 487383 - DNA, 19 bp, Mus musculus
  siRNA target sequence for Zfp112 (NM_021307.1,856-874).
cggtgaaggtattattact

SEQ ID NO: 487384 - DNA, 19 bp, Mus musculus
  siRNA target sequence for Zfp112 (NM_021307.1,860-878).
gaaggtattattacttaat

SEQ ID NO: 487385 - DNA, 19 bp, Mus musculus
  siRNA target sequence for Zfp112 (NM_021307.1,1111-1129).
cttctccaagagtgtgtat

SEQ ID NO: 487386 - DNA, 19 bp, Mus musculus
  siRNA target sequence for Zfp112 (NM_021307.1,1155-1173).
gggaatgtccactatggtt

SEQ ID NO: 487387 - DNA, 19 bp, Mus musculus
  siRNA target sequence for Zfp112 (NM_021307.1,1254-1272).
cctgtccactgcaatagta

SEQ ID NO: 487388 - DNA, 19 bp, Mus musculus
  siRNA target sequence for Zfp112 (NM_021307.1,1292-1310).
ggaagagcccaataattat

SEQ ID NO: 487389 - DNA, 19 bp, Mus musculus
  siRNA target sequence for Zfp112 (NM_021307.1,1337-1355).
gagttcatgtcttcaagtt

SEQ ID NO: 487390 - DNA, 19 bp, Mus musculus
  siRNA target sequence for Zfp112 (NM_021307.1,1400-1418).
gtgtagaaaaaatttcaca

SEQ ID NO: 487391 - DNA, 19 bp, Mus musculus
  siRNA target sequence for Zfp112 (NM_021307.1,1483-1501).
gtggtaaccacttcagttt

SEQ ID NO: 487392 - DNA, 19 bp, Mus musculus
  siRNA target sequence for Zfp112 (NM_021307.1,1542-1560).
gaacaaccacacaatcgtt

SEQ ID NO: 487393 - DNA, 19 bp, Mus musculus
  siRNA target sequence for Zfp112 (NM_021307.1,1566-1584).
cgtacaggcttcagtcaaa

SEQ ID NO: 487394 - DNA, 19 bp, Mus musculus
  siRNA target sequence for Zfp112 (NM_021307.1,1572-1590).
ggcttcagtcaaactttgt

SEQ ID NO: 487395 - DNA, 19 bp, Mus musculus
  siRNA target sequence for Zfp112 (NM_021307.1,1620-1638).
cgagaaaagccttctcata

SEQ ID NO: 487396 - DNA, 19 bp, Mus musculus
  siRNA target sequence for Zfp112 (NM_021307.1,1673-1691).
ccccaaggatcctcagaaa

SEQ ID NO: 487397 - DNA, 19 bp, Mus musculus
  siRNA target sequence for Zfp112 (NM_021307.1,1738-1756).
gatcagttctggacattca

SEQ ID NO: 487398 - DNA, 19 bp, Mus musculus
  siRNA target sequence for Zfp112 (NM_021307.1,1977-1995).
ggcttcagctggagcttta

SEQ ID NO: 487399 - DNA, 19 bp, Mus musculus
  siRNA target sequence for Zfp112 (NM_021307.1,1990-2008).
gctttaaccttcaaatcca

SEQ ID NO: 487400 - DNA, 19 bp, Mus musculus
  siRNA target sequence for Zfp112 (NM_021307.1,1991-2009).
ctttaaccttcaaatccat

SEQ ID NO: 487401 - DNA, 19 bp, Mus musculus
  siRNA target sequence for Zfp112 (NM_021307.1,2236-2254).
gtcagagagcatatctaca

SEQ ID NO: 487402 - DNA, 19 bp, Mus musculus
  siRNA target sequence for Zfp112 (NM_021307.1,2359-2377).
cagggcgaaaaccattcaa

SEQ ID NO: 487403 - DNA, 19 bp, Mus musculus
  siRNA target sequence for Zfp112 (NM_021307.1,2361-2379).
gggcgaaaaccattcaaat

SEQ ID NO: 487404 - DNA, 19 bp, Mus musculus
  siRNA target sequence for Zfp112 (NM_021307.1,2387-2405).
ctgcacaaagggattcagt

SEQ ID NO: 487405 - DNA, 19 bp, Mus musculus
  siRNA target sequence for Zfp112 (NM_021307.1,2659-2677).
ggagctcaggccttctgat

SEQ ID NO: 487406 - DNA, 19 bp, Mus musculus
  siRNA target sequence for Zfp112 (NM_021307.1,2667-2685).
ggccttctgatccatcaaa

SEQ ID NO: 487407 - DNA, 19 bp, Mus musculus
  siRNA target sequence for Zfp118 (NM_013843.2,333-351).
gacaggaggcagtagctaa

SEQ ID NO: 487408 - DNA, 19 bp, Mus musculus
  siRNA target sequence for Zfp118 (NM_013843.2,425-443).
gctggttctccattaatca

SEQ ID NO: 487409 - DNA, 19 bp, Mus musculus
  siRNA target sequence for Zfp118 (NM_013843.2,763-781).
gttaaatcaagatagacat

SEQ ID NO: 487410 - DNA, 19 bp, Mus musculus
  siRNA target sequence for Zfp118 (NM_013843.2,789-807).
cacacactggcgaagaact

SEQ ID NO: 487411 - DNA, 19 bp, Mus musculus
  siRNA target sequence for Zfp118 (NM_013843.2,799-817).
cgaagaactttgcaaatct

SEQ ID NO: 487412 - DNA, 19 bp, Mus musculus
  siRNA target sequence for Zfp118 (NM_013843.2,1008-1026).
ccgcttcaagcttaactgt

SEQ ID NO: 487413 - DNA, 19 bp, Mus musculus
  siRNA target sequence for Zfp118 (NM_013843.2,1009-1027).
cgcttcaagcttaactgta

SEQ ID NO: 487414 - DNA, 19 bp, Mus musculus
  siRNA target sequence for Zfp118 (NM_013843.2,1014-1032).
caagcttaactgtacacaa

SEQ ID NO: 487415 - DNA, 19 bp, Mus musculus
  siRNA target sequence for Zfp118 (NM_013843.2,1426-1444).
ctactatgcatcatataga

SEQ ID NO: 487416 - DNA, 19 bp, Mus musculus
  siRNA target sequence for Zfp118 (NM_013843.2,1458-1476).
ctcattctctagataaatt

SEQ ID NO: 487417 - DNA, 19 bp, Mus musculus
  siRNA target sequence for Zfp118 (NM_013843.2,1580-1598).
gataaatcttttactgtta

SEQ ID NO: 487418 - DNA, 19 bp, Mus musculus
  siRNA target sequence for Zfp118 (NM_013843.2,1846-1864).
ccagcgttcaaatcttata

SEQ ID NO: 487419 - DNA, 19 bp, Mus musculus
  siRNA target sequence for Zfp118 (NM_013843.2,1933-1951).
gtgttcaactcttcaaata

SEQ ID NO: 487420 - DNA, 19 bp, Mus musculus
  siRNA target sequence for Zfp120 (NM_023266.3,228-246).
cgctgctataggcatgaaa

SEQ ID NO: 487421 - DNA, 19 bp, Mus musculus
  siRNA target sequence for Zfp120 (NM_023266.3,230-248).
ctgctataggcatgaaaga

SEQ ID NO: 487422 - DNA, 19 bp, Mus musculus
  siRNA target sequence for Zfp128 (NM_153802.2,323-341).
cccaaacctgcagttatct

SEQ ID NO: 487423 - DNA, 19 bp, Mus musculus
  siRNA target sequence for Zfp128 (NM_153802.2,466-484).
ggaaccatcccctattaca

SEQ ID NO: 487424 - DNA, 19 bp, Mus musculus
  siRNA target sequence for Zfp128 (NM_153802.2,509-527).
gttccttgtcgttctatga

SEQ ID NO: 487425 - DNA, 19 bp, Mus musculus
  siRNA target sequence for Zfp128 (NM_153802.2,522-540).
ctatgatagggatagatca

SEQ ID NO: 487426 - DNA, 19 bp, Mus musculus
  siRNA target sequence for Zfp128 (NM_153802.2,531-549).
ggatagatcaggaaagtga

SEQ ID NO: 487427 - DNA, 19 bp, Mus musculus
  siRNA target sequence for Zfp128 (NM_153802.2,618-636).
gtcaaagccacaaaagtct

SEQ ID NO: 487428 - DNA, 19 bp, Mus musculus
  siRNA target sequence for Zfp128 (NM_153802.2,743-761).
cataatccaagcttagtta

SEQ ID NO: 487429 - DNA, 19 bp, Mus musculus
  siRNA target sequence for Zfp128 (NM_153802.2,797-815).
gatgacaatggcagtcaaa

SEQ ID NO: 487430 - DNA, 19 bp, Mus musculus
  siRNA target sequence for Zfp128 (NM_153802.2,1605-1623).
gtagcagaaggcaagaaca

SEQ ID NO: 487431 - DNA, 19 bp, Mus musculus
  siRNA target sequence for Zfp128 (NM_153802.2,1635-1653).
ggggctcaagactcattca

SEQ ID NO: 487432 - DNA, 19 bp, Mus musculus
  siRNA target sequence for Zfp128 (NM_153802.2,1652-1670).
cagaatacaaactcaaatt

SEQ ID NO: 487433 - DNA, 19 bp, Mus musculus
  siRNA target sequence for Zfp128 (NM_153802.2,1729-1747).
gtttgaccttcgtgaaatt

SEQ ID NO: 487434 - DNA, 19 bp, Mus musculus
  siRNA target sequence for Zfp13 (NM_011747.1,710-728).
ggaccagagagcgaaagat

SEQ ID NO: 487435 - DNA, 19 bp, Mus musculus
  siRNA target sequence for Zfp13 (NM_011747.1,819-837).
ggaccacacacagcaaaat

SEQ ID NO: 487436 - DNA, 19 bp, Mus musculus
  siRNA target sequence for Zfp13 (NM_011747.1,820-838).
gaccacacacagcaaaatt

SEQ ID NO: 487437 - DNA, 19 bp, Mus musculus
  siRNA target sequence for Zfp13 (NM_011747.1,928-946).
ctagaggacacaaaatcga

SEQ ID NO: 487438 - DNA, 19 bp, Mus musculus
  siRNA target sequence for Zfp13 (NM_011747.1,931-949).
gaggacacaaaatcgataa

SEQ ID NO: 487439 - DNA, 19 bp, Mus musculus
  siRNA target sequence for Zfp13 (NM_011747.1,934-952).
gacacaaaatcgataagga

SEQ ID NO: 487440 - DNA, 19 bp, Mus musculus
  siRNA target sequence for Zfp13 (NM_011747.1,1004-1022).
ctagtggcccaggtacaaa

SEQ ID NO: 487441 - DNA, 19 bp, Mus musculus
  siRNA target sequence for Zfp13 (NM_011747.1,1174-1192).
gacacgggcaagaagacat

SEQ ID NO: 487442 - DNA, 19 bp, Mus musculus
  siRNA target sequence for Zfp13 (NM_011747.1,1652-1670).
ccaatctcatcgcacataa

SEQ ID NO: 487443 - DNA, 19 bp, Mus musculus
  siRNA target sequence for Zfp13 (NM_011747.1,1653-1671).
caatctcatcgcacataat

SEQ ID NO: 487444 - DNA, 19 bp, Mus musculus
  siRNA target sequence for Zfp235 (NM_019941.1,559-577).
caggccatgatgtcaagaa

SEQ ID NO: 487445 - DNA, 19 bp, Mus musculus
  siRNA target sequence for Zfp235 (NM_019941.1,870-888).
ctgggtgttgacattctga

SEQ ID NO: 487446 - DNA, 19 bp, Mus musculus
  siRNA target sequence for Zfp235 (NM_019941.1,872-890).
gggtgttgacattctgaat

SEQ ID NO: 487447 - DNA, 19 bp, Mus musculus
  siRNA target sequence for Zfp235 (NM_019941.1,873-891).
ggtgttgacattctgaatt

SEQ ID NO: 487448 - DNA, 19 bp, Mus musculus
  siRNA target sequence for Zfp235 (NM_019941.1,876-894).
gttgacattctgaattgca

SEQ ID NO: 487449 - DNA, 19 bp, Mus musculus
  siRNA target sequence for Zfp235 (NM_019941.1,1076-1094).
gcaggtcctcttaggaaat

SEQ ID NO: 487450 - DNA, 19 bp, Mus musculus
  siRNA target sequence for Zfp235 (NM_019941.1,1077-1095).
caggtcctcttaggaaata

SEQ ID NO: 487451 - DNA, 19 bp, Mus musculus
  siRNA target sequence for Zfp235 (NM_019941.1,1102-1120).
ctgtacatggtacatatga

SEQ ID NO: 487452 - DNA, 19 bp, Mus musculus
  siRNA target sequence for Zfp235 (NM_019941.1,1119-1137).
gaggacactagttatacct

SEQ ID NO: 487453 - DNA, 19 bp, Mus musculus
  siRNA target sequence for Zfp235 (NM_019941.1,1135-1153).
cctccagtgtcattcaaca

SEQ ID NO: 487454 - DNA, 19 bp, Mus musculus
  siRNA target sequence for Zfp235 (NM_019941.1,1136-1154).
ctccagtgtcattcaacaa

SEQ ID NO: 487455 - DNA, 19 bp, Mus musculus
  siRNA target sequence for Zfp235 (NM_019941.1,1378-1396).
gccgaagcacagatctcaa

SEQ ID NO: 487456 - DNA, 19 bp, Mus musculus
  siRNA target sequence for Zfp275 (NM_031494.1,291-309).
ggtgtcatttgatattgta

SEQ ID NO: 487457 - DNA, 19 bp, Mus musculus
  siRNA target sequence for Zfp275 (NM_031494.1,416-434).
gtcctgctttggtatctca

SEQ ID NO: 487458 - DNA, 19 bp, Mus musculus
  siRNA target sequence for Zfp275 (NM_031494.1,596-614).
gcgctgaggtcaaacagaa

SEQ ID NO: 487459 - DNA, 19 bp, Mus musculus
  siRNA target sequence for Zfp275 (NM_031494.1,635-653).
gagggagcccacaaaatct

SEQ ID NO: 487460 - DNA, 19 bp, Mus musculus
  siRNA target sequence for Zfp275 (NM_031494.1,690-708).
ggacaccttccgccttaaa

SEQ ID NO: 487461 - DNA, 19 bp, Mus musculus
  siRNA target sequence for Zfp275 (NM_031494.1,783-801).
caggggggtgtcagaattt

SEQ ID NO: 487462 - DNA, 19 bp, Mus musculus
  siRNA target sequence for Zfp275 (NM_031494.1,786-804).
gggggtgtcagaatttaat

SEQ ID NO: 487463 - DNA, 19 bp, Mus musculus
  siRNA target sequence for Zfp275 (NM_031494.1,788-806).
gggtgtcagaatttaatga

SEQ ID NO: 487464 - DNA, 19 bp, Mus musculus
  siRNA target sequence for Zfp275 (NM_031494.1,1097-1115).
cgtgcagcagggatttcct

SEQ ID NO: 487465 - DNA, 19 bp, Mus musculus
  siRNA target sequence for Zfp275 (NM_031494.1,1407-1425).
cggtgagcggccttatgca

SEQ ID NO: 487466 - DNA, 19 bp, Mus musculus
  siRNA target sequence for Zfp275 (NM_031494.1,1454-1472).
ggccttctgacctcatcaa

SEQ ID NO: 487467 - DNA, 19 bp, Mus musculus
  siRNA target sequence for Zfp275 (NM_031494.1,1482-1500).
catccacagcggactgaaa

SEQ ID NO: 487468 - DNA, 19 bp, Mus musculus
  siRNA target sequence for Zfp282 (NM_146175.2,532-550).
cagctgtggagtttggtaa

SEQ ID NO: 487469 - DNA, 19 bp, Mus musculus
  siRNA target sequence for Zfp282 (NM_146175.2,909-927).
caccccgaagagagagaaa

SEQ ID NO: 487470 - DNA, 19 bp, Mus musculus
  siRNA target sequence for Zfp282 (NM_146175.2,963-981).
gtgccggcacaggacatat

SEQ ID NO: 487471 - DNA, 19 bp, Mus musculus
  siRNA target sequence for Zfp282 (NM_146175.2,966-984).
ccggcacaggacatatcct

SEQ ID NO: 487472 - DNA, 19 bp, Mus musculus
  siRNA target sequence for Zfp282 (NM_146175.2,1045-1063).
ccatccccacagaatccat

SEQ ID NO: 487473 - DNA, 19 bp, Mus musculus
  siRNA target sequence for Zfp282 (NM_146175.2,1165-1183).
ccacagatcctaattcaga

SEQ ID NO: 487474 - DNA, 19 bp, Mus musculus
  siRNA target sequence for Zfp282 (NM_146175.2,1190-1208).
catctcagcacatgacatt

SEQ ID NO: 487475 - DNA, 19 bp, Mus musculus
  siRNA target sequence for Zfp282 (NM_146175.2,1250-1268).
cccacgtgactcaatggaa

SEQ ID NO: 487476 - DNA, 19 bp, Mus musculus
  siRNA target sequence for Zfp282 (NM_146175.2,1551-1569).
gcgggtagtggcaatagta

SEQ ID NO: 487477 - DNA, 19 bp, Mus musculus
  siRNA target sequence for Zfp30 (NM_013705.1,172-190).
cttgcgattctggaatcat

SEQ ID NO: 487478 - DNA, 19 bp, Mus musculus
  siRNA target sequence for Zfp30 (NM_013705.1,183-201).
ggaatcatggctcatagta

SEQ ID NO: 487479 - DNA, 19 bp, Mus musculus
  siRNA target sequence for Zfp30 (NM_013705.1,193-211).
ctcatagtacggtgatgtt

SEQ ID NO: 487480 - DNA, 19 bp, Mus musculus
  siRNA target sequence for Zfp30 (NM_013705.1,195-213).
catagtacggtgatgttca

SEQ ID NO: 487481 - DNA, 19 bp, Mus musculus
  siRNA target sequence for Zfp30 (NM_013705.1,262-280).
cctacgagagggatctgta

SEQ ID NO: 487482 - DNA, 19 bp, Mus musculus
  siRNA target sequence for Zfp30 (NM_013705.1,374-392).
gaaggagccgtggatgatt

SEQ ID NO: 487483 - DNA, 19 bp, Mus musculus
  siRNA target sequence for Zfp30 (NM_013705.1,378-396).
gagccgtggatgattgtga

SEQ ID NO: 487484 - DNA, 19 bp, Mus musculus
  siRNA target sequence for Zfp30 (NM_013705.1,440-458).
cagcagtaacgggttactt

SEQ ID NO: 487485 - DNA, 19 bp, Mus musculus
  siRNA target sequence for Zfp30 (NM_013705.1,462-480).
gaaaagaatacttacgaaa

SEQ ID NO: 487486 - DNA, 19 bp, Mus musculus
  siRNA target sequence for Zfp30 (NM_013705.1,467-485).
gaatacttacgaaattaat

SEQ ID NO: 487487 - DNA, 19 bp, Mus musculus
  siRNA target sequence for Zfp30 (NM_013705.1,486-504).
ctatctccgtgggaaataa

SEQ ID NO: 487488 - DNA, 19 bp, Mus musculus
  siRNA target sequence for Zfp30 (NM_013705.1,545-563).
ggggaaagactttgaatat

SEQ ID NO: 487489 - DNA, 19 bp, Mus musculus
  siRNA target sequence for Zfp30 (NM_013705.1,576-594).
gaacaagagaactctcata

SEQ ID NO: 487490 - DNA, 19 bp, Mus musculus
  siRNA target sequence for Zfp30 (NM_013705.1,584-602).
gaactctcatagggtatat

SEQ ID NO: 487491 - DNA, 19 bp, Mus musculus
  siRNA target sequence for Zfp30 (NM_013705.1,658-676).
cacctgttagtctctatca

SEQ ID NO: 487492 - DNA, 19 bp, Mus musculus
  siRNA target sequence for Zfp30 (NM_013705.1,731-749).
caaagtccgccaacaactt

SEQ ID NO: 487493 - DNA, 19 bp, Mus musculus
  siRNA target sequence for Zfp30 (NM_013705.1,740-758).
ccaacaacttactttccat

SEQ ID NO: 487494 - DNA, 19 bp, Mus musculus
  siRNA target sequence for Zfp30 (NM_013705.1,1114-1132).
gctcacgccacgagtgtaa

SEQ ID NO: 487495 - DNA, 19 bp, Mus musculus
  siRNA target sequence for Zfp30 (NM_013705.1,1165-1183).
gcctccggctgcatcacaa

SEQ ID NO: 487496 - DNA, 19 bp, Mus musculus
  siRNA target sequence for Zfp30 (NM_013705.1,1166-1184).
cctccggctgcatcacaaa

SEQ ID NO: 487497 - DNA, 19 bp, Mus musculus
  siRNA target sequence for Zfp30 (NM_013705.1,1407-1425).
cggtactcggagctcattt

SEQ ID NO: 487498 - DNA, 19 bp, Mus musculus
  siRNA target sequence for Zfp30 (NM_013705.1,1658-1676).
cctccactcgtctctcatt

SEQ ID NO: 487499 - DNA, 19 bp, Mus musculus
  siRNA target sequence for Zfp30 (NM_013705.1,1767-1785).
cagcgaattcataagaatt

SEQ ID NO: 487500 - DNA, 19 bp, Mus musculus
  siRNA target sequence for Zfp334 (NM_178411.2,502-520).
gcaaaccagatgtgatctt

SEQ ID NO: 487501 - DNA, 19 bp, Mus musculus
  siRNA target sequence for Zfp334 (NM_178411.2,543-561).
ccctgggtagtggaaaact

SEQ ID NO: 487502 - DNA, 19 bp, Mus musculus
  siRNA target sequence for Zfp334 (NM_178411.2,645-663).
gtcgtcaatagcaaaccaa

SEQ ID NO: 487503 - DNA, 19 bp, Mus musculus
  siRNA target sequence for Zfp334 (NM_178411.2,655-673).
gcaaaccaatgctggaaaa

SEQ ID NO: 487504 - DNA, 19 bp, Mus musculus
  siRNA target sequence for Zfp334 (NM_178411.2,753-771).
ggcggaaatggcttagaaa

SEQ ID NO: 487505 - DNA, 19 bp, Mus musculus
  siRNA target sequence for Zfp334 (NM_178411.2,755-773).
cggaaatggcttagaaaat

SEQ ID NO: 487506 - DNA, 19 bp, Mus musculus
  siRNA target sequence for Zfp334 (NM_178411.2,895-913).
ggtacagacgtaatgaagt

SEQ ID NO: 487507 - DNA, 19 bp, Mus musculus
  siRNA target sequence for Zfp334 (NM_178411.2,896-914).
gtacagacgtaatgaagtt

SEQ ID NO: 487508 - DNA, 19 bp, Mus musculus
  siRNA target sequence for Zfp334 (NM_178411.2,1041-1059).
gagcggaagcggaatgaat

SEQ ID NO: 487509 - DNA, 19 bp, Mus musculus
  siRNA target sequence for Zfp334 (NM_178411.2,1067-1085).
gtgtaggaagaccttttca

SEQ ID NO: 487510 - DNA, 19 bp, Mus musculus
  siRNA target sequence for Zfp334 (NM_178411.2,1132-1150).
gaccctacgcctgcaatta

SEQ ID NO: 487511 - DNA, 19 bp, Mus musculus
  siRNA target sequence for Zfp334 (NM_178411.2,1938-1956).
cgcttcgcgcacaagagaa

SEQ ID NO: 487512 - DNA, 19 bp, Mus musculus
  siRNA target sequence for Zfp334 (NM_178411.2,1943-1961).
cgcgcacaagagaaccata

SEQ ID NO: 487513 - DNA, 19 bp, Mus musculus
  siRNA target sequence for Zfp334 (NM_178411.2,1944-1962).
gcgcacaagagaaccatat

SEQ ID NO: 487514 - DNA, 19 bp, Mus musculus
  siRNA target sequence for Zfp334 (NM_178411.2,2223-2241).
ccgtacgcctgcaacgaat

SEQ ID NO: 487515 - DNA, 19 bp, Mus musculus
  siRNA target sequence for Zfp334 (NM_178411.2,2273-2291).
gactgaacaccagaaaata

SEQ ID NO: 487516 - DNA, 19 bp, Mus musculus
  siRNA target sequence for Zfp354b (NM_013744.2,406-424).
ggacttcacgtcaggaaaa

SEQ ID NO: 487517 - DNA, 19 bp, Mus musculus
  siRNA target sequence for Zfp354b (NM_013744.2,429-447).
gcagacctgacaacagttt

SEQ ID NO: 487518 - DNA, 19 bp, Mus musculus
  siRNA target sequence for Zfp354b (NM_013744.2,434-452).
cctgacaacagttttagaa

SEQ ID NO: 487519 - DNA, 19 bp, Mus musculus
  siRNA target sequence for Zfp354b (NM_013744.2,457-475).
ggatacaaatgaaagctta

SEQ ID NO: 487520 - DNA, 19 bp, Mus musculus
  siRNA target sequence for Zfp354b (NM_013744.2,515-533).
gataaaagccgtaagaatt

SEQ ID NO: 487521 - DNA, 19 bp, Mus musculus
  siRNA target sequence for Zfp354b (NM_013744.2,549-567).
gcgttggcctgaagtcaat

SEQ ID NO: 487522 - DNA, 19 bp, Mus musculus
  siRNA target sequence for Zfp354b (NM_013744.2,554-572).
ggcctgaagtcaattggta

SEQ ID NO: 487523 - DNA, 19 bp, Mus musculus
  siRNA target sequence for Zfp354b (NM_013744.2,555-573).
gcctgaagtcaattggtaa

SEQ ID NO: 487524 - DNA, 19 bp, Mus musculus
  siRNA target sequence for Zfp354b (NM_013744.2,610-628).
cctcgaggaaaattcaact

SEQ ID NO: 487525 - DNA, 19 bp, Mus musculus
  siRNA target sequence for Zfp354b (NM_013744.2,692-710).
gccttcattcacaactcat

SEQ ID NO: 487526 - DNA, 19 bp, Mus musculus
  siRNA target sequence for Zfp354b (NM_013744.2,708-726).
catcccttcgcaaacatct

SEQ ID NO: 487527 - DNA, 19 bp, Mus musculus
  siRNA target sequence for Zfp354b (NM_013744.2,711-729).
cccttcgcaaacatctgaa

SEQ ID NO: 487528 - DNA, 19 bp, Mus musculus
  siRNA target sequence for Zfp354b (NM_013744.2,712-730).
ccttcgcaaacatctgaaa

SEQ ID NO: 487529 - DNA, 19 bp, Mus musculus
  siRNA target sequence for Zfp354b (NM_013744.2,713-731).
cttcgcaaacatctgaaaa

SEQ ID NO: 487530 - DNA, 19 bp, Mus musculus
  siRNA target sequence for Zfp354b (NM_013744.2,985-1003).
ccatgcccgagaaaatcct

SEQ ID NO: 487531 - DNA, 19 bp, Mus musculus
  siRNA target sequence for Zfp354b (NM_013744.2,990-1008).
cccgagaaaatcctcataa

SEQ ID NO: 487532 - DNA, 19 bp, Mus musculus
  siRNA target sequence for Zfp354b (NM_013744.2,991-1009).
ccgagaaaatcctcataaa

SEQ ID NO: 487533 - DNA, 19 bp, Mus musculus
  siRNA target sequence for Zfp354b (NM_013744.2,992-1010).
cgagaaaatcctcataaat

SEQ ID NO: 487534 - DNA, 19 bp, Mus musculus
  siRNA target sequence for Zfp354b (NM_013744.2,1678-1696).
cacgtgcgggaagagtttt

SEQ ID NO: 487535 - DNA, 19 bp, Mus musculus
  siRNA target sequence for Zfp354b (NM_013744.2,1683-1701).
gcgggaagagttttagaca

SEQ ID NO: 487536 - DNA, 19 bp, Mus musculus
  siRNA target sequence for Zfp354b (NM_013744.2,1698-1716).
gacaaagctcctcacttat

SEQ ID NO: 487537 - DNA, 19 bp, Mus musculus
  siRNA target sequence for Zfp354b (NM_013744.2,1786-1804).
gagatcctccctaaccaat

SEQ ID NO: 487538 - DNA, 19 bp, Mus musculus
  siRNA target sequence for Zfp354b (NM_013744.2,1792-1810).
ctccctaaccaatcactat

SEQ ID NO: 487539 - DNA, 19 bp, Mus musculus
  siRNA target sequence for Zfp354b (NM_013744.2,1795-1813).
cctaaccaatcactataga

SEQ ID NO: 487540 - DNA, 19 bp, Mus musculus
  siRNA target sequence for Zfp354b (NM_013744.2,1807-1825).
ctatagaattcatatcgaa

SEQ ID NO: 487541 - DNA, 19 bp, Mus musculus
  siRNA target sequence for Zfp354b (NM_013744.2,1823-1841).
gaagaggacgccttgaaca

SEQ ID NO: 487542 - DNA, 19 bp, Mus musculus
  siRNA target sequence for Zfp354b (NM_013744.2,1828-1846).
ggacgccttgaacatagat

SEQ ID NO: 487543 - DNA, 19 bp, Mus musculus
  siRNA target sequence for Zfp354b (NM_013744.2,1829-1847).
gacgccttgaacatagatt

SEQ ID NO: 487544 - DNA, 19 bp, Mus musculus
  siRNA target sequence for Zfp354b (NM_013744.2,1834-1852).
cttgaacatagatttgcat

SEQ ID NO: 487545 - DNA, 19 bp, Mus musculus
  siRNA target sequence for Zfp354c (NM_013922.2,327-345).
ggggtttcaggcttcaata

SEQ ID NO: 487546 - DNA, 19 bp, Mus musculus
  siRNA target sequence for Zfp354c (NM_013922.2,426-444).
cgagatttggccagagata

SEQ ID NO: 487547 - DNA, 19 bp, Mus musculus
  siRNA target sequence for Zfp354c (NM_013922.2,434-452).
ggccagagatagaagcatt

SEQ ID NO: 487548 - DNA, 19 bp, Mus musculus
  siRNA target sequence for Zfp354c (NM_013922.2,493-511).
gggctgataaagaatggat

SEQ ID NO: 487549 - DNA, 19 bp, Mus musculus
  siRNA target sequence for Zfp354c (NM_013922.2,508-526).
ggatccactaagtgtgttt

SEQ ID NO: 487550 - DNA, 19 bp, Mus musculus
  siRNA target sequence for Zfp354c (NM_013922.2,509-527).
gatccactaagtgtgttta

SEQ ID NO: 487551 - DNA, 19 bp, Mus musculus
  siRNA target sequence for Zfp354c (NM_013922.2,540-558).
ctttggagagcttgtgaaa

SEQ ID NO: 487552 - DNA, 19 bp, Mus musculus
  siRNA target sequence for Zfp354c (NM_013922.2,545-563).
gagagcttgtgaaaactga

SEQ ID NO: 487553 - DNA, 19 bp, Mus musculus
  siRNA target sequence for Zfp354c (NM_013922.2,667-685).
ccggagaaacccttgttca

SEQ ID NO: 487554 - DNA, 19 bp, Mus musculus
  siRNA target sequence for Zfp354c (NM_013922.2,672-690).
gaaacccttgttcattagt

SEQ ID NO: 487555 - DNA, 19 bp, Mus musculus
  siRNA target sequence for Zfp354c (NM_013922.2,678-696).
cttgttcattagtaaagca

SEQ ID NO: 487556 - DNA, 19 bp, Mus musculus
  siRNA target sequence for Zfp354c (NM_013922.2,713-731).
gtgatcctacagaaagtgt

SEQ ID NO: 487557 - DNA, 19 bp, Mus musculus
  siRNA target sequence for Zfp354c (NM_013922.2,730-748).
gttcctgctacgtatcaca

SEQ ID NO: 487558 - DNA, 19 bp, Mus musculus
  siRNA target sequence for Zfp354c (NM_013922.2,767-785).
cacaggattttgatctaat

SEQ ID NO: 487559 - DNA, 19 bp, Mus musculus
  siRNA target sequence for Zfp354c (NM_013922.2,769-787).
caggattttgatctaatga

SEQ ID NO: 487560 - DNA, 19 bp, Mus musculus
  siRNA target sequence for Zfp354c (NM_013922.2,771-789).
ggattttgatctaatgaga

SEQ ID NO: 487561 - DNA, 19 bp, Mus musculus
  siRNA target sequence for Zfp354c (NM_013922.2,1358-1376).
gtgtgtctacccttatcga

SEQ ID NO: 487562 - DNA, 19 bp, Mus musculus
  siRNA target sequence for Zfp354c (NM_013922.2,1440-1458).
ccagtattcctccttcaat

SEQ ID NO: 487563 - DNA, 19 bp, Mus musculus
  siRNA target sequence for Zfp354c (NM_013922.2,1443-1461).
gtattcctccttcaatgaa

SEQ ID NO: 487564 - DNA, 19 bp, Mus musculus
  siRNA target sequence for Zfp354c (NM_013922.2,1455-1473).
caatgaacatcggaagatt

SEQ ID NO: 487565 - DNA, 19 bp, Mus musculus
  siRNA target sequence for Zfp354c (NM_013922.2,1517-1535).
cctttggctgtaaatcaaa

SEQ ID NO: 487566 - DNA, 19 bp, Mus musculus
  siRNA target sequence for Zfp354c (NM_013922.2,1522-1540).
ggctgtaaatcaaaccttt

SEQ ID NO: 487567 - DNA, 19 bp, Mus musculus
  siRNA target sequence for Zfp354c (NM_013922.2,1523-1541).
gctgtaaatcaaaccttta

SEQ ID NO: 487568 - DNA, 19 bp, Mus musculus
  siRNA target sequence for Zfp354c (NM_013922.2,1524-1542).
ctgtaaatcaaacctttat

SEQ ID NO: 487569 - DNA, 19 bp, Mus musculus
  siRNA target sequence for Zfp354c (NM_013922.2,1729-1747).
cttaaggaaaggctgtata

SEQ ID NO: 487570 - DNA, 19 bp, Mus musculus
  siRNA target sequence for Zfp354c (NM_013922.2,1784-1802).
catcccttactccatatca

SEQ ID NO: 487571 - DNA, 19 bp, Mus musculus
  siRNA target sequence for Zfp354c (NM_013922.2,1795-1813).
ccatatcagaaatttctga

SEQ ID NO: 487572 - DNA, 19 bp, Mus musculus
  siRNA target sequence for Zfp386 (NM_019565.1,168-186).
ggctgtatagggatgtgat

SEQ ID NO: 487573 - DNA, 19 bp, Mus musculus
  siRNA target sequence for Zfp386 (NM_019565.1,284-302).
gtgactaatggaagttata

SEQ ID NO: 487574 - DNA, 19 bp, Mus musculus
  siRNA target sequence for Zfp386 (NM_019565.1,366-384).
gccatggtagacataagca

SEQ ID NO: 487575 - DNA, 19 bp, Mus musculus
  siRNA target sequence for Zfp386 (NM_019565.1,367-385).
ccatggtagacataagcaa

SEQ ID NO: 487576 - DNA, 19 bp, Mus musculus
  siRNA target sequence for Zfp386 (NM_019565.1,389-407).
ctgatcacaagcaatacca

SEQ ID NO: 487577 - DNA, 19 bp, Mus musculus
  siRNA target sequence for Zfp386 (NM_019565.1,449-467).
cctcatgcaaggacagata

SEQ ID NO: 487578 - DNA, 19 bp, Mus musculus
  siRNA target sequence for Zfp386 (NM_019565.1,459-477).
ggacagatacttttgatga

SEQ ID NO: 487579 - DNA, 19 bp, Mus musculus
  siRNA target sequence for Zfp386 (NM_019565.1,476-494).
gagccatgtgtctataact

SEQ ID NO: 487580 - DNA, 19 bp, Mus musculus
  siRNA target sequence for Zfp386 (NM_019565.1,483-501).
gtgtctataactgtaaata

SEQ ID NO: 487581 - DNA, 19 bp, Mus musculus
  siRNA target sequence for Zfp386 (NM_019565.1,526-544).
cttaactttgaaagaaagt

SEQ ID NO: 487582 - DNA, 19 bp, Mus musculus
  siRNA target sequence for Zfp386 (NM_019565.1,543-561).
gttgggaagatctgataga

SEQ ID NO: 487583 - DNA, 19 bp, Mus musculus
  siRNA target sequence for Zfp386 (NM_019565.1,547-565).
ggaagatctgatagataga

SEQ ID NO: 487584 - DNA, 19 bp, Mus musculus
  siRNA target sequence for Zfp386 (NM_019565.1,548-566).
gaagatctgatagatagat

SEQ ID NO: 487585 - DNA, 19 bp, Mus musculus
  siRNA target sequence for Zfp386 (NM_019565.1,739-757).
gcctgctactgatccatta

SEQ ID NO: 487586 - DNA, 19 bp, Mus musculus
  siRNA target sequence for Zfp386 (NM_019565.1,740-758).
cctgctactgatccattat

SEQ ID NO: 487587 - DNA, 19 bp, Mus musculus
  siRNA target sequence for Zfp386 (NM_019565.1,741-759).
ctgctactgatccattatt

SEQ ID NO: 487588 - DNA, 19 bp, Mus musculus
  siRNA target sequence for Zfp386 (NM_019565.1,744-762).
ctactgatccattattgca

SEQ ID NO: 487589 - DNA, 19 bp, Mus musculus
  siRNA target sequence for Zfp386 (NM_019565.1,761-779).
catagccaaaatctagata

SEQ ID NO: 487590 - DNA, 19 bp, Mus musculus
  siRNA target sequence for Zfp386 (NM_019565.1,789-807).
gggaaaccccttacatgta

SEQ ID NO: 487591 - DNA, 19 bp, Mus musculus
  siRNA target sequence for Zfp386 (NM_019565.1,790-808).
ggaaaccccttacatgtat

SEQ ID NO: 487592 - DNA, 19 bp, Mus musculus
  siRNA target sequence for Zfp386 (NM_019565.1,791-809).
gaaaccccttacatgtata

SEQ ID NO: 487593 - DNA, 19 bp, Mus musculus
  siRNA target sequence for Zfp386 (NM_019565.1,795-813).
ccccttacatgtataagga

SEQ ID NO: 487594 - DNA, 19 bp, Mus musculus
  siRNA target sequence for Zfp386 (NM_019565.1,811-829).
ggaaattagcaaaggtttt

SEQ ID NO: 487595 - DNA, 19 bp, Mus musculus
  siRNA target sequence for Zfp386 (NM_019565.1,812-830).
gaaattagcaaaggtttta

SEQ ID NO: 487596 - DNA, 19 bp, Mus musculus
  siRNA target sequence for Zfp386 (NM_019565.1,831-849).
gtagtggatctttactaaa

SEQ ID NO: 487597 - DNA, 19 bp, Mus musculus
  siRNA target sequence for Zfp386 (NM_019565.1,860-878).
gatgtggttatcttagaga

SEQ ID NO: 487598 - DNA, 19 bp, Mus musculus
  siRNA target sequence for Zfp386 (NM_019565.1,863-881).
gtggttatcttagagaaat

SEQ ID NO: 487599 - DNA, 19 bp, Mus musculus
  siRNA target sequence for Zfp386 (NM_019565.1,865-883).
ggttatcttagagaaatct

SEQ ID NO: 487600 - DNA, 19 bp, Mus musculus
  siRNA target sequence for Zfp386 (NM_019565.1,882-900).
ctggtcagcgtgacaaagt

SEQ ID NO: 487601 - DNA, 19 bp, Mus musculus
  siRNA target sequence for Zfp386 (NM_019565.1,889-907).
gcgtgacaaagtacagaat

SEQ ID NO: 487602 - DNA, 19 bp, Mus musculus
  siRNA target sequence for Zfp386 (NM_019565.1,895-913).
caaagtacagaatgacttt

SEQ ID NO: 487603 - DNA, 19 bp, Mus musculus
  siRNA target sequence for Zfp386 (NM_019565.1,930-948).
ccaacaaccatcaatgtaa

SEQ ID NO: 487604 - DNA, 19 bp, Mus musculus
  siRNA target sequence for Zfp386 (NM_019565.1,958-976).
gaagcttttcaattgtgat

SEQ ID NO: 487605 - DNA, 19 bp, Mus musculus
  siRNA target sequence for Zfp386 (NM_019565.1,989-1007).
caatgttcaaagcttacta

SEQ ID NO: 487606 - DNA, 19 bp, Mus musculus
  siRNA target sequence for Zfp386 (NM_019565.1,1009-1027).
ccagcagtgtaactatatt

SEQ ID NO: 487607 - DNA, 19 bp, Mus musculus
  siRNA target sequence for Zfp386 (NM_019565.1,1012-1030).
gcagtgtaactatattcaa

SEQ ID NO: 487608 - DNA, 19 bp, Mus musculus
  siRNA target sequence for Zfp386 (NM_019565.1,1015-1033).
gtgtaactatattcaagat

SEQ ID NO: 487609 - DNA, 19 bp, Mus musculus
  siRNA target sequence for Zfp386 (NM_019565.1,1017-1035).
gtaactatattcaagataa

SEQ ID NO: 487610 - DNA, 19 bp, Mus musculus
  siRNA target sequence for Zfp398 (NM_027477.1,238-256).
gactcggaatgccttacat

SEQ ID NO: 487611 - DNA, 19 bp, Mus musculus
  siRNA target sequence for Zfp398 (NM_027477.1,386-404).
ggcgactcctccatctaga

SEQ ID NO: 487612 - DNA, 19 bp, Mus musculus
  siRNA target sequence for Zfp398 (NM_027477.1,387-405).
gcgactcctccatctagaa

SEQ ID NO: 487613 - DNA, 19 bp, Mus musculus
  siRNA target sequence for Zfp398 (NM_027477.1,585-603).
gcggctgcccccaggtatt

SEQ ID NO: 487614 - DNA, 19 bp, Mus musculus
  siRNA target sequence for Zfp398 (NM_027477.1,586-604).
cggctgcccccaggtatta

SEQ ID NO: 487615 - DNA, 19 bp, Mus musculus
  siRNA target sequence for Zfp398 (NM_027477.1,587-605).
ggctgcccccaggtattaa

SEQ ID NO: 487616 - DNA, 19 bp, Mus musculus
  siRNA target sequence for Zfp398 (NM_027477.1,588-606).
gctgcccccaggtattaaa

SEQ ID NO: 487617 - DNA, 19 bp, Mus musculus
  siRNA target sequence for Zfp398 (NM_027477.1,591-609).
gcccccaggtattaaagga

SEQ ID NO: 487618 - DNA, 19 bp, Mus musculus
  siRNA target sequence for Zfp398 (NM_027477.1,637-655).
gatgacgtctccatctact

SEQ ID NO: 487619 - DNA, 19 bp, Mus musculus
  siRNA target sequence for Zfp398 (NM_027477.1,640-658).
gacgtctccatctactttt

SEQ ID NO: 487620 - DNA, 19 bp, Mus musculus
  siRNA target sequence for Zfp398 (NM_027477.1,747-765).
ggattatgccatgaatcaa

SEQ ID NO: 487621 - DNA, 19 bp, Mus musculus
  siRNA target sequence for Zfp398 (NM_027477.1,756-774).
catgaatcaacctgatgtt

SEQ ID NO: 487622 - DNA, 19 bp, Mus musculus
  siRNA target sequence for Zfp398 (NM_027477.1,759-777).
gaatcaacctgatgtttta

SEQ ID NO: 487623 - DNA, 19 bp, Mus musculus
  siRNA target sequence for Zfp398 (NM_027477.1,825-843).
gccagaagcaagtgagatt

SEQ ID NO: 487624 - DNA, 19 bp, Mus musculus
  siRNA target sequence for Zfp398 (NM_027477.1,883-901).
gatattctgtcttggatta

SEQ ID NO: 487625 - DNA, 19 bp, Mus musculus
  siRNA target sequence for Zfp398 (NM_027477.1,954-972).
gctgtacaaaggtacctat

SEQ ID NO: 487626 - DNA, 19 bp, Mus musculus
  siRNA target sequence for Zfp398 (NM_027477.1,965-983).
gtacctatgctgatgaaga

SEQ ID NO: 487627 - DNA, 19 bp, Mus musculus
  siRNA target sequence for Zfp398 (NM_027477.1,968-986).
cctatgctgatgaagaact

SEQ ID NO: 487628 - DNA, 19 bp, Mus musculus
  siRNA target sequence for Zfp398 (NM_027477.1,1078-1096).
gcattttcagatatagctt

SEQ ID NO: 487629 - DNA, 19 bp, Mus musculus
  siRNA target sequence for Zfp398 (NM_027477.1,1165-1183).
gagggacaagtgactttta

SEQ ID NO: 487630 - DNA, 19 bp, Mus musculus
  siRNA target sequence for Zfp398 (NM_027477.1,1167-1185).
gggacaagtgacttttact

SEQ ID NO: 487631 - DNA, 19 bp, Mus musculus
  siRNA target sequence for Zfp398 (NM_027477.1,1169-1187).
gacaagtgacttttactca

SEQ ID NO: 487632 - DNA, 19 bp, Mus musculus
  siRNA target sequence for Zfp398 (NM_027477.1,1219-1237).
ggagagcaggtgttctcat

SEQ ID NO: 487633 - DNA, 19 bp, Mus musculus
  siRNA target sequence for Zfp398 (NM_027477.1,1256-1274).
gtctcagtcaagacatgtt

SEQ ID NO: 487634 - DNA, 19 bp, Mus musculus
  siRNA target sequence for Zfp398 (NM_027477.1,1258-1276).
ctcagtcaagacatgttaa

SEQ ID NO: 487635 - DNA, 19 bp, Mus musculus
  siRNA target sequence for Zfp398 (NM_027477.1,1588-1606).
cgtagcttcagccttaaga

SEQ ID NO: 487636 - DNA, 19 bp, Mus musculus
  siRNA target sequence for Zfp398 (NM_027477.1,1589-1607).
gtagcttcagccttaagat

SEQ ID NO: 487637 - DNA, 19 bp, Mus musculus
  siRNA target sequence for Zfp398 (NM_027477.1,1661-1679).
ctcagtgtggcattgactt

SEQ ID NO: 487638 - DNA, 19 bp, Mus musculus
  siRNA target sequence for Zfp398 (NM_027477.1,1768-1786).
cgtaaggaacacttgctaa

SEQ ID NO: 487639 - DNA, 19 bp, Mus musculus
  siRNA target sequence for Zfp398 (NM_027477.1,1769-1787).
gtaaggaacacttgctaaa

SEQ ID NO: 487640 - DNA, 19 bp, Mus musculus
  siRNA target sequence for Zfp398 (NM_027477.1,1853-1871).
gcaagcatcacctcatgaa

SEQ ID NO: 487641 - DNA, 19 bp, Mus musculus
  siRNA target sequence for Zfp398 (NM_027477.1,2022-2040).
cccacctggtccactctta

SEQ ID NO: 487642 - DNA, 19 bp, Mus musculus
  siRNA target sequence for Zfp398 (NM_027477.1,2023-2041).
ccacctggtccactcttaa

SEQ ID NO: 487643 - DNA, 19 bp, Mus musculus
  siRNA target sequence for Zfp398 (NM_027477.1,2112-2130).
gagtggaggggtggtttta

SEQ ID NO: 487644 - DNA, 19 bp, Mus musculus
  siRNA target sequence for Zfp40 (NM_009555.1,246-264).
cagcaatctagtctttgta

SEQ ID NO: 487645 - DNA, 19 bp, Mus musculus
  siRNA target sequence for Zfp40 (NM_009555.1,275-293).
gcatatgtggtaaatacga

SEQ ID NO: 487646 - DNA, 19 bp, Mus musculus
  siRNA target sequence for Zfp40 (NM_009555.1,276-294).
catatgtggtaaatacgaa

SEQ ID NO: 487647 - DNA, 19 bp, Mus musculus
  siRNA target sequence for Zfp40 (NM_009555.1,447-465).
gtatgggagtgataaccaa

SEQ ID NO: 487648 - DNA, 19 bp, Mus musculus
  siRNA target sequence for Zfp40 (NM_009555.1,468-486).
ggatccatctaatgaatca

SEQ ID NO: 487649 - DNA, 19 bp, Mus musculus
  siRNA target sequence for Zfp40 (NM_009555.1,492-510).
cctaaaggcacataaaagt

SEQ ID NO: 487650 - DNA, 19 bp, Mus musculus
  siRNA target sequence for Zfp40 (NM_009555.1,538-556).
gattatagggagtatttaa

SEQ ID NO: 487651 - DNA, 19 bp, Mus musculus
  siRNA target sequence for Zfp40 (NM_009555.1,567-585).
catcattggctcatataca

SEQ ID NO: 487652 - DNA, 19 bp, Mus musculus
  siRNA target sequence for Zfp40 (NM_009555.1,584-602).
cacaaatggacactagaaa

SEQ ID NO: 487653 - DNA, 19 bp, Mus musculus
  siRNA target sequence for Zfp40 (NM_009555.1,657-675).
catgataaaacgaatgtgt

SEQ ID NO: 487654 - DNA, 19 bp, Mus musculus
  siRNA target sequence for Zfp40 (NM_009555.1,768-786).
gaaaccctataaacttaca

SEQ ID NO: 487655 - DNA, 19 bp, Mus musculus
  siRNA target sequence for Zfp40 (NM_009555.1,772-790).
ccctataaacttacagaat

SEQ ID NO: 487656 - DNA, 19 bp, Mus musculus
  siRNA target sequence for Zfp40 (NM_009555.1,791-809).
gcaataagtccattctgta

SEQ ID NO: 487657 - DNA, 19 bp, Mus musculus
  siRNA target sequence for Zfp40 (NM_009555.1,792-810).
caataagtccattctgtat

SEQ ID NO: 487658 - DNA, 19 bp, Mus musculus
  siRNA target sequence for Zfp40 (NM_009555.1,882-900).
gtgctattatcattcatca

SEQ ID NO: 487659 - DNA, 19 bp, Mus musculus
  siRNA target sequence for Zfp40 (NM_009555.1,972-990).
ctgctgcttaggtcttaaa

SEQ ID NO: 487660 - DNA, 19 bp, Mus musculus
  siRNA target sequence for Zfp40 (NM_009555.1,977-995).
gcttaggtcttaaaagaca

SEQ ID NO: 487661 - DNA, 19 bp, Mus musculus
  siRNA target sequence for Zfp40 (NM_009555.1,1085-1103).
gaacccaccgtagaaaact

SEQ ID NO: 487662 - DNA, 19 bp, Mus musculus
  siRNA target sequence for Zfp40 (NM_009555.1,1088-1106).
cccaccgtagaaaacttca

SEQ ID NO: 487663 - DNA, 19 bp, Mus musculus
  siRNA target sequence for Zfp40 (NM_009555.1,1097-1115).
gaaaacttcacagatgtaa

SEQ ID NO: 487664 - DNA, 19 bp, Mus musculus
  siRNA target sequence for Zfp40 (NM_009555.1,1230-1248).
ccaacttaaaacacatcaa

SEQ ID NO: 487665 - DNA, 19 bp, Mus musculus
  siRNA target sequence for Zfp40 (NM_009555.1,1290-1308).
cgagaaatcctttactgtt

SEQ ID NO: 487666 - DNA, 19 bp, Mus musculus
  siRNA target sequence for Zfp40 (NM_009555.1,2264-2282).
ctgcaagaagccttactaa

SEQ ID NO: 487667 - DNA, 19 bp, Mus musculus
  siRNA target sequence for Zfp454 (NM_172794.2,347-365).
ggatcccaaccagatatgt

SEQ ID NO: 487668 - DNA, 19 bp, Mus musculus
  siRNA target sequence for Zfp454 (NM_172794.2,348-366).
gatcccaaccagatatgtt

SEQ ID NO: 487669 - DNA, 19 bp, Mus musculus
  siRNA target sequence for Zfp454 (NM_172794.2,482-500).
ccggttacaggggaaatta

SEQ ID NO: 487670 - DNA, 19 bp, Mus musculus
  siRNA target sequence for Zfp454 (NM_172794.2,484-502).
ggttacaggggaaattaca

SEQ ID NO: 487671 - DNA, 19 bp, Mus musculus
  siRNA target sequence for Zfp454 (NM_172794.2,503-521).
gtggccatgagtaagaaat

SEQ ID NO: 487672 - DNA, 19 bp, Mus musculus
  siRNA target sequence for Zfp454 (NM_172794.2,507-525).
ccatgagtaagaaattcct

SEQ ID NO: 487673 - DNA, 19 bp, Mus musculus
  siRNA target sequence for Zfp454 (NM_172794.2,552-570).
cggatcaatggatagcaaa

SEQ ID NO: 487674 - DNA, 19 bp, Mus musculus
  siRNA target sequence for Zfp454 (NM_172794.2,578-596).
gcatgtgctaacttgttca

SEQ ID NO: 487675 - DNA, 19 bp, Mus musculus
  siRNA target sequence for Zfp454 (NM_172794.2,579-597).
catgtgctaacttgttcaa

SEQ ID NO: 487676 - DNA, 19 bp, Mus musculus
  siRNA target sequence for Zfp454 (NM_172794.2,702-720).
catcacccatccaaagtca

SEQ ID NO: 487677 - DNA, 19 bp, Mus musculus
  siRNA target sequence for Zfp454 (NM_172794.2,732-750).
caagcaaaacggcttttga

SEQ ID NO: 487678 - DNA, 19 bp, Mus musculus
  siRNA target sequence for Zfp454 (NM_172794.2,809-827).
cttcataccgaaaaactca

SEQ ID NO: 487679 - DNA, 19 bp, Mus musculus
  siRNA target sequence for Zfp454 (NM_172794.2,824-842).
ctcaacccaagtcagaaat

SEQ ID NO: 487680 - DNA, 19 bp, Mus musculus
  siRNA target sequence for Zfp454 (NM_172794.2,996-1014).
cctaccaccagaaaatcca

SEQ ID NO: 487681 - DNA, 19 bp, Mus musculus
  siRNA target sequence for Zfp454 (NM_172794.2,1054-1072).
ggcctttatccggaacata

SEQ ID NO: 487682 - DNA, 19 bp, Mus musculus
  siRNA target sequence for Zfp454 (NM_172794.2,1112-1130).
cctttccaatgcaaccttt

SEQ ID NO: 487683 - DNA, 19 bp, Mus musculus
  siRNA target sequence for Zfp454 (NM_172794.2,1225-1243).
cttcaatcagagtacaagt

SEQ ID NO: 487684 - DNA, 19 bp, Mus musculus
  siRNA target sequence for Zfp454 (NM_172794.2,1228-1246).
caatcagagtacaagtttt

SEQ ID NO: 487685 - DNA, 19 bp, Mus musculus
  siRNA target sequence for Zfp454 (NM_172794.2,1531-1549).
gccttacacgtgtaacata

SEQ ID NO: 487686 - DNA, 19 bp, Mus musculus
  siRNA target sequence for Zfp454 (NM_172794.2,1577-1595).
gcccttacccaacataaga

SEQ ID NO: 487687 - DNA, 19 bp, Mus musculus
  siRNA target sequence for Zfp472 (NM_153063.1,296-314).
ctgtaaatatgattatggt

SEQ ID NO: 487688 - DNA, 19 bp, Mus musculus
  siRNA target sequence for Zfp472 (NM_153063.1,348-366).
gagcatgttgcgaatgaaa

SEQ ID NO: 487689 - DNA, 19 bp, Mus musculus
  siRNA target sequence for Zfp472 (NM_153063.1,350-368).
gcatgttgcgaatgaaaaa

SEQ ID NO: 487690 - DNA, 19 bp, Mus musculus
  siRNA target sequence for Zfp472 (NM_153063.1,528-546).
gagttgctttggatgcata

SEQ ID NO: 487691 - DNA, 19 bp, Mus musculus
  siRNA target sequence for Zfp472 (NM_153063.1,594-612).
gaagcctctaggagtttca

SEQ ID NO: 487692 - DNA, 19 bp, Mus musculus
  siRNA target sequence for Zfp472 (NM_153063.1,607-625).
gtttcactaccgatcatga

SEQ ID NO: 487693 - DNA, 19 bp, Mus musculus
  siRNA target sequence for Zfp472 (NM_153063.1,611-629).
cactaccgatcatgattat

SEQ ID NO: 487694 - DNA, 19 bp, Mus musculus
  siRNA target sequence for Zfp472 (NM_153063.1,613-631).
ctaccgatcatgattatga

SEQ ID NO: 487695 - DNA, 19 bp, Mus musculus
  siRNA target sequence for Zfp472 (NM_153063.1,738-756).
cgtcacacatgtaagcaat

SEQ ID NO: 487696 - DNA, 19 bp, Mus musculus
  siRNA target sequence for Zfp472 (NM_153063.1,1030-1048).
ccagtgcctgctattatca

SEQ ID NO: 487697 - DNA, 19 bp, Mus musculus
  siRNA target sequence for Zfp472 (NM_153063.1,1111-1129).
gttctgcgtaccttcacat

SEQ ID NO: 487698 - DNA, 19 bp, Mus musculus
  siRNA target sequence for Zfp472 (NM_153063.1,1114-1132).
ctgcgtaccttcacataca

SEQ ID NO: 487699 - DNA, 19 bp, Mus musculus
  siRNA target sequence for Zfp472 (NM_153063.1,1198-1216).
ccaccgggtgtcacaaaca

SEQ ID NO: 487700 - DNA, 19 bp, Mus musculus
  siRNA target sequence for Zfp472 (NM_153063.1,1199-1217).
caccgggtgtcacaaacat

SEQ ID NO: 487701 - DNA, 19 bp, Mus musculus
  siRNA target sequence for Zfp472 (NM_153063.1,1201-1219).
ccgggtgtcacaaacatga

SEQ ID NO: 487702 - DNA, 19 bp, Mus musculus
  siRNA target sequence for Zfp472 (NM_153063.1,1261-1279).
gtgggaaactattcacttt

SEQ ID NO: 487703 - DNA, 19 bp, Mus musculus
  siRNA target sequence for Zfp472 (NM_153063.1,1280-1298).
ccccagatcccttcacata

SEQ ID NO: 487704 - DNA, 19 bp, Mus musculus
  siRNA target sequence for Zfp472 (NM_153063.1,1295-1313).
catacacgagcgatctcat

SEQ ID NO: 487705 - DNA, 19 bp, Mus musculus
  siRNA target sequence for Zfp52 (NM_144515.1,573-591).
ggagtcttgtccatgtaat

SEQ ID NO: 487706 - DNA, 19 bp, Mus musculus
  siRNA target sequence for Zfp52 (NM_144515.1,797-815).
ccaacattcggcaatatca

SEQ ID NO: 487707 - DNA, 19 bp, Mus musculus
  siRNA target sequence for Zfp52 (NM_144515.1,798-816).
caacattcggcaatatcaa

SEQ ID NO: 487708 - DNA, 19 bp, Mus musculus
  siRNA target sequence for Zfp52 (NM_144515.1,840-858).
gcacaagcaggatgaacat

SEQ ID NO: 487709 - DNA, 19 bp, Mus musculus
  siRNA target sequence for Zfp52 (NM_144515.1,843-861).
caagcaggatgaacatgat

SEQ ID NO: 487710 - DNA, 19 bp, Mus musculus
  siRNA target sequence for Zfp52 (NM_144515.1,862-880).
gaccatttcagctctctat

SEQ ID NO: 487711 - DNA, 19 bp, Mus musculus
  siRNA target sequence for Zfp52 (NM_144515.1,864-882).
ccatttcagctctctatat

SEQ ID NO: 487712 - DNA, 19 bp, Mus musculus
  siRNA target sequence for Zfp52 (NM_144515.1,932-950).
ggcactgcaggaaatactt

SEQ ID NO: 487713 - DNA, 19 bp, Mus musculus
  siRNA target sequence for Zfp52 (NM_144515.1,1039-1057).
cagtggtcaagccttaaaa

SEQ ID NO: 487714 - DNA, 19 bp, Mus musculus
  siRNA target sequence for Zfp52 (NM_144515.1,1043-1061).
ggtcaagccttaaaacaga

SEQ ID NO: 487715 - DNA, 19 bp, Mus musculus
  siRNA target sequence for Zfp52 (NM_144515.1,1044-1062).
gtcaagccttaaaacagat

SEQ ID NO: 487716 - DNA, 19 bp, Mus musculus
  siRNA target sequence for Zfp52 (NM_144515.1,1072-1090).
catacggcaaagaaaccat

SEQ ID NO: 487717 - DNA, 19 bp, Mus musculus
  siRNA target sequence for Zfp52 (NM_144515.1,1113-1131).
gttacttgtgcagttatct

SEQ ID NO: 487718 - DNA, 19 bp, Mus musculus
  siRNA target sequence for Zfp52 (NM_144515.1,1122-1140).
gcagttatctgcacttaaa

SEQ ID NO: 487719 - DNA, 19 bp, Mus musculus
  siRNA target sequence for Zfp52 (NM_144515.1,1331-1349).
ccgaaaagccttacagata

SEQ ID NO: 487720 - DNA, 19 bp, Mus musculus
  siRNA target sequence for Zfp52 (NM_144515.1,1332-1350).
cgaaaagccttacagatat

SEQ ID NO: 487721 - DNA, 19 bp, Mus musculus
  siRNA target sequence for Zfp52 (NM_144515.1,1344-1362).
cagatatgaggtatgtgat

SEQ ID NO: 487722 - DNA, 19 bp, Mus musculus
  siRNA target sequence for Zfp52 (NM_144515.1,1351-1369).
gaggtatgtgatacatcta

SEQ ID NO: 487723 - DNA, 19 bp, Mus musculus
  siRNA target sequence for Zfp52 (NM_144515.1,1353-1371).
ggtatgtgatacatctatt

SEQ ID NO: 487724 - DNA, 19 bp, Mus musculus
  siRNA target sequence for Zfp52 (NM_144515.1,1354-1372).
gtatgtgatacatctatta

SEQ ID NO: 487725 - DNA, 19 bp, Mus musculus
  siRNA target sequence for Zfp52 (NM_144515.1,1703-1721).
cttttacctggttctcaaa

SEQ ID NO: 487726 - DNA, 19 bp, Mus musculus
  siRNA target sequence for Zfp54 (NM_011760.1,124-142).
gcaccgtggagaatcttgt

SEQ ID NO: 487727 - DNA, 19 bp, Mus musculus
  siRNA target sequence for Zfp54 (NM_011760.1,127-145).
ccgtggagaatcttgtgat

SEQ ID NO: 487728 - DNA, 19 bp, Mus musculus
  siRNA target sequence for Zfp54 (NM_011760.1,277-295).
gggggagggctgtaaccta

SEQ ID NO: 487729 - DNA, 19 bp, Mus musculus
  siRNA target sequence for Zfp54 (NM_011760.1,1032-1050).
gtcttaaagaacatcgaaa

SEQ ID NO: 487730 - DNA, 19 bp, Mus musculus
  siRNA target sequence for Zfp54 (NM_011760.1,1073-1091).
ggaacaaacccttacaaat

SEQ ID NO: 487731 - DNA, 19 bp, Mus musculus
  siRNA target sequence for Zfp54 (NM_011760.1,1706-1724).
cactactcaagtcttagaa

SEQ ID NO: 487732 - DNA, 19 bp, Mus musculus
  siRNA target sequence for Zfp54 (NM_011760.1,1752-1770).
gacattatacgtgtaaaca

SEQ ID NO: 487733 - DNA, 19 bp, Mus musculus
  siRNA target sequence for Zfp54 (NM_011760.1,2027-2045).
gacagatcctatatccaat

SEQ ID NO: 487734 - DNA, 19 bp, Mus musculus
  siRNA target sequence for Zfp57 (NM_009559.2,571-589).
ccaggacaccagtcagtta

SEQ ID NO: 487735 - DNA, 19 bp, Mus musculus
  siRNA target sequence for Zfp57 (NM_009559.2,572-590).
caggacaccagtcagttat

SEQ ID NO: 487736 - DNA, 19 bp, Mus musculus
  siRNA target sequence for Zfp57 (NM_009559.2,574-592).
ggacaccagtcagttatga

SEQ ID NO: 487737 - DNA, 19 bp, Mus musculus
  siRNA target sequence for Zfp57 (NM_009559.2,775-793).
gttgcacaggggtattcaa

SEQ ID NO: 487738 - DNA, 19 bp, Mus musculus
  siRNA target sequence for Zfp57 (NM_009559.2,791-809).
caaaggtggaccattcttt

SEQ ID NO: 487739 - DNA, 19 bp, Mus musculus
  siRNA target sequence for Zfp57 (NM_009559.2,883-901).
ggaggctggcagtcacaaa

SEQ ID NO: 487740 - DNA, 19 bp, Mus musculus
  siRNA target sequence for Zfp57 (NM_009559.2,887-905).
gctggcagtcacaaatcca

SEQ ID NO: 487741 - DNA, 19 bp, Mus musculus
  siRNA target sequence for Zfp57 (NM_009559.2,1013-1031).
ccgacgtgctcatttaggt

SEQ ID NO: 487742 - DNA, 19 bp, Mus musculus
  siRNA target sequence for Zfp57 (NM_009559.2,1014-1032).
cgacgtgctcatttaggtt

SEQ ID NO: 487743 - DNA, 19 bp, Mus musculus
  siRNA target sequence for Zfp57 (NM_009559.2,1098-1116).
ctgaaggtacaccaaaaca

SEQ ID NO: 487744 - DNA, 19 bp, Mus musculus
  siRNA target sequence for Zfp57 (NM_009559.2,1210-1228).
ccctcaagtatgtgaaagt

SEQ ID NO: 487745 - DNA, 19 bp, Mus musculus
  siRNA target sequence for Zfp57 (NM_009559.2,1270-1288).
gagcctcgaccctgaatgt

SEQ ID NO: 487746 - DNA, 19 bp, Mus musculus
  siRNA target sequence for Zfp57 (NM_009559.2,1272-1290).
gcctcgaccctgaatgtca

SEQ ID NO: 487747 - DNA, 19 bp, Mus musculus
  siRNA target sequence for Zfp57 (NM_009559.2,1291-1309).
gatccaactctattacagt

SEQ ID NO: 487748 - DNA, 19 bp, Mus musculus
  siRNA target sequence for Zfp57 (NM_009559.2,1308-1326).
gtggtccgttcaagagaaa

SEQ ID NO: 487749 - DNA, 19 bp, Mus musculus
  siRNA target sequence for Zfp57 (NM_009559.2,1328-1346).
gatctcttgtccctattgt

SEQ ID NO: 487750 - DNA, 19 bp, Mus musculus
  siRNA target sequence for Zfp57 (NM_009559.2,1338-1356).
ccctattgtcacataacgt

SEQ ID NO: 487751 - DNA, 19 bp, Mus musculus
  siRNA target sequence for Zfp57 (NM_009559.2,1339-1357).
cctattgtcacataacgtt

SEQ ID NO: 487752 - DNA, 19 bp, Mus musculus
  siRNA target sequence for Zfp57 (NM_009559.2,1345-1363).
gtcacataacgtttaccat

SEQ ID NO: 487753 - DNA, 19 bp, Mus musculus
  siRNA target sequence for Zfp57 (NM_009559.2,1451-1469).
caacacactcagaatgcaa

SEQ ID NO: 487754 - DNA, 19 bp, Mus musculus
  siRNA target sequence for Zfp57 (NM_009559.2,1540-1558).
gccaaagaccaatcagatt

SEQ ID NO: 487755 - DNA, 19 bp, Mus musculus
  siRNA target sequence for Zfp57 (NM_009559.2,1570-1588).
gggaaatcctgggtcattt

SEQ ID NO: 487756 - DNA, 19 bp, Mus musculus
  siRNA target sequence for Zfp57 (NM_009559.2,1589-1607).
gctcggctatcttcatgaa

SEQ ID NO: 487757 - DNA, 19 bp, Mus musculus
  siRNA target sequence for Zfp57 (NM_009559.2,1716-1734).
ggcctgtctgggaaaggta

SEQ ID NO: 487758 - DNA, 19 bp, Mus musculus
  siRNA target sequence for Zfp61 (NM_009561.1,1537-1555).
cgctctgatcacagagtat

SEQ ID NO: 487759 - DNA, 19 bp, Mus musculus
  siRNA target sequence for Zfp61 (NM_009561.1,1546-1564).
cacagagtatgcaaaagta

SEQ ID NO: 487760 - DNA, 19 bp, Mus musculus
  siRNA target sequence for Zfp61 (NM_009561.1,1624-1642).
cagaatggagggattcaca

SEQ ID NO: 487761 - DNA, 19 bp, Mus musculus
  siRNA target sequence for Zfp61 (NM_009561.1,1694-1712).
cggatcctcaccaagtgtt

SEQ ID NO: 487762 - DNA, 19 bp, Mus musculus
  siRNA target sequence for Zfp61 (NM_009561.1,1695-1713).
ggatcctcaccaagtgtta

SEQ ID NO: 487763 - DNA, 19 bp, Mus musculus
  siRNA target sequence for Zfp61 (NM_009561.1,1699-1717).
cctcaccaagtgttagact

SEQ ID NO: 487764 - DNA, 19 bp, Mus musculus
  siRNA target sequence for Zfp61 (NM_009561.1,1729-1747).
gcttgtgcatgtgttgaat

SEQ ID NO: 487765 - DNA, 19 bp, Mus musculus
  siRNA target sequence for Zfp61 (NM_009561.1,1770-1788).
cacagatggctgcattcat

SEQ ID NO: 487766 - DNA, 19 bp, Mus musculus
  siRNA target sequence for Zfp61 (NM_009561.1,1836-1854).
ggtctgcacgccagtgaaa

SEQ ID NO: 487767 - DNA, 19 bp, Mus musculus
  siRNA target sequence for Zfp61 (NM_009561.1,1867-1885).
gagcagtgcgaaaagtctt

SEQ ID NO: 487768 - DNA, 19 bp, Mus musculus
  siRNA target sequence for Zfp61 (NM_009561.1,1869-1887).
gcagtgcgaaaagtcttta

SEQ ID NO: 487769 - DNA, 19 bp, Mus musculus
  siRNA target sequence for Zfp61 (NM_009561.1,1872-1890).
gtgcgaaaagtctttactt

SEQ ID NO: 487770 - DNA, 19 bp, Mus musculus
  siRNA target sequence for Zfp61 (NM_009561.1,2144-2162).
gtagctccaatctctacat

SEQ ID NO: 487771 - DNA, 19 bp, Mus musculus
  siRNA target sequence for Zfp61 (NM_009561.1,2202-2220).
cgtggactgcgggaaagaa

SEQ ID NO: 487772 - DNA, 19 bp, Mus musculus
  siRNA target sequence for Zfp61 (NM_009561.1,2203-2221).
gtggactgcgggaaagaat

SEQ ID NO: 487773 - DNA, 19 bp, Mus musculus
  siRNA target sequence for Zfp61 (NM_009561.1,2476-2494).
ggttggcggtcaaatctta

SEQ ID NO: 487774 - DNA, 19 bp, Mus musculus
  siRNA target sequence for Zfp61 (NM_009561.1,2477-2495).
gttggcggtcaaatcttat

SEQ ID NO: 487775 - DNA, 19 bp, Mus musculus
  siRNA target sequence for Zfp61 (NM_009561.1,2511-2529).
ccacagcagtggtaaacct

SEQ ID NO: 487776 - DNA, 19 bp, Mus musculus
  siRNA target sequence for Zfp61 (NM_009561.1,2562-2580).
ggagtccactcaggaaaaa

SEQ ID NO: 487777 - DNA, 19 bp, Mus musculus
  siRNA target sequence for Zfp61 (NM_009561.1,2563-2581).
gagtccactcaggaaaaat

SEQ ID NO: 487778 - DNA, 19 bp, Mus musculus
  siRNA target sequence for Zfp61 (NM_009561.1,2570-2588).
ctcaggaaaaatgttctat

SEQ ID NO: 487779 - DNA, 19 bp, Mus musculus
  siRNA target sequence for Zfp68 (NM_013844.1,473-491).
ccggagctgatcttcaatt

SEQ ID NO: 487780 - DNA, 19 bp, Mus musculus
  siRNA target sequence for Zfp68 (NM_013844.1,542-560).
ccagatttccagaatatga

SEQ ID NO: 487781 - DNA, 19 bp, Mus musculus
  siRNA target sequence for Zfp68 (NM_013844.1,574-592).
gagcagtccagataccaaa

SEQ ID NO: 487782 - DNA, 19 bp, Mus musculus
  siRNA target sequence for Zfp68 (NM_013844.1,614-632).
gccctcaacagtgaaacat

SEQ ID NO: 487783 - DNA, 19 bp, Mus musculus
  siRNA target sequence for Zfp68 (NM_013844.1,653-671).
gggaatacttgcaatgtga

SEQ ID NO: 487784 - DNA, 19 bp, Mus musculus
  siRNA target sequence for Zfp68 (NM_013844.1,664-682).
caatgtgagcacaaaccat

SEQ ID NO: 487785 - DNA, 19 bp, Mus musculus
  siRNA target sequence for Zfp68 (NM_013844.1,668-686).
gtgagcacaaaccatattt

SEQ ID NO: 487786 - DNA, 19 bp, Mus musculus
  siRNA target sequence for Zfp68 (NM_013844.1,670-688).
gagcacaaaccatatttca

SEQ ID NO: 487787 - DNA, 19 bp, Mus musculus
  siRNA target sequence for Zfp68 (NM_013844.1,709-727).
gaactcactaggaatgagt

SEQ ID NO: 487788 - DNA, 19 bp, Mus musculus
  siRNA target sequence for Zfp68 (NM_013844.1,719-737).
ggaatgagtcctagaaagt

SEQ ID NO: 487789 - DNA, 19 bp, Mus musculus
  siRNA target sequence for Zfp68 (NM_013844.1,720-738).
gaatgagtcctagaaagtt

SEQ ID NO: 487790 - DNA, 19 bp, Mus musculus
  siRNA target sequence for Zfp68 (NM_013844.1,724-742).
gagtcctagaaagtttatt

SEQ ID NO: 487791 - DNA, 19 bp, Mus musculus
  siRNA target sequence for Zfp68 (NM_013844.1,726-744).
gtcctagaaagtttattct

SEQ ID NO: 487792 - DNA, 19 bp, Mus musculus
  siRNA target sequence for Zfp68 (NM_013844.1,838-856).
ccccgagcaagttagtcta

SEQ ID NO: 487793 - DNA, 19 bp, Mus musculus
  siRNA target sequence for Zfp68 (NM_013844.1,839-857).
cccgagcaagttagtctat

SEQ ID NO: 487794 - DNA, 19 bp, Mus musculus
  siRNA target sequence for Zfp68 (NM_013844.1,840-858).
ccgagcaagttagtctata

SEQ ID NO: 487795 - DNA, 19 bp, Mus musculus
  siRNA target sequence for Zfp68 (NM_013844.1,870-888).
ggtcacagagttactttca

SEQ ID NO: 487796 - DNA, 19 bp, Mus musculus
  siRNA target sequence for Zfp68 (NM_013844.1,871-889).
gtcacagagttactttcaa

SEQ ID NO: 487797 - DNA, 19 bp, Mus musculus
  siRNA target sequence for Zfp68 (NM_013844.1,899-917).
ccagggaaatccttcaaca

SEQ ID NO: 487798 - DNA, 19 bp, Mus musculus
  siRNA target sequence for Zfp68 (NM_013844.1,902-920).
gggaaatccttcaacacaa

SEQ ID NO: 487799 - DNA, 19 bp, Mus musculus
  siRNA target sequence for Zfp68 (NM_013844.1,964-982).
cttaggtgatacagcattt

SEQ ID NO: 487800 - DNA, 19 bp, Mus musculus
  siRNA target sequence for Zfp68 (NM_013844.1,969-987).
gtgatacagcatttattga

SEQ ID NO: 487801 - DNA, 19 bp, Mus musculus
  siRNA target sequence for Zfp68 (NM_013844.1,998-1016).
gctcagataagggtgaaat

SEQ ID NO: 487802 - DNA, 19 bp, Mus musculus
  siRNA target sequence for Zfp68 (NM_013844.1,1001-1019).
cagataagggtgaaatcct

SEQ ID NO: 487803 - DNA, 19 bp, Mus musculus
  siRNA target sequence for Zfp68 (NM_013844.1,1050-1068).
gcaagtctgaccttaatga

SEQ ID NO: 487804 - DNA, 19 bp, Mus musculus
  siRNA target sequence for Zfp68 (NM_013844.1,1114-1132).
ctttgagaacccttttatt

SEQ ID NO: 487805 - DNA, 19 bp, Mus musculus
  siRNA target sequence for Zfp68 (NM_013844.1,1124-1142).
ccttttattattgaatcat

SEQ ID NO: 487806 - DNA, 19 bp, Mus musculus
  siRNA target sequence for Zfp68 (NM_013844.1,1210-1228).
gtcagaagtgagtcttcat

SEQ ID NO: 487807 - DNA, 19 bp, Mus musculus
  siRNA target sequence for Zfp68 (NM_013844.1,1274-1292).
ggcaagtgcttttattgga

SEQ ID NO: 487808 - DNA, 19 bp, Mus musculus
  siRNA target sequence for Zfp68 (NM_013844.1,1291-1309).
gaaaaccagcttcaataga

SEQ ID NO: 487809 - DNA, 19 bp, Mus musculus
  siRNA target sequence for Zfp68 (NM_013844.1,1415-1433).
gagagaccatacatatgct

SEQ ID NO: 487810 - DNA, 19 bp, Mus musculus
  siRNA target sequence for Zfp68 (NM_013844.1,1417-1435).
gagaccatacatatgcttt

SEQ ID NO: 487811 - DNA, 19 bp, Mus musculus
  siRNA target sequence for Zfp68 (NM_013844.1,1449-1467).
ctttctatcgtaaatcaga

SEQ ID NO: 487812 - DNA, 19 bp, Mus musculus
  siRNA target sequence for Zfp68 (NM_013844.1,1458-1476).
gtaaatcagagcttactga

SEQ ID NO: 487813 - DNA, 19 bp, Mus musculus
  siRNA target sequence for Zfp68 (NM_013844.1,1621-1639).
ctccactaagtcctattta

SEQ ID NO: 487814 - DNA, 19 bp, Mus musculus
  siRNA target sequence for Zfp68 (NM_013844.1,1624-1642).
cactaagtcctatttaact

SEQ ID NO: 487815 - DNA, 19 bp, Mus musculus
  siRNA target sequence for Zfp68 (NM_013844.1,1688-1706).
gtatgtaggaagtcattta

SEQ ID NO: 487816 - DNA, 19 bp, Mus musculus
  siRNA target sequence for Zfp68 (NM_013844.1,1727-1745).
catcattggagaactcata

SEQ ID NO: 487817 - DNA, 19 bp, Mus musculus
  siRNA target sequence for Zfp68 (NM_013844.1,1841-1859).
cgctatgaatgtcaattat

SEQ ID NO: 487818 - DNA, 19 bp, Mus musculus
  siRNA target sequence for Zfp68 (NM_013844.1,1879-1897).
cacttcacacctcattgta

SEQ ID NO: 487819 - DNA, 19 bp, Mus musculus
  siRNA target sequence for Zfp68 (NM_013844.1,1957-1975).
ctatgataagtcaaacctt

SEQ ID NO: 487820 - DNA, 19 bp, Mus musculus
  siRNA target sequence for Zfp68 (NM_013844.1,2057-2075).
caacatcagacgatgtatt

SEQ ID NO: 487821 - DNA, 19 bp, Mus musculus
  siRNA target sequence for Zfp68 (NM_013844.1,2063-2081).
cagacgatgtattatgaat

SEQ ID NO: 487822 - DNA, 19 bp, Mus musculus
  siRNA target sequence for Zfp68 (NM_013844.1,2065-2083).
gacgatgtattatgaatat

SEQ ID NO: 487823 - DNA, 19 bp, Mus musculus
  siRNA target sequence for Zfp68 (NM_013844.1,2067-2085).
cgatgtattatgaatatga

SEQ ID NO: 487824 - DNA, 19 bp, Mus musculus
  siRNA target sequence for Zfp72 (NM_133228.2,411-429).
ctcactcggcactttctat

SEQ ID NO: 487825 - DNA, 19 bp, Mus musculus
  siRNA target sequence for Zfp72 (NM_133228.2,821-839).
gccttccgtaggtcaacat

SEQ ID NO: 487826 - DNA, 19 bp, Mus musculus
  siRNA target sequence for Zfp72 (NM_133228.2,822-840).
ccttccgtaggtcaacata

SEQ ID NO: 487827 - DNA, 19 bp, Mus musculus
  siRNA target sequence for Zfp72 (NM_133228.2,828-846).
gtaggtcaacatactttca

SEQ ID NO: 487828 - DNA, 19 bp, Mus musculus
  siRNA target sequence for Zfp72 (NM_133228.2,906-924).
cattctactatcgttcaaa

SEQ ID NO: 487829 - DNA, 19 bp, Mus musculus
  siRNA target sequence for Zfp72 (NM_133228.2,926-944).
ctgaagggacatcagatta

SEQ ID NO: 487830 - DNA, 19 bp, Mus musculus
  siRNA target sequence for Zfp72 (NM_133228.2,928-946).
gaagggacatcagattatt

SEQ ID NO: 487831 - DNA, 19 bp, Mus musculus
  siRNA target sequence for Zfp72 (NM_133228.2,999-1017).
ctagctcagacctttctaa

SEQ ID NO: 487832 - DNA, 19 bp, Mus musculus
  siRNA target sequence for Zfp72 (NM_133228.2,1251-1269).
ctcgctccgaactttctaa

SEQ ID NO: 487833 - DNA, 19 bp, Mus musculus
  siRNA target sequence for Zfp72 (NM_133228.2,1289-1307).
gaagtgaagctctacaact

SEQ ID NO: 487834 - DNA, 19 bp, Mus musculus
  siRNA target sequence for Zfp72 (NM_133228.2,1575-1593).
gattctcgactcactcata

SEQ ID NO: 487835 - DNA, 19 bp, Mus musculus
  siRNA target sequence for Zfp72 (NM_133228.2,1599-1617).
ctctgcacaaattacttca

SEQ ID NO: 487836 - DNA, 19 bp, Mus musculus
  siRNA target sequence for Zfp72 (NM_133228.2,1601-1619).
ctgcacaaattacttcata

SEQ ID NO: 487837 - DNA, 19 bp, Mus musculus
  siRNA target sequence for Zfp9 (NM_011763.1,169-187).
caagggacccgtgacatta

SEQ ID NO: 487838 - DNA, 19 bp, Mus musculus
  siRNA target sequence for Zfp9 (NM_011763.1,289-307).
gttctctgtgggttatcgt

SEQ ID NO: 487839 - DNA, 19 bp, Mus musculus
  siRNA target sequence for Zfp9 (NM_011763.1,310-328).
ggttaagccaagtgtgatt

SEQ ID NO: 487840 - DNA, 19 bp, Mus musculus
  siRNA target sequence for Zfp9 (NM_011763.1,321-339).
gtgtgattgcaaagttgaa

SEQ ID NO: 487841 - DNA, 19 bp, Mus musculus
  siRNA target sequence for Zfp9 (NM_011763.1,357-375).
ggccattagaagaattttt

SEQ ID NO: 487842 - DNA, 19 bp, Mus musculus
  siRNA target sequence for Zfp9 (NM_011763.1,378-396).
gtaagagccgtggtgataa

SEQ ID NO: 487843 - DNA, 19 bp, Mus musculus
  siRNA target sequence for Zfp9 (NM_011763.1,572-590).
cacaccaagaagtcctata

SEQ ID NO: 487844 - DNA, 19 bp, Mus musculus
  siRNA target sequence for Zfp9 (NM_011763.1,603-621).
gtggacaagctttctataa

SEQ ID NO: 487845 - DNA, 19 bp, Mus musculus
  siRNA target sequence for Zfp9 (NM_011763.1,606-624).
gacaagctttctataagaa

SEQ ID NO: 487846 - DNA, 19 bp, Mus musculus
  siRNA target sequence for Zfp9 (NM_011763.1,625-643).
cgaagacctcacaatccat

SEQ ID NO: 487847 - DNA, 19 bp, Mus musculus
  siRNA target sequence for Zfp9 (NM_011763.1,709-727).
gtcgtctctcactagacat

SEQ ID NO: 487848 - DNA, 19 bp, Mus musculus
  siRNA target sequence for Zfp9 (NM_011763.1,769-787).
gtgtgataaatccttctat

SEQ ID NO: 487849 - DNA, 19 bp, Mus musculus
  siRNA target sequence for Zfp9 (NM_011763.1,773-791).
gataaatccttctatcaga

SEQ ID NO: 487850 - DNA, 19 bp, Mus musculus
  siRNA target sequence for Zfp9 (NM_011763.1,1225-1243).
caaacacgagagaaagcat

SEQ ID NO: 487851 - DNA, 19 bp, Mus musculus
  siRNA target sequence for Zfp94 (NM_009568.1,461-479).
cgcttttctgctcacaaat

SEQ ID NO: 487852 - DNA, 19 bp, Mus musculus
  siRNA target sequence for Zfp94 (NM_009568.1,463-481).
cttttctgctcacaaatct

SEQ ID NO: 487853 - DNA, 19 bp, Mus musculus
  siRNA target sequence for Zfp94 (NM_009568.1,490-508).
gttagcagggacctaatga

SEQ ID NO: 487854 - DNA, 19 bp, Mus musculus
  siRNA target sequence for Zfp94 (NM_009568.1,582-600).
caggaagtacagcaaacat

SEQ ID NO: 487855 - DNA, 19 bp, Mus musculus
  siRNA target sequence for Zfp94 (NM_009568.1,598-616).
cattccggtcagaaaccat

SEQ ID NO: 487856 - DNA, 19 bp, Mus musculus
  siRNA target sequence for Zfp94 (NM_009568.1,938-956).
gtcacagctcggagtttaa

SEQ ID NO: 487857 - DNA, 19 bp, Mus musculus
  siRNA target sequence for Zfp94 (NM_009568.1,940-958).
cacagctcggagtttaaca

SEQ ID NO: 487858 - DNA, 19 bp, Mus musculus
  siRNA target sequence for Zfp94 (NM_009568.1,944-962).
gctcggagtttaacaatca

SEQ ID NO: 487859 - DNA, 19 bp, Mus musculus
  siRNA target sequence for Zfp94 (NM_009568.1,947-965).
cggagtttaacaatcacat

SEQ ID NO: 487860 - DNA, 19 bp, Mus musculus
  siRNA target sequence for Zfp94 (NM_009568.1,948-966).
ggagtttaacaatcacata

SEQ ID NO: 487861 - DNA, 19 bp, Mus musculus
  siRNA target sequence for Zfp94 (NM_009568.1,949-967).
gagtttaacaatcacataa

SEQ ID NO: 487862 - DNA, 19 bp, Mus musculus
  siRNA target sequence for Zfp94 (NM_009568.1,951-969).
gtttaacaatcacataaga

SEQ ID NO: 487863 - DNA, 19 bp, Mus musculus
  siRNA target sequence for Zfp94 (NM_009568.1,1356-1374).
ctgtcgggcctccaacttt

SEQ ID NO: 487864 - DNA, 19 bp, Mus musculus
  siRNA target sequence for Zfp94 (NM_009568.1,1408-1426).
ccgtatcgatgtgacatat

SEQ ID NO: 487865 - DNA, 19 bp, Mus musculus
  siRNA target sequence for Zfp94 (NM_009568.1,1613-1631).
ggagctcaagtctcctaat

SEQ ID NO: 487866 - DNA, 19 bp, Mus musculus
  siRNA target sequence for Zfp94 (NM_009568.1,1614-1632).
gagctcaagtctcctaatt

SEQ ID NO: 487867 - DNA, 19 bp, Mus musculus
  siRNA target sequence for Zfp94 (NM_009568.1,1616-1634).
gctcaagtctcctaattca

SEQ ID NO: 487868 - DNA, 19 bp, Mus musculus
  siRNA target sequence for Zfp94 (NM_009568.1,1654-1672).
gatgagggtcgcaaggatt

SEQ ID NO: 487869 - DNA, 19 bp, Mus musculus
  siRNA target sequence for Zik1 (NM_009577.2,336-354).
gcagaactttgcactcata

SEQ ID NO: 487870 - DNA, 19 bp, Mus musculus
  siRNA target sequence for Zik1 (NM_009577.2,361-379).
cagggttgtgggcataaaa

SEQ ID NO: 487871 - DNA, 19 bp, Mus musculus
  siRNA target sequence for Zik1 (NM_009577.2,412-430).
gcgtcaaagggtttgagat

SEQ ID NO: 487872 - DNA, 19 bp, Mus musculus
  siRNA target sequence for Zik1 (NM_009577.2,432-450).
cgagaccacaccgaaaact

SEQ ID NO: 487873 - DNA, 19 bp, Mus musculus
  siRNA target sequence for Zik1 (NM_009577.2,433-451).
gagaccacaccgaaaacta

SEQ ID NO: 487874 - DNA, 19 bp, Mus musculus
  siRNA target sequence for Zik1 (NM_009577.2,508-526).
cctgggcagaaacatagta

SEQ ID NO: 487875 - DNA, 19 bp, Mus musculus
  siRNA target sequence for Zik1 (NM_009577.2,552-570).
gcaccaagaccataatagt

SEQ ID NO: 487876 - DNA, 19 bp, Mus musculus
  siRNA target sequence for Zik1 (NM_009577.2,555-573).
ccaagaccataatagtaca

SEQ ID NO: 487877 - DNA, 19 bp, Mus musculus
  siRNA target sequence for Zik1 (NM_009577.2,602-620).
ggtcttcatacctgttcta

SEQ ID NO: 487878 - DNA, 19 bp, Mus musculus
  siRNA target sequence for Zik1 (NM_009577.2,640-658).
cccagttgggatgttgaaa

SEQ ID NO: 487879 - DNA, 19 bp, Mus musculus
  siRNA target sequence for Zik1 (NM_009577.2,661-679).
gacctcccagatatactga

SEQ ID NO: 487880 - DNA, 19 bp, Mus musculus
  siRNA target sequence for Zik1 (NM_009577.2,694-712).
caggtctgtcccaaaacta

SEQ ID NO: 487881 - DNA, 19 bp, Mus musculus
  siRNA target sequence for Zik1 (NM_009577.2,697-715).
gtctgtcccaaaactaaga

SEQ ID NO: 487882 - DNA, 19 bp, Mus musculus
  siRNA target sequence for Zik1 (NM_009577.2,781-799).
cagagcctttccagtcaaa

SEQ ID NO: 487883 - DNA, 19 bp, Mus musculus
  siRNA target sequence for Zik1 (NM_009577.2,786-804).
cctttccagtcaaaagcaa

SEQ ID NO: 487884 - DNA, 19 bp, Mus musculus
  siRNA target sequence for Zik1 (NM_009577.2,787-805).
ctttccagtcaaaagcaaa

SEQ ID NO: 487885 - DNA, 19 bp, Mus musculus
  siRNA target sequence for Zik1 (NM_009577.2,808-826).
cttgctcaccacccaaaaa

SEQ ID NO: 487886 - DNA, 19 bp, Mus musculus
  siRNA target sequence for Zik1 (NM_009577.2,927-945).
gccttgggagtgtagagat

SEQ ID NO: 487887 - DNA, 19 bp, Mus musculus
  siRNA target sequence for Zik1 (NM_009577.2,966-984).
gacctcccacctgaatgat

SEQ ID NO: 487888 - DNA, 19 bp, Mus musculus
  siRNA target sequence for Zik1 (NM_009577.2,978-996).
gaatgatcaccgtagaata

SEQ ID NO: 487889 - DNA, 19 bp, Mus musculus
  siRNA target sequence for Zik1 (NM_009577.2,982-1000).
gatcaccgtagaatacaca

SEQ ID NO: 487890 - DNA, 19 bp, Mus musculus
  siRNA target sequence for Zik1 (NM_009577.2,1122-1140).
gtcctttagtcaaaaagct

SEQ ID NO: 487891 - DNA, 19 bp, Mus musculus
  siRNA target sequence for Zik1 (NM_009577.2,1214-1232).
gtcaaagtgccattcttaa

SEQ ID NO: 487892 - DNA, 19 bp, Mus musculus
  siRNA target sequence for Zik1 (NM_009577.2,1467-1485).
ccaaaagtccggtctcatt

SEQ ID NO: 487893 - DNA, 19 bp, Mus musculus
  siRNA target sequence for Zik1 (NM_009577.2,1528-1546).
gacacatgtgggaattctt

SEQ ID NO: 487894 - DNA, 19 bp, Mus musculus
  siRNA target sequence for Zik1 (NM_009577.2,1566-1584).
cattcatcaccaaaaatgt

SEQ ID NO: 487895 - DNA, 19 bp, Mus musculus
  siRNA target sequence for Zim1 (NM_011769.2,702-720).
gaagaagacaggggataat

SEQ ID NO: 487896 - DNA, 19 bp, Mus musculus
  siRNA target sequence for Zim1 (NM_011769.2,739-757).
cggaagccagacaattcta

SEQ ID NO: 487897 - DNA, 19 bp, Mus musculus
  siRNA target sequence for Zim1 (NM_011769.2,744-762).
gccagacaattctaagaca

SEQ ID NO: 487898 - DNA, 19 bp, Mus musculus
  siRNA target sequence for Zim1 (NM_011769.2,777-795).
gcagaaggcggcagatcaa

SEQ ID NO: 487899 - DNA, 19 bp, Mus musculus
  siRNA target sequence for Zim1 (NM_011769.2,841-859).
gatgacaggccatctcaaa

SEQ ID NO: 487900 - DNA, 19 bp, Mus musculus
  siRNA target sequence for Zim1 (NM_011769.2,905-923).
ccagcataccgggcaataa

SEQ ID NO: 487901 - DNA, 19 bp, Mus musculus
  siRNA target sequence for Zim1 (NM_011769.2,908-926).
gcataccgggcaataagga

SEQ ID NO: 487902 - DNA, 19 bp, Mus musculus
  siRNA target sequence for Zim1 (NM_011769.2,914-932).
cgggcaataaggagaatga

SEQ ID NO: 487903 - DNA, 19 bp, Mus musculus
  siRNA target sequence for Zim1 (NM_011769.2,915-933).
gggcaataaggagaatgaa

SEQ ID NO: 487904 - DNA, 19 bp, Mus musculus
  siRNA target sequence for Zim1 (NM_011769.2,924-942).
ggagaatgaatctgcaatt

SEQ ID NO: 487905 - DNA, 19 bp, Mus musculus
  siRNA target sequence for Zim1 (NM_011769.2,927-945).
gaatgaatctgcaattcca

SEQ ID NO: 487906 - DNA, 19 bp, Mus musculus
  siRNA target sequence for Zim1 (NM_011769.2,948-966).
cacatcttcgggtcaaaca

SEQ ID NO: 487907 - DNA, 19 bp, Mus musculus
  siRNA target sequence for Zim1 (NM_011769.2,1008-1026).
gccgacctcggggaaagat

SEQ ID NO: 487908 - DNA, 19 bp, Mus musculus
  siRNA target sequence for Zim1 (NM_011769.2,1010-1028).
cgacctcggggaaagatgt

SEQ ID NO: 487909 - DNA, 19 bp, Mus musculus
  siRNA target sequence for Zim1 (NM_011769.2,1011-1029).
gacctcggggaaagatgtt

SEQ ID NO: 487910 - DNA, 19 bp, Mus musculus
  siRNA target sequence for Zim1 (NM_011769.2,1013-1031).
cctcggggaaagatgttga

SEQ ID NO: 487911 - DNA, 19 bp, Mus musculus
  siRNA target sequence for Zim1 (NM_011769.2,1081-1099).
cctgcccgacaaggtaaaa

SEQ ID NO: 487912 - DNA, 19 bp, Mus musculus
  siRNA target sequence for Zim1 (NM_011769.2,1082-1100).
ctgcccgacaaggtaaaaa

SEQ ID NO: 487913 - DNA, 19 bp, Mus musculus
  siRNA target sequence for Zim1 (NM_011769.2,1198-1216).
gacacgtgcggcaaatctt

SEQ ID NO: 487914 - DNA, 19 bp, Mus musculus
  siRNA target sequence for Zim1 (NM_011769.2,1214-1232).
ctttccggcacctctcata

SEQ ID NO: 487915 - DNA, 19 bp, Mus musculus
  siRNA target sequence for Zim1 (NM_011769.2,1578-1596).
gcatcagcggctccattta

SEQ ID NO: 487916 - DNA, 19 bp, Mus musculus
  siRNA target sequence for Zim1 (NM_011769.2,1579-1597).
catcagcggctccatttaa

SEQ ID NO: 487917 - DNA, 19 bp, Mus musculus
  siRNA target sequence for Zim1 (NM_011769.2,1616-1634).
gtgacaagtgcggaaaaca

SEQ ID NO: 487918 - DNA, 19 bp, Mus musculus
  siRNA target sequence for Zim1 (NM_011769.2,1639-1657).
cgaaacagctcgtacttga

SEQ ID NO: 487919 - DNA, 19 bp, Mus musculus
  siRNA target sequence for Zim1 (NM_011769.2,1785-1803).
caaggggtgtggaaagact

SEQ ID NO: 487920 - DNA, 19 bp, Mus musculus
  siRNA target sequence for Zim1 (NM_011769.2,1885-1903).
ggtttcactgacaaaacta

SEQ ID NO: 487921 - DNA, 19 bp, Mus musculus
  siRNA target sequence for Zim1 (NM_011769.2,1894-1912).
gacaaaactacattgaata

SEQ ID NO: 487922 - DNA, 19 bp, Mus musculus
  siRNA target sequence for Zim1 (NM_011769.2,1904-1922).
cattgaataatcacttgaa

SEQ ID NO: 487923 - DNA, 19 bp, Mus musculus
  siRNA target sequence for Zim1 (NM_011769.2,1956-1974).
ccagtgcgggagaaccttt

SEQ ID NO: 487924 - DNA, 19 bp, Mus musculus
  siRNA target sequence for Zim1 (NM_011769.2,1964-1982).
ggagaacctttaaaaaact

SEQ ID NO: 487925 - DNA, 19 bp, Mus musculus
  siRNA target sequence for 0610011D08Rik (NM_025647.2,123-141).
ccgttggtcgtgttcgttt

SEQ ID NO: 487926 - DNA, 19 bp, Mus musculus
  siRNA target sequence for 0610011D08Rik (NM_025647.2,124-142).
cgttggtcgtgttcgtttt

SEQ ID NO: 487927 - DNA, 19 bp, Mus musculus
  siRNA target sequence for 0610011D08Rik (NM_025647.2,254-272).
ctcacagtatggtgaactt

SEQ ID NO: 487928 - DNA, 19 bp, Mus musculus
  siRNA target sequence for 0610011D08Rik (NM_025647.2,582-600).
cttgaatcaacgaaaccaa

SEQ ID NO: 487929 - DNA, 19 bp, Mus musculus
  siRNA target sequence for 1110007H10Rik (NM_026765.2,256-274).
ggccaccatggtacaatga

SEQ ID NO: 487930 - DNA, 19 bp, Mus musculus
  siRNA target sequence for 1110007H10Rik (NM_026765.2,257-275).
gccaccatggtacaatgaa

SEQ ID NO: 487931 - DNA, 19 bp, Mus musculus
  siRNA target sequence for 1110007H10Rik (NM_026765.2,259-277).
caccatggtacaatgaaca

SEQ ID NO: 487932 - DNA, 19 bp, Mus musculus
  siRNA target sequence for 1110007H10Rik (NM_026765.2,289-307).
ccaaggaggcctttgctat

SEQ ID NO: 487933 - DNA, 19 bp, Mus musculus
  siRNA target sequence for 1110007H10Rik (NM_026765.2,356-374).
gatcattgaggcactagat

SEQ ID NO: 487934 - DNA, 19 bp, Mus musculus
  siRNA target sequence for 1110007H10Rik (NM_026765.2,395-413).
gtccatggactccttctat

SEQ ID NO: 487935 - DNA, 19 bp, Mus musculus
  siRNA target sequence for 1110007H10Rik (NM_026765.2,438-456).
gaacaggctgcctgtaaca

SEQ ID NO: 487936 - DNA, 19 bp, Mus musculus
  siRNA target sequence for 1110007H10Rik (NM_026765.2,441-459).
caggctgcctgtaacaatt

SEQ ID NO: 487937 - DNA, 19 bp, Mus musculus
  siRNA target sequence for 1110007H10Rik (NM_026765.2,449-467).
ctgtaacaatttcaacttt

SEQ ID NO: 487938 - DNA, 19 bp, Mus musculus
  siRNA target sequence for 1110007H10Rik (NM_026765.2,451-469).
gtaacaatttcaactttga

SEQ ID NO: 487939 - DNA, 19 bp, Mus musculus
  siRNA target sequence for 1110007H10Rik (NM_026765.2,481-499).
cctttgacttcgatctcat

SEQ ID NO: 487940 - DNA, 19 bp, Mus musculus
  siRNA target sequence for 1110007H10Rik (NM_026765.2,486-504).
gacttcgatctcatcattt

SEQ ID NO: 487941 - DNA, 19 bp, Mus musculus
  siRNA target sequence for 1110007H10Rik (NM_026765.2,545-563).
gcccatctatgatttcact

SEQ ID NO: 487942 - DNA, 19 bp, Mus musculus
  siRNA target sequence for 1110007H10Rik (NM_026765.2,562-580).
ctacccatagccggaaaaa

SEQ ID NO: 487943 - DNA, 19 bp, Mus musculus
  siRNA target sequence for 1110007H10Rik (NM_026765.2,594-612).
ctgtatggtgcgaatgtca

SEQ ID NO: 487944 - DNA, 19 bp, Mus musculus
  siRNA target sequence for 1110007H10Rik (NM_026765.2,779-797).
gtttgtcaaacctgcattt

SEQ ID NO: 487945 - DNA, 19 bp, Mus musculus
  siRNA target sequence for 1110007H10Rik (NM_026765.2,789-807).
cctgcatttgatcagtata

SEQ ID NO: 487946 - DNA, 19 bp, Mus musculus
  siRNA target sequence for 1110007H10Rik (NM_026765.2,790-808).
ctgcatttgatcagtatat

SEQ ID NO: 487947 - DNA, 19 bp, Mus musculus
  siRNA target sequence for 1110007H10Rik (NM_026765.2,793-811).
catttgatcagtatatcca

SEQ ID NO: 487948 - DNA, 19 bp, Mus musculus
  siRNA target sequence for 1110007H10Rik (NM_026765.2,817-835).
ccatgcggctggcagatat

SEQ ID NO: 487949 - DNA, 19 bp, Mus musculus
  siRNA target sequence for 1110007H10Rik (NM_026765.2,1035-1053).
gagactagccgggatgaat

SEQ ID NO: 487950 - DNA, 19 bp, Mus musculus
  siRNA target sequence for 1110007H10Rik (NM_026765.2,1039-1057).
ctagccgggatgaattcat

SEQ ID NO: 487951 - DNA, 19 bp, Mus musculus
  siRNA target sequence for 1110007H10Rik (NM_026765.2,1076-1094).
gatgcggctgcttattgaa

SEQ ID NO: 487952 - DNA, 19 bp, Mus musculus
  siRNA target sequence for 1110007H10Rik (NM_026765.2,1184-1202).
gatcaccggcgtgtcaatt

SEQ ID NO: 487953 - DNA, 19 bp, Mus musculus
  siRNA target sequence for 1110007H10Rik (NM_026765.2,1317-1335).
ctgaggcttcccaaggata

SEQ ID NO: 487954 - DNA, 19 bp, Mus musculus
  siRNA target sequence for 1110007H10Rik (NM_026765.2,1322-1340).
gcttcccaaggatatcagt

SEQ ID NO: 487955 - DNA, 19 bp, Mus musculus
  siRNA target sequence for 1110007H10Rik (NM_026765.2,1562-1580).
cccaggcattgggaacttt

SEQ ID NO: 487956 - DNA, 19 bp, Mus musculus
  siRNA target sequence for 1110012E06Rik (NM_029097.1,199-217).
gacagggacgtcaatcgat

SEQ ID NO: 487957 - DNA, 19 bp, Mus musculus
  siRNA target sequence for 1110012E06Rik (NM_029097.1,391-409).
cgccgaaacactcgttata

SEQ ID NO: 487958 - DNA, 19 bp, Mus musculus
  siRNA target sequence for 1110012E06Rik (NM_029097.1,393-411).
ccgaaacactcgttataga

SEQ ID NO: 487959 - DNA, 19 bp, Mus musculus
  siRNA target sequence for 1110012E06Rik (NM_029097.1,394-412).
cgaaacactcgttatagaa

SEQ ID NO: 487960 - DNA, 19 bp, Mus musculus
  siRNA target sequence for 1110012E06Rik (NM_029097.1,604-622).
gcaggtactgcgctattat

SEQ ID NO: 487961 - DNA, 19 bp, Mus musculus
  siRNA target sequence for 1110012E06Rik (NM_029097.1,638-656).
cgctacgtctggatggaaa

SEQ ID NO: 487962 - DNA, 19 bp, Mus musculus
  siRNA target sequence for 1110012E06Rik (NM_029097.1,752-770).
gctacgaggaagaccattt

SEQ ID NO: 487963 - DNA, 19 bp, Mus musculus
  siRNA target sequence for 1110012E06Rik (NM_029097.1,753-771).
ctacgaggaagaccattta

SEQ ID NO: 487964 - DNA, 19 bp, Mus musculus
  siRNA target sequence for 1110012E06Rik (NM_029097.1,876-894).
ggctggccgaccactacta

SEQ ID NO: 487965 - DNA, 19 bp, Mus musculus
  siRNA target sequence for 1110012E06Rik (NM_029097.1,949-967).
gtacaagaccagaaagcaa

SEQ ID NO: 487966 - DNA, 19 bp, Mus musculus
  siRNA target sequence for 1110012E06Rik (NM_029097.1,1646-1664).
cggctcgtgtgctttgaca

SEQ ID NO: 487967 - DNA, 19 bp, Mus musculus
  siRNA target sequence for 1110012E06Rik (NM_029097.1,1803-1821).
ccctcagccagctacatga

SEQ ID NO: 487968 - DNA, 19 bp, Mus musculus
  siRNA target sequence for 1110012E06Rik (NM_029097.1,1833-1851).
gcgaccccatggatctgaa

SEQ ID NO: 487969 - DNA, 19 bp, Mus musculus
  siRNA target sequence for 1110012E06Rik (NM_029097.1,2346-2364).
gcatccgcaccgttatggt

SEQ ID NO: 487970 - DNA, 19 bp, Mus musculus
  siRNA target sequence for 1110012E06Rik (NM_029097.1,2880-2898).
gctccctggatacttcatt

SEQ ID NO: 487971 - DNA, 19 bp, Mus musculus
  siRNA target sequence for 1110012E06Rik (NM_029097.1,2895-2913).
cattcagcgtcttcaagta

SEQ ID NO: 487972 - DNA, 19 bp, Mus musculus
  siRNA target sequence for 1110012E06Rik (NM_029097.1,3230-3248).
ctgcccaactacgagaata

SEQ ID NO: 487973 - DNA, 19 bp, Mus musculus
  siRNA target sequence for 1110012E06Rik (NM_029097.1,3470-3488).
ggtctggtcgccttcaact

SEQ ID NO: 487974 - DNA, 19 bp, Mus musculus
  siRNA target sequence for 1110012E06Rik (NM_029097.1,3471-3489).
gtctggtcgccttcaactt

SEQ ID NO: 487975 - DNA, 19 bp, Mus musculus
  siRNA target sequence for 1110012E06Rik (NM_029097.1,3564-3582).
gggcctccaagaagcaatt

SEQ ID NO: 487976 - DNA, 19 bp, Mus musculus
  siRNA target sequence for 1110048D14Rik (NM_183120.1,152-170).
gcttatggttggtacaata

SEQ ID NO: 487977 - DNA, 19 bp, Mus musculus
  siRNA target sequence for 1110048D14Rik (NM_183120.1,153-171).
cttatggttggtacaatat

SEQ ID NO: 487978 - DNA, 19 bp, Mus musculus
  siRNA target sequence for 1110048D14Rik (NM_183120.1,158-176).
ggttggtacaatatttaat

SEQ ID NO: 487979 - DNA, 19 bp, Mus musculus
  siRNA target sequence for 1110048D14Rik (NM_183120.1,177-195).
gtatataggcagaagtatt

SEQ ID NO: 487980 - DNA, 19 bp, Mus musculus
  siRNA target sequence for 1110048D14Rik (NM_183120.1,191-209).
gtattatagggtctttaaa

SEQ ID NO: 487981 - DNA, 19 bp, Mus musculus
  siRNA target sequence for 1110048D14Rik (NM_183120.1,223-241).
gtagcactgcttttaaact

SEQ ID NO: 487982 - DNA, 19 bp, Mus musculus
  siRNA target sequence for 1110048D14Rik (NM_183120.1,226-244).
gcactgcttttaaacttaa

SEQ ID NO: 487983 - DNA, 19 bp, Mus musculus
  siRNA target sequence for 1110048D14Rik (NM_183120.1,254-272).
gatatttttcatatgtcaa

SEQ ID NO: 487984 - DNA, 19 bp, Mus musculus
  siRNA target sequence for 1110048D14Rik (NM_183120.1,268-286).
gtcaagacacactggtaaa

SEQ ID NO: 487985 - DNA, 19 bp, Mus musculus
  siRNA target sequence for 1110048D14Rik (NM_183120.1,270-288).
caagacacactggtaaatt

SEQ ID NO: 487986 - DNA, 19 bp, Mus musculus
  siRNA target sequence for 1110048D14Rik (NM_183120.1,279-297).
ctggtaaatttctgttaca

SEQ ID NO: 487987 - DNA, 19 bp, Mus musculus
  siRNA target sequence for 1110055A02Rik (NM_025414.2,1151-1169).
ctcctgcaggtcctacata

SEQ ID NO: 487988 - DNA, 19 bp, Mus musculus
  siRNA target sequence for 1110055A02Rik (NM_025414.2,1154-1172).
ctgcaggtcctacataata

SEQ ID NO: 487989 - DNA, 19 bp, Mus musculus
  siRNA target sequence for 1110055A02Rik (NM_025414.2,1156-1174).
gcaggtcctacataataca

SEQ ID NO: 487990 - DNA, 19 bp, Mus musculus
  siRNA target sequence for 1110055A02Rik (NM_025414.2,1157-1175).
caggtcctacataatacaa

SEQ ID NO: 487991 - DNA, 19 bp, Mus musculus
  siRNA target sequence for 1110055A02Rik (NM_025414.2,1271-1289).
cttgtggaaaccattcaca

SEQ ID NO: 487992 - DNA, 19 bp, Mus musculus
  siRNA target sequence for 1110055A02Rik (NM_025414.2,1333-1351).
catagaaagatataaacta

SEQ ID NO: 487993 - DNA, 19 bp, Mus musculus
  siRNA target sequence for 1110055A02Rik (NM_025414.2,1474-1492).
ccatgctctgccagcttta

SEQ ID NO: 487994 - DNA, 19 bp, Mus musculus
  siRNA target sequence for 1110055A02Rik (NM_025414.2,1521-1539).
cggctaagaacacacaaat

SEQ ID NO: 487995 - DNA, 19 bp, Mus musculus
  siRNA target sequence for 1110055A02Rik (NM_025414.2,1659-1677).
gacaccggctccaaaagca

SEQ ID NO: 487996 - DNA, 19 bp, Mus musculus
  siRNA target sequence for 1110055A02Rik (NM_025414.2,1728-1746).
ggttaactcggaaacacat

SEQ ID NO: 487997 - DNA, 19 bp, Mus musculus
  siRNA target sequence for 1110055A02Rik (NM_025414.2,1738-1756).
gaaacacatcagaaggtta

SEQ ID NO: 487998 - DNA, 19 bp, Mus musculus
  siRNA target sequence for 1110055A02Rik (NM_025414.2,1742-1760).
cacatcagaaggttacaca

SEQ ID NO: 487999 - DNA, 19 bp, Mus musculus
  siRNA target sequence for 1110055A02Rik (NM_025414.2,1824-1842).
ctaaagaactggatggtat

SEQ ID NO: 488000 - DNA, 19 bp, Mus musculus
  siRNA target sequence for 1110055A02Rik (NM_025414.2,1908-1926).
ggttcctgggagcaataat

SEQ ID NO: 488001 - DNA, 19 bp, Mus musculus
  siRNA target sequence for 1110055A02Rik (NM_025414.2,1970-1988).
ggcgtacgtggctttcaga

SEQ ID NO: 488002 - DNA, 19 bp, Mus musculus
  siRNA target sequence for 1110055A02Rik (NM_025414.2,2069-2087).
gctggtattacatctatca

SEQ ID NO: 488003 - DNA, 19 bp, Mus musculus
  siRNA target sequence for 1110055A02Rik (NM_025414.2,2093-2111).
ctgccccagggctcgataa

SEQ ID NO: 488004 - DNA, 19 bp, Mus musculus
  siRNA target sequence for 1110055A02Rik (NM_025414.2,2096-2114).
ccccagggctcgataaagt

SEQ ID NO: 488005 - DNA, 19 bp, Mus musculus
  siRNA target sequence for 1110055A02Rik (NM_025414.2,2097-2115).
cccagggctcgataaagtt

SEQ ID NO: 488006 - DNA, 19 bp, Mus musculus
  siRNA target sequence for 1110055A02Rik (NM_025414.2,2098-2116).
ccagggctcgataaagttt

SEQ ID NO: 488007 - DNA, 19 bp, Mus musculus
  siRNA target sequence for 1110055A02Rik (NM_025414.2,2102-2120).
ggctcgataaagtttcact

SEQ ID NO: 488008 - DNA, 19 bp, Mus musculus
  siRNA target sequence for 1190004I24Rik (NM_175137.3,391-409).
gccccaggcactttgtaca

SEQ ID NO: 488009 - DNA, 19 bp, Mus musculus
  siRNA target sequence for 1190004I24Rik (NM_175137.3,549-567).
gtcacaaggaggtagtatt

SEQ ID NO: 488010 - DNA, 19 bp, Mus musculus
  siRNA target sequence for 1190004I24Rik (NM_175137.3,553-571).
caaggaggtagtattgtat

SEQ ID NO: 488011 - DNA, 19 bp, Mus musculus
  siRNA target sequence for 1190004I24Rik (NM_175137.3,557-575).
gaggtagtattgtatgaaa

SEQ ID NO: 488012 - DNA, 19 bp, Mus musculus
  siRNA target sequence for 1190004I24Rik (NM_175137.3,673-691).
gcgagagggcttcttcaaa

SEQ ID NO: 488013 - DNA, 19 bp, Mus musculus
  siRNA target sequence for 1190004I24Rik (NM_175137.3,728-746).
gagaccttttccatgtgta

SEQ ID NO: 488014 - DNA, 19 bp, Mus musculus
  siRNA target sequence for 1190004I24Rik (NM_175137.3,865-883).
gtctgatcacgcaggaatt

SEQ ID NO: 488015 - DNA, 19 bp, Mus musculus
  siRNA target sequence for 1190004I24Rik (NM_175137.3,869-887).
gatcacgcaggaattgcta

SEQ ID NO: 488016 - DNA, 19 bp, Mus musculus
  siRNA target sequence for 1190004I24Rik (NM_175137.3,1098-1116).
ctttcgtgcgactctacaa

SEQ ID NO: 488017 - DNA, 19 bp, Mus musculus
  siRNA target sequence for 1190004I24Rik (NM_175137.3,1134-1152).
ggaaccgccagcttgtcaa

SEQ ID NO: 488018 - DNA, 19 bp, Mus musculus
  siRNA target sequence for 1190004I24Rik (NM_175137.3,1145-1163).
cttgtcaactggtcatgta

SEQ ID NO: 488019 - DNA, 19 bp, Mus musculus
  siRNA target sequence for 1190004I24Rik (NM_175137.3,1148-1166).
gtcaactggtcatgtactt

SEQ ID NO: 488020 - DNA, 19 bp, Mus musculus
  siRNA target sequence for 1190004I24Rik (NM_175137.3,1242-1260).
gcccaacccctgtgtcttt

SEQ ID NO: 488021 - DNA, 19 bp, Mus musculus
  siRNA target sequence for 1190004I24Rik (NM_175137.3,1381-1399).
cccgagatacacgcattta

SEQ ID NO: 488022 - DNA, 19 bp, Mus musculus
  siRNA target sequence for 1190004I24Rik (NM_175137.3,1383-1401).
cgagatacacgcatttaca

SEQ ID NO: 488023 - DNA, 19 bp, Mus musculus
  siRNA target sequence for 1190004I24Rik (NM_175137.3,1384-1402).
gagatacacgcatttacat

SEQ ID NO: 488024 - DNA, 19 bp, Mus musculus
  siRNA target sequence for 1190004I24Rik (NM_175137.3,1503-1521).
ctgctcacagtccaataga

SEQ ID NO: 488025 - DNA, 19 bp, Mus musculus
  siRNA target sequence for 1190004I24Rik (NM_175137.3,1900-1918).
gtggtggggccatcagatt

SEQ ID NO: 488026 - DNA, 19 bp, Mus musculus
  siRNA target sequence for 1190004I24Rik (NM_175137.3,2595-2613).
gtgccctgggggataactt

SEQ ID NO: 488027 - DNA, 19 bp, Mus musculus
  siRNA target sequence for 1190004I24Rik (NM_175137.3,2739-2757).
cccacaccctgtatcattt

SEQ ID NO: 488028 - DNA, 19 bp, Mus musculus
  siRNA target sequence for 1190004I24Rik (NM_175137.3,2834-2852).
ccccctcaggtcctgtttt

SEQ ID NO: 488029 - DNA, 19 bp, Mus musculus
  siRNA target sequence for 1190004I24Rik (NM_175137.3,2837-2855).
cctcaggtcctgttttcct

SEQ ID NO: 488030 - DNA, 19 bp, Mus musculus
  siRNA target sequence for 1190004I24Rik (NM_175137.3,3318-3336).
ctgcccgaaggcagaagtt

SEQ ID NO: 488031 - DNA, 19 bp, Mus musculus
  siRNA target sequence for 1190004I24Rik (NM_175137.3,3412-3430).
cctccatctggaattgtca

SEQ ID NO: 488032 - DNA, 19 bp, Mus musculus
  siRNA target sequence for 1190004I24Rik (NM_175137.3,3413-3431).
ctccatctggaattgtcaa

SEQ ID NO: 488033 - DNA, 19 bp, Mus musculus
  siRNA target sequence for 1200009I24Rik (NM_026171.1,157-175).
catccgacttgcaaagact

SEQ ID NO: 488034 - DNA, 19 bp, Mus musculus
  siRNA target sequence for 1200009I24Rik (NM_026171.1,172-190).
gactgtacagtgtagatta

SEQ ID NO: 488035 - DNA, 19 bp, Mus musculus
  siRNA target sequence for 1200009I24Rik (NM_026171.1,330-348).
gagtacactgaaagctatt

SEQ ID NO: 488036 - DNA, 19 bp, Mus musculus
  siRNA target sequence for 1200009I24Rik (NM_026171.1,332-350).
gtacactgaaagctattct

SEQ ID NO: 488037 - DNA, 19 bp, Mus musculus
  siRNA target sequence for 1200009I24Rik (NM_026171.1,435-453).
ggaaactcagagtctgttt

SEQ ID NO: 488038 - DNA, 19 bp, Mus musculus
  siRNA target sequence for 1200009I24Rik (NM_026171.1,497-515).
gccattgctgacgtctaaa

SEQ ID NO: 488039 - DNA, 19 bp, Mus musculus
  siRNA target sequence for 1200009I24Rik (NM_026171.1,498-516).
ccattgctgacgtctaaaa

SEQ ID NO: 488040 - DNA, 19 bp, Mus musculus
  siRNA target sequence for 1200009I24Rik (NM_026171.1,517-535).
cgggctccgtgccattgaa

SEQ ID NO: 488041 - DNA, 19 bp, Mus musculus
  siRNA target sequence for 1200009I24Rik (NM_026171.1,519-537).
ggctccgtgccattgaaga

SEQ ID NO: 488042 - DNA, 19 bp, Mus musculus
  siRNA target sequence for 1200009I24Rik (NM_026171.1,558-576).
ggaggatggtttattgaca

SEQ ID NO: 488043 - DNA, 19 bp, Mus musculus
  siRNA target sequence for 1200009I24Rik (NM_026171.1,559-577).
gaggatggtttattgacaa

SEQ ID NO: 488044 - DNA, 19 bp, Mus musculus
  siRNA target sequence for 1200009I24Rik (NM_026171.1,561-579).
ggatggtttattgacaaaa

SEQ ID NO: 488045 - DNA, 19 bp, Mus musculus
  siRNA target sequence for 1200009I24Rik (NM_026171.1,672-690).
gactcttctcttttggaaa

SEQ ID NO: 488046 - DNA, 19 bp, Mus musculus
  siRNA target sequence for 1200009I24Rik (NM_026171.1,679-697).
ctcttttggaaagtgataa

SEQ ID NO: 488047 - DNA, 19 bp, Mus musculus
  siRNA target sequence for 1200009I24Rik (NM_026171.1,850-868).
gaggcaatgatgcaacatt

SEQ ID NO: 488048 - DNA, 19 bp, Mus musculus
  siRNA target sequence for 1200009I24Rik (NM_026171.1,852-870).
ggcaatgatgcaacattaa

SEQ ID NO: 488049 - DNA, 19 bp, Mus musculus
  siRNA target sequence for 1200009I24Rik (NM_026171.1,901-919).
gccatccagaggtatacca

SEQ ID NO: 488050 - DNA, 19 bp, Mus musculus
  siRNA target sequence for 1200009I24Rik (NM_026171.1,997-1015).
caatagcaggggaacttga

SEQ ID NO: 488051 - DNA, 19 bp, Mus musculus
  siRNA target sequence for 1200009I24Rik (NM_026171.1,1011-1029).
cttgacttgccgattctga

SEQ ID NO: 488052 - DNA, 19 bp, Mus musculus
  siRNA target sequence for 1200009I24Rik (NM_026171.1,1077-1095).
cagaagctccgtgagttat

SEQ ID NO: 488053 - DNA, 19 bp, Mus musculus
  siRNA target sequence for 1200009I24Rik (NM_026171.1,1109-1127).
gtcaaatgcaccatgtatt

SEQ ID NO: 488054 - DNA, 19 bp, Mus musculus
  siRNA target sequence for 1200009I24Rik (NM_026171.1,1111-1129).
caaatgcaccatgtattgt

SEQ ID NO: 488055 - DNA, 19 bp, Mus musculus
  siRNA target sequence for 1200009I24Rik (NM_026171.1,1150-1168).
caattacccccaaaagaga

SEQ ID NO: 488056 - DNA, 19 bp, Mus musculus
  siRNA target sequence for 1200009I24Rik (NM_026171.1,1249-1267).
cagctcgggtcctagttat

SEQ ID NO: 488057 - DNA, 19 bp, Mus musculus
  siRNA target sequence for 1200009I24Rik (NM_026171.1,1398-1416).
ctgaggcttccggaaactt

SEQ ID NO: 488058 - DNA, 19 bp, Mus musculus
  siRNA target sequence for 1200009I24Rik (NM_026171.1,1402-1420).
ggcttccggaaacttttaa

SEQ ID NO: 488059 - DNA, 19 bp, Mus musculus
  siRNA target sequence for 1200009I24Rik (NM_026171.1,1403-1421).
gcttccggaaacttttaat

SEQ ID NO: 488060 - DNA, 19 bp, Mus musculus
  siRNA target sequence for 1200009I24Rik (NM_026171.1,1491-1509).
gccatgtgtgcggtcaata

SEQ ID NO: 488061 - DNA, 19 bp, Mus musculus
  siRNA target sequence for 1200009I24Rik (NM_026171.1,1501-1519).
cggtcaatagggtcttgat

SEQ ID NO: 488062 - DNA, 19 bp, Mus musculus
  siRNA target sequence for 1200009I24Rik (NM_026171.1,1503-1521).
gtcaatagggtcttgatga

SEQ ID NO: 488063 - DNA, 19 bp, Mus musculus
  siRNA target sequence for 1200009I24Rik (NM_026171.1,1505-1523).
caatagggtcttgatgaaa

SEQ ID NO: 488064 - DNA, 19 bp, Mus musculus
  siRNA target sequence for 1200009I24Rik (NM_026171.1,1686-1704).
caaggactgtgcattgaat

SEQ ID NO: 488065 - DNA, 19 bp, Mus musculus
  siRNA target sequence for 1200009I24Rik (NM_026171.1,1689-1707).
ggactgtgcattgaattga

SEQ ID NO: 488066 - DNA, 19 bp, Mus musculus
  siRNA target sequence for 1200009I24Rik (NM_026171.1,1748-1766).
caaaagggaaggctttgta

SEQ ID NO: 488067 - DNA, 19 bp, Mus musculus
  siRNA target sequence for 1200009I24Rik (NM_026171.1,1764-1782).
gtaactgtccctaatgtga

SEQ ID NO: 488068 - DNA, 19 bp, Mus musculus
  siRNA target sequence for 1200009I24Rik (NM_026171.1,1781-1799).
gacatgggctgatattggt

SEQ ID NO: 488069 - DNA, 19 bp, Mus musculus
  siRNA target sequence for 1200009I24Rik (NM_026171.1,1797-1815).
ggtgccctggaagatatta

SEQ ID NO: 488070 - DNA, 19 bp, Mus musculus
  siRNA target sequence for 1200009I24Rik (NM_026171.1,1802-1820).
cctggaagatattagagat

SEQ ID NO: 488071 - DNA, 19 bp, Mus musculus
  siRNA target sequence for 1200009I24Rik (NM_026171.1,1821-1839).
gagcttataatggcaatat

SEQ ID NO: 488072 - DNA, 19 bp, Mus musculus
  siRNA target sequence for 1200009I24Rik (NM_026171.1,1927-1945).
gaaaaactctgctagcaaa

SEQ ID NO: 488073 - DNA, 19 bp, Mus musculus
  siRNA target sequence for 1200009I24Rik (NM_026171.1,1954-1972).
caaatgagtctggactaaa

SEQ ID NO: 488074 - DNA, 19 bp, Mus musculus
  siRNA target sequence for 1200009I24Rik (NM_026171.1,1961-1979).
gtctggactaaattttata

SEQ ID NO: 488075 - DNA, 19 bp, Mus musculus
  siRNA target sequence for 1200009I24Rik (NM_026171.1,1981-1999).
ctgtcaaaggccctgaatt

SEQ ID NO: 488076 - DNA, 19 bp, Mus musculus
  siRNA target sequence for 1200009I24Rik (NM_026171.1,1983-2001).
gtcaaaggccctgaattat

SEQ ID NO: 488077 - DNA, 19 bp, Mus musculus
  siRNA target sequence for 1200009I24Rik (NM_026171.1,1989-2007).
ggccctgaattattgaata

SEQ ID NO: 488078 - DNA, 19 bp, Mus musculus
  siRNA target sequence for 1200009I24Rik (NM_026171.1,2028-2046).
cgtgctgttcgacaagttt

SEQ ID NO: 488079 - DNA, 19 bp, Mus musculus
  siRNA target sequence for 1200009I24Rik (NM_026171.1,2029-2047).
gtgctgttcgacaagtttt

SEQ ID NO: 488080 - DNA, 19 bp, Mus musculus
  siRNA target sequence for 1200009I24Rik (NM_026171.1,2068-2086).
ccccctgcgtgatattttt

SEQ ID NO: 488081 - DNA, 19 bp, Mus musculus
  siRNA target sequence for 1200009I24Rik (NM_026171.1,2069-2087).
cccctgcgtgatatttttt

SEQ ID NO: 488082 - DNA, 19 bp, Mus musculus
  siRNA target sequence for 1200009I24Rik (NM_026171.1,2071-2089).
cctgcgtgatattttttga

SEQ ID NO: 488083 - DNA, 19 bp, Mus musculus
  siRNA target sequence for 1200009I24Rik (NM_026171.1,2072-2090).
ctgcgtgatattttttgat

SEQ ID NO: 488084 - DNA, 19 bp, Mus musculus
  siRNA target sequence for 1200009I24Rik (NM_026171.1,2074-2092).
gcgtgatattttttgatga

SEQ ID NO: 488085 - DNA, 19 bp, Mus musculus
  siRNA target sequence for 1200009I24Rik (NM_026171.1,2088-2106).
gatgaagtggatgctttat

SEQ ID NO: 488086 - DNA, 19 bp, Mus musculus
  siRNA target sequence for 1200009I24Rik (NM_026171.1,2140-2158).
gtgttcgtgtggtgaatca

SEQ ID NO: 488087 - DNA, 19 bp, Mus musculus
  siRNA target sequence for 1200009I24Rik (NM_026171.1,2188-2206).
cacgccagcaagtttttat

SEQ ID NO: 488088 - DNA, 19 bp, Mus musculus
  siRNA target sequence for 1200009I24Rik (NM_026171.1,2215-2233).
ccaccaatagaccagatat

SEQ ID NO: 488089 - DNA, 19 bp, Mus musculus
  siRNA target sequence for 1200009I24Rik (NM_026171.1,2219-2237).
caatagaccagatatcatt

SEQ ID NO: 488090 - DNA, 19 bp, Mus musculus
  siRNA target sequence for 1200009I24Rik (NM_026171.1,2302-2320).
cagaccgtgttgccatatt

SEQ ID NO: 488091 - DNA, 19 bp, Mus musculus
  siRNA target sequence for 1200009I24Rik (NM_026171.1,2304-2322).
gaccgtgttgccatattaa

SEQ ID NO: 488092 - DNA, 19 bp, Mus musculus
  siRNA target sequence for 1200009I24Rik (NM_026171.1,2307-2325).
cgtgttgccatattaaaga

SEQ ID NO: 488093 - DNA, 19 bp, Mus musculus
  siRNA target sequence for 1200009I24Rik (NM_026171.1,2310-2328).
gttgccatattaaagacta

SEQ ID NO: 488094 - DNA, 19 bp, Mus musculus
  siRNA target sequence for 1200009I24Rik (NM_026171.1,2391-2409).
gaccttcgttgtaattgct

SEQ ID NO: 488095 - DNA, 19 bp, Mus musculus
  siRNA target sequence for 1200009I24Rik (NM_026171.1,2394-2412).
cttcgttgtaattgctata

SEQ ID NO: 488096 - DNA, 19 bp, Mus musculus
  siRNA target sequence for 1200009I24Rik (NM_026171.1,2457-2475).
gccctgagacaagaaataa

SEQ ID NO: 488097 - DNA, 19 bp, Mus musculus
  siRNA target sequence for 1200009I24Rik (NM_026171.1,2459-2477).
cctgagacaagaaataaca

SEQ ID NO: 488098 - DNA, 19 bp, Mus musculus
  siRNA target sequence for 1200009I24Rik (NM_026171.1,2497-2515).
gagcaggtgagcttaaggt

SEQ ID NO: 488099 - DNA, 19 bp, Mus musculus
  siRNA target sequence for 1200009I24Rik (NM_026171.1,2505-2523).
gagcttaaggtcagtcata

SEQ ID NO: 488100 - DNA, 19 bp, Mus musculus
  siRNA target sequence for 1200009I24Rik (NM_026171.1,2573-2591).
ggatcaagtgatgtatgaa

SEQ ID NO: 488101 - DNA, 19 bp, Mus musculus
  siRNA target sequence for 1200013B22Rik (NM_028778.2,174-192).
gcggacgggctcatcaagt

SEQ ID NO: 488102 - DNA, 19 bp, Mus musculus
  siRNA target sequence for 1200013B22Rik (NM_028778.2,185-203).
catcaagtcgcctaaacct

SEQ ID NO: 488103 - DNA, 19 bp, Mus musculus
  siRNA target sequence for 1200013B22Rik (NM_028778.2,425-443).
caaccacccccacatcatt

SEQ ID NO: 488104 - DNA, 19 bp, Mus musculus
  siRNA target sequence for 1200013B22Rik (NM_028778.2,453-471).
gaagtgtttgagaatagca

SEQ ID NO: 488105 - DNA, 19 bp, Mus musculus
  siRNA target sequence for 1200013B22Rik (NM_028778.2,499-517).
ccagccgaggcgatctgta

SEQ ID NO: 488106 - DNA, 19 bp, Mus musculus
  siRNA target sequence for 1200013B22Rik (NM_028778.2,500-518).
cagccgaggcgatctgtat

SEQ ID NO: 488107 - DNA, 19 bp, Mus musculus
  siRNA target sequence for 1200013B22Rik (NM_028778.2,502-520).
gccgaggcgatctgtatga

SEQ ID NO: 488108 - DNA, 19 bp, Mus musculus
  siRNA target sequence for 1200013B22Rik (NM_028778.2,503-521).
ccgaggcgatctgtatgat

SEQ ID NO: 488109 - DNA, 19 bp, Mus musculus
  siRNA target sequence for 1200013B22Rik (NM_028778.2,504-522).
cgaggcgatctgtatgatt

SEQ ID NO: 488110 - DNA, 19 bp, Mus musculus
  siRNA target sequence for 1200013B22Rik (NM_028778.2,552-570).
cgggacgccaggcatttct

SEQ ID NO: 488111 - DNA, 19 bp, Mus musculus
  siRNA target sequence for 1200013B22Rik (NM_028778.2,553-571).
gggacgccaggcatttctt

SEQ ID NO: 488112 - DNA, 19 bp, Mus musculus
  siRNA target sequence for 1200013B22Rik (NM_028778.2,746-764).
ctacgcctcgcctgagata

SEQ ID NO: 488113 - DNA, 19 bp, Mus musculus
  siRNA target sequence for 1200013B22Rik (NM_028778.2,750-768).
gcctcgcctgagatagtca

SEQ ID NO: 488114 - DNA, 19 bp, Mus musculus
  siRNA target sequence for 1200013B22Rik (NM_028778.2,751-769).
cctcgcctgagatagtcaa

SEQ ID NO: 488115 - DNA, 19 bp, Mus musculus
  siRNA target sequence for 1200013B22Rik (NM_028778.2,857-875).
cgggcaggatcataaaaca

SEQ ID NO: 488116 - DNA, 19 bp, Mus musculus
  siRNA target sequence for 1200013B22Rik (NM_028778.2,859-877).
ggcaggatcataaaacact

SEQ ID NO: 488117 - DNA, 19 bp, Mus musculus
  siRNA target sequence for 1200013B22Rik (NM_028778.2,939-957).
ctgatccggtggctgttaa

SEQ ID NO: 488118 - DNA, 19 bp, Mus musculus
  siRNA target sequence for 1200013B22Rik (NM_028778.2,1067-1085).
gcaccctagtggtgacttt

SEQ ID NO: 488119 - DNA, 19 bp, Mus musculus
  siRNA target sequence for 1200013B22Rik (NM_028778.2,1203-1221).
gggctggagcggcaacatt

SEQ ID NO: 488120 - DNA, 19 bp, Mus musculus
  siRNA target sequence for 1200013B22Rik (NM_028778.2,1205-1223).
gctggagcggcaacattct

SEQ ID NO: 488121 - DNA, 19 bp, Mus musculus
  siRNA target sequence for 1200013B22Rik (NM_028778.2,1209-1227).
gagcggcaacattctctta

SEQ ID NO: 488122 - DNA, 19 bp, Mus musculus
  siRNA target sequence for 1200013B22Rik (NM_028778.2,1212-1230).
cggcaacattctcttaaga

SEQ ID NO: 488123 - DNA, 19 bp, Mus musculus
  siRNA target sequence for 1200013B22Rik (NM_028778.2,1244-1262).
gaatgacatggctcaaaat

SEQ ID NO: 488124 - DNA, 19 bp, Mus musculus
  siRNA target sequence for 1200013B22Rik (NM_028778.2,1303-1321).
gcaagagcagccttaagct

SEQ ID NO: 488125 - DNA, 19 bp, Mus musculus
  siRNA target sequence for 1200013B22Rik (NM_028778.2,1304-1322).
caagagcagccttaagctt

SEQ ID NO: 488126 - DNA, 19 bp, Mus musculus
  siRNA target sequence for 1200013B22Rik (NM_028778.2,1320-1338).
cttccgaaaggcattctca

SEQ ID NO: 488127 - DNA, 19 bp, Mus musculus
  siRNA target sequence for 1200013B22Rik (NM_028778.2,1324-1342).
cgaaaggcattctcaagaa

SEQ ID NO: 488128 - DNA, 19 bp, Mus musculus
  siRNA target sequence for 1200013B22Rik (NM_028778.2,1391-1409).
cagaccggtgcctgatact

SEQ ID NO: 488129 - DNA, 19 bp, Mus musculus
  siRNA target sequence for 1200013B22Rik (NM_028778.2,1466-1484).
gtctcgacagcgtgaatct

SEQ ID NO: 488130 - DNA, 19 bp, Mus musculus
  siRNA target sequence for 1200013B22Rik (NM_028778.2,1476-1494).
cgtgaatctggttactact

SEQ ID NO: 488131 - DNA, 19 bp, Mus musculus
  siRNA target sequence for 1200013B22Rik (NM_028778.2,1510-1528).
gcgagtctggggaactctt

SEQ ID NO: 488132 - DNA, 19 bp, Mus musculus
  siRNA target sequence for 1200013B22Rik (NM_028778.2,1511-1529).
cgagtctggggaactctta

SEQ ID NO: 488133 - DNA, 19 bp, Mus musculus
  siRNA target sequence for 1200013B22Rik (NM_028778.2,1606-1624).
gcaagggcattctcaaact

SEQ ID NO: 488134 - DNA, 19 bp, Mus musculus
  siRNA target sequence for 1200013B22Rik (NM_028778.2,1637-1655).
ctcccgcacagccttagaa

SEQ ID NO: 488135 - DNA, 19 bp, Mus musculus
  siRNA target sequence for 1200013B22Rik (NM_028778.2,1765-1783).
ccgagtcctttgaccaatt

SEQ ID NO: 488136 - DNA, 19 bp, Mus musculus
  siRNA target sequence for 1200013B22Rik (NM_028778.2,1903-1921).
gggatagctgcttttctct

SEQ ID NO: 488137 - DNA, 19 bp, Mus musculus
  siRNA target sequence for 1200016D23Rik (NM_028776.3,210-228).
ctgagggagtctcctttta

SEQ ID NO: 488138 - DNA, 19 bp, Mus musculus
  siRNA target sequence for 1200016D23Rik (NM_028776.3,214-232).
gggagtctccttttacctt

SEQ ID NO: 488139 - DNA, 19 bp, Mus musculus
  siRNA target sequence for 1200016D23Rik (NM_028776.3,215-233).
ggagtctccttttacctta

SEQ ID NO: 488140 - DNA, 19 bp, Mus musculus
  siRNA target sequence for 1200016D23Rik (NM_028776.3,247-265).
ctgtttatcccgccatatt

SEQ ID NO: 488141 - DNA, 19 bp, Mus musculus
  siRNA target sequence for 1200016D23Rik (NM_028776.3,283-301).
cttccgtgtttgtatataa

SEQ ID NO: 488142 - DNA, 19 bp, Mus musculus
  siRNA target sequence for 1200016D23Rik (NM_028776.3,359-377).
cccttgcttgctaagattt

SEQ ID NO: 488143 - DNA, 19 bp, Mus musculus
  siRNA target sequence for 1200016D23Rik (NM_028776.3,475-493).
gtgctggaatctatgacat

SEQ ID NO: 488144 - DNA, 19 bp, Mus musculus
  siRNA target sequence for 1200016D23Rik (NM_028776.3,526-544).
gacatttgacacacaacaa

SEQ ID NO: 488145 - DNA, 19 bp, Mus musculus
  siRNA target sequence for 1200016D23Rik (NM_028776.3,550-568).
gcctgtcgtctgtttttgt

SEQ ID NO: 488146 - DNA, 19 bp, Mus musculus
  siRNA target sequence for 1200016D23Rik (NM_028776.3,647-665).
gaatatccagtcagtaaga

SEQ ID NO: 488147 - DNA, 19 bp, Mus musculus
  siRNA target sequence for 1200016D23Rik (NM_028776.3,921-939).
ctagaagttgtgaacttct

SEQ ID NO: 488148 - DNA, 19 bp, Mus musculus
  siRNA target sequence for 1200016D23Rik (NM_028776.3,1106-1124).
ctatctacttggtcctaaa

SEQ ID NO: 488149 - DNA, 19 bp, Mus musculus
  siRNA target sequence for 1200016D23Rik (NM_028776.3,1416-1434).
ggagaacgaaccaagatct

SEQ ID NO: 488150 - DNA, 19 bp, Mus musculus
  siRNA target sequence for 1200016D23Rik (NM_028776.3,1514-1532).
gcagagtcgggtctcaaaa

SEQ ID NO: 488151 - DNA, 19 bp, Mus musculus
  siRNA target sequence for 1200016D23Rik (NM_028776.3,1541-1559).
ggacccctcgtctaacgta

SEQ ID NO: 488152 - DNA, 19 bp, Mus musculus
  siRNA target sequence for 1200016D23Rik (NM_028776.3,1542-1560).
gacccctcgtctaacgtat

SEQ ID NO: 488153 - DNA, 19 bp, Mus musculus
  siRNA target sequence for 1200016D23Rik (NM_028776.3,1604-1622).
gcgcatacaggaagaatgt

SEQ ID NO: 488154 - DNA, 19 bp, Mus musculus
  siRNA target sequence for 1200016D23Rik (NM_028776.3,1605-1623).
cgcatacaggaagaatgtt

SEQ ID NO: 488155 - DNA, 19 bp, Mus musculus
  siRNA target sequence for 1200016D23Rik (NM_028776.3,1640-1658).
gacaggtgatcagttttct

SEQ ID NO: 488156 - DNA, 19 bp, Mus musculus
  siRNA target sequence for 1200016D23Rik (NM_028776.3,1642-1660).
caggtgatcagttttctca

SEQ ID NO: 488157 - DNA, 19 bp, Mus musculus
  siRNA target sequence for 1200016D23Rik (NM_028776.3,1723-1741).
gcttccctgcaggttctaa

SEQ ID NO: 488158 - DNA, 19 bp, Mus musculus
  siRNA target sequence for 1200016D23Rik (NM_028776.3,1724-1742).
cttccctgcaggttctaat

SEQ ID NO: 488159 - DNA, 19 bp, Mus musculus
  siRNA target sequence for 1200016D23Rik (NM_028776.3,1902-1920).
ggcactgaaataaactcaa

SEQ ID NO: 488160 - DNA, 19 bp, Mus musculus
  siRNA target sequence for 1200016D23Rik (NM_028776.3,2029-2047).
caaagaccagtcatagaca

SEQ ID NO: 488161 - DNA, 19 bp, Mus musculus
  siRNA target sequence for 1200016D23Rik (NM_028776.3,2067-2085).
ccccaagtgtcacaagaaa

SEQ ID NO: 488162 - DNA, 19 bp, Mus musculus
  siRNA target sequence for 1200016D23Rik (NM_028776.3,2117-2135).
gggagaagagtttaccatt

SEQ ID NO: 488163 - DNA, 19 bp, Mus musculus
  siRNA target sequence for 1200016D23Rik (NM_028776.3,2124-2142).
gagtttaccattcaagtaa

SEQ ID NO: 488164 - DNA, 19 bp, Mus musculus
  siRNA target sequence for 1200016D23Rik (NM_028776.3,2172-2190).
gactggtttgcagatatga

SEQ ID NO: 488165 - DNA, 19 bp, Mus musculus
  siRNA target sequence for 1200016D23Rik (NM_028776.3,2220-2238).
cttattctgcctgaactaa

SEQ ID NO: 488166 - DNA, 19 bp, Mus musculus
  siRNA target sequence for 1200016D23Rik (NM_028776.3,2352-2370).
gagctagcctgggaagata

SEQ ID NO: 488167 - DNA, 19 bp, Mus musculus
  siRNA target sequence for 1300002A08Rik (NM_025827.2,295-313).
gccaccattgcacagaatt

SEQ ID NO: 488168 - DNA, 19 bp, Mus musculus
  siRNA target sequence for 1300002A08Rik (NM_025827.2,299-317).
ccattgcacagaattggaa

SEQ ID NO: 488169 - DNA, 19 bp, Mus musculus
  siRNA target sequence for 1300002A08Rik (NM_025827.2,357-375).
ccaaaccacactacacttt

SEQ ID NO: 488170 - DNA, 19 bp, Mus musculus
  siRNA target sequence for 1300002A08Rik (NM_025827.2,407-425).
gtgcaggtcttaaaagaga

SEQ ID NO: 488171 - DNA, 19 bp, Mus musculus
  siRNA target sequence for 1300002A08Rik (NM_025827.2,467-485).
gaggaatttcccaatatct

SEQ ID NO: 488172 - DNA, 19 bp, Mus musculus
  siRNA target sequence for 1300002A08Rik (NM_025827.2,476-494).
cccaatatctgcaaaagca

SEQ ID NO: 488173 - DNA, 19 bp, Mus musculus
  siRNA target sequence for 1300002A08Rik (NM_025827.2,537-555).
cagtgcagttggttgaaat

SEQ ID NO: 488174 - DNA, 19 bp, Mus musculus
  siRNA target sequence for 1300002A08Rik (NM_025827.2,548-566).
gttgaaatgttggatatgt

SEQ ID NO: 488175 - DNA, 19 bp, Mus musculus
  siRNA target sequence for 1300002A08Rik (NM_025827.2,567-585).
ccgtccctgcagttgctaa

SEQ ID NO: 488176 - DNA, 19 bp, Mus musculus
  siRNA target sequence for 1300002A08Rik (NM_025827.2,568-586).
cgtccctgcagttgctaaa

SEQ ID NO: 488177 - DNA, 19 bp, Mus musculus
  siRNA target sequence for 1300002A08Rik (NM_025827.2,569-587).
gtccctgcagttgctaaat

SEQ ID NO: 488178 - DNA, 19 bp, Mus musculus
  siRNA target sequence for 1300002A08Rik (NM_025827.2,589-607).
gagacgtcttttagataat

SEQ ID NO: 488179 - DNA, 19 bp, Mus musculus
  siRNA target sequence for 1300002A08Rik (NM_025827.2,591-609).
gacgtcttttagataatct

SEQ ID NO: 488180 - DNA, 19 bp, Mus musculus
  siRNA target sequence for 1300002A08Rik (NM_025827.2,620-638).
gctctaccagacattctaa

SEQ ID NO: 488181 - DNA, 19 bp, Mus musculus
  siRNA target sequence for 1300002A08Rik (NM_025827.2,623-641).
ctaccagacattctaactt

SEQ ID NO: 488182 - DNA, 19 bp, Mus musculus
  siRNA target sequence for 1300002A08Rik (NM_025827.2,635-653).
ctaacttcaattattcgaa

SEQ ID NO: 488183 - DNA, 19 bp, Mus musculus
  siRNA target sequence for 1300002A08Rik (NM_025827.2,667-685).
gaagctccagatcttagat

SEQ ID NO: 488184 - DNA, 19 bp, Mus musculus
  siRNA target sequence for 1300002A08Rik (NM_025827.2,695-713).
ctggaggatcggttcaaga

SEQ ID NO: 488185 - DNA, 19 bp, Mus musculus
  siRNA target sequence for 1300002A08Rik (NM_025827.2,698-716).
gaggatcggttcaagatga

SEQ ID NO: 488186 - DNA, 19 bp, Mus musculus
  siRNA target sequence for 1300002A08Rik (NM_025827.2,718-736).
catacctctgcttgttaga

SEQ ID NO: 488187 - DNA, 19 bp, Mus musculus
  siRNA target sequence for 1300002A08Rik (NM_025827.2,727-745).
gcttgttagacagattgaa

SEQ ID NO: 488188 - DNA, 19 bp, Mus musculus
  siRNA target sequence for 1300002A08Rik (NM_025827.2,761-779).
cagaagactcgcaaaccta

SEQ ID NO: 488189 - DNA, 19 bp, Mus musculus
  siRNA target sequence for 1300002A08Rik (NM_025827.2,766-784).
gactcgcaaacctaaacaa

SEQ ID NO: 488190 - DNA, 19 bp, Mus musculus
  siRNA target sequence for 1300002A08Rik (NM_025827.2,768-786).
ctcgcaaacctaaacaaga

SEQ ID NO: 488191 - DNA, 19 bp, Mus musculus
  siRNA target sequence for 1300002A08Rik (NM_025827.2,790-808).
cgacaagagggttatagca

SEQ ID NO: 488192 - DNA, 19 bp, Mus musculus
  siRNA target sequence for 1300002A08Rik (NM_025827.2,793-811).
caagagggttatagcaata

SEQ ID NO: 488193 - DNA, 19 bp, Mus musculus
  siRNA target sequence for 1300002A08Rik (NM_025827.2,926-944).
gaacaggctcataaagtct

SEQ ID NO: 488194 - DNA, 19 bp, Mus musculus
  siRNA target sequence for 1300002A08Rik (NM_025827.2,952-970).
ggagataaaaagactcaaa

SEQ ID NO: 488195 - DNA, 19 bp, Mus musculus
  siRNA target sequence for 1300002A08Rik (NM_025827.2,992-1010).
gaatatgctctgactagaa

SEQ ID NO: 488196 - DNA, 19 bp, Mus musculus
  siRNA target sequence for 1300002A08Rik (NM_025827.2,998-1016).
gctctgactagaaattatt

SEQ ID NO: 488197 - DNA, 19 bp, Mus musculus
  siRNA target sequence for 1300002A08Rik (NM_025827.2,1003-1021).
gactagaaattatttggaa

SEQ ID NO: 488198 - DNA, 19 bp, Mus musculus
  siRNA target sequence for 1300002A08Rik (NM_025827.2,1042-1060).
gaacaaaagtacaactgat

SEQ ID NO: 488199 - DNA, 19 bp, Mus musculus
  siRNA target sequence for 1300002A08Rik (NM_025827.2,1100-1118).
gaccattatgccatggaaa

SEQ ID NO: 488200 - DNA, 19 bp, Mus musculus
  siRNA target sequence for 1300002A08Rik (NM_025827.2,1128-1146).
ggagggttttggaatactt

SEQ ID NO: 488201 - DNA, 19 bp, Mus musculus
  siRNA target sequence for 1300002A08Rik (NM_025827.2,1204-1222).
gcctggagtaggcaaaaca

SEQ ID NO: 488202 - DNA, 19 bp, Mus musculus
  siRNA target sequence for 1300002A08Rik (NM_025827.2,1335-1353).
gtatgcctggtcgtatcat

SEQ ID NO: 488203 - DNA, 19 bp, Mus musculus
  siRNA target sequence for 1300002A08Rik (NM_025827.2,1339-1357).
gcctggtcgtatcatcaat

SEQ ID NO: 488204 - DNA, 19 bp, Mus musculus
  siRNA target sequence for 1300002A08Rik (NM_025827.2,1465-1483).
ggatcctgaacaaaaccat

SEQ ID NO: 488205 - DNA, 19 bp, Mus musculus
  siRNA target sequence for 1300002A08Rik (NM_025827.2,1489-1507).
cacagatcactatctaaat

SEQ ID NO: 488206 - DNA, 19 bp, Mus musculus
  siRNA target sequence for 1300002A08Rik (NM_025827.2,1491-1509).
cagatcactatctaaatgt

SEQ ID NO: 488207 - DNA, 19 bp, Mus musculus
  siRNA target sequence for 1300002A08Rik (NM_025827.2,1582-1600).
ggacaggatggagatcatt

SEQ ID NO: 488208 - DNA, 19 bp, Mus musculus
  siRNA target sequence for 1300002A08Rik (NM_025827.2,1724-1742).
gccatcattaccagataca

SEQ ID NO: 488209 - DNA, 19 bp, Mus musculus
  siRNA target sequence for 1300002A08Rik (NM_025827.2,1792-1810).
ccgtgctgtggcagtgaaa

SEQ ID NO: 488210 - DNA, 19 bp, Mus musculus
  siRNA target sequence for 1300002A08Rik (NM_025827.2,1941-1959).
cacctgaaatgccaattct

SEQ ID NO: 488211 - DNA, 19 bp, Mus musculus
  siRNA target sequence for 1300002A08Rik (NM_025827.2,1943-1961).
cctgaaatgccaattctga

SEQ ID NO: 488212 - DNA, 19 bp, Mus musculus
  siRNA target sequence for 1300002A08Rik (NM_025827.2,1944-1962).
ctgaaatgccaattctgat

SEQ ID NO: 488213 - DNA, 19 bp, Mus musculus
  siRNA target sequence for 1300002A08Rik (NM_025827.2,2014-2032).
ggtatctgagcgtttgagt

SEQ ID NO: 488214 - DNA, 19 bp, Mus musculus
  siRNA target sequence for 1300002A08Rik (NM_025827.2,2064-2082).
ctcccttgggtggcaaaat

SEQ ID NO: 488215 - DNA, 19 bp, Mus musculus
  siRNA target sequence for 1300002A08Rik (NM_025827.2,2067-2085).
ccttgggtggcaaaatcat

SEQ ID NO: 488216 - DNA, 19 bp, Mus musculus
  siRNA target sequence for 1300002A08Rik (NM_025827.2,2073-2091).
gtggcaaaatcatgtttgt

SEQ ID NO: 488217 - DNA, 19 bp, Mus musculus
  siRNA target sequence for 1300002A08Rik (NM_025827.2,2086-2104).
gtttgtggaagcaagtaga

SEQ ID NO: 488218 - DNA, 19 bp, Mus musculus
  siRNA target sequence for 1300002A08Rik (NM_025827.2,2108-2126).
gacggtgaaggccaactaa

SEQ ID NO: 488219 - DNA, 19 bp, Mus musculus
  siRNA target sequence for 1300002A08Rik (NM_025827.2,2110-2128).
cggtgaaggccaactaaca

SEQ ID NO: 488220 - DNA, 19 bp, Mus musculus
  siRNA target sequence for 1300002A08Rik (NM_025827.2,2112-2130).
gtgaaggccaactaacact

SEQ ID NO: 488221 - DNA, 19 bp, Mus musculus
  siRNA target sequence for 1300002A08Rik (NM_025827.2,2165-2183).
gcccatctcgccattagct

SEQ ID NO: 488222 - DNA, 19 bp, Mus musculus
  siRNA target sequence for 1300002A08Rik (NM_025827.2,2184-2202).
ggcttcgaagcaatgcaaa

SEQ ID NO: 488223 - DNA, 19 bp, Mus musculus
  siRNA target sequence for 1300002A08Rik (NM_025827.2,2203-2221).
gaaataccacctgactaat

SEQ ID NO: 488224 - DNA, 19 bp, Mus musculus
  siRNA target sequence for 1300002A08Rik (NM_025827.2,2209-2227).
ccacctgactaatgctttt

SEQ ID NO: 488225 - DNA, 19 bp, Mus musculus
  siRNA target sequence for 1300002A08Rik (NM_025827.2,2217-2235).
ctaatgcttttggaagttt

SEQ ID NO: 488226 - DNA, 19 bp, Mus musculus
  siRNA target sequence for 1300002A08Rik (NM_025827.2,2301-2319).
catctgctggtgttaccat

SEQ ID NO: 488227 - DNA, 19 bp, Mus musculus
  siRNA target sequence for 1300002A08Rik (NM_025827.2,2306-2324).
gctggtgttaccatagtaa

SEQ ID NO: 488228 - DNA, 19 bp, Mus musculus
  siRNA target sequence for 1300002A08Rik (NM_025827.2,2325-2343).
cttgtctcgcctcactttt

SEQ ID NO: 488229 - DNA, 19 bp, Mus musculus
  siRNA target sequence for 1300002A08Rik (NM_025827.2,2353-2371).
gcttgtgcgctcagatgta

SEQ ID NO: 488230 - DNA, 19 bp, Mus musculus
  siRNA target sequence for 1300002A08Rik (NM_025827.2,2392-2410).
gctgagagggcttgttctt

SEQ ID NO: 488231 - DNA, 19 bp, Mus musculus
  siRNA target sequence for 1300002A08Rik (NM_025827.2,2412-2430).
cagtgggtggaattaaaga

SEQ ID NO: 488232 - DNA, 19 bp, Mus musculus
  siRNA target sequence for 1300002A08Rik (NM_025827.2,2454-2472).
caggactgaagcagatcat

SEQ ID NO: 488233 - DNA, 19 bp, Mus musculus
  siRNA target sequence for 1300002A08Rik (NM_025827.2,2518-2536).
cgtcagacaggatctaagt

SEQ ID NO: 488234 - DNA, 19 bp, Mus musculus
  siRNA target sequence for 1300002A08Rik (NM_025827.2,2519-2537).
gtcagacaggatctaagtt

SEQ ID NO: 488235 - DNA, 19 bp, Mus musculus
  siRNA target sequence for 1300002A08Rik (NM_025827.2,2523-2541).
gacaggatctaagttttgt

SEQ ID NO: 488236 - DNA, 19 bp, Mus musculus
  siRNA target sequence for 1300007K12Rik (NM_133695.1,978-996).
ggattgtgaccagttcaat

SEQ ID NO: 488237 - DNA, 19 bp, Mus musculus
  siRNA target sequence for 1300007K12Rik (NM_133695.1,1492-1510).
ctatggcatctttacattt

SEQ ID NO: 488238 - DNA, 19 bp, Mus musculus
  siRNA target sequence for 1700054C12Rik (NM_183262.1,436-454).
gcagctacggcgtggttta

SEQ ID NO: 488239 - DNA, 19 bp, Mus musculus
  siRNA target sequence for 1700054C12Rik (NM_183262.1,437-455).
cagctacggcgtggtttat

SEQ ID NO: 488240 - DNA, 19 bp, Mus musculus
  siRNA target sequence for 1700054C12Rik (NM_183262.1,439-457).
gctacggcgtggtttatga

SEQ ID NO: 488241 - DNA, 19 bp, Mus musculus
  siRNA target sequence for 1700054C12Rik (NM_183262.1,801-819).
gacccagccaccaacaaaa

SEQ ID NO: 488242 - DNA, 19 bp, Mus musculus
  siRNA target sequence for 1700054C12Rik (NM_183262.1,845-863).
cattgccttcctgcataaa

SEQ ID NO: 488243 - DNA, 19 bp, Mus musculus
  siRNA target sequence for 1700054C12Rik (NM_183262.1,993-1011).
gagggcaatcaagataaca

SEQ ID NO: 488244 - DNA, 19 bp, Mus musculus
  siRNA target sequence for 1700054C12Rik (NM_183262.1,995-1013).
gggcaatcaagataacaaa

SEQ ID NO: 488245 - DNA, 19 bp, Mus musculus
  siRNA target sequence for 1700054C12Rik (NM_183262.1,1051-1069).
gtggctcagacttctacat

SEQ ID NO: 488246 - DNA, 19 bp, Mus musculus
  siRNA target sequence for 1700054C12Rik (NM_183262.1,1136-1154).
ctgggcaatgatagaaaga

SEQ ID NO: 488247 - DNA, 19 bp, Mus musculus
  siRNA target sequence for 1700054C12Rik (NM_183262.1,1138-1156).
gggcaatgatagaaagaat

SEQ ID NO: 488248 - DNA, 19 bp, Mus musculus
  siRNA target sequence for 1700054C12Rik (NM_183262.1,1139-1157).
ggcaatgatagaaagaatt

SEQ ID NO: 488249 - DNA, 19 bp, Mus musculus
  siRNA target sequence for 1700054C12Rik (NM_183262.1,1193-1211).
ggggacctacattaagcaa

SEQ ID NO: 488250 - DNA, 19 bp, Mus musculus
  siRNA target sequence for 1700054C12Rik (NM_183262.1,1234-1252).
gtgaggcgctgctagaaaa

SEQ ID NO: 488251 - DNA, 19 bp, Mus musculus
  siRNA target sequence for 1700054C12Rik (NM_183262.1,1269-1287).
catatcccccagaaacgta

SEQ ID NO: 488252 - DNA, 19 bp, Mus musculus
  siRNA target sequence for 1700054C12Rik (NM_183262.1,1307-1325).
ggtcaagcagctcttgaaa

SEQ ID NO: 488253 - DNA, 19 bp, Mus musculus
  siRNA target sequence for 1700091F14Rik (NM_183099.1,282-300).
cggatcagagggtgttcat

SEQ ID NO: 488254 - DNA, 19 bp, Mus musculus
  siRNA target sequence for 1700091F14Rik (NM_183099.1,283-301).
ggatcagagggtgttcata

SEQ ID NO: 488255 - DNA, 19 bp, Mus musculus
  siRNA target sequence for 1700091F14Rik (NM_183099.1,308-326).
gttcgagaatgcatgaaca

SEQ ID NO: 488256 - DNA, 19 bp, Mus musculus
  siRNA target sequence for 1700091F14Rik (NM_183099.1,318-336).
gcatgaacaacggttactt

SEQ ID NO: 488257 - DNA, 19 bp, Mus musculus
  siRNA target sequence for 1700091F14Rik (NM_183099.1,393-411).
caacacgtgagcgaatgaa

SEQ ID NO: 488258 - DNA, 19 bp, Mus musculus
  siRNA target sequence for 1700091F14Rik (NM_183099.1,497-515).
gcggaatactccagaaagt

SEQ ID NO: 488259 - DNA, 19 bp, Mus musculus
  siRNA target sequence for 1700091F14Rik (NM_183099.1,498-516).
cggaatactccagaaagtt

SEQ ID NO: 488260 - DNA, 19 bp, Mus musculus
  siRNA target sequence for 1700091F14Rik (NM_183099.1,514-532).
gttcctgccccgtgagatt

SEQ ID NO: 488261 - DNA, 19 bp, Mus musculus
  siRNA target sequence for 1700091F14Rik (NM_183099.1,517-535).
cctgccccgtgagatttta

SEQ ID NO: 488262 - DNA, 19 bp, Mus musculus
  siRNA target sequence for 1700091F14Rik (NM_183099.1,518-536).
ctgccccgtgagattttat

SEQ ID NO: 488263 - DNA, 19 bp, Mus musculus
  siRNA target sequence for 1700091F14Rik (NM_183099.1,520-538).
gccccgtgagattttatca

SEQ ID NO: 488264 - DNA, 19 bp, Mus musculus
  siRNA target sequence for 1700091F14Rik (NM_183099.1,522-540).
cccgtgagattttatcact

SEQ ID NO: 488265 - DNA, 19 bp, Mus musculus
  siRNA target sequence for 1700091F14Rik (NM_183099.1,769-787).
cagggacttgaaatgtgaa

SEQ ID NO: 488266 - DNA, 19 bp, Mus musculus
  siRNA target sequence for 1700091F14Rik (NM_183099.1,799-817).
ggatgaccagggcttcata

SEQ ID NO: 488267 - DNA, 19 bp, Mus musculus
  siRNA target sequence for 1700091F14Rik (NM_183099.1,800-818).
gatgaccagggcttcataa

SEQ ID NO: 488268 - DNA, 19 bp, Mus musculus
  siRNA target sequence for 1700112N14Rik (NM_175031.2,212-230).
ccacgttttggagatgatt

SEQ ID NO: 488269 - DNA, 19 bp, Mus musculus
  siRNA target sequence for 1700112N14Rik (NM_175031.2,239-257).
ctcttttgggagagtgtat

SEQ ID NO: 488270 - DNA, 19 bp, Mus musculus
  siRNA target sequence for 1700112N14Rik (NM_175031.2,252-270).
gtgtataagggccgaaaaa

SEQ ID NO: 488271 - DNA, 19 bp, Mus musculus
  siRNA target sequence for 1700112N14Rik (NM_175031.2,338-356).
gaatctgcaacgagagatt

SEQ ID NO: 488272 - DNA, 19 bp, Mus musculus
  siRNA target sequence for 1700112N14Rik (NM_175031.2,382-400).
ccaacattgtgcatatgct

SEQ ID NO: 488273 - DNA, 19 bp, Mus musculus
  siRNA target sequence for 1700112N14Rik (NM_175031.2,450-468).
gaaggagaactctttcaga

SEQ ID NO: 488274 - DNA, 19 bp, Mus musculus
  siRNA target sequence for 1700112N14Rik (NM_175031.2,563-581).
cctacaccgcgacatgaaa

SEQ ID NO: 488275 - DNA, 19 bp, Mus musculus
  siRNA target sequence for 1700112N14Rik (NM_175031.2,601-619).
ccaagggtggtggcattaa

SEQ ID NO: 488276 - DNA, 19 bp, Mus musculus
  siRNA target sequence for 1700112N14Rik (NM_175031.2,605-623).
gggtggtggcattaaactt

SEQ ID NO: 488277 - DNA, 19 bp, Mus musculus
  siRNA target sequence for 1700112N14Rik (NM_175031.2,606-624).
ggtggtggcattaaacttt

SEQ ID NO: 488278 - DNA, 19 bp, Mus musculus
  siRNA target sequence for 1700112N14Rik (NM_175031.2,684-702).
ggcacaccgctctatatgt

SEQ ID NO: 488279 - DNA, 19 bp, Mus musculus
  siRNA target sequence for 1700112N14Rik (NM_175031.2,852-870).
cgctggccctccaccatta

SEQ ID NO: 488280 - DNA, 19 bp, Mus musculus
  siRNA target sequence for 1700112N14Rik (NM_175031.2,854-872).
ctggccctccaccattagt

SEQ ID NO: 488281 - DNA, 19 bp, Mus musculus
  siRNA target sequence for 1700112N14Rik (NM_175031.2,931-949).
cctggccagacctcttaca

SEQ ID NO: 488282 - DNA, 19 bp, Mus musculus
  siRNA target sequence for 1700112N14Rik (NM_175031.2,932-950).
ctggccagacctcttacat

SEQ ID NO: 488283 - DNA, 19 bp, Mus musculus
  siRNA target sequence for 1700112N14Rik (NM_175031.2,968-986).
ccgtgtcaccatcataact

SEQ ID NO: 488284 - DNA, 19 bp, Mus musculus
  siRNA target sequence for 1700112N14Rik (NM_175031.2,1002-1020).
gatttgggcaccccattta

SEQ ID NO: 488285 - DNA, 19 bp, Mus musculus
  siRNA target sequence for 1700112N14Rik (NM_175031.2,1007-1025).
gggcaccccatttactagt

SEQ ID NO: 488286 - DNA, 19 bp, Mus musculus
  siRNA target sequence for 1700112N14Rik (NM_175031.2,1103-1121).
cctgcgccaggcctgtaaa

SEQ ID NO: 488287 - DNA, 19 bp, Mus musculus
  siRNA target sequence for 1700112N14Rik (NM_175031.2,1107-1125).
cgccaggcctgtaaactca

SEQ ID NO: 488288 - DNA, 19 bp, Mus musculus
  siRNA target sequence for 1700112N14Rik (NM_175031.2,1108-1126).
gccaggcctgtaaactcat

SEQ ID NO: 488289 - DNA, 19 bp, Mus musculus
  siRNA target sequence for 1700112N14Rik (NM_175031.2,1255-1273).
gcctcttggctggtatact

SEQ ID NO: 488290 - DNA, 19 bp, Mus musculus
  siRNA target sequence for 1700112N14Rik (NM_175031.2,1266-1284).
ggtatactggcttcagaaa

SEQ ID NO: 488291 - DNA, 19 bp, Mus musculus
  siRNA target sequence for 1700112N14Rik (NM_175031.2,1267-1285).
gtatactggcttcagaaat

SEQ ID NO: 488292 - DNA, 19 bp, Mus musculus
  siRNA target sequence for 1700112N14Rik (NM_175031.2,1327-1345).
gtacctctcgggaaaacca

SEQ ID NO: 488293 - DNA, 19 bp, Mus musculus
  siRNA target sequence for 1700112N14Rik (NM_175031.2,1402-1420).
ggcagagcactgatgtagt

SEQ ID NO: 488294 - DNA, 19 bp, Mus musculus
  siRNA target sequence for 1700112N14Rik (NM_175031.2,1509-1527).
cccctcaccctgttgtgta

SEQ ID NO: 488295 - DNA, 19 bp, Mus musculus
  siRNA target sequence for 1700112N14Rik (NM_175031.2,1510-1528).
ccctcaccctgttgtgtaa

SEQ ID NO: 488296 - DNA, 19 bp, Mus musculus
  siRNA target sequence for 1700112N14Rik (NM_175031.2,1666-1684).
ctgtgctcttgtattcctt

SEQ ID NO: 488297 - DNA, 19 bp, Mus musculus
  siRNA target sequence for 1700112N14Rik (NM_175031.2,1800-1818).
gtggttcaggcctactttt

SEQ ID NO: 488298 - DNA, 19 bp, Mus musculus
  siRNA target sequence for 1700112N14Rik (NM_175031.2,1803-1821).
gttcaggcctacttttcgt

SEQ ID NO: 488299 - DNA, 19 bp, Mus musculus
  siRNA target sequence for 1700112N14Rik (NM_175031.2,1814-1832).
cttttcgtgcaccttcaat

SEQ ID NO: 488300 - DNA, 19 bp, Mus musculus
  siRNA target sequence for 1700112N14Rik (NM_175031.2,2352-2370).
ctctacgcctgctgctata

SEQ ID NO: 488301 - DNA, 19 bp, Mus musculus
  siRNA target sequence for 1700112N14Rik (NM_175031.2,2357-2375).
cgcctgctgctatattagt

SEQ ID NO: 488302 - DNA, 19 bp, Mus musculus
  siRNA target sequence for 1700112N14Rik (NM_175031.2,2359-2377).
cctgctgctatattagtga

SEQ ID NO: 488303 - DNA, 19 bp, Mus musculus
  siRNA target sequence for 1700112N14Rik (NM_175031.2,2556-2574).
gaggttgctactctcttta

SEQ ID NO: 488304 - DNA, 19 bp, Mus musculus
  siRNA target sequence for 1700112N14Rik (NM_175031.2,2717-2735).
gctgactccgccgtatagt

SEQ ID NO: 488305 - DNA, 19 bp, Mus musculus
  siRNA target sequence for 1700112N14Rik (NM_175031.2,2718-2736).
ctgactccgccgtatagtt

SEQ ID NO: 488306 - DNA, 19 bp, Mus musculus
  siRNA target sequence for 1700112N14Rik (NM_175031.2,2720-2738).
gactccgccgtatagttgt

SEQ ID NO: 488307 - DNA, 19 bp, Mus musculus
  siRNA target sequence for 1700112N14Rik (NM_175031.2,2838-2856).
ctgtggcaccgcttttcca

SEQ ID NO: 488308 - DNA, 19 bp, Mus musculus
  siRNA target sequence for 1700112N14Rik (NM_175031.2,2892-2910).
gaagacgacctgctactat

SEQ ID NO: 488309 - DNA, 19 bp, Mus musculus
  siRNA target sequence for 1700112N14Rik (NM_175031.2,2895-2913).
gacgacctgctactatcaa

SEQ ID NO: 488310 - DNA, 19 bp, Mus musculus
  siRNA target sequence for 1700112N14Rik (NM_175031.2,3263-3281).
ccaccacctttcgttgtta

SEQ ID NO: 488311 - DNA, 19 bp, Mus musculus
  siRNA target sequence for 1700112N14Rik (NM_175031.2,3266-3284).
ccacctttcgttgttacaa

SEQ ID NO: 488312 - DNA, 19 bp, Mus musculus
  siRNA target sequence for 1810022J16Rik (NM_026952.1,224-242).
cccccgaagcggcatcttt

SEQ ID NO: 488313 - DNA, 19 bp, Mus musculus
  siRNA target sequence for 1810022J16Rik (NM_026952.1,234-252).
ggcatctttgggtaccata

SEQ ID NO: 488314 - DNA, 19 bp, Mus musculus
  siRNA target sequence for 1810022J16Rik (NM_026952.1,236-254).
catctttgggtaccataat

SEQ ID NO: 488315 - DNA, 19 bp, Mus musculus
  siRNA target sequence for 1810022J16Rik (NM_026952.1,239-257).
ctttgggtaccataatcaa

SEQ ID NO: 488316 - DNA, 19 bp, Mus musculus
  siRNA target sequence for 1810022J16Rik (NM_026952.1,406-424).
cggtcccgagacttgctaa

SEQ ID NO: 488317 - DNA, 19 bp, Mus musculus
  siRNA target sequence for 1810022J16Rik (NM_026952.1,464-482).
ccaaatctggatctatgaa

SEQ ID NO: 488318 - DNA, 19 bp, Mus musculus
  siRNA target sequence for 1810022J16Rik (NM_026952.1,489-507).
ggtatcgggcagttccaaa

SEQ ID NO: 488319 - DNA, 19 bp, Mus musculus
  siRNA target sequence for 1810022J16Rik (NM_026952.1,568-586).
gaatccaggtcgtccaaaa

SEQ ID NO: 488320 - DNA, 19 bp, Mus musculus
  siRNA target sequence for 1810022J16Rik (NM_026952.1,572-590).
ccaggtcgtccaaaatgca

SEQ ID NO: 488321 - DNA, 19 bp, Mus musculus
  siRNA target sequence for 1810022J16Rik (NM_026952.1,603-621).
ccgcaaagagcgagagtta

SEQ ID NO: 488322 - DNA, 19 bp, Mus musculus
  siRNA target sequence for 1810022J16Rik (NM_026952.1,604-622).
cgcaaagagcgagagttaa

SEQ ID NO: 488323 - DNA, 19 bp, Mus musculus
  siRNA target sequence for 1810022J16Rik (NM_026952.1,633-651).
caaggaccggagtaaaagt

SEQ ID NO: 488324 - DNA, 19 bp, Mus musculus
  siRNA target sequence for 1810022J16Rik (NM_026952.1,636-654).
ggaccggagtaaaagtcat

SEQ ID NO: 488325 - DNA, 19 bp, Mus musculus
  siRNA target sequence for 1810022J16Rik (NM_026952.1,710-728).
ccaggagtccccataggaa

SEQ ID NO: 488326 - DNA, 19 bp, Mus musculus
  siRNA target sequence for 1810022J16Rik (NM_026952.1,711-729).
caggagtccccataggaaa

SEQ ID NO: 488327 - DNA, 19 bp, Mus musculus
  siRNA target sequence for 1810022J16Rik (NM_026952.1,759-777).
cccttccggagcttcttat

SEQ ID NO: 488328 - DNA, 19 bp, Mus musculus
  siRNA target sequence for 1810022J16Rik (NM_026952.1,770-788).
cttcttatggccaagacta

SEQ ID NO: 488329 - DNA, 19 bp, Mus musculus
  siRNA target sequence for 1810022J16Rik (NM_026952.1,778-796).
ggccaagactacgatctta

SEQ ID NO: 488330 - DNA, 19 bp, Mus musculus
  siRNA target sequence for 1810022J16Rik (NM_026952.1,976-994).
cggtcctccagctatgaaa

SEQ ID NO: 488331 - DNA, 19 bp, Mus musculus
  siRNA target sequence for 1810022J16Rik (NM_026952.1,991-1009).
gaaaggagcggctcttaca

SEQ ID NO: 488332 - DNA, 19 bp, Mus musculus
  siRNA target sequence for 1810022J16Rik (NM_026952.1,1107-1125).
catgaagtccagaagtaga

SEQ ID NO: 488333 - DNA, 19 bp, Mus musculus
  siRNA target sequence for 1810022J16Rik (NM_026952.1,1205-1223).
cacctgtcaggcttccatt

SEQ ID NO: 488334 - DNA, 19 bp, Mus musculus
  siRNA target sequence for 1810022J16Rik (NM_026952.1,1367-1385).
ggttagagtctaaaaagtt

SEQ ID NO: 488335 - DNA, 19 bp, Mus musculus
  siRNA target sequence for 1810022J16Rik (NM_026952.1,1368-1386).
gttagagtctaaaaagtta

SEQ ID NO: 488336 - DNA, 19 bp, Mus musculus
  siRNA target sequence for 1810022J16Rik (NM_026952.1,1383-1401).
gttacccagaagtataaaa

SEQ ID NO: 488337 - DNA, 19 bp, Mus musculus
  siRNA target sequence for 1810022J16Rik (NM_026952.1,1453-1471).
ccagaggtaaaacattgtt

SEQ ID NO: 488338 - DNA, 19 bp, Mus musculus
  siRNA target sequence for 1810022J16Rik (NM_026952.1,1459-1477).
gtaaaacattgtttagaca

SEQ ID NO: 488339 - DNA, 19 bp, Mus musculus
  siRNA target sequence for 1810022J16Rik (NM_026952.1,1513-1531).
catcctgctaaggatttga

SEQ ID NO: 488340 - DNA, 19 bp, Mus musculus
  siRNA target sequence for 1810022J16Rik (NM_026952.1,1567-1585).
ccgaaagaggtgattgtta

SEQ ID NO: 488341 - DNA, 19 bp, Mus musculus
  siRNA target sequence for 1810022J16Rik (NM_026952.1,1704-1722).
gcctccactaccagctatt

SEQ ID NO: 488342 - DNA, 19 bp, Mus musculus
  siRNA target sequence for 1810022J16Rik (NM_026952.1,1748-1766).
cccaaccaccatttagtca

SEQ ID NO: 488343 - DNA, 19 bp, Mus musculus
  siRNA target sequence for 1810022J16Rik (NM_026952.1,1774-1792).
gtttcaagtacttcaattt

SEQ ID NO: 488344 - DNA, 19 bp, Mus musculus
  siRNA target sequence for 1810022J16Rik (NM_026952.1,1849-1867).
ccccctgtacaggtttcta

SEQ ID NO: 488345 - DNA, 19 bp, Mus musculus
  siRNA target sequence for 1810022J16Rik (NM_026952.1,1850-1868).
cccctgtacaggtttctat

SEQ ID NO: 488346 - DNA, 19 bp, Mus musculus
  siRNA target sequence for 1810022J16Rik (NM_026952.1,1869-1887).
gaagactcaagtatctata

SEQ ID NO: 488347 - DNA, 19 bp, Mus musculus
  siRNA target sequence for 1810022J16Rik (NM_026952.1,1872-1890).
gactcaagtatctataaca

SEQ ID NO: 488348 - DNA, 19 bp, Mus musculus
  siRNA target sequence for 1810022J16Rik (NM_026952.1,1944-1962).
cctattacctggagatgat

SEQ ID NO: 488349 - DNA, 19 bp, Mus musculus
  siRNA target sequence for 1810022J16Rik (NM_026952.1,1965-1983).
catggatagtccaaaagaa

SEQ ID NO: 488350 - DNA, 19 bp, Mus musculus
  siRNA target sequence for 1810022J16Rik (NM_026952.1,2027-2045).
ctcgccacttgcttacaga

SEQ ID NO: 488351 - DNA, 19 bp, Mus musculus
  siRNA target sequence for 1810022J16Rik (NM_026952.1,2120-2138).
cacctcaacaaccatataa

SEQ ID NO: 488352 - DNA, 19 bp, Mus musculus
  siRNA target sequence for 1810022J16Rik (NM_026952.1,2226-2244).
cattattgggattattgga

SEQ ID NO: 488353 - DNA, 19 bp, Mus musculus
  siRNA target sequence for 1810022J16Rik (NM_026952.1,2248-2266).
gggacctatggccaagtat

SEQ ID NO: 488354 - DNA, 19 bp, Mus musculus
  siRNA target sequence for 1810022J16Rik (NM_026952.1,2386-2404).
gttcaccagagtgttgtaa

SEQ ID NO: 488355 - DNA, 19 bp, Mus musculus
  siRNA target sequence for 1810022J16Rik (NM_026952.1,2389-2407).
caccagagtgttgtaaaca

SEQ ID NO: 488356 - DNA, 19 bp, Mus musculus
  siRNA target sequence for 1810022J16Rik (NM_026952.1,2398-2416).
gttgtaaacatgaaggaaa

SEQ ID NO: 488357 - DNA, 19 bp, Mus musculus
  siRNA target sequence for 1810022J16Rik (NM_026952.1,2461-2479).
ggtgccttttaccttgtat

SEQ ID NO: 488358 - DNA, 19 bp, Mus musculus
  siRNA target sequence for 1810022J16Rik (NM_026952.1,2462-2480).
gtgccttttaccttgtatt

SEQ ID NO: 488359 - DNA, 19 bp, Mus musculus
  siRNA target sequence for 1810022J16Rik (NM_026952.1,2539-2557).
gaggaccatatcaagtcat

SEQ ID NO: 488360 - DNA, 19 bp, Mus musculus
  siRNA target sequence for 1810022J16Rik (NM_026952.1,2542-2560).
gaccatatcaagtcattta

SEQ ID NO: 488361 - DNA, 19 bp, Mus musculus
  siRNA target sequence for 1810022J16Rik (NM_026952.1,2545-2563).
catatcaagtcatttatga

SEQ ID NO: 488362 - DNA, 19 bp, Mus musculus
  siRNA target sequence for 1810022J16Rik (NM_026952.1,2677-2695).
ggacttgctcggctctata

SEQ ID NO: 488363 - DNA, 19 bp, Mus musculus
  siRNA target sequence for 1810022J16Rik (NM_026952.1,2678-2696).
gacttgctcggctctataa

SEQ ID NO: 488364 - DNA, 19 bp, Mus musculus
  siRNA target sequence for 1810022J16Rik (NM_026952.1,2680-2698).
cttgctcggctctataact

SEQ ID NO: 488365 - DNA, 19 bp, Mus musculus
  siRNA target sequence for 1810022J16Rik (NM_026952.1,2711-2729).
gcccttacacaaacaaagt

SEQ ID NO: 488366 - DNA, 19 bp, Mus musculus
  siRNA target sequence for 1810022J16Rik (NM_026952.1,2714-2732).
cttacacaaacaaagtcat

SEQ ID NO: 488367 - DNA, 19 bp, Mus musculus
  siRNA target sequence for 1810022J16Rik (NM_026952.1,2829-2847).
gttcacaaagaaacctatt

SEQ ID NO: 488368 - DNA, 19 bp, Mus musculus
  siRNA target sequence for 1810022J16Rik (NM_026952.1,2981-2999).
gacgcctaagagaagaatt

SEQ ID NO: 488369 - DNA, 19 bp, Mus musculus
  siRNA target sequence for 1810022J16Rik (NM_026952.1,3017-3035).
cggcacttgatctattgga

SEQ ID NO: 488370 - DNA, 19 bp, Mus musculus
  siRNA target sequence for 1810022J16Rik (NM_026952.1,3083-3101).
ccctacagagtgactttct

SEQ ID NO: 488371 - DNA, 19 bp, Mus musculus
  siRNA target sequence for 1810022J16Rik (NM_026952.1,3084-3102).
cctacagagtgactttctt

SEQ ID NO: 488372 - DNA, 19 bp, Mus musculus
  siRNA target sequence for 1810022J16Rik (NM_026952.1,3189-3207).
gcagcgacagagtggtatt

SEQ ID NO: 488373 - DNA, 19 bp, Mus musculus
  siRNA target sequence for 1810022J16Rik (NM_026952.1,3198-3216).
gagtggtattgtgatagaa

SEQ ID NO: 488374 - DNA, 19 bp, Mus musculus
  siRNA target sequence for 1810022J16Rik (NM_026952.1,3200-3218).
gtggtattgtgatagaaga

SEQ ID NO: 488375 - DNA, 19 bp, Mus musculus
  siRNA target sequence for 1810022J16Rik (NM_026952.1,3269-3287).
ctgagcctgtgaaaaacaa

SEQ ID NO: 488376 - DNA, 19 bp, Mus musculus
  siRNA target sequence for 1810022J16Rik (NM_026952.1,3385-3403).
gaattggcagtgttattaa

SEQ ID NO: 488377 - DNA, 19 bp, Mus musculus
  siRNA target sequence for 1810022J16Rik (NM_026952.1,3496-3514).
gccttgaatcagtctatta

SEQ ID NO: 488378 - DNA, 19 bp, Mus musculus
  siRNA target sequence for 1810022J16Rik (NM_026952.1,3579-3597).
gaaggaggtaccttctgta

SEQ ID NO: 488379 - DNA, 19 bp, Mus musculus
  siRNA target sequence for 1810022J16Rik (NM_026952.1,3713-3731).
caggtaacctggaggaaaa

SEQ ID NO: 488380 - DNA, 19 bp, Mus musculus
  siRNA target sequence for 1810022J16Rik (NM_026952.1,3793-3811).
gaggcagcaggtaaacaga

SEQ ID NO: 488381 - DNA, 19 bp, Mus musculus
  siRNA target sequence for 1810022J16Rik (NM_026952.1,3810-3828).
gaccggtcatgaatctcat

SEQ ID NO: 488382 - DNA, 19 bp, Mus musculus
  siRNA target sequence for 2210022F10Rik (NM_133838.2,365-383).
cacgttcatcagatactta

SEQ ID NO: 488383 - DNA, 19 bp, Mus musculus
  siRNA target sequence for 2210022F10Rik (NM_133838.2,367-385).
cgttcatcagatacttact

SEQ ID NO: 488384 - DNA, 19 bp, Mus musculus
  siRNA target sequence for 2210022F10Rik (NM_133838.2,478-496).
ctgggaatgctttagttgt

SEQ ID NO: 488385 - DNA, 19 bp, Mus musculus
  siRNA target sequence for 2210022F10Rik (NM_133838.2,526-544).
gtcgctttggaaatgcttt

SEQ ID NO: 488386 - DNA, 19 bp, Mus musculus
  siRNA target sequence for 2210022F10Rik (NM_133838.2,711-729).
ctctttgacgctcacaaat

SEQ ID NO: 488387 - DNA, 19 bp, Mus musculus
  siRNA target sequence for 2210022F10Rik (NM_133838.2,901-919).
gagtctacattggttcatt

SEQ ID NO: 488388 - DNA, 19 bp, Mus musculus
  siRNA target sequence for 2210022F10Rik (NM_133838.2,1015-1033).
ctgcagtgcgcaaactcaa

SEQ ID NO: 488389 - DNA, 19 bp, Mus musculus
  siRNA target sequence for 2210022F10Rik (NM_133838.2,1018-1036).
cagtgcgcaaactcaatga

SEQ ID NO: 488390 - DNA, 19 bp, Mus musculus
  siRNA target sequence for 2210022F10Rik (NM_133838.2,1148-1166).
caggctcccggaaatctat

SEQ ID NO: 488391 - DNA, 19 bp, Mus musculus
  siRNA target sequence for 2210022F10Rik (NM_133838.2,1176-1194).
cagcgagaataccagattt

SEQ ID NO: 488392 - DNA, 19 bp, Mus musculus
  siRNA target sequence for 2210022F10Rik (NM_133838.2,1178-1196).
gcgagaataccagatttct

SEQ ID NO: 488393 - DNA, 19 bp, Mus musculus
  siRNA target sequence for 2210022F10Rik (NM_133838.2,1465-1483).
gggtcgtggctaaagacaa

SEQ ID NO: 488394 - DNA, 19 bp, Mus musculus
  siRNA target sequence for 2210022F10Rik (NM_133838.2,1486-1504).
cggtgtatgacgaactctt

SEQ ID NO: 488395 - DNA, 19 bp, Mus musculus
  siRNA target sequence for 2210022F10Rik (NM_133838.2,1487-1505).
ggtgtatgacgaactcttt

SEQ ID NO: 488396 - DNA, 19 bp, Mus musculus
  siRNA target sequence for 2210022F10Rik (NM_133838.2,1508-1526).
cacgctgtcacccatcaat

SEQ ID NO: 488397 - DNA, 19 bp, Mus musculus
  siRNA target sequence for 2210023C10Rik (NM_198246.1,160-178).
cagagctccccgaactctt

SEQ ID NO: 488398 - DNA, 19 bp, Mus musculus
  siRNA target sequence for 2210023C10Rik (NM_198246.1,631-649).
gcttggcggagttctttta

SEQ ID NO: 488399 - DNA, 19 bp, Mus musculus
  siRNA target sequence for 2210023C10Rik (NM_198246.1,707-725).
ccaactgggcggatcagat

SEQ ID NO: 488400 - DNA, 19 bp, Mus musculus
  siRNA target sequence for 2210023C10Rik (NM_198246.1,723-741).
gatcagttgggcaacatca

SEQ ID NO: 488401 - DNA, 19 bp, Mus musculus
  siRNA target sequence for 2210023C10Rik (NM_198246.1,770-788).
gactggagaggatgtgttt

SEQ ID NO: 488402 - DNA, 19 bp, Mus musculus
  siRNA target sequence for 2210023C10Rik (NM_198246.1,790-808).
gaatcactgtacctctaat

SEQ ID NO: 488403 - DNA, 19 bp, Mus musculus
  siRNA target sequence for 2210023C10Rik (NM_198246.1,801-819).
cctctaattacaagtacaa

SEQ ID NO: 488404 - DNA, 19 bp, Mus musculus
  siRNA target sequence for 2210023C10Rik (NM_198246.1,872-890).
gaaaacatcaccgtttgaa

SEQ ID NO: 488405 - DNA, 19 bp, Mus musculus
  siRNA target sequence for 2210023C10Rik (NM_198246.1,877-895).
catcaccgtttgaacttta

SEQ ID NO: 488406 - DNA, 19 bp, Mus musculus
  siRNA target sequence for 2210023C10Rik (NM_198246.1,880-898).
caccgtttgaactttatca

SEQ ID NO: 488407 - DNA, 19 bp, Mus musculus
  siRNA target sequence for 2210023C10Rik (NM_198246.1,882-900).
ccgtttgaactttatcagt

SEQ ID NO: 488408 - DNA, 19 bp, Mus musculus
  siRNA target sequence for 2210023C10Rik (NM_198246.1,986-1004).
gcagctacatgtcaaagaa

SEQ ID NO: 488409 - DNA, 19 bp, Mus musculus
  siRNA target sequence for 2210023C10Rik (NM_198246.1,1052-1070).
gcttgttcacggacaagaa

SEQ ID NO: 488410 - DNA, 19 bp, Mus musculus
  siRNA target sequence for 2210023C10Rik (NM_198246.1,1139-1157).
gtctgaccaagagttaaaa

SEQ ID NO: 488411 - DNA, 19 bp, Mus musculus
  siRNA target sequence for 2210023C10Rik (NM_198246.1,1257-1275).
cgagggtatcggatgataa

SEQ ID NO: 488412 - DNA, 19 bp, Mus musculus
  siRNA target sequence for 2210023C10Rik (NM_198246.1,1261-1279).
ggtatcggatgataacaga

SEQ ID NO: 488413 - DNA, 19 bp, Mus musculus
  siRNA target sequence for 2210023C10Rik (NM_198246.1,1262-1280).
gtatcggatgataacagaa

SEQ ID NO: 488414 - DNA, 19 bp, Mus musculus
  siRNA target sequence for 2210023C10Rik (NM_198246.1,1278-1296).
gaaggtggagtcagtataa

SEQ ID NO: 488415 - DNA, 19 bp, Mus musculus
  siRNA target sequence for 2210023C10Rik (NM_198246.1,1307-1325).
ggtaacaaatcctgaaagt

SEQ ID NO: 488416 - DNA, 19 bp, Mus musculus
  siRNA target sequence for 2210023C10Rik (NM_198246.1,1329-1347).
ctagtaattggacaacata

SEQ ID NO: 488417 - DNA, 19 bp, Mus musculus
  siRNA target sequence for 2210023C10Rik (NM_198246.1,1339-1357).
gacaacatattctcaagaa

SEQ ID NO: 488418 - DNA, 19 bp, Mus musculus
  siRNA target sequence for 2210023C10Rik (NM_198246.1,1359-1377).
ggactttccttacttaaaa

SEQ ID NO: 488419 - DNA, 19 bp, Mus musculus
  siRNA target sequence for 2210023C10Rik (NM_198246.1,1360-1378).
gactttccttacttaaaat

SEQ ID NO: 488420 - DNA, 19 bp, Mus musculus
  siRNA target sequence for 2310004N11Rik (NM_028800.2,530-548).
gagtctggtcggatggtaa

SEQ ID NO: 488421 - DNA, 19 bp, Mus musculus
  siRNA target sequence for 2310004N11Rik (NM_028800.2,537-555).
gtcggatggtaaagaagat

SEQ ID NO: 488422 - DNA, 19 bp, Mus musculus
  siRNA target sequence for 2310004N11Rik (NM_028800.2,760-778).
gaacatggtgctcaacaaa

SEQ ID NO: 488423 - DNA, 19 bp, Mus musculus
  siRNA target sequence for 2310004N11Rik (NM_028800.2,780-798).
ggacccatcggataactat

SEQ ID NO: 488424 - DNA, 19 bp, Mus musculus
  siRNA target sequence for 2310004N11Rik (NM_028800.2,939-957).
gcgtggtgctcttcactat

SEQ ID NO: 488425 - DNA, 19 bp, Mus musculus
  siRNA target sequence for 2310004N11Rik (NM_028800.2,1203-1221).
cggacattgatgaccaaat

SEQ ID NO: 488426 - DNA, 19 bp, Mus musculus
  siRNA target sequence for 2310004N11Rik (NM_028800.2,1266-1284).
gctcccaatacgagtttga

SEQ ID NO: 488427 - DNA, 19 bp, Mus musculus
  siRNA target sequence for 2310004N11Rik (NM_028800.2,1269-1287).
cccaatacgagtttgagaa

SEQ ID NO: 488428 - DNA, 19 bp, Mus musculus
  siRNA target sequence for 2310057M21Rik (NM_026655.2,139-157).
ggccacgtgcccaagactt

SEQ ID NO: 488429 - DNA, 19 bp, Mus musculus
  siRNA target sequence for 2310057M21Rik (NM_026655.2,193-211).
gccaggatccggttagtct

SEQ ID NO: 488430 - DNA, 19 bp, Mus musculus
  siRNA target sequence for 2310057M21Rik (NM_026655.2,197-215).
ggatccggttagtctgaaa

SEQ ID NO: 488431 - DNA, 19 bp, Mus musculus
  siRNA target sequence for 2310057M21Rik (NM_026655.2,198-216).
gatccggttagtctgaaaa

SEQ ID NO: 488432 - DNA, 19 bp, Mus musculus
  siRNA target sequence for 2310057M21Rik (NM_026655.2,201-219).
ccggttagtctgaaaagca

SEQ ID NO: 488433 - DNA, 19 bp, Mus musculus
  siRNA target sequence for 2310057M21Rik (NM_026655.2,269-287).
ccctaatgggggtgaagaa

SEQ ID NO: 488434 - DNA, 19 bp, Mus musculus
  siRNA target sequence for 2310057M21Rik (NM_026655.2,271-289).
ctaatgggggtgaagaaat

SEQ ID NO: 488435 - DNA, 19 bp, Mus musculus
  siRNA target sequence for 2310057M21Rik (NM_026655.2,386-404).
cctggatgacagtgaacat

SEQ ID NO: 488436 - DNA, 19 bp, Mus musculus
  siRNA target sequence for 2310057M21Rik (NM_026655.2,402-420).
catgaaaagatcttgttat

SEQ ID NO: 488437 - DNA, 19 bp, Mus musculus
  siRNA target sequence for 2310057M21Rik (NM_026655.2,447-465).
cccacgcatgcctgtaaaa

SEQ ID NO: 488438 - DNA, 19 bp, Mus musculus
  siRNA target sequence for 2310057M21Rik (NM_026655.2,448-466).
ccacgcatgcctgtaaaat

SEQ ID NO: 488439 - DNA, 19 bp, Mus musculus
  siRNA target sequence for 2310057M21Rik (NM_026655.2,574-592).
cacggatagaccttgacaa

SEQ ID NO: 488440 - DNA, 19 bp, Mus musculus
  siRNA target sequence for 2310057M21Rik (NM_026655.2,577-595).
ggatagaccttgacaacat

SEQ ID NO: 488441 - DNA, 19 bp, Mus musculus
  siRNA target sequence for 2310057M21Rik (NM_026655.2,588-606).
gacaacatccaaaccataa

SEQ ID NO: 488442 - DNA, 19 bp, Mus musculus
  siRNA target sequence for 2310057M21Rik (NM_026655.2,644-662).
gcagctcatgagcatgatt

SEQ ID NO: 488443 - DNA, 19 bp, Mus musculus
  siRNA target sequence for 2310057M21Rik (NM_026655.2,648-666).
ctcatgagcatgattaggt

SEQ ID NO: 488444 - DNA, 19 bp, Mus musculus
  siRNA target sequence for 2310057M21Rik (NM_026655.2,650-668).
catgagcatgattaggttt

SEQ ID NO: 488445 - DNA, 19 bp, Mus musculus
  siRNA target sequence for 2310057M21Rik (NM_026655.2,829-847).
ccatcactgaaaatttaaa

SEQ ID NO: 488446 - DNA, 19 bp, Mus musculus
  siRNA target sequence for 2310057M21Rik (NM_026655.2,910-928).
gtcaccttatgccacaaaa

SEQ ID NO: 488447 - DNA, 19 bp, Mus musculus
  siRNA target sequence for 2310057M21Rik (NM_026655.2,934-952).
cccttgaaagtgatcttaa

SEQ ID NO: 488448 - DNA, 19 bp, Mus musculus
  siRNA target sequence for 2310057M21Rik (NM_026655.2,936-954).
cttgaaagtgatcttaaaa

SEQ ID NO: 488449 - DNA, 19 bp, Mus musculus
  siRNA target sequence for 2310057M21Rik (NM_026655.2,1174-1192).
ctaaaaacatggaactgat

SEQ ID NO: 488450 - DNA, 19 bp, Mus musculus
  siRNA target sequence for 2310057M21Rik (NM_026655.2,1306-1324).
cagggatgcctctaagaca

SEQ ID NO: 488451 - DNA, 19 bp, Mus musculus
  siRNA target sequence for 2310079N02Rik (NM_025636.1,177-195).
ggctgcccgtggatggatt

SEQ ID NO: 488452 - DNA, 19 bp, Mus musculus
  siRNA target sequence for 2310079N02Rik (NM_025636.1,178-196).
gctgcccgtggatggattt

SEQ ID NO: 488453 - DNA, 19 bp, Mus musculus
  siRNA target sequence for 2310079N02Rik (NM_025636.1,179-197).
ctgcccgtggatggatttt

SEQ ID NO: 488454 - DNA, 19 bp, Mus musculus
  siRNA target sequence for 2310079N02Rik (NM_025636.1,315-333).
gtcgagtggggcagtatgt

SEQ ID NO: 488455 - DNA, 19 bp, Mus musculus
  siRNA target sequence for 2310079N02Rik (NM_025636.1,334-352).
ggtgaacttggattctttt

SEQ ID NO: 488456 - DNA, 19 bp, Mus musculus
  siRNA target sequence for 2310079N02Rik (NM_025636.1,402-420).
ccaaacacagagtgtgtat

SEQ ID NO: 488457 - DNA, 19 bp, Mus musculus
  siRNA target sequence for 2310079N02Rik (NM_025636.1,489-507).
ccacaccaggcattatcgt

SEQ ID NO: 488458 - DNA, 19 bp, Mus musculus
  siRNA target sequence for 2310079N02Rik (NM_025636.1,615-633).
gcctcttgccagatattgt

SEQ ID NO: 488459 - DNA, 19 bp, Mus musculus
  siRNA target sequence for 2400004E04Rik (NM_028021.1,68-86).
ctgaggcagcccaatcgtt

SEQ ID NO: 488460 - DNA, 19 bp, Mus musculus
  siRNA target sequence for 2400004E04Rik (NM_028021.1,367-385).
ctgcgagaacgctactact

SEQ ID NO: 488461 - DNA, 19 bp, Mus musculus
  siRNA target sequence for 2400004E04Rik (NM_028021.1,381-399).
ctactccgggctcatttat

SEQ ID NO: 488462 - DNA, 19 bp, Mus musculus
  siRNA target sequence for 2400004E04Rik (NM_028021.1,386-404).
ccgggctcatttataccta

SEQ ID NO: 488463 - DNA, 19 bp, Mus musculus
  siRNA target sequence for 2400004E04Rik (NM_028021.1,456-474).
cacggaggccattgttgaa

SEQ ID NO: 488464 - DNA, 19 bp, Mus musculus
  siRNA target sequence for 2400004E04Rik (NM_028021.1,553-571).
caggatcgtgaggatcaat

SEQ ID NO: 488465 - DNA, 19 bp, Mus musculus
  siRNA target sequence for 2400004E04Rik (NM_028021.1,886-904).
gaatgcagcttccatatct

SEQ ID NO: 488466 - DNA, 19 bp, Mus musculus
  siRNA target sequence for 2400004E04Rik (NM_028021.1,923-941).
gcgctggggagcagctaaa

SEQ ID NO: 488467 - DNA, 19 bp, Mus musculus
  siRNA target sequence for 2400004E04Rik (NM_028021.1,924-942).
cgctggggagcagctaaaa

SEQ ID NO: 488468 - DNA, 19 bp, Mus musculus
  siRNA target sequence for 2400004E04Rik (NM_028021.1,957-975).
ggagccctgttcccattat

SEQ ID NO: 488469 - DNA, 19 bp, Mus musculus
  siRNA target sequence for 2400004E04Rik (NM_028021.1,1009-1027).
ggccaggagcgtgagttat

SEQ ID NO: 488470 - DNA, 19 bp, Mus musculus
  siRNA target sequence for 2400004E04Rik (NM_028021.1,1010-1028).
gccaggagcgtgagttatt

SEQ ID NO: 488471 - DNA, 19 bp, Mus musculus
  siRNA target sequence for 2400004E04Rik (NM_028021.1,1121-1139).
gcaacattgtcctgaagaa

SEQ ID NO: 488472 - DNA, 19 bp, Mus musculus
  siRNA target sequence for 2400004E04Rik (NM_028021.1,1254-1272).
caaagtgggccgagattat

SEQ ID NO: 488473 - DNA, 19 bp, Mus musculus
  siRNA target sequence for 2400004E04Rik (NM_028021.1,1263-1281).
ccgagattatgttcagaaa

SEQ ID NO: 488474 - DNA, 19 bp, Mus musculus
  siRNA target sequence for 2400004E04Rik (NM_028021.1,1814-1832).
ccagtgagtggctgatgaa

SEQ ID NO: 488475 - DNA, 19 bp, Mus musculus
  siRNA target sequence for 2400004E04Rik (NM_028021.1,2214-2232).
gttccgacagcgctatgaa

SEQ ID NO: 488476 - DNA, 19 bp, Mus musculus
  siRNA target sequence for 2400004E04Rik (NM_028021.1,2401-2419).
gtcaccgacatcatagtgt

SEQ ID NO: 488477 - DNA, 19 bp, Mus musculus
  siRNA target sequence for 2400004E04Rik (NM_028021.1,3191-3209).
gacgccaggaactagagaa

SEQ ID NO: 488478 - DNA, 19 bp, Mus musculus
  siRNA target sequence for 2400004E04Rik (NM_028021.1,3838-3856).
cagggccgatccagtgatt

SEQ ID NO: 488479 - DNA, 19 bp, Mus musculus
  siRNA target sequence for 2400004E04Rik (NM_028021.1,4386-4404).
gaagaagcagcggaaattt

SEQ ID NO: 488480 - DNA, 19 bp, Mus musculus
  siRNA target sequence for 2400004E04Rik (NM_028021.1,4755-4773).
ggctctgaaggctcaacat

SEQ ID NO: 488481 - DNA, 19 bp, Mus musculus
  siRNA target sequence for 2400004E04Rik (NM_028021.1,4757-4775).
ctctgaaggctcaacatga

SEQ ID NO: 488482 - DNA, 19 bp, Mus musculus
  siRNA target sequence for 2400004E04Rik (NM_028021.1,5042-5060).
gctcccgcgacgagatgtt

SEQ ID NO: 488483 - DNA, 19 bp, Mus musculus
  siRNA target sequence for 2400004E04Rik (NM_028021.1,5194-5212).
gtggccagtggcaatctta

SEQ ID NO: 488484 - DNA, 19 bp, Mus musculus
  siRNA target sequence for 2400004E04Rik (NM_028021.1,5198-5216).
ccagtggcaatcttagcaa

SEQ ID NO: 488485 - DNA, 19 bp, Mus musculus
  siRNA target sequence for 2400004E04Rik (NM_028021.1,5281-5299).
gaggaagaacagaacaact

SEQ ID NO: 488486 - DNA, 19 bp, Mus musculus
  siRNA target sequence for 2400004E04Rik (NM_028021.1,5493-5511).
cgctgctctggagtctaaa

SEQ ID NO: 488487 - DNA, 19 bp, Mus musculus
  siRNA target sequence for 2400004E04Rik (NM_028021.1,5777-5795).
ctgagtctgcagaatccat

SEQ ID NO: 488488 - DNA, 19 bp, Mus musculus
  siRNA target sequence for 2400004E04Rik (NM_028021.1,5829-5847).
ccggcgtggcccacttaca

SEQ ID NO: 488489 - DNA, 19 bp, Mus musculus
  siRNA target sequence for 2400004E04Rik (NM_028021.1,5833-5851).
cgtggcccacttacattca

SEQ ID NO: 488490 - DNA, 19 bp, Mus musculus
  siRNA target sequence for 2400004H09Rik (NM_179203.1,209-227).
ccatcgcccaaggacaaat

SEQ ID NO: 488491 - DNA, 19 bp, Mus musculus
  siRNA target sequence for 2400004H09Rik (NM_179203.1,474-492).
gggcccagtaccaggataa

SEQ ID NO: 488492 - DNA, 19 bp, Mus musculus
  siRNA target sequence for 2400004H09Rik (NM_179203.1,630-648).
ggcataaaaacgagatgtt

SEQ ID NO: 488493 - DNA, 19 bp, Mus musculus
  siRNA target sequence for 2400004H09Rik (NM_179203.1,794-812).
ggattccgtgcatttgtga

SEQ ID NO: 488494 - DNA, 19 bp, Mus musculus
  siRNA target sequence for 2400004H09Rik (NM_179203.1,839-857).
gtggctgggttgacactat

SEQ ID NO: 488495 - DNA, 19 bp, Mus musculus
  siRNA target sequence for 2400004H09Rik (NM_179203.1,841-859).
ggctgggttgacactatta

SEQ ID NO: 488496 - DNA, 19 bp, Mus musculus
  siRNA target sequence for 2400004H09Rik (NM_179203.1,894-912).
ctgttgctggtcggtatat

SEQ ID NO: 488497 - DNA, 19 bp, Mus musculus
  siRNA target sequence for 2400004H09Rik (NM_179203.1,1063-1081).
ggcacgggtccgagatatt

SEQ ID NO: 488498 - DNA, 19 bp, Mus musculus
  siRNA target sequence for 2400004H09Rik (NM_179203.1,1082-1100).
gccatcgcaacaagaaata

SEQ ID NO: 488499 - DNA, 19 bp, Mus musculus
  siRNA target sequence for 2400004H09Rik (NM_179203.1,1151-1169).
gggactggcaagacactat

SEQ ID NO: 488500 - DNA, 19 bp, Mus musculus
  siRNA target sequence for 2400004H09Rik (NM_179203.1,1153-1171).
gactggcaagacactattt

SEQ ID NO: 488501 - DNA, 19 bp, Mus musculus
  siRNA target sequence for 2400004H09Rik (NM_179203.1,1341-1359).
ggaaacgagcgactgaaaa

SEQ ID NO: 488502 - DNA, 19 bp, Mus musculus
  siRNA target sequence for 2400004H09Rik (NM_179203.1,1410-1428).
gacagcacagtagtaagtt

SEQ ID NO: 488503 - DNA, 19 bp, Mus musculus
  siRNA target sequence for 2400004H09Rik (NM_179203.1,1532-1550).
gagcgcctggtgagaatgt

SEQ ID NO: 488504 - DNA, 19 bp, Mus musculus
  siRNA target sequence for 2400004H09Rik (NM_179203.1,1534-1552).
gcgcctggtgagaatgtat

SEQ ID NO: 488505 - DNA, 19 bp, Mus musculus
  siRNA target sequence for 2400004H09Rik (NM_179203.1,1607-1625).
gcccagtttgactatggaa

SEQ ID NO: 488506 - DNA, 19 bp, Mus musculus
  siRNA target sequence for 2400004H09Rik (NM_179203.1,1728-1746).
gagtcctcacggaagctat

SEQ ID NO: 488507 - DNA, 19 bp, Mus musculus
  siRNA target sequence for 2400004H09Rik (NM_179203.1,1792-1810).
gatgcagtggcttaaagta

SEQ ID NO: 488508 - DNA, 19 bp, Mus musculus
  siRNA target sequence for 2410001H17Rik (NM_025889.1,371-389).
gctggacccaacatccttt

SEQ ID NO: 488509 - DNA, 19 bp, Mus musculus
  siRNA target sequence for 2410001H17Rik (NM_025889.1,500-518).
gagtctaccatgtgatctt

SEQ ID NO: 488510 - DNA, 19 bp, Mus musculus
  siRNA target sequence for 2410001H17Rik (NM_025889.1,508-526).
catgtgatcttcatctact

SEQ ID NO: 488511 - DNA, 19 bp, Mus musculus
  siRNA target sequence for 2410002K23Rik (NM_026508.1,189-207).
gatctctgcaggacagtta

SEQ ID NO: 488512 - DNA, 19 bp, Mus musculus
  siRNA target sequence for 2410002K23Rik (NM_026508.1,343-361).
cgttctctgtactcagaaa

SEQ ID NO: 488513 - DNA, 19 bp, Mus musculus
  siRNA target sequence for 2410002K23Rik (NM_026508.1,486-504).
gaagggcactattaccatt

SEQ ID NO: 488514 - DNA, 19 bp, Mus musculus
  siRNA target sequence for 2410002K23Rik (NM_026508.1,671-689).
ctgacaaggttgaagtcta

SEQ ID NO: 488515 - DNA, 19 bp, Mus musculus
  siRNA target sequence for 2410002K23Rik (NM_026508.1,775-793).
gttagacctgggaccaaaa

SEQ ID NO: 488516 - DNA, 19 bp, Mus musculus
  siRNA target sequence for 2410002K23Rik (NM_026508.1,833-851).
gcgagtcccgggtacaaga

SEQ ID NO: 488517 - DNA, 19 bp, Mus musculus
  siRNA target sequence for 2410002K23Rik (NM_026508.1,834-852).
cgagtcccgggtacaagat

SEQ ID NO: 488518 - DNA, 19 bp, Mus musculus
  siRNA target sequence for 2410002K23Rik (NM_026508.1,844-862).
gtacaagatgtggtaacaa

SEQ ID NO: 488519 - DNA, 19 bp, Mus musculus
  siRNA target sequence for 2410002K23Rik (NM_026508.1,847-865).
caagatgtggtaacaaagt

SEQ ID NO: 488520 - DNA, 19 bp, Mus musculus
  siRNA target sequence for 2410002K23Rik (NM_026508.1,850-868).
gatgtggtaacaaagtaca

SEQ ID NO: 488521 - DNA, 19 bp, Mus musculus
  siRNA target sequence for 2410002K23Rik (NM_026508.1,886-904).
cccttgtaccttaatggaa

SEQ ID NO: 488522 - DNA, 19 bp, Mus musculus
  siRNA target sequence for 2410002K23Rik (NM_026508.1,902-920).
gaaagcggattaacacttt

SEQ ID NO: 488523 - DNA, 19 bp, Mus musculus
  siRNA target sequence for 2410002K23Rik (NM_026508.1,970-988).
gaggaattctaccgttata

SEQ ID NO: 488524 - DNA, 19 bp, Mus musculus
  siRNA target sequence for 2410002K23Rik (NM_026508.1,972-990).
ggaattctaccgttatatt

SEQ ID NO: 488525 - DNA, 19 bp, Mus musculus
  siRNA target sequence for 2410002K23Rik (NM_026508.1,1069-1087).
gtgccagagatgaaaccat

SEQ ID NO: 488526 - DNA, 19 bp, Mus musculus
  siRNA target sequence for 2410002K23Rik (NM_026508.1,1077-1095).
gatgaaaccatccatgttt

SEQ ID NO: 488527 - DNA, 19 bp, Mus musculus
  siRNA target sequence for 2410002K23Rik (NM_026508.1,1272-1290).
gaaactccgggatgttcta

SEQ ID NO: 488528 - DNA, 19 bp, Mus musculus
  siRNA target sequence for 2410002K23Rik (NM_026508.1,1285-1303).
gttctacaacagagattga

SEQ ID NO: 488529 - DNA, 19 bp, Mus musculus
  siRNA target sequence for 2410002K23Rik (NM_026508.1,1291-1309).
caacagagattgatcaagt

SEQ ID NO: 488530 - DNA, 19 bp, Mus musculus
  siRNA target sequence for 2410002K23Rik (NM_026508.1,1294-1312).
cagagattgatcaagttct

SEQ ID NO: 488531 - DNA, 19 bp, Mus musculus
  siRNA target sequence for 2410002K23Rik (NM_026508.1,1298-1316).
gattgatcaagttcttcat

SEQ ID NO: 488532 - DNA, 19 bp, Mus musculus
  siRNA target sequence for 2410002K23Rik (NM_026508.1,1337-1355).
ctgaaaaatacgcaaagtt

SEQ ID NO: 488533 - DNA, 19 bp, Mus musculus
  siRNA target sequence for 2410002K23Rik (NM_026508.1,1339-1357).
gaaaaatacgcaaagtttt

SEQ ID NO: 488534 - DNA, 19 bp, Mus musculus
  siRNA target sequence for 2410002K23Rik (NM_026508.1,1347-1365).
cgcaaagttttttgaagat

SEQ ID NO: 488535 - DNA, 19 bp, Mus musculus
  siRNA target sequence for 2410002K23Rik (NM_026508.1,1363-1381).
gattatggcttgttcatga

SEQ ID NO: 488536 - DNA, 19 bp, Mus musculus
  siRNA target sequence for 2410002K23Rik (NM_026508.1,1476-1494).
gaccagcttaccagactat

SEQ ID NO: 488537 - DNA, 19 bp, Mus musculus
  siRNA target sequence for 2410002K23Rik (NM_026508.1,1510-1528).
gctggcacccgcaacatct

SEQ ID NO: 488538 - DNA, 19 bp, Mus musculus
  siRNA target sequence for 2410002K23Rik (NM_026508.1,1513-1531).
ggcacccgcaacatctatt

SEQ ID NO: 488539 - DNA, 19 bp, Mus musculus
  siRNA target sequence for 2410002K23Rik (NM_026508.1,1548-1566).
ccgtcacctggctgaacat

SEQ ID NO: 488540 - DNA, 19 bp, Mus musculus
  siRNA target sequence for 2410002K23Rik (NM_026508.1,1559-1577).
ctgaacattcaccctatta

SEQ ID NO: 488541 - DNA, 19 bp, Mus musculus
  siRNA target sequence for 2410002K23Rik (NM_026508.1,1648-1666).
cacctgagggagtttgaca

SEQ ID NO: 488542 - DNA, 19 bp, Mus musculus
  siRNA target sequence for 2410002K23Rik (NM_026508.1,1710-1728).
ctacaaggaggaaaagttt

SEQ ID NO: 488543 - DNA, 19 bp, Mus musculus
  siRNA target sequence for 2410002K23Rik (NM_026508.1,1780-1798).
ctaatggcgtggatgagaa

SEQ ID NO: 488544 - DNA, 19 bp, Mus musculus
  siRNA target sequence for 2410002K23Rik (NM_026508.1,1785-1803).
ggcgtggatgagaaatgca

SEQ ID NO: 488545 - DNA, 19 bp, Mus musculus
  siRNA target sequence for 2410002K23Rik (NM_026508.1,1820-1838).
ccaatgtgaaggtgacttt

SEQ ID NO: 488546 - DNA, 19 bp, Mus musculus
  siRNA target sequence for 2410002K23Rik (NM_026508.1,1972-1990).
cccaggcacacactgataa

SEQ ID NO: 488547 - DNA, 19 bp, Mus musculus
  siRNA target sequence for 2410002K23Rik (NM_026508.1,2037-2055).
gctcgtggatcagatctat

SEQ ID NO: 488548 - DNA, 19 bp, Mus musculus
  siRNA target sequence for 2410002K23Rik (NM_026508.1,2072-2090).
cagcaggactcgttgatga

SEQ ID NO: 488549 - DNA, 19 bp, Mus musculus
  siRNA target sequence for 2410002K23Rik (NM_026508.1,2111-2129).
gcctgaacgaccttttggt

SEQ ID NO: 488550 - DNA, 19 bp, Mus musculus
  siRNA target sequence for 2410021P16Rik (NM_028037.1,861-879).
ctctcagatcagagcaaaa

SEQ ID NO: 488551 - DNA, 19 bp, Mus musculus
  siRNA target sequence for 2410021P16Rik (NM_028037.1,893-911).
cagtcctcaccaacaactt

SEQ ID NO: 488552 - DNA, 19 bp, Mus musculus
  siRNA target sequence for 2410021P16Rik (NM_028037.1,940-958).
cccctggaccggaaacagt

SEQ ID NO: 488553 - DNA, 19 bp, Mus musculus
  siRNA target sequence for 2410021P16Rik (NM_028037.1,942-960).
cctggaccggaaacagttt

SEQ ID NO: 488554 - DNA, 19 bp, Mus musculus
  siRNA target sequence for 2410021P16Rik (NM_028037.1,1052-1070).
cagaggctatttttcttga

SEQ ID NO: 488555 - DNA, 19 bp, Mus musculus
  siRNA target sequence for 2410021P16Rik (NM_028037.1,1058-1076).
ctatttttcttgatgatct

SEQ ID NO: 488556 - DNA, 19 bp, Mus musculus
  siRNA target sequence for 2410021P16Rik (NM_028037.1,1072-1090).
gatctgggatccaatctaa

SEQ ID NO: 488557 - DNA, 19 bp, Mus musculus
  siRNA target sequence for 2410021P16Rik (NM_028037.1,1289-1307).
ccatggagctccttcagtt

SEQ ID NO: 488558 - DNA, 19 bp, Mus musculus
  siRNA target sequence for 2410021P16Rik (NM_028037.1,1296-1314).
gctccttcagtttgatcat

SEQ ID NO: 488559 - DNA, 19 bp, Mus musculus
  siRNA target sequence for 2410021P16Rik (NM_028037.1,1322-1340).
caaacccaacgtactacat

SEQ ID NO: 488560 - DNA, 19 bp, Mus musculus
  siRNA target sequence for 2410021P16Rik (NM_028037.1,1398-1416).
ctctgcccatgccatagaa

SEQ ID NO: 488561 - DNA, 19 bp, Mus musculus
  siRNA target sequence for 2410021P16Rik (NM_028037.1,1408-1426).
gccatagaaagggaattca

SEQ ID NO: 488562 - DNA, 19 bp, Mus musculus
  siRNA target sequence for 2410021P16Rik (NM_028037.1,1418-1436).
gggaattcaggatcatgaa

SEQ ID NO: 488563 - DNA, 19 bp, Mus musculus
  siRNA target sequence for 2410021P16Rik (NM_028037.1,1431-1449).
catgaaagcccttgcaaat

SEQ ID NO: 488564 - DNA, 19 bp, Mus musculus
  siRNA target sequence for 2410021P16Rik (NM_028037.1,1434-1452).
gaaagcccttgcaaatgca

SEQ ID NO: 488565 - DNA, 19 bp, Mus musculus
  siRNA target sequence for 2410021P16Rik (NM_028037.1,1504-1522).
ggcacccccttctacttga

SEQ ID NO: 488566 - DNA, 19 bp, Mus musculus
  siRNA target sequence for 2410021P16Rik (NM_028037.1,1669-1687).
ggcaagcaaggggactata

SEQ ID NO: 488567 - DNA, 19 bp, Mus musculus
  siRNA target sequence for 2410021P16Rik (NM_028037.1,1670-1688).
gcaagcaaggggactatat

SEQ ID NO: 488568 - DNA, 19 bp, Mus musculus
  siRNA target sequence for 2410021P16Rik (NM_028037.1,1674-1692).
gcaaggggactatattcct

SEQ ID NO: 488569 - DNA, 19 bp, Mus musculus
  siRNA target sequence for 2410021P16Rik (NM_028037.1,1751-1769).
caatggagaggcttatcca

SEQ ID NO: 488570 - DNA, 19 bp, Mus musculus
  siRNA target sequence for 2410021P16Rik (NM_028037.1,2068-2086).
gacaactggaacttctaca

SEQ ID NO: 488571 - DNA, 19 bp, Mus musculus
  siRNA target sequence for 2410021P16Rik (NM_028037.1,2103-2121).
ccgggtggctgcaatccta

SEQ ID NO: 488572 - DNA, 19 bp, Mus musculus
  siRNA target sequence for 2410021P16Rik (NM_028037.1,2711-2729).
cggatacggggaatatgga

SEQ ID NO: 488573 - DNA, 19 bp, Mus musculus
  siRNA target sequence for 2410021P16Rik (NM_028037.1,2793-2811).
caggatccgttcttgcttt

SEQ ID NO: 488574 - DNA, 19 bp, Mus musculus
  siRNA target sequence for 2410021P16Rik (NM_028037.1,2925-2943).
cctggatcctcgatgcaaa

SEQ ID NO: 488575 - DNA, 19 bp, Mus musculus
  siRNA target sequence for 2410021P16Rik (NM_028037.1,2929-2947).
gatcctcgatgcaaactct

SEQ ID NO: 488576 - DNA, 19 bp, Mus musculus
  siRNA target sequence for 2410021P16Rik (NM_028037.1,3179-3197).
ggcctggccggattcatca

SEQ ID NO: 488577 - DNA, 19 bp, Mus musculus
  siRNA target sequence for 2410021P16Rik (NM_028037.1,3400-3418).
gcagctttagacattgcaa

SEQ ID NO: 488578 - DNA, 19 bp, Mus musculus
  siRNA target sequence for 2410021P16Rik (NM_028037.1,3401-3419).
cagctttagacattgcaat

SEQ ID NO: 488579 - DNA, 19 bp, Mus musculus
  siRNA target sequence for 2610005A10Rik (NM_028105.2,241-259).
ggtgtctacctctacagta

SEQ ID NO: 488580 - DNA, 19 bp, Mus musculus
  siRNA target sequence for 2610005A10Rik (NM_028105.2,242-260).
gtgtctacctctacagtaa

SEQ ID NO: 488581 - DNA, 19 bp, Mus musculus
  siRNA target sequence for 2610005A10Rik (NM_028105.2,775-793).
ctggccgtgaagcaacttt

SEQ ID NO: 488582 - DNA, 19 bp, Mus musculus
  siRNA target sequence for 2610005A10Rik (NM_028105.2,796-814).
ccagattttgaattcatgt

SEQ ID NO: 488583 - DNA, 19 bp, Mus musculus
  siRNA target sequence for 2610005A10Rik (NM_028105.2,959-977).
gggtgctcctgatggaatt

SEQ ID NO: 488584 - DNA, 19 bp, Mus musculus
  siRNA target sequence for 2610005A10Rik (NM_028105.2,1020-1038).
gaaccagatcgatgtgaat

SEQ ID NO: 488585 - DNA, 19 bp, Mus musculus
  siRNA target sequence for 2610005A10Rik (NM_028105.2,1024-1042).
cagatcgatgtgaatgaga

SEQ ID NO: 488586 - DNA, 19 bp, Mus musculus
  siRNA target sequence for 2610005A10Rik (NM_028105.2,1337-1355).
cctgggactcagtcaaaca

SEQ ID NO: 488587 - DNA, 19 bp, Mus musculus
  siRNA target sequence for 2610005A10Rik (NM_028105.2,1392-1410).
ctcagagattcgcaataat

SEQ ID NO: 488588 - DNA, 19 bp, Mus musculus
  siRNA target sequence for 2610005A10Rik (NM_028105.2,1434-1452).
cagccagctccttaaccat

SEQ ID NO: 488589 - DNA, 19 bp, Mus musculus
  siRNA target sequence for 2610005A10Rik (NM_028105.2,1473-1491).
catcctgaagactaatgat

SEQ ID NO: 488590 - DNA, 19 bp, Mus musculus
  siRNA target sequence for 2610005A10Rik (NM_028105.2,1535-1553).
ccagttccttcctcaacat

SEQ ID NO: 488591 - DNA, 19 bp, Mus musculus
  siRNA target sequence for 2610005A10Rik (NM_028105.2,1620-1638).
gactcagatatctttcagt

SEQ ID NO: 488592 - DNA, 19 bp, Mus musculus
  siRNA target sequence for 2610005A10Rik (NM_028105.2,1659-1677).
gatcaaccttcatgaactt

SEQ ID NO: 488593 - DNA, 19 bp, Mus musculus
  siRNA target sequence for 2610018G03Rik (NM_133729.1,235-253).
ctcaccggtggctgttcaa

SEQ ID NO: 488594 - DNA, 19 bp, Mus musculus
  siRNA target sequence for 2610018G03Rik (NM_133729.1,254-272).
gtgcctgggatgcagaata

SEQ ID NO: 488595 - DNA, 19 bp, Mus musculus
  siRNA target sequence for 2610018G03Rik (NM_133729.1,256-274).
gcctgggatgcagaataat

SEQ ID NO: 488596 - DNA, 19 bp, Mus musculus
  siRNA target sequence for 2610018G03Rik (NM_133729.1,257-275).
cctgggatgcagaataata

SEQ ID NO: 488597 - DNA, 19 bp, Mus musculus
  siRNA target sequence for 2610018G03Rik (NM_133729.1,287-305).
gaagaactgttcacaaaat

SEQ ID NO: 488598 - DNA, 19 bp, Mus musculus
  siRNA target sequence for 2610018G03Rik (NM_133729.1,363-381).
ctcagcaagtggttgcaat

SEQ ID NO: 488599 - DNA, 19 bp, Mus musculus
  siRNA target sequence for 2610018G03Rik (NM_133729.1,365-383).
cagcaagtggttgcaatta

SEQ ID NO: 488600 - DNA, 19 bp, Mus musculus
  siRNA target sequence for 2610018G03Rik (NM_133729.1,371-389).
gtggttgcaattaaaatca

SEQ ID NO: 488601 - DNA, 19 bp, Mus musculus
  siRNA target sequence for 2610018G03Rik (NM_133729.1,460-478).
cagctcatatgtaacaaaa

SEQ ID NO: 488602 - DNA, 19 bp, Mus musculus
  siRNA target sequence for 2610018G03Rik (NM_133729.1,499-517).
gggttcaaaactatggata

SEQ ID NO: 488603 - DNA, 19 bp, Mus musculus
  siRNA target sequence for 2610018G03Rik (NM_133729.1,501-519).
gttcaaaactatggataat

SEQ ID NO: 488604 - DNA, 19 bp, Mus musculus
  siRNA target sequence for 2610018G03Rik (NM_133729.1,509-527).
ctatggataataatggaat

SEQ ID NO: 488605 - DNA, 19 bp, Mus musculus
  siRNA target sequence for 2610018G03Rik (NM_133729.1,513-531).
ggataataatggaatacct

SEQ ID NO: 488606 - DNA, 19 bp, Mus musculus
  siRNA target sequence for 2610018G03Rik (NM_133729.1,514-532).
gataataatggaataccta

SEQ ID NO: 488607 - DNA, 19 bp, Mus musculus
  siRNA target sequence for 2610018G03Rik (NM_133729.1,559-577).
gcgtgctggtccatttgat

SEQ ID NO: 488608 - DNA, 19 bp, Mus musculus
  siRNA target sequence for 2610018G03Rik (NM_133729.1,613-631).
gaaaggtctggactatcta

SEQ ID NO: 488609 - DNA, 19 bp, Mus musculus
  siRNA target sequence for 2610018G03Rik (NM_133729.1,805-823).
gtcagcttatgactctaaa

SEQ ID NO: 488610 - DNA, 19 bp, Mus musculus
  siRNA target sequence for 2610018G03Rik (NM_133729.1,868-886).
gggagagcctccgaattct

SEQ ID NO: 488611 - DNA, 19 bp, Mus musculus
  siRNA target sequence for 2610018G03Rik (NM_133729.1,941-959).
cttattggagactttacta

SEQ ID NO: 488612 - DNA, 19 bp, Mus musculus
  siRNA target sequence for 2610018G03Rik (NM_133729.1,947-965).
ggagactttactaagtctt

SEQ ID NO: 488613 - DNA, 19 bp, Mus musculus
  siRNA target sequence for 2610018G03Rik (NM_133729.1,991-1009).
gaataaagacccgtcattt

SEQ ID NO: 488614 - DNA, 19 bp, Mus musculus
  siRNA target sequence for 2610018G03Rik (NM_133729.1,1011-1029).
gtcctacagctaaagaact

SEQ ID NO: 488615 - DNA, 19 bp, Mus musculus
  siRNA target sequence for 2610018G03Rik (NM_133729.1,1013-1031).
cctacagctaaagaacttt

SEQ ID NO: 488616 - DNA, 19 bp, Mus musculus
  siRNA target sequence for 2610018G03Rik (NM_133729.1,1014-1032).
ctacagctaaagaactttt

SEQ ID NO: 488617 - DNA, 19 bp, Mus musculus
  siRNA target sequence for 2610018G03Rik (NM_133729.1,1036-1054).
gcataagttcatcgtaaaa

SEQ ID NO: 488618 - DNA, 19 bp, Mus musculus
  siRNA target sequence for 2610018G03Rik (NM_133729.1,1037-1055).
cataagttcatcgtaaaaa

SEQ ID NO: 488619 - DNA, 19 bp, Mus musculus
  siRNA target sequence for 2610018G03Rik (NM_133729.1,1042-1060).
gttcatcgtaaaaaattca

SEQ ID NO: 488620 - DNA, 19 bp, Mus musculus
  siRNA target sequence for 2610018G03Rik (NM_133729.1,1068-1086).
cttcttatctgactgaatt

SEQ ID NO: 488621 - DNA, 19 bp, Mus musculus
  siRNA target sequence for 2610018G03Rik (NM_133729.1,1071-1089).
cttatctgactgaattgat

SEQ ID NO: 488622 - DNA, 19 bp, Mus musculus
  siRNA target sequence for 2610018G03Rik (NM_133729.1,1187-1205).
caccctgaatggagtttca

SEQ ID NO: 488623 - DNA, 19 bp, Mus musculus
  siRNA target sequence for 2610018G03Rik (NM_133729.1,1215-1233).
gtaagaagcctgatccaaa

SEQ ID NO: 488624 - DNA, 19 bp, Mus musculus
  siRNA target sequence for 2610018G03Rik (NM_133729.1,1301-1319).
cctgcatttgccgaactta

SEQ ID NO: 488625 - DNA, 19 bp, Mus musculus
  siRNA target sequence for 2610018G03Rik (NM_133729.1,1302-1320).
ctgcatttgccgaacttaa

SEQ ID NO: 488626 - DNA, 19 bp, Mus musculus
  siRNA target sequence for 2610018G03Rik (NM_133729.1,1305-1323).
catttgccgaacttaaaca

SEQ ID NO: 488627 - DNA, 19 bp, Mus musculus
  siRNA target sequence for 2610018G03Rik (NM_133729.1,1347-1365).
gaaaccaggcaattgaaga

SEQ ID NO: 488628 - DNA, 19 bp, Mus musculus
  siRNA target sequence for 2610018G03Rik (NM_133729.1,1423-1441).
ggtgaagaaactaatcgaa

SEQ ID NO: 488629 - DNA, 19 bp, Mus musculus
  siRNA target sequence for 2610018G03Rik (NM_133729.1,1429-1447).
gaaactaatcgaaaaattt

SEQ ID NO: 488630 - DNA, 19 bp, Mus musculus
  siRNA target sequence for 2610018G03Rik (NM_133729.1,1438-1456).
cgaaaaatttcaaaagtgt

SEQ ID NO: 488631 - DNA, 19 bp, Mus musculus
  siRNA target sequence for 2610019A05Rik (NM_028126.1,159-177).
gagtccatagcatctttct

SEQ ID NO: 488632 - DNA, 19 bp, Mus musculus
  siRNA target sequence for 2610019A05Rik (NM_028126.1,188-206).
gatgatgagcagctttctt

SEQ ID NO: 488633 - DNA, 19 bp, Mus musculus
  siRNA target sequence for 2610019A05Rik (NM_028126.1,287-305).
caaaccaacgggagagtat

SEQ ID NO: 488634 - DNA, 19 bp, Mus musculus
  siRNA target sequence for 2610019A05Rik (NM_028126.1,291-309).
ccaacgggagagtatgtga

SEQ ID NO: 488635 - DNA, 19 bp, Mus musculus
  siRNA target sequence for 2610019A05Rik (NM_028126.1,326-344).
cctagaagcttgttccaat

SEQ ID NO: 488636 - DNA, 19 bp, Mus musculus
  siRNA target sequence for 2610019A05Rik (NM_028126.1,392-410).
cagccatcccaatatagta

SEQ ID NO: 488637 - DNA, 19 bp, Mus musculus
  siRNA target sequence for 2610019A05Rik (NM_028126.1,421-439).
ccaccttcatcgcagataa

SEQ ID NO: 488638 - DNA, 19 bp, Mus musculus
  siRNA target sequence for 2610019A05Rik (NM_028126.1,444-462).
ctgtgggtcgtcacatcat

SEQ ID NO: 488639 - DNA, 19 bp, Mus musculus
  siRNA target sequence for 2610019A05Rik (NM_028126.1,446-464).
gtgggtcgtcacatcattt

SEQ ID NO: 488640 - DNA, 19 bp, Mus musculus
  siRNA target sequence for 2610019A05Rik (NM_028126.1,448-466).
gggtcgtcacatcatttat

SEQ ID NO: 488641 - DNA, 19 bp, Mus musculus
  siRNA target sequence for 2610019A05Rik (NM_028126.1,470-488).
gtacggctctgcaaaggat

SEQ ID NO: 488642 - DNA, 19 bp, Mus musculus
  siRNA target sequence for 2610019A05Rik (NM_028126.1,476-494).
ctctgcaaaggatctcatt

SEQ ID NO: 488643 - DNA, 19 bp, Mus musculus
  siRNA target sequence for 2610019A05Rik (NM_028126.1,552-570).
gtgctaaaggccttagact

SEQ ID NO: 488644 - DNA, 19 bp, Mus musculus
  siRNA target sequence for 2610019A05Rik (NM_028126.1,641-659).
ggtctacctgtctggttta

SEQ ID NO: 488645 - DNA, 19 bp, Mus musculus
  siRNA target sequence for 2610019A05Rik (NM_028126.1,662-680).
cagcaaccttagcatgatt

SEQ ID NO: 488646 - DNA, 19 bp, Mus musculus
  siRNA target sequence for 2610019A05Rik (NM_028126.1,710-728).
cgatttccccaaatatagt

SEQ ID NO: 488647 - DNA, 19 bp, Mus musculus
  siRNA target sequence for 2610019A05Rik (NM_028126.1,770-788).
gaatcttcagggttacgat

SEQ ID NO: 488648 - DNA, 19 bp, Mus musculus
  siRNA target sequence for 2610019A05Rik (NM_028126.1,789-807).
gccaagtccgatatctaca

SEQ ID NO: 488649 - DNA, 19 bp, Mus musculus
  siRNA target sequence for 2610019A05Rik (NM_028126.1,803-821).
ctacagtgtgggaatcaca

SEQ ID NO: 488650 - DNA, 19 bp, Mus musculus
  siRNA target sequence for 2610019A05Rik (NM_028126.1,812-830).
gggaatcacagcatgtgaa

SEQ ID NO: 488651 - DNA, 19 bp, Mus musculus
  siRNA target sequence for 2610019A05Rik (NM_028126.1,843-861).
catgtccccttcaaagata

SEQ ID NO: 488652 - DNA, 19 bp, Mus musculus
  siRNA target sequence for 2610019A05Rik (NM_028126.1,1063-1081).
cgcctcacttccacaactt

SEQ ID NO: 488653 - DNA, 19 bp, Mus musculus
  siRNA target sequence for 2610019A05Rik (NM_028126.1,1064-1082).
gcctcacttccacaacttt

SEQ ID NO: 488654 - DNA, 19 bp, Mus musculus
  siRNA target sequence for 2610019A05Rik (NM_028126.1,1262-1280).
cggcctggtgacaaaccta

SEQ ID NO: 488655 - DNA, 19 bp, Mus musculus
  siRNA target sequence for 2610024N01Rik (NM_027931.1,168-186).
ggaccgctcacgtgaaaaa

SEQ ID NO: 488656 - DNA, 19 bp, Mus musculus
  siRNA target sequence for 2610024N01Rik (NM_027931.1,171-189).
ccgctcacgtgaaaaagtt

SEQ ID NO: 488657 - DNA, 19 bp, Mus musculus
  siRNA target sequence for 2610024N01Rik (NM_027931.1,172-190).
cgctcacgtgaaaaagtta

SEQ ID NO: 488658 - DNA, 19 bp, Mus musculus
  siRNA target sequence for 2610024N01Rik (NM_027931.1,217-235).
ggctattaagatatcactt

SEQ ID NO: 488659 - DNA, 19 bp, Mus musculus
  siRNA target sequence for 2610024N01Rik (NM_027931.1,257-275).
gctgttgcatggaacacaa

SEQ ID NO: 488660 - DNA, 19 bp, Mus musculus
  siRNA target sequence for 2610024N01Rik (NM_027931.1,268-286).
gaacacaaccccttaccaa

SEQ ID NO: 488661 - DNA, 19 bp, Mus musculus
  siRNA target sequence for 2610024N01Rik (NM_027931.1,328-346).
ggctgctgaagtaaatgga

SEQ ID NO: 488662 - DNA, 19 bp, Mus musculus
  siRNA target sequence for 2610024N01Rik (NM_027931.1,335-353).
gaagtaaatggagaacttt

SEQ ID NO: 488663 - DNA, 19 bp, Mus musculus
  siRNA target sequence for 2610024N01Rik (NM_027931.1,365-383).
cgacccttggagacagatt

SEQ ID NO: 488664 - DNA, 19 bp, Mus musculus
  siRNA target sequence for 2610024N01Rik (NM_027931.1,391-409).
cagatttctgacatttgat

SEQ ID NO: 488665 - DNA, 19 bp, Mus musculus
  siRNA target sequence for 2610024N01Rik (NM_027931.1,462-480).
ctgcggctgagcaacaact

SEQ ID NO: 488666 - DNA, 19 bp, Mus musculus
  siRNA target sequence for 2610024N01Rik (NM_027931.1,497-515).
cgaggtccaagcacagaat

SEQ ID NO: 488667 - DNA, 19 bp, Mus musculus
  siRNA target sequence for 2610024N01Rik (NM_027931.1,516-534).
cgggcttttaccatgactt

SEQ ID NO: 488668 - DNA, 19 bp, Mus musculus
  siRNA target sequence for 2610024N01Rik (NM_027931.1,564-582).
gcgcagagttgcccatttt

SEQ ID NO: 488669 - DNA, 19 bp, Mus musculus
  siRNA target sequence for 2610024N01Rik (NM_027931.1,567-585).
cagagttgcccattttaga

SEQ ID NO: 488670 - DNA, 19 bp, Mus musculus
  siRNA target sequence for 2610024N01Rik (NM_027931.1,715-733).
cccaacggcaacagtgtat

SEQ ID NO: 488671 - DNA, 19 bp, Mus musculus
  siRNA target sequence for 2610024N01Rik (NM_027931.1,859-877).
gcagagggtatcaggaatt

SEQ ID NO: 488672 - DNA, 19 bp, Mus musculus
  siRNA target sequence for 2610024N01Rik (NM_027931.1,860-878).
cagagggtatcaggaattt

SEQ ID NO: 488673 - DNA, 19 bp, Mus musculus
  siRNA target sequence for 2610024N01Rik (NM_027931.1,862-880).
gagggtatcaggaatttct

SEQ ID NO: 488674 - DNA, 19 bp, Mus musculus
  siRNA target sequence for 2610024N01Rik (NM_027931.1,962-980).
gaacaggagctcttcttct

SEQ ID NO: 488675 - DNA, 19 bp, Mus musculus
  siRNA target sequence for 2610024N01Rik (NM_027931.1,1019-1037).
cgagggacaagagtctata

SEQ ID NO: 488676 - DNA, 19 bp, Mus musculus
  siRNA target sequence for 2610024N01Rik (NM_027931.1,1020-1038).
gagggacaagagtctataa

SEQ ID NO: 488677 - DNA, 19 bp, Mus musculus
  siRNA target sequence for 2610024N01Rik (NM_027931.1,1101-1119).
ccacgctgttttctacaaa

SEQ ID NO: 488678 - DNA, 19 bp, Mus musculus
  siRNA target sequence for 2610024N01Rik (NM_027931.1,1104-1122).
cgctgttttctacaaaact

SEQ ID NO: 488679 - DNA, 19 bp, Mus musculus
  siRNA target sequence for 2610024N01Rik (NM_027931.1,1150-1168).
ctatagggcagacatgttt

SEQ ID NO: 488680 - DNA, 19 bp, Mus musculus
  siRNA target sequence for 2610024N01Rik (NM_027931.1,1773-1791).
cagagtgtccagtccttat

SEQ ID NO: 488681 - DNA, 19 bp, Mus musculus
  siRNA target sequence for 2610024N01Rik (NM_027931.1,2019-2037).
cccagcttgcccactacaa

SEQ ID NO: 488682 - DNA, 19 bp, Mus musculus
  siRNA target sequence for 2610024N01Rik (NM_027931.1,2023-2041).
gcttgcccactacaacttt

SEQ ID NO: 488683 - DNA, 19 bp, Mus musculus
  siRNA target sequence for 2610024N01Rik (NM_027931.1,2027-2045).
gcccactacaactttcagt

SEQ ID NO: 488684 - DNA, 19 bp, Mus musculus
  siRNA target sequence for 2610024N01Rik (NM_027931.1,2028-2046).
cccactacaactttcagtt

SEQ ID NO: 488685 - DNA, 19 bp, Mus musculus
  siRNA target sequence for 2610024N01Rik (NM_027931.1,2029-2047).
ccactacaactttcagttt

SEQ ID NO: 488686 - DNA, 19 bp, Mus musculus
  siRNA target sequence for 2610024N01Rik (NM_027931.1,2057-2075).
cagagagagcagagtcaaa

SEQ ID NO: 488687 - DNA, 19 bp, Mus musculus
  siRNA target sequence for 2610024N01Rik (NM_027931.1,2170-2188).
ggtccccaatgcagaagaa

SEQ ID NO: 488688 - DNA, 19 bp, Mus musculus
  siRNA target sequence for 2610318I15Rik (NM_028259.1,87-105).
ggcgggacggcttttacct

SEQ ID NO: 488689 - DNA, 19 bp, Mus musculus
  siRNA target sequence for 2610318I15Rik (NM_028259.1,88-106).
gcgggacggcttttaccta

SEQ ID NO: 488690 - DNA, 19 bp, Mus musculus
  siRNA target sequence for 2610318I15Rik (NM_028259.1,144-162).
caggagtgtttgacataga

SEQ ID NO: 488691 - DNA, 19 bp, Mus musculus
  siRNA target sequence for 2610318I15Rik (NM_028259.1,202-220).
ggaggaggggggtcagtta

SEQ ID NO: 488692 - DNA, 19 bp, Mus musculus
  siRNA target sequence for 2610318I15Rik (NM_028259.1,203-221).
gaggaggggggtcagttaa

SEQ ID NO: 488693 - DNA, 19 bp, Mus musculus
  siRNA target sequence for 2610318I15Rik (NM_028259.1,208-226).
ggggggtcagttaaatgaa

SEQ ID NO: 488694 - DNA, 19 bp, Mus musculus
  siRNA target sequence for 2610318I15Rik (NM_028259.1,209-227).
gggggtcagttaaatgaaa

SEQ ID NO: 488695 - DNA, 19 bp, Mus musculus
  siRNA target sequence for 2610318I15Rik (NM_028259.1,243-261).
gagttggaccatatgaact

SEQ ID NO: 488696 - DNA, 19 bp, Mus musculus
  siRNA target sequence for 2610318I15Rik (NM_028259.1,268-286).
ggaacattgtgagaaattt

SEQ ID NO: 488697 - DNA, 19 bp, Mus musculus
  siRNA target sequence for 2610318I15Rik (NM_028259.1,362-380).
ggtaaagggggctatggaa

SEQ ID NO: 488698 - DNA, 19 bp, Mus musculus
  siRNA target sequence for 2610318I15Rik (NM_028259.1,372-390).
gctatggaaaggtttttca

SEQ ID NO: 488699 - DNA, 19 bp, Mus musculus
  siRNA target sequence for 2610318I15Rik (NM_028259.1,431-449).
gccatgaaggtgcttaaaa

SEQ ID NO: 488700 - DNA, 19 bp, Mus musculus
  siRNA target sequence for 2610318I15Rik (NM_028259.1,490-508).
gaaagcagagcggaacatt

SEQ ID NO: 488701 - DNA, 19 bp, Mus musculus
  siRNA target sequence for 2610318I15Rik (NM_028259.1,597-615).
gtggaggagaactatttat

SEQ ID NO: 488702 - DNA, 19 bp, Mus musculus
  siRNA target sequence for 2610318I15Rik (NM_028259.1,671-689).
cgctcttcactgcagaatt

SEQ ID NO: 488703 - DNA, 19 bp, Mus musculus
  siRNA target sequence for 2610318I15Rik (NM_028259.1,672-690).
gctcttcactgcagaattt

SEQ ID NO: 488704 - DNA, 19 bp, Mus musculus
  siRNA target sequence for 2610318I15Rik (NM_028259.1,680-698).
ctgcagaatttccttgaat

SEQ ID NO: 488705 - DNA, 19 bp, Mus musculus
  siRNA target sequence for 2610318I15Rik (NM_028259.1,736-754).
gataaccctgaacatacat

SEQ ID NO: 488706 - DNA, 19 bp, Mus musculus
  siRNA target sequence for 2610318I15Rik (NM_028259.1,790-808).
cctcctattcgccttttct

SEQ ID NO: 488707 - DNA, 19 bp, Mus musculus
  siRNA target sequence for 2610318I15Rik (NM_028259.1,794-812).
ctattcgccttttctaaca

SEQ ID NO: 488708 - DNA, 19 bp, Mus musculus
  siRNA target sequence for 2610318I15Rik (NM_028259.1,889-907).
ggtcctgctagctgtgaaa

SEQ ID NO: 488709 - DNA, 19 bp, Mus musculus
  siRNA target sequence for 2610318I15Rik (NM_028259.1,931-949).
ccctccatcctggagtaat

SEQ ID NO: 488710 - DNA, 19 bp, Mus musculus
  siRNA target sequence for 2610318I15Rik (NM_028259.1,945-963).
gtaatctgcaggattgcaa

SEQ ID NO: 488711 - DNA, 19 bp, Mus musculus
  siRNA target sequence for 2610318I15Rik (NM_028259.1,952-970).
gcaggattgcaacattgtt

SEQ ID NO: 488712 - DNA, 19 bp, Mus musculus
  siRNA target sequence for 2610509G12Rik (NM_027435.1,289-307).
cctctgaagacgactgttt

SEQ ID NO: 488713 - DNA, 19 bp, Mus musculus
  siRNA target sequence for 2610509G12Rik (NM_027435.1,330-348).
cgaaatagagctattaaca

SEQ ID NO: 488714 - DNA, 19 bp, Mus musculus
  siRNA target sequence for 2610509G12Rik (NM_027435.1,347-365).
caggtgcctcccactaaat

SEQ ID NO: 488715 - DNA, 19 bp, Mus musculus
  siRNA target sequence for 2610509G12Rik (NM_027435.1,388-406).
ggatttataaagatcgaat

SEQ ID NO: 488716 - DNA, 19 bp, Mus musculus
  siRNA target sequence for 2610509G12Rik (NM_027435.1,438-456).
ccaatgcaactagatactt

SEQ ID NO: 488717 - DNA, 19 bp, Mus musculus
  siRNA target sequence for 2610509G12Rik (NM_027435.1,490-508).
gtcacattgcagctctaaa

SEQ ID NO: 488718 - DNA, 19 bp, Mus musculus
  siRNA target sequence for 2610509G12Rik (NM_027435.1,538-556).
cagaagtcttcgaaaagtt

SEQ ID NO: 488719 - DNA, 19 bp, Mus musculus
  siRNA target sequence for 2610509G12Rik (NM_027435.1,540-558).
gaagtcttcgaaaagttta

SEQ ID NO: 488720 - DNA, 19 bp, Mus musculus
  siRNA target sequence for 2610509G12Rik (NM_027435.1,543-561).
gtcttcgaaaagtttaaaa

SEQ ID NO: 488721 - DNA, 19 bp, Mus musculus
  siRNA target sequence for 2610509G12Rik (NM_027435.1,756-774).
cagatgcgcccagcaatta

SEQ ID NO: 488722 - DNA, 19 bp, Mus musculus
  siRNA target sequence for 2610509G12Rik (NM_027435.1,758-776).
gatgcgcccagcaattata

SEQ ID NO: 488723 - DNA, 19 bp, Mus musculus
  siRNA target sequence for 2610509G12Rik (NM_027435.1,762-780).
cgcccagcaattatattct

SEQ ID NO: 488724 - DNA, 19 bp, Mus musculus
  siRNA target sequence for 2610509G12Rik (NM_027435.1,811-829).
gatctagcaggcaagatca

SEQ ID NO: 488725 - DNA, 19 bp, Mus musculus
  siRNA target sequence for 2610509G12Rik (NM_027435.1,817-835).
gcaggcaagatcagattca

SEQ ID NO: 488726 - DNA, 19 bp, Mus musculus
  siRNA target sequence for 2610509G12Rik (NM_027435.1,834-852).
cacagttctattgtttcaa

SEQ ID NO: 488727 - DNA, 19 bp, Mus musculus
  siRNA target sequence for 2610509G12Rik (NM_027435.1,854-872).
cctgttagctcttatggat

SEQ ID NO: 488728 - DNA, 19 bp, Mus musculus
  siRNA target sequence for 2610509G12Rik (NM_027435.1,909-927).
gctaccaaccggctagatt

SEQ ID NO: 488729 - DNA, 19 bp, Mus musculus
  siRNA target sequence for 2610509G12Rik (NM_027435.1,913-931).
ccaaccggctagattccat

SEQ ID NO: 488730 - DNA, 19 bp, Mus musculus
  siRNA target sequence for 2610509G12Rik (NM_027435.1,914-932).
caaccggctagattccata

SEQ ID NO: 488731 - DNA, 19 bp, Mus musculus
  siRNA target sequence for 2610509G12Rik (NM_027435.1,999-1017).
gctcgaaaagagattctga

SEQ ID NO: 488732 - DNA, 19 bp, Mus musculus
  siRNA target sequence for 2610509G12Rik (NM_027435.1,1008-1026).
gagattctgaagattcata

SEQ ID NO: 488733 - DNA, 19 bp, Mus musculus
  siRNA target sequence for 2610509G12Rik (NM_027435.1,1098-1116).
ggtgcggatattaagtcaa

SEQ ID NO: 488734 - DNA, 19 bp, Mus musculus
  siRNA target sequence for 2610509G12Rik (NM_027435.1,1099-1117).
gtgcggatattaagtcaat

SEQ ID NO: 488735 - DNA, 19 bp, Mus musculus
  siRNA target sequence for 2610509G12Rik (NM_027435.1,1101-1119).
gcggatattaagtcaatct

SEQ ID NO: 488736 - DNA, 19 bp, Mus musculus
  siRNA target sequence for 2610509G12Rik (NM_027435.1,1103-1121).
ggatattaagtcaatctgt

SEQ ID NO: 488737 - DNA, 19 bp, Mus musculus
  siRNA target sequence for 2610509G12Rik (NM_027435.1,1150-1168).
gacggtacccgcagatcta

SEQ ID NO: 488738 - DNA, 19 bp, Mus musculus
  siRNA target sequence for 2610509G12Rik (NM_027435.1,1152-1170).
cggtacccgcagatctaca

SEQ ID NO: 488739 - DNA, 19 bp, Mus musculus
  siRNA target sequence for 2610509G12Rik (NM_027435.1,1188-1206).
cagctggatctctcttcaa

SEQ ID NO: 488740 - DNA, 19 bp, Mus musculus
  siRNA target sequence for 2610509G12Rik (NM_027435.1,1191-1209).
ctggatctctcttcaatta

SEQ ID NO: 488741 - DNA, 19 bp, Mus musculus
  siRNA target sequence for 2610509G12Rik (NM_027435.1,1211-1229).
catctcagctaaggatttt

SEQ ID NO: 488742 - DNA, 19 bp, Mus musculus
  siRNA target sequence for 2610509G12Rik (NM_027435.1,1344-1362).
gacgccctacagaaagtat

SEQ ID NO: 488743 - DNA, 19 bp, Mus musculus
  siRNA target sequence for 2610509G12Rik (NM_027435.1,1346-1364).
cgccctacagaaagtattt

SEQ ID NO: 488744 - DNA, 19 bp, Mus musculus
  siRNA target sequence for 2610509G12Rik (NM_027435.1,1349-1367).
cctacagaaagtatttcca

SEQ ID NO: 488745 - DNA, 19 bp, Mus musculus
  siRNA target sequence for 2610509G12Rik (NM_027435.1,1377-1395).
gttggaacaaacaaatctt

SEQ ID NO: 488746 - DNA, 19 bp, Mus musculus
  siRNA target sequence for 2610509G12Rik (NM_027435.1,1388-1406).
caaatctttaaattcagat

SEQ ID NO: 488747 - DNA, 19 bp, Mus musculus
  siRNA target sequence for 2610509G12Rik (NM_027435.1,1528-1546).
gttaccagcctatgtcttt

SEQ ID NO: 488748 - DNA, 19 bp, Mus musculus
  siRNA target sequence for 2610509G12Rik (NM_027435.1,1532-1550).
ccagcctatgtcttttcga

SEQ ID NO: 488749 - DNA, 19 bp, Mus musculus
  siRNA target sequence for 2610509G12Rik (NM_027435.1,1541-1559).
gtcttttcgaccaagacta

SEQ ID NO: 488750 - DNA, 19 bp, Mus musculus
  siRNA target sequence for 2610509G12Rik (NM_027435.1,1606-1624).
cagctgtcatccatgcttt

SEQ ID NO: 488751 - DNA, 19 bp, Mus musculus
  siRNA target sequence for 2610509G12Rik (NM_027435.1,1613-1631).
catccatgctttggaaaaa

SEQ ID NO: 488752 - DNA, 19 bp, Mus musculus
  siRNA target sequence for 2610509G12Rik (NM_027435.1,1636-1654).
ctgtatatacattagacat

SEQ ID NO: 488753 - DNA, 19 bp, Mus musculus
  siRNA target sequence for 2610509G12Rik (NM_027435.1,1662-1680).
ctttttggcatcagtacaa

SEQ ID NO: 488754 - DNA, 19 bp, Mus musculus
  siRNA target sequence for 2610509G12Rik (NM_027435.1,1709-1727).
gattcgtgaagctaagaga

SEQ ID NO: 488755 - DNA, 19 bp, Mus musculus
  siRNA target sequence for 2610509G12Rik (NM_027435.1,1729-1747).
cagcacccagcatagtcta

SEQ ID NO: 488756 - DNA, 19 bp, Mus musculus
  siRNA target sequence for 2610509G12Rik (NM_027435.1,1732-1750).
cacccagcatagtctatgt

SEQ ID NO: 488757 - DNA, 19 bp, Mus musculus
  siRNA target sequence for 2610509G12Rik (NM_027435.1,1749-1767).
gtcccacatatccatttgt

SEQ ID NO: 488758 - DNA, 19 bp, Mus musculus
  siRNA target sequence for 2610509G12Rik (NM_027435.1,1760-1778).
ccatttgtggtgggaaata

SEQ ID NO: 488759 - DNA, 19 bp, Mus musculus
  siRNA target sequence for 2610509G12Rik (NM_027435.1,1820-1838).
gactataccttcatttgct

SEQ ID NO: 488760 - DNA, 19 bp, Mus musculus
  siRNA target sequence for 2610509G12Rik (NM_027435.1,1883-1901).
gccggaagaggtacaagaa

SEQ ID NO: 488761 - DNA, 19 bp, Mus musculus
  siRNA target sequence for 2610509G12Rik (NM_027435.1,1884-1902).
ccggaagaggtacaagaat

SEQ ID NO: 488762 - DNA, 19 bp, Mus musculus
  siRNA target sequence for 2610509G12Rik (NM_027435.1,1887-1905).
gaagaggtacaagaattgt

SEQ ID NO: 488763 - DNA, 19 bp, Mus musculus
  siRNA target sequence for 2610509G12Rik (NM_027435.1,1899-1917).
gaattgtttacccatgatt

SEQ ID NO: 488764 - DNA, 19 bp, Mus musculus
  siRNA target sequence for 2610509G12Rik (NM_027435.1,1963-1981).
ccaaattttttgaagactt

SEQ ID NO: 488765 - DNA, 19 bp, Mus musculus
  siRNA target sequence for 2610509G12Rik (NM_027435.1,2004-2022).
cctcctgtgtcacaaaaga

SEQ ID NO: 488766 - DNA, 19 bp, Mus musculus
  siRNA target sequence for 2610509G12Rik (NM_027435.1,2166-2184).
catagacttgctattgata

SEQ ID NO: 488767 - DNA, 19 bp, Mus musculus
  siRNA target sequence for 2610509G12Rik (NM_027435.1,2186-2204).
gcgattccgagtctttact

SEQ ID NO: 488768 - DNA, 19 bp, Mus musculus
  siRNA target sequence for 2610509G12Rik (NM_027435.1,2187-2205).
cgattccgagtctttacta

SEQ ID NO: 488769 - DNA, 19 bp, Mus musculus
  siRNA target sequence for 2610509G12Rik (NM_027435.1,2223-2241).
gaggttcctgattatgtca

SEQ ID NO: 488770 - DNA, 19 bp, Mus musculus
  siRNA target sequence for 2610509G12Rik (NM_027435.1,2308-2326).
ctgtgaaagactatttgaa

SEQ ID NO: 488771 - DNA, 19 bp, Mus musculus
  siRNA target sequence for 2610509G12Rik (NM_027435.1,2327-2345).
ggatattgatctaatctgt

SEQ ID NO: 488772 - DNA, 19 bp, Mus musculus
  siRNA target sequence for 2610509G12Rik (NM_027435.1,2421-2439).
gacactgcttatgcaataa

SEQ ID NO: 488773 - DNA, 19 bp, Mus musculus
  siRNA target sequence for 2610509G12Rik (NM_027435.1,2425-2443).
ctgcttatgcaataattaa

SEQ ID NO: 488774 - DNA, 19 bp, Mus musculus
  siRNA target sequence for 2610509G12Rik (NM_027435.1,2428-2446).
cttatgcaataattaaaga

SEQ ID NO: 488775 - DNA, 19 bp, Mus musculus
  siRNA target sequence for 2610509G12Rik (NM_027435.1,2508-2526).
ggttgtagctcctccaaat

SEQ ID NO: 488776 - DNA, 19 bp, Mus musculus
  siRNA target sequence for 2610509G12Rik (NM_027435.1,2509-2527).
gttgtagctcctccaaata

SEQ ID NO: 488777 - DNA, 19 bp, Mus musculus
  siRNA target sequence for 2610509G12Rik (NM_027435.1,2521-2539).
ccaaatacgcaccatctta

SEQ ID NO: 488778 - DNA, 19 bp, Mus musculus
  siRNA target sequence for 2610509G12Rik (NM_027435.1,2522-2540).
caaatacgcaccatcttat

SEQ ID NO: 488779 - DNA, 19 bp, Mus musculus
  siRNA target sequence for 2610509G12Rik (NM_027435.1,2543-2561).
ccacgtcatgccaaagcaa

SEQ ID NO: 488780 - DNA, 19 bp, Mus musculus
  siRNA target sequence for 2610509G12Rik (NM_027435.1,2544-2562).
cacgtcatgccaaagcaaa

SEQ ID NO: 488781 - DNA, 19 bp, Mus musculus
  siRNA target sequence for 2610509G12Rik (NM_027435.1,2546-2564).
cgtcatgccaaagcaaaat

SEQ ID NO: 488782 - DNA, 19 bp, Mus musculus
  siRNA target sequence for 2610509G12Rik (NM_027435.1,2690-2708).
gcatgtaggcaccaaaata

SEQ ID NO: 488783 - DNA, 19 bp, Mus musculus
  siRNA target sequence for 2610509G12Rik (NM_027435.1,2691-2709).
catgtaggcaccaaaataa

SEQ ID NO: 488784 - DNA, 19 bp, Mus musculus
  siRNA target sequence for 2610509G12Rik (NM_027435.1,2711-2729).
gcgaaggaaaatttcacaa

SEQ ID NO: 488785 - DNA, 19 bp, Mus musculus
  siRNA target sequence for 2610509G12Rik (NM_027435.1,2831-2849).
cgagtcctcggtagaagaa

SEQ ID NO: 488786 - DNA, 19 bp, Mus musculus
  siRNA target sequence for 2610509G12Rik (NM_027435.1,2834-2852).
gtcctcggtagaagaaagt

SEQ ID NO: 488787 - DNA, 19 bp, Mus musculus
  siRNA target sequence for 2610509G12Rik (NM_027435.1,2836-2854).
cctcggtagaagaaagtga

SEQ ID NO: 488788 - DNA, 19 bp, Mus musculus
  siRNA target sequence for 2610509G12Rik (NM_027435.1,2851-2869).
gtgacaagcaaaatagact

SEQ ID NO: 488789 - DNA, 19 bp, Mus musculus
  siRNA target sequence for 2610509G12Rik (NM_027435.1,2866-2884).
gacttgaaagcaacataga

SEQ ID NO: 488790 - DNA, 19 bp, Mus musculus
  siRNA target sequence for 2610509G12Rik (NM_027435.1,2899-2917).
caagttcctctaatattga

SEQ ID NO: 488791 - DNA, 19 bp, Mus musculus
  siRNA target sequence for 2610509G12Rik (NM_027435.1,2902-2920).
gttcctctaatattgagaa

SEQ ID NO: 488792 - DNA, 19 bp, Mus musculus
  siRNA target sequence for 2610509G12Rik (NM_027435.1,2905-2923).
cctctaatattgagaatga

SEQ ID NO: 488793 - DNA, 19 bp, Mus musculus
  siRNA target sequence for 2610509G12Rik (NM_027435.1,3021-3039).
cccgaagacagtgaatcaa

SEQ ID NO: 488794 - DNA, 19 bp, Mus musculus
  siRNA target sequence for 2610509G12Rik (NM_027435.1,3023-3041).
cgaagacagtgaatcaaaa

SEQ ID NO: 488795 - DNA, 19 bp, Mus musculus
  siRNA target sequence for 2610509G12Rik (NM_027435.1,3159-3177).
gaccacaagcagttaacaa

SEQ ID NO: 488796 - DNA, 19 bp, Mus musculus
  siRNA target sequence for 2610509G12Rik (NM_027435.1,3161-3179).
ccacaagcagttaacaaat

SEQ ID NO: 488797 - DNA, 19 bp, Mus musculus
  siRNA target sequence for 2610509G12Rik (NM_027435.1,3162-3180).
cacaagcagttaacaaata

SEQ ID NO: 488798 - DNA, 19 bp, Mus musculus
  siRNA target sequence for 2610509G12Rik (NM_027435.1,3190-3208).
cggttgttaaaaaaagtca

SEQ ID NO: 488799 - DNA, 19 bp, Mus musculus
  siRNA target sequence for 2610509G12Rik (NM_027435.1,3224-3242).
ccaactggagaatttgtat

SEQ ID NO: 488800 - DNA, 19 bp, Mus musculus
  siRNA target sequence for 2610509G12Rik (NM_027435.1,3246-3264).
gtaatcagccagtgtattt

SEQ ID NO: 488801 - DNA, 19 bp, Mus musculus
  siRNA target sequence for 2610509G12Rik (NM_027435.1,3273-3291).
cgcagggactatgacaaaa

SEQ ID NO: 488802 - DNA, 19 bp, Mus musculus
  siRNA target sequence for 2610509G12Rik (NM_027435.1,3275-3293).
cagggactatgacaaaaca

SEQ ID NO: 488803 - DNA, 19 bp, Mus musculus
  siRNA target sequence for 2700091H24Rik (NM_025979.2,186-204).
gtgcattcgggaaagtgta

SEQ ID NO: 488804 - DNA, 19 bp, Mus musculus
  siRNA target sequence for 2700091H24Rik (NM_025979.2,212-230).
cagaaaggcggcaagttgt

SEQ ID NO: 488805 - DNA, 19 bp, Mus musculus
  siRNA target sequence for 2700091H24Rik (NM_025979.2,234-252).
cagtgaaggttgtcaaaaa

SEQ ID NO: 488806 - DNA, 19 bp, Mus musculus
  siRNA target sequence for 2700091H24Rik (NM_025979.2,316-334).
gagcaaaagcccttttgtt

SEQ ID NO: 488807 - DNA, 19 bp, Mus musculus
  siRNA target sequence for 2700091H24Rik (NM_025979.2,327-345).
cttttgttgtgcatctcta

SEQ ID NO: 488808 - DNA, 19 bp, Mus musculus
  siRNA target sequence for 2700091H24Rik (NM_025979.2,362-380).
gcaagcaacatctacttga

SEQ ID NO: 488809 - DNA, 19 bp, Mus musculus
  siRNA target sequence for 2700091H24Rik (NM_025979.2,363-381).
caagcaacatctacttgat

SEQ ID NO: 488810 - DNA, 19 bp, Mus musculus
  siRNA target sequence for 2700091H24Rik (NM_025979.2,407-425).
gtcaagtctctcctacata

SEQ ID NO: 488811 - DNA, 19 bp, Mus musculus
  siRNA target sequence for 2700091H24Rik (NM_025979.2,409-427).
caagtctctcctacatata

SEQ ID NO: 488812 - DNA, 19 bp, Mus musculus
  siRNA target sequence for 2700091H24Rik (NM_025979.2,419-437).
ctacatatatatggttatt

SEQ ID NO: 488813 - DNA, 19 bp, Mus musculus
  siRNA target sequence for 2700091H24Rik (NM_025979.2,473-491).
gtagcattggctttagact

SEQ ID NO: 488814 - DNA, 19 bp, Mus musculus
  siRNA target sequence for 2700091H24Rik (NM_025979.2,530-548).
ccggacaatatgcttattt

SEQ ID NO: 488815 - DNA, 19 bp, Mus musculus
  siRNA target sequence for 2700091H24Rik (NM_025979.2,638-656).
ccatcaatgtctaaaccta

SEQ ID NO: 488816 - DNA, 19 bp, Mus musculus
  siRNA target sequence for 2700091H24Rik (NM_025979.2,639-657).
catcaatgtctaaacctaa

SEQ ID NO: 488817 - DNA, 19 bp, Mus musculus
  siRNA target sequence for 2700091H24Rik (NM_025979.2,658-676).
gcaagattattcaagaact

SEQ ID NO: 488818 - DNA, 19 bp, Mus musculus
  siRNA target sequence for 2700091H24Rik (NM_025979.2,672-690).
gaactccaggacaagtctt

SEQ ID NO: 488819 - DNA, 19 bp, Mus musculus
  siRNA target sequence for 2700091H24Rik (NM_025979.2,686-704).
gtcttatctctcatcagtt

SEQ ID NO: 488820 - DNA, 19 bp, Mus musculus
  siRNA target sequence for 2700091H24Rik (NM_025979.2,718-736).
cacaccagttggagaaaaa

SEQ ID NO: 488821 - DNA, 19 bp, Mus musculus
  siRNA target sequence for 2700091H24Rik (NM_025979.2,757-775).
gttttcagcccctaagtct

SEQ ID NO: 488822 - DNA, 19 bp, Mus musculus
  siRNA target sequence for 2700091H24Rik (NM_025979.2,823-841).
gaaggagccgacttcttat

SEQ ID NO: 488823 - DNA, 19 bp, Mus musculus
  siRNA target sequence for 2700091H24Rik (NM_025979.2,827-845).
gagccgacttcttattcga

SEQ ID NO: 488824 - DNA, 19 bp, Mus musculus
  siRNA target sequence for 2700091H24Rik (NM_025979.2,920-938).
ctactccagtgtaggaaaa

SEQ ID NO: 488825 - DNA, 19 bp, Mus musculus
  siRNA target sequence for 2700091H24Rik (NM_025979.2,941-959).
ctgggtacctcaagtacta

SEQ ID NO: 488826 - DNA, 19 bp, Mus musculus
  siRNA target sequence for 2700091H24Rik (NM_025979.2,943-961).
gggtacctcaagtactagt

SEQ ID NO: 488827 - DNA, 19 bp, Mus musculus
  siRNA target sequence for 2700091H24Rik (NM_025979.2,944-962).
ggtacctcaagtactagta

SEQ ID NO: 488828 - DNA, 19 bp, Mus musculus
  siRNA target sequence for 2700091H24Rik (NM_025979.2,1076-1094).
gttgaaatgctgtatgcaa

SEQ ID NO: 488829 - DNA, 19 bp, Mus musculus
  siRNA target sequence for 2700091H24Rik (NM_025979.2,1189-1207).
ggtgaccctccctagaaaa

SEQ ID NO: 488830 - DNA, 19 bp, Mus musculus
  siRNA target sequence for 2700091H24Rik (NM_025979.2,1190-1208).
gtgaccctccctagaaaat

SEQ ID NO: 488831 - DNA, 19 bp, Mus musculus
  siRNA target sequence for 2700091H24Rik (NM_025979.2,1241-1259).
ccagataatgagaacatga

SEQ ID NO: 488832 - DNA, 19 bp, Mus musculus
  siRNA target sequence for 2700091H24Rik (NM_025979.2,1381-1399).
cagtccttgtcaggaaatt

SEQ ID NO: 488833 - DNA, 19 bp, Mus musculus
  siRNA target sequence for 2700091H24Rik (NM_025979.2,1391-1409).
caggaaattatgcaaagta

SEQ ID NO: 488834 - DNA, 19 bp, Mus musculus
  siRNA target sequence for 2700091H24Rik (NM_025979.2,1426-1444).
gtatgaggccaataaggaa

SEQ ID NO: 488835 - DNA, 19 bp, Mus musculus
  siRNA target sequence for 2700091H24Rik (NM_025979.2,1447-1465).
gcaaggctgccgtgcaaat

SEQ ID NO: 488836 - DNA, 19 bp, Mus musculus
  siRNA target sequence for 2700091H24Rik (NM_025979.2,1451-1469).
ggctgccgtgcaaatcaaa

SEQ ID NO: 488837 - DNA, 19 bp, Mus musculus
  siRNA target sequence for 2700091H24Rik (NM_025979.2,1456-1474).
ccgtgcaaatcaaagtaca

SEQ ID NO: 488838 - DNA, 19 bp, Mus musculus
  siRNA target sequence for 2700091H24Rik (NM_025979.2,1466-1484).
caaagtacaggcttgacaa

SEQ ID NO: 488839 - DNA, 19 bp, Mus musculus
  siRNA target sequence for 2700091H24Rik (NM_025979.2,1490-1508).
gtccagaacctgaagctat

SEQ ID NO: 488840 - DNA, 19 bp, Mus musculus
  siRNA target sequence for 2700091H24Rik (NM_025979.2,1549-1567).
gaacattgtcacctattta

SEQ ID NO: 488841 - DNA, 19 bp, Mus musculus
  siRNA target sequence for 2700091H24Rik (NM_025979.2,1582-1600).
cccagaaaaactgcatata

SEQ ID NO: 488842 - DNA, 19 bp, Mus musculus
  siRNA target sequence for 2700091H24Rik (NM_025979.2,1595-1613).
catataccaacgatagcaa

SEQ ID NO: 488843 - DNA, 19 bp, Mus musculus
  siRNA target sequence for 2700091H24Rik (NM_025979.2,1605-1623).
cgatagcaaagaaccttat

SEQ ID NO: 488844 - DNA, 19 bp, Mus musculus
  siRNA target sequence for 2700091H24Rik (NM_025979.2,1618-1636).
ccttatgtctgaactagat

SEQ ID NO: 488845 - DNA, 19 bp, Mus musculus
  siRNA target sequence for 2700091H24Rik (NM_025979.2,1642-1660).
ctgtgagctgagcagtaaa

SEQ ID NO: 488846 - DNA, 19 bp, Mus musculus
  siRNA target sequence for 2700091H24Rik (NM_025979.2,1663-1681).
ggactgcctcagttctaat

SEQ ID NO: 488847 - DNA, 19 bp, Mus musculus
  siRNA target sequence for 2700091H24Rik (NM_025979.2,1668-1686).
gcctcagttctaattctgt

SEQ ID NO: 488848 - DNA, 19 bp, Mus musculus
  siRNA target sequence for 2700091H24Rik (NM_025979.2,1740-1758).
cttttcctggagtgtctat

SEQ ID NO: 488849 - DNA, 19 bp, Mus musculus
  siRNA target sequence for 2700091H24Rik (NM_025979.2,1783-1801).
ggccttagaaccagataaa

SEQ ID NO: 488850 - DNA, 19 bp, Mus musculus
  siRNA target sequence for 2700091H24Rik (NM_025979.2,1804-1822).
catcagagactactctttt

SEQ ID NO: 488851 - DNA, 19 bp, Mus musculus
  siRNA target sequence for 2700091H24Rik (NM_025979.2,1836-1854).
ctgaagatctatttgtgtt

SEQ ID NO: 488852 - DNA, 19 bp, Mus musculus
  siRNA target sequence for 2700091H24Rik (NM_025979.2,1841-1859).
gatctatttgtgttaccaa

SEQ ID NO: 488853 - DNA, 19 bp, Mus musculus
  siRNA target sequence for 2700091H24Rik (NM_025979.2,1952-1970).
gcattgacctctaaaatca

SEQ ID NO: 488854 - DNA, 19 bp, Mus musculus
  siRNA target sequence for 2700091H24Rik (NM_025979.2,1953-1971).
cattgacctctaaaatcaa

SEQ ID NO: 488855 - DNA, 19 bp, Mus musculus
  siRNA target sequence for 2700091H24Rik (NM_025979.2,1969-1987).
caacgtcgtggcttttcga

SEQ ID NO: 488856 - DNA, 19 bp, Mus musculus
  siRNA target sequence for 2700091H24Rik (NM_025979.2,1975-1993).
cgtggcttttcgaagtttt

SEQ ID NO: 488857 - DNA, 19 bp, Mus musculus
  siRNA target sequence for 2700091H24Rik (NM_025979.2,1976-1994).
gtggcttttcgaagtttta

SEQ ID NO: 488858 - DNA, 19 bp, Mus musculus
  siRNA target sequence for 2700091H24Rik (NM_025979.2,1986-2004).
gaagttttaacagtcatat

SEQ ID NO: 488859 - DNA, 19 bp, Mus musculus
  siRNA target sequence for 2700091H24Rik (NM_025979.2,2000-2018).
catattaacgcatctacta

SEQ ID NO: 488860 - DNA, 19 bp, Mus musculus
  siRNA target sequence for 2700091H24Rik (NM_025979.2,2032-2050).
caaaatcagcataacttct

SEQ ID NO: 488861 - DNA, 19 bp, Mus musculus
  siRNA target sequence for 2700091H24Rik (NM_025979.2,2134-2152).
gtcacatcagactccaaat

SEQ ID NO: 488862 - DNA, 19 bp, Mus musculus
  siRNA target sequence for 2700091H24Rik (NM_025979.2,2136-2154).
cacatcagactccaaatca

SEQ ID NO: 488863 - DNA, 19 bp, Mus musculus
  siRNA target sequence for 2700091H24Rik (NM_025979.2,2145-2163).
ctccaaatcaggtcaagtt

SEQ ID NO: 488864 - DNA, 19 bp, Mus musculus
  siRNA target sequence for 2700091H24Rik (NM_025979.2,2309-2327).
ggagtttgcttgttcgaat

SEQ ID NO: 488865 - DNA, 19 bp, Mus musculus
  siRNA target sequence for 2700091H24Rik (NM_025979.2,2310-2328).
gagtttgcttgttcgaatt

SEQ ID NO: 488866 - DNA, 19 bp, Mus musculus
  siRNA target sequence for 2700091H24Rik (NM_025979.2,2334-2352).
caggaattccccctttcaa

SEQ ID NO: 488867 - DNA, 19 bp, Mus musculus
  siRNA target sequence for 2700091H24Rik (NM_025979.2,2337-2355).
gaattccccctttcaatga

SEQ ID NO: 488868 - DNA, 19 bp, Mus musculus
  siRNA target sequence for 2700091H24Rik (NM_025979.2,2366-2384).
caacaagtattccagaata

SEQ ID NO: 488869 - DNA, 19 bp, Mus musculus
  siRNA target sequence for 2700091H24Rik (NM_025979.2,2369-2387).
caagtattccagaatattt

SEQ ID NO: 488870 - DNA, 19 bp, Mus musculus
  siRNA target sequence for 2700091H24Rik (NM_025979.2,2409-2427).
cagaaggcgaagaaaagct

SEQ ID NO: 488871 - DNA, 19 bp, Mus musculus
  siRNA target sequence for 2700091H24Rik (NM_025979.2,2416-2434).
cgaagaaaagctatctgat

SEQ ID NO: 488872 - DNA, 19 bp, Mus musculus
  siRNA target sequence for 2700091H24Rik (NM_025979.2,2447-2465).
gcaatggacatgcttttaa

SEQ ID NO: 488873 - DNA, 19 bp, Mus musculus
  siRNA target sequence for 2700091H24Rik (NM_025979.2,2452-2470).
ggacatgcttttaaccatt

SEQ ID NO: 488874 - DNA, 19 bp, Mus musculus
  siRNA target sequence for 2700091H24Rik (NM_025979.2,2576-2594).
ccagacgacgaaacagata

SEQ ID NO: 488875 - DNA, 19 bp, Mus musculus
  siRNA target sequence for 2700091H24Rik (NM_025979.2,2579-2597).
gacgacgaaacagatacat

SEQ ID NO: 488876 - DNA, 19 bp, Mus musculus
  siRNA target sequence for 2700091H24Rik (NM_025979.2,2584-2602).
cgaaacagatacatcctat

SEQ ID NO: 488877 - DNA, 19 bp, Mus musculus
  siRNA target sequence for 2700091H24Rik (NM_025979.2,2621-2639).
gctcaacatctgaccatat

SEQ ID NO: 488878 - DNA, 19 bp, Mus musculus
  siRNA target sequence for 2700091H24Rik (NM_025979.2,2632-2650).
gaccatatctgggtttagt

SEQ ID NO: 488879 - DNA, 19 bp, Mus musculus
  siRNA target sequence for 2810018E08Rik (NM_133823.2,655-673).
gattgagctgtcaagagat

SEQ ID NO: 488880 - DNA, 19 bp, Mus musculus
  siRNA target sequence for 2810018E08Rik (NM_133823.2,659-677).
gagctgtcaagagatatga

SEQ ID NO: 488881 - DNA, 19 bp, Mus musculus
  siRNA target sequence for 2810018E08Rik (NM_133823.2,1081-1099).
ggacacaatgagagagttt

SEQ ID NO: 488882 - DNA, 19 bp, Mus musculus
  siRNA target sequence for 2810431B21Rik (NM_024274.1,308-326).
gagatacttggtaaatcct

SEQ ID NO: 488883 - DNA, 19 bp, Mus musculus
  siRNA target sequence for 2810431B21Rik (NM_024274.1,404-422).
caccctctgtggctgatta

SEQ ID NO: 488884 - DNA, 19 bp, Mus musculus
  siRNA target sequence for 2810431B21Rik (NM_024274.1,408-426).
ctctgtggctgattaagga

SEQ ID NO: 488885 - DNA, 19 bp, Mus musculus
  siRNA target sequence for 2810431B21Rik (NM_024274.1,477-495).
ctctattctccgtctatga

SEQ ID NO: 488886 - DNA, 19 bp, Mus musculus
  siRNA target sequence for 2810431B21Rik (NM_024274.1,516-534).
ccacctggcagaactttga

SEQ ID NO: 488887 - DNA, 19 bp, Mus musculus
  siRNA target sequence for 2810431B21Rik (NM_024274.1,517-535).
cacctggcagaactttgat

SEQ ID NO: 488888 - DNA, 19 bp, Mus musculus
  siRNA target sequence for 2810431B21Rik (NM_024274.1,554-572).
gaccaccccagcaggaaaa

SEQ ID NO: 488889 - DNA, 19 bp, Mus musculus
  siRNA target sequence for 2810431B21Rik (NM_024274.1,575-593).
ggggacaactattacttga

SEQ ID NO: 488890 - DNA, 19 bp, Mus musculus
  siRNA target sequence for 2810431B21Rik (NM_024274.1,576-594).
gggacaactattacttgaa

SEQ ID NO: 488891 - DNA, 19 bp, Mus musculus
  siRNA target sequence for 2810431B21Rik (NM_024274.1,643-661).
gctgcatgcgggacttaat

SEQ ID NO: 488892 - DNA, 19 bp, Mus musculus
  siRNA target sequence for 2810431B21Rik (NM_024274.1,689-707).
cgtcgtgaccagattgatt

SEQ ID NO: 488893 - DNA, 19 bp, Mus musculus
  siRNA target sequence for 2810431B21Rik (NM_024274.1,757-775).
caagcatgagttatttgct

SEQ ID NO: 488894 - DNA, 19 bp, Mus musculus
  siRNA target sequence for 2810431B21Rik (NM_024274.1,816-834).
gttctcgctctgctcataa

SEQ ID NO: 488895 - DNA, 19 bp, Mus musculus
  siRNA target sequence for 2810431B21Rik (NM_024274.1,874-892).
gttcgaccttaaacaagta

SEQ ID NO: 488896 - DNA, 19 bp, Mus musculus
  siRNA target sequence for 2810431B21Rik (NM_024274.1,1059-1077).
ctggtgctcaggatcgaat

SEQ ID NO: 488897 - DNA, 19 bp, Mus musculus
  siRNA target sequence for 2810431B21Rik (NM_024274.1,1086-1104).
cgtttggcctgggattaga

SEQ ID NO: 488898 - DNA, 19 bp, Mus musculus
  siRNA target sequence for 2810431B21Rik (NM_024274.1,1087-1105).
gtttggcctgggattagaa

SEQ ID NO: 488899 - DNA, 19 bp, Mus musculus
  siRNA target sequence for 2810431B21Rik (NM_024274.1,1091-1109).
ggcctgggattagaaagat

SEQ ID NO: 488900 - DNA, 19 bp, Mus musculus
  siRNA target sequence for 2810431B21Rik (NM_024274.1,1133-1151).
cctgacatccgccttttct

SEQ ID NO: 488901 - DNA, 19 bp, Mus musculus
  siRNA target sequence for 2810431B21Rik (NM_024274.1,1238-1256).
gccgtgttcaatgacattt

SEQ ID NO: 488902 - DNA, 19 bp, Mus musculus
  siRNA target sequence for 2810431B21Rik (NM_024274.1,1263-1281).
ggctgccctctgagaacta

SEQ ID NO: 488903 - DNA, 19 bp, Mus musculus
  siRNA target sequence for 2810431B21Rik (NM_024274.1,1276-1294).
gaactacacggagaatgat

SEQ ID NO: 488904 - DNA, 19 bp, Mus musculus
  siRNA target sequence for 3110005L17Rik (NM_153587.1,210-228).
gcgagcagctccttactgt

SEQ ID NO: 488905 - DNA, 19 bp, Mus musculus
  siRNA target sequence for 3110005L17Rik (NM_153587.1,238-256).
gctgcggaccgccaactta

SEQ ID NO: 488906 - DNA, 19 bp, Mus musculus
  siRNA target sequence for 3110005L17Rik (NM_153587.1,239-257).
ctgcggaccgccaacttaa

SEQ ID NO: 488907 - DNA, 19 bp, Mus musculus
  siRNA target sequence for 3110005L17Rik (NM_153587.1,241-259).
gcggaccgccaacttaaca

SEQ ID NO: 488908 - DNA, 19 bp, Mus musculus
  siRNA target sequence for 3110005L17Rik (NM_153587.1,274-292).
ggtggggattgaaaacttt

SEQ ID NO: 488909 - DNA, 19 bp, Mus musculus
  siRNA target sequence for 3110005L17Rik (NM_153587.1,307-325).
cctaggaactggagcttat

SEQ ID NO: 488910 - DNA, 19 bp, Mus musculus
  siRNA target sequence for 3110005L17Rik (NM_153587.1,332-350).
gtatttctagttcgtaaaa

SEQ ID NO: 488911 - DNA, 19 bp, Mus musculus
  siRNA target sequence for 3110005L17Rik (NM_153587.1,366-384).
ctggaaagctgtatgctat

SEQ ID NO: 488912 - DNA, 19 bp, Mus musculus
  siRNA target sequence for 3110005L17Rik (NM_153587.1,380-398).
gctatgaaggttttaaaaa

SEQ ID NO: 488913 - DNA, 19 bp, Mus musculus
  siRNA target sequence for 3110005L17Rik (NM_153587.1,471-489).
gacagtcgccatttttggt

SEQ ID NO: 488914 - DNA, 19 bp, Mus musculus
  siRNA target sequence for 3110005L17Rik (NM_153587.1,488-506).
gtgacattgcactatgctt

SEQ ID NO: 488915 - DNA, 19 bp, Mus musculus
  siRNA target sequence for 3110005L17Rik (NM_153587.1,523-541).
gcttcatctcatcttagat

SEQ ID NO: 488916 - DNA, 19 bp, Mus musculus
  siRNA target sequence for 3110005L17Rik (NM_153587.1,527-545).
catctcatcttagattata

SEQ ID NO: 488917 - DNA, 19 bp, Mus musculus
  siRNA target sequence for 3110005L17Rik (NM_153587.1,601-619).
cgaagtgcagatctatgtt

SEQ ID NO: 488918 - DNA, 19 bp, Mus musculus
  siRNA target sequence for 3110005L17Rik (NM_153587.1,649-667).
gcacaagttggggattata

SEQ ID NO: 488919 - DNA, 19 bp, Mus musculus
  siRNA target sequence for 3110005L17Rik (NM_153587.1,650-668).
cacaagttggggattatat

SEQ ID NO: 488920 - DNA, 19 bp, Mus musculus
  siRNA target sequence for 3110005L17Rik (NM_153587.1,661-679).
gattatataccgtgacatt

SEQ ID NO: 488921 - DNA, 19 bp, Mus musculus
  siRNA target sequence for 3110005L17Rik (NM_153587.1,713-731).
catgtggtgctgacagatt

SEQ ID NO: 488922 - DNA, 19 bp, Mus musculus
  siRNA target sequence for 3110005L17Rik (NM_153587.1,726-744).
cagatttcggtctgagtaa

SEQ ID NO: 488923 - DNA, 19 bp, Mus musculus
  siRNA target sequence for 3110005L17Rik (NM_153587.1,735-753).
gtctgagtaaggagtttgt

SEQ ID NO: 488924 - DNA, 19 bp, Mus musculus
  siRNA target sequence for 3110005L17Rik (NM_153587.1,746-764).
gagtttgtggccgatgaaa

SEQ ID NO: 488925 - DNA, 19 bp, Mus musculus
  siRNA target sequence for 3110005L17Rik (NM_153587.1,761-779).
gaaactgaaagagcatatt

SEQ ID NO: 488926 - DNA, 19 bp, Mus musculus
  siRNA target sequence for 3110005L17Rik (NM_153587.1,859-877).
gtggagcttaggtgttcta

SEQ ID NO: 488927 - DNA, 19 bp, Mus musculus
  siRNA target sequence for 3110005L17Rik (NM_153587.1,914-932).
gtcgatggagaaaaaaatt

SEQ ID NO: 488928 - DNA, 19 bp, Mus musculus
  siRNA target sequence for 3110005L17Rik (NM_153587.1,1018-1036).
gcgtctcttgatgaaagat

SEQ ID NO: 488929 - DNA, 19 bp, Mus musculus
  siRNA target sequence for 3110005L17Rik (NM_153587.1,1156-1174).
ggtgatccgggatgagtta

SEQ ID NO: 488930 - DNA, 19 bp, Mus musculus
  siRNA target sequence for 3110005L17Rik (NM_153587.1,1159-1177).
gatccgggatgagttagat

SEQ ID NO: 488931 - DNA, 19 bp, Mus musculus
  siRNA target sequence for 3110005L17Rik (NM_153587.1,1182-1200).
gtaacttcgctgaagagtt

SEQ ID NO: 488932 - DNA, 19 bp, Mus musculus
  siRNA target sequence for 3110005L17Rik (NM_153587.1,1243-1261).
gagctccgagcgactgttt

SEQ ID NO: 488933 - DNA, 19 bp, Mus musculus
  siRNA target sequence for 3110005L17Rik (NM_153587.1,1245-1263).
gctccgagcgactgtttca

SEQ ID NO: 488934 - DNA, 19 bp, Mus musculus
  siRNA target sequence for 3110005L17Rik (NM_153587.1,1273-1291).
cttcgttgctccatctatt

SEQ ID NO: 488935 - DNA, 19 bp, Mus musculus
  siRNA target sequence for 3110005L17Rik (NM_153587.1,1281-1299).
ctccatctattctcttcaa

SEQ ID NO: 488936 - DNA, 19 bp, Mus musculus
  siRNA target sequence for 3110005L17Rik (NM_153587.1,1302-1320).
gtaacgcagctgttataga

SEQ ID NO: 488937 - DNA, 19 bp, Mus musculus
  siRNA target sequence for 3110005L17Rik (NM_153587.1,1348-1366).
ccgtcctggagtgacaaat

SEQ ID NO: 488938 - DNA, 19 bp, Mus musculus
  siRNA target sequence for 3110005L17Rik (NM_153587.1,1350-1368).
gtcctggagtgacaaatgt

SEQ ID NO: 488939 - DNA, 19 bp, Mus musculus
  siRNA target sequence for 3110005L17Rik (NM_153587.1,1387-1405).
gaaggactcacccttctat

SEQ ID NO: 488940 - DNA, 19 bp, Mus musculus
  siRNA target sequence for 3110005L17Rik (NM_153587.1,1390-1408).
ggactcacccttctatcaa

SEQ ID NO: 488941 - DNA, 19 bp, Mus musculus
  siRNA target sequence for 3110005L17Rik (NM_153587.1,1398-1416).
ccttctatcaacactatga

SEQ ID NO: 488942 - DNA, 19 bp, Mus musculus
  siRNA target sequence for 3110005L17Rik (NM_153587.1,1466-1484).
cgcaagtgtgtacacaaaa

SEQ ID NO: 488943 - DNA, 19 bp, Mus musculus
  siRNA target sequence for 3110005L17Rik (NM_153587.1,1467-1485).
gcaagtgtgtacacaaaaa

SEQ ID NO: 488944 - DNA, 19 bp, Mus musculus
  siRNA target sequence for 3110005L17Rik (NM_153587.1,1493-1511).
caagcatttgctgtcaaaa

SEQ ID NO: 488945 - DNA, 19 bp, Mus musculus
  siRNA target sequence for 3110005L17Rik (NM_153587.1,1570-1588).
cgaaggacaccccaatatt

SEQ ID NO: 488946 - DNA, 19 bp, Mus musculus
  siRNA target sequence for 3110005L17Rik (NM_153587.1,1574-1592).
ggacaccccaatattgtga

SEQ ID NO: 488947 - DNA, 19 bp, Mus musculus
  siRNA target sequence for 3110005L17Rik (NM_153587.1,1575-1593).
gacaccccaatattgtgaa

SEQ ID NO: 488948 - DNA, 19 bp, Mus musculus
  siRNA target sequence for 3110005L17Rik (NM_153587.1,1582-1600).
caatattgtgaaactacat

SEQ ID NO: 488949 - DNA, 19 bp, Mus musculus
  siRNA target sequence for 3110005L17Rik (NM_153587.1,1676-1694).
gctctgcttttcaacagaa

SEQ ID NO: 488950 - DNA, 19 bp, Mus musculus
  siRNA target sequence for 3110005L17Rik (NM_153587.1,1761-1779).
cacctcccatgcctgaaat

SEQ ID NO: 488951 - DNA, 19 bp, Mus musculus
  siRNA target sequence for 3110005L17Rik (NM_153587.1,1771-1789).
gcctgaaattgtgctattt

SEQ ID NO: 488952 - DNA, 19 bp, Mus musculus
  siRNA target sequence for 3110005L17Rik (NM_153587.1,1802-1820).
gacaatggacagcttcata

SEQ ID NO: 488953 - DNA, 19 bp, Mus musculus
  siRNA target sequence for 3110005L17Rik (NM_153587.1,1998-2016).
ctgatgaaaacgacaattt

SEQ ID NO: 488954 - DNA, 19 bp, Mus musculus
  siRNA target sequence for 3110005L17Rik (NM_153587.1,2165-2183).
ggtgtcatcctgtatacaa

SEQ ID NO: 488955 - DNA, 19 bp, Mus musculus
  siRNA target sequence for 3110005L17Rik (NM_153587.1,2207-2225).
cagtctcatgacagaagtt

SEQ ID NO: 488956 - DNA, 19 bp, Mus musculus
  siRNA target sequence for 3110005L17Rik (NM_153587.1,2209-2227).
gtctcatgacagaagttta

SEQ ID NO: 488957 - DNA, 19 bp, Mus musculus
  siRNA target sequence for 3110005L17Rik (NM_153587.1,2232-2250).
gcaccagtgcagtagaaat

SEQ ID NO: 488958 - DNA, 19 bp, Mus musculus
  siRNA target sequence for 3110005L17Rik (NM_153587.1,2291-2309).
gaagcgtggaagaatgtat

SEQ ID NO: 488959 - DNA, 19 bp, Mus musculus
  siRNA target sequence for 3110005L17Rik (NM_153587.1,2329-2347).
gattcaagggcttcttaca

SEQ ID NO: 488960 - DNA, 19 bp, Mus musculus
  siRNA target sequence for 3110005L17Rik (NM_153587.1,2493-2511).
cctttcatgcctttaacaa

SEQ ID NO: 488961 - DNA, 19 bp, Mus musculus
  siRNA target sequence for 3110005L17Rik (NM_153587.1,2498-2516).
catgcctttaacaagtata

SEQ ID NO: 488962 - DNA, 19 bp, Mus musculus
  siRNA target sequence for 3110005L17Rik (NM_153587.1,2512-2530).
gtataagagagaaggattt

SEQ ID NO: 488963 - DNA, 19 bp, Mus musculus
  siRNA target sequence for 3110005L17Rik (NM_153587.1,2645-2663).
cagtcccacggcaagacaa

SEQ ID NO: 488964 - DNA, 19 bp, Mus musculus
  siRNA target sequence for 3230401I01Rik (NM_026140.2,183-201).
cgtactgccctctacaact

SEQ ID NO: 488965 - DNA, 19 bp, Mus musculus
  siRNA target sequence for 3230401I01Rik (NM_026140.2,184-202).
gtactgccctctacaacta

SEQ ID NO: 488966 - DNA, 19 bp, Mus musculus
  siRNA target sequence for 3230401I01Rik (NM_026140.2,218-236).
gcaccaagggagcttcatt

SEQ ID NO: 488967 - DNA, 19 bp, Mus musculus
  siRNA target sequence for 3230401I01Rik (NM_026140.2,374-392).
ccagcggctggctctgtat

SEQ ID NO: 488968 - DNA, 19 bp, Mus musculus
  siRNA target sequence for 3230401I01Rik (NM_026140.2,497-515).
gacaccccggtatgacaat

SEQ ID NO: 488969 - DNA, 19 bp, Mus musculus
  siRNA target sequence for 3230401I01Rik (NM_026140.2,611-629).
cttccaggacctggtatat

SEQ ID NO: 488970 - DNA, 19 bp, Mus musculus
  siRNA target sequence for 3230401I01Rik (NM_026140.2,631-649).
gctggactcagcatgaagt

SEQ ID NO: 488971 - DNA, 19 bp, Mus musculus
  siRNA target sequence for 3230401I01Rik (NM_026140.2,666-684).
gacccagttatcctgaaaa

SEQ ID NO: 488972 - DNA, 19 bp, Mus musculus
  siRNA target sequence for 3230401I01Rik (NM_026140.2,864-882).
ggtagcaagctgtctaaga

SEQ ID NO: 488973 - DNA, 19 bp, Mus musculus
  siRNA target sequence for 3230401I01Rik (NM_026140.2,931-949).
cagaagccttgcttgacat

SEQ ID NO: 488974 - DNA, 19 bp, Mus musculus
  siRNA target sequence for 3230401I01Rik (NM_026140.2,936-954).
gccttgcttgacatcatca

SEQ ID NO: 488975 - DNA, 19 bp, Mus musculus
  siRNA target sequence for 3230401I01Rik (NM_026140.2,1278-1296).
gtgtactcctacttatgga

SEQ ID NO: 488976 - DNA, 19 bp, Mus musculus
  siRNA target sequence for 3230401I01Rik (NM_026140.2,1327-1345).
gtgccagctcggaaaacgt

SEQ ID NO: 488977 - DNA, 19 bp, Mus musculus
  siRNA target sequence for 3230401I01Rik (NM_026140.2,1361-1379).
gcgcttgctggggctttta

SEQ ID NO: 488978 - DNA, 19 bp, Mus musculus
  siRNA target sequence for 3230401I01Rik (NM_026140.2,1387-1405).
ctggcttaagcctaactca

SEQ ID NO: 488979 - DNA, 19 bp, Mus musculus
  siRNA target sequence for 3230401I01Rik (NM_026140.2,1538-1556).
gtccttgggcccaaaggaa

SEQ ID NO: 488980 - DNA, 19 bp, Mus musculus
  siRNA target sequence for 3300002K07Rik (NM_152809.1,110-128).
ccgagtttggaggatttgt

SEQ ID NO: 488981 - DNA, 19 bp, Mus musculus
  siRNA target sequence for 3300002K07Rik (NM_152809.1,111-129).
cgagtttggaggatttgtt

SEQ ID NO: 488982 - DNA, 19 bp, Mus musculus
  siRNA target sequence for 3300002K07Rik (NM_152809.1,162-180).
cagttctcatgatagctat

SEQ ID NO: 488983 - DNA, 19 bp, Mus musculus
  siRNA target sequence for 3300002K07Rik (NM_152809.1,206-224).
gtccactcaaagaacttga

SEQ ID NO: 488984 - DNA, 19 bp, Mus musculus
  siRNA target sequence for 3300002K07Rik (NM_152809.1,209-227).
cactcaaagaacttgatat

SEQ ID NO: 488985 - DNA, 19 bp, Mus musculus
  siRNA target sequence for 3300002K07Rik (NM_152809.1,241-259).
gcctgagaacttcttaata

SEQ ID NO: 488986 - DNA, 19 bp, Mus musculus
  siRNA target sequence for 3300002K07Rik (NM_152809.1,308-326).
ggtttggcaaaggaatata

SEQ ID NO: 488987 - DNA, 19 bp, Mus musculus
  siRNA target sequence for 3300002K07Rik (NM_152809.1,380-398).
ggaaccgccagatacatga

SEQ ID NO: 488988 - DNA, 19 bp, Mus musculus
  siRNA target sequence for 3300002K07Rik (NM_152809.1,416-434).
ggaaaagagcagagtagaa

SEQ ID NO: 488989 - DNA, 19 bp, Mus musculus
  siRNA target sequence for 3300002K07Rik (NM_152809.1,555-573).
gagccacaccaatagaagt

SEQ ID NO: 488990 - DNA, 19 bp, Mus musculus
  siRNA target sequence for 3300002K07Rik (NM_152809.1,558-576).
ccacaccaatagaagtgtt

SEQ ID NO: 488991 - DNA, 19 bp, Mus musculus
  siRNA target sequence for 3300002K07Rik (NM_152809.1,619-637).
cgtacgaaggctggatttt

SEQ ID NO: 488992 - DNA, 19 bp, Mus musculus
  siRNA target sequence for 3300002K07Rik (NM_152809.1,627-645).
ggctggatttttttgaaaa

SEQ ID NO: 488993 - DNA, 19 bp, Mus musculus
  siRNA target sequence for 3300002K07Rik (NM_152809.1,646-664).
gccagactatgattaccta

SEQ ID NO: 488994 - DNA, 19 bp, Mus musculus
  siRNA target sequence for 3300002K07Rik (NM_152809.1,647-665).
ccagactatgattacctaa

SEQ ID NO: 488995 - DNA, 19 bp, Mus musculus
  siRNA target sequence for 3300002K07Rik (NM_152809.1,722-740).
gactggattggtaaacagt

SEQ ID NO: 488996 - DNA, 19 bp, Mus musculus
  siRNA target sequence for 3300002K07Rik (NM_152809.1,770-788).
gaccctgctctgtcatcaa

SEQ ID NO: 488997 - DNA, 19 bp, Mus musculus
  siRNA target sequence for 3300002K07Rik (NM_152809.1,773-791).
cctgctctgtcatcaaaca

SEQ ID NO: 488998 - DNA, 19 bp, Mus musculus
  siRNA target sequence for 3300002K07Rik (NM_152809.1,802-820).
ccaacacagagataagata

SEQ ID NO: 488999 - DNA, 19 bp, Mus musculus
  siRNA target sequence for 3300002K07Rik (NM_152809.1,835-853).
ccaggttgtaagttctaca

SEQ ID NO: 489000 - DNA, 19 bp, Mus musculus
  siRNA target sequence for 3300002K07Rik (NM_152809.1,836-854).
caggttgtaagttctacaa

SEQ ID NO: 489001 - DNA, 19 bp, Mus musculus
  siRNA target sequence for 3300002K07Rik (NM_152809.1,892-910).
gtcgaatgcacccattaca

SEQ ID NO: 489002 - DNA, 19 bp, Mus musculus
  siRNA target sequence for 3300002K07Rik (NM_152809.1,904-922).
cattacagctcctacagaa

SEQ ID NO: 489003 - DNA, 19 bp, Mus musculus
  siRNA target sequence for 3300002K07Rik (NM_152809.1,929-947).
gtgatggacgagacaaact

SEQ ID NO: 489004 - DNA, 19 bp, Mus musculus
  siRNA target sequence for 3300002K07Rik (NM_152809.1,940-958).
gacaaactgccagaaagta

SEQ ID NO: 489005 - DNA, 19 bp, Mus musculus
  siRNA target sequence for 4832426G23Rik (NM_177369.2,111-129).
gacgcggagatggctattt

SEQ ID NO: 489006 - DNA, 19 bp, Mus musculus
  siRNA target sequence for 4832426G23Rik (NM_177369.2,113-131).
cgcggagatggctattttt

SEQ ID NO: 489007 - DNA, 19 bp, Mus musculus
  siRNA target sequence for 4832426G23Rik (NM_177369.2,172-190).
ggattgaggcccaaaataa

SEQ ID NO: 489008 - DNA, 19 bp, Mus musculus
  siRNA target sequence for 4832426G23Rik (NM_177369.2,243-261).
gtgaaaagcgttatacaaa

SEQ ID NO: 489009 - DNA, 19 bp, Mus musculus
  siRNA target sequence for 4832426G23Rik (NM_177369.2,602-620).
gacggtcatctccacttta

SEQ ID NO: 489010 - DNA, 19 bp, Mus musculus
  siRNA target sequence for 4832426G23Rik (NM_177369.2,605-623).
ggtcatctccactttagga

SEQ ID NO: 489011 - DNA, 19 bp, Mus musculus
  siRNA target sequence for 4832426G23Rik (NM_177369.2,611-629).
ctccactttaggatgtgaa

SEQ ID NO: 489012 - DNA, 19 bp, Mus musculus
  siRNA target sequence for 4833412N02Rik (NM_029020.2,386-404).
ccaggatggtcgctacaat

SEQ ID NO: 489013 - DNA, 19 bp, Mus musculus
  siRNA target sequence for 4833412N02Rik (NM_029020.2,610-628).
ctgccttatagcactatgt

SEQ ID NO: 489014 - DNA, 19 bp, Mus musculus
  siRNA target sequence for 4833412N02Rik (NM_029020.2,612-630).
gccttatagcactatgtga

SEQ ID NO: 489015 - DNA, 19 bp, Mus musculus
  siRNA target sequence for 4833412N02Rik (NM_029020.2,623-641).
ctatgtgaggccaaagagt

SEQ ID NO: 489016 - DNA, 19 bp, Mus musculus
  siRNA target sequence for 4833412N02Rik (NM_029020.2,666-684).
ccccagagctgcgctttaa

SEQ ID NO: 489017 - DNA, 19 bp, Mus musculus
  siRNA target sequence for 4833412N02Rik (NM_029020.2,667-685).
cccagagctgcgctttaat

SEQ ID NO: 489018 - DNA, 19 bp, Mus musculus
  siRNA target sequence for 4833412N02Rik (NM_029020.2,756-774).
gtgcggcactagtgaatgt

SEQ ID NO: 489019 - DNA, 19 bp, Mus musculus
  siRNA target sequence for 4833412N02Rik (NM_029020.2,903-921).
gactgctgacctttggata

SEQ ID NO: 489020 - DNA, 19 bp, Mus musculus
  siRNA target sequence for 4833412N02Rik (NM_029020.2,907-925).
gctgacctttggataccta

SEQ ID NO: 489021 - DNA, 19 bp, Mus musculus
  siRNA target sequence for 4833412N02Rik (NM_029020.2,987-1005).
ccctgctccggcaagacat

SEQ ID NO: 489022 - DNA, 19 bp, Mus musculus
  siRNA target sequence for 4833412N02Rik (NM_029020.2,988-1006).
cctgctccggcaagacatt

SEQ ID NO: 489023 - DNA, 19 bp, Mus musculus
  siRNA target sequence for 4833412N02Rik (NM_029020.2,992-1010).
ctccggcaagacattgctt

SEQ ID NO: 489024 - DNA, 19 bp, Mus musculus
  siRNA target sequence for 4833412N02Rik (NM_029020.2,1042-1060).
gagtcgcttgactactgat

SEQ ID NO: 489025 - DNA, 19 bp, Mus musculus
  siRNA target sequence for 4833412N02Rik (NM_029020.2,1053-1071).
ctactgatgtgcaagaatt

SEQ ID NO: 489026 - DNA, 19 bp, Mus musculus
  siRNA target sequence for 4833412N02Rik (NM_029020.2,1061-1079).
gtgcaagaattcaagtcat

SEQ ID NO: 489027 - DNA, 19 bp, Mus musculus
  siRNA target sequence for 4833412N02Rik (NM_029020.2,1342-1360).
ggaggaggaacgctatcaa

SEQ ID NO: 489028 - DNA, 19 bp, Mus musculus
  siRNA target sequence for 4833412N02Rik (NM_029020.2,1372-1390).
gtcatgctgctgtaaagca

SEQ ID NO: 489029 - DNA, 19 bp, Mus musculus
  siRNA target sequence for 4833412N02Rik (NM_029020.2,1610-1628).
ggagcccgagtcttcgaat

SEQ ID NO: 489030 - DNA, 19 bp, Mus musculus
  siRNA target sequence for 4833412N02Rik (NM_029020.2,1611-1629).
gagcccgagtcttcgaata

SEQ ID NO: 489031 - DNA, 19 bp, Mus musculus
  siRNA target sequence for 4833412N02Rik (NM_029020.2,1613-1631).
gcccgagtcttcgaataca

SEQ ID NO: 489032 - DNA, 19 bp, Mus musculus
  siRNA target sequence for 4833412N02Rik (NM_029020.2,1614-1632).
cccgagtcttcgaatacat

SEQ ID NO: 489033 - DNA, 19 bp, Mus musculus
  siRNA target sequence for 4833412N02Rik (NM_029020.2,1840-1858).
cttgctggaacgcttctat

SEQ ID NO: 489034 - DNA, 19 bp, Mus musculus
  siRNA target sequence for 4833412N02Rik (NM_029020.2,1931-1949).
caggtcataggtttcatca

SEQ ID NO: 489035 - DNA, 19 bp, Mus musculus
  siRNA target sequence for 4833412N02Rik (NM_029020.2,1955-1973).
gagccagtcctgtttgcaa

SEQ ID NO: 489036 - DNA, 19 bp, Mus musculus
  siRNA target sequence for 4833412N02Rik (NM_029020.2,2312-2330).
gcccactccatcattgtca

SEQ ID NO: 489037 - DNA, 19 bp, Mus musculus
  siRNA target sequence for 4833412N02Rik (NM_029020.2,2361-2379).
cccacgaagaactccttaa

SEQ ID NO: 489038 - DNA, 19 bp, Mus musculus
  siRNA target sequence for 4833412N02Rik (NM_029020.2,2362-2380).
ccacgaagaactccttaaa

SEQ ID NO: 489039 - DNA, 19 bp, Mus musculus
  siRNA target sequence for 4833412N02Rik (NM_029020.2,2363-2381).
cacgaagaactccttaaaa

SEQ ID NO: 489040 - DNA, 19 bp, Mus musculus
  siRNA target sequence for 4833412N02Rik (NM_029020.2,2365-2383).
cgaagaactccttaaaaaa

SEQ ID NO: 489041 - DNA, 19 bp, Mus musculus
  siRNA target sequence for 4833412N02Rik (NM_029020.2,2399-2417).
gagcttatccggagacaaa

SEQ ID NO: 489042 - DNA, 19 bp, Mus musculus
  siRNA target sequence for 4921513O20Rik (NM_025730.1,107-125).
ccacaatgtgctgcttttt

SEQ ID NO: 489043 - DNA, 19 bp, Mus musculus
  siRNA target sequence for 4921513O20Rik (NM_025730.1,108-126).
cacaatgtgctgcttttta

SEQ ID NO: 489044 - DNA, 19 bp, Mus musculus
  siRNA target sequence for 4921513O20Rik (NM_025730.1,227-245).
gttccgggcacctgaagtt

SEQ ID NO: 489045 - DNA, 19 bp, Mus musculus
  siRNA target sequence for 4921513O20Rik (NM_025730.1,243-261).
gttgccagggggaatgtca

SEQ ID NO: 489046 - DNA, 19 bp, Mus musculus
  siRNA target sequence for 4921513O20Rik (NM_025730.1,247-265).
ccagggggaatgtcattta

SEQ ID NO: 489047 - DNA, 19 bp, Mus musculus
  siRNA target sequence for 4921513O20Rik (NM_025730.1,250-268).
gggggaatgtcatttataa

SEQ ID NO: 489048 - DNA, 19 bp, Mus musculus
  siRNA target sequence for 4921513O20Rik (NM_025730.1,253-271).
ggaatgtcatttataacca

SEQ ID NO: 489049 - DNA, 19 bp, Mus musculus
  siRNA target sequence for 4921513O20Rik (NM_025730.1,273-291).
caggccgatgtttattctt

SEQ ID NO: 489050 - DNA, 19 bp, Mus musculus
  siRNA target sequence for 4921513O20Rik (NM_025730.1,295-313).
gcttactacttcacgatat

SEQ ID NO: 489051 - DNA, 19 bp, Mus musculus
  siRNA target sequence for 4921513O20Rik (NM_025730.1,296-314).
cttactacttcacgatatt

SEQ ID NO: 489052 - DNA, 19 bp, Mus musculus
  siRNA target sequence for 4921513O20Rik (NM_025730.1,300-318).
ctacttcacgatatttgga

SEQ ID NO: 489053 - DNA, 19 bp, Mus musculus
  siRNA target sequence for 4921513O20Rik (NM_025730.1,317-335).
gacaactgggagtaggatt

SEQ ID NO: 489054 - DNA, 19 bp, Mus musculus
  siRNA target sequence for 4921513O20Rik (NM_025730.1,319-337).
caactgggagtaggattat

SEQ ID NO: 489055 - DNA, 19 bp, Mus musculus
  siRNA target sequence for 4921513O20Rik (NM_025730.1,322-340).
ctgggagtaggattatgga

SEQ ID NO: 489056 - DNA, 19 bp, Mus musculus
  siRNA target sequence for 4921513O20Rik (NM_025730.1,349-367).
ggttcccaaatgagtttga

SEQ ID NO: 489057 - DNA, 19 bp, Mus musculus
  siRNA target sequence for 4921513O20Rik (NM_025730.1,350-368).
gttcccaaatgagtttgat

SEQ ID NO: 489058 - DNA, 19 bp, Mus musculus
  siRNA target sequence for 4921513O20Rik (NM_025730.1,389-407).
gttgccagatccagttaaa

SEQ ID NO: 489059 - DNA, 19 bp, Mus musculus
  siRNA target sequence for 4921513O20Rik (NM_025730.1,427-445).
ggcctatggttgagaagtt

SEQ ID NO: 489060 - DNA, 19 bp, Mus musculus
  siRNA target sequence for 4921513O20Rik (NM_025730.1,428-446).
gcctatggttgagaagtta

SEQ ID NO: 489061 - DNA, 19 bp, Mus musculus
  siRNA target sequence for 4921513O20Rik (NM_025730.1,434-452).
ggttgagaagttaattaca

SEQ ID NO: 489062 - DNA, 19 bp, Mus musculus
  siRNA target sequence for 4921513O20Rik (NM_025730.1,435-453).
gttgagaagttaattacaa

SEQ ID NO: 489063 - DNA, 19 bp, Mus musculus
  siRNA target sequence for 4921513O20Rik (NM_025730.1,490-508).
ctgcccaggtctttgacat

SEQ ID NO: 489064 - DNA, 19 bp, Mus musculus
  siRNA target sequence for 4921513O20Rik (NM_025730.1,492-510).
gcccaggtctttgacattt

SEQ ID NO: 489065 - DNA, 19 bp, Mus musculus
  siRNA target sequence for 4921513O20Rik (NM_025730.1,495-513).
caggtctttgacattttga

SEQ ID NO: 489066 - DNA, 19 bp, Mus musculus
  siRNA target sequence for 4921513O20Rik (NM_025730.1,512-530).
gaattcggctgaattaatt

SEQ ID NO: 489067 - DNA, 19 bp, Mus musculus
  siRNA target sequence for 4921513O20Rik (NM_025730.1,532-550).
gcctcatgcgacacatttt

SEQ ID NO: 489068 - DNA, 19 bp, Mus musculus
  siRNA target sequence for 4921513O20Rik (NM_025730.1,533-551).
cctcatgcgacacatttta

SEQ ID NO: 489069 - DNA, 19 bp, Mus musculus
  siRNA target sequence for 4921513O20Rik (NM_025730.1,539-557).
gcgacacattttaatacct

SEQ ID NO: 489070 - DNA, 19 bp, Mus musculus
  siRNA target sequence for 4921513O20Rik (NM_025730.1,581-599).
ggttgccacgaatctcaat

SEQ ID NO: 489071 - DNA, 19 bp, Mus musculus
  siRNA target sequence for 4921513O20Rik (NM_025730.1,582-600).
gttgccacgaatctcaata

SEQ ID NO: 489072 - DNA, 19 bp, Mus musculus
  siRNA target sequence for 4921513O20Rik (NM_025730.1,648-666).
cagctttccttatttgact

SEQ ID NO: 489073 - DNA, 19 bp, Mus musculus
  siRNA target sequence for 4921513O20Rik (NM_025730.1,663-681).
gacttaaacacggaaagat

SEQ ID NO: 489074 - DNA, 19 bp, Mus musculus
  siRNA target sequence for 4921513O20Rik (NM_025730.1,690-708).
gaggaagttgctgatagta

SEQ ID NO: 489075 - DNA, 19 bp, Mus musculus
  siRNA target sequence for 4921513O20Rik (NM_025730.1,692-710).
ggaagttgctgatagtaga

SEQ ID NO: 489076 - DNA, 19 bp, Mus musculus
  siRNA target sequence for 4921513O20Rik (NM_025730.1,693-711).
gaagttgctgatagtagaa

SEQ ID NO: 489077 - DNA, 19 bp, Mus musculus
  siRNA target sequence for 4921513O20Rik (NM_025730.1,735-753).
ctcgctgctgagaaagaga

SEQ ID NO: 489078 - DNA, 19 bp, Mus musculus
  siRNA target sequence for 4921513O20Rik (NM_025730.1,788-806).
cctggtcatcaatgttgaa

SEQ ID NO: 489079 - DNA, 19 bp, Mus musculus
  siRNA target sequence for 4921513O20Rik (NM_025730.1,820-838).
gacacaccctggaaaagat

SEQ ID NO: 489080 - DNA, 19 bp, Mus musculus
  siRNA target sequence for 4921513O20Rik (NM_025730.1,828-846).
ctggaaaagatgactgatt

SEQ ID NO: 489081 - DNA, 19 bp, Mus musculus
  siRNA target sequence for 4921513O20Rik (NM_025730.1,918-936).
gctgatggtaacttaatga

SEQ ID NO: 489082 - DNA, 19 bp, Mus musculus
  siRNA target sequence for 4921513O20Rik (NM_025730.1,919-937).
ctgatggtaacttaatgat

SEQ ID NO: 489083 - DNA, 19 bp, Mus musculus
  siRNA target sequence for 4921513O20Rik (NM_025730.1,921-939).
gatggtaacttaatgatat

SEQ ID NO: 489084 - DNA, 19 bp, Mus musculus
  siRNA target sequence for 4921513O20Rik (NM_025730.1,945-963).
gataaagccgttaagtgta

SEQ ID NO: 489085 - DNA, 19 bp, Mus musculus
  siRNA target sequence for 4921513O20Rik (NM_025730.1,976-994).
ccttgaagacactacacat

SEQ ID NO: 489086 - DNA, 19 bp, Mus musculus
  siRNA target sequence for 4921513O20Rik (NM_025730.1,1028-1046).
cgagtccctgaattcatct

SEQ ID NO: 489087 - DNA, 19 bp, Mus musculus
  siRNA target sequence for 4921513O20Rik (NM_025730.1,1155-1173).
gcagctttcagcgattcta

SEQ ID NO: 489088 - DNA, 19 bp, Mus musculus
  siRNA target sequence for 4921513O20Rik (NM_025730.1,1156-1174).
cagctttcagcgattctaa

SEQ ID NO: 489089 - DNA, 19 bp, Mus musculus
  siRNA target sequence for 4921513O20Rik (NM_025730.1,1158-1176).
gctttcagcgattctaaca

SEQ ID NO: 489090 - DNA, 19 bp, Mus musculus
  siRNA target sequence for 4921513O20Rik (NM_025730.1,1159-1177).
ctttcagcgattctaacat

SEQ ID NO: 489091 - DNA, 19 bp, Mus musculus
  siRNA target sequence for 4921513O20Rik (NM_025730.1,1163-1181).
cagcgattctaacatcata

SEQ ID NO: 489092 - DNA, 19 bp, Mus musculus
  siRNA target sequence for 4921513O20Rik (NM_025730.1,1238-1256).
ggtgtgggacaagaaaaca

SEQ ID NO: 489093 - DNA, 19 bp, Mus musculus
  siRNA target sequence for 4921513O20Rik (NM_025730.1,1241-1259).
gtgggacaagaaaacagaa

SEQ ID NO: 489094 - DNA, 19 bp, Mus musculus
  siRNA target sequence for 4921513O20Rik (NM_025730.1,1298-1316).
ggaggtgatggtaaaacta

SEQ ID NO: 489095 - DNA, 19 bp, Mus musculus
  siRNA target sequence for 4921513O20Rik (NM_025730.1,1299-1317).
gaggtgatggtaaaactaa

SEQ ID NO: 489096 - DNA, 19 bp, Mus musculus
  siRNA target sequence for 4921513O20Rik (NM_025730.1,1302-1320).
gtgatggtaaaactaaaca

SEQ ID NO: 489097 - DNA, 19 bp, Mus musculus
  siRNA target sequence for 4921513O20Rik (NM_025730.1,1405-1423).
gaggaggccacatcttact

SEQ ID NO: 489098 - DNA, 19 bp, Mus musculus
  siRNA target sequence for 4921513O20Rik (NM_025730.1,1446-1464).
gttatccgcaccattcaca

SEQ ID NO: 489099 - DNA, 19 bp, Mus musculus
  siRNA target sequence for 4921513O20Rik (NM_025730.1,1487-1505).
catggccacagcacaatta

SEQ ID NO: 489100 - DNA, 19 bp, Mus musculus
  siRNA target sequence for 4921513O20Rik (NM_025730.1,1490-1508).
ggccacagcacaattagga

SEQ ID NO: 489101 - DNA, 19 bp, Mus musculus
  siRNA target sequence for 4921513O20Rik (NM_025730.1,1536-1554).
gggtacaagcggaagagta

SEQ ID NO: 489102 - DNA, 19 bp, Mus musculus
  siRNA target sequence for 4921513O20Rik (NM_025730.1,1550-1568).
gagtacagagggtatccaa

SEQ ID NO: 489103 - DNA, 19 bp, Mus musculus
  siRNA target sequence for 4921513O20Rik (NM_025730.1,1555-1573).
cagagggtatccaagaaca

SEQ ID NO: 489104 - DNA, 19 bp, Mus musculus
  siRNA target sequence for 4921513O20Rik (NM_025730.1,1559-1577).
gggtatccaagaacaaaaa

SEQ ID NO: 489105 - DNA, 19 bp, Mus musculus
  siRNA target sequence for 4921513O20Rik (NM_025730.1,1578-1596).
gagatacaatcttgtttgt

SEQ ID NO: 489106 - DNA, 19 bp, Mus musculus
  siRNA target sequence for 4921513O20Rik (NM_025730.1,1580-1598).
gatacaatcttgtttgtct

SEQ ID NO: 489107 - DNA, 19 bp, Mus musculus
  siRNA target sequence for 4921513O20Rik (NM_025730.1,1597-1615).
ctatttgggacctcaatct

SEQ ID NO: 489108 - DNA, 19 bp, Mus musculus
  siRNA target sequence for 4921513O20Rik (NM_025730.1,1617-1635).
ccacacgaggtgcaaaatt

SEQ ID NO: 489109 - DNA, 19 bp, Mus musculus
  siRNA target sequence for 4921513O20Rik (NM_025730.1,1618-1636).
cacacgaggtgcaaaattt

SEQ ID NO: 489110 - DNA, 19 bp, Mus musculus
  siRNA target sequence for 4921513O20Rik (NM_025730.1,1622-1640).
cgaggtgcaaaatttagaa

SEQ ID NO: 489111 - DNA, 19 bp, Mus musculus
  siRNA target sequence for 4921513O20Rik (NM_025730.1,1623-1641).
gaggtgcaaaatttagaaa

SEQ ID NO: 489112 - DNA, 19 bp, Mus musculus
  siRNA target sequence for 4921525H23Rik (NM_026487.2,64-82).
cttttctcgtccattgagt

SEQ ID NO: 489113 - DNA, 19 bp, Mus musculus
  siRNA target sequence for 4921525H23Rik (NM_026487.2,75-93).
cattgagtcggaatgaagt

SEQ ID NO: 489114 - DNA, 19 bp, Mus musculus
  siRNA target sequence for 4921525H23Rik (NM_026487.2,89-107).
gaagttgtcggtttaattt

SEQ ID NO: 489115 - DNA, 19 bp, Mus musculus
  siRNA target sequence for 4921525H23Rik (NM_026487.2,98-116).
ggtttaattttccgtttaa

SEQ ID NO: 489116 - DNA, 19 bp, Mus musculus
  siRNA target sequence for 4921525H23Rik (NM_026487.2,109-127).
ccgtttaacaatatttggt

SEQ ID NO: 489117 - DNA, 19 bp, Mus musculus
  siRNA target sequence for 4921525H23Rik (NM_026487.2,125-143).
ggtgcagtaacgtacttca

SEQ ID NO: 489118 - DNA, 19 bp, Mus musculus
  siRNA target sequence for 4921525H23Rik (NM_026487.2,128-146).
gcagtaacgtacttcacta

SEQ ID NO: 489119 - DNA, 19 bp, Mus musculus
  siRNA target sequence for 4921525H23Rik (NM_026487.2,131-149).
gtaacgtacttcactatta

SEQ ID NO: 489120 - DNA, 19 bp, Mus musculus
  siRNA target sequence for 4921525H23Rik (NM_026487.2,226-244).
gcaaattggtgtgaaaaat

SEQ ID NO: 489121 - DNA, 19 bp, Mus musculus
  siRNA target sequence for 4921525H23Rik (NM_026487.2,284-302).
ctagtagaccctcttaata

SEQ ID NO: 489122 - DNA, 19 bp, Mus musculus
  siRNA target sequence for 4921525H23Rik (NM_026487.2,293-311).
cctcttaatatgcatgtta

SEQ ID NO: 489123 - DNA, 19 bp, Mus musculus
  siRNA target sequence for 4921525H23Rik (NM_026487.2,318-336).
gtgatatagcaggtttaga

SEQ ID NO: 489124 - DNA, 19 bp, Mus musculus
  siRNA target sequence for 4921525H23Rik (NM_026487.2,494-512).
gcaggctgtcggttcatta

SEQ ID NO: 489125 - DNA, 19 bp, Mus musculus
  siRNA target sequence for 4921525H23Rik (NM_026487.2,495-513).
caggctgtcggttcattaa

SEQ ID NO: 489126 - DNA, 19 bp, Mus musculus
  siRNA target sequence for 4921525H23Rik (NM_026487.2,498-516).
gctgtcggttcattaacct

SEQ ID NO: 489127 - DNA, 19 bp, Mus musculus
  siRNA target sequence for 4921525H23Rik (NM_026487.2,541-559).
gtggtatggagaatctcaa

SEQ ID NO: 489128 - DNA, 19 bp, Mus musculus
  siRNA target sequence for 4921525H23Rik (NM_026487.2,631-649).
ctctttcctacgaaatcgt

SEQ ID NO: 489129 - DNA, 19 bp, Mus musculus
  siRNA target sequence for 4921525H23Rik (NM_026487.2,727-745).
cagctgccaggttatagta

SEQ ID NO: 489130 - DNA, 19 bp, Mus musculus
  siRNA target sequence for 4921525H23Rik (NM_026487.2,729-747).
gctgccaggttatagtaat

SEQ ID NO: 489131 - DNA, 19 bp, Mus musculus
  siRNA target sequence for 4921525H23Rik (NM_026487.2,770-788).
gaccttgactccgctataa

SEQ ID NO: 489132 - DNA, 19 bp, Mus musculus
  siRNA target sequence for 4921525H23Rik (NM_026487.2,780-798).
ccgctataatgcgaagaat

SEQ ID NO: 489133 - DNA, 19 bp, Mus musculus
  siRNA target sequence for 4921525H23Rik (NM_026487.2,795-813).
gaatgcctacacgatttca

SEQ ID NO: 489134 - DNA, 19 bp, Mus musculus
  siRNA target sequence for 4921525H23Rik (NM_026487.2,799-817).
gcctacacgatttcatatt

SEQ ID NO: 489135 - DNA, 19 bp, Mus musculus
  siRNA target sequence for 4921525H23Rik (NM_026487.2,800-818).
cctacacgatttcatatta

SEQ ID NO: 489136 - DNA, 19 bp, Mus musculus
  siRNA target sequence for 4921525H23Rik (NM_026487.2,801-819).
ctacacgatttcatattaa

SEQ ID NO: 489137 - DNA, 19 bp, Mus musculus
  siRNA target sequence for 4921525H23Rik (NM_026487.2,804-822).
cacgatttcatattaacca

SEQ ID NO: 489138 - DNA, 19 bp, Mus musculus
  siRNA target sequence for 4921525H23Rik (NM_026487.2,880-898).
ggatagacacgtagatctt

SEQ ID NO: 489139 - DNA, 19 bp, Mus musculus
  siRNA target sequence for 4921525H23Rik (NM_026487.2,885-903).
gacacgtagatcttctaga

SEQ ID NO: 489140 - DNA, 19 bp, Mus musculus
  siRNA target sequence for 4921525H23Rik (NM_026487.2,975-993).
gtgtcagggaatatgtcaa

SEQ ID NO: 489141 - DNA, 19 bp, Mus musculus
  siRNA target sequence for 4921525H23Rik (NM_026487.2,977-995).
gtcagggaatatgtcaatt

SEQ ID NO: 489142 - DNA, 19 bp, Mus musculus
  siRNA target sequence for 4921525H23Rik (NM_026487.2,1009-1027).
gagtcacgatgaagatgaa

SEQ ID NO: 489143 - DNA, 19 bp, Mus musculus
  siRNA target sequence for 4921525H23Rik (NM_026487.2,1051-1069).
cctgcatcgggcaattgaa

SEQ ID NO: 489144 - DNA, 19 bp, Mus musculus
  siRNA target sequence for 4921525H23Rik (NM_026487.2,1052-1070).
ctgcatcgggcaattgaaa

SEQ ID NO: 489145 - DNA, 19 bp, Mus musculus
  siRNA target sequence for 4921525H23Rik (NM_026487.2,1055-1073).
catcgggcaattgaaaaga

SEQ ID NO: 489146 - DNA, 19 bp, Mus musculus
  siRNA target sequence for 4921525H23Rik (NM_026487.2,1106-1124).
gttctaactcacgtttgtt

SEQ ID NO: 489147 - DNA, 19 bp, Mus musculus
  siRNA target sequence for 4930417M19Rik (NM_177195.2,72-90).
gaaatacgtaaaagctttt

SEQ ID NO: 489148 - DNA, 19 bp, Mus musculus
  siRNA target sequence for 4930417M19Rik (NM_177195.2,120-138).
gtactgctctgcaatgcaa

SEQ ID NO: 489149 - DNA, 19 bp, Mus musculus
  siRNA target sequence for 4930417M19Rik (NM_177195.2,180-198).
gattttgcaggccaacaat

SEQ ID NO: 489150 - DNA, 19 bp, Mus musculus
  siRNA target sequence for 4930417M19Rik (NM_177195.2,207-225).
caactctctttttgagtat

SEQ ID NO: 489151 - DNA, 19 bp, Mus musculus
  siRNA target sequence for 4930417M19Rik (NM_177195.2,220-238).
gagtatccggacaattcca

SEQ ID NO: 489152 - DNA, 19 bp, Mus musculus
  siRNA target sequence for 4930417M19Rik (NM_177195.2,229-247).
gacaattccatcaagacat

SEQ ID NO: 489153 - DNA, 19 bp, Mus musculus
  siRNA target sequence for 4930417M19Rik (NM_177195.2,275-293).
ccatgaacctgtttgaaca

SEQ ID NO: 489154 - DNA, 19 bp, Mus musculus
  siRNA target sequence for 4930417M19Rik (NM_177195.2,427-445).
gccatcgatgacgtgaaaa

SEQ ID NO: 489155 - DNA, 19 bp, Mus musculus
  siRNA target sequence for 4930417M19Rik (NM_177195.2,429-447).
catcgatgacgtgaaaaga

SEQ ID NO: 489156 - DNA, 19 bp, Mus musculus
  siRNA target sequence for 4930417M19Rik (NM_177195.2,468-486).
caacaaccgctctgtttca

SEQ ID NO: 489157 - DNA, 19 bp, Mus musculus
  siRNA target sequence for 4930417M19Rik (NM_177195.2,529-547).
gtccaagtgggggacataa

SEQ ID NO: 489158 - DNA, 19 bp, Mus musculus
  siRNA target sequence for 4930417M19Rik (NM_177195.2,607-625).
ccgtacggcctgacataca

SEQ ID NO: 489159 - DNA, 19 bp, Mus musculus
  siRNA target sequence for 4930417M19Rik (NM_177195.2,608-626).
cgtacggcctgacatacat

SEQ ID NO: 489160 - DNA, 19 bp, Mus musculus
  siRNA target sequence for 4930417M19Rik (NM_177195.2,609-627).
gtacggcctgacatacatt

SEQ ID NO: 489161 - DNA, 19 bp, Mus musculus
  siRNA target sequence for 4930417M19Rik (NM_177195.2,612-630).
cggcctgacatacattgaa

SEQ ID NO: 489162 - DNA, 19 bp, Mus musculus
  siRNA target sequence for 4930417M19Rik (NM_177195.2,615-633).
cctgacatacattgaaaca

SEQ ID NO: 489163 - DNA, 19 bp, Mus musculus
  siRNA target sequence for 4930417M19Rik (NM_177195.2,647-665).
gtgaaaccaacctgaaagt

SEQ ID NO: 489164 - DNA, 19 bp, Mus musculus
  siRNA target sequence for 4930417M19Rik (NM_177195.2,714-732).
gctgtcctcctttaatgga

SEQ ID NO: 489165 - DNA, 19 bp, Mus musculus
  siRNA target sequence for 4930417M19Rik (NM_177195.2,743-761).
gtgatcctcctaataacaa

SEQ ID NO: 489166 - DNA, 19 bp, Mus musculus
  siRNA target sequence for 4930417M19Rik (NM_177195.2,792-810).
cctggggaacacctactta

SEQ ID NO: 489167 - DNA, 19 bp, Mus musculus
  siRNA target sequence for 4930417M19Rik (NM_177195.2,796-814).
gggaacacctacttactga

SEQ ID NO: 489168 - DNA, 19 bp, Mus musculus
  siRNA target sequence for 4930417M19Rik (NM_177195.2,870-888).
cggtttggtcgtttacact

SEQ ID NO: 489169 - DNA, 19 bp, Mus musculus
  siRNA target sequence for 4930417M19Rik (NM_177195.2,890-908).
ggcaagacaccaaattaat

SEQ ID NO: 489170 - DNA, 19 bp, Mus musculus
  siRNA target sequence for 4930417M19Rik (NM_177195.2,922-940).
cggtccaccttcaaacgaa

SEQ ID NO: 489171 - DNA, 19 bp, Mus musculus
  siRNA target sequence for 4930444A02Rik (NM_029037.2,352-370).
ctcgccatggcccttatga

SEQ ID NO: 489172 - DNA, 19 bp, Mus musculus
  siRNA target sequence for 4930444A02Rik (NM_029037.2,446-464).
ctccgggctacttcagaat

SEQ ID NO: 489173 - DNA, 19 bp, Mus musculus
  siRNA target sequence for 4930444A02Rik (NM_029037.2,714-732).
cactattctcaccgaatat

SEQ ID NO: 489174 - DNA, 19 bp, Mus musculus
  siRNA target sequence for 4930444A02Rik (NM_029037.2,716-734).
ctattctcaccgaatatca

SEQ ID NO: 489175 - DNA, 19 bp, Mus musculus
  siRNA target sequence for 4930444A02Rik (NM_029037.2,752-770).
gcaacctggaagaaacact

SEQ ID NO: 489176 - DNA, 19 bp, Mus musculus
  siRNA target sequence for 4930444A02Rik (NM_029037.2,759-777).
ggaagaaacactaaacctt

SEQ ID NO: 489177 - DNA, 19 bp, Mus musculus
  siRNA target sequence for 4930444A02Rik (NM_029037.2,767-785).
cactaaacctttcaaagta

SEQ ID NO: 489178 - DNA, 19 bp, Mus musculus
  siRNA target sequence for 4930444A02Rik (NM_029037.2,834-852).
cgtcagcatcattaactat

SEQ ID NO: 489179 - DNA, 19 bp, Mus musculus
  siRNA target sequence for 4930444A02Rik (NM_029037.2,878-896).
gggtcatgtgtgactctaa

SEQ ID NO: 489180 - DNA, 19 bp, Mus musculus
  siRNA target sequence for 4930444A02Rik (NM_029037.2,918-936).
ccagtacctgctaacaagt

SEQ ID NO: 489181 - DNA, 19 bp, Mus musculus
  siRNA target sequence for 4930444A02Rik (NM_029037.2,925-943).
ctgctaacaagtaacttca

SEQ ID NO: 489182 - DNA, 19 bp, Mus musculus
  siRNA target sequence for 4930444A02Rik (NM_029037.2,988-1006).
gactctggggtacttataa

SEQ ID NO: 489183 - DNA, 19 bp, Mus musculus
  siRNA target sequence for 4930444A02Rik (NM_029037.2,1079-1097).
ccttccaagacgatctcat

SEQ ID NO: 489184 - DNA, 19 bp, Mus musculus
  siRNA target sequence for 4930444A02Rik (NM_029037.2,1116-1134).
ggttgacatctggaagatt

SEQ ID NO: 489185 - DNA, 19 bp, Mus musculus
  siRNA target sequence for 4930444A02Rik (NM_029037.2,1162-1180).
cacgtggaagggagtgata

SEQ ID NO: 489186 - DNA, 19 bp, Mus musculus
  siRNA target sequence for 4930444A02Rik (NM_029037.2,1168-1186).
gaagggagtgatatggtta

SEQ ID NO: 489187 - DNA, 19 bp, Mus musculus
  siRNA target sequence for 4930444A02Rik (NM_029037.2,1171-1189).
gggagtgatatggttagat

SEQ ID NO: 489188 - DNA, 19 bp, Mus musculus
  siRNA target sequence for 4930444A02Rik (NM_029037.2,1172-1190).
ggagtgatatggttagatt

SEQ ID NO: 489189 - DNA, 19 bp, Mus musculus
  siRNA target sequence for 4930444A02Rik (NM_029037.2,1177-1195).
gatatggttagattccatt

SEQ ID NO: 489190 - DNA, 19 bp, Mus musculus
  siRNA target sequence for 4930444A02Rik (NM_029037.2,1224-1242).
ccagatcccggcagaaaga

SEQ ID NO: 489191 - DNA, 19 bp, Mus musculus
  siRNA target sequence for 4930444A02Rik (NM_029037.2,1268-1286).
cttaccagagggttttcca

SEQ ID NO: 489192 - DNA, 19 bp, Mus musculus
  siRNA target sequence for 4930444A02Rik (NM_029037.2,1305-1323).
gatgtcgcagacgaaagaa

SEQ ID NO: 489193 - DNA, 19 bp, Mus musculus
  siRNA target sequence for 4931409K22 (NM_177676.2,1991-2009).
ctgtggactcactgtttga

SEQ ID NO: 489194 - DNA, 19 bp, Mus musculus
  siRNA target sequence for 4931409K22 (NM_177676.2,2120-2138).
ccatgccgtccctgtttga

SEQ ID NO: 489195 - DNA, 19 bp, Mus musculus
  siRNA target sequence for 4931409K22 (NM_177676.2,2121-2139).
catgccgtccctgtttgat

SEQ ID NO: 489196 - DNA, 19 bp, Mus musculus
  siRNA target sequence for 4931409K22 (NM_177676.2,2173-2191).
cggctgggctcccatgata

SEQ ID NO: 489197 - DNA, 19 bp, Mus musculus
  siRNA target sequence for 4931409K22 (NM_177676.2,2175-2193).
gctgggctcccatgatata

SEQ ID NO: 489198 - DNA, 19 bp, Mus musculus
  siRNA target sequence for 4931409K22 (NM_177676.2,2183-2201).
cccatgatatacataccat

SEQ ID NO: 489199 - DNA, 19 bp, Mus musculus
  siRNA target sequence for 4931409K22 (NM_177676.2,2346-2364).
cggagcacagctactagta

SEQ ID NO: 489200 - DNA, 19 bp, Mus musculus
  siRNA target sequence for 4931409K22 (NM_177676.2,2348-2366).
gagcacagctactagtaca

SEQ ID NO: 489201 - DNA, 19 bp, Mus musculus
  siRNA target sequence for 4931409K22 (NM_177676.2,2356-2374).
ctactagtacacattgtct

SEQ ID NO: 489202 - DNA, 19 bp, Mus musculus
  siRNA target sequence for 4931409K22 (NM_177676.2,2404-2422).
gtcatctggattggaaata

SEQ ID NO: 489203 - DNA, 19 bp, Mus musculus
  siRNA target sequence for 4931409K22 (NM_177676.2,2463-2481).
gacgatggaccctaaaaga

SEQ ID NO: 489204 - DNA, 19 bp, Mus musculus
  siRNA target sequence for 4931409K22 (NM_177676.2,2465-2483).
cgatggaccctaaaagaat

SEQ ID NO: 489205 - DNA, 19 bp, Mus musculus
  siRNA target sequence for 4931409K22 (NM_177676.2,2580-2598).
ggggctgtgccggttctat

SEQ ID NO: 489206 - DNA, 19 bp, Mus musculus
  siRNA target sequence for 4931409K22 (NM_177676.2,2582-2600).
ggctgtgccggttctatga

SEQ ID NO: 489207 - DNA, 19 bp, Mus musculus
  siRNA target sequence for 4931409K22 (NM_177676.2,2591-2609).
ggttctatgagcgtattct

SEQ ID NO: 489208 - DNA, 19 bp, Mus musculus
  siRNA target sequence for 4931409K22 (NM_177676.2,2694-2712).
ctcgagtctggatgttagt

SEQ ID NO: 489209 - DNA, 19 bp, Mus musculus
  siRNA target sequence for 4931409K22 (NM_177676.2,2734-2752).
ggctacacacctagtcata

SEQ ID NO: 489210 - DNA, 19 bp, Mus musculus
  siRNA target sequence for 4931409K22 (NM_177676.2,2736-2754).
ctacacacctagtcatatt

SEQ ID NO: 489211 - DNA, 19 bp, Mus musculus
  siRNA target sequence for 4931409K22 (NM_177676.2,2739-2757).
cacacctagtcatattcta

SEQ ID NO: 489212 - DNA, 19 bp, Mus musculus
  siRNA target sequence for 4931409K22 (NM_177676.2,2741-2759).
cacctagtcatattctaca

SEQ ID NO: 489213 - DNA, 19 bp, Mus musculus
  siRNA target sequence for 4931409K22 (NM_177676.2,2788-2806).
cggctccttcaacttatca

SEQ ID NO: 489214 - DNA, 19 bp, Mus musculus
  siRNA target sequence for 4931409K22 (NM_177676.2,2791-2809).
ctccttcaacttatcaaga

SEQ ID NO: 489215 - DNA, 19 bp, Mus musculus
  siRNA target sequence for 4931409K22 (NM_177676.2,2884-2902).
cttaaggaatggtttttca

SEQ ID NO: 489216 - DNA, 19 bp, Mus musculus
  siRNA target sequence for 4932411A10 (NM_177719.2,529-547).
ctcaaccgggctcaactaa

SEQ ID NO: 489217 - DNA, 19 bp, Mus musculus
  siRNA target sequence for 4932411A10 (NM_177719.2,534-552).
ccgggctcaactaaccttt

SEQ ID NO: 489218 - DNA, 19 bp, Mus musculus
  siRNA target sequence for 4932411A10 (NM_177719.2,553-571).
gactatctacacacaaatt

SEQ ID NO: 489219 - DNA, 19 bp, Mus musculus
  siRNA target sequence for 4932411A10 (NM_177719.2,572-590).
caactacccatgcattttt

SEQ ID NO: 489220 - DNA, 19 bp, Mus musculus
  siRNA target sequence for 4932411A10 (NM_177719.2,575-593).
ctacccatgcatttttgtt

SEQ ID NO: 489221 - DNA, 19 bp, Mus musculus
  siRNA target sequence for 4932411A10 (NM_177719.2,634-652).
gatgccacccggatagata

SEQ ID NO: 489222 - DNA, 19 bp, Mus musculus
  siRNA target sequence for 4932411A10 (NM_177719.2,637-655).
gccacccggatagatattt

SEQ ID NO: 489223 - DNA, 19 bp, Mus musculus
  siRNA target sequence for 4932411A10 (NM_177719.2,638-656).
ccacccggatagatattta

SEQ ID NO: 489224 - DNA, 19 bp, Mus musculus
  siRNA target sequence for 4932411A10 (NM_177719.2,800-818).
ggtacgggaatggactaaa

SEQ ID NO: 489225 - DNA, 19 bp, Mus musculus
  siRNA target sequence for 4932411A10 (NM_177719.2,801-819).
gtacgggaatggactaaaa

SEQ ID NO: 489226 - DNA, 19 bp, Mus musculus
  siRNA target sequence for 4932411A10 (NM_177719.2,940-958).
cctttgcctacttggaata

SEQ ID NO: 489227 - DNA, 19 bp, Mus musculus
  siRNA target sequence for 4932411A10 (NM_177719.2,967-985).
cgagaacctgtcacagata

SEQ ID NO: 489228 - DNA, 19 bp, Mus musculus
  siRNA target sequence for 4932411A10 (NM_177719.2,1094-1112).
ccctggtcgtcattttcaa

SEQ ID NO: 489229 - DNA, 19 bp, Mus musculus
  siRNA target sequence for 4932411A10 (NM_177719.2,1095-1113).
cctggtcgtcattttcaat

SEQ ID NO: 489230 - DNA, 19 bp, Mus musculus
  siRNA target sequence for 4932411A10 (NM_177719.2,1442-1460).
cccgtacattagaaataca

SEQ ID NO: 489231 - DNA, 19 bp, Mus musculus
  siRNA target sequence for 4932411A10 (NM_177719.2,1444-1462).
cgtacattagaaatacaca

SEQ ID NO: 489232 - DNA, 19 bp, Mus musculus
  siRNA target sequence for 4932411A10 (NM_177719.2,1445-1463).
gtacattagaaatacacat

SEQ ID NO: 489233 - DNA, 19 bp, Mus musculus
  siRNA target sequence for 4932411A10 (NM_177719.2,1636-1654).
gaccatgatggcatgttta

SEQ ID NO: 489234 - DNA, 19 bp, Mus musculus
  siRNA target sequence for 4932411A10 (NM_177719.2,1705-1723).
ctggaaaagggcatggtat

SEQ ID NO: 489235 - DNA, 19 bp, Mus musculus
  siRNA target sequence for 4932411A10 (NM_177719.2,1873-1891).
gcccagcatggaattatta

SEQ ID NO: 489236 - DNA, 19 bp, Mus musculus
  siRNA target sequence for 4932411A10 (NM_177719.2,1929-1947).
gaacagacccccatctgat

SEQ ID NO: 489237 - DNA, 19 bp, Mus musculus
  siRNA target sequence for 4932411A10 (NM_177719.2,1977-1995).
gcaagtcccaaccactata

SEQ ID NO: 489238 - DNA, 19 bp, Mus musculus
  siRNA target sequence for 4932411A10 (NM_177719.2,1989-2007).
cactatacagtgtgattta

SEQ ID NO: 489239 - DNA, 19 bp, Mus musculus
  siRNA target sequence for 4932411A10 (NM_177719.2,1996-2014).
cagtgtgatttatgtctaa

SEQ ID NO: 489240 - DNA, 19 bp, Mus musculus
  siRNA target sequence for 4932411A10 (NM_177719.2,2025-2043).
cctccccttccagttaagt

SEQ ID NO: 489241 - DNA, 19 bp, Mus musculus
  siRNA target sequence for 4932411A10 (NM_177719.2,2034-2052).
ccagttaagtgctgtagaa

SEQ ID NO: 489242 - DNA, 19 bp, Mus musculus
  siRNA target sequence for 4932411A10 (NM_177719.2,2053-2071).
gaaggttaccccatcaact

SEQ ID NO: 489243 - DNA, 19 bp, Mus musculus
  siRNA target sequence for 4932411A10 (NM_177719.2,2062-2080).
cccatcaactgggtttgtt

SEQ ID NO: 489244 - DNA, 19 bp, Mus musculus
  siRNA target sequence for 4932411A10 (NM_177719.2,2136-2154).
gattcctctggggatatta

SEQ ID NO: 489245 - DNA, 19 bp, Mus musculus
  siRNA target sequence for 4932411A10 (NM_177719.2,2261-2279).
cacaaagcgacctaaaaaa

SEQ ID NO: 489246 - DNA, 19 bp, Mus musculus
  siRNA target sequence for 4932411A10 (NM_177719.2,2263-2281).
caaagcgacctaaaaaaat

SEQ ID NO: 489247 - DNA, 19 bp, Mus musculus
  siRNA target sequence for 4932411A10 (NM_177719.2,2348-2366).
cgtctttccatgtagtaaa

SEQ ID NO: 489248 - DNA, 19 bp, Mus musculus
  siRNA target sequence for 4932411A10 (NM_177719.2,2355-2373).
ccatgtagtaaaaacgaat

SEQ ID NO: 489249 - DNA, 19 bp, Mus musculus
  siRNA target sequence for 4932411A10 (NM_177719.2,2442-2460).
caatccaaaacctcctttt

SEQ ID NO: 489250 - DNA, 19 bp, Mus musculus
  siRNA target sequence for 4932411A10 (NM_177719.2,2453-2471).
ctccttttctggtagacaa

SEQ ID NO: 489251 - DNA, 19 bp, Mus musculus
  siRNA target sequence for 4932411A10 (NM_177719.2,2497-2515).
cccgagacaccccaaaagt

SEQ ID NO: 489252 - DNA, 19 bp, Mus musculus
  siRNA target sequence for 4932411A10 (NM_177719.2,2499-2517).
cgagacaccccaaaagtca

SEQ ID NO: 489253 - DNA, 19 bp, Mus musculus
  siRNA target sequence for 4932411A10 (NM_177719.2,2522-2540).
gcctcctggtcaaaactat

SEQ ID NO: 489254 - DNA, 19 bp, Mus musculus
  siRNA target sequence for 4932411A10 (NM_177719.2,2548-2566).
cccccacctctggtacaat

SEQ ID NO: 489255 - DNA, 19 bp, Mus musculus
  siRNA target sequence for 4932411A10 (NM_177719.2,2611-2629).
gtcgaaactccccaaatca

SEQ ID NO: 489256 - DNA, 19 bp, Mus musculus
  siRNA target sequence for 4932411A10 (NM_177719.2,2652-2670).
gccatatgtacctgttaat

SEQ ID NO: 489257 - DNA, 19 bp, Mus musculus
  siRNA target sequence for 4932411A10 (NM_177719.2,2709-2727).
ggtctctgatgaaatagaa

SEQ ID NO: 489258 - DNA, 19 bp, Mus musculus
  siRNA target sequence for 4932411A10 (NM_177719.2,3048-3066).
gtaccagagcactgatgaa

SEQ ID NO: 489259 - DNA, 19 bp, Mus musculus
  siRNA target sequence for 4932411A10 (NM_177719.2,3219-3237).
ctggaactgcctacattat

SEQ ID NO: 489260 - DNA, 19 bp, Mus musculus
  siRNA target sequence for 4932411A10 (NM_177719.2,3247-3265).
ctgagttttcccatatcca

SEQ ID NO: 489261 - DNA, 19 bp, Mus musculus
  siRNA target sequence for 4932411A10 (NM_177719.2,3270-3288).
ggagctaggtgccatgaat

SEQ ID NO: 489262 - DNA, 19 bp, Mus musculus
  siRNA target sequence for 4932411A10 (NM_177719.2,3271-3289).
gagctaggtgccatgaatt

SEQ ID NO: 489263 - DNA, 19 bp, Mus musculus
  siRNA target sequence for 4932411A10 (NM_177719.2,3280-3298).
gccatgaattcagaagaat

SEQ ID NO: 489264 - DNA, 19 bp, Mus musculus
  siRNA target sequence for 4932411A10 (NM_177719.2,3340-3358).
gtcggactccagaatctct

SEQ ID NO: 489265 - DNA, 19 bp, Mus musculus
  siRNA target sequence for 4932411A10 (NM_177719.2,3355-3373).
ctctgccgctcctaccaaa

SEQ ID NO: 489266 - DNA, 19 bp, Mus musculus
  siRNA target sequence for 4932411A10 (NM_177719.2,3412-3430).
ctgcgcatctcccagaaaa

SEQ ID NO: 489267 - DNA, 19 bp, Mus musculus
  siRNA target sequence for 4932411A10 (NM_177719.2,3414-3432).
gcgcatctcccagaaaaaa

SEQ ID NO: 489268 - DNA, 19 bp, Mus musculus
  siRNA target sequence for 4932411A10 (NM_177719.2,3496-3514).
gctcagcagggcataaaca

SEQ ID NO: 489269 - DNA, 19 bp, Mus musculus
  siRNA target sequence for 4932411A10 (NM_177719.2,3497-3515).
ctcagcagggcataaacat

SEQ ID NO: 489270 - DNA, 19 bp, Mus musculus
  siRNA target sequence for 4932416N14Rik (NM_172461.1,250-268).
gtacccgaccgctttgatt

SEQ ID NO: 489271 - DNA, 19 bp, Mus musculus
  siRNA target sequence for 4932416N14Rik (NM_172461.1,254-272).
ccgaccgctttgattgcaa

SEQ ID NO: 489272 - DNA, 19 bp, Mus musculus
  siRNA target sequence for 4932416N14Rik (NM_172461.1,259-277).
cgctttgattgcaagaaga

SEQ ID NO: 489273 - DNA, 19 bp, Mus musculus
  siRNA target sequence for 4932416N14Rik (NM_172461.1,260-278).
gctttgattgcaagaagat

SEQ ID NO: 489274 - DNA, 19 bp, Mus musculus
  siRNA target sequence for 4932416N14Rik (NM_172461.1,270-288).
caagaagatatgttcttca

SEQ ID NO: 489275 - DNA, 19 bp, Mus musculus
  siRNA target sequence for 4932416N14Rik (NM_172461.1,382-400).
ctctgttggcgaattaaat

SEQ ID NO: 489276 - DNA, 19 bp, Mus musculus
  siRNA target sequence for 4932416N14Rik (NM_172461.1,390-408).
gcgaattaaatccaaatga

SEQ ID NO: 489277 - DNA, 19 bp, Mus musculus
  siRNA target sequence for 4932416N14Rik (NM_172461.1,497-515).
gagactttttgcattatca

SEQ ID NO: 489278 - DNA, 19 bp, Mus musculus
  siRNA target sequence for 4932416N14Rik (NM_172461.1,530-548).
ggccgagatctggactata

SEQ ID NO: 489279 - DNA, 19 bp, Mus musculus
  siRNA target sequence for 4932416N14Rik (NM_172461.1,532-550).
ccgagatctggactataga

SEQ ID NO: 489280 - DNA, 19 bp, Mus musculus
  siRNA target sequence for 4932416N14Rik (NM_172461.1,533-551).
cgagatctggactatagaa

SEQ ID NO: 489281 - DNA, 19 bp, Mus musculus
  siRNA target sequence for 4932416N14Rik (NM_172461.1,573-591).
ggaaagtcttcgctgaaaa

SEQ ID NO: 489282 - DNA, 19 bp, Mus musculus
  siRNA target sequence for 4932416N14Rik (NM_172461.1,578-596).
gtcttcgctgaaaatcaga

SEQ ID NO: 489283 - DNA, 19 bp, Mus musculus
  siRNA target sequence for 4932416N14Rik (NM_172461.1,580-598).
cttcgctgaaaatcagata

SEQ ID NO: 489284 - DNA, 19 bp, Mus musculus
  siRNA target sequence for 4932416N14Rik (NM_172461.1,583-601).
cgctgaaaatcagatagta

SEQ ID NO: 489285 - DNA, 19 bp, Mus musculus
  siRNA target sequence for 4932416N14Rik (NM_172461.1,585-603).
ctgaaaatcagatagtaga

SEQ ID NO: 489286 - DNA, 19 bp, Mus musculus
  siRNA target sequence for 4932416N14Rik (NM_172461.1,587-605).
gaaaatcagatagtagaat

SEQ ID NO: 489287 - DNA, 19 bp, Mus musculus
  siRNA target sequence for 4932416N14Rik (NM_172461.1,593-611).
cagatagtagaatggttta

SEQ ID NO: 489288 - DNA, 19 bp, Mus musculus
  siRNA target sequence for 4932416N14Rik (NM_172461.1,640-658).
gcatgagaggagaatactt

SEQ ID NO: 489289 - DNA, 19 bp, Mus musculus
  siRNA target sequence for 4932416N14Rik (NM_172461.1,656-674).
cttcatcgagacttgaaat

SEQ ID NO: 489290 - DNA, 19 bp, Mus musculus
  siRNA target sequence for 4932416N14Rik (NM_172461.1,723-741).
gagtttctcggctgctaat

SEQ ID NO: 489291 - DNA, 19 bp, Mus musculus
  siRNA target sequence for 4932416N14Rik (NM_172461.1,733-751).
gctgctaatgggttcatgt

SEQ ID NO: 489292 - DNA, 19 bp, Mus musculus
  siRNA target sequence for 4932416N14Rik (NM_172461.1,752-770).
gagctggctacaactctaa

SEQ ID NO: 489293 - DNA, 19 bp, Mus musculus
  siRNA target sequence for 4932416N14Rik (NM_172461.1,771-789).
ccgggaccccccattatat

SEQ ID NO: 489294 - DNA, 19 bp, Mus musculus
  siRNA target sequence for 4932416N14Rik (NM_172461.1,773-791).
gggaccccccattatatga

SEQ ID NO: 489295 - DNA, 19 bp, Mus musculus
  siRNA target sequence for 4932416N14Rik (NM_172461.1,775-793).
gaccccccattatatgagt

SEQ ID NO: 489296 - DNA, 19 bp, Mus musculus
  siRNA target sequence for 4932416N14Rik (NM_172461.1,848-866).
gcatgcattttatatgaga

SEQ ID NO: 489297 - DNA, 19 bp, Mus musculus
  siRNA target sequence for 4932416N14Rik (NM_172461.1,870-888).
gttgcctggatcatgcatt

SEQ ID NO: 489298 - DNA, 19 bp, Mus musculus
  siRNA target sequence for 4932416N14Rik (NM_172461.1,874-892).
cctggatcatgcatttgct

SEQ ID NO: 489299 - DNA, 19 bp, Mus musculus
  siRNA target sequence for 4932416N14Rik (NM_172461.1,907-925).
gtctgtggttttgaatatt

SEQ ID NO: 489300 - DNA, 19 bp, Mus musculus
  siRNA target sequence for 4932416N14Rik (NM_172461.1,909-927).
ctgtggttttgaatattgt

SEQ ID NO: 489301 - DNA, 19 bp, Mus musculus
  siRNA target sequence for 4932416N14Rik (NM_172461.1,942-960).
cttcactcccggacagata

SEQ ID NO: 489302 - DNA, 19 bp, Mus musculus
  siRNA target sequence for 4932416N14Rik (NM_172461.1,955-973).
cagatatccacgagaacta

SEQ ID NO: 489303 - DNA, 19 bp, Mus musculus
  siRNA target sequence for 4932416N14Rik (NM_172461.1,957-975).
gatatccacgagaactaaa

SEQ ID NO: 489304 - DNA, 19 bp, Mus musculus
  siRNA target sequence for 4932416N14Rik (NM_172461.1,986-1004).
gaacgcatgttgaacaaga

SEQ ID NO: 489305 - DNA, 19 bp, Mus musculus
  siRNA target sequence for 4932416N14Rik (NM_172461.1,1019-1037).
ccgtcggctgcagacattt

SEQ ID NO: 489306 - DNA, 19 bp, Mus musculus
  siRNA target sequence for 4932416N14Rik (NM_172461.1,1020-1038).
cgtcggctgcagacatttt

SEQ ID NO: 489307 - DNA, 19 bp, Mus musculus
  siRNA target sequence for 4932416N14Rik (NM_172461.1,1021-1039).
gtcggctgcagacatttta

SEQ ID NO: 489308 - DNA, 19 bp, Mus musculus
  siRNA target sequence for 4932416N14Rik (NM_172461.1,1064-1082).
cttcagctcctgatgtgta

SEQ ID NO: 489309 - DNA, 19 bp, Mus musculus
  siRNA target sequence for 4932416N14Rik (NM_172461.1,1129-1147).
ggaggctgctcatacgatt

SEQ ID NO: 489310 - DNA, 19 bp, Mus musculus
  siRNA target sequence for 4932416N14Rik (NM_172461.1,1130-1148).
gaggctgctcatacgatta

SEQ ID NO: 489311 - DNA, 19 bp, Mus musculus
  siRNA target sequence for 4932416N14Rik (NM_172461.1,1132-1150).
ggctgctcatacgattaat

SEQ ID NO: 489312 - DNA, 19 bp, Mus musculus
  siRNA target sequence for 4932416N14Rik (NM_172461.1,1264-1282).
caggaggctgaaaaagatt

SEQ ID NO: 489313 - DNA, 19 bp, Mus musculus
  siRNA target sequence for 4932416N14Rik (NM_172461.1,1363-1381).
gctccatgaactagatgaa

SEQ ID NO: 489314 - DNA, 19 bp, Mus musculus
  siRNA target sequence for 4932416N14Rik (NM_172461.1,1422-1440).
gcctggacctcgatgaact

SEQ ID NO: 489315 - DNA, 19 bp, Mus musculus
  siRNA target sequence for 4932416N14Rik (NM_172461.1,1423-1441).
cctggacctcgatgaactt

SEQ ID NO: 489316 - DNA, 19 bp, Mus musculus
  siRNA target sequence for 4932416N14Rik (NM_172461.1,1469-1487).
gacctcggacattatgaga

SEQ ID NO: 489317 - DNA, 19 bp, Mus musculus
  siRNA target sequence for 4932416N14Rik (NM_172461.1,1498-1516).
cccacttgttgctgaacaa

SEQ ID NO: 489318 - DNA, 19 bp, Mus musculus
  siRNA target sequence for 4932416N14Rik (NM_172461.1,1499-1517).
ccacttgttgctgaacaat

SEQ ID NO: 489319 - DNA, 19 bp, Mus musculus
  siRNA target sequence for 4932416N14Rik (NM_172461.1,1500-1518).
cacttgttgctgaacaata

SEQ ID NO: 489320 - DNA, 19 bp, Mus musculus
  siRNA target sequence for 4932416N14Rik (NM_172461.1,1699-1717).
ctctctagacacaaagact

SEQ ID NO: 489321 - DNA, 19 bp, Mus musculus
  siRNA target sequence for 4932416N14Rik (NM_172461.1,1819-1837).
gctaggaatggaaacgttt

SEQ ID NO: 489322 - DNA, 19 bp, Mus musculus
  siRNA target sequence for 4932416N14Rik (NM_172461.1,1927-1945).
ggccagtgactgctttgaa

SEQ ID NO: 489323 - DNA, 19 bp, Mus musculus
  siRNA target sequence for 4932416N14Rik (NM_172461.1,1932-1950).
gtgactgctttgaagttga

SEQ ID NO: 489324 - DNA, 19 bp, Mus musculus
  siRNA target sequence for 4932416N14Rik (NM_172461.1,1946-1964).
gttgaccagctcctctatt

SEQ ID NO: 489325 - DNA, 19 bp, Mus musculus
  siRNA target sequence for 4932416N14Rik (NM_172461.1,2042-2060).
ccggtcaagggcactcatt

SEQ ID NO: 489326 - DNA, 19 bp, Mus musculus
  siRNA target sequence for 4932702G04Rik (NM_053180.2,84-102).
cccacggcatcgtcttcaa

SEQ ID NO: 489327 - DNA, 19 bp, Mus musculus
  siRNA target sequence for 4932702G04Rik (NM_053180.2,85-103).
ccacggcatcgtcttcaaa

SEQ ID NO: 489328 - DNA, 19 bp, Mus musculus
  siRNA target sequence for 4932702G04Rik (NM_053180.2,212-230).
gagatagaggacagtcaat

SEQ ID NO: 489329 - DNA, 19 bp, Mus musculus
  siRNA target sequence for 4932702G04Rik (NM_053180.2,214-232).
gatagaggacagtcaatat

SEQ ID NO: 489330 - DNA, 19 bp, Mus musculus
  siRNA target sequence for 4932702G04Rik (NM_053180.2,275-293).
gtgctggctttcgaattta

SEQ ID NO: 489331 - DNA, 19 bp, Mus musculus
  siRNA target sequence for 4932702G04Rik (NM_053180.2,453-471).
cctcaggccagctcaagat

SEQ ID NO: 489332 - DNA, 19 bp, Mus musculus
  siRNA target sequence for 4932702G04Rik (NM_053180.2,454-472).
ctcaggccagctcaagata

SEQ ID NO: 489333 - DNA, 19 bp, Mus musculus
  siRNA target sequence for 4932702G04Rik (NM_053180.2,661-679).
cgaaaacgacattgaacaa

SEQ ID NO: 489334 - DNA, 19 bp, Mus musculus
  siRNA target sequence for 4932702G04Rik (NM_053180.2,888-906).
cccttctgcatcagtactt

SEQ ID NO: 489335 - DNA, 19 bp, Mus musculus
  siRNA target sequence for 4933423E17 (NM_177706.2,465-483).
ccagcatggcactactgaa

SEQ ID NO: 489336 - DNA, 19 bp, Mus musculus
  siRNA target sequence for 4933423E17 (NM_177706.2,591-609).
gctcagccaccctaacatt

SEQ ID NO: 489337 - DNA, 19 bp, Mus musculus
  siRNA target sequence for 4933423E17 (NM_177706.2,594-612).
cagccaccctaacattgtt

SEQ ID NO: 489338 - DNA, 19 bp, Mus musculus
  siRNA target sequence for 4933423E17 (NM_177706.2,633-651).
gacagaacagaacatttat

SEQ ID NO: 489339 - DNA, 19 bp, Mus musculus
  siRNA target sequence for 4933423E17 (NM_177706.2,635-653).
cagaacagaacatttatct

SEQ ID NO: 489340 - DNA, 19 bp, Mus musculus
  siRNA target sequence for 4933423E17 (NM_177706.2,640-658).
cagaacatttatctgatta

SEQ ID NO: 489341 - DNA, 19 bp, Mus musculus
  siRNA target sequence for 4933423E17 (NM_177706.2,728-746).
caagaagcatatttgttca

SEQ ID NO: 489342 - DNA, 19 bp, Mus musculus
  siRNA target sequence for 4933423E17 (NM_177706.2,799-817).
ctaaagcctgacaatgtca

SEQ ID NO: 489343 - DNA, 19 bp, Mus musculus
  siRNA target sequence for 4933423E17 (NM_177706.2,826-844).
gagcatggaaatgtcaaaa

SEQ ID NO: 489344 - DNA, 19 bp, Mus musculus
  siRNA target sequence for 4933423E17 (NM_177706.2,856-874).
gggctaggtgccagattca

SEQ ID NO: 489345 - DNA, 19 bp, Mus musculus
  siRNA target sequence for 4933423E17 (NM_177706.2,1003-1021).
gtgacagggatttttccat

SEQ ID NO: 489346 - DNA, 19 bp, Mus musculus
  siRNA target sequence for 4933423E17 (NM_177706.2,1027-1045).
gggtccaccttgtcagaaa

SEQ ID NO: 489347 - DNA, 19 bp, Mus musculus
  siRNA target sequence for 4933423E17 (NM_177706.2,1060-1078).
ctacaagggaggtatgaaa

SEQ ID NO: 489348 - DNA, 19 bp, Mus musculus
  siRNA target sequence for 4933423E17 (NM_177706.2,1075-1093).
gaaattccttataatctct

SEQ ID NO: 489349 - DNA, 19 bp, Mus musculus
  siRNA target sequence for 4933423E17 (NM_177706.2,1118-1136).
gcctgttattggcaacaaa

SEQ ID NO: 489350 - DNA, 19 bp, Mus musculus
  siRNA target sequence for 4933423E17 (NM_177706.2,1192-1210).
ggggaaaagactatcacat

SEQ ID NO: 489351 - DNA, 19 bp, Mus musculus
  siRNA target sequence for 4933423E17 (NM_177706.2,1248-1266).
cataatggcagccatgaaa

SEQ ID NO: 489352 - DNA, 19 bp, Mus musculus
  siRNA target sequence for 4933423E17 (NM_177706.2,1254-1272).
ggcagccatgaaaaatatt

SEQ ID NO: 489353 - DNA, 19 bp, Mus musculus
  siRNA target sequence for 4933423E17 (NM_177706.2,1282-1300).
gtgcaggacattagagaat

SEQ ID NO: 489354 - DNA, 19 bp, Mus musculus
  siRNA target sequence for 4933423E17 (NM_177706.2,1288-1306).
gacattagagaatcattaa

SEQ ID NO: 489355 - DNA, 19 bp, Mus musculus
  siRNA target sequence for 4933423E17 (NM_177706.2,1311-1329).
cagaaagttcgatgaaact

SEQ ID NO: 489356 - DNA, 19 bp, Mus musculus
  siRNA target sequence for 4933423E17 (NM_177706.2,1313-1331).
gaaagttcgatgaaactat

SEQ ID NO: 489357 - DNA, 19 bp, Mus musculus
  siRNA target sequence for 4933423E17 (NM_177706.2,1324-1342).
gaaactatggctacatata

SEQ ID NO: 489358 - DNA, 19 bp, Mus musculus
  siRNA target sequence for 4933423E17 (NM_177706.2,1364-1382).
gtcaggatgatggcaatta

SEQ ID NO: 489359 - DNA, 19 bp, Mus musculus
  siRNA target sequence for 4933423E17 (NM_177706.2,1372-1390).
gatggcaattatgttcaaa

SEQ ID NO: 489360 - DNA, 19 bp, Mus musculus
  siRNA target sequence for 4933423E17 (NM_177706.2,1376-1394).
gcaattatgttcaaacaaa

SEQ ID NO: 489361 - DNA, 19 bp, Mus musculus
  siRNA target sequence for 4933423E17 (NM_177706.2,1414-1432).
ccacctttcccttcagtaa

SEQ ID NO: 489362 - DNA, 19 bp, Mus musculus
  siRNA target sequence for 4933423E17 (NM_177706.2,1744-1762).
cctaggggctggaggaaat

SEQ ID NO: 489363 - DNA, 19 bp, Mus musculus
  siRNA target sequence for 4933423E17 (NM_177706.2,1802-1820).
gctgcacgttgcctcaaaa

SEQ ID NO: 489364 - DNA, 19 bp, Mus musculus
  siRNA target sequence for 4933423E17 (NM_177706.2,1803-1821).
ctgcacgttgcctcaaaaa

SEQ ID NO: 489365 - DNA, 19 bp, Mus musculus
  siRNA target sequence for 4933424F08Rik (NM_027673.1,222-240).
gtcatggaggagtatggtt

SEQ ID NO: 489366 - DNA, 19 bp, Mus musculus
  siRNA target sequence for 4933424F08Rik (NM_027673.1,352-370).
ctgaagactatctcaacaa

SEQ ID NO: 489367 - DNA, 19 bp, Mus musculus
  siRNA target sequence for 4933424F08Rik (NM_027673.1,354-372).
gaagactatctcaacaagt

SEQ ID NO: 489368 - DNA, 19 bp, Mus musculus
  siRNA target sequence for 4933424F08Rik (NM_027673.1,448-466).
ccacatcccgagtatacat

SEQ ID NO: 489369 - DNA, 19 bp, Mus musculus
  siRNA target sequence for 4933424F08Rik (NM_027673.1,451-469).
catcccgagtatacatcat

SEQ ID NO: 489370 - DNA, 19 bp, Mus musculus
  siRNA target sequence for 4933424F08Rik (NM_027673.1,454-472).
cccgagtatacatcatttt

SEQ ID NO: 489371 - DNA, 19 bp, Mus musculus
  siRNA target sequence for 4933424F08Rik (NM_027673.1,457-475).
gagtatacatcattttgga

SEQ ID NO: 489372 - DNA, 19 bp, Mus musculus
  siRNA target sequence for 4933424F08Rik (NM_027673.1,500-518).
cgaatggatccaacgatat

SEQ ID NO: 489373 - DNA, 19 bp, Mus musculus
  siRNA target sequence for 4933424F08Rik (NM_027673.1,596-614).
catcgtgcaccgggattta

SEQ ID NO: 489374 - DNA, 19 bp, Mus musculus
  siRNA target sequence for 4933424F08Rik (NM_027673.1,600-618).
gtgcaccgggatttaaagt

SEQ ID NO: 489375 - DNA, 19 bp, Mus musculus
  siRNA target sequence for 4933424F08Rik (NM_027673.1,871-889).
cacggctgccctttgatga

SEQ ID NO: 489376 - DNA, 19 bp, Mus musculus
  siRNA target sequence for 4933424F08Rik (NM_027673.1,984-1002).
cagctgctacgccaatcta

SEQ ID NO: 489377 - DNA, 19 bp, Mus musculus
  siRNA target sequence for 4933424F08Rik (NM_027673.1,1009-1027).
gtgccaccatcctagatgt

SEQ ID NO: 489378 - DNA, 19 bp, Mus musculus
  siRNA target sequence for 4933424F08Rik (NM_027673.1,1058-1076).
gcctgagcaaccttcgaat

SEQ ID NO: 489379 - DNA, 19 bp, Mus musculus
  siRNA target sequence for 4933424F08Rik (NM_027673.1,1125-1143).
cggcaccagtccttggaaa

SEQ ID NO: 489380 - DNA, 19 bp, Mus musculus
  siRNA target sequence for 4933439B08Rik (NM_027721.1,84-102).
cttaccagactctcaaact

SEQ ID NO: 489381 - DNA, 19 bp, Mus musculus
  siRNA target sequence for 4933439B08Rik (NM_027721.1,119-137).
gaggcgtacgagatgagaa

SEQ ID NO: 489382 - DNA, 19 bp, Mus musculus
  siRNA target sequence for 4933439B08Rik (NM_027721.1,124-142).
gtacgagatgagaacagaa

SEQ ID NO: 489383 - DNA, 19 bp, Mus musculus
  siRNA target sequence for 4933439B08Rik (NM_027721.1,138-156).
cagaagcacggcgaaaaaa

SEQ ID NO: 489384 - DNA, 19 bp, Mus musculus
  siRNA target sequence for 4933439B08Rik (NM_027721.1,147-165).
ggcgaaaaaatcttctcat

SEQ ID NO: 489385 - DNA, 19 bp, Mus musculus
  siRNA target sequence for 4933439B08Rik (NM_027721.1,148-166).
gcgaaaaaatcttctcatt

SEQ ID NO: 489386 - DNA, 19 bp, Mus musculus
  siRNA target sequence for 4933439B08Rik (NM_027721.1,238-256).
gggattacggcgctttgaa

SEQ ID NO: 489387 - DNA, 19 bp, Mus musculus
  siRNA target sequence for 4933439B08Rik (NM_027721.1,246-264).
ggcgctttgaagtttgtga

SEQ ID NO: 489388 - DNA, 19 bp, Mus musculus
  siRNA target sequence for 4933439B08Rik (NM_027721.1,268-286).
cgttgacctggaaactatt

SEQ ID NO: 489389 - DNA, 19 bp, Mus musculus
  siRNA target sequence for 4933439B08Rik (NM_027721.1,269-287).
gttgacctggaaactattt

SEQ ID NO: 489390 - DNA, 19 bp, Mus musculus
  siRNA target sequence for 4933439B08Rik (NM_027721.1,292-310).
ggaatatgagagctattat

SEQ ID NO: 489391 - DNA, 19 bp, Mus musculus
  siRNA target sequence for 4933439B08Rik (NM_027721.1,293-311).
gaatatgagagctattatt

SEQ ID NO: 489392 - DNA, 19 bp, Mus musculus
  siRNA target sequence for 4933439B08Rik (NM_027721.1,353-371).
ccggacccagtggaaaata

SEQ ID NO: 489393 - DNA, 19 bp, Mus musculus
  siRNA target sequence for 4933439B08Rik (NM_027721.1,354-372).
cggacccagtggaaaataa

SEQ ID NO: 489394 - DNA, 19 bp, Mus musculus
  siRNA target sequence for 4933439B08Rik (NM_027721.1,355-373).
ggacccagtggaaaataat

SEQ ID NO: 489395 - DNA, 19 bp, Mus musculus
  siRNA target sequence for 4933439B08Rik (NM_027721.1,409-427).
gacgaatgacagttgtcaa

SEQ ID NO: 489396 - DNA, 19 bp, Mus musculus
  siRNA target sequence for 4933439B08Rik (NM_027721.1,411-429).
cgaatgacagttgtcaaaa

SEQ ID NO: 489397 - DNA, 19 bp, Mus musculus
  siRNA target sequence for 4933439B08Rik (NM_027721.1,425-443).
caaaatctccccaagatat

SEQ ID NO: 489398 - DNA, 19 bp, Mus musculus
  siRNA target sequence for 4933439B08Rik (NM_027721.1,451-469).
gaagtcacgacctaaaact

SEQ ID NO: 489399 - DNA, 19 bp, Mus musculus
  siRNA target sequence for 4933439B08Rik (NM_027721.1,498-516).
ctgtcaaggaacaccttaa

SEQ ID NO: 489400 - DNA, 19 bp, Mus musculus
  siRNA target sequence for 4933439B08Rik (NM_027721.1,560-578).
gacttcggcctgaacatat

SEQ ID NO: 489401 - DNA, 19 bp, Mus musculus
  siRNA target sequence for 4933439B08Rik (NM_027721.1,562-580).
cttcggcctgaacatatca

SEQ ID NO: 489402 - DNA, 19 bp, Mus musculus
  siRNA target sequence for 4933439B08Rik (NM_027721.1,617-635).
ccacgaagaggccaaatca

SEQ ID NO: 489403 - DNA, 19 bp, Mus musculus
  siRNA target sequence for 4933439B08Rik (NM_027721.1,618-636).
cacgaagaggccaaatcat

SEQ ID NO: 489404 - DNA, 19 bp, Mus musculus
  siRNA target sequence for 4933439B08Rik (NM_027721.1,621-639).
gaagaggccaaatcattga

SEQ ID NO: 489405 - DNA, 19 bp, Mus musculus
  siRNA target sequence for 4933439B08Rik (NM_027721.1,667-685).
caaaggagccacaagtgaa

SEQ ID NO: 489406 - DNA, 19 bp, Mus musculus
  siRNA target sequence for 4933439B08Rik (NM_027721.1,689-707).
gcattgaacacctttgaat

SEQ ID NO: 489407 - DNA, 19 bp, Mus musculus
  siRNA target sequence for 4933439B08Rik (NM_027721.1,749-767).
gcatttattggcatgaaca

SEQ ID NO: 489408 - DNA, 19 bp, Mus musculus
  siRNA target sequence for 4933439B08Rik (NM_027721.1,791-809).
gtggtgagccgggacattt

SEQ ID NO: 489409 - DNA, 19 bp, Mus musculus
  siRNA target sequence for 4933439B08Rik (NM_027721.1,793-811).
ggtgagccgggacatttat

SEQ ID NO: 489410 - DNA, 19 bp, Mus musculus
  siRNA target sequence for 4933439B08Rik (NM_027721.1,812-830).
ctccataatcccaacataa

SEQ ID NO: 489411 - DNA, 19 bp, Mus musculus
  siRNA target sequence for 4933439B08Rik (NM_027721.1,826-844).
cataaagtggaatgacatt

SEQ ID NO: 489412 - DNA, 19 bp, Mus musculus
  siRNA target sequence for 4933439B08Rik (NM_027721.1,858-876).
cagccaagcagctagtcaa

SEQ ID NO: 489413 - DNA, 19 bp, Mus musculus
  siRNA target sequence for 4933439B08Rik (NM_027721.1,861-879).
ccaagcagctagtcaaaga

SEQ ID NO: 489414 - DNA, 19 bp, Mus musculus
  siRNA target sequence for 4933439B08Rik (NM_027721.1,881-899).
gccgttgtgtacccaataa

SEQ ID NO: 489415 - DNA, 19 bp, Mus musculus
  siRNA target sequence for 4933439B08Rik (NM_027721.1,883-901).
cgttgtgtacccaataaga

SEQ ID NO: 489416 - DNA, 19 bp, Mus musculus
  siRNA target sequence for 4933439B08Rik (NM_027721.1,911-929).
ctcttcacaggaattcttt

SEQ ID NO: 489417 - DNA, 19 bp, Mus musculus
  siRNA target sequence for 4933439B08Rik (NM_027721.1,995-1013).
gtggccaccgaatgcaaaa

SEQ ID NO: 489418 - DNA, 19 bp, Mus musculus
  siRNA target sequence for 4933439B08Rik (NM_027721.1,1059-1077).
gaggagattccgaaaaact

SEQ ID NO: 489419 - DNA, 19 bp, Mus musculus
  siRNA target sequence for 4933439B08Rik (NM_027721.1,1078-1096).
ggtccgggtgctgtttgaa

SEQ ID NO: 489420 - DNA, 19 bp, Mus musculus
  siRNA target sequence for 4933439B08Rik (NM_027721.1,1245-1263).
cggaggatctcgtgtttgt

SEQ ID NO: 489421 - DNA, 19 bp, Mus musculus
  siRNA target sequence for 4933439B08Rik (NM_027721.1,1249-1267).
ggatctcgtgtttgtctta

SEQ ID NO: 489422 - DNA, 19 bp, Mus musculus
  siRNA target sequence for 5430416A05Rik (NM_024242.2,419-437).
gaatggcggcagtaactat

SEQ ID NO: 489423 - DNA, 19 bp, Mus musculus
  siRNA target sequence for 5430416A05Rik (NM_024242.2,441-459).
gcaaaccgacagacttcta

SEQ ID NO: 489424 - DNA, 19 bp, Mus musculus
  siRNA target sequence for 5430416A05Rik (NM_024242.2,442-460).
caaaccgacagacttctaa

SEQ ID NO: 489425 - DNA, 19 bp, Mus musculus
  siRNA target sequence for 5430416A05Rik (NM_024242.2,447-465).
cgacagacttctaactaca

SEQ ID NO: 489426 - DNA, 19 bp, Mus musculus
  siRNA target sequence for 5430416A05Rik (NM_024242.2,448-466).
gacagacttctaactacaa

SEQ ID NO: 489427 - DNA, 19 bp, Mus musculus
  siRNA target sequence for 5430416A05Rik (NM_024242.2,450-468).
cagacttctaactacaatt

SEQ ID NO: 489428 - DNA, 19 bp, Mus musculus
  siRNA target sequence for 5430416A05Rik (NM_024242.2,452-470).
gacttctaactacaattca

SEQ ID NO: 489429 - DNA, 19 bp, Mus musculus
  siRNA target sequence for 5430416A05Rik (NM_024242.2,492-510).
gacaagtccttgcgaaaat

SEQ ID NO: 489430 - DNA, 19 bp, Mus musculus
  siRNA target sequence for 5430416A05Rik (NM_024242.2,497-515).
gtccttgcgaaaatttgaa

SEQ ID NO: 489431 - DNA, 19 bp, Mus musculus
  siRNA target sequence for 5430416A05Rik (NM_024242.2,499-517).
ccttgcgaaaatttgaaaa

SEQ ID NO: 489432 - DNA, 19 bp, Mus musculus
  siRNA target sequence for 5430416A05Rik (NM_024242.2,528-546).
ctaaataagctgaatgtta

SEQ ID NO: 489433 - DNA, 19 bp, Mus musculus
  siRNA target sequence for 5430416A05Rik (NM_024242.2,594-612).
gcagaatcgtatcgaatta

SEQ ID NO: 489434 - DNA, 19 bp, Mus musculus
  siRNA target sequence for 5430416A05Rik (NM_024242.2,595-613).
cagaatcgtatcgaattaa

SEQ ID NO: 489435 - DNA, 19 bp, Mus musculus
  siRNA target sequence for 5430416A05Rik (NM_024242.2,601-619).
cgtatcgaattaaagataa

SEQ ID NO: 489436 - DNA, 19 bp, Mus musculus
  siRNA target sequence for 5430416A05Rik (NM_024242.2,634-652).
ccgtagaacaggttttgga

SEQ ID NO: 489437 - DNA, 19 bp, Mus musculus
  siRNA target sequence for 5430416A05Rik (NM_024242.2,635-653).
cgtagaacaggttttggat

SEQ ID NO: 489438 - DNA, 19 bp, Mus musculus
  siRNA target sequence for 5430416A05Rik (NM_024242.2,654-672).
cccagaacaaggatgattt

SEQ ID NO: 489439 - DNA, 19 bp, Mus musculus
  siRNA target sequence for 5430416A05Rik (NM_024242.2,695-713).
ccacatatcagagatacat

SEQ ID NO: 489440 - DNA, 19 bp, Mus musculus
  siRNA target sequence for 5430416A05Rik (NM_024242.2,716-734).
ctgtattagcactggaaaa

SEQ ID NO: 489441 - DNA, 19 bp, Mus musculus
  siRNA target sequence for 5430416A05Rik (NM_024242.2,773-791).
gagcagagcaatcaaaata

SEQ ID NO: 489442 - DNA, 19 bp, Mus musculus
  siRNA target sequence for 5430416A05Rik (NM_024242.2,775-793).
gcagagcaatcaaaatata

SEQ ID NO: 489443 - DNA, 19 bp, Mus musculus
  siRNA target sequence for 5430416A05Rik (NM_024242.2,785-803).
caaaatatacaaaacttct

SEQ ID NO: 489444 - DNA, 19 bp, Mus musculus
  siRNA target sequence for 5430416A05Rik (NM_024242.2,815-833).
caaagatcgtgataagtat

SEQ ID NO: 489445 - DNA, 19 bp, Mus musculus
  siRNA target sequence for 5430416A05Rik (NM_024242.2,819-837).
gatcgtgataagtatgtga

SEQ ID NO: 489446 - DNA, 19 bp, Mus musculus
  siRNA target sequence for 5430416A05Rik (NM_024242.2,851-869).
gttccggcgtggctattgt

SEQ ID NO: 489447 - DNA, 19 bp, Mus musculus
  siRNA target sequence for 5430416A05Rik (NM_024242.2,854-872).
ccggcgtggctattgtaaa

SEQ ID NO: 489448 - DNA, 19 bp, Mus musculus
  siRNA target sequence for 5430416A05Rik (NM_024242.2,857-875).
gcgtggctattgtaaagga

SEQ ID NO: 489449 - DNA, 19 bp, Mus musculus
  siRNA target sequence for 5430416A05Rik (NM_024242.2,859-877).
gtggctattgtaaaggaaa

SEQ ID NO: 489450 - DNA, 19 bp, Mus musculus
  siRNA target sequence for 5430416A05Rik (NM_024242.2,920-938).
gaatttgtgcaggctaaaa

SEQ ID NO: 489451 - DNA, 19 bp, Mus musculus
  siRNA target sequence for 5430416A05Rik (NM_024242.2,932-950).
gctaaaaacagcaaacata

SEQ ID NO: 489452 - DNA, 19 bp, Mus musculus
  siRNA target sequence for 5430416A05Rik (NM_024242.2,960-978).
gaaccaatcaggctaagaa

SEQ ID NO: 489453 - DNA, 19 bp, Mus musculus
  siRNA target sequence for 5430416A05Rik (NM_024242.2,1021-1039).
cagccccacttttgaaaaa

SEQ ID NO: 489454 - DNA, 19 bp, Mus musculus
  siRNA target sequence for 5430416A05Rik (NM_024242.2,1057-1075).
ccaaggcacgggagttgta

SEQ ID NO: 489455 - DNA, 19 bp, Mus musculus
  siRNA target sequence for 5430416A05Rik (NM_024242.2,1106-1124).
gtatcaggacgctagactt

SEQ ID NO: 489456 - DNA, 19 bp, Mus musculus
  siRNA target sequence for 5430416A05Rik (NM_024242.2,1221-1239).
gcattggagttcttgagaa

SEQ ID NO: 489457 - DNA, 19 bp, Mus musculus
  siRNA target sequence for 5430416A05Rik (NM_024242.2,1244-1262).
ctgtaccaatgtcaatgat

SEQ ID NO: 489458 - DNA, 19 bp, Mus musculus
  siRNA target sequence for 5430416A05Rik (NM_024242.2,1250-1268).
caatgtcaatgatttcttt

SEQ ID NO: 489459 - DNA, 19 bp, Mus musculus
  siRNA target sequence for 5430416A05Rik (NM_024242.2,1361-1379).
ggaaaaggctatggaaata

SEQ ID NO: 489460 - DNA, 19 bp, Mus musculus
  siRNA target sequence for 5430416A05Rik (NM_024242.2,1462-1480).
ccttaaacgaagtaaagaa

SEQ ID NO: 489461 - DNA, 19 bp, Mus musculus
  siRNA target sequence for 5430416A05Rik (NM_024242.2,1463-1481).
cttaaacgaagtaaagaat

SEQ ID NO: 489462 - DNA, 19 bp, Mus musculus
  siRNA target sequence for 5430416A05Rik (NM_024242.2,1502-1520).
catgatgaggttaaaggaa

SEQ ID NO: 489463 - DNA, 19 bp, Mus musculus
  siRNA target sequence for 5430416A05Rik (NM_024242.2,1542-1560).
cagcaagacaacattctat

SEQ ID NO: 489464 - DNA, 19 bp, Mus musculus
  siRNA target sequence for 5430416A05Rik (NM_024242.2,1565-1583).
gactgtcatgggattgaaa

SEQ ID NO: 489465 - DNA, 19 bp, Mus musculus
  siRNA target sequence for 5430416A05Rik (NM_024242.2,1567-1585).
ctgtcatgggattgaaaaa

SEQ ID NO: 489466 - DNA, 19 bp, Mus musculus
  siRNA target sequence for 5430416A05Rik (NM_024242.2,1716-1734).
gccggatgcagaaaccata

SEQ ID NO: 489467 - DNA, 19 bp, Mus musculus
  siRNA target sequence for 5430416A05Rik (NM_024242.2,1717-1735).
ccggatgcagaaaccatat

SEQ ID NO: 489468 - DNA, 19 bp, Mus musculus
  siRNA target sequence for 5430416A05Rik (NM_024242.2,1718-1736).
cggatgcagaaaccatatt

SEQ ID NO: 489469 - DNA, 19 bp, Mus musculus
  siRNA target sequence for 5430416A05Rik (NM_024242.2,1814-1832).
ccctaaacatgtgaaaaaa

SEQ ID NO: 489470 - DNA, 19 bp, Mus musculus
  siRNA target sequence for 5630401M14Rik (NM_029413.1,444-462).
cgcggagctgctagataat

SEQ ID NO: 489471 - DNA, 19 bp, Mus musculus
  siRNA target sequence for 5630401M14Rik (NM_029413.1,447-465).
ggagctgctagataatgct

SEQ ID NO: 489472 - DNA, 19 bp, Mus musculus
  siRNA target sequence for 5630401M14Rik (NM_029413.1,485-503).
ccaggacagtctttataga

SEQ ID NO: 489473 - DNA, 19 bp, Mus musculus
  siRNA target sequence for 5630401M14Rik (NM_029413.1,486-504).
caggacagtctttatagat

SEQ ID NO: 489474 - DNA, 19 bp, Mus musculus
  siRNA target sequence for 5630401M14Rik (NM_029413.1,488-506).
ggacagtctttatagatgt

SEQ ID NO: 489475 - DNA, 19 bp, Mus musculus
  siRNA target sequence for 5630401M14Rik (NM_029413.1,489-507).
gacagtctttatagatgtt

SEQ ID NO: 489476 - DNA, 19 bp, Mus musculus
  siRNA target sequence for 5630401M14Rik (NM_029413.1,527-545).
cgtgtttgacctttactga

SEQ ID NO: 489477 - DNA, 19 bp, Mus musculus
  siRNA target sequence for 5630401M14Rik (NM_029413.1,528-546).
gtgtttgacctttactgat

SEQ ID NO: 489478 - DNA, 19 bp, Mus musculus
  siRNA target sequence for 5630401M14Rik (NM_029413.1,585-603).
gctcagctttggctttaca

SEQ ID NO: 489479 - DNA, 19 bp, Mus musculus
  siRNA target sequence for 5630401M14Rik (NM_029413.1,596-614).
gctttacagataaagtaat

SEQ ID NO: 489480 - DNA, 19 bp, Mus musculus
  siRNA target sequence for 5630401M14Rik (NM_029413.1,631-649).
cccatcggggtctttggta

SEQ ID NO: 489481 - DNA, 19 bp, Mus musculus
  siRNA target sequence for 5630401M14Rik (NM_029413.1,632-650).
ccatcggggtctttggtaa

SEQ ID NO: 489482 - DNA, 19 bp, Mus musculus
  siRNA target sequence for 5630401M14Rik (NM_029413.1,633-651).
catcggggtctttggtaat

SEQ ID NO: 489483 - DNA, 19 bp, Mus musculus
  siRNA target sequence for 5630401M14Rik (NM_029413.1,665-683).
gttccatgcgactaggaaa

SEQ ID NO: 489484 - DNA, 19 bp, Mus musculus
  siRNA target sequence for 5630401M14Rik (NM_029413.1,669-687).
catgcgactaggaaaggat

SEQ ID NO: 489485 - DNA, 19 bp, Mus musculus
  siRNA target sequence for 5630401M14Rik (NM_029413.1,759-777).
ccaggcgcaggcggttatt

SEQ ID NO: 489486 - DNA, 19 bp, Mus musculus
  siRNA target sequence for 5630401M14Rik (NM_029413.1,762-780).
ggcgcaggcggttattgta

SEQ ID NO: 489487 - DNA, 19 bp, Mus musculus
  siRNA target sequence for 5630401M14Rik (NM_029413.1,768-786).
ggcggttattgtaccaatt

SEQ ID NO: 489488 - DNA, 19 bp, Mus musculus
  siRNA target sequence for 5630401M14Rik (NM_029413.1,850-868).
gccatcttgaactattcga

SEQ ID NO: 489489 - DNA, 19 bp, Mus musculus
  siRNA target sequence for 5630401M14Rik (NM_029413.1,851-869).
ccatcttgaactattcgat

SEQ ID NO: 489490 - DNA, 19 bp, Mus musculus
  siRNA target sequence for 5630401M14Rik (NM_029413.1,852-870).
catcttgaactattcgatt

SEQ ID NO: 489491 - DNA, 19 bp, Mus musculus
  siRNA target sequence for 5630401M14Rik (NM_029413.1,981-999).
ggacttcgatacagatcaa

SEQ ID NO: 489492 - DNA, 19 bp, Mus musculus
  siRNA target sequence for 5630401M14Rik (NM_029413.1,984-1002).
cttcgatacagatcaatat

SEQ ID NO: 489493 - DNA, 19 bp, Mus musculus
  siRNA target sequence for 5630401M14Rik (NM_029413.1,988-1006).
gatacagatcaatatgata

SEQ ID NO: 489494 - DNA, 19 bp, Mus musculus
  siRNA target sequence for 5630401M14Rik (NM_029413.1,1062-1080).
gctgccagaaacagagtat

SEQ ID NO: 489495 - DNA, 19 bp, Mus musculus
  siRNA target sequence for 5630401M14Rik (NM_029413.1,1063-1081).
ctgccagaaacagagtatt

SEQ ID NO: 489496 - DNA, 19 bp, Mus musculus
  siRNA target sequence for 5630401M14Rik (NM_029413.1,1067-1085).
cagaaacagagtattcctt

SEQ ID NO: 489497 - DNA, 19 bp, Mus musculus
  siRNA target sequence for 5630401M14Rik (NM_029413.1,1083-1101).
cttacgggcattttgtagt

SEQ ID NO: 489498 - DNA, 19 bp, Mus musculus
  siRNA target sequence for 5630401M14Rik (NM_029413.1,1097-1115).
gtagtattctatatatgaa

SEQ ID NO: 489499 - DNA, 19 bp, Mus musculus
  siRNA target sequence for 5630401M14Rik (NM_029413.1,1149-1167).
ggtgactacgcagatgatt

SEQ ID NO: 489500 - DNA, 19 bp, Mus musculus
  siRNA target sequence for 5630401M14Rik (NM_029413.1,1154-1172).
ctacgcagatgattgctaa

SEQ ID NO: 489501 - DNA, 19 bp, Mus musculus
  siRNA target sequence for 5630401M14Rik (NM_029413.1,1175-1193).
gcctggccaatgtagaata

SEQ ID NO: 489502 - DNA, 19 bp, Mus musculus
  siRNA target sequence for 5630401M14Rik (NM_029413.1,1208-1226).
ctacctccacgaataagca

SEQ ID NO: 489503 - DNA, 19 bp, Mus musculus
  siRNA target sequence for 5630401M14Rik (NM_029413.1,1244-1262).
gattctcttgcaaatacca

SEQ ID NO: 489504 - DNA, 19 bp, Mus musculus
  siRNA target sequence for 5630401M14Rik (NM_029413.1,1288-1306).
cataacaaccgccttatta

SEQ ID NO: 489505 - DNA, 19 bp, Mus musculus
  siRNA target sequence for 5630401M14Rik (NM_029413.1,1300-1318).
cttattaaggcctttgaga

SEQ ID NO: 489506 - DNA, 19 bp, Mus musculus
  siRNA target sequence for 5630401M14Rik (NM_029413.1,1359-1377).
gggagtaattggagtcatt

SEQ ID NO: 489507 - DNA, 19 bp, Mus musculus
  siRNA target sequence for 5630401M14Rik (NM_029413.1,1361-1379).
gagtaattggagtcattga

SEQ ID NO: 489508 - DNA, 19 bp, Mus musculus
  siRNA target sequence for 5630401M14Rik (NM_029413.1,1370-1388).
gagtcattgagtgcaattt

SEQ ID NO: 489509 - DNA, 19 bp, Mus musculus
  siRNA target sequence for 5630401M14Rik (NM_029413.1,1374-1392).
cattgagtgcaatttccta

SEQ ID NO: 489510 - DNA, 19 bp, Mus musculus
  siRNA target sequence for 5630401M14Rik (NM_029413.1,1380-1398).
gtgcaatttcctaaaacct

SEQ ID NO: 489511 - DNA, 19 bp, Mus musculus
  siRNA target sequence for 5630401M14Rik (NM_029413.1,1400-1418).
cctacaacaaacaagactt

SEQ ID NO: 489512 - DNA, 19 bp, Mus musculus
  siRNA target sequence for 5630401M14Rik (NM_029413.1,1401-1419).
ctacaacaaacaagacttt

SEQ ID NO: 489513 - DNA, 19 bp, Mus musculus
  siRNA target sequence for 5630401M14Rik (NM_029413.1,1432-1450).
gaataccggttgacaataa

SEQ ID NO: 489514 - DNA, 19 bp, Mus musculus
  siRNA target sequence for 5630401M14Rik (NM_029413.1,1460-1478).
caaggaagctcaatgctta

SEQ ID NO: 489515 - DNA, 19 bp, Mus musculus
  siRNA target sequence for 5630401M14Rik (NM_029413.1,1555-1573).
caatgtgatgaatgtctta

SEQ ID NO: 489516 - DNA, 19 bp, Mus musculus
  siRNA target sequence for 5630401M14Rik (NM_029413.1,1596-1614).
ggtggatccatccacatta

SEQ ID NO: 489517 - DNA, 19 bp, Mus musculus
  siRNA target sequence for 5630401M14Rik (NM_029413.1,1599-1617).
ggatccatccacattacct

SEQ ID NO: 489518 - DNA, 19 bp, Mus musculus
  siRNA target sequence for 5630401M14Rik (NM_029413.1,1615-1633).
cctgcaagatggttttgtt

SEQ ID NO: 489519 - DNA, 19 bp, Mus musculus
  siRNA target sequence for 5630401M14Rik (NM_029413.1,1618-1636).
gcaagatggttttgttatt

SEQ ID NO: 489520 - DNA, 19 bp, Mus musculus
  siRNA target sequence for 5630401M14Rik (NM_029413.1,1673-1691).
cagaagaacaagaacgtat

SEQ ID NO: 489521 - DNA, 19 bp, Mus musculus
  siRNA target sequence for 5630401M14Rik (NM_029413.1,1712-1730).
gcaaggctaagcaacaagt

SEQ ID NO: 489522 - DNA, 19 bp, Mus musculus
  siRNA target sequence for 5630401M14Rik (NM_029413.1,1757-1775).
cgatggaaagtgacaagta

SEQ ID NO: 489523 - DNA, 19 bp, Mus musculus
  siRNA target sequence for 5630401M14Rik (NM_029413.1,1785-1803).
cagtaatccaccaaagact

SEQ ID NO: 489524 - DNA, 19 bp, Mus musculus
  siRNA target sequence for 5630401M14Rik (NM_029413.1,1800-1818).
gactcctcctctacaagat

SEQ ID NO: 489525 - DNA, 19 bp, Mus musculus
  siRNA target sequence for 5630401M14Rik (NM_029413.1,1802-1820).
ctcctcctctacaagatat

SEQ ID NO: 489526 - DNA, 19 bp, Mus musculus
  siRNA target sequence for 5630401M14Rik (NM_029413.1,1841-1859).
caattggatatgagcaaat

SEQ ID NO: 489527 - DNA, 19 bp, Mus musculus
  siRNA target sequence for 5630401M14Rik (NM_029413.1,1872-1890).
cctgcttccgtctgttaga

SEQ ID NO: 489528 - DNA, 19 bp, Mus musculus
  siRNA target sequence for 5630401M14Rik (NM_029413.1,1875-1893).
gcttccgtctgttagagaa

SEQ ID NO: 489529 - DNA, 19 bp, Mus musculus
  siRNA target sequence for 5630401M14Rik (NM_029413.1,2013-2031).
gatgccgctatctcctata

SEQ ID NO: 489530 - DNA, 19 bp, Mus musculus
  siRNA target sequence for 5630401M14Rik (NM_029413.1,2016-2034).
gccgctatctcctatagat

SEQ ID NO: 489531 - DNA, 19 bp, Mus musculus
  siRNA target sequence for 5630401M14Rik (NM_029413.1,2017-2035).
ccgctatctcctatagatt

SEQ ID NO: 489532 - DNA, 19 bp, Mus musculus
  siRNA target sequence for 5630401M14Rik (NM_029413.1,2018-2036).
cgctatctcctatagatta

SEQ ID NO: 489533 - DNA, 19 bp, Mus musculus
  siRNA target sequence for 5630401M14Rik (NM_029413.1,2020-2038).
ctatctcctatagattact

SEQ ID NO: 489534 - DNA, 19 bp, Mus musculus
  siRNA target sequence for 5630401M14Rik (NM_029413.1,2126-2144).
gtacaccaccacatctcat

SEQ ID NO: 489535 - DNA, 19 bp, Mus musculus
  siRNA target sequence for 5630401M14Rik (NM_029413.1,2281-2299).
gaagagtctaacagaagta

SEQ ID NO: 489536 - DNA, 19 bp, Mus musculus
  siRNA target sequence for 5630401M14Rik (NM_029413.1,2292-2310).
cagaagtagtgagaacata

SEQ ID NO: 489537 - DNA, 19 bp, Mus musculus
  siRNA target sequence for 5630401M14Rik (NM_029413.1,2322-2340).
gaataaagggccgtttgta

SEQ ID NO: 489538 - DNA, 19 bp, Mus musculus
  siRNA target sequence for 5630401M14Rik (NM_029413.1,2342-2360).
ctgttgtcggtgttgcaaa

SEQ ID NO: 489539 - DNA, 19 bp, Mus musculus
  siRNA target sequence for 5630401M14Rik (NM_029413.1,2412-2430).
ggaatttgtaggcaaaaga

SEQ ID NO: 489540 - DNA, 19 bp, Mus musculus
  siRNA target sequence for 5630401M14Rik (NM_029413.1,2447-2465).
ggaagagagcaaatcctta

SEQ ID NO: 489541 - DNA, 19 bp, Mus musculus
  siRNA target sequence for 5630401M14Rik (NM_029413.1,2451-2469).
gagagcaaatccttactct

SEQ ID NO: 489542 - DNA, 19 bp, Mus musculus
  siRNA target sequence for 5630401M14Rik (NM_029413.1,2506-2524).
gattgccaggacagtagaa

SEQ ID NO: 489543 - DNA, 19 bp, Mus musculus
  siRNA target sequence for 5630401M14Rik (NM_029413.1,2525-2543).
gtcggaacatgccaaagat

SEQ ID NO: 489544 - DNA, 19 bp, Mus musculus
  siRNA target sequence for 5630401M14Rik (NM_029413.1,2527-2545).
cggaacatgccaaagataa

SEQ ID NO: 489545 - DNA, 19 bp, Mus musculus
  siRNA target sequence for 5630401M14Rik (NM_029413.1,2551-2569).
ccaaaagagtcggaagaat

SEQ ID NO: 489546 - DNA, 19 bp, Mus musculus
  siRNA target sequence for 5630401M14Rik (NM_029413.1,2576-2594).
gaaccacggaaaaattgga

SEQ ID NO: 489547 - DNA, 19 bp, Mus musculus
  siRNA target sequence for 5630401M14Rik (NM_029413.1,2597-2615).
gtgttttggctgaaaggaa

SEQ ID NO: 489548 - DNA, 19 bp, Mus musculus
  siRNA target sequence for 5630401M14Rik (NM_029413.1,2663-2681).
ggcattctgaatataagaa

SEQ ID NO: 489549 - DNA, 19 bp, Mus musculus
  siRNA target sequence for 5630401M14Rik (NM_029413.1,2689-2707).
catgaattggtgacctata

SEQ ID NO: 489550 - DNA, 19 bp, Mus musculus
  siRNA target sequence for 5630401M14Rik (NM_029413.1,2716-2734).
gagacagaaggcatatact

SEQ ID NO: 489551 - DNA, 19 bp, Mus musculus
  siRNA target sequence for 5630401M14Rik (NM_029413.1,2764-2782).
gctgaattccagattctga

SEQ ID NO: 489552 - DNA, 19 bp, Mus musculus
  siRNA target sequence for 5630401M14Rik (NM_029413.1,2908-2926).
ctagaaaggttaattacta

SEQ ID NO: 489553 - DNA, 19 bp, Mus musculus
  siRNA target sequence for 6030436C20Rik (NM_178654.2,715-733).
gactctcgtagttctacta

SEQ ID NO: 489554 - DNA, 19 bp, Mus musculus
  siRNA target sequence for 6030436C20Rik (NM_178654.2,807-825).
gatacagatgtactcaaat

SEQ ID NO: 489555 - DNA, 19 bp, Mus musculus
  siRNA target sequence for 6030436C20Rik (NM_178654.2,871-889).
ctacaggatagcaagacaa

SEQ ID NO: 489556 - DNA, 19 bp, Mus musculus
  siRNA target sequence for 6030436C20Rik (NM_178654.2,979-997).
gagcttcggatggaagaat

SEQ ID NO: 489557 - DNA, 19 bp, Mus musculus
  siRNA target sequence for 6030436C20Rik (NM_178654.2,981-999).
gcttcggatggaagaatta

SEQ ID NO: 489558 - DNA, 19 bp, Mus musculus
  siRNA target sequence for 6030436C20Rik (NM_178654.2,982-1000).
cttcggatggaagaattaa

SEQ ID NO: 489559 - DNA, 19 bp, Mus musculus
  siRNA target sequence for 6030436C20Rik (NM_178654.2,991-1009).
gaagaattaagacatcatt

SEQ ID NO: 489560 - DNA, 19 bp, Mus musculus
  siRNA target sequence for 6030436C20Rik (NM_178654.2,1001-1019).
gacatcattttaagataga

SEQ ID NO: 489561 - DNA, 19 bp, Mus musculus
  siRNA target sequence for 6030436C20Rik (NM_178654.2,1039-1057).
gcaaagaatgtcatgaagt

SEQ ID NO: 489562 - DNA, 19 bp, Mus musculus
  siRNA target sequence for 6030436C20Rik (NM_178654.2,1044-1062).
gaatgtcatgaagttactt

SEQ ID NO: 489563 - DNA, 19 bp, Mus musculus
  siRNA target sequence for 6030436C20Rik (NM_178654.2,1099-1117).
gaagcacaagcgagattta

SEQ ID NO: 489564 - DNA, 19 bp, Mus musculus
  siRNA target sequence for 6030436C20Rik (NM_178654.2,1103-1121).
cacaagcgagatttaatga

SEQ ID NO: 489565 - DNA, 19 bp, Mus musculus
  siRNA target sequence for 6030436C20Rik (NM_178654.2,1105-1123).
caagcgagatttaatgaat

SEQ ID NO: 489566 - DNA, 19 bp, Mus musculus
  siRNA target sequence for 6030436C20Rik (NM_178654.2,1108-1126).
gcgagatttaatgaatcaa

SEQ ID NO: 489567 - DNA, 19 bp, Mus musculus
  siRNA target sequence for 6030436C20Rik (NM_178654.2,1127-1145).
gtcagaagttggacctttt

SEQ ID NO: 489568 - DNA, 19 bp, Mus musculus
  siRNA target sequence for 6030436C20Rik (NM_178654.2,1308-1326).
gctaaccggtactttggaa

SEQ ID NO: 489569 - DNA, 19 bp, Mus musculus
  siRNA target sequence for 6030436C20Rik (NM_178654.2,1333-1351).
cttatggggtgccaagata

SEQ ID NO: 489570 - DNA, 19 bp, Mus musculus
  siRNA target sequence for 6030436C20Rik (NM_178654.2,1338-1356).
ggggtgccaagatatccta

SEQ ID NO: 489571 - DNA, 19 bp, Mus musculus
  siRNA target sequence for 6030436C20Rik (NM_178654.2,1344-1362).
ccaagatatcctagagaat

SEQ ID NO: 489572 - DNA, 19 bp, Mus musculus
  siRNA target sequence for 6030436C20Rik (NM_178654.2,1439-1457).
gcagaaccagcaagagtaa

SEQ ID NO: 489573 - DNA, 19 bp, Mus musculus
  siRNA target sequence for 6030436C20Rik (NM_178654.2,1440-1458).
cagaaccagcaagagtaaa

SEQ ID NO: 489574 - DNA, 19 bp, Mus musculus
  siRNA target sequence for 6030436C20Rik (NM_178654.2,1492-1510).
gacttgtccaatgatgttt

SEQ ID NO: 489575 - DNA, 19 bp, Mus musculus
  siRNA target sequence for 6030436C20Rik (NM_178654.2,1514-1532).
ctgttttgaagctagataa

SEQ ID NO: 489576 - DNA, 19 bp, Mus musculus
  siRNA target sequence for 6030436C20Rik (NM_178654.2,1554-1572).
ctggaaacccatttcaaat

SEQ ID NO: 489577 - DNA, 19 bp, Mus musculus
  siRNA target sequence for 6030436C20Rik (NM_178654.2,1575-1593).
gtcgtgggaccagaagttt

SEQ ID NO: 489578 - DNA, 19 bp, Mus musculus
  siRNA target sequence for 6030436C20Rik (NM_178654.2,1610-1628).
ggtcacgtgaactggaaat

SEQ ID NO: 489579 - DNA, 19 bp, Mus musculus
  siRNA target sequence for 6030436C20Rik (NM_178654.2,1611-1629).
gtcacgtgaactggaaatt

SEQ ID NO: 489580 - DNA, 19 bp, Mus musculus
  siRNA target sequence for 6030436C20Rik (NM_178654.2,1679-1697).
ggttagaagattttttaga

SEQ ID NO: 489581 - DNA, 19 bp, Mus musculus
  siRNA target sequence for 6030436C20Rik (NM_178654.2,1712-1730).
gcatgtgtctctatttgga

SEQ ID NO: 489582 - DNA, 19 bp, Mus musculus
  siRNA target sequence for 6030436C20Rik (NM_178654.2,1746-1764).
gtttgcagaggttactttt

SEQ ID NO: 489583 - DNA, 19 bp, Mus musculus
  siRNA target sequence for 6030436C20Rik (NM_178654.2,1755-1773).
ggttactttttttaatcca

SEQ ID NO: 489584 - DNA, 19 bp, Mus musculus
  siRNA target sequence for 6030436C20Rik (NM_178654.2,1828-1846).
caaggcaaaacatttctca

SEQ ID NO: 489585 - DNA, 19 bp, Mus musculus
  siRNA target sequence for 6030436C20Rik (NM_178654.2,1898-1916).
gagctattcccacagtaaa

SEQ ID NO: 489586 - DNA, 19 bp, Mus musculus
  siRNA target sequence for 6030436C20Rik (NM_178654.2,1901-1919).
ctattcccacagtaaatca

SEQ ID NO: 489587 - DNA, 19 bp, Mus musculus
  siRNA target sequence for 6030436C20Rik (NM_178654.2,1974-1992).
cgcacgcattcctgatcta

SEQ ID NO: 489588 - DNA, 19 bp, Mus musculus
  siRNA target sequence for 6030436C20Rik (NM_178654.2,2001-2019).
ggccagtgactctacagta

SEQ ID NO: 489589 - DNA, 19 bp, Mus musculus
  siRNA target sequence for 6030436C20Rik (NM_178654.2,2006-2024).
gtgactctacagtaaccaa

SEQ ID NO: 489590 - DNA, 19 bp, Mus musculus
  siRNA target sequence for 6030436C20Rik (NM_178654.2,2008-2026).
gactctacagtaaccaaat

SEQ ID NO: 489591 - DNA, 19 bp, Mus musculus
  siRNA target sequence for 6030436C20Rik (NM_178654.2,2012-2030).
ctacagtaaccaaattgga

SEQ ID NO: 489592 - DNA, 19 bp, Mus musculus
  siRNA target sequence for 6030436C20Rik (NM_178654.2,2109-2127).
gagagttttggatatacct

SEQ ID NO: 489593 - DNA, 19 bp, Mus musculus
  siRNA target sequence for 6030436C20Rik (NM_178654.2,2131-2149).
cagggttcagaaactgttt

SEQ ID NO: 489594 - DNA, 19 bp, Mus musculus
  siRNA target sequence for 6030436C20Rik (NM_178654.2,2134-2152).
ggttcagaaactgttttca

SEQ ID NO: 489595 - DNA, 19 bp, Mus musculus
  siRNA target sequence for 6030436C20Rik (NM_178654.2,2267-2285).
ctcagcagaggtttcagtt

SEQ ID NO: 489596 - DNA, 19 bp, Mus musculus
  siRNA target sequence for 6030436C20Rik (NM_178654.2,2340-2358).
ggtgctgttggcggaatat

SEQ ID NO: 489597 - DNA, 19 bp, Mus musculus
  siRNA target sequence for 6030436C20Rik (NM_178654.2,2341-2359).
gtgctgttggcggaatata

SEQ ID NO: 489598 - DNA, 19 bp, Mus musculus
  siRNA target sequence for 6030436C20Rik (NM_178654.2,2351-2369).
cggaatataaacacacaaa

SEQ ID NO: 489599 - DNA, 19 bp, Mus musculus
  siRNA target sequence for 6030436C20Rik (NM_178654.2,2406-2424).
cattgtggcacgagatgaa

SEQ ID NO: 489600 - DNA, 19 bp, Mus musculus
  siRNA target sequence for 6030436C20Rik (NM_178654.2,2477-2495).
ggcacccgtttctagtgaa

SEQ ID NO: 489601 - DNA, 19 bp, Mus musculus
  siRNA target sequence for 6030436C20Rik (NM_178654.2,2482-2500).
ccgtttctagtgaaccttt

SEQ ID NO: 489602 - DNA, 19 bp, Mus musculus
  siRNA target sequence for 6030436C20Rik (NM_178654.2,2483-2501).
cgtttctagtgaacctttt

SEQ ID NO: 489603 - DNA, 19 bp, Mus musculus
  siRNA target sequence for 6030436C20Rik (NM_178654.2,2484-2502).
gtttctagtgaaccttttt

SEQ ID NO: 489604 - DNA, 19 bp, Mus musculus
  siRNA target sequence for 6030436C20Rik (NM_178654.2,2568-2586).
gatgcacatccatactgat

SEQ ID NO: 489605 - DNA, 19 bp, Mus musculus
  siRNA target sequence for 6030436C20Rik (NM_178654.2,2629-2647).
gttcttgggttgcaatact

SEQ ID NO: 489606 - DNA, 19 bp, Mus musculus
  siRNA target sequence for 6030436C20Rik (NM_178654.2,2637-2655).
gttgcaatacttacatgaa

SEQ ID NO: 489607 - DNA, 19 bp, Mus musculus
  siRNA target sequence for 6030436C20Rik (NM_178654.2,2764-2782).
gataggacaagcacatttt

SEQ ID NO: 489608 - DNA, 19 bp, Mus musculus
  siRNA target sequence for 6030436C20Rik (NM_178654.2,2805-2823).
cccagaagtcctaacagaa

SEQ ID NO: 489609 - DNA, 19 bp, Mus musculus
  siRNA target sequence for 6030436C20Rik (NM_178654.2,2806-2824).
ccagaagtcctaacagaaa

SEQ ID NO: 489610 - DNA, 19 bp, Mus musculus
  siRNA target sequence for 6030436C20Rik (NM_178654.2,2829-2847).
gtacacaagggctgtagat

SEQ ID NO: 489611 - DNA, 19 bp, Mus musculus
  siRNA target sequence for 6030436C20Rik (NM_178654.2,2850-2868).
gtggggccttggtgtactt

SEQ ID NO: 489612 - DNA, 19 bp, Mus musculus
  siRNA target sequence for 6030436C20Rik (NM_178654.2,2852-2870).
ggggccttggtgtacttat

SEQ ID NO: 489613 - DNA, 19 bp, Mus musculus
  siRNA target sequence for 6030436C20Rik (NM_178654.2,2854-2872).
ggccttggtgtacttatat

SEQ ID NO: 489614 - DNA, 19 bp, Mus musculus
  siRNA target sequence for 6030436C20Rik (NM_178654.2,2855-2873).
gccttggtgtacttatata

SEQ ID NO: 489615 - DNA, 19 bp, Mus musculus
  siRNA target sequence for 6030436C20Rik (NM_178654.2,2944-2962).
gacgaagtaaggtatccaa

SEQ ID NO: 489616 - DNA, 19 bp, Mus musculus
  siRNA target sequence for 6030436C20Rik (NM_178654.2,3086-3104).
ccgactggagtgctctaat

SEQ ID NO: 489617 - DNA, 19 bp, Mus musculus
  siRNA target sequence for 6030436C20Rik (NM_178654.2,3098-3116).
ctctaatggacaaaaaagt

SEQ ID NO: 489618 - DNA, 19 bp, Mus musculus
  siRNA target sequence for 6030436C20Rik (NM_178654.2,3145-3163).
ggacgggaagatgttagta

SEQ ID NO: 489619 - DNA, 19 bp, Mus musculus
  siRNA target sequence for 6030436C20Rik (NM_178654.2,3146-3164).
gacgggaagatgttagtaa

SEQ ID NO: 489620 - DNA, 19 bp, Mus musculus
  siRNA target sequence for 6030436C20Rik (NM_178654.2,3148-3166).
cgggaagatgttagtaact

SEQ ID NO: 489621 - DNA, 19 bp, Mus musculus
  siRNA target sequence for 6030436C20Rik (NM_178654.2,3149-3167).
gggaagatgttagtaactt

SEQ ID NO: 489622 - DNA, 19 bp, Mus musculus
  siRNA target sequence for 6030436C20Rik (NM_178654.2,3211-3229).
cgagaaccaaggatactct

SEQ ID NO: 489623 - DNA, 19 bp, Mus musculus
  siRNA target sequence for 6030436C20Rik (NM_178654.2,3212-3230).
gagaaccaaggatactctt

SEQ ID NO: 489624 - DNA, 19 bp, Mus musculus
  siRNA target sequence for 6030436C20Rik (NM_178654.2,3243-3261).
ggagatgttccacgatttt

SEQ ID NO: 489625 - DNA, 19 bp, Mus musculus
  siRNA target sequence for 6330415M09Rik (NM_027539.3,1119-1137).
gtgcctccaacgaaccatt

SEQ ID NO: 489626 - DNA, 19 bp, Mus musculus
  siRNA target sequence for 6330415M09Rik (NM_027539.3,1123-1141).
ctccaacgaaccatttcgt

SEQ ID NO: 489627 - DNA, 19 bp, Mus musculus
  siRNA target sequence for 6330415M09Rik (NM_027539.3,1125-1143).
ccaacgaaccatttcgtaa

SEQ ID NO: 489628 - DNA, 19 bp, Mus musculus
  siRNA target sequence for 6330415M09Rik (NM_027539.3,1126-1144).
caacgaaccatttcgtaaa

SEQ ID NO: 489629 - DNA, 19 bp, Mus musculus
  siRNA target sequence for 6330415M09Rik (NM_027539.3,1129-1147).
cgaaccatttcgtaaagtt

SEQ ID NO: 489630 - DNA, 19 bp, Mus musculus
  siRNA target sequence for 6330415M09Rik (NM_027539.3,1133-1151).
ccatttcgtaaagttgatt

SEQ ID NO: 489631 - DNA, 19 bp, Mus musculus
  siRNA target sequence for 6330415M09Rik (NM_027539.3,1134-1152).
catttcgtaaagttgatta

SEQ ID NO: 489632 - DNA, 19 bp, Mus musculus
  siRNA target sequence for 6330415M09Rik (NM_027539.3,1148-1166).
gattacaccaaaaacgtta

SEQ ID NO: 489633 - DNA, 19 bp, Mus musculus
  siRNA target sequence for 6330415M09Rik (NM_027539.3,1170-1188).
cgaactggtctgtgaacat

SEQ ID NO: 489634 - DNA, 19 bp, Mus musculus
  siRNA target sequence for 6330415M09Rik (NM_027539.3,1311-1329).
ccgtgcggatccttctgaa

SEQ ID NO: 489635 - DNA, 19 bp, Mus musculus
  siRNA target sequence for 6330415M09Rik (NM_027539.3,1312-1330).
cgtgcggatccttctgaat

SEQ ID NO: 489636 - DNA, 19 bp, Mus musculus
  siRNA target sequence for 6330415M09Rik (NM_027539.3,1313-1331).
gtgcggatccttctgaata

SEQ ID NO: 489637 - DNA, 19 bp, Mus musculus
  siRNA target sequence for 6330415M09Rik (NM_027539.3,1315-1333).
gcggatccttctgaataaa

SEQ ID NO: 489638 - DNA, 19 bp, Mus musculus
  siRNA target sequence for 6330415M09Rik (NM_027539.3,1348-1366).
ctttgagcaggtcttaaca

SEQ ID NO: 489639 - DNA, 19 bp, Mus musculus
  siRNA target sequence for 6330415M09Rik (NM_027539.3,1372-1390).
caccgaagccattaaacta

SEQ ID NO: 489640 - DNA, 19 bp, Mus musculus
  siRNA target sequence for 6330415M09Rik (NM_027539.3,1374-1392).
ccgaagccattaaactaga

SEQ ID NO: 489641 - DNA, 19 bp, Mus musculus
  siRNA target sequence for 6330415M09Rik (NM_027539.3,1487-1505).
ggacctgaaaaatatcgtt

SEQ ID NO: 489642 - DNA, 19 bp, Mus musculus
  siRNA target sequence for 6330415M09Rik (NM_027539.3,1538-1556).
gaatgccgtgtcctgaaat

SEQ ID NO: 489643 - DNA, 19 bp, Mus musculus
  siRNA target sequence for 6330415M09Rik (NM_027539.3,1571-1589).
gcctcagctgcgaagtatt

SEQ ID NO: 489644 - DNA, 19 bp, Mus musculus
  siRNA target sequence for 6330415M09Rik (NM_027539.3,1573-1591).
ctcagctgcgaagtattct

SEQ ID NO: 489645 - DNA, 19 bp, Mus musculus
  siRNA target sequence for 6330415M09Rik (NM_027539.3,1716-1734).
gaagtttcagaggattgaa

SEQ ID NO: 489646 - DNA, 19 bp, Mus musculus
  siRNA target sequence for 6330415M09Rik (NM_027539.3,1755-1773).
gatcttcttccaacgtaaa

SEQ ID NO: 489647 - DNA, 19 bp, Mus musculus
  siRNA target sequence for 6330415M09Rik (NM_027539.3,1801-1819).
gagccctgaaggtgtgaat

SEQ ID NO: 489648 - DNA, 19 bp, Mus musculus
  siRNA target sequence for 6330415M09Rik (NM_027539.3,1886-1904).
ggcaacttcgcggtagtta

SEQ ID NO: 489649 - DNA, 19 bp, Mus musculus
  siRNA target sequence for 6330415M09Rik (NM_027539.3,1887-1905).
gcaacttcgcggtagttaa

SEQ ID NO: 489650 - DNA, 19 bp, Mus musculus
  siRNA target sequence for 6330415M09Rik (NM_027539.3,1929-1947).
gaaaagagtttgcattaaa

SEQ ID NO: 489651 - DNA, 19 bp, Mus musculus
  siRNA target sequence for 6330415M09Rik (NM_027539.3,1934-1952).
gagtttgcattaaagatta

SEQ ID NO: 489652 - DNA, 19 bp, Mus musculus
  siRNA target sequence for 6330415M09Rik (NM_027539.3,1940-1958).
gcattaaagattatagaca

SEQ ID NO: 489653 - DNA, 19 bp, Mus musculus
  siRNA target sequence for 6330415M09Rik (NM_027539.3,1941-1959).
cattaaagattatagacaa

SEQ ID NO: 489654 - DNA, 19 bp, Mus musculus
  siRNA target sequence for 6330415M09Rik (NM_027539.3,1974-1992).
gaaaggagcatctgattga

SEQ ID NO: 489655 - DNA, 19 bp, Mus musculus
  siRNA target sequence for 6330415M09Rik (NM_027539.3,2064-2082).
caactgacctctttctagt

SEQ ID NO: 489656 - DNA, 19 bp, Mus musculus
  siRNA target sequence for 6330415M09Rik (NM_027539.3,2154-2172).
gaagcgccatggtgtacaa

SEQ ID NO: 489657 - DNA, 19 bp, Mus musculus
  siRNA target sequence for 6330415M09Rik (NM_027539.3,2365-2383).
catagctgaaacaggttat

SEQ ID NO: 489658 - DNA, 19 bp, Mus musculus
  siRNA target sequence for 6330415M09Rik (NM_027539.3,2404-2422).
ggcagctggtgtgattaca

SEQ ID NO: 489659 - DNA, 19 bp, Mus musculus
  siRNA target sequence for 6330415M09Rik (NM_027539.3,2409-2427).
ctggtgtgattacatacat

SEQ ID NO: 489660 - DNA, 19 bp, Mus musculus
  siRNA target sequence for 6330415M09Rik (NM_027539.3,2448-2466).
cattccggagtgagaacaa

SEQ ID NO: 489661 - DNA, 19 bp, Mus musculus
  siRNA target sequence for 6330415M09Rik (NM_027539.3,2557-2575).
gttaatcagtcaaatgctt

SEQ ID NO: 489662 - DNA, 19 bp, Mus musculus
  siRNA target sequence for 6330415M09Rik (NM_027539.3,2646-2664).
cccaggagaacaatatgca

SEQ ID NO: 489663 - DNA, 19 bp, Mus musculus
  siRNA target sequence for 6330415M09Rik (NM_027539.3,2735-2753).
ggggtctccgttatcatga

SEQ ID NO: 489664 - DNA, 19 bp, Mus musculus
  siRNA target sequence for 6330415M09Rik (NM_027539.3,2738-2756).
gtctccgttatcatgaaca

SEQ ID NO: 489665 - DNA, 19 bp, Mus musculus
  siRNA target sequence for 6330415M09Rik (NM_027539.3,2749-2767).
catgaacacggctctagat

SEQ ID NO: 489666 - DNA, 19 bp, Mus musculus
  siRNA target sequence for 6330415M09Rik (NM_027539.3,2752-2770).
gaacacggctctagataaa

SEQ ID NO: 489667 - DNA, 19 bp, Mus musculus
  siRNA target sequence for 6330514A18 (NM_183152.1,800-818).
cacccttgtcagagatgta

SEQ ID NO: 489668 - DNA, 19 bp, Mus musculus
  siRNA target sequence for 6330514A18 (NM_183152.1,809-827).
cagagatgtaccaaaacat

SEQ ID NO: 489669 - DNA, 19 bp, Mus musculus
  siRNA target sequence for 6330514A18 (NM_183152.1,1088-1106).
gtccctttacctcaaaaga

SEQ ID NO: 489670 - DNA, 19 bp, Mus musculus
  siRNA target sequence for 6330514A18 (NM_183152.1,1360-1378).
cctaagtgggtggattact

SEQ ID NO: 489671 - DNA, 19 bp, Mus musculus
  siRNA target sequence for 6330514A18 (NM_183152.1,1564-1582).
cggctctttgcctgctata

SEQ ID NO: 489672 - DNA, 19 bp, Mus musculus
  siRNA target sequence for 6330514A18 (NM_183152.1,1565-1583).
ggctctttgcctgctatat

SEQ ID NO: 489673 - DNA, 19 bp, Mus musculus
  siRNA target sequence for 6330580J24Rik (NM_026378.2,1200-1218).
cgggacttttgtcatgtat

SEQ ID NO: 489674 - DNA, 19 bp, Mus musculus
  siRNA target sequence for 6330580J24Rik (NM_026378.2,1201-1219).
gggacttttgtcatgtata

SEQ ID NO: 489675 - DNA, 19 bp, Mus musculus
  siRNA target sequence for 6330580J24Rik (NM_026378.2,1429-1447).
gtccgcacggagatggtat

SEQ ID NO: 489676 - DNA, 19 bp, Mus musculus
  siRNA target sequence for 6330580J24Rik (NM_026378.2,1433-1451).
gcacggagatggtatgcaa

SEQ ID NO: 489677 - DNA, 19 bp, Mus musculus
  siRNA target sequence for 6330580J24Rik (NM_026378.2,1485-1503).
ctactataaccgagtacat

SEQ ID NO: 489678 - DNA, 19 bp, Mus musculus
  siRNA target sequence for 6720485C15Rik (NM_026551.2,238-256).
gctccgtcatccaggtatt

SEQ ID NO: 489679 - DNA, 19 bp, Mus musculus
  siRNA target sequence for 6720485C15Rik (NM_026551.2,241-259).
ccgtcatccaggtattcca

SEQ ID NO: 489680 - DNA, 19 bp, Mus musculus
  siRNA target sequence for 6720485C15Rik (NM_026551.2,325-343).
ctgcccaccggcgtatagt

SEQ ID NO: 489681 - DNA, 19 bp, Mus musculus
  siRNA target sequence for 6720485C15Rik (NM_026551.2,328-346).
cccaccggcgtatagtaga

SEQ ID NO: 489682 - DNA, 19 bp, Mus musculus
  siRNA target sequence for 6720485C15Rik (NM_026551.2,511-529).
gctaccgatacgtgattct

SEQ ID NO: 489683 - DNA, 19 bp, Mus musculus
  siRNA target sequence for 9130012B15Rik (NM_030221.1,219-237).
caggcttggaccagaacta

SEQ ID NO: 489684 - DNA, 19 bp, Mus musculus
  siRNA target sequence for 9130012B15Rik (NM_030221.1,238-256).
gaaatatgcggctatggat

SEQ ID NO: 489685 - DNA, 19 bp, Mus musculus
  siRNA target sequence for 9130012B15Rik (NM_030221.1,376-394).
cggaatgttcgctacaact

SEQ ID NO: 489686 - DNA, 19 bp, Mus musculus
  siRNA target sequence for 9130012B15Rik (NM_030221.1,469-487).
cgggaactgcgctggttta

SEQ ID NO: 489687 - DNA, 19 bp, Mus musculus
  siRNA target sequence for 9130012B15Rik (NM_030221.1,503-521).
gccgacaaactgaggaata

SEQ ID NO: 489688 - DNA, 19 bp, Mus musculus
  siRNA target sequence for 9130012B15Rik (NM_030221.1,504-522).
ccgacaaactgaggaatat

SEQ ID NO: 489689 - DNA, 19 bp, Mus musculus
  siRNA target sequence for 9130012B15Rik (NM_030221.1,546-564).
cctgacaaagcagaaaact

SEQ ID NO: 489690 - DNA, 19 bp, Mus musculus
  siRNA target sequence for 9130012B15Rik (NM_030221.1,673-691).
ggtgtggagatcattacca

SEQ ID NO: 489691 - DNA, 19 bp, Mus musculus
  siRNA target sequence for 9130012B15Rik (NM_030221.1,734-752).
gagtggatctggtaaccat

SEQ ID NO: 489692 - DNA, 19 bp, Mus musculus
  siRNA target sequence for 9130012B15Rik (NM_030221.1,825-843).
cgatggctgtgccatgatt

SEQ ID NO: 489693 - DNA, 19 bp, Mus musculus
  siRNA target sequence for 9130012B15Rik (NM_030221.1,829-847).
ggctgtgccatgattgcta

SEQ ID NO: 489694 - DNA, 19 bp, Mus musculus
  siRNA target sequence for 9130012B15Rik (NM_030221.1,830-848).
gctgtgccatgattgctat

SEQ ID NO: 489695 - DNA, 19 bp, Mus musculus
  siRNA target sequence for 9130012B15Rik (NM_030221.1,1022-1040).
cggtcagtgaagacttgtt

SEQ ID NO: 489696 - DNA, 19 bp, Mus musculus
  siRNA target sequence for 9130012B15Rik (NM_030221.1,1330-1348).
cggctgctcactacttgtt

SEQ ID NO: 489697 - DNA, 19 bp, Mus musculus
  siRNA target sequence for 9130012B15Rik (NM_030221.1,1331-1349).
ggctgctcactacttgtta

SEQ ID NO: 489698 - DNA, 19 bp, Mus musculus
  siRNA target sequence for 9130012B15Rik (NM_030221.1,1333-1351).
ctgctcactacttgttaca

SEQ ID NO: 489699 - DNA, 19 bp, Mus musculus
  siRNA target sequence for 9130012B15Rik (NM_030221.1,1415-1433).
gaagctaccacatcaatct

SEQ ID NO: 489700 - DNA, 19 bp, Mus musculus
  siRNA target sequence for 9130012B15Rik (NM_030221.1,1691-1709).
gctccagtgcggacatcaa

SEQ ID NO: 489701 - DNA, 19 bp, Mus musculus
  siRNA target sequence for 9130012B15Rik (NM_030221.1,2004-2022).
ggtgaagctatttttctca

SEQ ID NO: 489702 - DNA, 19 bp, Mus musculus
  siRNA target sequence for 9130012B15Rik (NM_030221.1,2055-2073).
cctcacaccagcatatcat

SEQ ID NO: 489703 - DNA, 19 bp, Mus musculus
  siRNA target sequence for 9130012B15Rik (NM_030221.1,2066-2084).
catatcatgctgaaaacta

SEQ ID NO: 489704 - DNA, 19 bp, Mus musculus
  siRNA target sequence for 9130012B15Rik (NM_030221.1,2110-2128).
ctgagaccctttctgtata

SEQ ID NO: 489705 - DNA, 19 bp, Mus musculus
  siRNA target sequence for 9130012B15Rik (NM_030221.1,2214-2232).
ggtcctggagcacttcaaa

SEQ ID NO: 489706 - DNA, 19 bp, Mus musculus
  siRNA target sequence for 9130012B15Rik (NM_030221.1,2233-2251).
gagccatcacctatatgga

SEQ ID NO: 489707 - DNA, 19 bp, Mus musculus
  siRNA target sequence for 9130012B15Rik (NM_030221.1,2235-2253).
gccatcacctatatggaaa

SEQ ID NO: 489708 - DNA, 19 bp, Mus musculus
  siRNA target sequence for 9330174J19Rik (NM_172613.2,200-218).
gccagcatgctttactcaa

SEQ ID NO: 489709 - DNA, 19 bp, Mus musculus
  siRNA target sequence for 9330174J19Rik (NM_172613.2,201-219).
ccagcatgctttactcaat

SEQ ID NO: 489710 - DNA, 19 bp, Mus musculus
  siRNA target sequence for 9330174J19Rik (NM_172613.2,310-328).
ggaatgctcccattggtat

SEQ ID NO: 489711 - DNA, 19 bp, Mus musculus
  siRNA target sequence for 9330174J19Rik (NM_172613.2,311-329).
gaatgctcccattggtatt

SEQ ID NO: 489712 - DNA, 19 bp, Mus musculus
  siRNA target sequence for 9330174J19Rik (NM_172613.2,319-337).
ccattggtattttattgga

SEQ ID NO: 489713 - DNA, 19 bp, Mus musculus
  siRNA target sequence for 9330174J19Rik (NM_172613.2,348-366).
gcgtgtatgggcaaactgt

SEQ ID NO: 489714 - DNA, 19 bp, Mus musculus
  siRNA target sequence for 9330174J19Rik (NM_172613.2,413-431).
cagatgaattcaaaattta

SEQ ID NO: 489715 - DNA, 19 bp, Mus musculus
  siRNA target sequence for 9330174J19Rik (NM_172613.2,512-530).
cagacgagggatacatcat

SEQ ID NO: 489716 - DNA, 19 bp, Mus musculus
  siRNA target sequence for 9330174J19Rik (NM_172613.2,517-535).
gagggatacatcataaaca

SEQ ID NO: 489717 - DNA, 19 bp, Mus musculus
  siRNA target sequence for 9330174J19Rik (NM_172613.2,519-537).
gggatacatcataaacaga

SEQ ID NO: 489718 - DNA, 19 bp, Mus musculus
  siRNA target sequence for 9330174J19Rik (NM_172613.2,540-558).
catccgaaagccagatcta

SEQ ID NO: 489719 - DNA, 19 bp, Mus musculus
  siRNA target sequence for 9330174J19Rik (NM_172613.2,545-563).
gaaagccagatctaaaggt

SEQ ID NO: 489720 - DNA, 19 bp, Mus musculus
  siRNA target sequence for 9330174J19Rik (NM_172613.2,553-571).
gatctaaaggtgagataca

SEQ ID NO: 489721 - DNA, 19 bp, Mus musculus
  siRNA target sequence for 9330174J19Rik (NM_172613.2,556-574).
ctaaaggtgagatacataa

SEQ ID NO: 489722 - DNA, 19 bp, Mus musculus
  siRNA target sequence for 9330174J19Rik (NM_172613.2,589-607).
cgatatgtttggaataatt

SEQ ID NO: 489723 - DNA, 19 bp, Mus musculus
  siRNA target sequence for 9330174J19Rik (NM_172613.2,590-608).
gatatgtttggaataattt

SEQ ID NO: 489724 - DNA, 19 bp, Mus musculus
  siRNA target sequence for 9330174J19Rik (NM_172613.2,658-676).
gcaaagatacatcagaaat

SEQ ID NO: 489725 - DNA, 19 bp, Mus musculus
  siRNA target sequence for 9330174J19Rik (NM_172613.2,708-726).
gatcaggaggttaatatgt

SEQ ID NO: 489726 - DNA, 19 bp, Mus musculus
  siRNA target sequence for 9330174J19Rik (NM_172613.2,728-746).
ggcctaatgctattgatgt

SEQ ID NO: 489727 - DNA, 19 bp, Mus musculus
  siRNA target sequence for 9330174J19Rik (NM_172613.2,729-747).
gcctaatgctattgatgtt

SEQ ID NO: 489728 - DNA, 19 bp, Mus musculus
  siRNA target sequence for 9330174J19Rik (NM_172613.2,748-766).
gaaatcacacctatttgga

SEQ ID NO: 489729 - DNA, 19 bp, Mus musculus
  siRNA target sequence for 9330174J19Rik (NM_172613.2,774-792).
catcaaggaggttctgaat

SEQ ID NO: 489730 - DNA, 19 bp, Mus musculus
  siRNA target sequence for 9330174J19Rik (NM_172613.2,909-927).
cctcagacagcaatctgta

SEQ ID NO: 489731 - DNA, 19 bp, Mus musculus
  siRNA target sequence for 9330174J19Rik (NM_172613.2,931-949).
ctgcaccatcttgttgaat

SEQ ID NO: 489732 - DNA, 19 bp, Mus musculus
  siRNA target sequence for 9330174J19Rik (NM_172613.2,946-964).
gaatcccataatagcatta

SEQ ID NO: 489733 - DNA, 19 bp, Mus musculus
  siRNA target sequence for 9330174J19Rik (NM_172613.2,950-968).
cccataatagcattacagt

SEQ ID NO: 489734 - DNA, 19 bp, Mus musculus
  siRNA target sequence for 9330174J19Rik (NM_172613.2,960-978).
cattacagtctctgtgtat

SEQ ID NO: 489735 - DNA, 19 bp, Mus musculus
  siRNA target sequence for 9330174J19Rik (NM_172613.2,1021-1039).
gtgcctggagatttattaa

SEQ ID NO: 489736 - DNA, 19 bp, Mus musculus
  siRNA target sequence for 9330174J19Rik (NM_172613.2,1027-1045).
ggagatttattaattctga

SEQ ID NO: 489737 - DNA, 19 bp, Mus musculus
  siRNA target sequence for 9330174J19Rik (NM_172613.2,1066-1084).
ccgtgtgacgccattctga

SEQ ID NO: 489738 - DNA, 19 bp, Mus musculus
  siRNA target sequence for 9330174J19Rik (NM_172613.2,1067-1085).
cgtgtgacgccattctgat

SEQ ID NO: 489739 - DNA, 19 bp, Mus musculus
  siRNA target sequence for 9330174J19Rik (NM_172613.2,1068-1086).
gtgtgacgccattctgatt

SEQ ID NO: 489740 - DNA, 19 bp, Mus musculus
  siRNA target sequence for 9330174J19Rik (NM_172613.2,1116-1134).
gctgacaggagaaagcatt

SEQ ID NO: 489741 - DNA, 19 bp, Mus musculus
  siRNA target sequence for 9330174J19Rik (NM_172613.2,1131-1149).
cattcctgtcactaaaact

SEQ ID NO: 489742 - DNA, 19 bp, Mus musculus
  siRNA target sequence for 9330174J19Rik (NM_172613.2,1340-1358).
cgaagcccatgaacttcaa

SEQ ID NO: 489743 - DNA, 19 bp, Mus musculus
  siRNA target sequence for 9330174J19Rik (NM_172613.2,1425-1443).
cctggatgttattaccatt

SEQ ID NO: 489744 - DNA, 19 bp, Mus musculus
  siRNA target sequence for 9330174J19Rik (NM_172613.2,1473-1491).
gaccacaggcatcatctat

SEQ ID NO: 489745 - DNA, 19 bp, Mus musculus
  siRNA target sequence for 9330174J19Rik (NM_172613.2,1532-1550).
gcccccagaggatcaatgt

SEQ ID NO: 489746 - DNA, 19 bp, Mus musculus
  siRNA target sequence for 9330174J19Rik (NM_172613.2,1536-1554).
ccagaggatcaatgtttgt

SEQ ID NO: 489747 - DNA, 19 bp, Mus musculus
  siRNA target sequence for 9330174J19Rik (NM_172613.2,1611-1629).
ggatccttggggagttgta

SEQ ID NO: 489748 - DNA, 19 bp, Mus musculus
  siRNA target sequence for 9330174J19Rik (NM_172613.2,1911-1929).
ccatcagttcccattctca

SEQ ID NO: 489749 - DNA, 19 bp, Mus musculus
  siRNA target sequence for 9330174J19Rik (NM_172613.2,1912-1930).
catcagttcccattctcat

SEQ ID NO: 489750 - DNA, 19 bp, Mus musculus
  siRNA target sequence for 9330174J19Rik (NM_172613.2,1975-1993).
ggccgactggcgttcatga

SEQ ID NO: 489751 - DNA, 19 bp, Mus musculus
  siRNA target sequence for 9330174J19Rik (NM_172613.2,1976-1994).
gccgactggcgttcatgaa

SEQ ID NO: 489752 - DNA, 19 bp, Mus musculus
  siRNA target sequence for 9330174J19Rik (NM_172613.2,2032-2050).
gacacagtaccaactagtt

SEQ ID NO: 489753 - DNA, 19 bp, Mus musculus
  siRNA target sequence for 9330174J19Rik (NM_172613.2,2034-2052).
cacagtaccaactagtttt

SEQ ID NO: 489754 - DNA, 19 bp, Mus musculus
  siRNA target sequence for 9330174J19Rik (NM_172613.2,2048-2066).
gttttattagtgaacttca

SEQ ID NO: 489755 - DNA, 19 bp, Mus musculus
  siRNA target sequence for 9330174J19Rik (NM_172613.2,2131-2149).
cccacaactgccttgatga

SEQ ID NO: 489756 - DNA, 19 bp, Mus musculus
  siRNA target sequence for 9330174J19Rik (NM_172613.2,2327-2345).
ccgaaggccagaaagtcat

SEQ ID NO: 489757 - DNA, 19 bp, Mus musculus
  siRNA target sequence for 9330174J19Rik (NM_172613.2,2333-2351).
gccagaaagtcattcttgt

SEQ ID NO: 489758 - DNA, 19 bp, Mus musculus
  siRNA target sequence for 9330174J19Rik (NM_172613.2,2387-2405).
ctatctcttggaaattagt

SEQ ID NO: 489759 - DNA, 19 bp, Mus musculus
  siRNA target sequence for 9330174J19Rik (NM_172613.2,2412-2430).
gaagaaacctggtccattt

SEQ ID NO: 489760 - DNA, 19 bp, Mus musculus
  siRNA target sequence for 9330174J19Rik (NM_172613.2,2440-2458).
gacacctatatcaacatta

SEQ ID NO: 489761 - DNA, 19 bp, Mus musculus
  siRNA target sequence for 9330174J19Rik (NM_172613.2,2442-2460).
cacctatatcaacattaga

SEQ ID NO: 489762 - DNA, 19 bp, Mus musculus
  siRNA target sequence for 9330174J19Rik (NM_172613.2,2444-2462).
cctatatcaacattagaga

SEQ ID NO: 489763 - DNA, 19 bp, Mus musculus
  siRNA target sequence for 9330174J19Rik (NM_172613.2,2508-2526).
gagtggaaaatcctttcat

SEQ ID NO: 489764 - DNA, 19 bp, Mus musculus
  siRNA target sequence for 9330174J19Rik (NM_172613.2,2524-2542).
catgttataagccaatatt

SEQ ID NO: 489765 - DNA, 19 bp, Mus musculus
  siRNA target sequence for 9330174J19Rik (NM_172613.2,2547-2565).
cagcttattgccaaagata

SEQ ID NO: 489766 - DNA, 19 bp, Mus musculus
  siRNA target sequence for 9330174J19Rik (NM_172613.2,2549-2567).
gcttattgccaaagatact

SEQ ID NO: 489767 - DNA, 19 bp, Mus musculus
  siRNA target sequence for 9330174J19Rik (NM_172613.2,2568-2586).
gatcaatgggaccatcttt

SEQ ID NO: 489768 - DNA, 19 bp, Mus musculus
  siRNA target sequence for 9330174J19Rik (NM_172613.2,2699-2717).
ctcatgtcggtatctcttt

SEQ ID NO: 489769 - DNA, 19 bp, Mus musculus
  siRNA target sequence for 9330174J19Rik (NM_172613.2,2753-2771).
cttccaagactccaaacat

SEQ ID NO: 489770 - DNA, 19 bp, Mus musculus
  siRNA target sequence for 9330174J19Rik (NM_172613.2,2777-2795).
gcgtgccacatctcatcaa

SEQ ID NO: 489771 - DNA, 19 bp, Mus musculus
  siRNA target sequence for 9330174J19Rik (NM_172613.2,2809-2827).
gctctcgttacatcctttt

SEQ ID NO: 489772 - DNA, 19 bp, Mus musculus
  siRNA target sequence for 9330174J19Rik (NM_172613.2,2812-2830).
ctcgttacatccttttgca

SEQ ID NO: 489773 - DNA, 19 bp, Mus musculus
  siRNA target sequence for 9330174J19Rik (NM_172613.2,2850-2868).
ctacagcatgattcagtat

SEQ ID NO: 489774 - DNA, 19 bp, Mus musculus
  siRNA target sequence for 9330174J19Rik (NM_172613.2,2895-2913).
gacaaacagcctttcaaat

SEQ ID NO: 489775 - DNA, 19 bp, Mus musculus
  siRNA target sequence for 9330174J19Rik (NM_172613.2,2935-2953).
ctggccatcacgactctta

SEQ ID NO: 489776 - DNA, 19 bp, Mus musculus
  siRNA target sequence for 9330174J19Rik (NM_172613.2,2937-2955).
ggccatcacgactcttatt

SEQ ID NO: 489777 - DNA, 19 bp, Mus musculus
  siRNA target sequence for 9330174J19Rik (NM_172613.2,2940-2958).
catcacgactcttattggt

SEQ ID NO: 489778 - DNA, 19 bp, Mus musculus
  siRNA target sequence for 9330174J19Rik (NM_172613.2,2948-2966).
ctcttattggtgtaacaat

SEQ ID NO: 489779 - DNA, 19 bp, Mus musculus
  siRNA target sequence for 9330174J19Rik (NM_172613.2,2950-2968).
cttattggtgtaacaatga

SEQ ID NO: 489780 - DNA, 19 bp, Mus musculus
  siRNA target sequence for 9330174J19Rik (NM_172613.2,2956-2974).
ggtgtaacaatgaatctga

SEQ ID NO: 489781 - DNA, 19 bp, Mus musculus
  siRNA target sequence for 9330174J19Rik (NM_172613.2,2957-2975).
gtgtaacaatgaatctgaa

SEQ ID NO: 489782 - DNA, 19 bp, Mus musculus
  siRNA target sequence for 9330174J19Rik (NM_172613.2,2988-3006).
caagctcgtgcctttcaga

SEQ ID NO: 489783 - DNA, 19 bp, Mus musculus
  siRNA target sequence for 9330174J19Rik (NM_172613.2,3116-3134).
ggtatatcatggactatca

SEQ ID NO: 489784 - DNA, 19 bp, Mus musculus
  siRNA target sequence for 9330174J19Rik (NM_172613.2,3215-3233).
gcacctttgcgagttttga

SEQ ID NO: 489785 - DNA, 19 bp, Mus musculus
  siRNA target sequence for 9330174J19Rik (NM_172613.2,3218-3236).
cctttgcgagttttgagaa

SEQ ID NO: 489786 - DNA, 19 bp, Mus musculus
  siRNA target sequence for 9330174J19Rik (NM_172613.2,3223-3241).
gcgagttttgagaatacga

SEQ ID NO: 489787 - DNA, 19 bp, Mus musculus
  siRNA target sequence for 9330174J19Rik (NM_172613.2,3232-3250).
gagaatacgacaatatggt

SEQ ID NO: 489788 - DNA, 19 bp, Mus musculus
  siRNA target sequence for 9330174J19Rik (NM_172613.2,3234-3252).
gaatacgacaatatggttt

SEQ ID NO: 489789 - DNA, 19 bp, Mus musculus
  siRNA target sequence for 9330174J19Rik (NM_172613.2,3277-3295).
gtggctcttgtattctcta

SEQ ID NO: 489790 - DNA, 19 bp, Mus musculus
  siRNA target sequence for 9330174J19Rik (NM_172613.2,3279-3297).
ggctcttgtattctctaaa

SEQ ID NO: 489791 - DNA, 19 bp, Mus musculus
  siRNA target sequence for 9330174J19Rik (NM_172613.2,3283-3301).
cttgtattctctaaaggaa

SEQ ID NO: 489792 - DNA, 19 bp, Mus musculus
  siRNA target sequence for 9330174J19Rik (NM_172613.2,3311-3329).
ggcagcccacctatacaaa

SEQ ID NO: 489793 - DNA, 19 bp, Mus musculus
  siRNA target sequence for 9330174J19Rik (NM_172613.2,3313-3331).
cagcccacctatacaaact

SEQ ID NO: 489794 - DNA, 19 bp, Mus musculus
  siRNA target sequence for 9330174J19Rik (NM_172613.2,3315-3333).
gcccacctatacaaactat

SEQ ID NO: 489795 - DNA, 19 bp, Mus musculus
  siRNA target sequence for 9330174J19Rik (NM_172613.2,3365-3383).
gcgtatgtcttttcattct

SEQ ID NO: 489796 - DNA, 19 bp, Mus musculus
  siRNA target sequence for 9330174J19Rik (NM_172613.2,3366-3384).
cgtatgtcttttcattcta

SEQ ID NO: 489797 - DNA, 19 bp, Mus musculus
  siRNA target sequence for 9330174J19Rik (NM_172613.2,3391-3409).
gatatcccagagatgcata

SEQ ID NO: 489798 - DNA, 19 bp, Mus musculus
  siRNA target sequence for 9330174J19Rik (NM_172613.2,3443-3461).
ggagagtctacattctcat

SEQ ID NO: 489799 - DNA, 19 bp, Mus musculus
  siRNA target sequence for 9330174J19Rik (NM_172613.2,3446-3464).
gagtctacattctcatcat

SEQ ID NO: 489800 - DNA, 19 bp, Mus musculus
  siRNA target sequence for 9330174J19Rik (NM_172613.2,3448-3466).
gtctacattctcatcatga

SEQ ID NO: 489801 - DNA, 19 bp, Mus musculus
  siRNA target sequence for 9330174J19Rik (NM_172613.2,3462-3480).
catgatcagctccaacttt

SEQ ID NO: 489802 - DNA, 19 bp, Mus musculus
  siRNA target sequence for 9330174J19Rik (NM_172613.2,3531-3549).
gatagcagtcaaaagatgt

SEQ ID NO: 489803 - DNA, 19 bp, Mus musculus
  siRNA target sequence for 9330174J19Rik (NM_172613.2,3554-3572).
gttatcaatcaaaaagtca

SEQ ID NO: 489804 - DNA, 19 bp, Mus musculus
  siRNA target sequence for 9430008B02Rik (NM_019945.1,77-95).
ctggaccgcgctttccaat

SEQ ID NO: 489805 - DNA, 19 bp, Mus musculus
  siRNA target sequence for 9430008B02Rik (NM_019945.1,79-97).
ggaccgcgctttccaattt

SEQ ID NO: 489806 - DNA, 19 bp, Mus musculus
  siRNA target sequence for 9430008B02Rik (NM_019945.1,282-300).
gcccacttctcgtttgctt

SEQ ID NO: 489807 - DNA, 19 bp, Mus musculus
  siRNA target sequence for 9430008B02Rik (NM_019945.1,444-462).
gacgagctgcactttctgt

SEQ ID NO: 489808 - DNA, 19 bp, Mus musculus
  siRNA target sequence for 9430008B02Rik (NM_019945.1,568-586).
cctcctacgacaacgaaat

SEQ ID NO: 489809 - DNA, 19 bp, Mus musculus
  siRNA target sequence for 9430008B02Rik (NM_019945.1,569-587).
ctcctacgacaacgaaatt

SEQ ID NO: 489810 - DNA, 19 bp, Mus musculus
  siRNA target sequence for 9430008B02Rik (NM_019945.1,571-589).
cctacgacaacgaaattgt

SEQ ID NO: 489811 - DNA, 19 bp, Mus musculus
  siRNA target sequence for 9430008B02Rik (NM_019945.1,779-797).
caccacggtctatttctat

SEQ ID NO: 489812 - DNA, 19 bp, Mus musculus
  siRNA target sequence for 9430008B02Rik (NM_019945.1,781-799).
ccacggtctatttctatga

SEQ ID NO: 489813 - DNA, 19 bp, Mus musculus
  siRNA target sequence for 9430008B02Rik (NM_019945.1,784-802).
cggtctatttctatgaact

SEQ ID NO: 489814 - DNA, 19 bp, Mus musculus
  siRNA target sequence for 9430008B02Rik (NM_019945.1,824-842).
gctgcaggacgcttatgaa

SEQ ID NO: 489815 - DNA, 19 bp, Mus musculus
  siRNA target sequence for 9430008B02Rik (NM_019945.1,993-1011).
gagggccacctggtcaaaa

SEQ ID NO: 489816 - DNA, 19 bp, Mus musculus
  siRNA target sequence for 9430008B02Rik (NM_019945.1,1012-1030).
ctgacatcccccgatacat

SEQ ID NO: 489817 - DNA, 19 bp, Mus musculus
  siRNA target sequence for 9430008B02Rik (NM_019945.1,1163-1181).
gaaacctcccggtgaaagt

SEQ ID NO: 489818 - DNA, 19 bp, Mus musculus
  siRNA target sequence for 9430008B02Rik (NM_019945.1,1171-1189).
ccggtgaaagtgactttga

SEQ ID NO: 489819 - DNA, 19 bp, Mus musculus
  siRNA target sequence for 9430008B02Rik (NM_019945.1,1188-1206).
gacactatcaagctcatta

SEQ ID NO: 489820 - DNA, 19 bp, Mus musculus
  siRNA target sequence for 9430008B02Rik (NM_019945.1,1192-1210).
ctatcaagctcattagcaa

SEQ ID NO: 489821 - DNA, 19 bp, Mus musculus
  siRNA target sequence for 9430008B02Rik (NM_019945.1,1507-1525).
cagttctagcccttgagta

SEQ ID NO: 489822 - DNA, 19 bp, Mus musculus
  siRNA target sequence for 9430008B02Rik (NM_019945.1,1566-1584).
gacaacctcctcattactt

SEQ ID NO: 489823 - DNA, 19 bp, Mus musculus
  siRNA target sequence for 9430008B02Rik (NM_019945.1,1595-1613).
catcaagctcacggatttt

SEQ ID NO: 489824 - DNA, 19 bp, Mus musculus
  siRNA target sequence for 9430008B02Rik (NM_019945.1,1637-1655).
gagcctgaccaccaactta

SEQ ID NO: 489825 - DNA, 19 bp, Mus musculus
  siRNA target sequence for 9430008B02Rik (NM_019945.1,1639-1657).
gcctgaccaccaacttata

SEQ ID NO: 489826 - DNA, 19 bp, Mus musculus
  siRNA target sequence for 9430008B02Rik (NM_019945.1,1640-1658).
cctgaccaccaacttatat

SEQ ID NO: 489827 - DNA, 19 bp, Mus musculus
  siRNA target sequence for 9430008B02Rik (NM_019945.1,1775-1793).
gtgggctatggggatcatt

SEQ ID NO: 489828 - DNA, 19 bp, Mus musculus
  siRNA target sequence for 9430008B02Rik (NM_019945.1,1909-1927).
cagatgcacagcttctaat

SEQ ID NO: 489829 - DNA, 19 bp, Mus musculus
  siRNA target sequence for 9430008B02Rik (NM_019945.1,1966-1984).
gggcaggtggtgcttttga

SEQ ID NO: 489830 - DNA, 19 bp, Mus musculus
  siRNA target sequence for 9430008B02Rik (NM_019945.1,2367-2385).
gggggctctccagagatta

SEQ ID NO: 489831 - DNA, 19 bp, Mus musculus
  siRNA target sequence for 9430008B02Rik (NM_019945.1,2398-2416).
cgtctgaagccagttttct

SEQ ID NO: 489832 - DNA, 19 bp, Mus musculus
  siRNA target sequence for 9430008B02Rik (NM_019945.1,2576-2594).
ccccaaagaggcagttcaa

SEQ ID NO: 489833 - DNA, 19 bp, Mus musculus
  siRNA target sequence for 9430008B02Rik (NM_019945.1,2775-2793).
cgaactgggggcaaagtta

SEQ ID NO: 489834 - DNA, 19 bp, Mus musculus
  siRNA target sequence for 9430008B02Rik (NM_019945.1,2776-2794).
gaactgggggcaaagttat

SEQ ID NO: 489835 - DNA, 19 bp, Mus musculus
  siRNA target sequence for 9430008B02Rik (NM_019945.1,3265-3283).
gcagttacaaagccaaaat

SEQ ID NO: 489836 - DNA, 19 bp, Mus musculus
  siRNA target sequence for 9430008B02Rik (NM_019945.1,3345-3363).
ctctttcggaagatcacaa

SEQ ID NO: 489837 - DNA, 19 bp, Mus musculus
  siRNA target sequence for 9430008B02Rik (NM_019945.1,3390-3408).
cgatcgctgtcctctttga

SEQ ID NO: 489838 - DNA, 19 bp, Mus musculus
  siRNA target sequence for 9430008B02Rik (NM_019945.1,3465-3483).
gcacgctcgcccacacata

SEQ ID NO: 489839 - DNA, 19 bp, Mus musculus
  siRNA target sequence for 9430008B02Rik (NM_019945.1,3469-3487).
gctcgcccacacatagcta

SEQ ID NO: 489840 - DNA, 19 bp, Mus musculus
  siRNA target sequence for 9430008B02Rik (NM_019945.1,3470-3488).
ctcgcccacacatagctat

SEQ ID NO: 489841 - DNA, 19 bp, Mus musculus
  siRNA target sequence for 9430008B02Rik (NM_019945.1,3608-3626).
cgggctgtcaccgaaacta

SEQ ID NO: 489842 - DNA, 19 bp, Mus musculus
  siRNA target sequence for 9430008B02Rik (NM_019945.1,3638-3656).
ccgctcagcgcgctgtaaa

SEQ ID NO: 489843 - DNA, 19 bp, Mus musculus
  siRNA target sequence for 9430008B02Rik (NM_019945.1,3639-3657).
cgctcagcgcgctgtaaat

SEQ ID NO: 489844 - DNA, 19 bp, Mus musculus
  siRNA target sequence for 9430008B02Rik (NM_019945.1,3894-3912).
ggcgcactgcgcaaacaca

SEQ ID NO: 489845 - DNA, 19 bp, Mus musculus
  siRNA target sequence for 9430008B02Rik (NM_019945.1,3991-4009).
gtgagacgcctcctattga

SEQ ID NO: 489846 - DNA, 19 bp, Mus musculus
  siRNA target sequence for 9430008B02Rik (NM_019945.1,4417-4435).
cagactccaagggattgaa

SEQ ID NO: 489847 - DNA, 19 bp, Mus musculus
  siRNA target sequence for 9430008B02Rik (NM_019945.1,4586-4604).
cctagtcccaacaaagaat

SEQ ID NO: 489848 - DNA, 19 bp, Mus musculus
  siRNA target sequence for 9430008B02Rik (NM_019945.1,4665-4683).
cctgaagcagggttgaact

SEQ ID NO: 489849 - DNA, 19 bp, Mus musculus
  siRNA target sequence for 9530053N22 (NM_198420.1,252-270).
cacaggcacaggattatga

SEQ ID NO: 489850 - DNA, 19 bp, Mus musculus
  siRNA target sequence for 9530053N22 (NM_198420.1,334-352).
gtgggtggagattatcgaa

SEQ ID NO: 489851 - DNA, 19 bp, Mus musculus
  siRNA target sequence for 9530053N22 (NM_198420.1,354-372).
cacgcacgcgcgaacgtat

SEQ ID NO: 489852 - DNA, 19 bp, Mus musculus
  siRNA target sequence for 9530053N22 (NM_198420.1,358-376).
cacgcgcgaacgtatgtat

SEQ ID NO: 489853 - DNA, 19 bp, Mus musculus
  siRNA target sequence for 9530053N22 (NM_198420.1,460-478).
gctctttgaccccaataca

SEQ ID NO: 489854 - DNA, 19 bp, Mus musculus
  siRNA target sequence for 9530053N22 (NM_198420.1,463-481).
ctttgaccccaatacatca

SEQ ID NO: 489855 - DNA, 19 bp, Mus musculus
  siRNA target sequence for 9530053N22 (NM_198420.1,477-495).
catcacgcttctactacta

SEQ ID NO: 489856 - DNA, 19 bp, Mus musculus
  siRNA target sequence for 9530053N22 (NM_198420.1,531-549).
cacagaactgcgacatcat

SEQ ID NO: 489857 - DNA, 19 bp, Mus musculus
  siRNA target sequence for 9530053N22 (NM_198420.1,734-752).
gaggatactagcagttgtt

SEQ ID NO: 489858 - DNA, 19 bp, Mus musculus
  siRNA target sequence for 9530053N22 (NM_198420.1,785-803).
gaggtataccgggattaca

SEQ ID NO: 489859 - DNA, 19 bp, Mus musculus
  siRNA target sequence for 9530053N22 (NM_198420.1,787-805).
ggtataccgggattacagt

SEQ ID NO: 489860 - DNA, 19 bp, Mus musculus
  siRNA target sequence for 9530053N22 (NM_198420.1,846-864).
gatggaactctggtaacaa

SEQ ID NO: 489861 - DNA, 19 bp, Mus musculus
  siRNA target sequence for 9530053N22 (NM_198420.1,1089-1107).
gttctccactgctgataca

SEQ ID NO: 489862 - DNA, 19 bp, Mus musculus
  siRNA target sequence for 9530053N22 (NM_198420.1,1140-1158).
cctcccctcgctatggtta

SEQ ID NO: 489863 - DNA, 19 bp, Mus musculus
  siRNA target sequence for 9530053N22 (NM_198420.1,1141-1159).
ctcccctcgctatggttat

SEQ ID NO: 489864 - DNA, 19 bp, Mus musculus
  siRNA target sequence for 9530053N22 (NM_198420.1,1143-1161).
cccctcgctatggttatga

SEQ ID NO: 489865 - DNA, 19 bp, Mus musculus
  siRNA target sequence for 9530053N22 (NM_198420.1,1144-1162).
ccctcgctatggttatgaa

SEQ ID NO: 489866 - DNA, 19 bp, Mus musculus
  siRNA target sequence for 9530053N22 (NM_198420.1,1284-1302).
gccgaaagccccatccatt

SEQ ID NO: 489867 - DNA, 19 bp, Mus musculus
  siRNA target sequence for 9530053N22 (NM_198420.1,1346-1364).
ctgatgcgcaccaagcaaa

SEQ ID NO: 489868 - DNA, 19 bp, Mus musculus
  siRNA target sequence for 9530053N22 (NM_198420.1,1448-1466).
ggctccagccccaagctta

SEQ ID NO: 489869 - DNA, 19 bp, Mus musculus
  siRNA target sequence for 9530053N22 (NM_198420.1,1470-1488).
ctgggcccaggcacaagta

SEQ ID NO: 489870 - DNA, 19 bp, Mus musculus
  siRNA target sequence for 9530053N22 (NM_198420.1,1703-1721).
ggcactcgcaagagaaaga

SEQ ID NO: 489871 - DNA, 19 bp, Mus musculus
  siRNA target sequence for 9530053N22 (NM_198420.1,1704-1722).
gcactcgcaagagaaagaa

SEQ ID NO: 489872 - DNA, 19 bp, Mus musculus
  siRNA target sequence for 9530053N22 (NM_198420.1,1827-1845).
ccagccttaccccagtaaa

SEQ ID NO: 489873 - DNA, 19 bp, Mus musculus
  siRNA target sequence for 9530053N22 (NM_198420.1,2201-2219).
gcctgcgcccagtttgaga

SEQ ID NO: 489874 - DNA, 19 bp, Mus musculus
  siRNA target sequence for 9530053N22 (NM_198420.1,2316-2334).
gggcctccaagcacttcaa

SEQ ID NO: 489875 - DNA, 19 bp, Mus musculus
  siRNA target sequence for 9530053N22 (NM_198420.1,2360-2378).
cgcaaggtgtccatagcta

SEQ ID NO: 489876 - DNA, 19 bp, Mus musculus
  siRNA target sequence for 9530053N22 (NM_198420.1,2394-2412).
gcagtgagtccatcaagaa

SEQ ID NO: 489877 - DNA, 19 bp, Mus musculus
  siRNA target sequence for 9530053N22 (NM_198420.1,2430-2448).
gtgaccggcacgtgaagaa

SEQ ID NO: 489878 - DNA, 19 bp, Mus musculus
  siRNA target sequence for 9530053N22 (NM_198420.1,2467-2485).
caagctaatccaaatgtat

SEQ ID NO: 489879 - DNA, 19 bp, Mus musculus
  siRNA target sequence for 9530053N22 (NM_198420.1,2518-2536).
gcacgtagccctagagata

SEQ ID NO: 489880 - DNA, 19 bp, Mus musculus
  siRNA target sequence for 9530053N22 (NM_198420.1,2568-2586).
gggatgagctgtatatcca

SEQ ID NO: 489881 - DNA, 19 bp, Mus musculus
  siRNA target sequence for 9530053N22 (NM_198420.1,2694-2712).
cctacctagagggctatat

SEQ ID NO: 489882 - DNA, 19 bp, Mus musculus
  siRNA target sequence for 9530053N22 (NM_198420.1,2718-2736).
ggcatatggaccctgttaa

SEQ ID NO: 489883 - DNA, 19 bp, Mus musculus
  siRNA target sequence for 9530053N22 (NM_198420.1,2763-2781).
cctatgcgaagtactgtta

SEQ ID NO: 489884 - DNA, 19 bp, Mus musculus
  siRNA target sequence for 9530053N22 (NM_198420.1,2823-2841).
gcctgaagaagcctaatgt

SEQ ID NO: 489885 - DNA, 19 bp, Mus musculus
  siRNA target sequence for 9530053N22 (NM_198420.1,3021-3039).
gggtccctggggacattga

SEQ ID NO: 489886 - DNA, 19 bp, Mus musculus
  siRNA target sequence for 9530053N22 (NM_198420.1,3142-3160).
gctggaagagcccttgatt

SEQ ID NO: 489887 - DNA, 19 bp, Mus musculus
  siRNA target sequence for 9530053N22 (NM_198420.1,3151-3169).
gcccttgattcctcatgaa

SEQ ID NO: 489888 - DNA, 19 bp, Mus musculus
  siRNA target sequence for 9530053N22 (NM_198420.1,3152-3170).
cccttgattcctcatgaat

SEQ ID NO: 489889 - DNA, 19 bp, Mus musculus
  siRNA target sequence for 9530053N22 (NM_198420.1,3153-3171).
ccttgattcctcatgaatt

SEQ ID NO: 489890 - DNA, 19 bp, Mus musculus
  siRNA target sequence for 9530053N22 (NM_198420.1,3386-3404).
cgcgtcatcttcgagaata

SEQ ID NO: 489891 - DNA, 19 bp, Mus musculus
  siRNA target sequence for 9530053N22 (NM_198420.1,3388-3406).
cgtcatcttcgagaataca

SEQ ID NO: 489892 - DNA, 19 bp, Mus musculus
  siRNA target sequence for 9530053N22 (NM_198420.1,3429-3447).
gagtgctcattcagcattt

SEQ ID NO: 489893 - DNA, 19 bp, Mus musculus
  siRNA target sequence for 9830148O20Rik (NM_175482.2,49-67).
ggtgccttatcgcttacat

SEQ ID NO: 489894 - DNA, 19 bp, Mus musculus
  siRNA target sequence for 9830148O20Rik (NM_175482.2,134-152).
cggcagacctggctcaaat

SEQ ID NO: 489895 - DNA, 19 bp, Mus musculus
  siRNA target sequence for 9830148O20Rik (NM_175482.2,154-172).
caacgacatctctgttact

SEQ ID NO: 489896 - DNA, 19 bp, Mus musculus
  siRNA target sequence for 9830148O20Rik (NM_175482.2,228-246).
gcgcctactgcttgatgta

SEQ ID NO: 489897 - DNA, 19 bp, Mus musculus
  siRNA target sequence for 9830148O20Rik (NM_175482.2,229-247).
cgcctactgcttgatgtat

SEQ ID NO: 489898 - DNA, 19 bp, Mus musculus
  siRNA target sequence for 9830148O20Rik (NM_175482.2,230-248).
gcctactgcttgatgtata

SEQ ID NO: 489899 - DNA, 19 bp, Mus musculus
  siRNA target sequence for 9830148O20Rik (NM_175482.2,237-255).
gcttgatgtatatcaatga

SEQ ID NO: 489900 - DNA, 19 bp, Mus musculus
  siRNA target sequence for 9830148O20Rik (NM_175482.2,278-296).
gaggcatcttctaatgaat

SEQ ID NO: 489901 - DNA, 19 bp, Mus musculus
  siRNA target sequence for 9830148O20Rik (NM_175482.2,428-446).
gagtcctccccgaactctt

SEQ ID NO: 489902 - DNA, 19 bp, Mus musculus
  siRNA target sequence for 9830148O20Rik (NM_175482.2,497-515).
gaggtccgatgcttgtctt

SEQ ID NO: 489903 - DNA, 19 bp, Mus musculus
  siRNA target sequence for 9830148O20Rik (NM_175482.2,603-621).
ccttgagtgaggcatttca

SEQ ID NO: 489904 - DNA, 19 bp, Mus musculus
  siRNA target sequence for 9830148O20Rik (NM_175482.2,681-699).
ctcgccttcagcatgttct

SEQ ID NO: 489905 - DNA, 19 bp, Mus musculus
  siRNA target sequence for 9830148O20Rik (NM_175482.2,755-773).
gaacagtttgcggatagaa

SEQ ID NO: 489906 - DNA, 19 bp, Mus musculus
  siRNA target sequence for 9830148O20Rik (NM_175482.2,760-778).
gtttgcggatagaaacctt

SEQ ID NO: 489907 - DNA, 19 bp, Mus musculus
  siRNA target sequence for 9830148O20Rik (NM_175482.2,765-783).
cggatagaaaccttagcta

SEQ ID NO: 489908 - DNA, 19 bp, Mus musculus
  siRNA target sequence for 9830148O20Rik (NM_175482.2,771-789).
gaaaccttagctatgatga

SEQ ID NO: 489909 - DNA, 19 bp, Mus musculus
  siRNA target sequence for 9830148O20Rik (NM_175482.2,792-810).
gatctatcagtatcatgaa

SEQ ID NO: 489910 - DNA, 19 bp, Mus musculus
  siRNA target sequence for 9830148O20Rik (NM_175482.2,818-836).
caggccaaattgatggaaa

SEQ ID NO: 489911 - DNA, 19 bp, Mus musculus
  siRNA target sequence for 9830148O20Rik (NM_175482.2,850-868).
catgaacatggaagagtat

SEQ ID NO: 489912 - DNA, 19 bp, Mus musculus
  siRNA target sequence for 9830148O20Rik (NM_175482.2,1030-1048).
cgtgaaggagtctgtgatt

SEQ ID NO: 489913 - DNA, 19 bp, Mus musculus
  siRNA target sequence for 9830148O20Rik (NM_175482.2,1049-1067).
gccttataccgcagaaaat

SEQ ID NO: 489914 - DNA, 19 bp, Mus musculus
  siRNA target sequence for 9830148O20Rik (NM_175482.2,1090-1108).
ggctgcttctctttttgaa

SEQ ID NO: 489915 - DNA, 19 bp, Mus musculus
  siRNA target sequence for 9830148O20Rik (NM_175482.2,1110-1128).
caaatgacgaccattctgt

SEQ ID NO: 489916 - DNA, 19 bp, Mus musculus
  siRNA target sequence for 9830148O20Rik (NM_175482.2,1125-1143).
ctgtaacagagggcattaa

SEQ ID NO: 489917 - DNA, 19 bp, Mus musculus
  siRNA target sequence for 9830148O20Rik (NM_175482.2,1168-1186).
ctgcatccacctgatcatt

SEQ ID NO: 489918 - DNA, 19 bp, Mus musculus
  siRNA target sequence for 9830148O20Rik (NM_175482.2,1326-1344).
cagaaatcatcgtcctaaa

SEQ ID NO: 489919 - DNA, 19 bp, Mus musculus
  siRNA target sequence for 9830148O20Rik (NM_175482.2,1345-1363).
ggagcctccaactattcga

SEQ ID NO: 489920 - DNA, 19 bp, Mus musculus
  siRNA target sequence for 9830148O20Rik (NM_175482.2,1365-1383).
cgaattctccctatgatct

SEQ ID NO: 489921 - DNA, 19 bp, Mus musculus
  siRNA target sequence for 9830148O20Rik (NM_175482.2,1366-1384).
gaattctccctatgatctt

SEQ ID NO: 489922 - DNA, 19 bp, Mus musculus
  siRNA target sequence for 9830148O20Rik (NM_175482.2,1414-1432).
cattcaaggagtttcaaca

SEQ ID NO: 489923 - DNA, 19 bp, Mus musculus
  siRNA target sequence for 9930020N01 (NM_172922.1,112-130).
cttcacgagggatgatttt

SEQ ID NO: 489924 - DNA, 19 bp, Mus musculus
  siRNA target sequence for 9930020N01 (NM_172922.1,284-302).
gtcaaaatggagaagatta

SEQ ID NO: 489925 - DNA, 19 bp, Mus musculus
  siRNA target sequence for 9930020N01 (NM_172922.1,321-339).
ccatctatggggtctgtaa

SEQ ID NO: 489926 - DNA, 19 bp, Mus musculus
  siRNA target sequence for 9930020N01 (NM_172922.1,351-369).
gcattgtgatggagttcat

SEQ ID NO: 489927 - DNA, 19 bp, Mus musculus
  siRNA target sequence for 9930020N01 (NM_172922.1,588-606).
ctcagaagcagtacattga

SEQ ID NO: 489928 - DNA, 19 bp, Mus musculus
  siRNA target sequence for 9930020N01 (NM_172922.1,633-651).
gctacatccctcctgaaat

SEQ ID NO: 489929 - DNA, 19 bp, Mus musculus
  siRNA target sequence for 9930020N01 (NM_172922.1,678-696).
ggcctgaatatgatgtgta

SEQ ID NO: 489930 - DNA, 19 bp, Mus musculus
  siRNA target sequence for 9930020N01 (NM_172922.1,746-764).
gcagggctcaatatgatga

SEQ ID NO: 489931 - DNA, 19 bp, Mus musculus
  siRNA target sequence for 9930020N01 (NM_172922.1,749-767).
gggctcaatatgatgacta

SEQ ID NO: 489932 - DNA, 19 bp, Mus musculus
  siRNA target sequence for 9930020N01 (NM_172922.1,750-768).
ggctcaatatgatgactat

SEQ ID NO: 489933 - DNA, 19 bp, Mus musculus
  siRNA target sequence for 9930020N01 (NM_172922.1,751-769).
gctcaatatgatgactatt

SEQ ID NO: 489934 - DNA, 19 bp, Mus musculus
  siRNA target sequence for 9930020N01 (NM_172922.1,752-770).
ctcaatatgatgactatta

SEQ ID NO: 489935 - DNA, 19 bp, Mus musculus
  siRNA target sequence for 9930020N01 (NM_172922.1,828-846).
cagaggaggtacatcaaat

SEQ ID NO: 489936 - DNA, 19 bp, Mus musculus
  siRNA target sequence for 9930020N01 (NM_172922.1,1108-1126).
gagcttggtcgcaagtgat

SEQ ID NO: 489937 - DNA, 19 bp, Mus musculus
  siRNA target sequence for 9930020N01 (NM_172922.1,1201-1219).
gtcccacgacgttgatgta

SEQ ID NO: 489938 - DNA, 19 bp, Mus musculus
  siRNA target sequence for 9930020N01 (NM_172922.1,1203-1221).
cccacgacgttgatgtaga

SEQ ID NO: 489939 - DNA, 19 bp, Mus musculus
  siRNA target sequence for 9930020N01 (NM_172922.1,1204-1222).
ccacgacgttgatgtagat

SEQ ID NO: 489940 - DNA, 19 bp, Mus musculus
  siRNA target sequence for 9930020N01 (NM_172922.1,1205-1223).
cacgacgttgatgtagatt

SEQ ID NO: 489941 - DNA, 19 bp, Mus musculus
  siRNA target sequence for 9930020N01 (NM_172922.1,1302-1320).
cacatggtgctgataccaa

SEQ ID NO: 489942 - DNA, 19 bp, Mus musculus
  siRNA target sequence for 9930020N01 (NM_172922.1,1461-1479).
cacagaacaactttgagaa

SEQ ID NO: 489943 - DNA, 19 bp, Mus musculus
  siRNA target sequence for 9930020N01 (NM_172922.1,1681-1699).
cattcagcacctgctaaaa

SEQ ID NO: 489944 - DNA, 19 bp, Mus musculus
  siRNA target sequence for 9930020N01 (NM_172922.1,1764-1782).
ggggcaaggaccttatctt

SEQ ID NO: 489945 - DNA, 19 bp, Mus musculus
  siRNA target sequence for 9930020N01 (NM_172922.1,1766-1784).
ggcaaggaccttatcttta

SEQ ID NO: 489946 - DNA, 19 bp, Mus musculus
  siRNA target sequence for 9930020N01 (NM_172922.1,1786-1804).
gatgcttctcagatatgga

SEQ ID NO: 489947 - DNA, 19 bp, Mus musculus
  siRNA target sequence for 9930020N01 (NM_172922.1,1844-1862).
ctgcacctagccacttaca

SEQ ID NO: 489948 - DNA, 19 bp, Mus musculus
  siRNA target sequence for 9930020N01 (NM_172922.1,2176-2194).
cctcaaagttctagttaaa

SEQ ID NO: 489949 - DNA, 19 bp, Mus musculus
  siRNA target sequence for 9930104H07Rik (NM_177390.2,315-333).
caaccttaggctcagattt

SEQ ID NO: 489950 - DNA, 19 bp, Mus musculus
  siRNA target sequence for 9930104H07Rik (NM_177390.2,340-358).
ggacgcatctacacattca

SEQ ID NO: 489951 - DNA, 19 bp, Mus musculus
  siRNA target sequence for 9930104H07Rik (NM_177390.2,341-359).
gacgcatctacacattcat

SEQ ID NO: 489952 - DNA, 19 bp, Mus musculus
  siRNA target sequence for 9930104H07Rik (NM_177390.2,386-404).
catacaaggtgctgaacat

SEQ ID NO: 489953 - DNA, 19 bp, Mus musculus
  siRNA target sequence for 9930104H07Rik (NM_177390.2,415-433).
gacactgtcgagcagtata

SEQ ID NO: 489954 - DNA, 19 bp, Mus musculus
  siRNA target sequence for 9930104H07Rik (NM_177390.2,512-530).
caaaagacacctgtattat

SEQ ID NO: 489955 - DNA, 19 bp, Mus musculus
  siRNA target sequence for 9930104H07Rik (NM_177390.2,517-535).
gacacctgtattatgatat

SEQ ID NO: 489956 - DNA, 19 bp, Mus musculus
  siRNA target sequence for 9930104H07Rik (NM_177390.2,654-672).
gtcaaactgcgttttggaa

SEQ ID NO: 489957 - DNA, 19 bp, Mus musculus
  siRNA target sequence for 9930104H07Rik (NM_177390.2,759-777).
ccccattgggggacatatt

SEQ ID NO: 489958 - DNA, 19 bp, Mus musculus
  siRNA target sequence for 9930104H07Rik (NM_177390.2,760-778).
cccattgggggacatatta

SEQ ID NO: 489959 - DNA, 19 bp, Mus musculus
  siRNA target sequence for 9930104H07Rik (NM_177390.2,761-779).
ccattgggggacatattaa

SEQ ID NO: 489960 - DNA, 19 bp, Mus musculus
  siRNA target sequence for 9930104H07Rik (NM_177390.2,769-787).
ggacatattaataactact

SEQ ID NO: 489961 - DNA, 19 bp, Mus musculus
  siRNA target sequence for 9930104H07Rik (NM_177390.2,826-844).
gaacggagcttccattctt

SEQ ID NO: 489962 - DNA, 19 bp, Mus musculus
  siRNA target sequence for 9930104H07Rik (NM_177390.2,907-925).
ctctcatcctacaactaca

SEQ ID NO: 489963 - DNA, 19 bp, Mus musculus
  siRNA target sequence for 9930104H07Rik (NM_177390.2,986-1004).
ctgatgccatgaaagtaat

SEQ ID NO: 489964 - DNA, 19 bp, Mus musculus
  siRNA target sequence for 9930104H07Rik (NM_177390.2,991-1009).
gccatgaaagtaattggat

SEQ ID NO: 489965 - DNA, 19 bp, Mus musculus
  siRNA target sequence for 9930104H07Rik (NM_177390.2,992-1010).
ccatgaaagtaattggatt

SEQ ID NO: 489966 - DNA, 19 bp, Mus musculus
  siRNA target sequence for 9930104H07Rik (NM_177390.2,1021-1039).
gagattcaaactgtgtata

SEQ ID NO: 489967 - DNA, 19 bp, Mus musculus
  siRNA target sequence for 9930104H07Rik (NM_177390.2,1091-1109).
gtgacacgccgcttattga

SEQ ID NO: 489968 - DNA, 19 bp, Mus musculus
  siRNA target sequence for 9930104H07Rik (NM_177390.2,1093-1111).
gacacgccgcttattgaga

SEQ ID NO: 489969 - DNA, 19 bp, Mus musculus
  siRNA target sequence for 9930104H07Rik (NM_177390.2,1095-1113).
cacgccgcttattgagaat

SEQ ID NO: 489970 - DNA, 19 bp, Mus musculus
  siRNA target sequence for 9930104H07Rik (NM_177390.2,1116-1134).
caaggttgtgtctgtcata

SEQ ID NO: 489971 - DNA, 19 bp, Mus musculus
  siRNA target sequence for 9930104H07Rik (NM_177390.2,1127-1145).
ctgtcatagcagaattgct

SEQ ID NO: 489972 - DNA, 19 bp, Mus musculus
  siRNA target sequence for 9930104H07Rik (NM_177390.2,1205-1223).
gtgacatcatcgacaaaca

SEQ ID NO: 489973 - DNA, 19 bp, Mus musculus
  siRNA target sequence for 9930104H07Rik (NM_177390.2,1258-1276).
gcctttgccaaggcaatat

SEQ ID NO: 489974 - DNA, 19 bp, Mus musculus
  siRNA target sequence for 9930104H07Rik (NM_177390.2,1259-1277).
cctttgccaaggcaatata

SEQ ID NO: 489975 - DNA, 19 bp, Mus musculus
  siRNA target sequence for 9930104H07Rik (NM_177390.2,1260-1278).
ctttgccaaggcaatatat

SEQ ID NO: 489976 - DNA, 19 bp, Mus musculus
  siRNA target sequence for 9930104H07Rik (NM_177390.2,1281-1299).
gcgcctcttttgttggatt

SEQ ID NO: 489977 - DNA, 19 bp, Mus musculus
  siRNA target sequence for 9930104H07Rik (NM_177390.2,1296-1314).
gattgttactcgcatcaat

SEQ ID NO: 489978 - DNA, 19 bp, Mus musculus
  siRNA target sequence for 9930104H07Rik (NM_177390.2,1300-1318).
gttactcgcatcaatgaca

SEQ ID NO: 489979 - DNA, 19 bp, Mus musculus
  siRNA target sequence for 9930104H07Rik (NM_177390.2,1343-1361).
ccacgatacatgggaaaaa

SEQ ID NO: 489980 - DNA, 19 bp, Mus musculus
  siRNA target sequence for 9930104H07Rik (NM_177390.2,1366-1384).
gttattggtgtcttggata

SEQ ID NO: 489981 - DNA, 19 bp, Mus musculus
  siRNA target sequence for 9930104H07Rik (NM_177390.2,1518-1536).
cccttggaaacacattgat

SEQ ID NO: 489982 - DNA, 19 bp, Mus musculus
  siRNA target sequence for 9930104H07Rik (NM_177390.2,1520-1538).
cttggaaacacattgatta

SEQ ID NO: 489983 - DNA, 19 bp, Mus musculus
  siRNA target sequence for 9930104H07Rik (NM_177390.2,1600-1618).
ctggatgacgcgtgtatga

SEQ ID NO: 489984 - DNA, 19 bp, Mus musculus
  siRNA target sequence for 9930104H07Rik (NM_177390.2,1602-1620).
ggatgacgcgtgtatgaat

SEQ ID NO: 489985 - DNA, 19 bp, Mus musculus
  siRNA target sequence for 9930104H07Rik (NM_177390.2,1648-1666).
cttgaggcccttaacagta

SEQ ID NO: 489986 - DNA, 19 bp, Mus musculus
  siRNA target sequence for 9930104H07Rik (NM_177390.2,1651-1669).
gaggcccttaacagtaaat

SEQ ID NO: 489987 - DNA, 19 bp, Mus musculus
  siRNA target sequence for 9930104H07Rik (NM_177390.2,1662-1680).
cagtaaattgggcaaacat

SEQ ID NO: 489988 - DNA, 19 bp, Mus musculus
  siRNA target sequence for 9930104H07Rik (NM_177390.2,1671-1689).
gggcaaacatggtcatttt

SEQ ID NO: 489989 - DNA, 19 bp, Mus musculus
  siRNA target sequence for 9930104H07Rik (NM_177390.2,1740-1758).
ctttcgaatccgtcattat

SEQ ID NO: 489990 - DNA, 19 bp, Mus musculus
  siRNA target sequence for 9930104H07Rik (NM_177390.2,1759-1777).
gcgggtgacgtggtctatt

SEQ ID NO: 489991 - DNA, 19 bp, Mus musculus
  siRNA target sequence for 9930104H07Rik (NM_177390.2,1761-1779).
gggtgacgtggtctattct

SEQ ID NO: 489992 - DNA, 19 bp, Mus musculus
  siRNA target sequence for 9930104H07Rik (NM_177390.2,1778-1796).
ctgccatcggttttatcga

SEQ ID NO: 489993 - DNA, 19 bp, Mus musculus
  siRNA target sequence for 9930104H07Rik (NM_177390.2,1785-1803).
cggttttatcgacaaaaat

SEQ ID NO: 489994 - DNA, 19 bp, Mus musculus
  siRNA target sequence for 9930104H07Rik (NM_177390.2,1794-1812).
cgacaaaaataaagatact

SEQ ID NO: 489995 - DNA, 19 bp, Mus musculus
  siRNA target sequence for 9930104H07Rik (NM_177390.2,1822-1840).
gatttcaagcgccttatgt

SEQ ID NO: 489996 - DNA, 19 bp, Mus musculus
  siRNA target sequence for 9930104H07Rik (NM_177390.2,1839-1857).
gtataacagctcaaatcct

SEQ ID NO: 489997 - DNA, 19 bp, Mus musculus
  siRNA target sequence for 9930104H07Rik (NM_177390.2,1924-1942).
gctgccaccttgtttaaga

SEQ ID NO: 489998 - DNA, 19 bp, Mus musculus
  siRNA target sequence for 9930104H07Rik (NM_177390.2,1927-1945).
gccaccttgtttaagaatt

SEQ ID NO: 489999 - DNA, 19 bp, Mus musculus
  siRNA target sequence for 9930104H07Rik (NM_177390.2,1931-1949).
ccttgtttaagaattctat

SEQ ID NO: 490000 - DNA, 19 bp, Mus musculus
  siRNA target sequence for 9930104H07Rik (NM_177390.2,2016-2034).
caagaagtccccacagata

SEQ ID NO: 490001 - DNA, 19 bp, Mus musculus
  siRNA target sequence for 9930104H07Rik (NM_177390.2,2051-2069).
gccgccatcaggtagaata

SEQ ID NO: 490002 - DNA, 19 bp, Mus musculus
  siRNA target sequence for 9930104H07Rik (NM_177390.2,2054-2072).
gccatcaggtagaatacct

SEQ ID NO: 490003 - DNA, 19 bp, Mus musculus
  siRNA target sequence for 9930104H07Rik (NM_177390.2,2397-2415).
caaggcagctctgacaata

SEQ ID NO: 490004 - DNA, 19 bp, Mus musculus
  siRNA target sequence for 9930104H07Rik (NM_177390.2,2401-2419).
gcagctctgacaataatca

SEQ ID NO: 490005 - DNA, 19 bp, Mus musculus
  siRNA target sequence for 9930104H07Rik (NM_177390.2,2420-2438).
ggtactacaggcgctataa

SEQ ID NO: 490006 - DNA, 19 bp, Mus musculus
  siRNA target sequence for 9930104H07Rik (NM_177390.2,2421-2439).
gtactacaggcgctataaa

SEQ ID NO: 490007 - DNA, 19 bp, Mus musculus
  siRNA target sequence for 9930104H07Rik (NM_177390.2,2471-2489).
gattccacggtgtcaagaa

SEQ ID NO: 490008 - DNA, 19 bp, Mus musculus
  siRNA target sequence for 9930104H07Rik (NM_177390.2,2476-2494).
cacggtgtcaagaacatga

SEQ ID NO: 490009 - DNA, 19 bp, Mus musculus
  siRNA target sequence for 9930104H07Rik (NM_177390.2,2519-2537).
ggccaaccccaccaaaagt

SEQ ID NO: 490010 - DNA, 19 bp, Mus musculus
  siRNA target sequence for 9930104H07Rik (NM_177390.2,2554-2572).
gaggccctgcagtcgattt

SEQ ID NO: 490011 - DNA, 19 bp, Mus musculus
  siRNA target sequence for 9930104H07Rik (NM_177390.2,2557-2575).
gccctgcagtcgattttta

SEQ ID NO: 490012 - DNA, 19 bp, Mus musculus
  siRNA target sequence for 9930104H07Rik (NM_177390.2,2558-2576).
ccctgcagtcgatttttaa

SEQ ID NO: 490013 - DNA, 19 bp, Mus musculus
  siRNA target sequence for 9930104H07Rik (NM_177390.2,2559-2577).
cctgcagtcgatttttaat

SEQ ID NO: 490014 - DNA, 19 bp, Mus musculus
  siRNA target sequence for 9930104H07Rik (NM_177390.2,2560-2578).
ctgcagtcgatttttaata

SEQ ID NO: 490015 - DNA, 19 bp, Mus musculus
  siRNA target sequence for 9930104H07Rik (NM_177390.2,2583-2601).
gagcatcccaactcatcaa

SEQ ID NO: 490016 - DNA, 19 bp, Mus musculus
  siRNA target sequence for 9930104H07Rik (NM_177390.2,2626-2644).
ccaggtcagggcaaaggtt

SEQ ID NO: 490017 - DNA, 19 bp, Mus musculus
  siRNA target sequence for 9930104H07Rik (NM_177390.2,2697-2715).
cctgggaaggcaactatct

SEQ ID NO: 490018 - DNA, 19 bp, Mus musculus
  siRNA target sequence for 9930104H07Rik (NM_177390.2,2698-2716).
ctgggaaggcaactatctt

SEQ ID NO: 490019 - DNA, 19 bp, Mus musculus
  siRNA target sequence for A230065J02Rik (NM_176946.2,218-236).
cacatatgtatcaagaagt

SEQ ID NO: 490020 - DNA, 19 bp, Mus musculus
  siRNA target sequence for A230065J02Rik (NM_176946.2,220-238).
catatgtatcaagaagtaa

SEQ ID NO: 490021 - DNA, 19 bp, Mus musculus
  siRNA target sequence for A230065J02Rik (NM_176946.2,259-277).
gtggatgaagtcaagagta

SEQ ID NO: 490022 - DNA, 19 bp, Mus musculus
  siRNA target sequence for A230065J02Rik (NM_176946.2,293-311).
gtcctcatgccgacatttt

SEQ ID NO: 490023 - DNA, 19 bp, Mus musculus
  siRNA target sequence for A230065J02Rik (NM_176946.2,296-314).
ctcatgccgacattttgga

SEQ ID NO: 490024 - DNA, 19 bp, Mus musculus
  siRNA target sequence for A230065J02Rik (NM_176946.2,298-316).
catgccgacattttggata

SEQ ID NO: 490025 - DNA, 19 bp, Mus musculus
  siRNA target sequence for A230065J02Rik (NM_176946.2,301-319).
gccgacattttggatatct

SEQ ID NO: 490026 - DNA, 19 bp, Mus musculus
  siRNA target sequence for A230065J02Rik (NM_176946.2,302-320).
ccgacattttggatatctt

SEQ ID NO: 490027 - DNA, 19 bp, Mus musculus
  siRNA target sequence for A230065J02Rik (NM_176946.2,312-330).
ggatatcttgggaatccat

SEQ ID NO: 490028 - DNA, 19 bp, Mus musculus
  siRNA target sequence for A230065J02Rik (NM_176946.2,321-339).
gggaatccattccaagtat

SEQ ID NO: 490029 - DNA, 19 bp, Mus musculus
  siRNA target sequence for A230065J02Rik (NM_176946.2,359-377).
gagcaaccttttataagat

SEQ ID NO: 490030 - DNA, 19 bp, Mus musculus
  siRNA target sequence for A230065J02Rik (NM_176946.2,511-529).
gtttttatgggcacaataa

SEQ ID NO: 490031 - DNA, 19 bp, Mus musculus
  siRNA target sequence for A230065J02Rik (NM_176946.2,531-549).
ggatgaaaccagtgcaatt

SEQ ID NO: 490032 - DNA, 19 bp, Mus musculus
  siRNA target sequence for A230065J02Rik (NM_176946.2,574-592).
gtcgtatcccggttaaatt

SEQ ID NO: 490033 - DNA, 19 bp, Mus musculus
  siRNA target sequence for A230065J02Rik (NM_176946.2,576-594).
cgtatcccggttaaattct

SEQ ID NO: 490034 - DNA, 19 bp, Mus musculus
  siRNA target sequence for A230065J02Rik (NM_176946.2,583-601).
cggttaaattctctgattt

SEQ ID NO: 490035 - DNA, 19 bp, Mus musculus
  siRNA target sequence for A230065J02Rik (NM_176946.2,616-634).
cagtacctgaacttattgt

SEQ ID NO: 490036 - DNA, 19 bp, Mus musculus
  siRNA target sequence for A230065J02Rik (NM_176946.2,618-636).
gtacctgaacttattgtct

SEQ ID NO: 490037 - DNA, 19 bp, Mus musculus
  siRNA target sequence for A230065J02Rik (NM_176946.2,638-656).
catcggtaactgctgatat

SEQ ID NO: 490038 - DNA, 19 bp, Mus musculus
  siRNA target sequence for A230065J02Rik (NM_176946.2,649-667).
gctgatattgaagatttct

SEQ ID NO: 490039 - DNA, 19 bp, Mus musculus
  siRNA target sequence for A230065J02Rik (NM_176946.2,713-731).
caaagcacatgcattacgt

SEQ ID NO: 490040 - DNA, 19 bp, Mus musculus
  siRNA target sequence for A230065J02Rik (NM_176946.2,720-738).
catgcattacgtaactcaa

SEQ ID NO: 490041 - DNA, 19 bp, Mus musculus
  siRNA target sequence for A230065J02Rik (NM_176946.2,834-852).
ggaaacaagttttcatagt

SEQ ID NO: 490042 - DNA, 19 bp, Mus musculus
  siRNA target sequence for A230065J02Rik (NM_176946.2,875-893).
ccacatcaaagataaatga

SEQ ID NO: 490043 - DNA, 19 bp, Mus musculus
  siRNA target sequence for A230065J02Rik (NM_176946.2,897-915).
gagcacagtcatttctaga

SEQ ID NO: 490044 - DNA, 19 bp, Mus musculus
  siRNA target sequence for A230065J02Rik (NM_176946.2,925-943).
gcagctttccttacacata

SEQ ID NO: 490045 - DNA, 19 bp, Mus musculus
  siRNA target sequence for A230065J02Rik (NM_176946.2,1013-1031).
gggataaagttcaaacatt

SEQ ID NO: 490046 - DNA, 19 bp, Mus musculus
  siRNA target sequence for A230065J02Rik (NM_176946.2,1037-1055).
ctgtggagatggataagaa

SEQ ID NO: 490047 - DNA, 19 bp, Mus musculus
  siRNA target sequence for A230065J02Rik (NM_176946.2,1079-1097).
ccgttggagtaaatatttt

SEQ ID NO: 490048 - DNA, 19 bp, Mus musculus
  siRNA target sequence for A230065J02Rik (NM_176946.2,1099-1117).
cggactcaccagttattct

SEQ ID NO: 490049 - DNA, 19 bp, Mus musculus
  siRNA target sequence for A230065J02Rik (NM_176946.2,1142-1160).
ctggcgagcctgggattat

SEQ ID NO: 490050 - DNA, 19 bp, Mus musculus
  siRNA target sequence for A230065J02Rik (NM_176946.2,1144-1162).
ggcgagcctgggattatca

SEQ ID NO: 490051 - DNA, 19 bp, Mus musculus
  siRNA target sequence for A230065J02Rik (NM_176946.2,1241-1259).
gtaattcactacagaacat

SEQ ID NO: 490052 - DNA, 19 bp, Mus musculus
  siRNA target sequence for A330064G03Rik (NM_177214.3,113-131).
gtttgcagtacgagtacaa

SEQ ID NO: 490053 - DNA, 19 bp, Mus musculus
  siRNA target sequence for A330064G03Rik (NM_177214.3,129-147).
caaggcgaactcaaatctt

SEQ ID NO: 490054 - DNA, 19 bp, Mus musculus
  siRNA target sequence for A330064G03Rik (NM_177214.3,236-254).
gaacccgaatgggagataa

SEQ ID NO: 490055 - DNA, 19 bp, Mus musculus
  siRNA target sequence for A330064G03Rik (NM_177214.3,322-340).
cggcatgacatgaacaaga

SEQ ID NO: 490056 - DNA, 19 bp, Mus musculus
  siRNA target sequence for A330064G03Rik (NM_177214.3,325-343).
catgacatgaacaagatga

SEQ ID NO: 490057 - DNA, 19 bp, Mus musculus
  siRNA target sequence for A330064G03Rik (NM_177214.3,464-482).
gagatcagcctcgagatat

SEQ ID NO: 490058 - DNA, 19 bp, Mus musculus
  siRNA target sequence for A330064G03Rik (NM_177214.3,471-489).
gcctcgagatattctttgt

SEQ ID NO: 490059 - DNA, 19 bp, Mus musculus
  siRNA target sequence for A330064G03Rik (NM_177214.3,638-656).
gtggcgacaaggagataca

SEQ ID NO: 490060 - DNA, 19 bp, Mus musculus
  siRNA target sequence for A330064G03Rik (NM_177214.3,640-658).
ggcgacaaggagatacaga

SEQ ID NO: 490061 - DNA, 19 bp, Mus musculus
  siRNA target sequence for A330064G03Rik (NM_177214.3,641-659).
gcgacaaggagatacagaa

SEQ ID NO: 490062 - DNA, 19 bp, Mus musculus
  siRNA target sequence for A330064G03Rik (NM_177214.3,672-690).
cattgatgagacttatggt

SEQ ID NO: 490063 - DNA, 19 bp, Mus musculus
  siRNA target sequence for A330064G03Rik (NM_177214.3,689-707).
gtgtgaacgtgcagtttga

SEQ ID NO: 490064 - DNA, 19 bp, Mus musculus
  siRNA target sequence for A330064G03Rik (NM_177214.3,691-709).
gtgaacgtgcagtttgagt

SEQ ID NO: 490065 - DNA, 19 bp, Mus musculus
  siRNA target sequence for A330064G03Rik (NM_177214.3,803-821).
gcaccctctctgctaatct

SEQ ID NO: 490066 - DNA, 19 bp, Mus musculus
  siRNA target sequence for A330064G03Rik (NM_177214.3,804-822).
caccctctctgctaatctt

SEQ ID NO: 490067 - DNA, 19 bp, Mus musculus
  siRNA target sequence for A330064G03Rik (NM_177214.3,806-824).
ccctctctgctaatcttgt

SEQ ID NO: 490068 - DNA, 19 bp, Mus musculus
  siRNA target sequence for A330064G03Rik (NM_177214.3,807-825).
cctctctgctaatcttgta

SEQ ID NO: 490069 - DNA, 19 bp, Mus musculus
  siRNA target sequence for A330064G03Rik (NM_177214.3,833-851).
gcgaactgatgagttctaa

SEQ ID NO: 490070 - DNA, 19 bp, Mus musculus
  siRNA target sequence for A330064G03Rik (NM_177214.3,864-882).
gcaccctcgggatatcgat

SEQ ID NO: 490071 - DNA, 19 bp, Mus musculus
  siRNA target sequence for A330064G03Rik (NM_177214.3,906-924).
cagtcgtttctatgatgat

SEQ ID NO: 490072 - DNA, 19 bp, Mus musculus
  siRNA target sequence for A330064G03Rik (NM_177214.3,995-1013).
gtgagaaccaactggtttt

SEQ ID NO: 490073 - DNA, 19 bp, Mus musculus
  siRNA target sequence for A330064G03Rik (NM_177214.3,1031-1049).
cgtttgacttcattaaagt

SEQ ID NO: 490074 - DNA, 19 bp, Mus musculus
  siRNA target sequence for A330064G03Rik (NM_177214.3,1304-1322).
caaggcaggttctggattt

SEQ ID NO: 490075 - DNA, 19 bp, Mus musculus
  siRNA target sequence for A330064G03Rik (NM_177214.3,1349-1367).
gccacttcatggccaataa

SEQ ID NO: 490076 - DNA, 19 bp, Mus musculus
  siRNA target sequence for A330064G03Rik (NM_177214.3,1401-1419).
ccagcgtaaaggctatgaa

SEQ ID NO: 490077 - DNA, 19 bp, Mus musculus
  siRNA target sequence for A330064G03Rik (NM_177214.3,1497-1515).
gtatgcccaggcaggattt

SEQ ID NO: 490078 - DNA, 19 bp, Mus musculus
  siRNA target sequence for A330064G03Rik (NM_177214.3,1635-1653).
gtgtatgctccgagagata

SEQ ID NO: 490079 - DNA, 19 bp, Mus musculus
  siRNA target sequence for A330064G03Rik (NM_177214.3,1668-1686).
catggacggcacaatcaat

SEQ ID NO: 490080 - DNA, 19 bp, Mus musculus
  siRNA target sequence for A330064G03Rik (NM_177214.3,1802-1820).
gggatcaccagctatgcaa

SEQ ID NO: 490081 - DNA, 19 bp, Mus musculus
  siRNA target sequence for A330064G03Rik (NM_177214.3,1938-1956).
gatccatcttctacatgat

SEQ ID NO: 490082 - DNA, 19 bp, Mus musculus
  siRNA target sequence for A330064G03Rik (NM_177214.3,1988-2006).
ccagggccatccgaaacat

SEQ ID NO: 490083 - DNA, 19 bp, Mus musculus
  siRNA target sequence for A330064G03Rik (NM_177214.3,2096-2114).
ctgctaagggcctcttcta

SEQ ID NO: 490084 - DNA, 19 bp, Mus musculus
  siRNA target sequence for A330064G03Rik (NM_177214.3,2098-2116).
gctaagggcctcttctact

SEQ ID NO: 490085 - DNA, 19 bp, Mus musculus
  siRNA target sequence for A330064G03Rik (NM_177214.3,2139-2157).
gcctctggaacaaacatat

SEQ ID NO: 490086 - DNA, 19 bp, Mus musculus
  siRNA target sequence for A330064G03Rik (NM_177214.3,2189-2207).
gtttccagatcatgaatga

SEQ ID NO: 490087 - DNA, 19 bp, Mus musculus
  siRNA target sequence for A330064G03Rik (NM_177214.3,2263-2281).
gtccattctcgaaaagaaa

SEQ ID NO: 490088 - DNA, 19 bp, Mus musculus
  siRNA target sequence for A330064G03Rik (NM_177214.3,2265-2283).
ccattctcgaaaagaaact

SEQ ID NO: 490089 - DNA, 19 bp, Mus musculus
  siRNA target sequence for A330064G03Rik (NM_177214.3,2386-2404).
gcagagcagtgcaagaact

SEQ ID NO: 490090 - DNA, 19 bp, Mus musculus
  siRNA target sequence for A330064G03Rik (NM_177214.3,2387-2405).
cagagcagtgcaagaactt

SEQ ID NO: 490091 - DNA, 19 bp, Mus musculus
  siRNA target sequence for A330064G03Rik (NM_177214.3,2469-2487).
ccgaacacttgtagaagat

SEQ ID NO: 490092 - DNA, 19 bp, Mus musculus
  siRNA target sequence for A330064G03Rik (NM_177214.3,2535-2553).
ggcgtggggtgtaaatctt

SEQ ID NO: 490093 - DNA, 19 bp, Mus musculus
  siRNA target sequence for A330064G03Rik (NM_177214.3,2558-2576).
cacatacagtcatcattaa

SEQ ID NO: 490094 - DNA, 19 bp, Mus musculus
  siRNA target sequence for A330064G03Rik (NM_177214.3,2787-2805).
catgctcaatgcggaaatt

SEQ ID NO: 490095 - DNA, 19 bp, Mus musculus
  siRNA target sequence for A330064G03Rik (NM_177214.3,2848-2866).
ctgggctatgcctacctat

SEQ ID NO: 490096 - DNA, 19 bp, Mus musculus
  siRNA target sequence for A330064G03Rik (NM_177214.3,2851-2869).
ggctatgcctacctataca

SEQ ID NO: 490097 - DNA, 19 bp, Mus musculus
  siRNA target sequence for A330064G03Rik (NM_177214.3,2852-2870).
gctatgcctacctatacat

SEQ ID NO: 490098 - DNA, 19 bp, Mus musculus
  siRNA target sequence for A330064G03Rik (NM_177214.3,2892-2910).
cctctatggcatttctcat

SEQ ID NO: 490099 - DNA, 19 bp, Mus musculus
  siRNA target sequence for A330064G03Rik (NM_177214.3,2895-2913).
ctatggcatttctcatgat

SEQ ID NO: 490100 - DNA, 19 bp, Mus musculus
  siRNA target sequence for A330064G03Rik (NM_177214.3,2943-2961).
gcgccgactcgatcttgtt

SEQ ID NO: 490101 - DNA, 19 bp, Mus musculus
  siRNA target sequence for A330064G03Rik (NM_177214.3,3037-3055).
gaacttggccggatagcaa

SEQ ID NO: 490102 - DNA, 19 bp, Mus musculus
  siRNA target sequence for A330064G03Rik (NM_177214.3,3047-3065).
ggatagcaagtcactacta

SEQ ID NO: 490103 - DNA, 19 bp, Mus musculus
  siRNA target sequence for A330064G03Rik (NM_177214.3,3052-3070).
gcaagtcactactatatca

SEQ ID NO: 490104 - DNA, 19 bp, Mus musculus
  siRNA target sequence for A330064G03Rik (NM_177214.3,3060-3078).
ctactatatcaccaatgat

SEQ ID NO: 490105 - DNA, 19 bp, Mus musculus
  siRNA target sequence for A330064G03Rik (NM_177214.3,3108-3126).
gcctactctgagtgagatt

SEQ ID NO: 490106 - DNA, 19 bp, Mus musculus
  siRNA target sequence for A330064G03Rik (NM_177214.3,3110-3128).
ctactctgagtgagattga

SEQ ID NO: 490107 - DNA, 19 bp, Mus musculus
  siRNA target sequence for A330064G03Rik (NM_177214.3,3218-3236).
gagtgcccatccctgtaaa

SEQ ID NO: 490108 - DNA, 19 bp, Mus musculus
  siRNA target sequence for A330064G03Rik (NM_177214.3,3250-3268).
gaacccagcgctaagatca

SEQ ID NO: 490109 - DNA, 19 bp, Mus musculus
  siRNA target sequence for A330064G03Rik (NM_177214.3,3359-3377).
ggttgatgcgtgcaatctt

SEQ ID NO: 490110 - DNA, 19 bp, Mus musculus
  siRNA target sequence for A330064G03Rik (NM_177214.3,3366-3384).
gcgtgcaatcttcgaaatt

SEQ ID NO: 490111 - DNA, 19 bp, Mus musculus
  siRNA target sequence for A330064G03Rik (NM_177214.3,3368-3386).
gtgcaatcttcgaaattgt

SEQ ID NO: 490112 - DNA, 19 bp, Mus musculus
  siRNA target sequence for A330064G03Rik (NM_177214.3,3398-3416).
gttgggcacagcttacaga

SEQ ID NO: 490113 - DNA, 19 bp, Mus musculus
  siRNA target sequence for A330064G03Rik (NM_177214.3,3401-3419).
gggcacagcttacagataa

SEQ ID NO: 490114 - DNA, 19 bp, Mus musculus
  siRNA target sequence for A330064G03Rik (NM_177214.3,3403-3421).
gcacagcttacagataaga

SEQ ID NO: 490115 - DNA, 19 bp, Mus musculus
  siRNA target sequence for A330064G03Rik (NM_177214.3,3426-3444).
gaatctctgcaagatgatt

SEQ ID NO: 490116 - DNA, 19 bp, Mus musculus
  siRNA target sequence for A330064G03Rik (NM_177214.3,3543-3561).
gcggctgtatgacttgaat

SEQ ID NO: 490117 - DNA, 19 bp, Mus musculus
  siRNA target sequence for A330064G03Rik (NM_177214.3,3545-3563).
ggctgtatgacttgaatca

SEQ ID NO: 490118 - DNA, 19 bp, Mus musculus
  siRNA target sequence for A330064G03Rik (NM_177214.3,3555-3573).
cttgaatcataatgagata

SEQ ID NO: 490119 - DNA, 19 bp, Mus musculus
  siRNA target sequence for A330064G03Rik (NM_177214.3,3570-3588).
gataggtgaacttattcga

SEQ ID NO: 490120 - DNA, 19 bp, Mus musculus
  siRNA target sequence for A330064G03Rik (NM_177214.3,3603-3621).
gaagaccatccacaagtat

SEQ ID NO: 490121 - DNA, 19 bp, Mus musculus
  siRNA target sequence for A330064G03Rik (NM_177214.3,3652-3670).
gtgcacctgcagcctatta

SEQ ID NO: 490122 - DNA, 19 bp, Mus musculus
  siRNA target sequence for A330064G03Rik (NM_177214.3,3654-3672).
gcacctgcagcctattaca

SEQ ID NO: 490123 - DNA, 19 bp, Mus musculus
  siRNA target sequence for A330064G03Rik (NM_177214.3,3671-3689).
cacgctctacgctgaaagt

SEQ ID NO: 490124 - DNA, 19 bp, Mus musculus
  siRNA target sequence for A330064G03Rik (NM_177214.3,3736-3754).
ggttcgtcagaggcatttt

SEQ ID NO: 490125 - DNA, 19 bp, Mus musculus
  siRNA target sequence for A330064G03Rik (NM_177214.3,3740-3758).
cgtcagaggcattttggat

SEQ ID NO: 490126 - DNA, 19 bp, Mus musculus
  siRNA target sequence for A330064G03Rik (NM_177214.3,3786-3804).
gattctgcaccatgaatat

SEQ ID NO: 490127 - DNA, 19 bp, Mus musculus
  siRNA target sequence for A330064G03Rik (NM_177214.3,3837-3855).
gcacctcatcacgttcttt

SEQ ID NO: 490128 - DNA, 19 bp, Mus musculus
  siRNA target sequence for A330064G03Rik (NM_177214.3,3977-3995).
cacctccaaccgaactgtt

SEQ ID NO: 490129 - DNA, 19 bp, Mus musculus
  siRNA target sequence for A330064G03Rik (NM_177214.3,4037-4055).
cttttgagagcctttacca

SEQ ID NO: 490130 - DNA, 19 bp, Mus musculus
  siRNA target sequence for A330064G03Rik (NM_177214.3,4042-4060).
gagagcctttaccaagata

SEQ ID NO: 490131 - DNA, 19 bp, Mus musculus
  siRNA target sequence for A330064G03Rik (NM_177214.3,4044-4062).
gagcctttaccaagataaa

SEQ ID NO: 490132 - DNA, 19 bp, Mus musculus
  siRNA target sequence for A330064G03Rik (NM_177214.3,4057-4075).
gataaatttcctttcttca

SEQ ID NO: 490133 - DNA, 19 bp, Mus musculus
  siRNA target sequence for A330064G03Rik (NM_177214.3,4078-4096).
cccatccagactcaagtat

SEQ ID NO: 490134 - DNA, 19 bp, Mus musculus
  siRNA target sequence for A330064G03Rik (NM_177214.3,4079-4097).
ccatccagactcaagtatt

SEQ ID NO: 490135 - DNA, 19 bp, Mus musculus
  siRNA target sequence for A330064G03Rik (NM_177214.3,4080-4098).
catccagactcaagtattt

SEQ ID NO: 490136 - DNA, 19 bp, Mus musculus
  siRNA target sequence for A330064G03Rik (NM_177214.3,4083-4101).
ccagactcaagtatttaat

SEQ ID NO: 490137 - DNA, 19 bp, Mus musculus
  siRNA target sequence for A330064G03Rik (NM_177214.3,4084-4102).
cagactcaagtatttaata

SEQ ID NO: 490138 - DNA, 19 bp, Mus musculus
  siRNA target sequence for A330064G03Rik (NM_177214.3,4145-4163).
cgggcagcgggaagactat

SEQ ID NO: 490139 - DNA, 19 bp, Mus musculus
  siRNA target sequence for A330064G03Rik (NM_177214.3,4147-4165).
ggcagcgggaagactatct

SEQ ID NO: 490140 - DNA, 19 bp, Mus musculus
  siRNA target sequence for A330064G03Rik (NM_177214.3,4186-4204).
cggatgctgctgcagaatt

SEQ ID NO: 490141 - DNA, 19 bp, Mus musculus
  siRNA target sequence for A330064G03Rik (NM_177214.3,4209-4227).
gggacgctgtgtctacatt

SEQ ID NO: 490142 - DNA, 19 bp, Mus musculus
  siRNA target sequence for A330064G03Rik (NM_177214.3,4210-4228).
ggacgctgtgtctacatta

SEQ ID NO: 490143 - DNA, 19 bp, Mus musculus
  siRNA target sequence for A330064G03Rik (NM_177214.3,4241-4259).
ctctggcagagcaggtata

SEQ ID NO: 490144 - DNA, 19 bp, Mus musculus
  siRNA target sequence for A330064G03Rik (NM_177214.3,4732-4750).
catgctatcaccaaacact

SEQ ID NO: 490145 - DNA, 19 bp, Mus musculus
  siRNA target sequence for A330064G03Rik (NM_177214.3,4758-4776).
gaagcctgtcatcgttttt

SEQ ID NO: 490146 - DNA, 19 bp, Mus musculus
  siRNA target sequence for A330064G03Rik (NM_177214.3,4794-4812).
gacccgcctcactgcaata

SEQ ID NO: 490147 - DNA, 19 bp, Mus musculus
  siRNA target sequence for A330064G03Rik (NM_177214.3,4796-4814).
cccgcctcactgcaataga

SEQ ID NO: 490148 - DNA, 19 bp, Mus musculus
  siRNA target sequence for A330064G03Rik (NM_177214.3,4798-4816).
cgcctcactgcaatagaca

SEQ ID NO: 490149 - DNA, 19 bp, Mus musculus
  siRNA target sequence for A330064G03Rik (NM_177214.3,5060-5078).
ctgctcatctagtgatcat

SEQ ID NO: 490150 - DNA, 19 bp, Mus musculus
  siRNA target sequence for A330064G03Rik (NM_177214.3,5063-5081).
ctcatctagtgatcatcat

SEQ ID NO: 490151 - DNA, 19 bp, Mus musculus
  siRNA target sequence for A330064G03Rik (NM_177214.3,5202-5220).
catgtgtcagggctctaaa

SEQ ID NO: 490152 - DNA, 19 bp, Mus musculus
  siRNA target sequence for A330064G03Rik (NM_177214.3,5271-5289).
cctggaccactgtatgcat

SEQ ID NO: 490153 - DNA, 19 bp, Mus musculus
  siRNA target sequence for A330064G03Rik (NM_177214.3,5282-5300).
gtatgcatgaccacttcaa

SEQ ID NO: 490154 - DNA, 19 bp, Mus musculus
  siRNA target sequence for A330064G03Rik (NM_177214.3,5384-5402).
cacagaaccccaattacta

SEQ ID NO: 490155 - DNA, 19 bp, Mus musculus
  siRNA target sequence for A330064G03Rik (NM_177214.3,5482-5500).
cagtccaaatgcatcagta

SEQ ID NO: 490156 - DNA, 19 bp, Mus musculus
  siRNA target sequence for A330064G03Rik (NM_177214.3,5486-5504).
ccaaatgcatcagtattga

SEQ ID NO: 490157 - DNA, 19 bp, Mus musculus
  siRNA target sequence for A330064G03Rik (NM_177214.3,5546-5564).
ctgcctactattacataaa

SEQ ID NO: 490158 - DNA, 19 bp, Mus musculus
  siRNA target sequence for A330064G03Rik (NM_177214.3,5614-5632).
gttcgaggacttattgaga

SEQ ID NO: 490159 - DNA, 19 bp, Mus musculus
  siRNA target sequence for A330064G03Rik (NM_177214.3,5620-5638).
ggacttattgagatcattt

SEQ ID NO: 490160 - DNA, 19 bp, Mus musculus
  siRNA target sequence for A330064G03Rik (NM_177214.3,5650-5668).
gagtatgagaacattccaa

SEQ ID NO: 490161 - DNA, 19 bp, Mus musculus
  siRNA target sequence for A330064G03Rik (NM_177214.3,5713-5731).
gtcccccacaagctgaata

SEQ ID NO: 490162 - DNA, 19 bp, Mus musculus
  siRNA target sequence for A330064G03Rik (NM_177214.3,5725-5743).
ctgaataaccccaagttca

SEQ ID NO: 490163 - DNA, 19 bp, Mus musculus
  siRNA target sequence for A330064G03Rik (NM_177214.3,5796-5814).
gcagctaagtgctgaacta

SEQ ID NO: 490164 - DNA, 19 bp, Mus musculus
  siRNA target sequence for A330064G03Rik (NM_177214.3,6025-6043).
gtggagagtgtttttgaca

SEQ ID NO: 490165 - DNA, 19 bp, Mus musculus
  siRNA target sequence for A330064G03Rik (NM_177214.3,6058-6076).
gatgaagaacggaatgcat

SEQ ID NO: 490166 - DNA, 19 bp, Mus musculus
  siRNA target sequence for A330064G03Rik (NM_177214.3,6122-6140).
gtaaccgctacccgaatat

SEQ ID NO: 490167 - DNA, 19 bp, Mus musculus
  siRNA target sequence for A330064G03Rik (NM_177214.3,6126-6144).
ccgctacccgaatattgaa

SEQ ID NO: 490168 - DNA, 19 bp, Mus musculus
  siRNA target sequence for A330064G03Rik (NM_177214.3,6128-6146).
gctacccgaatattgaact

SEQ ID NO: 490169 - DNA, 19 bp, Mus musculus
  siRNA target sequence for A330064G03Rik (NM_177214.3,6433-6451).
ggctgtgaccaggagtata

SEQ ID NO: 490170 - DNA, 19 bp, Mus musculus
  siRNA target sequence for A330064G03Rik (NM_177214.3,6437-6455).
gtgaccaggagtataagtt

SEQ ID NO: 490171 - DNA, 19 bp, Mus musculus
  siRNA target sequence for A330064G03Rik (NM_177214.3,6439-6457).
gaccaggagtataagttca

SEQ ID NO: 490172 - DNA, 19 bp, Mus musculus
  siRNA target sequence for A330090H18 (NM_177671.2,143-161).
cgggaccgccgaagaagtt

SEQ ID NO: 490173 - DNA, 19 bp, Mus musculus
  siRNA target sequence for A330090H18 (NM_177671.2,144-162).
gggaccgccgaagaagtta

SEQ ID NO: 490174 - DNA, 19 bp, Mus musculus
  siRNA target sequence for A330090H18 (NM_177671.2,145-163).
ggaccgccgaagaagttat

SEQ ID NO: 490175 - DNA, 19 bp, Mus musculus
  siRNA target sequence for A330090H18 (NM_177671.2,148-166).
ccgccgaagaagttatcct

SEQ ID NO: 490176 - DNA, 19 bp, Mus musculus
  siRNA target sequence for A330090H18 (NM_177671.2,380-398).
gcgcgactgcagtagcata

SEQ ID NO: 490177 - DNA, 19 bp, Mus musculus
  siRNA target sequence for A330090H18 (NM_177671.2,491-509).
caaccgaccccgcaagatt

SEQ ID NO: 490178 - DNA, 19 bp, Mus musculus
  siRNA target sequence for A330090H18 (NM_177671.2,495-513).
cgaccccgcaagattgaca

SEQ ID NO: 490179 - DNA, 19 bp, Mus musculus
  siRNA target sequence for A430065P19Rik (NM_177376.2,62-80).
ggtcggacagcctcacttt

SEQ ID NO: 490180 - DNA, 19 bp, Mus musculus
  siRNA target sequence for A430065P19Rik (NM_177376.2,63-81).
gtcggacagcctcacttta

SEQ ID NO: 490181 - DNA, 19 bp, Mus musculus
  siRNA target sequence for A430065P19Rik (NM_177376.2,65-83).
cggacagcctcactttatt

SEQ ID NO: 490182 - DNA, 19 bp, Mus musculus
  siRNA target sequence for A430065P19Rik (NM_177376.2,69-87).
cagcctcactttattcgtt

SEQ ID NO: 490183 - DNA, 19 bp, Mus musculus
  siRNA target sequence for A430065P19Rik (NM_177376.2,75-93).
cactttattcgttgcatta

SEQ ID NO: 490184 - DNA, 19 bp, Mus musculus
  siRNA target sequence for A430065P19Rik (NM_177376.2,200-218).
ctcccatcgcatcttcttt

SEQ ID NO: 490185 - DNA, 19 bp, Mus musculus
  siRNA target sequence for A430065P19Rik (NM_177376.2,248-266).
ggcattccgagcacatcaa

SEQ ID NO: 490186 - DNA, 19 bp, Mus musculus
  siRNA target sequence for A430065P19Rik (NM_177376.2,249-267).
gcattccgagcacatcaaa

SEQ ID NO: 490187 - DNA, 19 bp, Mus musculus
  siRNA target sequence for A430065P19Rik (NM_177376.2,343-361).
caaaggttttcctcaaata

SEQ ID NO: 490188 - DNA, 19 bp, Mus musculus
  siRNA target sequence for A430065P19Rik (NM_177376.2,365-383).
ccatgtcgagcaattaaat

SEQ ID NO: 490189 - DNA, 19 bp, Mus musculus
  siRNA target sequence for A430065P19Rik (NM_177376.2,366-384).
catgtcgagcaattaaatt

SEQ ID NO: 490190 - DNA, 19 bp, Mus musculus
  siRNA target sequence for A430065P19Rik (NM_177376.2,371-389).
cgagcaattaaatttgctt

SEQ ID NO: 490191 - DNA, 19 bp, Mus musculus
  siRNA target sequence for A430065P19Rik (NM_177376.2,447-465).
ggagcaaggagatacaaga

SEQ ID NO: 490192 - DNA, 19 bp, Mus musculus
  siRNA target sequence for A430065P19Rik (NM_177376.2,641-659).
gtccaacagaggtcatgaa

SEQ ID NO: 490193 - DNA, 19 bp, Mus musculus
  siRNA target sequence for A430065P19Rik (NM_177376.2,928-946).
ggtgtcagcagcccaaaat

SEQ ID NO: 490194 - DNA, 19 bp, Mus musculus
  siRNA target sequence for A430065P19Rik (NM_177376.2,958-976).
ccgaggacaccatgtacta

SEQ ID NO: 490195 - DNA, 19 bp, Mus musculus
  siRNA target sequence for A430065P19Rik (NM_177376.2,959-977).
cgaggacaccatgtactat

SEQ ID NO: 490196 - DNA, 19 bp, Mus musculus
  siRNA target sequence for A430065P19Rik (NM_177376.2,960-978).
gaggacaccatgtactata

SEQ ID NO: 490197 - DNA, 19 bp, Mus musculus
  siRNA target sequence for A430065P19Rik (NM_177376.2,971-989).
gtactataaccagttaaat

SEQ ID NO: 490198 - DNA, 19 bp, Mus musculus
  siRNA target sequence for A430065P19Rik (NM_177376.2,983-1001).
gttaaatggaactctagaa

SEQ ID NO: 490199 - DNA, 19 bp, Mus musculus
  siRNA target sequence for A430065P19Rik (NM_177376.2,1024-1042).
caagaaaacttggacaaat

SEQ ID NO: 490200 - DNA, 19 bp, Mus musculus
  siRNA target sequence for A430065P19Rik (NM_177376.2,1057-1075).
gggaggaccagtattacaa

SEQ ID NO: 490201 - DNA, 19 bp, Mus musculus
  siRNA target sequence for A430065P19Rik (NM_177376.2,1058-1076).
ggaggaccagtattacaaa

SEQ ID NO: 490202 - DNA, 19 bp, Mus musculus
  siRNA target sequence for A430065P19Rik (NM_177376.2,1059-1077).
gaggaccagtattacaaat

SEQ ID NO: 490203 - DNA, 19 bp, Mus musculus
  siRNA target sequence for A530046H20Rik (NM_172310.1,371-389).
gtgaagcaaccgaatttta

SEQ ID NO: 490204 - DNA, 19 bp, Mus musculus
  siRNA target sequence for A530046H20Rik (NM_172310.1,373-391).
gaagcaaccgaattttata

SEQ ID NO: 490205 - DNA, 19 bp, Mus musculus
  siRNA target sequence for A530046H20Rik (NM_172310.1,424-442).
gacagatcatcaactgtta

SEQ ID NO: 490206 - DNA, 19 bp, Mus musculus
  siRNA target sequence for A530046H20Rik (NM_172310.1,468-486).
caaacaacgtgatttcagt

SEQ ID NO: 490207 - DNA, 19 bp, Mus musculus
  siRNA target sequence for A530046H20Rik (NM_172310.1,523-541).
gtggaaaacaacaccttat

SEQ ID NO: 490208 - DNA, 19 bp, Mus musculus
  siRNA target sequence for A530046H20Rik (NM_172310.1,526-544).
gaaaacaacaccttatcaa

SEQ ID NO: 490209 - DNA, 19 bp, Mus musculus
  siRNA target sequence for A530046H20Rik (NM_172310.1,545-563).
gtggccgctggaattagta

SEQ ID NO: 490210 - DNA, 19 bp, Mus musculus
  siRNA target sequence for A530046H20Rik (NM_172310.1,571-589).
ggctgaacatacagtgatt

SEQ ID NO: 490211 - DNA, 19 bp, Mus musculus
  siRNA target sequence for A530046H20Rik (NM_172310.1,591-609).
ccaaagtgaacggtgtatt

SEQ ID NO: 490212 - DNA, 19 bp, Mus musculus
  siRNA target sequence for A530046H20Rik (NM_172310.1,716-734).
ggggaggccatggaacttt

SEQ ID NO: 490213 - DNA, 19 bp, Mus musculus
  siRNA target sequence for A530046H20Rik (NM_172310.1,721-739).
ggccatggaactttactat

SEQ ID NO: 490214 - DNA, 19 bp, Mus musculus
  siRNA target sequence for A530046H20Rik (NM_172310.1,829-847).
gtctgccctggagaacata

SEQ ID NO: 490215 - DNA, 19 bp, Mus musculus
  siRNA target sequence for A530046H20Rik (NM_172310.1,902-920).
gacactctcctggaaatgt

SEQ ID NO: 490216 - DNA, 19 bp, Mus musculus
  siRNA target sequence for A530046H20Rik (NM_172310.1,969-987).
ctccgacgaccactgttta

SEQ ID NO: 490217 - DNA, 19 bp, Mus musculus
  siRNA target sequence for A530046H20Rik (NM_172310.1,971-989).
ccgacgaccactgtttaca

SEQ ID NO: 490218 - DNA, 19 bp, Mus musculus
  siRNA target sequence for A530046H20Rik (NM_172310.1,988-1006).
caggtgtggtccattgatt

SEQ ID NO: 490219 - DNA, 19 bp, Mus musculus
  siRNA target sequence for A530046H20Rik (NM_172310.1,998-1016).
ccattgattgacctttgta

SEQ ID NO: 490220 - DNA, 19 bp, Mus musculus
  siRNA target sequence for A530046H20Rik (NM_172310.1,1066-1084).
caagaactcctcaacatat

SEQ ID NO: 490221 - DNA, 19 bp, Mus musculus
  siRNA target sequence for A530046H20Rik (NM_172310.1,1118-1136).
cggatctatgggatatcct

SEQ ID NO: 490222 - DNA, 19 bp, Mus musculus
  siRNA target sequence for A530046H20Rik (NM_172310.1,1119-1137).
ggatctatgggatatcctt

SEQ ID NO: 490223 - DNA, 19 bp, Mus musculus
  siRNA target sequence for A530046H20Rik (NM_172310.1,1270-1288).
cccgagaggagcgttcatt

SEQ ID NO: 490224 - DNA, 19 bp, Mus musculus
  siRNA target sequence for A530046H20Rik (NM_172310.1,1271-1289).
ccgagaggagcgttcattt

SEQ ID NO: 490225 - DNA, 19 bp, Mus musculus
  siRNA target sequence for A530046H20Rik (NM_172310.1,1272-1290).
cgagaggagcgttcattta

SEQ ID NO: 490226 - DNA, 19 bp, Mus musculus
  siRNA target sequence for A530046H20Rik (NM_172310.1,1346-1364).
gtgctctctcccaacatgt

SEQ ID NO: 490227 - DNA, 19 bp, Mus musculus
  siRNA target sequence for A530046H20Rik (NM_172310.1,1357-1375).
caacatgtacaacagtaaa

SEQ ID NO: 490228 - DNA, 19 bp, Mus musculus
  siRNA target sequence for A530046H20Rik (NM_172310.1,1403-1421).
cattacagtaacaacatgt

SEQ ID NO: 490229 - DNA, 19 bp, Mus musculus
  siRNA target sequence for A530046H20Rik (NM_172310.1,1470-1488).
gtccagggcactgtttaat

SEQ ID NO: 490230 - DNA, 19 bp, Mus musculus
  siRNA target sequence for A530046H20Rik (NM_172310.1,1473-1491).
cagggcactgtttaatgtt

SEQ ID NO: 490231 - DNA, 19 bp, Mus musculus
  siRNA target sequence for A530046H20Rik (NM_172310.1,1513-1531).
gagggaaatgcctgttaga

SEQ ID NO: 490232 - DNA, 19 bp, Mus musculus
  siRNA target sequence for A530046H20Rik (NM_172310.1,1515-1533).
gggaaatgcctgttagatt

SEQ ID NO: 490233 - DNA, 19 bp, Mus musculus
  siRNA target sequence for A530046H20Rik (NM_172310.1,1524-1542).
ctgttagatttgctgattt

SEQ ID NO: 490234 - DNA, 19 bp, Mus musculus
  siRNA target sequence for A530046H20Rik (NM_172310.1,1663-1681).
ggggtgcttgcacttttta

SEQ ID NO: 490235 - DNA, 19 bp, Mus musculus
  siRNA target sequence for A530046H20Rik (NM_172310.1,1748-1766).
ctaggagagattgagatat

SEQ ID NO: 490236 - DNA, 19 bp, Mus musculus
  siRNA target sequence for A530046H20Rik (NM_172310.1,1792-1810).
gaacagcttggtggaattt

SEQ ID NO: 490237 - DNA, 19 bp, Mus musculus
  siRNA target sequence for A530046H20Rik (NM_172310.1,1801-1819).
ggtggaatttggaaaacca

SEQ ID NO: 490238 - DNA, 19 bp, Mus musculus
  siRNA target sequence for A530046H20Rik (NM_172310.1,1849-1867).
ctatggccctaaaatcgat

SEQ ID NO: 490239 - DNA, 19 bp, Mus musculus
  siRNA target sequence for A530046H20Rik (NM_172310.1,1853-1871).
ggccctaaaatcgatataa

SEQ ID NO: 490240 - DNA, 19 bp, Mus musculus
  siRNA target sequence for A530046H20Rik (NM_172310.1,1854-1872).
gccctaaaatcgatataaa

SEQ ID NO: 490241 - DNA, 19 bp, Mus musculus
  siRNA target sequence for A530046H20Rik (NM_172310.1,1857-1875).
ctaaaatcgatataaaaat

SEQ ID NO: 490242 - DNA, 19 bp, Mus musculus
  siRNA target sequence for A530046H20Rik (NM_172310.1,1928-1946).
caactgcctatcaggttta

SEQ ID NO: 490243 - DNA, 19 bp, Mus musculus
  siRNA target sequence for A530046H20Rik (NM_172310.1,1951-1969).
cacatatgtgagtaaggat

SEQ ID NO: 490244 - DNA, 19 bp, Mus musculus
  siRNA target sequence for A530046H20Rik (NM_172310.1,1962-1980).
gtaaggatggggatgacaa

SEQ ID NO: 490245 - DNA, 19 bp, Mus musculus
  siRNA target sequence for A530046H20Rik (NM_172310.1,2108-2126).
gtaggcccagcttgtgaaa

SEQ ID NO: 490246 - DNA, 19 bp, Mus musculus
  siRNA target sequence for A530046H20Rik (NM_172310.1,2173-2191).
ggccgatgtggacttagat

SEQ ID NO: 490247 - DNA, 19 bp, Mus musculus
  siRNA target sequence for A530046H20Rik (NM_172310.1,2183-2201).
gacttagatgacagttgta

SEQ ID NO: 490248 - DNA, 19 bp, Mus musculus
  siRNA target sequence for A530046H20Rik (NM_172310.1,2189-2207).
gatgacagttgtacactaa

SEQ ID NO: 490249 - DNA, 19 bp, Mus musculus
  siRNA target sequence for A530046H20Rik (NM_172310.1,2225-2243).
gcacagctggctcagtata

SEQ ID NO: 490250 - DNA, 19 bp, Mus musculus
  siRNA target sequence for A530046H20Rik (NM_172310.1,2226-2244).
cacagctggctcagtataa

SEQ ID NO: 490251 - DNA, 19 bp, Mus musculus
  siRNA target sequence for A530046H20Rik (NM_172310.1,2231-2249).
ctggctcagtataatttca

SEQ ID NO: 490252 - DNA, 19 bp, Mus musculus
  siRNA target sequence for A530090O15Rik (NM_144549.2,561-579).
cggtccgggtctactgttt

SEQ ID NO: 490253 - DNA, 19 bp, Mus musculus
  siRNA target sequence for A530090O15Rik (NM_144549.2,866-884).
gcaaggaattccccattaa

SEQ ID NO: 490254 - DNA, 19 bp, Mus musculus
  siRNA target sequence for A530090O15Rik (NM_144549.2,871-889).
gaattccccattaaacact

SEQ ID NO: 490255 - DNA, 19 bp, Mus musculus
  siRNA target sequence for A530090O15Rik (NM_144549.2,922-940).
ccgtcccatagcaacatca

SEQ ID NO: 490256 - DNA, 19 bp, Mus musculus
  siRNA target sequence for A530090O15Rik (NM_144549.2,971-989).
gcaaggcctacgtcttctt

SEQ ID NO: 490257 - DNA, 19 bp, Mus musculus
  siRNA target sequence for A530090O15Rik (NM_144549.2,1188-1206).
ggaagatactcacatcatt

SEQ ID NO: 490258 - DNA, 19 bp, Mus musculus
  siRNA target sequence for A530090O15Rik (NM_144549.2,1189-1207).
gaagatactcacatcatta

SEQ ID NO: 490259 - DNA, 19 bp, Mus musculus
  siRNA target sequence for A530090O15Rik (NM_144549.2,1318-1336).
ctcggggtgatgctctata

SEQ ID NO: 490260 - DNA, 19 bp, Mus musculus
  siRNA target sequence for A530090O15Rik (NM_144549.2,1347-1365).
cggacgatacccctttcat

SEQ ID NO: 490261 - DNA, 19 bp, Mus musculus
  siRNA target sequence for A530090O15Rik (NM_144549.2,1372-1390).
gatccgagtgccctttttt

SEQ ID NO: 490262 - DNA, 19 bp, Mus musculus
  siRNA target sequence for A530090O15Rik (NM_144549.2,1375-1393).
ccgagtgcccttttttcca

SEQ ID NO: 490263 - DNA, 19 bp, Mus musculus
  siRNA target sequence for A530090O15Rik (NM_144549.2,1376-1394).
cgagtgcccttttttccaa

SEQ ID NO: 490264 - DNA, 19 bp, Mus musculus
  siRNA target sequence for A530090O15Rik (NM_144549.2,1516-1534).
ccctggttcgagtatgtct

SEQ ID NO: 490265 - DNA, 19 bp, Mus musculus
  siRNA target sequence for A530090O15Rik (NM_144549.2,1533-1551).
cttggaaccgggctatgtt

SEQ ID NO: 490266 - DNA, 19 bp, Mus musculus
  siRNA target sequence for A530090O15Rik (NM_144549.2,1596-1614).
ggaggacagtgacataagt

SEQ ID NO: 490267 - DNA, 19 bp, Mus musculus
  siRNA target sequence for A530090O15Rik (NM_144549.2,1597-1615).
gaggacagtgacataagtt

SEQ ID NO: 490268 - DNA, 19 bp, Mus musculus
  siRNA target sequence for A630047E20Rik (NM_173032.1,289-307).
gctctcccacatgatgttt

SEQ ID NO: 490269 - DNA, 19 bp, Mus musculus
  siRNA target sequence for A630047E20Rik (NM_173032.1,332-350).
caccaaattccatcaaaat

SEQ ID NO: 490270 - DNA, 19 bp, Mus musculus
  siRNA target sequence for A630047E20Rik (NM_173032.1,334-352).
ccaaattccatcaaaatct

SEQ ID NO: 490271 - DNA, 19 bp, Mus musculus
  siRNA target sequence for A630047E20Rik (NM_173032.1,335-353).
caaattccatcaaaatctt

SEQ ID NO: 490272 - DNA, 19 bp, Mus musculus
  siRNA target sequence for A630047E20Rik (NM_173032.1,355-373).
ggtcgctttcaaatcctta

SEQ ID NO: 490273 - DNA, 19 bp, Mus musculus
  siRNA target sequence for A630047E20Rik (NM_173032.1,356-374).
gtcgctttcaaatccttaa

SEQ ID NO: 490274 - DNA, 19 bp, Mus musculus
  siRNA target sequence for A630047E20Rik (NM_173032.1,358-376).
cgctttcaaatccttaaga

SEQ ID NO: 490275 - DNA, 19 bp, Mus musculus
  siRNA target sequence for A630047E20Rik (NM_173032.1,419-437).
ggggaaagcatgaaagact

SEQ ID NO: 490276 - DNA, 19 bp, Mus musculus
  siRNA target sequence for A630047E20Rik (NM_173032.1,456-474).
ctgtgagcgcagtttggaa

SEQ ID NO: 490277 - DNA, 19 bp, Mus musculus
  siRNA target sequence for A630047E20Rik (NM_173032.1,495-513).
gcctgtgagtcattcaaca

SEQ ID NO: 490278 - DNA, 19 bp, Mus musculus
  siRNA target sequence for A630047E20Rik (NM_173032.1,512-530).
cagttctgtgcatagcata

SEQ ID NO: 490279 - DNA, 19 bp, Mus musculus
  siRNA target sequence for A630047E20Rik (NM_173032.1,534-552).
ggtacttgagggcttacat

SEQ ID NO: 490280 - DNA, 19 bp, Mus musculus
  siRNA target sequence for A630047E20Rik (NM_173032.1,535-553).
gtacttgagggcttacatt

SEQ ID NO: 490281 - DNA, 19 bp, Mus musculus
  siRNA target sequence for A630047E20Rik (NM_173032.1,538-556).
cttgagggcttacattact

SEQ ID NO: 490282 - DNA, 19 bp, Mus musculus
  siRNA target sequence for A630047E20Rik (NM_173032.1,544-562).
ggcttacattacttgaaca

SEQ ID NO: 490283 - DNA, 19 bp, Mus musculus
  siRNA target sequence for A630047E20Rik (NM_173032.1,545-563).
gcttacattacttgaacaa

SEQ ID NO: 490284 - DNA, 19 bp, Mus musculus
  siRNA target sequence for A630047E20Rik (NM_173032.1,583-601).
gccttgtctccccataata

SEQ ID NO: 490285 - DNA, 19 bp, Mus musculus
  siRNA target sequence for A630047E20Rik (NM_173032.1,584-602).
ccttgtctccccataatat

SEQ ID NO: 490286 - DNA, 19 bp, Mus musculus
  siRNA target sequence for A630047E20Rik (NM_173032.1,609-627).
ggatcggaagggccatatt

SEQ ID NO: 490287 - DNA, 19 bp, Mus musculus
  siRNA target sequence for A630047E20Rik (NM_173032.1,610-628).
gatcggaagggccatatta

SEQ ID NO: 490288 - DNA, 19 bp, Mus musculus
  siRNA target sequence for A630047E20Rik (NM_173032.1,614-632).
ggaagggccatattaaact

SEQ ID NO: 490289 - DNA, 19 bp, Mus musculus
  siRNA target sequence for A630047E20Rik (NM_173032.1,622-640).
catattaaactggctaaat

SEQ ID NO: 490290 - DNA, 19 bp, Mus musculus
  siRNA target sequence for A630047E20Rik (NM_173032.1,633-651).
ggctaaatttggactttat

SEQ ID NO: 490291 - DNA, 19 bp, Mus musculus
  siRNA target sequence for A630047E20Rik (NM_173032.1,708-726).
ggcacctgaggtaattgca

SEQ ID NO: 490292 - DNA, 19 bp, Mus musculus
  siRNA target sequence for A630047E20Rik (NM_173032.1,717-735).
ggtaattgcacaaggaatt

SEQ ID NO: 490293 - DNA, 19 bp, Mus musculus
  siRNA target sequence for A630047E20Rik (NM_173032.1,754-772).
gtgccaagtgaaaaaccat

SEQ ID NO: 490294 - DNA, 19 bp, Mus musculus
  siRNA target sequence for A630047E20Rik (NM_173032.1,781-799).
ggccccaaatcagatgtat

SEQ ID NO: 490295 - DNA, 19 bp, Mus musculus
  siRNA target sequence for A630047E20Rik (NM_173032.1,835-853).
gggagaaaattgtttcaga

SEQ ID NO: 490296 - DNA, 19 bp, Mus musculus
  siRNA target sequence for A630047E20Rik (NM_173032.1,894-912).
gggctgtgtagatgatact

SEQ ID NO: 490297 - DNA, 19 bp, Mus musculus
  siRNA target sequence for A630047E20Rik (NM_173032.1,895-913).
ggctgtgtagatgatacta

SEQ ID NO: 490298 - DNA, 19 bp, Mus musculus
  siRNA target sequence for A630047E20Rik (NM_173032.1,896-914).
gctgtgtagatgatactat

SEQ ID NO: 490299 - DNA, 19 bp, Mus musculus
  siRNA target sequence for A630047E20Rik (NM_173032.1,899-917).
gtgtagatgatactataat

SEQ ID NO: 490300 - DNA, 19 bp, Mus musculus
  siRNA target sequence for A630047E20Rik (NM_173032.1,937-955).
gggtgtctggacattatca

SEQ ID NO: 490301 - DNA, 19 bp, Mus musculus
  siRNA target sequence for A630047E20Rik (NM_173032.1,938-956).
ggtgtctggacattatcaa

SEQ ID NO: 490302 - DNA, 19 bp, Mus musculus
  siRNA target sequence for A630047E20Rik (NM_173032.1,958-976).
gagcttcctgaaaatgtga

SEQ ID NO: 490303 - DNA, 19 bp, Mus musculus
  siRNA target sequence for A630047E20Rik (NM_173032.1,960-978).
gcttcctgaaaatgtgata

SEQ ID NO: 490304 - DNA, 19 bp, Mus musculus
  siRNA target sequence for A630047E20Rik (NM_173032.1,1025-1043).
ccccagatgagttaatgaa

SEQ ID NO: 490305 - DNA, 19 bp, Mus musculus
  siRNA target sequence for A630047E20Rik (NM_173032.1,1058-1076).
gtgaagtgtcacctttata

SEQ ID NO: 490306 - DNA, 19 bp, Mus musculus
  siRNA target sequence for A630047E20Rik (NM_173032.1,1060-1078).
gaagtgtcacctttataca

SEQ ID NO: 490307 - DNA, 19 bp, Mus musculus
  siRNA target sequence for A630047E20Rik (NM_173032.1,1070-1088).
ctttatacaccccctttat

SEQ ID NO: 490308 - DNA, 19 bp, Mus musculus
  siRNA target sequence for A630047E20Rik (NM_173032.1,1117-1135).
ctgagatgcgctgatctaa

SEQ ID NO: 490309 - DNA, 19 bp, Mus musculus
  siRNA target sequence for A630047E20Rik (NM_173032.1,1119-1137).
gagatgcgctgatctaact

SEQ ID NO: 490310 - DNA, 19 bp, Mus musculus
  siRNA target sequence for A630047E20Rik (NM_173032.1,1121-1139).
gatgcgctgatctaactct

SEQ ID NO: 490311 - DNA, 19 bp, Mus musculus
  siRNA target sequence for A630047E20Rik (NM_173032.1,1147-1165).
gatatcagtgacttgtgta

SEQ ID NO: 490312 - DNA, 19 bp, Mus musculus
  siRNA target sequence for A630047E20Rik (NM_173032.1,1185-1203).
cctggcagagagatctatt

SEQ ID NO: 490313 - DNA, 19 bp, Mus musculus
  siRNA target sequence for A630047E20Rik (NM_173032.1,1196-1214).
gatctattgaggaagttta

SEQ ID NO: 490314 - DNA, 19 bp, Mus musculus
  siRNA target sequence for A630047E20Rik (NM_173032.1,1199-1217).
ctattgaggaagtttacta

SEQ ID NO: 490315 - DNA, 19 bp, Mus musculus
  siRNA target sequence for A630047E20Rik (NM_173032.1,1204-1222).
gaggaagtttactaccttt

SEQ ID NO: 490316 - DNA, 19 bp, Mus musculus
  siRNA target sequence for A630047E20Rik (NM_173032.1,1243-1261).
ctggaaaaggagcttataa

SEQ ID NO: 490317 - DNA, 19 bp, Mus musculus
  siRNA target sequence for A630047E20Rik (NM_173032.1,1293-1311).
ctgcacactcccgaatttt

SEQ ID NO: 490318 - DNA, 19 bp, Mus musculus
  siRNA target sequence for A630047E20Rik (NM_173032.1,1295-1313).
gcacactcccgaattttct

SEQ ID NO: 490319 - DNA, 19 bp, Mus musculus
  siRNA target sequence for A630047E20Rik (NM_173032.1,1298-1316).
cactcccgaattttctctt

SEQ ID NO: 490320 - DNA, 19 bp, Mus musculus
  siRNA target sequence for A630047E20Rik (NM_173032.1,1302-1320).
cccgaattttctctttgaa

SEQ ID NO: 490321 - DNA, 19 bp, Mus musculus
  siRNA target sequence for A630047E20Rik (NM_173032.1,1352-1370).
gaagctcactcttagatga

SEQ ID NO: 490322 - DNA, 19 bp, Mus musculus
  siRNA target sequence for A630047E20Rik (NM_173032.1,1373-1391).
ccacagtcacgttgtcttt

SEQ ID NO: 490323 - DNA, 19 bp, Mus musculus
  siRNA target sequence for A630047E20Rik (NM_173032.1,1388-1406).
ctttgtgccagctaagaaa

SEQ ID NO: 490324 - DNA, 19 bp, Mus musculus
  siRNA target sequence for A630047E20Rik (NM_173032.1,1394-1412).
gccagctaagaaacagatt

SEQ ID NO: 490325 - DNA, 19 bp, Mus musculus
  siRNA target sequence for A630047E20Rik (NM_173032.1,1450-1468).
gaggatgaccagtcaaatt

SEQ ID NO: 490326 - DNA, 19 bp, Mus musculus
  siRNA target sequence for A630047E20Rik (NM_173032.1,1471-1489).
ccacattcaaacagcaata

SEQ ID NO: 490327 - DNA, 19 bp, Mus musculus
  siRNA target sequence for A630047E20Rik (NM_173032.1,1478-1496).
caaacagcaataatgagtt

SEQ ID NO: 490328 - DNA, 19 bp, Mus musculus
  siRNA target sequence for A630047E20Rik (NM_173032.1,1505-1523).
ctgctaccctgcctttaat

SEQ ID NO: 490329 - DNA, 19 bp, Mus musculus
  siRNA target sequence for A630047E20Rik (NM_173032.1,1552-1570).
ctcaacaggattattctct

SEQ ID NO: 490330 - DNA, 19 bp, Mus musculus
  siRNA target sequence for A630047E20Rik (NM_173032.1,1584-1602).
gaaggcttacccatacaaa

SEQ ID NO: 490331 - DNA, 19 bp, Mus musculus
  siRNA target sequence for A630047E20Rik (NM_173032.1,1587-1605).
ggcttacccatacaaaaaa

SEQ ID NO: 490332 - DNA, 19 bp, Mus musculus
  siRNA target sequence for A630047E20Rik (NM_173032.1,1588-1606).
gcttacccatacaaaaaaa

SEQ ID NO: 490333 - DNA, 19 bp, Mus musculus
  siRNA target sequence for A630047E20Rik (NM_173032.1,1642-1660).
ccacttatgagaggtttaa

SEQ ID NO: 490334 - DNA, 19 bp, Mus musculus
  siRNA target sequence for A630047E20Rik (NM_173032.1,1691-1709).
ctattcatgccaagtatga

SEQ ID NO: 490335 - DNA, 19 bp, Mus musculus
  siRNA target sequence for A630047E20Rik (NM_173032.1,1708-1726).
gacgccattgacaaagaca

SEQ ID NO: 490336 - DNA, 19 bp, Mus musculus
  siRNA target sequence for A630047E20Rik (NM_173032.1,1725-1743).
cactccgattcctacagat

SEQ ID NO: 490337 - DNA, 19 bp, Mus musculus
  siRNA target sequence for A630047E20Rik (NM_173032.1,1730-1748).
cgattcctacagatagaca

SEQ ID NO: 490338 - DNA, 19 bp, Mus musculus
  siRNA target sequence for A630047E20Rik (NM_173032.1,1731-1749).
gattcctacagatagacaa

SEQ ID NO: 490339 - DNA, 19 bp, Mus musculus
  siRNA target sequence for A630047E20Rik (NM_173032.1,1764-1782).
ccctcgctgtcatcagtat

SEQ ID NO: 490340 - DNA, 19 bp, Mus musculus
  siRNA target sequence for A630047E20Rik (NM_173032.1,1766-1784).
ctcgctgtcatcagtatga

SEQ ID NO: 490341 - DNA, 19 bp, Mus musculus
  siRNA target sequence for A630047E20Rik (NM_173032.1,1818-1836).
gttccggcgtgtactgaaa

SEQ ID NO: 490342 - DNA, 19 bp, Mus musculus
  siRNA target sequence for A630047E20Rik (NM_173032.1,1845-1863).
ggtttctcatcctgatctt

SEQ ID NO: 490343 - DNA, 19 bp, Mus musculus
  siRNA target sequence for A630047E20Rik (NM_173032.1,1897-1915).
ccattcctgtatctaaatt

SEQ ID NO: 490344 - DNA, 19 bp, Mus musculus
  siRNA target sequence for A630047E20Rik (NM_173032.1,1898-1916).
cattcctgtatctaaattt

SEQ ID NO: 490345 - DNA, 19 bp, Mus musculus
  siRNA target sequence for A630047E20Rik (NM_173032.1,1905-1923).
gtatctaaatttcaacaat

SEQ ID NO: 490346 - DNA, 19 bp, Mus musculus
  siRNA target sequence for A630047E20Rik (NM_173032.1,1939-1957).
gcgtgcatgtctgctttta

SEQ ID NO: 490347 - DNA, 19 bp, Mus musculus
  siRNA target sequence for A630047E20Rik (NM_173032.1,1952-1970).
cttttattcccaaatacct

SEQ ID NO: 490348 - DNA, 19 bp, Mus musculus
  siRNA target sequence for A630047E20Rik (NM_173032.1,1986-2004).
gaaggacaactctcatgta

SEQ ID NO: 490349 - DNA, 19 bp, Mus musculus
  siRNA target sequence for A630047E20Rik (NM_173032.1,1989-2007).
ggacaactctcatgtaata

SEQ ID NO: 490350 - DNA, 19 bp, Mus musculus
  siRNA target sequence for A630047E20Rik (NM_173032.1,2084-2102).
gcttcattcccgatctcta

SEQ ID NO: 490351 - DNA, 19 bp, Mus musculus
  siRNA target sequence for A630047E20Rik (NM_173032.1,2100-2118).
ctacgccatcccttggttt

SEQ ID NO: 490352 - DNA, 19 bp, Mus musculus
  siRNA target sequence for A630047E20Rik (NM_173032.1,2115-2133).
gtttctcaccatgtttact

SEQ ID NO: 490353 - DNA, 19 bp, Mus musculus
  siRNA target sequence for A630047E20Rik (NM_173032.1,2121-2139).
caccatgtttactcatgta

SEQ ID NO: 490354 - DNA, 19 bp, Mus musculus
  siRNA target sequence for A630047E20Rik (NM_173032.1,2320-2338).
cgtgagtcggtcaatctgt

SEQ ID NO: 490355 - DNA, 19 bp, Mus musculus
  siRNA target sequence for A630047E20Rik (NM_173032.1,2321-2339).
gtgagtcggtcaatctgtt

SEQ ID NO: 490356 - DNA, 19 bp, Mus musculus
  siRNA target sequence for A630047E20Rik (NM_173032.1,2323-2341).
gagtcggtcaatctgtttt

SEQ ID NO: 490357 - DNA, 19 bp, Mus musculus
  siRNA target sequence for A630047E20Rik (NM_173032.1,2337-2355).
gttttgctggactcctaaa

SEQ ID NO: 490358 - DNA, 19 bp, Mus musculus
  siRNA target sequence for A630047E20Rik (NM_173032.1,2350-2368).
cctaaaagtgctacataca

SEQ ID NO: 490359 - DNA, 19 bp, Mus musculus
  siRNA target sequence for A630047E20Rik (NM_173032.1,2417-2435).
gaagctcagcgccttactt

SEQ ID NO: 490360 - DNA, 19 bp, Mus musculus
  siRNA target sequence for A630047E20Rik (NM_173032.1,2483-2501).
cctctccggtgtggaaaat

SEQ ID NO: 490361 - DNA, 19 bp, Mus musculus
  siRNA target sequence for A630047E20Rik (NM_173032.1,2488-2506).
ccggtgtggaaaatgcatt

SEQ ID NO: 490362 - DNA, 19 bp, Mus musculus
  siRNA target sequence for A830007P12Rik (NM_146115.2,250-268).
ccgacctagaccaacctaa

SEQ ID NO: 490363 - DNA, 19 bp, Mus musculus
  siRNA target sequence for A830007P12Rik (NM_146115.2,251-269).
cgacctagaccaacctaaa

SEQ ID NO: 490364 - DNA, 19 bp, Mus musculus
  siRNA target sequence for A830007P12Rik (NM_146115.2,252-270).
gacctagaccaacctaaat

SEQ ID NO: 490365 - DNA, 19 bp, Mus musculus
  siRNA target sequence for A830007P12Rik (NM_146115.2,255-273).
ctagaccaacctaaattct

SEQ ID NO: 490366 - DNA, 19 bp, Mus musculus
  siRNA target sequence for A830007P12Rik (NM_146115.2,328-346).
ggcgtagtcgggtagttct

SEQ ID NO: 490367 - DNA, 19 bp, Mus musculus
  siRNA target sequence for A830007P12Rik (NM_146115.2,331-349).
gtagtcgggtagttctcta

SEQ ID NO: 490368 - DNA, 19 bp, Mus musculus
  siRNA target sequence for A830007P12Rik (NM_146115.2,449-467).
caacgccattgagaatcta

SEQ ID NO: 490369 - DNA, 19 bp, Mus musculus
  siRNA target sequence for A830007P12Rik (NM_146115.2,461-479).
gaatctagacgataatgca

SEQ ID NO: 490370 - DNA, 19 bp, Mus musculus
  siRNA target sequence for A830007P12Rik (NM_146115.2,710-728).
gcagtaccatgcacgatat

SEQ ID NO: 490371 - DNA, 19 bp, Mus musculus
  siRNA target sequence for A830007P12Rik (NM_146115.2,859-877).
cacctgcgctgctagatga

SEQ ID NO: 490372 - DNA, 19 bp, Mus musculus
  siRNA target sequence for A830007P12Rik (NM_146115.2,909-927).
caccatttccacaatgcta

SEQ ID NO: 490373 - DNA, 19 bp, Mus musculus
  siRNA target sequence for A830007P12Rik (NM_146115.2,917-935).
ccacaatgctatctatgta

SEQ ID NO: 490374 - DNA, 19 bp, Mus musculus
  siRNA target sequence for A830007P12Rik (NM_146115.2,943-961).
gtggcgctggtggtataga

SEQ ID NO: 490375 - DNA, 19 bp, Mus musculus
  siRNA target sequence for A830007P12Rik (NM_146115.2,945-963).
ggcgctggtggtatagaga

SEQ ID NO: 490376 - DNA, 19 bp, Mus musculus
  siRNA target sequence for A830007P12Rik (NM_146115.2,946-964).
gcgctggtggtatagagat

SEQ ID NO: 490377 - DNA, 19 bp, Mus musculus
  siRNA target sequence for A830007P12Rik (NM_146115.2,1047-1065).
ccagcccaggagttactca

SEQ ID NO: 490378 - DNA, 19 bp, Mus musculus
  siRNA target sequence for A830007P12Rik (NM_146115.2,1279-1297).
gcaagcaggtagtagctaa

SEQ ID NO: 490379 - DNA, 19 bp, Mus musculus
  siRNA target sequence for A830084F09Rik (NM_146244.2,157-175).
catgtacctggaacagatt

SEQ ID NO: 490380 - DNA, 19 bp, Mus musculus
  siRNA target sequence for A830084F09Rik (NM_146244.2,659-677).
catggcgtcccctacatga

SEQ ID NO: 490381 - DNA, 19 bp, Mus musculus
  siRNA target sequence for A830084F09Rik (NM_146244.2,662-680).
ggcgtcccctacatgacaa

SEQ ID NO: 490382 - DNA, 19 bp, Mus musculus
  siRNA target sequence for A830084F09Rik (NM_146244.2,663-681).
gcgtcccctacatgacaaa

SEQ ID NO: 490383 - DNA, 19 bp, Mus musculus
  siRNA target sequence for A830084F09Rik (NM_146244.2,664-682).
cgtcccctacatgacaaaa

SEQ ID NO: 490384 - DNA, 19 bp, Mus musculus
  siRNA target sequence for A830084F09Rik (NM_146244.2,665-683).
gtcccctacatgacaaaat

SEQ ID NO: 490385 - DNA, 19 bp, Mus musculus
  siRNA target sequence for A830084F09Rik (NM_146244.2,668-686).
ccctacatgacaaaattgt

SEQ ID NO: 490386 - DNA, 19 bp, Mus musculus
  siRNA target sequence for A830084F09Rik (NM_146244.2,768-786).
cccaggaccattttcaata

SEQ ID NO: 490387 - DNA, 19 bp, Mus musculus
  siRNA target sequence for A830084F09Rik (NM_146244.2,772-790).
ggaccattttcaatactct

SEQ ID NO: 490388 - DNA, 19 bp, Mus musculus
  siRNA target sequence for A830084F09Rik (NM_146244.2,782-800).
caatactctgggcttaact

SEQ ID NO: 490389 - DNA, 19 bp, Mus musculus
  siRNA target sequence for A830084F09Rik (NM_146244.2,885-903).
ccctgaggcagaacagaat

SEQ ID NO: 490390 - DNA, 19 bp, Mus musculus
  siRNA target sequence for A830084F09Rik (NM_146244.2,1033-1051).
ccactcgcacagtcaagtt

SEQ ID NO: 490391 - DNA, 19 bp, Mus musculus
  siRNA target sequence for A830084F09Rik (NM_146244.2,1034-1052).
cactcgcacagtcaagtta

SEQ ID NO: 490392 - DNA, 19 bp, Mus musculus
  siRNA target sequence for A830084F09Rik (NM_146244.2,1336-1354).
catccaactcacgtatttt

SEQ ID NO: 490393 - DNA, 19 bp, Mus musculus
  siRNA target sequence for A830084F09Rik (NM_146244.2,1473-1491).
gctcactcctgtatgaact

SEQ ID NO: 490394 - DNA, 19 bp, Mus musculus
  siRNA target sequence for A830084F09Rik (NM_146244.2,1581-1599).
cagcttctctgctaactga

SEQ ID NO: 490395 - DNA, 19 bp, Mus musculus
  siRNA target sequence for A830084F09Rik (NM_146244.2,1667-1685).
catccctttttcagtacta

SEQ ID NO: 490396 - DNA, 19 bp, Mus musculus
  siRNA target sequence for A930015B13Rik (NM_178749.2,353-371).
ctgcattgtgcggaagaat

SEQ ID NO: 490397 - DNA, 19 bp, Mus musculus
  siRNA target sequence for A930015B13Rik (NM_178749.2,355-373).
gcattgtgcggaagaatga

SEQ ID NO: 490398 - DNA, 19 bp, Mus musculus
  siRNA target sequence for A930015B13Rik (NM_178749.2,483-501).
cctttcctggtgaatctgt

SEQ ID NO: 490399 - DNA, 19 bp, Mus musculus
  siRNA target sequence for A930015B13Rik (NM_178749.2,492-510).
gtgaatctgtggtattcct

SEQ ID NO: 490400 - DNA, 19 bp, Mus musculus
  siRNA target sequence for A930015B13Rik (NM_178749.2,556-574).
gtggtgacctgcgttatca

SEQ ID NO: 490401 - DNA, 19 bp, Mus musculus
  siRNA target sequence for A930015B13Rik (NM_178749.2,688-706).
ctgacaatattttacttga

SEQ ID NO: 490402 - DNA, 19 bp, Mus musculus
  siRNA target sequence for A930015B13Rik (NM_178749.2,869-887).
cggggtgacggcttacgaa

SEQ ID NO: 490403 - DNA, 19 bp, Mus musculus
  siRNA target sequence for A930015B13Rik (NM_178749.2,895-913).
gaggccggagaccatatca

SEQ ID NO: 490404 - DNA, 19 bp, Mus musculus
  siRNA target sequence for A930015B13Rik (NM_178749.2,897-915).
ggccggagaccatatcaca

SEQ ID NO: 490405 - DNA, 19 bp, Mus musculus
  siRNA target sequence for A930015B13Rik (NM_178749.2,912-930).
cacatccgctccagtactt

SEQ ID NO: 490406 - DNA, 19 bp, Mus musculus
  siRNA target sequence for A930015B13Rik (NM_178749.2,931-949).
ccagcaaggaaattgtgaa

SEQ ID NO: 490407 - DNA, 19 bp, Mus musculus
  siRNA target sequence for A930015B13Rik (NM_178749.2,934-952).
gcaaggaaattgtgaacat

SEQ ID NO: 490408 - DNA, 19 bp, Mus musculus
  siRNA target sequence for A930015B13Rik (NM_178749.2,957-975).
gagacagcaattgtaactt

SEQ ID NO: 490409 - DNA, 19 bp, Mus musculus
  siRNA target sequence for A930015B13Rik (NM_178749.2,1019-1037).
gctgcttgaacctaatcca

SEQ ID NO: 490410 - DNA, 19 bp, Mus musculus
  siRNA target sequence for A930015B13Rik (NM_178749.2,1068-1086).
cagaatttcccttacatga

SEQ ID NO: 490411 - DNA, 19 bp, Mus musculus
  siRNA target sequence for A930015B13Rik (NM_178749.2,1078-1096).
cttacatgagtgacatgaa

SEQ ID NO: 490412 - DNA, 19 bp, Mus musculus
  siRNA target sequence for A930015B13Rik (NM_178749.2,1145-1163).
caaaggcaggctcaattgt

SEQ ID NO: 490413 - DNA, 19 bp, Mus musculus
  siRNA target sequence for A930015B13Rik (NM_178749.2,1413-1431).
gaggacggccagaataaca

SEQ ID NO: 490414 - DNA, 19 bp, Mus musculus
  siRNA target sequence for A930015B13Rik (NM_178749.2,1419-1437).
ggccagaataacaacctat

SEQ ID NO: 490415 - DNA, 19 bp, Mus musculus
  siRNA target sequence for A930018B01Rik (NM_024216.1,236-254).
cggcagaacacttcaacta

SEQ ID NO: 490416 - DNA, 19 bp, Mus musculus
  siRNA target sequence for A930018B01Rik (NM_024216.1,398-416).
gccacgtcgaggacgatta

SEQ ID NO: 490417 - DNA, 19 bp, Mus musculus
  siRNA target sequence for A930018B01Rik (NM_024216.1,400-418).
cacgtcgaggacgattaca

SEQ ID NO: 490418 - DNA, 19 bp, Mus musculus
  siRNA target sequence for A930018B01Rik (NM_024216.1,408-426).
ggacgattacatccttttt

SEQ ID NO: 490419 - DNA, 19 bp, Mus musculus
  siRNA target sequence for A930018B01Rik (NM_024216.1,412-430).
gattacatcctttttgact

SEQ ID NO: 490420 - DNA, 19 bp, Mus musculus
  siRNA target sequence for A930018B01Rik (NM_024216.1,455-473).
cccacctgcctgtcatgaa

SEQ ID NO: 490421 - DNA, 19 bp, Mus musculus
  siRNA target sequence for A930018B01Rik (NM_024216.1,515-533).
gcggagtgttccttgttga

SEQ ID NO: 490422 - DNA, 19 bp, Mus musculus
  siRNA target sequence for A930018B01Rik (NM_024216.1,547-565).
gtggagtcattcaagttta

SEQ ID NO: 490423 - DNA, 19 bp, Mus musculus
  siRNA target sequence for A930018B01Rik (NM_024216.1,550-568).
gagtcattcaagtttatct

SEQ ID NO: 490424 - DNA, 19 bp, Mus musculus
  siRNA target sequence for A930018B01Rik (NM_024216.1,588-606).
gagtgccatggtttctcta

SEQ ID NO: 490425 - DNA, 19 bp, Mus musculus
  siRNA target sequence for A930018B01Rik (NM_024216.1,607-625).
gagatcccacaggttaaca

SEQ ID NO: 490426 - DNA, 19 bp, Mus musculus
  siRNA target sequence for A930018B01Rik (NM_024216.1,711-729).
cgattcaaccggtgactta

SEQ ID NO: 490427 - DNA, 19 bp, Mus musculus
  siRNA target sequence for A930018B01Rik (NM_024216.1,712-730).
gattcaaccggtgacttaa

SEQ ID NO: 490428 - DNA, 19 bp, Mus musculus
  siRNA target sequence for A930018B01Rik (NM_024216.1,724-742).
gacttaagaagccaaaagt

SEQ ID NO: 490429 - DNA, 19 bp, Mus musculus
  siRNA target sequence for A930018B01Rik (NM_024216.1,946-964).
caagaacggcagaatgagt

SEQ ID NO: 490430 - DNA, 19 bp, Mus musculus
  siRNA target sequence for A930019K20Rik (NM_172516.2,324-342).
ggaccgccttccctgtata

SEQ ID NO: 490431 - DNA, 19 bp, Mus musculus
  siRNA target sequence for A930019K20Rik (NM_172516.2,328-346).
cgccttccctgtatactga

SEQ ID NO: 490432 - DNA, 19 bp, Mus musculus
  siRNA target sequence for A930019K20Rik (NM_172516.2,495-513).
ggcgctccccggtcagtat

SEQ ID NO: 490433 - DNA, 19 bp, Mus musculus
  siRNA target sequence for A930019K20Rik (NM_172516.2,497-515).
cgctccccggtcagtatga

SEQ ID NO: 490434 - DNA, 19 bp, Mus musculus
  siRNA target sequence for A930019K20Rik (NM_172516.2,498-516).
gctccccggtcagtatgaa

SEQ ID NO: 490435 - DNA, 19 bp, Mus musculus
  siRNA target sequence for A930019K20Rik (NM_172516.2,503-521).
ccggtcagtatgaactagt

SEQ ID NO: 490436 - DNA, 19 bp, Mus musculus
  siRNA target sequence for A930019K20Rik (NM_172516.2,522-540).
gcacacgctagcttcacat

SEQ ID NO: 490437 - DNA, 19 bp, Mus musculus
  siRNA target sequence for A930019K20Rik (NM_172516.2,617-635).
ctgacctcgaggtgacaat

SEQ ID NO: 490438 - DNA, 19 bp, Mus musculus
  siRNA target sequence for A930019K20Rik (NM_172516.2,796-814).
cgggaagttagacagtatt

SEQ ID NO: 490439 - DNA, 19 bp, Mus musculus
  siRNA target sequence for A930019K20Rik (NM_172516.2,797-815).
gggaagttagacagtattt

SEQ ID NO: 490440 - DNA, 19 bp, Mus musculus
  siRNA target sequence for A930019K20Rik (NM_172516.2,822-840).
ccccatgttctttttcaaa

SEQ ID NO: 490441 - DNA, 19 bp, Mus musculus
  siRNA target sequence for A930019K20Rik (NM_172516.2,841-859).
gtacccaagctggagataa

SEQ ID NO: 490442 - DNA, 19 bp, Mus musculus
  siRNA target sequence for A930019K20Rik (NM_172516.2,844-862).
cccaagctggagataatca

SEQ ID NO: 490443 - DNA, 19 bp, Mus musculus
  siRNA target sequence for A930019K20Rik (NM_172516.2,1100-1118).
gccttgacatctttattaa

SEQ ID NO: 490444 - DNA, 19 bp, Mus musculus
  siRNA target sequence for A930019K20Rik (NM_172516.2,1156-1174).
cccaaacgcctagaatata

SEQ ID NO: 490445 - DNA, 19 bp, Mus musculus
  siRNA target sequence for A930019K20Rik (NM_172516.2,1158-1176).
caaacgcctagaatatact

SEQ ID NO: 490446 - DNA, 19 bp, Mus musculus
  siRNA target sequence for A930019K20Rik (NM_172516.2,1162-1180).
cgcctagaatatactagaa

SEQ ID NO: 490447 - DNA, 19 bp, Mus musculus
  siRNA target sequence for A930019K20Rik (NM_172516.2,1165-1183).
ctagaatatactagaaaaa

SEQ ID NO: 490448 - DNA, 19 bp, Mus musculus
  siRNA target sequence for A930019K20Rik (NM_172516.2,1330-1348).
cctgagaatggagaaacaa

SEQ ID NO: 490449 - DNA, 19 bp, Mus musculus
  siRNA target sequence for A930019K20Rik (NM_172516.2,1449-1467).
ctacctgcgggaaagcttt

SEQ ID NO: 490450 - DNA, 19 bp, Mus musculus
  siRNA target sequence for A930019K20Rik (NM_172516.2,1452-1470).
cctgcgggaaagctttgtt

SEQ ID NO: 490451 - DNA, 19 bp, Mus musculus
  siRNA target sequence for A930019K20Rik (NM_172516.2,1491-1509).
gcagagccttgaaaaatca

SEQ ID NO: 490452 - DNA, 19 bp, Mus musculus
  siRNA target sequence for A930019K20Rik (NM_172516.2,1535-1553).
gcaactatctcaaacagat

SEQ ID NO: 490453 - DNA, 19 bp, Mus musculus
  siRNA target sequence for A930019K20Rik (NM_172516.2,1554-1572).
cttaaatgccgcttaccat

SEQ ID NO: 490454 - DNA, 19 bp, Mus musculus
  siRNA target sequence for A930019K20Rik (NM_172516.2,1569-1587).
ccatgttgaggtcactttt

SEQ ID NO: 490455 - DNA, 19 bp, Mus musculus
  siRNA target sequence for A930019K20Rik (NM_172516.2,1635-1653).
gatcatccagcgtatcaca

SEQ ID NO: 490456 - DNA, 19 bp, Mus musculus
  siRNA target sequence for A930019K20Rik (NM_172516.2,1761-1779).
ccgcacgcggctcaatagt

SEQ ID NO: 490457 - DNA, 19 bp, Mus musculus
  siRNA target sequence for A930019K20Rik (NM_172516.2,1762-1780).
cgcacgcggctcaatagtt

SEQ ID NO: 490458 - DNA, 19 bp, Mus musculus
  siRNA target sequence for A930019K20Rik (NM_172516.2,1764-1782).
cacgcggctcaatagttct

SEQ ID NO: 490459 - DNA, 19 bp, Mus musculus
  siRNA target sequence for A930019K20Rik (NM_172516.2,1767-1785).
gcggctcaatagttctcat

SEQ ID NO: 490460 - DNA, 19 bp, Mus musculus
  siRNA target sequence for A930019K20Rik (NM_172516.2,1832-1850).
gccgtctggagaaaactga

SEQ ID NO: 490461 - DNA, 19 bp, Mus musculus
  siRNA target sequence for A930019K20Rik (NM_172516.2,1859-1877).
ggctaaaggttcgaaaaga

SEQ ID NO: 490462 - DNA, 19 bp, Mus musculus
  siRNA target sequence for A930019K20Rik (NM_172516.2,1860-1878).
gctaaaggttcgaaaagat

SEQ ID NO: 490463 - DNA, 19 bp, Mus musculus
  siRNA target sequence for A930019K20Rik (NM_172516.2,1905-1923).
gctagagagccggtcttta

SEQ ID NO: 490464 - DNA, 19 bp, Mus musculus
  siRNA target sequence for A930019K20Rik (NM_172516.2,1932-1950).
cttgcttcaccgtaaacct

SEQ ID NO: 490465 - DNA, 19 bp, Mus musculus
  siRNA target sequence for A930019K20Rik (NM_172516.2,1935-1953).
gcttcaccgtaaacctaaa

SEQ ID NO: 490466 - DNA, 19 bp, Mus musculus
  siRNA target sequence for A930019K20Rik (NM_172516.2,1936-1954).
cttcaccgtaaacctaaat

SEQ ID NO: 490467 - DNA, 19 bp, Mus musculus
  siRNA target sequence for A930019K20Rik (NM_172516.2,1976-1994).
gccaatatggtgtggtata

SEQ ID NO: 490468 - DNA, 19 bp, Mus musculus
  siRNA target sequence for A930019K20Rik (NM_172516.2,2022-2040).
cccttgtgccctcaaatca

SEQ ID NO: 490469 - DNA, 19 bp, Mus musculus
  siRNA target sequence for A930019K20Rik (NM_172516.2,2024-2042).
cttgtgccctcaaatcagt

SEQ ID NO: 490470 - DNA, 19 bp, Mus musculus
  siRNA target sequence for A930019K20Rik (NM_172516.2,2118-2136).
gcggctggtcgatcttcat

SEQ ID NO: 490471 - DNA, 19 bp, Mus musculus
  siRNA target sequence for A930019K20Rik (NM_172516.2,2141-2159).
cagtcattgactacaacta

SEQ ID NO: 490472 - DNA, 19 bp, Mus musculus
  siRNA target sequence for A930019K20Rik (NM_172516.2,2174-2192).
gcgttgctgtactgcttat

SEQ ID NO: 490473 - DNA, 19 bp, Mus musculus
  siRNA target sequence for A930019K20Rik (NM_172516.2,2247-2265).
ggagacacgtttgcaaata

SEQ ID NO: 490474 - DNA, 19 bp, Mus musculus
  siRNA target sequence for A930019K20Rik (NM_172516.2,2250-2268).
gacacgtttgcaaatagct

SEQ ID NO: 490475 - DNA, 19 bp, Mus musculus
  siRNA target sequence for A930019K20Rik (NM_172516.2,2317-2335).
catcgggatatcaaactga

SEQ ID NO: 490476 - DNA, 19 bp, Mus musculus
  siRNA target sequence for A930019K20Rik (NM_172516.2,2320-2338).
cgggatatcaaactgaaaa

SEQ ID NO: 490477 - DNA, 19 bp, Mus musculus
  siRNA target sequence for A930019K20Rik (NM_172516.2,2356-2374).
caaaaccgtgccaagatca

SEQ ID NO: 490478 - DNA, 19 bp, Mus musculus
  siRNA target sequence for A930019K20Rik (NM_172516.2,2373-2391).
caccgacttaggattctgt

SEQ ID NO: 490479 - DNA, 19 bp, Mus musculus
  siRNA target sequence for A930019K20Rik (NM_172516.2,2375-2393).
ccgacttaggattctgtaa

SEQ ID NO: 490480 - DNA, 19 bp, Mus musculus
  siRNA target sequence for A930019K20Rik (NM_172516.2,2376-2394).
cgacttaggattctgtaaa

SEQ ID NO: 490481 - DNA, 19 bp, Mus musculus
  siRNA target sequence for A930019K20Rik (NM_172516.2,2422-2440).
gtggggacaccaatccata

SEQ ID NO: 490482 - DNA, 19 bp, Mus musculus
  siRNA target sequence for A930019K20Rik (NM_172516.2,2442-2460).
ggcccctgaacttttcaca

SEQ ID NO: 490483 - DNA, 19 bp, Mus musculus
  siRNA target sequence for A930019K20Rik (NM_172516.2,2497-2515).
gggatccttttttggtata

SEQ ID NO: 490484 - DNA, 19 bp, Mus musculus
  siRNA target sequence for A930019K20Rik (NM_172516.2,2610-2628).
gcgtcttcctgtgtttgat

SEQ ID NO: 490485 - DNA, 19 bp, Mus musculus
  siRNA target sequence for A930019K20Rik (NM_172516.2,2705-2723).
ctatgctccgaagcattat

SEQ ID NO: 490486 - DNA, 19 bp, Mus musculus
  siRNA target sequence for A930019K20Rik (NM_172516.2,2764-2782).
ggactagacgattctactt

SEQ ID NO: 490487 - DNA, 19 bp, Mus musculus
  siRNA target sequence for AA407809 (NM_030724.1,371-389).
ctaagatcgtccagctttt

SEQ ID NO: 490488 - DNA, 19 bp, Mus musculus
  siRNA target sequence for AA407809 (NM_030724.1,484-502).
gccctcaagggccaattca

SEQ ID NO: 490489 - DNA, 19 bp, Mus musculus
  siRNA target sequence for AA407809 (NM_030724.1,485-503).
ccctcaagggccaattcaa

SEQ ID NO: 490490 - DNA, 19 bp, Mus musculus
  siRNA target sequence for AA407809 (NM_030724.1,489-507).
caagggccaattcaacttt

SEQ ID NO: 490491 - DNA, 19 bp, Mus musculus
  siRNA target sequence for AA407809 (NM_030724.1,521-539).
cctttgacaacgaactcat

SEQ ID NO: 490492 - DNA, 19 bp, Mus musculus
  siRNA target sequence for AA407809 (NM_030724.1,531-549).
cgaactcatcttcaaaaca

SEQ ID NO: 490493 - DNA, 19 bp, Mus musculus
  siRNA target sequence for AA407809 (NM_030724.1,664-682).
gggatcctagccttctatt

SEQ ID NO: 490494 - DNA, 19 bp, Mus musculus
  siRNA target sequence for AA407809 (NM_030724.1,695-713).
gagacctgttccagatgaa

SEQ ID NO: 490495 - DNA, 19 bp, Mus musculus
  siRNA target sequence for AA407809 (NM_030724.1,700-718).
ctgttccagatgaagcttt

SEQ ID NO: 490496 - DNA, 19 bp, Mus musculus
  siRNA target sequence for AA407809 (NM_030724.1,743-761).
gtctgtctcgccgagtatt

SEQ ID NO: 490497 - DNA, 19 bp, Mus musculus
  siRNA target sequence for AA407809 (NM_030724.1,745-763).
ctgtctcgccgagtattga

SEQ ID NO: 490498 - DNA, 19 bp, Mus musculus
  siRNA target sequence for AA407809 (NM_030724.1,785-803).
gggaccttgagcagatttt

SEQ ID NO: 490499 - DNA, 19 bp, Mus musculus
  siRNA target sequence for AA407809 (NM_030724.1,786-804).
ggaccttgagcagatttta

SEQ ID NO: 490500 - DNA, 19 bp, Mus musculus
  siRNA target sequence for AA407809 (NM_030724.1,789-807).
ccttgagcagattttatca

SEQ ID NO: 490501 - DNA, 19 bp, Mus musculus
  siRNA target sequence for AA407809 (NM_030724.1,808-826).
cagtacattacgtttgtga

SEQ ID NO: 490502 - DNA, 19 bp, Mus musculus
  siRNA target sequence for AA407809 (NM_030724.1,868-886).
gccgatgtgatcattccta

SEQ ID NO: 490503 - DNA, 19 bp, Mus musculus
  siRNA target sequence for AA407809 (NM_030724.1,884-902).
ctagaggtgccgacaatct

SEQ ID NO: 490504 - DNA, 19 bp, Mus musculus
  siRNA target sequence for AA407809 (NM_030724.1,967-985).
cagacgaacggctatctca

SEQ ID NO: 490505 - DNA, 19 bp, Mus musculus
  siRNA target sequence for Aatk (NM_007377.1,290-308).
gtcgctccgtgcaacttct

SEQ ID NO: 490506 - DNA, 19 bp, Mus musculus
  siRNA target sequence for Aatk (NM_007377.1,330-348).
gcacagcctcctgtactta

SEQ ID NO: 490507 - DNA, 19 bp, Mus musculus
  siRNA target sequence for Aatk (NM_007377.1,551-569).
ccccctacctgctggttat

SEQ ID NO: 490508 - DNA, 19 bp, Mus musculus
  siRNA target sequence for Aatk (NM_007377.1,585-603).
gggggacctcaaaggttat

SEQ ID NO: 490509 - DNA, 19 bp, Mus musculus
  siRNA target sequence for Aatk (NM_007377.1,588-606).
ggacctcaaaggttatcta

SEQ ID NO: 490510 - DNA, 19 bp, Mus musculus
  siRNA target sequence for Aatk (NM_007377.1,680-698).
gtggcgtcttgcatctaca

SEQ ID NO: 490511 - DNA, 19 bp, Mus musculus
  siRNA target sequence for Aatk (NM_007377.1,761-779).
cagtgaaggttggtgatta

SEQ ID NO: 490512 - DNA, 19 bp, Mus musculus
  siRNA target sequence for Aatk (NM_007377.1,782-800).
gcctgtcgcattgcaaata

SEQ ID NO: 490513 - DNA, 19 bp, Mus musculus
  siRNA target sequence for Aatk (NM_007377.1,784-802).
ctgtcgcattgcaaataca

SEQ ID NO: 490514 - DNA, 19 bp, Mus musculus
  siRNA target sequence for Aatk (NM_007377.1,941-959).
ccatctgggagcttttcga

SEQ ID NO: 490515 - DNA, 19 bp, Mus musculus
  siRNA target sequence for Aatk (NM_007377.1,1162-1180).
gctaagggcaccacagaat

SEQ ID NO: 490516 - DNA, 19 bp, Mus musculus
  siRNA target sequence for Aatk (NM_007377.1,1163-1181).
ctaagggcaccacagaatt

SEQ ID NO: 490517 - DNA, 19 bp, Mus musculus
  siRNA target sequence for Aatk (NM_007377.1,1379-1397).
caagccacggcctcaactt

SEQ ID NO: 490518 - DNA, 19 bp, Mus musculus
  siRNA target sequence for Aatk (NM_007377.1,1384-1402).
cacggcctcaactttgaat

SEQ ID NO: 490519 - DNA, 19 bp, Mus musculus
  siRNA target sequence for Aatk (NM_007377.1,1552-1570).
gtgggtagcgagtacttca

SEQ ID NO: 490520 - DNA, 19 bp, Mus musculus
  siRNA target sequence for Aatk (NM_007377.1,1746-1764).
ctgtgaccaccattcacat

SEQ ID NO: 490521 - DNA, 19 bp, Mus musculus
  siRNA target sequence for Aatk (NM_007377.1,1975-1993).
ggacactggagctctaaca

SEQ ID NO: 490522 - DNA, 19 bp, Mus musculus
  siRNA target sequence for Aatk (NM_007377.1,1976-1994).
gacactggagctctaacat

SEQ ID NO: 490523 - DNA, 19 bp, Mus musculus
  siRNA target sequence for Aatk (NM_007377.1,1978-1996).
cactggagctctaacatgt

SEQ ID NO: 490524 - DNA, 19 bp, Mus musculus
  siRNA target sequence for Aatk (NM_007377.1,2142-2160).
ggaggatcccagagatttt

SEQ ID NO: 490525 - DNA, 19 bp, Mus musculus
  siRNA target sequence for Aatk (NM_007377.1,2310-2328).
cattgtggaacccaaactt

SEQ ID NO: 490526 - DNA, 19 bp, Mus musculus
  siRNA target sequence for Aatk (NM_007377.1,2616-2634).
ggagaagtcaggcatagta

SEQ ID NO: 490527 - DNA, 19 bp, Mus musculus
  siRNA target sequence for Aatk (NM_007377.1,2802-2820).
ctatgagtctcctgagttt

SEQ ID NO: 490528 - DNA, 19 bp, Mus musculus
  siRNA target sequence for Aatk (NM_007377.1,3536-3554).
gccagagtgcccgaaatct

SEQ ID NO: 490529 - DNA, 19 bp, Mus musculus
  siRNA target sequence for Aatk (NM_007377.1,3537-3555).
ccagagtgcccgaaatcta

SEQ ID NO: 490530 - DNA, 19 bp, Mus musculus
  siRNA target sequence for Aatk (NM_007377.1,3962-3980).
ctgcctcccgcttttccat

SEQ ID NO: 490531 - DNA, 19 bp, Mus musculus
  siRNA target sequence for Abca1 (NM_013454.2,353-371).
gaagaatctgacatttcga

SEQ ID NO: 490532 - DNA, 19 bp, Mus musculus
  siRNA target sequence for Abca1 (NM_013454.2,455-473).
cccaccctacgaacaacat

SEQ ID NO: 490533 - DNA, 19 bp, Mus musculus
  siRNA target sequence for Abca1 (NM_013454.2,457-475).
caccctacgaacaacatga

SEQ ID NO: 490534 - DNA, 19 bp, Mus musculus
  siRNA target sequence for Abca1 (NM_013454.2,476-494).
gtgccactttccgaataaa

SEQ ID NO: 490535 - DNA, 19 bp, Mus musculus
  siRNA target sequence for Abca1 (NM_013454.2,525-543).
gtacaggggattatctgta

SEQ ID NO: 490536 - DNA, 19 bp, Mus musculus
  siRNA target sequence for Abca1 (NM_013454.2,554-572).
cccctgcttccgttatcca

SEQ ID NO: 490537 - DNA, 19 bp, Mus musculus
  siRNA target sequence for Abca1 (NM_013454.2,586-604).
ctcccggtgttgttggaaa

SEQ ID NO: 490538 - DNA, 19 bp, Mus musculus
  siRNA target sequence for Abca1 (NM_013454.2,589-607).
ccggtgttgttggaaactt

SEQ ID NO: 490539 - DNA, 19 bp, Mus musculus
  siRNA target sequence for Abca1 (NM_013454.2,590-608).
cggtgttgttggaaacttt

SEQ ID NO: 490540 - DNA, 19 bp, Mus musculus
  siRNA target sequence for Abca1 (NM_013454.2,591-609).
ggtgttgttggaaacttta

SEQ ID NO: 490541 - DNA, 19 bp, Mus musculus
  siRNA target sequence for Abca1 (NM_013454.2,594-612).
gttgttggaaactttaaca

SEQ ID NO: 490542 - DNA, 19 bp, Mus musculus
  siRNA target sequence for Abca1 (NM_013454.2,597-615).
gttggaaactttaacaagt

SEQ ID NO: 490543 - DNA, 19 bp, Mus musculus
  siRNA target sequence for Abca1 (NM_013454.2,670-688).
gagataccagcattaagga

SEQ ID NO: 490544 - DNA, 19 bp, Mus musculus
  siRNA target sequence for Abca1 (NM_013454.2,706-724).
gaatgttacggcagatcaa

SEQ ID NO: 490545 - DNA, 19 bp, Mus musculus
  siRNA target sequence for Abca1 (NM_013454.2,726-744).
catcccaactcaaatttga

SEQ ID NO: 490546 - DNA, 19 bp, Mus musculus
  siRNA target sequence for Abca1 (NM_013454.2,783-801).
ggattcctgcagcacaatt

SEQ ID NO: 490547 - DNA, 19 bp, Mus musculus
  siRNA target sequence for Abca1 (NM_013454.2,784-802).
gattcctgcagcacaattt

SEQ ID NO: 490548 - DNA, 19 bp, Mus musculus
  siRNA target sequence for Abca1 (NM_013454.2,850-868).
gtctccagaaggtattttt

SEQ ID NO: 490549 - DNA, 19 bp, Mus musculus
  siRNA target sequence for Abca1 (NM_013454.2,869-887).
gcaaggctaccaattacat

SEQ ID NO: 490550 - DNA, 19 bp, Mus musculus
  siRNA target sequence for Abca1 (NM_013454.2,870-888).
caaggctaccaattacatt

SEQ ID NO: 490551 - DNA, 19 bp, Mus musculus
  siRNA target sequence for Abca1 (NM_013454.2,899-917).
gtgtaacggatcaaaatta

SEQ ID NO: 490552 - DNA, 19 bp, Mus musculus
  siRNA target sequence for Abca1 (NM_013454.2,901-919).
gtaacggatcaaaattaga

SEQ ID NO: 490553 - DNA, 19 bp, Mus musculus
  siRNA target sequence for Abca1 (NM_013454.2,905-923).
cggatcaaaattagaagaa

SEQ ID NO: 490554 - DNA, 19 bp, Mus musculus
  siRNA target sequence for Abca1 (NM_013454.2,933-951).
cttggtgatgcggaagttt

SEQ ID NO: 490555 - DNA, 19 bp, Mus musculus
  siRNA target sequence for Abca1 (NM_013454.2,997-1015).
gagtactgcgctacaacat

SEQ ID NO: 490556 - DNA, 19 bp, Mus musculus
  siRNA target sequence for Abca1 (NM_013454.2,1028-1046).
gccagttgtgacaaaacta

SEQ ID NO: 490557 - DNA, 19 bp, Mus musculus
  siRNA target sequence for Abca1 (NM_013454.2,1029-1047).
ccagttgtgacaaaactaa

SEQ ID NO: 490558 - DNA, 19 bp, Mus musculus
  siRNA target sequence for Abca1 (NM_013454.2,1030-1048).
cagttgtgacaaaactaaa

SEQ ID NO: 490559 - DNA, 19 bp, Mus musculus
  siRNA target sequence for Abca1 (NM_013454.2,1160-1178).
gcggcaggaggtgatgttt

SEQ ID NO: 490560 - DNA, 19 bp, Mus musculus
  siRNA target sequence for Abca1 (NM_013454.2,1288-1306).
ggtacgaggataacaacta

SEQ ID NO: 490561 - DNA, 19 bp, Mus musculus
  siRNA target sequence for Abca1 (NM_013454.2,1292-1310).
cgaggataacaactacaaa

SEQ ID NO: 490562 - DNA, 19 bp, Mus musculus
  siRNA target sequence for Abca1 (NM_013454.2,1366-1384).
ctacaactccttattgcaa

SEQ ID NO: 490563 - DNA, 19 bp, Mus musculus
  siRNA target sequence for Abca1 (NM_013454.2,1372-1390).
ctccttattgcaatgattt

SEQ ID NO: 490564 - DNA, 19 bp, Mus musculus
  siRNA target sequence for Abca1 (NM_013454.2,1374-1392).
ccttattgcaatgatttga

SEQ ID NO: 490565 - DNA, 19 bp, Mus musculus
  siRNA target sequence for Abca1 (NM_013454.2,1375-1393).
cttattgcaatgatttgat

SEQ ID NO: 490566 - DNA, 19 bp, Mus musculus
  siRNA target sequence for Abca1 (NM_013454.2,1403-1421).
ggagtctagtcctctttct

SEQ ID NO: 490567 - DNA, 19 bp, Mus musculus
  siRNA target sequence for Abca1 (NM_013454.2,1413-1431).
cctctttctcgaattattt

SEQ ID NO: 490568 - DNA, 19 bp, Mus musculus
  siRNA target sequence for Abca1 (NM_013454.2,1766-1784).
ctggagagaagctttcaat

SEQ ID NO: 490569 - DNA, 19 bp, Mus musculus
  siRNA target sequence for Abca1 (NM_013454.2,1768-1786).
ggagagaagctttcaatga

SEQ ID NO: 490570 - DNA, 19 bp, Mus musculus
  siRNA target sequence for Abca1 (NM_013454.2,1794-1812).
caggcaatccagacgatat

SEQ ID NO: 490571 - DNA, 19 bp, Mus musculus
  siRNA target sequence for Abca1 (NM_013454.2,1796-1814).
ggcaatccagacgatatct

SEQ ID NO: 490572 - DNA, 19 bp, Mus musculus
  siRNA target sequence for Abca1 (NM_013454.2,1936-1954).
gcatcactccagatagtgt

SEQ ID NO: 490573 - DNA, 19 bp, Mus musculus
  siRNA target sequence for Abca1 (NM_013454.2,1998-2016).
gacaacgtggagagaacta

SEQ ID NO: 490574 - DNA, 19 bp, Mus musculus
  siRNA target sequence for Abca1 (NM_013454.2,2000-2018).
caacgtggagagaactaat

SEQ ID NO: 490575 - DNA, 19 bp, Mus musculus
  siRNA target sequence for Abca1 (NM_013454.2,2007-2025).
gagagaactaataagatca

SEQ ID NO: 490576 - DNA, 19 bp, Mus musculus
  siRNA target sequence for Abca1 (NM_013454.2,2050-2068).
ctcgggctgacccttttga

SEQ ID NO: 490577 - DNA, 19 bp, Mus musculus
  siRNA target sequence for Abca1 (NM_013454.2,2067-2085).
gaagatatgcgctatgtct

SEQ ID NO: 490578 - DNA, 19 bp, Mus musculus
  siRNA target sequence for Abca1 (NM_013454.2,2164-2182).
gtgtctacgtgcaacagat

SEQ ID NO: 490579 - DNA, 19 bp, Mus musculus
  siRNA target sequence for Abca1 (NM_013454.2,2183-2201).
gccctacccctgttatgtt

SEQ ID NO: 490580 - DNA, 19 bp, Mus musculus
  siRNA target sequence for Abca1 (NM_013454.2,2185-2203).
cctacccctgttatgttga

SEQ ID NO: 490581 - DNA, 19 bp, Mus musculus
  siRNA target sequence for Abca1 (NM_013454.2,2186-2204).
ctacccctgttatgttgat

SEQ ID NO: 490582 - DNA, 19 bp, Mus musculus
  siRNA target sequence for Abca1 (NM_013454.2,2191-2209).
cctgttatgttgatgacat

SEQ ID NO: 490583 - DNA, 19 bp, Mus musculus
  siRNA target sequence for Abca1 (NM_013454.2,2230-2248).
ggtcaatgcccctcttcat

SEQ ID NO: 490584 - DNA, 19 bp, Mus musculus
  siRNA target sequence for Abca1 (NM_013454.2,2269-2287).
ctgtcgctgtgatcatcaa

SEQ ID NO: 490585 - DNA, 19 bp, Mus musculus
  siRNA target sequence for Abca1 (NM_013454.2,2360-2378).
ctggtttagctggtttgtt

SEQ ID NO: 490586 - DNA, 19 bp, Mus musculus
  siRNA target sequence for Abca1 (NM_013454.2,2421-2439).
gtcatcttgaagttaggaa

SEQ ID NO: 490587 - DNA, 19 bp, Mus musculus
  siRNA target sequence for Abca1 (NM_013454.2,2665-2683).
ctcctgtggcttttggatt

SEQ ID NO: 490588 - DNA, 19 bp, Mus musculus
  siRNA target sequence for Abca1 (NM_013454.2,2680-2698).
gattcggctgtgagtattt

SEQ ID NO: 490589 - DNA, 19 bp, Mus musculus
  siRNA target sequence for Abca1 (NM_013454.2,2725-2743).
gggtccaatgggacaatct

SEQ ID NO: 490590 - DNA, 19 bp, Mus musculus
  siRNA target sequence for Abca1 (NM_013454.2,2727-2745).
gtccaatgggacaatctct

SEQ ID NO: 490591 - DNA, 19 bp, Mus musculus
  siRNA target sequence for Abca1 (NM_013454.2,2892-2910).
ccttgtaccaagtcatact

SEQ ID NO: 490592 - DNA, 19 bp, Mus musculus
  siRNA target sequence for Abca1 (NM_013454.2,3070-3088).
gcttggcgctcaactttta

SEQ ID NO: 490593 - DNA, 19 bp, Mus musculus
  siRNA target sequence for Abca1 (NM_013454.2,3074-3092).
ggcgctcaacttttacgaa

SEQ ID NO: 490594 - DNA, 19 bp, Mus musculus
  siRNA target sequence for Abca1 (NM_013454.2,3136-3154).
ccaccaccatgtcaatact

SEQ ID NO: 490595 - DNA, 19 bp, Mus musculus
  siRNA target sequence for Abca1 (NM_013454.2,3244-3262).
gagtctgtccccagcataa

SEQ ID NO: 490596 - DNA, 19 bp, Mus musculus
  siRNA target sequence for Abca1 (NM_013454.2,3463-3481).
gtggatccaaggttgtcat

SEQ ID NO: 490597 - DNA, 19 bp, Mus musculus
  siRNA target sequence for Abca1 (NM_013454.2,3466-3484).
gatccaaggttgtcattct

SEQ ID NO: 490598 - DNA, 19 bp, Mus musculus
  siRNA target sequence for Abca1 (NM_013454.2,3532-3550).
gggaactcctgctaaaata

SEQ ID NO: 490599 - DNA, 19 bp, Mus musculus
  siRNA target sequence for Abca1 (NM_013454.2,3552-3570).
cggcaaggccgcaccatta

SEQ ID NO: 490600 - DNA, 19 bp, Mus musculus
  siRNA target sequence for Abca1 (NM_013454.2,3553-3571).
ggcaaggccgcaccattat

SEQ ID NO: 490601 - DNA, 19 bp, Mus musculus
  siRNA target sequence for Abca1 (NM_013454.2,3554-3572).
gcaaggccgcaccattatt

SEQ ID NO: 490602 - DNA, 19 bp, Mus musculus
  siRNA target sequence for Abca1 (NM_013454.2,3555-3573).
caaggccgcaccattattt

SEQ ID NO: 490603 - DNA, 19 bp, Mus musculus
  siRNA target sequence for Abca1 (NM_013454.2,3558-3576).
ggccgcaccattattttgt

SEQ ID NO: 490604 - DNA, 19 bp, Mus musculus
  siRNA target sequence for Abca1 (NM_013454.2,3560-3578).
ccgcaccattattttgtct

SEQ ID NO: 490605 - DNA, 19 bp, Mus musculus
  siRNA target sequence for Abca1 (NM_013454.2,3651-3669).
gtgggctcctccctgtttt

SEQ ID NO: 490606 - DNA, 19 bp, Mus musculus
  siRNA target sequence for Abca1 (NM_013454.2,3655-3673).
gctcctccctgtttttgaa

SEQ ID NO: 490607 - DNA, 19 bp, Mus musculus
  siRNA target sequence for Abca1 (NM_013454.2,3680-3698).
gttgggaacgggttactat

SEQ ID NO: 490608 - DNA, 19 bp, Mus musculus
  siRNA target sequence for Abca1 (NM_013454.2,3684-3702).
ggaacgggttactatctga

SEQ ID NO: 490609 - DNA, 19 bp, Mus musculus
  siRNA target sequence for Abca1 (NM_013454.2,3758-3776).
caccgtgtcttgtctgaaa

SEQ ID NO: 490610 - DNA, 19 bp, Mus musculus
  siRNA target sequence for Abca1 (NM_013454.2,3760-3778).
ccgtgtcttgtctgaaaaa

SEQ ID NO: 490611 - DNA, 19 bp, Mus musculus
  siRNA target sequence for Abca1 (NM_013454.2,3816-3834).
ctgggcagcgaccatgaaa

SEQ ID NO: 490612 - DNA, 19 bp, Mus musculus
  siRNA target sequence for Abca1 (NM_013454.2,4166-4184).
cccatttacggaagatgat

SEQ ID NO: 490613 - DNA, 19 bp, Mus musculus
  siRNA target sequence for Abca1 (NM_013454.2,4185-4203).
gctgttgatcccaatgact

SEQ ID NO: 490614 - DNA, 19 bp, Mus musculus
  siRNA target sequence for Abca1 (NM_013454.2,4195-4213).
ccaatgactctgacataga

SEQ ID NO: 490615 - DNA, 19 bp, Mus musculus
  siRNA target sequence for Abca1 (NM_013454.2,4343-4361).
gagccggaagggtttcttt

SEQ ID NO: 490616 - DNA, 19 bp, Mus musculus
  siRNA target sequence for Abca1 (NM_013454.2,4466-4484).
gtataatgagcagtataca

SEQ ID NO: 490617 - DNA, 19 bp, Mus musculus
  siRNA target sequence for Abca1 (NM_013454.2,4532-4550).
gaatgctctgaccaaagat

SEQ ID NO: 490618 - DNA, 19 bp, Mus musculus
  siRNA target sequence for Abca1 (NM_013454.2,4564-4582).
cccgctgtatggaaggaaa

SEQ ID NO: 490619 - DNA, 19 bp, Mus musculus
  siRNA target sequence for Abca1 (NM_013454.2,4796-4814).
cgcagacatccttcagaat

SEQ ID NO: 490620 - DNA, 19 bp, Mus musculus
  siRNA target sequence for Abca1 (NM_013454.2,4850-4868).
gacgtacgtgcagatcata

SEQ ID NO: 490621 - DNA, 19 bp, Mus musculus
  siRNA target sequence for Abca1 (NM_013454.2,4869-4887).
gcaaagagcttaaagaata

SEQ ID NO: 490622 - DNA, 19 bp, Mus musculus
  siRNA target sequence for Abca1 (NM_013454.2,4928-4946).
gggtgtcagtaattctcaa

SEQ ID NO: 490623 - DNA, 19 bp, Mus musculus
  siRNA target sequence for Abca1 (NM_013454.2,4954-4972).
ctccgagccatgaagttaa

SEQ ID NO: 490624 - DNA, 19 bp, Mus musculus
  siRNA target sequence for Abca1 (NM_013454.2,4957-4975).
cgagccatgaagttaatga

SEQ ID NO: 490625 - DNA, 19 bp, Mus musculus
  siRNA target sequence for Abca1 (NM_013454.2,4958-4976).
gagccatgaagttaatgat

SEQ ID NO: 490626 - DNA, 19 bp, Mus musculus
  siRNA target sequence for Abca1 (NM_013454.2,5065-5083).
ggctggatacgaaaaacaa

SEQ ID NO: 490627 - DNA, 19 bp, Mus musculus
  siRNA target sequence for Abca1 (NM_013454.2,5066-5084).
gctggatacgaaaaacaat

SEQ ID NO: 490628 - DNA, 19 bp, Mus musculus
  siRNA target sequence for Abca1 (NM_013454.2,5070-5088).
gatacgaaaaacaatgtca

SEQ ID NO: 490629 - DNA, 19 bp, Mus musculus
  siRNA target sequence for Abca1 (NM_013454.2,5109-5127).
ggctggcatgctatcagtt

SEQ ID NO: 490630 - DNA, 19 bp, Mus musculus
  siRNA target sequence for Abca1 (NM_013454.2,5125-5143).
gttcgttcctgaatgtcat

SEQ ID NO: 490631 - DNA, 19 bp, Mus musculus
  siRNA target sequence for Abca1 (NM_013454.2,5189-5207).
gagccagtatggaatcact

SEQ ID NO: 490632 - DNA, 19 bp, Mus musculus
  siRNA target sequence for Abca1 (NM_013454.2,5277-5295).
gacgtcctcgtgtctatct

SEQ ID NO: 490633 - DNA, 19 bp, Mus musculus
  siRNA target sequence for Abca1 (NM_013454.2,5279-5297).
cgtcctcgtgtctatctgt

SEQ ID NO: 490634 - DNA, 19 bp, Mus musculus
  siRNA target sequence for Abca1 (NM_013454.2,5368-5386).
ccaagcatcttcagttcat

SEQ ID NO: 490635 - DNA, 19 bp, Mus musculus
  siRNA target sequence for Abca1 (NM_013454.2,5394-5412).
gtgaagcctgtcatctact

SEQ ID NO: 490636 - DNA, 19 bp, Mus musculus
  siRNA target sequence for Abca1 (NM_013454.2,5429-5447).
ctgggatatgtgcaattat

SEQ ID NO: 490637 - DNA, 19 bp, Mus musculus
  siRNA target sequence for Abca1 (NM_013454.2,5454-5472).
cctgctacactggtcatta

SEQ ID NO: 490638 - DNA, 19 bp, Mus musculus
  siRNA target sequence for Abca1 (NM_013454.2,5455-5473).
ctgctacactggtcattat

SEQ ID NO: 490639 - DNA, 19 bp, Mus musculus
  siRNA target sequence for Abca1 (NM_013454.2,5458-5476).
ctacactggtcattatcat

SEQ ID NO: 490640 - DNA, 19 bp, Mus musculus
  siRNA target sequence for Abca1 (NM_013454.2,5561-5579).
gatcactcctctcatgtat

SEQ ID NO: 490641 - DNA, 19 bp, Mus musculus
  siRNA target sequence for Abca1 (NM_013454.2,5581-5599).
cagcatcctttgtgttcaa

SEQ ID NO: 490642 - DNA, 19 bp, Mus musculus
  siRNA target sequence for Abca1 (NM_013454.2,5660-5678).
cagtgtggccactttcgta

SEQ ID NO: 490643 - DNA, 19 bp, Mus musculus
  siRNA target sequence for Abca1 (NM_013454.2,5681-5699).
ggagctgtttacaaacaat

SEQ ID NO: 490644 - DNA, 19 bp, Mus musculus
  siRNA target sequence for Abca1 (NM_013454.2,5682-5700).
gagctgtttacaaacaata

SEQ ID NO: 490645 - DNA, 19 bp, Mus musculus
  siRNA target sequence for Abca1 (NM_013454.2,5861-5879).
ggtaggacggaaccttttt

SEQ ID NO: 490646 - DNA, 19 bp, Mus musculus
  siRNA target sequence for Abca1 (NM_013454.2,5900-5918).
ggtgttcttcctcattact

SEQ ID NO: 490647 - DNA, 19 bp, Mus musculus
  siRNA target sequence for Abca1 (NM_013454.2,5919-5937).
gttctgatccagtacagat

SEQ ID NO: 490648 - DNA, 19 bp, Mus musculus
  siRNA target sequence for Abca1 (NM_013454.2,5965-5983).
cgaagcttcctcctttgaa

SEQ ID NO: 490649 - DNA, 19 bp, Mus musculus
  siRNA target sequence for Abca1 (NM_013454.2,6026-6044).
ggacggtggcggacagaat

SEQ ID NO: 490650 - DNA, 19 bp, Mus musculus
  siRNA target sequence for Abca1 (NM_013454.2,6030-6048).
ggtggcggacagaatgaca

SEQ ID NO: 490651 - DNA, 19 bp, Mus musculus
  siRNA target sequence for Abca1 (NM_013454.2,6031-6049).
gtggcggacagaatgacat

SEQ ID NO: 490652 - DNA, 19 bp, Mus musculus
  siRNA target sequence for Abca1 (NM_013454.2,6062-6080).
ggaactgaccaagatctat

SEQ ID NO: 490653 - DNA, 19 bp, Mus musculus
  siRNA target sequence for Abca1 (NM_013454.2,6063-6081).
gaactgaccaagatctata

SEQ ID NO: 490654 - DNA, 19 bp, Mus musculus
  siRNA target sequence for Abca1 (NM_013454.2,6066-6084).
ctgaccaagatctatagga

SEQ ID NO: 490655 - DNA, 19 bp, Mus musculus
  siRNA target sequence for Abca1 (NM_013454.2,6165-6183).
gctgggaagtcaacaactt

SEQ ID NO: 490656 - DNA, 19 bp, Mus musculus
  siRNA target sequence for Abca1 (NM_013454.2,6168-6186).
gggaagtcaacaactttca

SEQ ID NO: 490657 - DNA, 19 bp, Mus musculus
  siRNA target sequence for Abca1 (NM_013454.2,6169-6187).
ggaagtcaacaactttcaa

SEQ ID NO: 490658 - DNA, 19 bp, Mus musculus
  siRNA target sequence for Abca1 (NM_013454.2,6217-6235).
gaggggatgcgttccttaa

SEQ ID NO: 490659 - DNA, 19 bp, Mus musculus
  siRNA target sequence for Abca1 (NM_013454.2,6221-6239).
ggatgcgttccttaacaaa

SEQ ID NO: 490660 - DNA, 19 bp, Mus musculus
  siRNA target sequence for Abca1 (NM_013454.2,6225-6243).
gcgttccttaacaaaaaca

SEQ ID NO: 490661 - DNA, 19 bp, Mus musculus
  siRNA target sequence for Abca1 (NM_013454.2,6236-6254).
caaaaacagcatcttatca

SEQ ID NO: 490662 - DNA, 19 bp, Mus musculus
  siRNA target sequence for Abca1 (NM_013454.2,6245-6263).
catcttatcaaatatccat

SEQ ID NO: 490663 - DNA, 19 bp, Mus musculus
  siRNA target sequence for Abca1 (NM_013454.2,6359-6377).
gggagtcccagaaaaggaa

SEQ ID NO: 490664 - DNA, 19 bp, Mus musculus
  siRNA target sequence for Abca1 (NM_013454.2,6432-6450).
gaaaaatatgccagtaact

SEQ ID NO: 490665 - DNA, 19 bp, Mus musculus
  siRNA target sequence for Abca1 (NM_013454.2,6546-6564).
cctaaagcccggagattct

SEQ ID NO: 490666 - DNA, 19 bp, Mus musculus
  siRNA target sequence for Abca1 (NM_013454.2,6547-6565).
ctaaagcccggagattctt

SEQ ID NO: 490667 - DNA, 19 bp, Mus musculus
  siRNA target sequence for Abca1 (NM_013454.2,6555-6573).
cggagattcttgtggaatt

SEQ ID NO: 490668 - DNA, 19 bp, Mus musculus
  siRNA target sequence for Abca1 (NM_013454.2,6568-6586).
ggaattgtgccctaagcat

SEQ ID NO: 490669 - DNA, 19 bp, Mus musculus
  siRNA target sequence for Abca1 (NM_013454.2,6569-6587).
gaattgtgccctaagcatt

SEQ ID NO: 490670 - DNA, 19 bp, Mus musculus
  siRNA target sequence for Abca1 (NM_013454.2,6606-6624).
gtagtccttacatctcata

SEQ ID NO: 490671 - DNA, 19 bp, Mus musculus
  siRNA target sequence for Abca1 (NM_013454.2,6609-6627).
gtccttacatctcatagta

SEQ ID NO: 490672 - DNA, 19 bp, Mus musculus
  siRNA target sequence for Abca1 (NM_013454.2,6694-6712).
gcagtgtccaacatctgaa

SEQ ID NO: 490673 - DNA, 19 bp, Mus musculus
  siRNA target sequence for Abca1 (NM_013454.2,6695-6713).
cagtgtccaacatctgaaa

SEQ ID NO: 490674 - DNA, 19 bp, Mus musculus
  siRNA target sequence for Abca1 (NM_013454.2,6871-6889).
catctctagccaggatatt

SEQ ID NO: 490675 - DNA, 19 bp, Mus musculus
  siRNA target sequence for Abca1 (NM_013454.2,6916-6934).
gactccacatagaagacta

SEQ ID NO: 490676 - DNA, 19 bp, Mus musculus
  siRNA target sequence for Abca1 (NM_013454.2,6949-6967).
caacacttgaccaagtatt

SEQ ID NO: 490677 - DNA, 19 bp, Mus musculus
  siRNA target sequence for Abca1 (NM_013454.2,6952-6970).
cacttgaccaagtatttgt

SEQ ID NO: 490678 - DNA, 19 bp, Mus musculus
  siRNA target sequence for Abca1 (NM_013454.2,6980-6998).
caaggaccaaagtgatgat

SEQ ID NO: 490679 - DNA, 19 bp, Mus musculus
  siRNA target sequence for Abca1 (NM_013454.2,7050-7068).
gccgttctcacatcctttt

SEQ ID NO: 490680 - DNA, 19 bp, Mus musculus
  siRNA target sequence for Abca2 (NM_007379.1,243-261).
gtttggcttcctgcaatat

SEQ ID NO: 490681 - DNA, 19 bp, Mus musculus
  siRNA target sequence for Abca2 (NM_007379.1,564-582).
ggtctatcgcttgcttttt

SEQ ID NO: 490682 - DNA, 19 bp, Mus musculus
  siRNA target sequence for Abca2 (NM_007379.1,951-969).
gagcctgccggcactctta

SEQ ID NO: 490683 - DNA, 19 bp, Mus musculus
  siRNA target sequence for Abca2 (NM_007379.1,1107-1125).
caccgggataggtgcaaat

SEQ ID NO: 490684 - DNA, 19 bp, Mus musculus
  siRNA target sequence for Abca2 (NM_007379.1,1110-1128).
cgggataggtgcaaattca

SEQ ID NO: 490685 - DNA, 19 bp, Mus musculus
  siRNA target sequence for Abca2 (NM_007379.1,1231-1249).
ggcttgcaacccatcttgt

SEQ ID NO: 490686 - DNA, 19 bp, Mus musculus
  siRNA target sequence for Abca2 (NM_007379.1,1282-1300).
cttcggagaggcaacatga

SEQ ID NO: 490687 - DNA, 19 bp, Mus musculus
  siRNA target sequence for Abca2 (NM_007379.1,1299-1317).
gagctccctgggttttaca

SEQ ID NO: 490688 - DNA, 19 bp, Mus musculus
  siRNA target sequence for Abca2 (NM_007379.1,1331-1349).
ggaacttgggccttctagt

SEQ ID NO: 490689 - DNA, 19 bp, Mus musculus
  siRNA target sequence for Abca2 (NM_007379.1,1466-1484).
cccaggtctggctcaacat

SEQ ID NO: 490690 - DNA, 19 bp, Mus musculus
  siRNA target sequence for Abca2 (NM_007379.1,1468-1486).
caggtctggctcaacatct

SEQ ID NO: 490691 - DNA, 19 bp, Mus musculus
  siRNA target sequence for Abca2 (NM_007379.1,1548-1566).
gcagtatgtagctgatctt

SEQ ID NO: 490692 - DNA, 19 bp, Mus musculus
  siRNA target sequence for Abca2 (NM_007379.1,1659-1677).
gcaacagcttgacacaata

SEQ ID NO: 490693 - DNA, 19 bp, Mus musculus
  siRNA target sequence for Abca2 (NM_007379.1,1663-1681).
cagcttgacacaatagaca

SEQ ID NO: 490694 - DNA, 19 bp, Mus musculus
  siRNA target sequence for Abca2 (NM_007379.1,1693-1711).
ggctggatccagttcatgt

SEQ ID NO: 490695 - DNA, 19 bp, Mus musculus
  siRNA target sequence for Abca2 (NM_007379.1,1761-1779).
cgtgaactacactctcaat

SEQ ID NO: 490696 - DNA, 19 bp, Mus musculus
  siRNA target sequence for Abca2 (NM_007379.1,1866-1884).
caagattcgccagaattca

SEQ ID NO: 490697 - DNA, 19 bp, Mus musculus
  siRNA target sequence for Abca2 (NM_007379.1,1906-1924).
gagatccgccgtgcttatt

SEQ ID NO: 490698 - DNA, 19 bp, Mus musculus
  siRNA target sequence for Abca2 (NM_007379.1,2264-2282).
gctttgtgcagctgtctat

SEQ ID NO: 490699 - DNA, 19 bp, Mus musculus
  siRNA target sequence for Abca2 (NM_007379.1,2374-2392).
gctgtggccactatcatgt

SEQ ID NO: 490700 - DNA, 19 bp, Mus musculus
  siRNA target sequence for Abca2 (NM_007379.1,2377-2395).
gtggccactatcatgtttt

SEQ ID NO: 490701 - DNA, 19 bp, Mus musculus
  siRNA target sequence for Abca2 (NM_007379.1,2380-2398).
gccactatcatgttttgct

SEQ ID NO: 490702 - DNA, 19 bp, Mus musculus
  siRNA target sequence for Abca2 (NM_007379.1,2468-2486).
gctacgttccctacatgta

SEQ ID NO: 490703 - DNA, 19 bp, Mus musculus
  siRNA target sequence for Abca2 (NM_007379.1,2680-2698).
cttgctgtcaccatgctta

SEQ ID NO: 490704 - DNA, 19 bp, Mus musculus
  siRNA target sequence for Abca2 (NM_007379.1,2721-2739).
cgtgctcacttggtacatt

SEQ ID NO: 490705 - DNA, 19 bp, Mus musculus
  siRNA target sequence for Abca2 (NM_007379.1,2787-2805).
ccgctacagaagtcctatt

SEQ ID NO: 490706 - DNA, 19 bp, Mus musculus
  siRNA target sequence for Abca2 (NM_007379.1,2985-3003).
caccaaggtctataagaat

SEQ ID NO: 490707 - DNA, 19 bp, Mus musculus
  siRNA target sequence for Abca2 (NM_007379.1,2987-3005).
ccaaggtctataagaatga

SEQ ID NO: 490708 - DNA, 19 bp, Mus musculus
  siRNA target sequence for Abca2 (NM_007379.1,3134-3152).
cgggctcagccactatcta

SEQ ID NO: 490709 - DNA, 19 bp, Mus musculus
  siRNA target sequence for Abca2 (NM_007379.1,3135-3153).
gggctcagccactatctat

SEQ ID NO: 490710 - DNA, 19 bp, Mus musculus
  siRNA target sequence for Abca2 (NM_007379.1,3416-3434).
gtggctctagagccattat

SEQ ID NO: 490711 - DNA, 19 bp, Mus musculus
  siRNA target sequence for Abca2 (NM_007379.1,3418-3436).
ggctctagagccattatct

SEQ ID NO: 490712 - DNA, 19 bp, Mus musculus
  siRNA target sequence for Abca2 (NM_007379.1,3419-3437).
gctctagagccattatctt

SEQ ID NO: 490713 - DNA, 19 bp, Mus musculus
  siRNA target sequence for Abca2 (NM_007379.1,3420-3438).
ctctagagccattatctta

SEQ ID NO: 490714 - DNA, 19 bp, Mus musculus
  siRNA target sequence for Abca2 (NM_007379.1,3422-3440).
ctagagccattatcttaga

SEQ ID NO: 490715 - DNA, 19 bp, Mus musculus
  siRNA target sequence for Abca2 (NM_007379.1,3487-3505).
gacctcattctgaagtaca

SEQ ID NO: 490716 - DNA, 19 bp, Mus musculus
  siRNA target sequence for Abca2 (NM_007379.1,3860-3878).
ccttcgagcgcctctttca

SEQ ID NO: 490717 - DNA, 19 bp, Mus musculus
  siRNA target sequence for Abca2 (NM_007379.1,3903-3921).
gctccatctgagcagtttt

SEQ ID NO: 490718 - DNA, 19 bp, Mus musculus
  siRNA target sequence for Abca2 (NM_007379.1,4190-4208).
gtcccctctttgacaactt

SEQ ID NO: 490719 - DNA, 19 bp, Mus musculus
  siRNA target sequence for Abca2 (NM_007379.1,4425-4443).
gttgtctgtccctgagatt

SEQ ID NO: 490720 - DNA, 19 bp, Mus musculus
  siRNA target sequence for Abca2 (NM_007379.1,4703-4721).
cacggttcttcgacagtat

SEQ ID NO: 490721 - DNA, 19 bp, Mus musculus
  siRNA target sequence for Abca2 (NM_007379.1,4705-4723).
cggttcttcgacagtatgt

SEQ ID NO: 490722 - DNA, 19 bp, Mus musculus
  siRNA target sequence for Abca2 (NM_007379.1,5070-5088).
ccgactacaccgatatgga

SEQ ID NO: 490723 - DNA, 19 bp, Mus musculus
  siRNA target sequence for Abca2 (NM_007379.1,5096-5114).
cctttggtaatgttcagaa

SEQ ID NO: 490724 - DNA, 19 bp, Mus musculus
  siRNA target sequence for Abca2 (NM_007379.1,5101-5119).
ggtaatgttcagaagtcta

SEQ ID NO: 490725 - DNA, 19 bp, Mus musculus
  siRNA target sequence for Abca2 (NM_007379.1,5102-5120).
gtaatgttcagaagtctat

SEQ ID NO: 490726 - DNA, 19 bp, Mus musculus
  siRNA target sequence for Abca2 (NM_007379.1,5261-5279).
caaacctacccaaaagcaa

SEQ ID NO: 490727 - DNA, 19 bp, Mus musculus
  siRNA target sequence for Abca2 (NM_007379.1,5489-5507).
ggtgcaaccctgtcatcta

SEQ ID NO: 490728 - DNA, 19 bp, Mus musculus
  siRNA target sequence for Abca2 (NM_007379.1,5564-5582).
gcgtgatcatcctctttgt

SEQ ID NO: 490729 - DNA, 19 bp, Mus musculus
  siRNA target sequence for Abca2 (NM_007379.1,5587-5605).
gacttacctgcctacacat

SEQ ID NO: 490730 - DNA, 19 bp, Mus musculus
  siRNA target sequence for Abca2 (NM_007379.1,5893-5911).
gagtacatcaacgaatact

SEQ ID NO: 490731 - DNA, 19 bp, Mus musculus
  siRNA target sequence for Abca2 (NM_007379.1,5904-5922).
cgaatactacgccaagatt

SEQ ID NO: 490732 - DNA, 19 bp, Mus musculus
  siRNA target sequence for Abca2 (NM_007379.1,5948-5966).
cgttcgagtgggacattgt

SEQ ID NO: 490733 - DNA, 19 bp, Mus musculus
  siRNA target sequence for Abca2 (NM_007379.1,6058-6076).
cgcctgcctgtgtctacta

SEQ ID NO: 490734 - DNA, 19 bp, Mus musculus
  siRNA target sequence for Abca2 (NM_007379.1,6126-6144).
ccgtggcgatgctgacaat

SEQ ID NO: 490735 - DNA, 19 bp, Mus musculus
  siRNA target sequence for Abca2 (NM_007379.1,6130-6148).
ggcgatgctgacaatgaca

SEQ ID NO: 490736 - DNA, 19 bp, Mus musculus
  siRNA target sequence for Abca2 (NM_007379.1,6131-6149).
gcgatgctgacaatgacat

SEQ ID NO: 490737 - DNA, 19 bp, Mus musculus
  siRNA target sequence for Abca2 (NM_007379.1,6519-6537).
gctggaactgacaaagtat

SEQ ID NO: 490738 - DNA, 19 bp, Mus musculus
  siRNA target sequence for Abca2 (NM_007379.1,6617-6635).
ccttcatctttctagatga

SEQ ID NO: 490739 - DNA, 19 bp, Mus musculus
  siRNA target sequence for Abca2 (NM_007379.1,6832-6850).
ggggatggctacatgatta

SEQ ID NO: 490740 - DNA, 19 bp, Mus musculus
  siRNA target sequence for Abca2 (NM_007379.1,6834-6852).
ggatggctacatgattact

SEQ ID NO: 490741 - DNA, 19 bp, Mus musculus
  siRNA target sequence for Abca2 (NM_007379.1,6838-6856).
ggctacatgattactgtaa

SEQ ID NO: 490742 - DNA, 19 bp, Mus musculus
  siRNA target sequence for Abca2 (NM_007379.1,6886-6904).
gtggtgcggttcttcaaca

SEQ ID NO: 490743 - DNA, 19 bp, Mus musculus
  siRNA target sequence for Abca2 (NM_007379.1,7024-7042).
ctgggcatcgaggattact

SEQ ID NO: 490744 - DNA, 19 bp, Mus musculus
  siRNA target sequence for Abca2 (NM_007379.1,7026-7044).
gggcatcgaggattactca

SEQ ID NO: 490745 - DNA, 19 bp, Mus musculus
  siRNA target sequence for Abca2 (NM_007379.1,7060-7078).
ctggataacgtgtttgtga

SEQ ID NO: 490746 - DNA, 19 bp, Mus musculus
  siRNA target sequence for Abca3 (NM_013855.1,606-624).
gtgcccaatgccactgttt

SEQ ID NO: 490747 - DNA, 19 bp, Mus musculus
  siRNA target sequence for Abca3 (NM_013855.1,797-815).
ggacttcgaggactacatt

SEQ ID NO: 490748 - DNA, 19 bp, Mus musculus
  siRNA target sequence for Abca3 (NM_013855.1,807-825).
gactacattcgctatgaca

SEQ ID NO: 490749 - DNA, 19 bp, Mus musculus
  siRNA target sequence for Abca3 (NM_013855.1,895-913).
cgctggcggtgaaatacca

SEQ ID NO: 490750 - DNA, 19 bp, Mus musculus
  siRNA target sequence for Abca3 (NM_013855.1,912-930).
cacctgcgcttcagttaca

SEQ ID NO: 490751 - DNA, 19 bp, Mus musculus
  siRNA target sequence for Abca3 (NM_013855.1,914-932).
cctgcgcttcagttacaca

SEQ ID NO: 490752 - DNA, 19 bp, Mus musculus
  siRNA target sequence for Abca3 (NM_013855.1,923-941).
cagttacacacgaagaaat

SEQ ID NO: 490753 - DNA, 19 bp, Mus musculus
  siRNA target sequence for Abca3 (NM_013855.1,952-970).
cccaaacaggaaatatttt

SEQ ID NO: 490754 - DNA, 19 bp, Mus musculus
  siRNA target sequence for Abca3 (NM_013855.1,1167-1185).
ctcatggtgatcaccaaaa

SEQ ID NO: 490755 - DNA, 19 bp, Mus musculus
  siRNA target sequence for Abca3 (NM_013855.1,1191-1209).
ccgttcccaccatacatct

SEQ ID NO: 490756 - DNA, 19 bp, Mus musculus
  siRNA target sequence for Abca3 (NM_013855.1,1338-1356).
cgcatgatggggcttaaca

SEQ ID NO: 490757 - DNA, 19 bp, Mus musculus
  siRNA target sequence for Abca3 (NM_013855.1,1372-1390).
gcgcttggttcctcatgtt

SEQ ID NO: 490758 - DNA, 19 bp, Mus musculus
  siRNA target sequence for Abca3 (NM_013855.1,1431-1449).
ctgttctgtgtcaaagtga

SEQ ID NO: 490759 - DNA, 19 bp, Mus musculus
  siRNA target sequence for Abca3 (NM_013855.1,1629-1647).
gtggctcctcggtacaact

SEQ ID NO: 490760 - DNA, 19 bp, Mus musculus
  siRNA target sequence for Abca3 (NM_013855.1,1676-1694).
ctgtctcctatctaatgtt

SEQ ID NO: 490761 - DNA, 19 bp, Mus musculus
  siRNA target sequence for Abca3 (NM_013855.1,1710-1728).
gcccagctcataggaaaat

SEQ ID NO: 490762 - DNA, 19 bp, Mus musculus
  siRNA target sequence for Abca3 (NM_013855.1,1902-1920).
ccctggcacttcttcctta

SEQ ID NO: 490763 - DNA, 19 bp, Mus musculus
  siRNA target sequence for Abca3 (NM_013855.1,2121-2139).
ctctacgaaggacagataa

SEQ ID NO: 490764 - DNA, 19 bp, Mus musculus
  siRNA target sequence for Abca3 (NM_013855.1,2123-2141).
ctacgaaggacagataaca

SEQ ID NO: 490765 - DNA, 19 bp, Mus musculus
  siRNA target sequence for Abca3 (NM_013855.1,2318-2336).
gacagttgccgaacatctt

SEQ ID NO: 490766 - DNA, 19 bp, Mus musculus
  siRNA target sequence for Abca3 (NM_013855.1,2320-2338).
cagttgccgaacatcttta

SEQ ID NO: 490767 - DNA, 19 bp, Mus musculus
  siRNA target sequence for Abca3 (NM_013855.1,2325-2343).
gccgaacatctttacttct

SEQ ID NO: 490768 - DNA, 19 bp, Mus musculus
  siRNA target sequence for Abca3 (NM_013855.1,2863-2881).
cgcacaggtttgaaagtct

SEQ ID NO: 490769 - DNA, 19 bp, Mus musculus
  siRNA target sequence for Abca3 (NM_013855.1,2987-3005).
caccagcatggacattcaa

SEQ ID NO: 490770 - DNA, 19 bp, Mus musculus
  siRNA target sequence for Abca3 (NM_013855.1,3103-3121).
gcattggagccctcataga

SEQ ID NO: 490771 - DNA, 19 bp, Mus musculus
  siRNA target sequence for Abca3 (NM_013855.1,3468-3486).
gaggagttcctggttttca

SEQ ID NO: 490772 - DNA, 19 bp, Mus musculus
  siRNA target sequence for Abca3 (NM_013855.1,3497-3515).
ggaaggaggcggctttaat

SEQ ID NO: 490773 - DNA, 19 bp, Mus musculus
  siRNA target sequence for Abca3 (NM_013855.1,3833-3851).
ggccaagcacgttcagttt

SEQ ID NO: 490774 - DNA, 19 bp, Mus musculus
  siRNA target sequence for Abca3 (NM_013855.1,3917-3935).
cgttcccagtctactactt

SEQ ID NO: 490775 - DNA, 19 bp, Mus musculus
  siRNA target sequence for Abca3 (NM_013855.1,4067-4085).
ggctgcgtccacagcttat

SEQ ID NO: 490776 - DNA, 19 bp, Mus musculus
  siRNA target sequence for Abca3 (NM_013855.1,4068-4086).
gctgcgtccacagcttata

SEQ ID NO: 490777 - DNA, 19 bp, Mus musculus
  siRNA target sequence for Abca3 (NM_013855.1,4087-4105).
ccaggctgaccatattcaa

SEQ ID NO: 490778 - DNA, 19 bp, Mus musculus
  siRNA target sequence for Abca3 (NM_013855.1,4090-4108).
ggctgaccatattcaacat

SEQ ID NO: 490779 - DNA, 19 bp, Mus musculus
  siRNA target sequence for Abca3 (NM_013855.1,4116-4134).
ggcatcgctaccttcatca

SEQ ID NO: 490780 - DNA, 19 bp, Mus musculus
  siRNA target sequence for Abca3 (NM_013855.1,4183-4201).
gaaccttagatcatgtgtt

SEQ ID NO: 490781 - DNA, 19 bp, Mus musculus
  siRNA target sequence for Abca3 (NM_013855.1,4186-4204).
ccttagatcatgtgttctt

SEQ ID NO: 490782 - DNA, 19 bp, Mus musculus
  siRNA target sequence for Abca3 (NM_013855.1,4232-4250).
ggcggtcagcaacttctat

SEQ ID NO: 490783 - DNA, 19 bp, Mus musculus
  siRNA target sequence for Abca3 (NM_013855.1,4240-4258).
gcaacttctatgagaacta

SEQ ID NO: 490784 - DNA, 19 bp, Mus musculus
  siRNA target sequence for Abca3 (NM_013855.1,4296-4314).
gcccactactgcaagaagt

SEQ ID NO: 490785 - DNA, 19 bp, Mus musculus
  siRNA target sequence for Abca3 (NM_013855.1,4299-4317).
cactactgcaagaagtaca

SEQ ID NO: 490786 - DNA, 19 bp, Mus musculus
  siRNA target sequence for Abca3 (NM_013855.1,4355-4373).
cccaggcgtgggcaagttt

SEQ ID NO: 490787 - DNA, 19 bp, Mus musculus
  siRNA target sequence for Abca3 (NM_013855.1,4359-4377).
ggcgtgggcaagtttgtga

SEQ ID NO: 490788 - DNA, 19 bp, Mus musculus
  siRNA target sequence for Abca3 (NM_013855.1,4691-4709).
cggcctgttgggtttcaat

SEQ ID NO: 490789 - DNA, 19 bp, Mus musculus
  siRNA target sequence for Abca3 (NM_013855.1,4967-4985).
ggaaccgcacgccaacaaa

SEQ ID NO: 490790 - DNA, 19 bp, Mus musculus
  siRNA target sequence for Abca3 (NM_013855.1,4972-4990).
cgcacgccaacaaactagt

SEQ ID NO: 490791 - DNA, 19 bp, Mus musculus
  siRNA target sequence for Abca3 (NM_013855.1,5180-5198).
ggagtgtgaagccttatgt

SEQ ID NO: 490792 - DNA, 19 bp, Mus musculus
  siRNA target sequence for Abca3 (NM_013855.1,5181-5199).
gagtgtgaagccttatgta

SEQ ID NO: 490793 - DNA, 19 bp, Mus musculus
  siRNA target sequence for Abca3 (NM_013855.1,5387-5405).
ccaagacatggtccattat

SEQ ID NO: 490794 - DNA, 19 bp, Mus musculus
  siRNA target sequence for Abca4 (NM_007378.1,147-165).
gcagaagattcgctttgta

SEQ ID NO: 490795 - DNA, 19 bp, Mus musculus
  siRNA target sequence for Abca4 (NM_007378.1,216-234).
gaatgccaacccactctat

SEQ ID NO: 490796 - DNA, 19 bp, Mus musculus
  siRNA target sequence for Abca4 (NM_007378.1,290-308).
cgtggctccaggggatttt

SEQ ID NO: 490797 - DNA, 19 bp, Mus musculus
  siRNA target sequence for Abca4 (NM_007378.1,298-316).
caggggattttctgcaata

SEQ ID NO: 490798 - DNA, 19 bp, Mus musculus
  siRNA target sequence for Abca4 (NM_007378.1,386-404).
ccatcttggcaagagtata

SEQ ID NO: 490799 - DNA, 19 bp, Mus musculus
  siRNA target sequence for Abca4 (NM_007378.1,387-405).
catcttggcaagagtatat

SEQ ID NO: 490800 - DNA, 19 bp, Mus musculus
  siRNA target sequence for Abca4 (NM_007378.1,390-408).
cttggcaagagtatatcga

SEQ ID NO: 490801 - DNA, 19 bp, Mus musculus
  siRNA target sequence for Abca4 (NM_007378.1,395-413).
caagagtatatcgagattt

SEQ ID NO: 490802 - DNA, 19 bp, Mus musculus
  siRNA target sequence for Abca4 (NM_007378.1,398-416).
gagtatatcgagattttca

SEQ ID NO: 490803 - DNA, 19 bp, Mus musculus
  siRNA target sequence for Abca4 (NM_007378.1,476-494).
gcaccttgtcgcagttcat

SEQ ID NO: 490804 - DNA, 19 bp, Mus musculus
  siRNA target sequence for Abca4 (NM_007378.1,507-525).
gactcaccctgagagattt

SEQ ID NO: 490805 - DNA, 19 bp, Mus musculus
  siRNA target sequence for Abca4 (NM_007378.1,541-559).
caaatccgagacatcctaa

SEQ ID NO: 490806 - DNA, 19 bp, Mus musculus
  siRNA target sequence for Abca4 (NM_007378.1,548-566).
gagacatcctaaaagatga

SEQ ID NO: 490807 - DNA, 19 bp, Mus musculus
  siRNA target sequence for Abca4 (NM_007378.1,571-589).
gcgctgaccctatttctca

SEQ ID NO: 490808 - DNA, 19 bp, Mus musculus
  siRNA target sequence for Abca4 (NM_007378.1,572-590).
cgctgaccctatttctcat

SEQ ID NO: 490809 - DNA, 19 bp, Mus musculus
  siRNA target sequence for Abca4 (NM_007378.1,580-598).
ctatttctcatgagaaaca

SEQ ID NO: 490810 - DNA, 19 bp, Mus musculus
  siRNA target sequence for Abca4 (NM_007378.1,647-665).
gtgtggagcagtttgctta

SEQ ID NO: 490811 - DNA, 19 bp, Mus musculus
  siRNA target sequence for Abca4 (NM_007378.1,718-736).
cagcgcttcatcatcttca

SEQ ID NO: 490812 - DNA, 19 bp, Mus musculus
  siRNA target sequence for Abca4 (NM_007378.1,823-841).
gccgatgtggacttcttca

SEQ ID NO: 490813 - DNA, 19 bp, Mus musculus
  siRNA target sequence for Abca4 (NM_007378.1,824-842).
ccgatgtggacttcttcaa

SEQ ID NO: 490814 - DNA, 19 bp, Mus musculus
  siRNA target sequence for Abca4 (NM_007378.1,825-843).
cgatgtggacttcttcaaa

SEQ ID NO: 490815 - DNA, 19 bp, Mus musculus
  siRNA target sequence for Abca4 (NM_007378.1,883-901).
caaggaatcaacttgagat

SEQ ID NO: 490816 - DNA, 19 bp, Mus musculus
  siRNA target sequence for Abca4 (NM_007378.1,905-923).
ggggaggaatattatctga

SEQ ID NO: 490817 - DNA, 19 bp, Mus musculus
  siRNA target sequence for Abca4 (NM_007378.1,920-938).
ctgatctgtcaccaagaat

SEQ ID NO: 490818 - DNA, 19 bp, Mus musculus
  siRNA target sequence for Abca4 (NM_007378.1,929-947).
caccaagaatgcaaaagtt

SEQ ID NO: 490819 - DNA, 19 bp, Mus musculus
  siRNA target sequence for Abca4 (NM_007378.1,931-949).
ccaagaatgcaaaagttta

SEQ ID NO: 490820 - DNA, 19 bp, Mus musculus
  siRNA target sequence for Abca4 (NM_007378.1,935-953).
gaatgcaaaagtttatcca

SEQ ID NO: 490821 - DNA, 19 bp, Mus musculus
  siRNA target sequence for Abca4 (NM_007378.1,951-969).
ccatcggccaagtgttcaa

SEQ ID NO: 490822 - DNA, 19 bp, Mus musculus
  siRNA target sequence for Abca4 (NM_007378.1,1082-1100).
cccgagtgttctcctttaa

SEQ ID NO: 490823 - DNA, 19 bp, Mus musculus
  siRNA target sequence for Abca4 (NM_007378.1,1084-1102).
cgagtgttctcctttaact

SEQ ID NO: 490824 - DNA, 19 bp, Mus musculus
  siRNA target sequence for Abca4 (NM_007378.1,1162-1180).
gcctattcttacgacaaaa

SEQ ID NO: 490825 - DNA, 19 bp, Mus musculus
  siRNA target sequence for Abca4 (NM_007378.1,1300-1318).
cctgctgctcgaaggataa

SEQ ID NO: 490826 - DNA, 19 bp, Mus musculus
  siRNA target sequence for Abca4 (NM_007378.1,1301-1319).
ctgctgctcgaaggataat

SEQ ID NO: 490827 - DNA, 19 bp, Mus musculus
  siRNA target sequence for Abca4 (NM_007378.1,1323-1341).
gaatgccaactcaactttt

SEQ ID NO: 490828 - DNA, 19 bp, Mus musculus
  siRNA target sequence for Abca4 (NM_007378.1,1354-1372).
cgagttaggaagttggtaa

SEQ ID NO: 490829 - DNA, 19 bp, Mus musculus
  siRNA target sequence for Abca4 (NM_007378.1,1393-1411).
ccccagatctggtacttct

SEQ ID NO: 490830 - DNA, 19 bp, Mus musculus
  siRNA target sequence for Abca4 (NM_007378.1,1395-1413).
ccagatctggtacttcttt

SEQ ID NO: 490831 - DNA, 19 bp, Mus musculus
  siRNA target sequence for Abca4 (NM_007378.1,1460-1478).
caaccgtcaaagacttcat

SEQ ID NO: 490832 - DNA, 19 bp, Mus musculus
  siRNA target sequence for Abca4 (NM_007378.1,1508-1526).
ccaccgaagccgtattaaa

SEQ ID NO: 490833 - DNA, 19 bp, Mus musculus
  siRNA target sequence for Abca4 (NM_007378.1,1511-1529).
ccgaagccgtattaaactt

SEQ ID NO: 490834 - DNA, 19 bp, Mus musculus
  siRNA target sequence for Abca4 (NM_007378.1,1513-1531).
gaagccgtattaaacttct

SEQ ID NO: 490835 - DNA, 19 bp, Mus musculus
  siRNA target sequence for Abca4 (NM_007378.1,1516-1534).
gccgtattaaacttcttct

SEQ ID NO: 490836 - DNA, 19 bp, Mus musculus
  siRNA target sequence for Abca4 (NM_007378.1,1535-1553).
ctaacggtccccaagagaa

SEQ ID NO: 490837 - DNA, 19 bp, Mus musculus
  siRNA target sequence for Abca4 (NM_007378.1,1549-1567).
gagaagcaggctgatgata

SEQ ID NO: 490838 - DNA, 19 bp, Mus musculus
  siRNA target sequence for Abca4 (NM_007378.1,1599-1617).
catcactgaccgattccta

SEQ ID NO: 490839 - DNA, 19 bp, Mus musculus
  siRNA target sequence for Abca4 (NM_007378.1,1614-1632).
cctacgcttggctaatcaa

SEQ ID NO: 490840 - DNA, 19 bp, Mus musculus
  siRNA target sequence for Abca4 (NM_007378.1,1619-1637).
gcttggctaatcaatacct

SEQ ID NO: 490841 - DNA, 19 bp, Mus musculus
  siRNA target sequence for Abca4 (NM_007378.1,1647-1665).
ggtcctggataagtttgaa

SEQ ID NO: 490842 - DNA, 19 bp, Mus musculus
  siRNA target sequence for Abca4 (NM_007378.1,1772-1790).
ccttacctcctcatgtgaa

SEQ ID NO: 490843 - DNA, 19 bp, Mus musculus
  siRNA target sequence for Abca4 (NM_007378.1,1797-1815).
gattcggatggacatagat

SEQ ID NO: 490844 - DNA, 19 bp, Mus musculus
  siRNA target sequence for Abca4 (NM_007378.1,1870-1888).
gcggatcctgtcgaagatt

SEQ ID NO: 490845 - DNA, 19 bp, Mus musculus
  siRNA target sequence for Abca4 (NM_007378.1,1882-1900).
gaagatttccggtacatct

SEQ ID NO: 490846 - DNA, 19 bp, Mus musculus
  siRNA target sequence for Abca4 (NM_007378.1,1902-1920).
gggaggttttgcctatcta

SEQ ID NO: 490847 - DNA, 19 bp, Mus musculus
  siRNA target sequence for Abca4 (NM_007378.1,1904-1922).
gaggttttgcctatctaca

SEQ ID NO: 490848 - DNA, 19 bp, Mus musculus
  siRNA target sequence for Abca4 (NM_007378.1,1970-1988).
ctccaattggagtctatct

SEQ ID NO: 490849 - DNA, 19 bp, Mus musculus
  siRNA target sequence for Abca4 (NM_007378.1,2014-2032).
gtggatgactccttcatga

SEQ ID NO: 490850 - DNA, 19 bp, Mus musculus
  siRNA target sequence for Abca4 (NM_007378.1,2044-2062).
cgctgtttccctatcttca

SEQ ID NO: 490851 - DNA, 19 bp, Mus musculus
  siRNA target sequence for Abca4 (NM_007378.1,2045-2063).
gctgtttccctatcttcat

SEQ ID NO: 490852 - DNA, 19 bp, Mus musculus
  siRNA target sequence for Abca4 (NM_007378.1,2065-2083).
gtgctggcgtggatctact

SEQ ID NO: 490853 - DNA, 19 bp, Mus musculus
  siRNA target sequence for Abca4 (NM_007378.1,2094-2112).
gaccgttaagggcattgtt

SEQ ID NO: 490854 - DNA, 19 bp, Mus musculus
  siRNA target sequence for Abca4 (NM_007378.1,2096-2114).
ccgttaagggcattgtttt

SEQ ID NO: 490855 - DNA, 19 bp, Mus musculus
  siRNA target sequence for Abca4 (NM_007378.1,2204-2222).
ccatcatggcgctgagtat

SEQ ID NO: 490856 - DNA, 19 bp, Mus musculus
  siRNA target sequence for Abca4 (NM_007378.1,2251-2269).
ggaaggatcctccattaca

SEQ ID NO: 490857 - DNA, 19 bp, Mus musculus
  siRNA target sequence for Abca4 (NM_007378.1,2270-2288).
gcgatcccttcattctctt

SEQ ID NO: 490858 - DNA, 19 bp, Mus musculus
  siRNA target sequence for Abca4 (NM_007378.1,2375-2393).
cctgcagtggggtcatcta

SEQ ID NO: 490859 - DNA, 19 bp, Mus musculus
  siRNA target sequence for Abca4 (NM_007378.1,2541-2559).
gctgcaatggagcaacatt

SEQ ID NO: 490860 - DNA, 19 bp, Mus musculus
  siRNA target sequence for Abca4 (NM_007378.1,2575-2593).
gaaggggatgagttcagtt

SEQ ID NO: 490861 - DNA, 19 bp, Mus musculus
  siRNA target sequence for Abca4 (NM_007378.1,2637-2655).
cggcttgcttgcttggtat

SEQ ID NO: 490862 - DNA, 19 bp, Mus musculus
  siRNA target sequence for Abca4 (NM_007378.1,2651-2669).
ggtatcttgaccaggtttt

SEQ ID NO: 490863 - DNA, 19 bp, Mus musculus
  siRNA target sequence for Abca4 (NM_007378.1,2664-2682).
ggttttcccaggagactat

SEQ ID NO: 490864 - DNA, 19 bp, Mus musculus
  siRNA target sequence for Abca4 (NM_007378.1,2921-2939).
ctgtggaccgtctgaacat

SEQ ID NO: 490865 - DNA, 19 bp, Mus musculus
  siRNA target sequence for Abca4 (NM_007378.1,3149-3167).
ctgagcacatcttgttcta

SEQ ID NO: 490866 - DNA, 19 bp, Mus musculus
  siRNA target sequence for Abca4 (NM_007378.1,3240-3258).
ccaccataagaggaatgaa

SEQ ID NO: 490867 - DNA, 19 bp, Mus musculus
  siRNA target sequence for Abca4 (NM_007378.1,3243-3261).
ccataagaggaatgaagaa

SEQ ID NO: 490868 - DNA, 19 bp, Mus musculus
  siRNA target sequence for Abca4 (NM_007378.1,3295-3313).
ctgtctgttgccattgctt

SEQ ID NO: 490869 - DNA, 19 bp, Mus musculus
  siRNA target sequence for Abca4 (NM_007378.1,3515-3533).
ccccgctcttcctcaagaa

SEQ ID NO: 490870 - DNA, 19 bp, Mus musculus
  siRNA target sequence for Abca4 (NM_007378.1,3541-3559).
ggcacaggcttctacttga

SEQ ID NO: 490871 - DNA, 19 bp, Mus musculus
  siRNA target sequence for Abca4 (NM_007378.1,3560-3578).
ccttagttcgcaagatgaa

SEQ ID NO: 490872 - DNA, 19 bp, Mus musculus
  siRNA target sequence for Abca4 (NM_007378.1,3610-3628).
ggggtctgcagctgtacat

SEQ ID NO: 490873 - DNA, 19 bp, Mus musculus
  siRNA target sequence for Abca4 (NM_007378.1,3613-3631).
gtctgcagctgtacatcaa

SEQ ID NO: 490874 - DNA, 19 bp, Mus musculus
  siRNA target sequence for Abca4 (NM_007378.1,3653-3671).
caacccgagtcgatgagat

SEQ ID NO: 490875 - DNA, 19 bp, Mus musculus
  siRNA target sequence for Abca4 (NM_007378.1,3706-3724).
gagctgatggatttggtat

SEQ ID NO: 490876 - DNA, 19 bp, Mus musculus
  siRNA target sequence for Abca4 (NM_007378.1,3753-3771).
ggaatgcattggtcaagaa

SEQ ID NO: 490877 - DNA, 19 bp, Mus musculus
  siRNA target sequence for Abca4 (NM_007378.1,3758-3776).
gcattggtcaagaacttat

SEQ ID NO: 490878 - DNA, 19 bp, Mus musculus
  siRNA target sequence for Abca4 (NM_007378.1,3925-3943).
gctggagcgggctctatgt

SEQ ID NO: 490879 - DNA, 19 bp, Mus musculus
  siRNA target sequence for Abca4 (NM_007378.1,3926-3944).
ctggagcgggctctatgtt

SEQ ID NO: 490880 - DNA, 19 bp, Mus musculus
  siRNA target sequence for Abca4 (NM_007378.1,3949-3967).
ggtggcgctcagcagaaaa

SEQ ID NO: 490881 - DNA, 19 bp, Mus musculus
  siRNA target sequence for Abca4 (NM_007378.1,4124-4142).
gtgctcggctgattcttca

SEQ ID NO: 490882 - DNA, 19 bp, Mus musculus
  siRNA target sequence for Abca4 (NM_007378.1,4130-4148).
ggctgattcttcaacatgt

SEQ ID NO: 490883 - DNA, 19 bp, Mus musculus
  siRNA target sequence for Abca4 (NM_007378.1,4158-4176).
gctagtcaagcgattccat

SEQ ID NO: 490884 - DNA, 19 bp, Mus musculus
  siRNA target sequence for Abca4 (NM_007378.1,4187-4205).
gcagccgcaaggactttgt

SEQ ID NO: 490885 - DNA, 19 bp, Mus musculus
  siRNA target sequence for Abca4 (NM_007378.1,4266-4284).
gcctccgtttggtgaattt

SEQ ID NO: 490886 - DNA, 19 bp, Mus musculus
  siRNA target sequence for Abca4 (NM_007378.1,4307-4325).
ggatgtatgggcatcaata

SEQ ID NO: 490887 - DNA, 19 bp, Mus musculus
  siRNA target sequence for Abca4 (NM_007378.1,4308-4326).
gatgtatgggcatcaatat

SEQ ID NO: 490888 - DNA, 19 bp, Mus musculus
  siRNA target sequence for Abca4 (NM_007378.1,4338-4356).
catggacgaacccaacaat

SEQ ID NO: 490889 - DNA, 19 bp, Mus musculus
  siRNA target sequence for Abca4 (NM_007378.1,4341-4359).
ggacgaacccaacaatgaa

SEQ ID NO: 490890 - DNA, 19 bp, Mus musculus
  siRNA target sequence for Abca4 (NM_007378.1,4401-4419).
ctttggcaaccgttgtcta

SEQ ID NO: 490891 - DNA, 19 bp, Mus musculus
  siRNA target sequence for Abca4 (NM_007378.1,4406-4424).
gcaaccgttgtctaaagga

SEQ ID NO: 490892 - DNA, 19 bp, Mus musculus
  siRNA target sequence for Abca4 (NM_007378.1,4407-4425).
caaccgttgtctaaaggaa

SEQ ID NO: 490893 - DNA, 19 bp, Mus musculus
  siRNA target sequence for Abca4 (NM_007378.1,4435-4453).
ccggagtacccatgcatta

SEQ ID NO: 490894 - DNA, 19 bp, Mus musculus
  siRNA target sequence for Abca4 (NM_007378.1,4436-4454).
cggagtacccatgcattaa

SEQ ID NO: 490895 - DNA, 19 bp, Mus musculus
  siRNA target sequence for Abca4 (NM_007378.1,4437-4455).
ggagtacccatgcattaat

SEQ ID NO: 490896 - DNA, 19 bp, Mus musculus
  siRNA target sequence for Abca4 (NM_007378.1,4657-4675).
ctcacgaacaggaacatct

SEQ ID NO: 490897 - DNA, 19 bp, Mus musculus
  siRNA target sequence for Abca4 (NM_007378.1,4674-4692).
ctccgactacttggtaaaa

SEQ ID NO: 490898 - DNA, 19 bp, Mus musculus
  siRNA target sequence for Abca4 (NM_007378.1,4695-4713).
gtaccctgctctcataaga

SEQ ID NO: 490899 - DNA, 19 bp, Mus musculus
  siRNA target sequence for Abca4 (NM_007378.1,4715-4733).
gcagcttaaagagcaaatt

SEQ ID NO: 490900 - DNA, 19 bp, Mus musculus
  siRNA target sequence for Abca4 (NM_007378.1,4727-4745).
gcaaattctgggtcaatga

SEQ ID NO: 490901 - DNA, 19 bp, Mus musculus
  siRNA target sequence for Abca4 (NM_007378.1,4728-4746).
caaattctgggtcaatgaa

SEQ ID NO: 490902 - DNA, 19 bp, Mus musculus
  siRNA target sequence for Abca4 (NM_007378.1,4747-4765).
cagaggtatggaggaattt

SEQ ID NO: 490903 - DNA, 19 bp, Mus musculus
  siRNA target sequence for Abca4 (NM_007378.1,4751-4769).
ggtatggaggaatttccat

SEQ ID NO: 490904 - DNA, 19 bp, Mus musculus
  siRNA target sequence for Abca4 (NM_007378.1,4871-4889).
gggaggcctccaaagaaat

SEQ ID NO: 490905 - DNA, 19 bp, Mus musculus
  siRNA target sequence for Abca4 (NM_007378.1,4917-4935).
cacagacaacattaaggta

SEQ ID NO: 490906 - DNA, 19 bp, Mus musculus
  siRNA target sequence for Abca4 (NM_007378.1,4923-4941).
caacattaaggtatggttt

SEQ ID NO: 490907 - DNA, 19 bp, Mus musculus
  siRNA target sequence for Abca4 (NM_007378.1,5026-5044).
gaccctgaggagtatggaa

SEQ ID NO: 490908 - DNA, 19 bp, Mus musculus
  siRNA target sequence for Abca4 (NM_007378.1,5123-5141).
ccgtggttgccatatgtgt

SEQ ID NO: 490909 - DNA, 19 bp, Mus musculus
  siRNA target sequence for Abca4 (NM_007378.1,5194-5212).
gagagggtgacgaaagcta

SEQ ID NO: 490910 - DNA, 19 bp, Mus musculus
  siRNA target sequence for Abca4 (NM_007378.1,5196-5214).
gagggtgacgaaagctaaa

SEQ ID NO: 490911 - DNA, 19 bp, Mus musculus
  siRNA target sequence for Abca4 (NM_007378.1,5198-5216).
gggtgacgaaagctaaaca

SEQ ID NO: 490912 - DNA, 19 bp, Mus musculus
  siRNA target sequence for Abca4 (NM_007378.1,5199-5217).
ggtgacgaaagctaaacat

SEQ ID NO: 490913 - DNA, 19 bp, Mus musculus
  siRNA target sequence for Abca4 (NM_007378.1,5200-5218).
gtgacgaaagctaaacatt

SEQ ID NO: 490914 - DNA, 19 bp, Mus musculus
  siRNA target sequence for Abca4 (NM_007378.1,5399-5417).
gggcagtcattcctatgat

SEQ ID NO: 490915 - DNA, 19 bp, Mus musculus
  siRNA target sequence for Abca4 (NM_007378.1,5402-5420).
cagtcattcctatgatgta

SEQ ID NO: 490916 - DNA, 19 bp, Mus musculus
  siRNA target sequence for Abca4 (NM_007378.1,5471-5489).
cctgtgctaacctgttcat

SEQ ID NO: 490917 - DNA, 19 bp, Mus musculus
  siRNA target sequence for Abca4 (NM_007378.1,5511-5529).
caccttcgtcctggaatta

SEQ ID NO: 490918 - DNA, 19 bp, Mus musculus
  siRNA target sequence for Abca4 (NM_007378.1,5514-5532).
cttcgtcctggaattattt

SEQ ID NO: 490919 - DNA, 19 bp, Mus musculus
  siRNA target sequence for Abca4 (NM_007378.1,5544-5562).
gacgctgctcaggttcaat

SEQ ID NO: 490920 - DNA, 19 bp, Mus musculus
  siRNA target sequence for Abca4 (NM_007378.1,5721-5739).
ggttgctatggcaatagaa

SEQ ID NO: 490921 - DNA, 19 bp, Mus musculus
  siRNA target sequence for Abca4 (NM_007378.1,5813-5831).
ctagagagcccgtttttga

SEQ ID NO: 490922 - DNA, 19 bp, Mus musculus
  siRNA target sequence for Abca4 (NM_007378.1,5820-5838).
gcccgtttttgatgaagat

SEQ ID NO: 490923 - DNA, 19 bp, Mus musculus
  siRNA target sequence for Abca4 (NM_007378.1,5866-5884).
gttatgagtgggggaaata

SEQ ID NO: 490924 - DNA, 19 bp, Mus musculus
  siRNA target sequence for Abca4 (NM_007378.1,5888-5906).
ccgacatcttaaagctaaa

SEQ ID NO: 490925 - DNA, 19 bp, Mus musculus
  siRNA target sequence for Abca4 (NM_007378.1,5908-5926).
gaactaaccaaggtttact

SEQ ID NO: 490926 - DNA, 19 bp, Mus musculus
  siRNA target sequence for Abca4 (NM_007378.1,6078-6096).
ggcaggcaagagcatttta

SEQ ID NO: 490927 - DNA, 19 bp, Mus musculus
  siRNA target sequence for Abca4 (NM_007378.1,6082-6100).
ggcaagagcattttaacta

SEQ ID NO: 490928 - DNA, 19 bp, Mus musculus
  siRNA target sequence for Abca4 (NM_007378.1,6205-6223).
ggcgtgccatcgaaggaaa

SEQ ID NO: 490929 - DNA, 19 bp, Mus musculus
  siRNA target sequence for Abca4 (NM_007378.1,6206-6224).
gcgtgccatcgaaggaaat

SEQ ID NO: 490930 - DNA, 19 bp, Mus musculus
  siRNA target sequence for Abca4 (NM_007378.1,6514-6532).
gtgaagggcacctttcagt

SEQ ID NO: 490931 - DNA, 19 bp, Mus musculus
  siRNA target sequence for Abca4 (NM_007378.1,6547-6565).
caacacctcaagtacaagt

SEQ ID NO: 490932 - DNA, 19 bp, Mus musculus
  siRNA target sequence for Abca4 (NM_007378.1,6564-6582).
gtttggagacggctacatt

SEQ ID NO: 490933 - DNA, 19 bp, Mus musculus
  siRNA target sequence for Abca4 (NM_007378.1,6568-6586).
ggagacggctacattgtca

SEQ ID NO: 490934 - DNA, 19 bp, Mus musculus
  siRNA target sequence for Abca4 (NM_007378.1,6574-6592).
ggctacattgtcacaatga

SEQ ID NO: 490935 - DNA, 19 bp, Mus musculus
  siRNA target sequence for Abca4 (NM_007378.1,6575-6593).
gctacattgtcacaatgaa

SEQ ID NO: 490936 - DNA, 19 bp, Mus musculus
  siRNA target sequence for Abca4 (NM_007378.1,6613-6631).
gacttgcttcccgatttga

SEQ ID NO: 490937 - DNA, 19 bp, Mus musculus
  siRNA target sequence for Abca4 (NM_007378.1,6615-6633).
cttgcttcccgatttgaat

SEQ ID NO: 490938 - DNA, 19 bp, Mus musculus
  siRNA target sequence for Abca4 (NM_007378.1,6944-6962).
ccgcaggatctgaacaact

SEQ ID NO: 490939 - DNA, 19 bp, Mus musculus
  siRNA target sequence for Abca4 (NM_007378.1,6978-6996).
ccccacggcagcagaagat

SEQ ID NO: 490940 - DNA, 19 bp, Mus musculus
  siRNA target sequence for Abca4 (NM_007378.1,6980-6998).
ccacggcagcagaagataa

SEQ ID NO: 490941 - DNA, 19 bp, Mus musculus
  siRNA target sequence for Abca5 (NM_147219.1,250-268).
ccagaacacttctactgaa

SEQ ID NO: 490942 - DNA, 19 bp, Mus musculus
  siRNA target sequence for Abca5 (NM_147219.1,290-308).
gactaaaaaaagtagtgtt

SEQ ID NO: 490943 - DNA, 19 bp, Mus musculus
  siRNA target sequence for Abca5 (NM_147219.1,343-361).
ggctgatattagttagcat

SEQ ID NO: 490944 - DNA, 19 bp, Mus musculus
  siRNA target sequence for Abca5 (NM_147219.1,427-445).
gcctttccaacgttattct

SEQ ID NO: 490945 - DNA, 19 bp, Mus musculus
  siRNA target sequence for Abca5 (NM_147219.1,428-446).
cctttccaacgttattctt

SEQ ID NO: 490946 - DNA, 19 bp, Mus musculus
  siRNA target sequence for Abca5 (NM_147219.1,433-451).
ccaacgttattcttggata

SEQ ID NO: 490947 - DNA, 19 bp, Mus musculus
  siRNA target sequence for Abca5 (NM_147219.1,452-470).
cactcccgtgactaacatt

SEQ ID NO: 490948 - DNA, 19 bp, Mus musculus
  siRNA target sequence for Abca5 (NM_147219.1,456-474).
cccgtgactaacattacaa

SEQ ID NO: 490949 - DNA, 19 bp, Mus musculus
  siRNA target sequence for Abca5 (NM_147219.1,490-508).
gggtttctaccgatcatct

SEQ ID NO: 490950 - DNA, 19 bp, Mus musculus
  siRNA target sequence for Abca5 (NM_147219.1,512-530).
caaggttatagttactgaa

SEQ ID NO: 490951 - DNA, 19 bp, Mus musculus
  siRNA target sequence for Abca5 (NM_147219.1,516-534).
gttatagttactgaagaat

SEQ ID NO: 490952 - DNA, 19 bp, Mus musculus
  siRNA target sequence for Abca5 (NM_147219.1,555-573).
gtagccgcaagtctttcta

SEQ ID NO: 490953 - DNA, 19 bp, Mus musculus
  siRNA target sequence for Abca5 (NM_147219.1,587-605).
cgtaggtgtggttttcaaa

SEQ ID NO: 490954 - DNA, 19 bp, Mus musculus
  siRNA target sequence for Abca5 (NM_147219.1,614-632).
gtcctatgaacttcgtttt

SEQ ID NO: 490955 - DNA, 19 bp, Mus musculus
  siRNA target sequence for Abca5 (NM_147219.1,616-634).
cctatgaacttcgtttttt

SEQ ID NO: 490956 - DNA, 19 bp, Mus musculus
  siRNA target sequence for Abca5 (NM_147219.1,617-635).
ctatgaacttcgttttttt

SEQ ID NO: 490957 - DNA, 19 bp, Mus musculus
  siRNA target sequence for Abca5 (NM_147219.1,644-662).
gattccagtgtcttctatt

SEQ ID NO: 490958 - DNA, 19 bp, Mus musculus
  siRNA target sequence for Abca5 (NM_147219.1,745-763).
cgatagatgctgccattat

SEQ ID NO: 490959 - DNA, 19 bp, Mus musculus
  siRNA target sequence for Abca5 (NM_147219.1,746-764).
gatagatgctgccattata

SEQ ID NO: 490960 - DNA, 19 bp, Mus musculus
  siRNA target sequence for Abca5 (NM_147219.1,805-823).
cgaccaaagctgtgatcat

SEQ ID NO: 490961 - DNA, 19 bp, Mus musculus
  siRNA target sequence for Abca5 (NM_147219.1,1014-1032).
ctgtacgcaagcttgattt

SEQ ID NO: 490962 - DNA, 19 bp, Mus musculus
  siRNA target sequence for Abca5 (NM_147219.1,1061-1079).
cgcaacagcttcttcgtta

SEQ ID NO: 490963 - DNA, 19 bp, Mus musculus
  siRNA target sequence for Abca5 (NM_147219.1,1062-1080).
gcaacagcttcttcgttat

SEQ ID NO: 490964 - DNA, 19 bp, Mus musculus
  siRNA target sequence for Abca5 (NM_147219.1,1063-1081).
caacagcttcttcgttatt

SEQ ID NO: 490965 - DNA, 19 bp, Mus musculus
  siRNA target sequence for Abca5 (NM_147219.1,1090-1108).
gtagcagcattgtgatctt

SEQ ID NO: 490966 - DNA, 19 bp, Mus musculus
  siRNA target sequence for Abca5 (NM_147219.1,1093-1111).
gcagcattgtgatctttct

SEQ ID NO: 490967 - DNA, 19 bp, Mus musculus
  siRNA target sequence for Abca5 (NM_147219.1,1094-1112).
cagcattgtgatctttcta

SEQ ID NO: 490968 - DNA, 19 bp, Mus musculus
  siRNA target sequence for Abca5 (NM_147219.1,1096-1114).
gcattgtgatctttctact

SEQ ID NO: 490969 - DNA, 19 bp, Mus musculus
  siRNA target sequence for Abca5 (NM_147219.1,1118-1136).
cttcttatatggattgtca

SEQ ID NO: 490970 - DNA, 19 bp, Mus musculus
  siRNA target sequence for Abca5 (NM_147219.1,1187-1205).
cgtgggagtcgttgagttt

SEQ ID NO: 490971 - DNA, 19 bp, Mus musculus
  siRNA target sequence for Abca5 (NM_147219.1,1190-1208).
gggagtcgttgagtttttt

SEQ ID NO: 490972 - DNA, 19 bp, Mus musculus
  siRNA target sequence for Abca5 (NM_147219.1,1194-1212).
gtcgttgagttttttgtca

SEQ ID NO: 490973 - DNA, 19 bp, Mus musculus
  siRNA target sequence for Abca5 (NM_147219.1,1211-1229).
caccgtggtgtttggattt

SEQ ID NO: 490974 - DNA, 19 bp, Mus musculus
  siRNA target sequence for Abca5 (NM_147219.1,1239-1257).
ctgattgtcctcatagaaa

SEQ ID NO: 490975 - DNA, 19 bp, Mus musculus
  siRNA target sequence for Abca5 (NM_147219.1,1355-1373).
gggtgccttattttctaat

SEQ ID NO: 490976 - DNA, 19 bp, Mus musculus
  siRNA target sequence for Abca5 (NM_147219.1,1356-1374).
ggtgccttattttctaatt

SEQ ID NO: 490977 - DNA, 19 bp, Mus musculus
  siRNA target sequence for Abca5 (NM_147219.1,1359-1377).
gccttattttctaatttga

SEQ ID NO: 490978 - DNA, 19 bp, Mus musculus
  siRNA target sequence for Abca5 (NM_147219.1,1383-1401).
ggtccctatcctctaatta

SEQ ID NO: 490979 - DNA, 19 bp, Mus musculus
  siRNA target sequence for Abca5 (NM_147219.1,1384-1402).
gtccctatcctctaattat

SEQ ID NO: 490980 - DNA, 19 bp, Mus musculus
  siRNA target sequence for Abca5 (NM_147219.1,1388-1406).
ctatcctctaattattact

SEQ ID NO: 490981 - DNA, 19 bp, Mus musculus
  siRNA target sequence for Abca5 (NM_147219.1,1420-1438).
ctcttgacagtgtgttcta

SEQ ID NO: 490982 - DNA, 19 bp, Mus musculus
  siRNA target sequence for Abca5 (NM_147219.1,1485-1503).
ggcttgaggaggtcatctt

SEQ ID NO: 490983 - DNA, 19 bp, Mus musculus
  siRNA target sequence for Abca5 (NM_147219.1,1486-1504).
gcttgaggaggtcatcttt

SEQ ID NO: 490984 - DNA, 19 bp, Mus musculus
  siRNA target sequence for Abca5 (NM_147219.1,1490-1508).
gaggaggtcatctttgtat

SEQ ID NO: 490985 - DNA, 19 bp, Mus musculus
  siRNA target sequence for Abca5 (NM_147219.1,1517-1535).
gccatcgtattggtcaaaa

SEQ ID NO: 490986 - DNA, 19 bp, Mus musculus
  siRNA target sequence for Abca5 (NM_147219.1,1556-1574).
gctatcggagggcaacatt

SEQ ID NO: 490987 - DNA, 19 bp, Mus musculus
  siRNA target sequence for Abca5 (NM_147219.1,1557-1575).
ctatcggagggcaacatta

SEQ ID NO: 490988 - DNA, 19 bp, Mus musculus
  siRNA target sequence for Abca5 (NM_147219.1,1567-1585).
gcaacattaatggcaatat

SEQ ID NO: 490989 - DNA, 19 bp, Mus musculus
  siRNA target sequence for Abca5 (NM_147219.1,1571-1589).
cattaatggcaatattagt

SEQ ID NO: 490990 - DNA, 19 bp, Mus musculus
  siRNA target sequence for Abca5 (NM_147219.1,1579-1597).
gcaatattagtctcaatga

SEQ ID NO: 490991 - DNA, 19 bp, Mus musculus
  siRNA target sequence for Abca5 (NM_147219.1,1605-1623).
gagcccgtttcttcagaat

SEQ ID NO: 490992 - DNA, 19 bp, Mus musculus
  siRNA target sequence for Abca5 (NM_147219.1,1645-1663).
gaataagtggtattcagaa

SEQ ID NO: 490993 - DNA, 19 bp, Mus musculus
  siRNA target sequence for Abca5 (NM_147219.1,1651-1669).
gtggtattcagaaatccta

SEQ ID NO: 490994 - DNA, 19 bp, Mus musculus
  siRNA target sequence for Abca5 (NM_147219.1,1659-1677).
cagaaatcctatagaaaga

SEQ ID NO: 490995 - DNA, 19 bp, Mus musculus
  siRNA target sequence for Abca5 (NM_147219.1,1685-1703).
gaacgtggaggctttgaga

SEQ ID NO: 490996 - DNA, 19 bp, Mus musculus
  siRNA target sequence for Abca5 (NM_147219.1,1893-1911).
ccgcagtcagatataaact

SEQ ID NO: 490997 - DNA, 19 bp, Mus musculus
  siRNA target sequence for Abca5 (NM_147219.1,1894-1912).
cgcagtcagatataaactt

SEQ ID NO: 490998 - DNA, 19 bp, Mus musculus
  siRNA target sequence for Abca5 (NM_147219.1,1895-1913).
gcagtcagatataaacttt

SEQ ID NO: 490999 - DNA, 19 bp, Mus musculus
  siRNA target sequence for Abca5 (NM_147219.1,1949-1967).
ggcttcaatcaaaggaata

SEQ ID NO: 491000 - DNA, 19 bp, Mus musculus
  siRNA target sequence for Abca5 (NM_147219.1,1962-1980).
ggaataccagccaacaata

SEQ ID NO: 491001 - DNA, 19 bp, Mus musculus
  siRNA target sequence for Abca5 (NM_147219.1,1963-1981).
gaataccagccaacaatat

SEQ ID NO: 491002 - DNA, 19 bp, Mus musculus
  siRNA target sequence for Abca5 (NM_147219.1,2018-2036).
catgcaagccatcaaagat

SEQ ID NO: 491003 - DNA, 19 bp, Mus musculus
  siRNA target sequence for Abca5 (NM_147219.1,2034-2052).
gataatcaagcgaaaaagt

SEQ ID NO: 491004 - DNA, 19 bp, Mus musculus
  siRNA target sequence for Abca5 (NM_147219.1,2051-2069).
gttaagcggtggtcagaaa

SEQ ID NO: 491005 - DNA, 19 bp, Mus musculus
  siRNA target sequence for Abca5 (NM_147219.1,2091-2109).
gcagttctcgggaatccaa

SEQ ID NO: 491006 - DNA, 19 bp, Mus musculus
  siRNA target sequence for Abca5 (NM_147219.1,2149-2167).
cctgctctcgccatattgt

SEQ ID NO: 491007 - DNA, 19 bp, Mus musculus
  siRNA target sequence for Abca5 (NM_147219.1,2150-2168).
ctgctctcgccatattgtt

SEQ ID NO: 491008 - DNA, 19 bp, Mus musculus
  siRNA target sequence for Abca5 (NM_147219.1,2159-2177).
ccatattgtttggaatctt

SEQ ID NO: 491009 - DNA, 19 bp, Mus musculus
  siRNA target sequence for Abca5 (NM_147219.1,2249-2267).
cgacaggaaagctgtcata

SEQ ID NO: 491010 - DNA, 19 bp, Mus musculus
  siRNA target sequence for Abca5 (NM_147219.1,2250-2268).
gacaggaaagctgtcatat

SEQ ID NO: 491011 - DNA, 19 bp, Mus musculus
  siRNA target sequence for Abca5 (NM_147219.1,2260-2278).
ctgtcatatcacaaggaat

SEQ ID NO: 491012 - DNA, 19 bp, Mus musculus
  siRNA target sequence for Abca5 (NM_147219.1,2330-2348).
ctaccgcctgagcatgtat

SEQ ID NO: 491013 - DNA, 19 bp, Mus musculus
  siRNA target sequence for Abca5 (NM_147219.1,2333-2351).
ccgcctgagcatgtatata

SEQ ID NO: 491014 - DNA, 19 bp, Mus musculus
  siRNA target sequence for Abca5 (NM_147219.1,2413-2431).
cgctactgcagcagaatga

SEQ ID NO: 491015 - DNA, 19 bp, Mus musculus
  siRNA target sequence for Abca5 (NM_147219.1,2449-2467).
gcctgcctttcaaagacat

SEQ ID NO: 491016 - DNA, 19 bp, Mus musculus
  siRNA target sequence for Abca5 (NM_147219.1,2493-2511).
gctctagacattcattcaa

SEQ ID NO: 491017 - DNA, 19 bp, Mus musculus
  siRNA target sequence for Abca5 (NM_147219.1,2594-2612).
ccaagcagactatagtgta

SEQ ID NO: 491018 - DNA, 19 bp, Mus musculus
  siRNA target sequence for Abca5 (NM_147219.1,2595-2613).
caagcagactatagtgtat

SEQ ID NO: 491019 - DNA, 19 bp, Mus musculus
  siRNA target sequence for Abca5 (NM_147219.1,2666-2684).
ggaacagagtttacttatt

SEQ ID NO: 491020 - DNA, 19 bp, Mus musculus
  siRNA target sequence for Abca5 (NM_147219.1,2685-2703).
ctctctgaaacgaaagctt

SEQ ID NO: 491021 - DNA, 19 bp, Mus musculus
  siRNA target sequence for Abca5 (NM_147219.1,2732-2750).
gcagcaagtgtctacgatt

SEQ ID NO: 491022 - DNA, 19 bp, Mus musculus
  siRNA target sequence for Abca5 (NM_147219.1,2736-2754).
caagtgtctacgattgcaa

SEQ ID NO: 491023 - DNA, 19 bp, Mus musculus
  siRNA target sequence for Abca5 (NM_147219.1,2741-2759).
gtctacgattgcaaagttt

SEQ ID NO: 491024 - DNA, 19 bp, Mus musculus
  siRNA target sequence for Abca5 (NM_147219.1,2743-2761).
ctacgattgcaaagtttca

SEQ ID NO: 491025 - DNA, 19 bp, Mus musculus
  siRNA target sequence for Abca5 (NM_147219.1,2892-2910).
ctcgttccagacttgtatt

SEQ ID NO: 491026 - DNA, 19 bp, Mus musculus
  siRNA target sequence for Abca5 (NM_147219.1,2954-2972).
gctgcttcaaaattctact

SEQ ID NO: 491027 - DNA, 19 bp, Mus musculus
  siRNA target sequence for Abca5 (NM_147219.1,2968-2986).
ctactgactcagatatcaa

SEQ ID NO: 491028 - DNA, 19 bp, Mus musculus
  siRNA target sequence for Abca5 (NM_147219.1,3118-3136).
ctgttttcaacagtactat

SEQ ID NO: 491029 - DNA, 19 bp, Mus musculus
  siRNA target sequence for Abca5 (NM_147219.1,3125-3143).
caacagtactatggtttat

SEQ ID NO: 491030 - DNA, 19 bp, Mus musculus
  siRNA target sequence for Abca5 (NM_147219.1,3128-3146).
cagtactatggtttattgt

SEQ ID NO: 491031 - DNA, 19 bp, Mus musculus
  siRNA target sequence for Abca5 (NM_147219.1,3153-3171).
gtcatgatgaacatcatta

SEQ ID NO: 491032 - DNA, 19 bp, Mus musculus
  siRNA target sequence for Abca5 (NM_147219.1,3164-3182).
catcattagtaactactat

SEQ ID NO: 491033 - DNA, 19 bp, Mus musculus
  siRNA target sequence for Abca5 (NM_147219.1,3172-3190).
gtaactactatctttatca

SEQ ID NO: 491034 - DNA, 19 bp, Mus musculus
  siRNA target sequence for Abca5 (NM_147219.1,3218-3236).
ctggagtaccccgttcatt

SEQ ID NO: 491035 - DNA, 19 bp, Mus musculus
  siRNA target sequence for Abca5 (NM_147219.1,3220-3238).
ggagtaccccgttcattca

SEQ ID NO: 491036 - DNA, 19 bp, Mus musculus
  siRNA target sequence for Abca5 (NM_147219.1,3221-3239).
gagtaccccgttcattcaa

SEQ ID NO: 491037 - DNA, 19 bp, Mus musculus
  siRNA target sequence for Abca5 (NM_147219.1,3226-3244).
ccccgttcattcaagaaat

SEQ ID NO: 491038 - DNA, 19 bp, Mus musculus
  siRNA target sequence for Abca5 (NM_147219.1,3227-3245).
cccgttcattcaagaaatt

SEQ ID NO: 491039 - DNA, 19 bp, Mus musculus
  siRNA target sequence for Abca5 (NM_147219.1,3228-3246).
ccgttcattcaagaaatta

SEQ ID NO: 491040 - DNA, 19 bp, Mus musculus
  siRNA target sequence for Abca5 (NM_147219.1,3240-3258).
gaaattactgacattgttt

SEQ ID NO: 491041 - DNA, 19 bp, Mus musculus
  siRNA target sequence for Abca5 (NM_147219.1,3307-3325).
ctgcaatgccaccttactt

SEQ ID NO: 491042 - DNA, 19 bp, Mus musculus
  siRNA target sequence for Abca5 (NM_147219.1,3323-3341).
ctttgccatggaaaatgca

SEQ ID NO: 491043 - DNA, 19 bp, Mus musculus
  siRNA target sequence for Abca5 (NM_147219.1,3339-3357).
gcagagaatcataagatca

SEQ ID NO: 491044 - DNA, 19 bp, Mus musculus
  siRNA target sequence for Abca5 (NM_147219.1,3340-3358).
cagagaatcataagatcaa

SEQ ID NO: 491045 - DNA, 19 bp, Mus musculus
  siRNA target sequence for Abca5 (NM_147219.1,3353-3371).
gatcaaagcttatactcaa

SEQ ID NO: 491046 - DNA, 19 bp, Mus musculus
  siRNA target sequence for Abca5 (NM_147219.1,3462-3480).
ctgggaagtttatttgcat

SEQ ID NO: 491047 - DNA, 19 bp, Mus musculus
  siRNA target sequence for Abca5 (NM_147219.1,3469-3487).
gtttatttgcatttcatca

SEQ ID NO: 491048 - DNA, 19 bp, Mus musculus
  siRNA target sequence for Abca5 (NM_147219.1,3494-3512).
gtatttttatcctgcaaaa

SEQ ID NO: 491049 - DNA, 19 bp, Mus musculus
  siRNA target sequence for Abca5 (NM_147219.1,3557-3575).
cattctgttcacgtacata

SEQ ID NO: 491050 - DNA, 19 bp, Mus musculus
  siRNA target sequence for Abca5 (NM_147219.1,3561-3579).
ctgttcacgtacatagctt

SEQ ID NO: 491051 - DNA, 19 bp, Mus musculus
  siRNA target sequence for Abca5 (NM_147219.1,3576-3594).
gcttcgttcactttcaaga

SEQ ID NO: 491052 - DNA, 19 bp, Mus musculus
  siRNA target sequence for Abca5 (NM_147219.1,3658-3676).
caatcacggaaacaacttt

SEQ ID NO: 491053 - DNA, 19 bp, Mus musculus
  siRNA target sequence for Abca5 (NM_147219.1,3664-3682).
cggaaacaactttctttct

SEQ ID NO: 491054 - DNA, 19 bp, Mus musculus
  siRNA target sequence for Abca5 (NM_147219.1,3691-3709).
cagttacggctgtctttca

SEQ ID NO: 491055 - DNA, 19 bp, Mus musculus
  siRNA target sequence for Abca5 (NM_147219.1,3693-3711).
gttacggctgtctttcatt

SEQ ID NO: 491056 - DNA, 19 bp, Mus musculus
  siRNA target sequence for Abca5 (NM_147219.1,3721-3739).
gcatagccattccaatcta

SEQ ID NO: 491057 - DNA, 19 bp, Mus musculus
  siRNA target sequence for Abca5 (NM_147219.1,3744-3762).
ctcctgggttgtctgattt

SEQ ID NO: 491058 - DNA, 19 bp, Mus musculus
  siRNA target sequence for Abca5 (NM_147219.1,3793-3811).
caaaaaatgagaataccta

SEQ ID NO: 491059 - DNA, 19 bp, Mus musculus
  siRNA target sequence for Abca5 (NM_147219.1,3812-3830).
caatccctgggatagactt

SEQ ID NO: 491060 - DNA, 19 bp, Mus musculus
  siRNA target sequence for Abca5 (NM_147219.1,3848-3866).
gccctacctgcagtgtata

SEQ ID NO: 491061 - DNA, 19 bp, Mus musculus
  siRNA target sequence for Abca5 (NM_147219.1,3903-3921).
catggaggcagatctataa

SEQ ID NO: 491062 - DNA, 19 bp, Mus musculus
  siRNA target sequence for Abca5 (NM_147219.1,3916-3934).
ctataagaaaggatccatt

SEQ ID NO: 491063 - DNA, 19 bp, Mus musculus
  siRNA target sequence for Abca5 (NM_147219.1,4067-4085).
gaagccagccattatggta

SEQ ID NO: 491064 - DNA, 19 bp, Mus musculus
  siRNA target sequence for Abca5 (NM_147219.1,4072-4090).
cagccattatggtatgcaa

SEQ ID NO: 491065 - DNA, 19 bp, Mus musculus
  siRNA target sequence for Abca5 (NM_147219.1,4196-4214).
gggactgttgggtccaaat

SEQ ID NO: 491066 - DNA, 19 bp, Mus musculus
  siRNA target sequence for Abca5 (NM_147219.1,4277-4295).
gatctttctaggagattat

SEQ ID NO: 491067 - DNA, 19 bp, Mus musculus
  siRNA target sequence for Abca5 (NM_147219.1,4300-4318).
cacattcaagtgaagatga

SEQ ID NO: 491068 - DNA, 19 bp, Mus musculus
  siRNA target sequence for Abca5 (NM_147219.1,4311-4329).
gaagatgacgaatccatta

SEQ ID NO: 491069 - DNA, 19 bp, Mus musculus
  siRNA target sequence for Abca5 (NM_147219.1,4314-4332).
gatgacgaatccattaagt

SEQ ID NO: 491070 - DNA, 19 bp, Mus musculus
  siRNA target sequence for Abca5 (NM_147219.1,4317-4335).
gacgaatccattaagtgta

SEQ ID NO: 491071 - DNA, 19 bp, Mus musculus
  siRNA target sequence for Abca5 (NM_147219.1,4440-4458).
gaagtcatcagtcgaataa

SEQ ID NO: 491072 - DNA, 19 bp, Mus musculus
  siRNA target sequence for Abca5 (NM_147219.1,4443-4461).
gtcatcagtcgaataacaa

SEQ ID NO: 491073 - DNA, 19 bp, Mus musculus
  siRNA target sequence for Abca5 (NM_147219.1,4459-4477).
caaaagcccttgatttgaa

SEQ ID NO: 491074 - DNA, 19 bp, Mus musculus
  siRNA target sequence for Abca5 (NM_147219.1,4520-4538).
caagcgaaagctgtgtttt

SEQ ID NO: 491075 - DNA, 19 bp, Mus musculus
  siRNA target sequence for Abca5 (NM_147219.1,4630-4648).
ctattcgaactgcatttaa

SEQ ID NO: 491076 - DNA, 19 bp, Mus musculus
  siRNA target sequence for Abca5 (NM_147219.1,4728-4746).
gtatctgggcagctaagat

SEQ ID NO: 491077 - DNA, 19 bp, Mus musculus
  siRNA target sequence for Abca5 (NM_147219.1,4736-4754).
gcagctaagatgtattgga

SEQ ID NO: 491078 - DNA, 19 bp, Mus musculus
  siRNA target sequence for Abca5 (NM_147219.1,4758-4776).
gtacaacatctaaagagta

SEQ ID NO: 491079 - DNA, 19 bp, Mus musculus
  siRNA target sequence for Abca5 (NM_147219.1,4767-4785).
ctaaagagtaagtttggta

SEQ ID NO: 491080 - DNA, 19 bp, Mus musculus
  siRNA target sequence for Abca5 (NM_147219.1,4783-4801).
gtaaaggctactttttgga

SEQ ID NO: 491081 - DNA, 19 bp, Mus musculus
  siRNA target sequence for Abca5 (NM_147219.1,4833-4851).
gaaatagatcgccttcaaa

SEQ ID NO: 491082 - DNA, 19 bp, Mus musculus
  siRNA target sequence for Abca5 (NM_147219.1,4883-4901).
ccgccaagagagcttttct

SEQ ID NO: 491083 - DNA, 19 bp, Mus musculus
  siRNA target sequence for Abca5 (NM_147219.1,4884-4902).
cgccaagagagcttttctt

SEQ ID NO: 491084 - DNA, 19 bp, Mus musculus
  siRNA target sequence for Abca5 (NM_147219.1,4948-4966).
cacaatccttcgctaagtt

SEQ ID NO: 491085 - DNA, 19 bp, Mus musculus
  siRNA target sequence for Abca5 (NM_147219.1,4960-4978).
ctaagttggaagaagcaaa

SEQ ID NO: 491086 - DNA, 19 bp, Mus musculus
  siRNA target sequence for Abca5 (NM_147219.1,4981-4999).
gcacttttgccattgaaga

SEQ ID NO: 491087 - DNA, 19 bp, Mus musculus
  siRNA target sequence for Abca5 (NM_147219.1,5110-5128).
ggacgcaggaggatagagt

SEQ ID NO: 491088 - DNA, 19 bp, Mus musculus
  siRNA target sequence for Abca5 (NM_147219.1,5115-5133).
caggaggatagagtagtat

SEQ ID NO: 491089 - DNA, 19 bp, Mus musculus
  siRNA target sequence for Abca5 (NM_147219.1,5118-5136).
gaggatagagtagtatttt

SEQ ID NO: 491090 - DNA, 19 bp, Mus musculus
  siRNA target sequence for Abca6 (NM_147218.1,245-263).
ggaagagagagagcttatt

SEQ ID NO: 491091 - DNA, 19 bp, Mus musculus
  siRNA target sequence for Abca6 (NM_147218.1,264-282).
ggaatggagcataccaatt

SEQ ID NO: 491092 - DNA, 19 bp, Mus musculus
  siRNA target sequence for Abca6 (NM_147218.1,265-283).
gaatggagcataccaatta

SEQ ID NO: 491093 - DNA, 19 bp, Mus musculus
  siRNA target sequence for Abca6 (NM_147218.1,269-287).
ggagcataccaattattat

SEQ ID NO: 491094 - DNA, 19 bp, Mus musculus
  siRNA target sequence for Abca6 (NM_147218.1,270-288).
gagcataccaattattata

SEQ ID NO: 491095 - DNA, 19 bp, Mus musculus
  siRNA target sequence for Abca6 (NM_147218.1,311-329).
cctacttggcaagaaatat

SEQ ID NO: 491096 - DNA, 19 bp, Mus musculus
  siRNA target sequence for Abca6 (NM_147218.1,312-330).
ctacttggcaagaaatatt

SEQ ID NO: 491097 - DNA, 19 bp, Mus musculus
  siRNA target sequence for Abca6 (NM_147218.1,354-372).
ggatcttggaagtctaaat

SEQ ID NO: 491098 - DNA, 19 bp, Mus musculus
  siRNA target sequence for Abca6 (NM_147218.1,480-498).
catcggggtaccaagtata

SEQ ID NO: 491099 - DNA, 19 bp, Mus musculus
  siRNA target sequence for Abca6 (NM_147218.1,483-501).
cggggtaccaagtatagaa

SEQ ID NO: 491100 - DNA, 19 bp, Mus musculus
  siRNA target sequence for Abca6 (NM_147218.1,537-555).
cgctttaggagtcatcttt

SEQ ID NO: 491101 - DNA, 19 bp, Mus musculus
  siRNA target sequence for Abca6 (NM_147218.1,538-556).
gctttaggagtcatcttta

SEQ ID NO: 491102 - DNA, 19 bp, Mus musculus
  siRNA target sequence for Abca6 (NM_147218.1,539-557).
ctttaggagtcatctttaa

SEQ ID NO: 491103 - DNA, 19 bp, Mus musculus
  siRNA target sequence for Abca6 (NM_147218.1,559-577).
gacagtttctcttaccaat

SEQ ID NO: 491104 - DNA, 19 bp, Mus musculus
  siRNA target sequence for Abca6 (NM_147218.1,563-581).
gtttctcttaccaattaaa

SEQ ID NO: 491105 - DNA, 19 bp, Mus musculus
  siRNA target sequence for Abca6 (NM_147218.1,583-601).
gtcctcaggatgtatggaa

SEQ ID NO: 491106 - DNA, 19 bp, Mus musculus
  siRNA target sequence for Abca6 (NM_147218.1,612-630).
gaaagaggacttattagct

SEQ ID NO: 491107 - DNA, 19 bp, Mus musculus
  siRNA target sequence for Abca6 (NM_147218.1,646-664).
cattctcaggcgttctgtt

SEQ ID NO: 491108 - DNA, 19 bp, Mus musculus
  siRNA target sequence for Abca6 (NM_147218.1,652-670).
caggcgttctgttcacttt

SEQ ID NO: 491109 - DNA, 19 bp, Mus musculus
  siRNA target sequence for Abca6 (NM_147218.1,686-704).
gaggcttcgtagctttaca

SEQ ID NO: 491110 - DNA, 19 bp, Mus musculus
  siRNA target sequence for Abca6 (NM_147218.1,698-716).
ctttacaaaccgccattaa

SEQ ID NO: 491111 - DNA, 19 bp, Mus musculus
  siRNA target sequence for Abca6 (NM_147218.1,710-728).
ccattaacgctgggattat

SEQ ID NO: 491112 - DNA, 19 bp, Mus musculus
  siRNA target sequence for Abca6 (NM_147218.1,768-786).
gtccatcgatgggatcaat

SEQ ID NO: 491113 - DNA, 19 bp, Mus musculus
  siRNA target sequence for Abca6 (NM_147218.1,812-830).
gagatctttcggattacga

SEQ ID NO: 491114 - DNA, 19 bp, Mus musculus
  siRNA target sequence for Abca6 (NM_147218.1,814-832).
gatctttcggattacgaaa

SEQ ID NO: 491115 - DNA, 19 bp, Mus musculus
  siRNA target sequence for Abca6 (NM_147218.1,817-835).
ctttcggattacgaaattt

SEQ ID NO: 491116 - DNA, 19 bp, Mus musculus
  siRNA target sequence for Abca6 (NM_147218.1,821-839).
cggattacgaaatttttat

SEQ ID NO: 491117 - DNA, 19 bp, Mus musculus
  siRNA target sequence for Abca6 (NM_147218.1,823-841).
gattacgaaatttttatct

SEQ ID NO: 491118 - DNA, 19 bp, Mus musculus
  siRNA target sequence for Abca6 (NM_147218.1,861-879).
ctcctcgtttatatatttt

SEQ ID NO: 491119 - DNA, 19 bp, Mus musculus
  siRNA target sequence for Abca6 (NM_147218.1,880-898).
gcatccagcaatgttacta

SEQ ID NO: 491120 - DNA, 19 bp, Mus musculus
  siRNA target sequence for Abca6 (NM_147218.1,881-899).
catccagcaatgttactaa

SEQ ID NO: 491121 - DNA, 19 bp, Mus musculus
  siRNA target sequence for Abca6 (NM_147218.1,965-983).
cctggggcttaatctatgt

SEQ ID NO: 491122 - DNA, 19 bp, Mus musculus
  siRNA target sequence for Abca6 (NM_147218.1,966-984).
ctggggcttaatctatgtt

SEQ ID NO: 491123 - DNA, 19 bp, Mus musculus
  siRNA target sequence for Abca6 (NM_147218.1,1015-1033).
gcaattatcataacatcta

SEQ ID NO: 491124 - DNA, 19 bp, Mus musculus
  siRNA target sequence for Abca6 (NM_147218.1,1028-1046).
catctacccagattataat

SEQ ID NO: 491125 - DNA, 19 bp, Mus musculus
  siRNA target sequence for Abca6 (NM_147218.1,1031-1049).
ctacccagattataatgat

SEQ ID NO: 491126 - DNA, 19 bp, Mus musculus
  siRNA target sequence for Abca6 (NM_147218.1,1054-1072).
ggtttcctggtcatattta

SEQ ID NO: 491127 - DNA, 19 bp, Mus musculus
  siRNA target sequence for Abca6 (NM_147218.1,1063-1081).
gtcatatttacgctgtttt

SEQ ID NO: 491128 - DNA, 19 bp, Mus musculus
  siRNA target sequence for Abca6 (NM_147218.1,1141-1159).
gctgtcctcacaaacctaa

SEQ ID NO: 491129 - DNA, 19 bp, Mus musculus
  siRNA target sequence for Abca6 (NM_147218.1,1142-1160).
ctgtcctcacaaacctaat

SEQ ID NO: 491130 - DNA, 19 bp, Mus musculus
  siRNA target sequence for Abca6 (NM_147218.1,1274-1292).
ctgggatggctaaggttat

SEQ ID NO: 491131 - DNA, 19 bp, Mus musculus
  siRNA target sequence for Abca6 (NM_147218.1,1276-1294).
gggatggctaaggttatct

SEQ ID NO: 491132 - DNA, 19 bp, Mus musculus
  siRNA target sequence for Abca6 (NM_147218.1,1277-1295).
ggatggctaaggttatctt

SEQ ID NO: 491133 - DNA, 19 bp, Mus musculus
  siRNA target sequence for Abca6 (NM_147218.1,1305-1323).
caacctgaatggtgtagta

SEQ ID NO: 491134 - DNA, 19 bp, Mus musculus
  siRNA target sequence for Abca6 (NM_147218.1,1335-1353).
ctcaggagaatcctatgta

SEQ ID NO: 491135 - DNA, 19 bp, Mus musculus
  siRNA target sequence for Abca6 (NM_147218.1,1351-1369).
gtaatgatagcagtatttt

SEQ ID NO: 491136 - DNA, 19 bp, Mus musculus
  siRNA target sequence for Abca6 (NM_147218.1,1356-1374).
gatagcagtatttttcata

SEQ ID NO: 491137 - DNA, 19 bp, Mus musculus
  siRNA target sequence for Abca6 (NM_147218.1,1371-1389).
catattggcttttgatagt

SEQ ID NO: 491138 - DNA, 19 bp, Mus musculus
  siRNA target sequence for Abca6 (NM_147218.1,1379-1397).
cttttgatagtcttctcta

SEQ ID NO: 491139 - DNA, 19 bp, Mus musculus
  siRNA target sequence for Abca6 (NM_147218.1,1408-1426).
gccctgtattttgacaaaa

SEQ ID NO: 491140 - DNA, 19 bp, Mus musculus
  siRNA target sequence for Abca6 (NM_147218.1,1449-1467).
ccggtctgctccactgttt

SEQ ID NO: 491141 - DNA, 19 bp, Mus musculus
  siRNA target sequence for Abca6 (NM_147218.1,1450-1468).
cggtctgctccactgtttt

SEQ ID NO: 491142 - DNA, 19 bp, Mus musculus
  siRNA target sequence for Abca6 (NM_147218.1,1451-1469).
ggtctgctccactgttttt

SEQ ID NO: 491143 - DNA, 19 bp, Mus musculus
  siRNA target sequence for Abca6 (NM_147218.1,1470-1488).
cttgaatccaacatcttgt

SEQ ID NO: 491144 - DNA, 19 bp, Mus musculus
  siRNA target sequence for Abca6 (NM_147218.1,1477-1495).
ccaacatcttgttttcgaa

SEQ ID NO: 491145 - DNA, 19 bp, Mus musculus
  siRNA target sequence for Abca6 (NM_147218.1,1478-1496).
caacatcttgttttcgaaa

SEQ ID NO: 491146 - DNA, 19 bp, Mus musculus
  siRNA target sequence for Abca6 (NM_147218.1,1492-1510).
cgaaaaacagcgaatagaa

SEQ ID NO: 491147 - DNA, 19 bp, Mus musculus
  siRNA target sequence for Abca6 (NM_147218.1,1542-1560).
gcttccttcggatgagtat

SEQ ID NO: 491148 - DNA, 19 bp, Mus musculus
  siRNA target sequence for Abca6 (NM_147218.1,1675-1693).
gatatctatgagagtcaaa

SEQ ID NO: 491149 - DNA, 19 bp, Mus musculus
  siRNA target sequence for Abca6 (NM_147218.1,1686-1704).
gagtcaaatcacagcaatt

SEQ ID NO: 491150 - DNA, 19 bp, Mus musculus
  siRNA target sequence for Abca6 (NM_147218.1,1688-1706).
gtcaaatcacagcaattct

SEQ ID NO: 491151 - DNA, 19 bp, Mus musculus
  siRNA target sequence for Abca6 (NM_147218.1,1721-1739).
cgggcaaatcttcattact

SEQ ID NO: 491152 - DNA, 19 bp, Mus musculus
  siRNA target sequence for Abca6 (NM_147218.1,1722-1740).
gggcaaatcttcattacta

SEQ ID NO: 491153 - DNA, 19 bp, Mus musculus
  siRNA target sequence for Abca6 (NM_147218.1,1723-1741).
ggcaaatcttcattactaa

SEQ ID NO: 491154 - DNA, 19 bp, Mus musculus
  siRNA target sequence for Abca6 (NM_147218.1,1743-1761).
catcctcagtggattgtat

SEQ ID NO: 491155 - DNA, 19 bp, Mus musculus
  siRNA target sequence for Abca6 (NM_147218.1,1746-1764).
cctcagtggattgtatgtt

SEQ ID NO: 491156 - DNA, 19 bp, Mus musculus
  siRNA target sequence for Abca6 (NM_147218.1,1776-1794).
gtcagtcacagtctacaat

SEQ ID NO: 491157 - DNA, 19 bp, Mus musculus
  siRNA target sequence for Abca6 (NM_147218.1,1784-1802).
cagtctacaataaaaatct

SEQ ID NO: 491158 - DNA, 19 bp, Mus musculus
  siRNA target sequence for Abca6 (NM_147218.1,1843-1861).
ggtgtttgtcctcaacata

SEQ ID NO: 491159 - DNA, 19 bp, Mus musculus
  siRNA target sequence for Abca6 (NM_147218.1,1844-1862).
gtgtttgtcctcaacataa

SEQ ID NO: 491160 - DNA, 19 bp, Mus musculus
  siRNA target sequence for Abca6 (NM_147218.1,1852-1870).
cctcaacataacgttcaat

SEQ ID NO: 491161 - DNA, 19 bp, Mus musculus
  siRNA target sequence for Abca6 (NM_147218.1,1899-1917).
cactctctttgctaaaata

SEQ ID NO: 491162 - DNA, 19 bp, Mus musculus
  siRNA target sequence for Abca6 (NM_147218.1,1948-1966).
gaggtacaacaaatcttat

SEQ ID NO: 491163 - DNA, 19 bp, Mus musculus
  siRNA target sequence for Abca6 (NM_147218.1,1950-1968).
ggtacaacaaatcttatca

SEQ ID NO: 491164 - DNA, 19 bp, Mus musculus
  siRNA target sequence for Abca6 (NM_147218.1,1993-2011).
gacgatctagccgaacatt

SEQ ID NO: 491165 - DNA, 19 bp, Mus musculus
  siRNA target sequence for Abca6 (NM_147218.1,1995-2013).
cgatctagccgaacattta

SEQ ID NO: 491166 - DNA, 19 bp, Mus musculus
  siRNA target sequence for Abca6 (NM_147218.1,1996-2014).
gatctagccgaacatttaa

SEQ ID NO: 491167 - DNA, 19 bp, Mus musculus
  siRNA target sequence for Abca6 (NM_147218.1,2054-2072).
ctgtaggagatcctcaaat

SEQ ID NO: 491168 - DNA, 19 bp, Mus musculus
  siRNA target sequence for Abca6 (NM_147218.1,2056-2074).
gtaggagatcctcaaattt

SEQ ID NO: 491169 - DNA, 19 bp, Mus musculus
  siRNA target sequence for Abca6 (NM_147218.1,2079-2097).
cttagatgaacctactgta

SEQ ID NO: 491170 - DNA, 19 bp, Mus musculus
  siRNA target sequence for Abca6 (NM_147218.1,2098-2116).
ggactcgatcccttttcga

SEQ ID NO: 491171 - DNA, 19 bp, Mus musculus
  siRNA target sequence for Abca6 (NM_147218.1,2251-2269).
gggtcttccgtctttctga

SEQ ID NO: 491172 - DNA, 19 bp, Mus musculus
  siRNA target sequence for Abca6 (NM_147218.1,2252-2270).
ggtcttccgtctttctgaa

SEQ ID NO: 491173 - DNA, 19 bp, Mus musculus
  siRNA target sequence for Abca6 (NM_147218.1,2279-2297).
ggggtcttggatatcactt

SEQ ID NO: 491174 - DNA, 19 bp, Mus musculus
  siRNA target sequence for Abca6 (NM_147218.1,2280-2298).
gggtcttggatatcactta

SEQ ID NO: 491175 - DNA, 19 bp, Mus musculus
  siRNA target sequence for Abca6 (NM_147218.1,2281-2299).
ggtcttggatatcacttaa

SEQ ID NO: 491176 - DNA, 19 bp, Mus musculus
  siRNA target sequence for Abca6 (NM_147218.1,2310-2328).
ggatgaaacgtgtgattca

SEQ ID NO: 491177 - DNA, 19 bp, Mus musculus
  siRNA target sequence for Abca6 (NM_147218.1,2323-2341).
gattcagagcggctaacat

SEQ ID NO: 491178 - DNA, 19 bp, Mus musculus
  siRNA target sequence for Abca6 (NM_147218.1,2392-2410).
gaaaagcttgtgtacattt

SEQ ID NO: 491179 - DNA, 19 bp, Mus musculus
  siRNA target sequence for Abca6 (NM_147218.1,2429-2447).
gcgaattcccagagttctt

SEQ ID NO: 491180 - DNA, 19 bp, Mus musculus
  siRNA target sequence for Abca6 (NM_147218.1,2445-2463).
cttcagtgatctcgataaa

SEQ ID NO: 491181 - DNA, 19 bp, Mus musculus
  siRNA target sequence for Abca6 (NM_147218.1,2448-2466).
cagtgatctcgataaatat

SEQ ID NO: 491182 - DNA, 19 bp, Mus musculus
  siRNA target sequence for Abca6 (NM_147218.1,2475-2493).
gggcttgatgagttatgaa

SEQ ID NO: 491183 - DNA, 19 bp, Mus musculus
  siRNA target sequence for Abca6 (NM_147218.1,2477-2495).
gcttgatgagttatgaagt

SEQ ID NO: 491184 - DNA, 19 bp, Mus musculus
  siRNA target sequence for Abca6 (NM_147218.1,2478-2496).
cttgatgagttatgaagtt

SEQ ID NO: 491185 - DNA, 19 bp, Mus musculus
  siRNA target sequence for Abca6 (NM_147218.1,2498-2516).
ccatgtcaactctcaatga

SEQ ID NO: 491186 - DNA, 19 bp, Mus musculus
  siRNA target sequence for Abca6 (NM_147218.1,2499-2517).
catgtcaactctcaatgat

SEQ ID NO: 491187 - DNA, 19 bp, Mus musculus
  siRNA target sequence for Abca6 (NM_147218.1,2504-2522).
caactctcaatgatgtctt

SEQ ID NO: 491188 - DNA, 19 bp, Mus musculus
  siRNA target sequence for Abca6 (NM_147218.1,2694-2712).
gcttcgcatcttaaagcta

SEQ ID NO: 491189 - DNA, 19 bp, Mus musculus
  siRNA target sequence for Abca6 (NM_147218.1,2695-2713).
cttcgcatcttaaagctaa

SEQ ID NO: 491190 - DNA, 19 bp, Mus musculus
  siRNA target sequence for Abca6 (NM_147218.1,2700-2718).
catcttaaagctaaaacga

SEQ ID NO: 491191 - DNA, 19 bp, Mus musculus
  siRNA target sequence for Abca6 (NM_147218.1,2771-2789).
cactggtcatagaatacgt

SEQ ID NO: 491192 - DNA, 19 bp, Mus musculus
  siRNA target sequence for Abca6 (NM_147218.1,2787-2805).
cgtggctaacgctttgcta

SEQ ID NO: 491193 - DNA, 19 bp, Mus musculus
  siRNA target sequence for Abca6 (NM_147218.1,2796-2814).
cgctttgctagaggtaaaa

SEQ ID NO: 491194 - DNA, 19 bp, Mus musculus
  siRNA target sequence for Abca6 (NM_147218.1,2797-2815).
gctttgctagaggtaaaaa

SEQ ID NO: 491195 - DNA, 19 bp, Mus musculus
  siRNA target sequence for Abca6 (NM_147218.1,2882-2900).
ccagcctattggtcatcaa

SEQ ID NO: 491196 - DNA, 19 bp, Mus musculus
  siRNA target sequence for Abca6 (NM_147218.1,2883-2901).
cagcctattggtcatcaat

SEQ ID NO: 491197 - DNA, 19 bp, Mus musculus
  siRNA target sequence for Abca6 (NM_147218.1,2885-2903).
gcctattggtcatcaataa

SEQ ID NO: 491198 - DNA, 19 bp, Mus musculus
  siRNA target sequence for Abca6 (NM_147218.1,2887-2905).
ctattggtcatcaataaca

SEQ ID NO: 491199 - DNA, 19 bp, Mus musculus
  siRNA target sequence for Abca6 (NM_147218.1,2893-2911).
gtcatcaataacacagaat

SEQ ID NO: 491200 - DNA, 19 bp, Mus musculus
  siRNA target sequence for Abca6 (NM_147218.1,2936-2954).
cactgaagcatcaaaacat

SEQ ID NO: 491201 - DNA, 19 bp, Mus musculus
  siRNA target sequence for Abca6 (NM_147218.1,3005-3023).
cctacaacggagctattat

SEQ ID NO: 491202 - DNA, 19 bp, Mus musculus
  siRNA target sequence for Abca6 (NM_147218.1,3006-3024).
ctacaacggagctattata

SEQ ID NO: 491203 - DNA, 19 bp, Mus musculus
  siRNA target sequence for Abca6 (NM_147218.1,3035-3053).
gacaaaaggattacagatt

SEQ ID NO: 491204 - DNA, 19 bp, Mus musculus
  siRNA target sequence for Abca6 (NM_147218.1,3081-3099).
gcactgctttcctatatta

SEQ ID NO: 491205 - DNA, 19 bp, Mus musculus
  siRNA target sequence for Abca6 (NM_147218.1,3139-3157).
cacacacagtatattagga

SEQ ID NO: 491206 - DNA, 19 bp, Mus musculus
  siRNA target sequence for Abca6 (NM_147218.1,3141-3159).
cacacagtatattaggatt

SEQ ID NO: 491207 - DNA, 19 bp, Mus musculus
  siRNA target sequence for Abca6 (NM_147218.1,3143-3161).
cacagtatattaggattaa

SEQ ID NO: 491208 - DNA, 19 bp, Mus musculus
  siRNA target sequence for Abca6 (NM_147218.1,3147-3165).
gtatattaggattaaggaa

SEQ ID NO: 491209 - DNA, 19 bp, Mus musculus
  siRNA target sequence for Abca6 (NM_147218.1,3155-3173).
ggattaaggaagatatatt

SEQ ID NO: 491210 - DNA, 19 bp, Mus musculus
  siRNA target sequence for Abca6 (NM_147218.1,3267-3285).
gagcagcgtcagcgattat

SEQ ID NO: 491211 - DNA, 19 bp, Mus musculus
  siRNA target sequence for Abca6 (NM_147218.1,3269-3287).
gcagcgtcagcgattataa

SEQ ID NO: 491212 - DNA, 19 bp, Mus musculus
  siRNA target sequence for Abca6 (NM_147218.1,3270-3288).
cagcgtcagcgattataaa

SEQ ID NO: 491213 - DNA, 19 bp, Mus musculus
  siRNA target sequence for Abca6 (NM_147218.1,3272-3290).
gcgtcagcgattataaaaa

SEQ ID NO: 491214 - DNA, 19 bp, Mus musculus
  siRNA target sequence for Abca6 (NM_147218.1,3274-3292).
gtcagcgattataaaaaga

SEQ ID NO: 491215 - DNA, 19 bp, Mus musculus
  siRNA target sequence for Abca6 (NM_147218.1,3298-3316).
gattcccagctgtggattt

SEQ ID NO: 491216 - DNA, 19 bp, Mus musculus
  siRNA target sequence for Abca6 (NM_147218.1,3369-3387).
cctcttcagcggaatgctt

SEQ ID NO: 491217 - DNA, 19 bp, Mus musculus
  siRNA target sequence for Abca6 (NM_147218.1,3392-3410).
caagctacttcacatcata

SEQ ID NO: 491218 - DNA, 19 bp, Mus musculus
  siRNA target sequence for Abca6 (NM_147218.1,3402-3420).
cacatcatacacgtcaaaa

SEQ ID NO: 491219 - DNA, 19 bp, Mus musculus
  siRNA target sequence for Abca6 (NM_147218.1,3404-3422).
catcatacacgtcaaaact

SEQ ID NO: 491220 - DNA, 19 bp, Mus musculus
  siRNA target sequence for Abca6 (NM_147218.1,3407-3425).
catacacgtcaaaactgtt

SEQ ID NO: 491221 - DNA, 19 bp, Mus musculus
  siRNA target sequence for Abca6 (NM_147218.1,3438-3456).
gacaagcgaaattgtgttt

SEQ ID NO: 491222 - DNA, 19 bp, Mus musculus
  siRNA target sequence for Abca6 (NM_147218.1,3443-3461).
gcgaaattgtgttttctgt

SEQ ID NO: 491223 - DNA, 19 bp, Mus musculus
  siRNA target sequence for Abca6 (NM_147218.1,3491-3509).
ctcttgtcttcttgacata

SEQ ID NO: 491224 - DNA, 19 bp, Mus musculus
  siRNA target sequence for Abca6 (NM_147218.1,3496-3514).
gtcttcttgacatatgtga

SEQ ID NO: 491225 - DNA, 19 bp, Mus musculus
  siRNA target sequence for Abca6 (NM_147218.1,3501-3519).
cttgacatatgtgatatca

SEQ ID NO: 491226 - DNA, 19 bp, Mus musculus
  siRNA target sequence for Abca6 (NM_147218.1,3506-3524).
catatgtgatatcatttgt

SEQ ID NO: 491227 - DNA, 19 bp, Mus musculus
  siRNA target sequence for Abca6 (NM_147218.1,3546-3564).
cagcaccctctggtcaatt

SEQ ID NO: 491228 - DNA, 19 bp, Mus musculus
  siRNA target sequence for Abca6 (NM_147218.1,3574-3592).
cttgtcatagccattacgt

SEQ ID NO: 491229 - DNA, 19 bp, Mus musculus
  siRNA target sequence for Abca6 (NM_147218.1,3579-3597).
catagccattacgtttgaa

SEQ ID NO: 491230 - DNA, 19 bp, Mus musculus
  siRNA target sequence for Abca6 (NM_147218.1,3590-3608).
cgtttgaaaaagttgcaaa

SEQ ID NO: 491231 - DNA, 19 bp, Mus musculus
  siRNA target sequence for Abca6 (NM_147218.1,3605-3623).
caaatggtcccttcaatga

SEQ ID NO: 491232 - DNA, 19 bp, Mus musculus
  siRNA target sequence for Abca6 (NM_147218.1,3618-3636).
caatgaagcactggttatt

SEQ ID NO: 491233 - DNA, 19 bp, Mus musculus
  siRNA target sequence for Abca6 (NM_147218.1,3746-3764).
ctgcggttgatcttctgtt

SEQ ID NO: 491234 - DNA, 19 bp, Mus musculus
  siRNA target sequence for Abca6 (NM_147218.1,3748-3766).
gcggttgatcttctgttat

SEQ ID NO: 491235 - DNA, 19 bp, Mus musculus
  siRNA target sequence for Abca6 (NM_147218.1,3760-3778).
ctgttatgcctaatacctt

SEQ ID NO: 491236 - DNA, 19 bp, Mus musculus
  siRNA target sequence for Abca6 (NM_147218.1,3767-3785).
gcctaataccttacattca

SEQ ID NO: 491237 - DNA, 19 bp, Mus musculus
  siRNA target sequence for Abca6 (NM_147218.1,3768-3786).
cctaataccttacattcat

SEQ ID NO: 491238 - DNA, 19 bp, Mus musculus
  siRNA target sequence for Abca6 (NM_147218.1,3810-3828).
gagatgcctggaactgaaa

SEQ ID NO: 491239 - DNA, 19 bp, Mus musculus
  siRNA target sequence for Abca6 (NM_147218.1,3812-3830).
gatgcctggaactgaaata

SEQ ID NO: 491240 - DNA, 19 bp, Mus musculus
  siRNA target sequence for Abca6 (NM_147218.1,3864-3882).
caggatagctccacaaagt

SEQ ID NO: 491241 - DNA, 19 bp, Mus musculus
  siRNA target sequence for Abca6 (NM_147218.1,3866-3884).
ggatagctccacaaagtct

SEQ ID NO: 491242 - DNA, 19 bp, Mus musculus
  siRNA target sequence for Abca6 (NM_147218.1,3867-3885).
gatagctccacaaagtcta

SEQ ID NO: 491243 - DNA, 19 bp, Mus musculus
  siRNA target sequence for Abca6 (NM_147218.1,3896-3914).
caaatcccgaggaacctat

SEQ ID NO: 491244 - DNA, 19 bp, Mus musculus
  siRNA target sequence for Abca6 (NM_147218.1,3902-3920).
ccgaggaacctatagatga

SEQ ID NO: 491245 - DNA, 19 bp, Mus musculus
  siRNA target sequence for Abca6 (NM_147218.1,4075-4093).
gtgaggaacgtctcttttt

SEQ ID NO: 491246 - DNA, 19 bp, Mus musculus
  siRNA target sequence for Abca6 (NM_147218.1,4077-4095).
gaggaacgtctctttttgt

SEQ ID NO: 491247 - DNA, 19 bp, Mus musculus
  siRNA target sequence for Abca6 (NM_147218.1,4129-4147).
cccgatggtgctggtaaaa

SEQ ID NO: 491248 - DNA, 19 bp, Mus musculus
  siRNA target sequence for Abca6 (NM_147218.1,4141-4159).
ggtaaaagttcctctatca

SEQ ID NO: 491249 - DNA, 19 bp, Mus musculus
  siRNA target sequence for Abca6 (NM_147218.1,4189-4207).
gctggacaggtggaattaa

SEQ ID NO: 491250 - DNA, 19 bp, Mus musculus
  siRNA target sequence for Abca6 (NM_147218.1,4190-4208).
ctggacaggtggaattaaa

SEQ ID NO: 491251 - DNA, 19 bp, Mus musculus
  siRNA target sequence for Abca6 (NM_147218.1,4192-4210).
ggacaggtggaattaaaaa

SEQ ID NO: 491252 - DNA, 19 bp, Mus musculus
  siRNA target sequence for Abca6 (NM_147218.1,4200-4218).
ggaattaaaaaggttaagt

SEQ ID NO: 491253 - DNA, 19 bp, Mus musculus
  siRNA target sequence for Abca6 (NM_147218.1,4239-4257).
cgacagcagggctgagttt

SEQ ID NO: 491254 - DNA, 19 bp, Mus musculus
  siRNA target sequence for Abca6 (NM_147218.1,4357-4375).
gtcgttgccatttcaagat

SEQ ID NO: 491255 - DNA, 19 bp, Mus musculus
  siRNA target sequence for Abca6 (NM_147218.1,4359-4377).
cgttgccatttcaagatta

SEQ ID NO: 491256 - DNA, 19 bp, Mus musculus
  siRNA target sequence for Abca6 (NM_147218.1,4363-4381).
gccatttcaagattagtga

SEQ ID NO: 491257 - DNA, 19 bp, Mus musculus
  siRNA target sequence for Abca6 (NM_147218.1,4365-4383).
catttcaagattagtgaat

SEQ ID NO: 491258 - DNA, 19 bp, Mus musculus
  siRNA target sequence for Abca6 (NM_147218.1,4548-4566).
ggcaatccaggcagttgtt

SEQ ID NO: 491259 - DNA, 19 bp, Mus musculus
  siRNA target sequence for Abca6 (NM_147218.1,4555-4573).
caggcagttgttaaagaca

SEQ ID NO: 491260 - DNA, 19 bp, Mus musculus
  siRNA target sequence for Abca6 (NM_147218.1,4557-4575).
ggcagttgttaaagacaat

SEQ ID NO: 491261 - DNA, 19 bp, Mus musculus
  siRNA target sequence for Abca6 (NM_147218.1,4698-4716).
gtttggccaggattacgtt

SEQ ID NO: 491262 - DNA, 19 bp, Mus musculus
  siRNA target sequence for Abca6 (NM_147218.1,4795-4813).
cgccaggacagatgtttct

SEQ ID NO: 491263 - DNA, 19 bp, Mus musculus
  siRNA target sequence for Abca6 (NM_147218.1,4827-4845).
caagctacccgtaacagat

SEQ ID NO: 491264 - DNA, 19 bp, Mus musculus
  siRNA target sequence for Abca6 (NM_147218.1,4830-4848).
gctacccgtaacagatgtt

SEQ ID NO: 491265 - DNA, 19 bp, Mus musculus
  siRNA target sequence for Abca6 (NM_147218.1,4857-4875).
gtctcaggccttccataaa

SEQ ID NO: 491266 - DNA, 19 bp, Mus musculus
  siRNA target sequence for Abca6 (NM_147218.1,4863-4881).
ggccttccataaactagaa

SEQ ID NO: 491267 - DNA, 19 bp, Mus musculus
  siRNA target sequence for Abca6 (NM_147218.1,4928-4946).
gcacactggacagagtaat

SEQ ID NO: 491268 - DNA, 19 bp, Mus musculus
  siRNA target sequence for Abca6 (NM_147218.1,4929-4947).
cacactggacagagtaatt

SEQ ID NO: 491269 - DNA, 19 bp, Mus musculus
  siRNA target sequence for Abca6 (NM_147218.1,4931-4949).
cactggacagagtaatttt

SEQ ID NO: 491270 - DNA, 19 bp, Mus musculus
  siRNA target sequence for Abca7 (NM_013850.1,59-77).
gacaaccgatccaactact

SEQ ID NO: 491271 - DNA, 19 bp, Mus musculus
  siRNA target sequence for Abca7 (NM_013850.1,73-91).
ctactagtggagttgcttt

SEQ ID NO: 491272 - DNA, 19 bp, Mus musculus
  siRNA target sequence for Abca7 (NM_013850.1,169-187).
ccaaacaagccattaccat

SEQ ID NO: 491273 - DNA, 19 bp, Mus musculus
  siRNA target sequence for Abca7 (NM_013850.1,214-232).
ggccttgtctgcaacgtaa

SEQ ID NO: 491274 - DNA, 19 bp, Mus musculus
  siRNA target sequence for Abca7 (NM_013850.1,215-233).
gccttgtctgcaacgtaaa

SEQ ID NO: 491275 - DNA, 19 bp, Mus musculus
  siRNA target sequence for Abca7 (NM_013850.1,217-235).
cttgtctgcaacgtaaaca

SEQ ID NO: 491276 - DNA, 19 bp, Mus musculus
  siRNA target sequence for Abca7 (NM_013850.1,220-238).
gtctgcaacgtaaacaact

SEQ ID NO: 491277 - DNA, 19 bp, Mus musculus
  siRNA target sequence for Abca7 (NM_013850.1,280-298).
ctgagtaactttaaggatt

SEQ ID NO: 491278 - DNA, 19 bp, Mus musculus
  siRNA target sequence for Abca7 (NM_013850.1,511-529).
ggtcaagcccaggattcta

SEQ ID NO: 491279 - DNA, 19 bp, Mus musculus
  siRNA target sequence for Abca7 (NM_013850.1,512-530).
gtcaagcccaggattctat

SEQ ID NO: 491280 - DNA, 19 bp, Mus musculus
  siRNA target sequence for Abca7 (NM_013850.1,694-712).
ggcctgtccctcaattggt

SEQ ID NO: 491281 - DNA, 19 bp, Mus musculus
  siRNA target sequence for Abca7 (NM_013850.1,695-713).
gcctgtccctcaattggta

SEQ ID NO: 491282 - DNA, 19 bp, Mus musculus
  siRNA target sequence for Abca7 (NM_013850.1,714-732).
cgaagccaaccagcttaat

SEQ ID NO: 491283 - DNA, 19 bp, Mus musculus
  siRNA target sequence for Abca7 (NM_013850.1,718-736).
gccaaccagcttaatgagt

SEQ ID NO: 491284 - DNA, 19 bp, Mus musculus
  siRNA target sequence for Abca7 (NM_013850.1,719-737).
ccaaccagcttaatgagtt

SEQ ID NO: 491285 - DNA, 19 bp, Mus musculus
  siRNA target sequence for Abca7 (NM_013850.1,845-863).
ggcgcctgaagccattgat

SEQ ID NO: 491286 - DNA, 19 bp, Mus musculus
  siRNA target sequence for Abca7 (NM_013850.1,864-882).
cctcgggaaaattctcttt

SEQ ID NO: 491287 - DNA, 19 bp, Mus musculus
  siRNA target sequence for Abca7 (NM_013850.1,1095-1113).
gaagttggaggctatcaaa

SEQ ID NO: 491288 - DNA, 19 bp, Mus musculus
  siRNA target sequence for Abca7 (NM_013850.1,1151-1169).
gggaggcccacgcagatat

SEQ ID NO: 491289 - DNA, 19 bp, Mus musculus
  siRNA target sequence for Abca7 (NM_013850.1,1386-1404).
gattcgaatggatatcgat

SEQ ID NO: 491290 - DNA, 19 bp, Mus musculus
  siRNA target sequence for Abca7 (NM_013850.1,1454-1472).
cgtcagcagatcctttcat

SEQ ID NO: 491291 - DNA, 19 bp, Mus musculus
  siRNA target sequence for Abca7 (NM_013850.1,1595-1613).
cctgctacgtggatgatgt

SEQ ID NO: 491292 - DNA, 19 bp, Mus musculus
  siRNA target sequence for Abca7 (NM_013850.1,1692-1710).
ggccgtggtgcgtgagaaa

SEQ ID NO: 491293 - DNA, 19 bp, Mus musculus
  siRNA target sequence for Abca7 (NM_013850.1,1696-1714).
gtggtgcgtgagaaagaga

SEQ ID NO: 491294 - DNA, 19 bp, Mus musculus
  siRNA target sequence for Abca7 (NM_013850.1,1715-1733).
cacggctgcgagaaaccat

SEQ ID NO: 491295 - DNA, 19 bp, Mus musculus
  siRNA target sequence for Abca7 (NM_013850.1,1808-1826).
gcgctgcgttgctggtatt

SEQ ID NO: 491296 - DNA, 19 bp, Mus musculus
  siRNA target sequence for Abca7 (NM_013850.1,1809-1827).
cgctgcgttgctggtatta

SEQ ID NO: 491297 - DNA, 19 bp, Mus musculus
  siRNA target sequence for Abca7 (NM_013850.1,1811-1829).
ctgcgttgctggtattagt

SEQ ID NO: 491298 - DNA, 19 bp, Mus musculus
  siRNA target sequence for Abca7 (NM_013850.1,1859-1877).
gccacccggttgtaatctt

SEQ ID NO: 491299 - DNA, 19 bp, Mus musculus
  siRNA target sequence for Abca7 (NM_013850.1,1905-1923).
caccgtcgctcagagtttt

SEQ ID NO: 491300 - DNA, 19 bp, Mus musculus
  siRNA target sequence for Abca7 (NM_013850.1,1979-1997).
cctattttgcgctctatct

SEQ ID NO: 491301 - DNA, 19 bp, Mus musculus
  siRNA target sequence for Abca7 (NM_013850.1,2034-2052).
gcacctgggcggactctta

SEQ ID NO: 491302 - DNA, 19 bp, Mus musculus
  siRNA target sequence for Abca7 (NM_013850.1,2074-2092).
gtagcctttggctttggat

SEQ ID NO: 491303 - DNA, 19 bp, Mus musculus
  siRNA target sequence for Abca7 (NM_013850.1,2128-2146).
ggggctcagtggcacaatt

SEQ ID NO: 491304 - DNA, 19 bp, Mus musculus
  siRNA target sequence for Abca7 (NM_013850.1,2129-2147).
gggctcagtggcacaattt

SEQ ID NO: 491305 - DNA, 19 bp, Mus musculus
  siRNA target sequence for Abca7 (NM_013850.1,2415-2433).
cattcgaggcctgaagaaa

SEQ ID NO: 491306 - DNA, 19 bp, Mus musculus
  siRNA target sequence for Abca7 (NM_013850.1,2419-2437).
cgaggcctgaagaaacatt

SEQ ID NO: 491307 - DNA, 19 bp, Mus musculus
  siRNA target sequence for Abca7 (NM_013850.1,2424-2442).
cctgaagaaacattttcgt

SEQ ID NO: 491308 - DNA, 19 bp, Mus musculus
  siRNA target sequence for Abca7 (NM_013850.1,2538-2556).
cacactgtccattttgagt

SEQ ID NO: 491309 - DNA, 19 bp, Mus musculus
  siRNA target sequence for Abca7 (NM_013850.1,2643-2661).
catctgcccgcagtacaat

SEQ ID NO: 491310 - DNA, 19 bp, Mus musculus
  siRNA target sequence for Abca7 (NM_013850.1,2676-2694).
gctgacagtggaagaacat

SEQ ID NO: 491311 - DNA, 19 bp, Mus musculus
  siRNA target sequence for Abca7 (NM_013850.1,2699-2717).
ggttctatggccgtttgaa

SEQ ID NO: 491312 - DNA, 19 bp, Mus musculus
  siRNA target sequence for Abca7 (NM_013850.1,2700-2718).
gttctatggccgtttgaaa

SEQ ID NO: 491313 - DNA, 19 bp, Mus musculus
  siRNA target sequence for Abca7 (NM_013850.1,2745-2763).
cgagcgggaacgtctgata

SEQ ID NO: 491314 - DNA, 19 bp, Mus musculus
  siRNA target sequence for Abca7 (NM_013850.1,2953-2971).
ggtcggacactgattctct

SEQ ID NO: 491315 - DNA, 19 bp, Mus musculus
  siRNA target sequence for Abca7 (NM_013850.1,3047-3065).
gtgggtccccgcttttctt

SEQ ID NO: 491316 - DNA, 19 bp, Mus musculus
  siRNA target sequence for Abca7 (NM_013850.1,3154-3172).
gaccccagacgggaaaaga

SEQ ID NO: 491317 - DNA, 19 bp, Mus musculus
  siRNA target sequence for Abca7 (NM_013850.1,3640-3658).
gtgcaaggctggacactta

SEQ ID NO: 491318 - DNA, 19 bp, Mus musculus
  siRNA target sequence for Abca7 (NM_013850.1,3819-3837).
gctcagccctgctatgtat

SEQ ID NO: 491319 - DNA, 19 bp, Mus musculus
  siRNA target sequence for Abca7 (NM_013850.1,3841-3859).
cctcaggtctcgttcttca

SEQ ID NO: 491320 - DNA, 19 bp, Mus musculus
  siRNA target sequence for Abca7 (NM_013850.1,4044-4062).
caactggacgccagaatct

SEQ ID NO: 491321 - DNA, 19 bp, Mus musculus
  siRNA target sequence for Abca7 (NM_013850.1,4246-4264).
ggcctaaagaccaagaagt

SEQ ID NO: 491322 - DNA, 19 bp, Mus musculus
  siRNA target sequence for Abca7 (NM_013850.1,4265-4283).
gggtggatgaggtcagata

SEQ ID NO: 491323 - DNA, 19 bp, Mus musculus
  siRNA target sequence for Abca7 (NM_013850.1,4341-4359).
ccgcacattggcagagatt

SEQ ID NO: 491324 - DNA, 19 bp, Mus musculus
  siRNA target sequence for Abca7 (NM_013850.1,4444-4462).
cggaacagcctcaagatct

SEQ ID NO: 491325 - DNA, 19 bp, Mus musculus
  siRNA target sequence for Abca7 (NM_013850.1,4602-4620).
caaggagcagctatctgaa

SEQ ID NO: 491326 - DNA, 19 bp, Mus musculus
  siRNA target sequence for Abca7 (NM_013850.1,4666-4684).
gtggtcttcgccatgtcat

SEQ ID NO: 491327 - DNA, 19 bp, Mus musculus
  siRNA target sequence for Abca7 (NM_013850.1,5084-5102).
gccggatcctgaaacaagt

SEQ ID NO: 491328 - DNA, 19 bp, Mus musculus
  siRNA target sequence for Abca7 (NM_013850.1,5087-5105).
ggatcctgaaacaagtgtt

SEQ ID NO: 491329 - DNA, 19 bp, Mus musculus
  siRNA target sequence for Abca7 (NM_013850.1,5186-5204).
gcttaggagacaagcaatt

SEQ ID NO: 491330 - DNA, 19 bp, Mus musculus
  siRNA target sequence for Abca7 (NM_013850.1,5429-5447).
gggacttgaccaaggttta

SEQ ID NO: 491331 - DNA, 19 bp, Mus musculus
  siRNA target sequence for Abca7 (NM_013850.1,6321-6339).
ggaggaggtgttcctatat

SEQ ID NO: 491332 - DNA, 19 bp, Mus musculus
  siRNA target sequence for Abca8a (NM_153145.1,37-55).
caaacgtgggccttattgt

SEQ ID NO: 491333 - DNA, 19 bp, Mus musculus
  siRNA target sequence for Abca8a (NM_153145.1,47-65).
ccttattgtgcaagaatct

SEQ ID NO: 491334 - DNA, 19 bp, Mus musculus
  siRNA target sequence for Abca8a (NM_153145.1,78-96).
gagactgaaaagagataca

SEQ ID NO: 491335 - DNA, 19 bp, Mus musculus
  siRNA target sequence for Abca8a (NM_153145.1,160-178).
gaagtttatgatttttcgt

SEQ ID NO: 491336 - DNA, 19 bp, Mus musculus
  siRNA target sequence for Abca8a (NM_153145.1,192-210).
ggacctgggacgcattgat

SEQ ID NO: 491337 - DNA, 19 bp, Mus musculus
  siRNA target sequence for Abca8a (NM_153145.1,193-211).
gacctgggacgcattgatt

SEQ ID NO: 491338 - DNA, 19 bp, Mus musculus
  siRNA target sequence for Abca8a (NM_153145.1,195-213).
cctgggacgcattgattca

SEQ ID NO: 491339 - DNA, 19 bp, Mus musculus
  siRNA target sequence for Abca8a (NM_153145.1,196-214).
ctgggacgcattgattcat

SEQ ID NO: 491340 - DNA, 19 bp, Mus musculus
  siRNA target sequence for Abca8a (NM_153145.1,198-216).
gggacgcattgattcattt

SEQ ID NO: 491341 - DNA, 19 bp, Mus musculus
  siRNA target sequence for Abca8a (NM_153145.1,199-217).
ggacgcattgattcattta

SEQ ID NO: 491342 - DNA, 19 bp, Mus musculus
  siRNA target sequence for Abca8a (NM_153145.1,200-218).
gacgcattgattcatttaa

SEQ ID NO: 491343 - DNA, 19 bp, Mus musculus
  siRNA target sequence for Abca8a (NM_153145.1,257-275).
caacaactcagaggataat

SEQ ID NO: 491344 - DNA, 19 bp, Mus musculus
  siRNA target sequence for Abca8a (NM_153145.1,281-299).
gagtctctttggtctctta

SEQ ID NO: 491345 - DNA, 19 bp, Mus musculus
  siRNA target sequence for Abca8a (NM_153145.1,322-340).
gcttctccgaatgaagaaa

SEQ ID NO: 491346 - DNA, 19 bp, Mus musculus
  siRNA target sequence for Abca8a (NM_153145.1,373-391).
gatgtagtgggggtcatat

SEQ ID NO: 491347 - DNA, 19 bp, Mus musculus
  siRNA target sequence for Abca8a (NM_153145.1,400-418).
gcttactcctacaacttga

SEQ ID NO: 491348 - DNA, 19 bp, Mus musculus
  siRNA target sequence for Abca8a (NM_153145.1,401-419).
cttactcctacaacttgaa

SEQ ID NO: 491349 - DNA, 19 bp, Mus musculus
  siRNA target sequence for Abca8a (NM_153145.1,485-503).
cctatggagagatcattta

SEQ ID NO: 491350 - DNA, 19 bp, Mus musculus
  siRNA target sequence for Abca8a (NM_153145.1,614-632).
cacttaccggaaaatacat

SEQ ID NO: 491351 - DNA, 19 bp, Mus musculus
  siRNA target sequence for Abca8a (NM_153145.1,616-634).
cttaccggaaaatacatca

SEQ ID NO: 491352 - DNA, 19 bp, Mus musculus
  siRNA target sequence for Abca8a (NM_153145.1,707-725).
ccccacttacctattatat

SEQ ID NO: 491353 - DNA, 19 bp, Mus musculus
  siRNA target sequence for Abca8a (NM_153145.1,848-866).
cccttctctcgacaactat

SEQ ID NO: 491354 - DNA, 19 bp, Mus musculus
  siRNA target sequence for Abca8a (NM_153145.1,849-867).
ccttctctcgacaactatt

SEQ ID NO: 491355 - DNA, 19 bp, Mus musculus
  siRNA target sequence for Abca8a (NM_153145.1,853-871).
ctctcgacaactattgtaa

SEQ ID NO: 491356 - DNA, 19 bp, Mus musculus
  siRNA target sequence for Abca8a (NM_153145.1,855-873).
ctcgacaactattgtaaaa

SEQ ID NO: 491357 - DNA, 19 bp, Mus musculus
  siRNA target sequence for Abca8a (NM_153145.1,857-875).
cgacaactattgtaaaact

SEQ ID NO: 491358 - DNA, 19 bp, Mus musculus
  siRNA target sequence for Abca8a (NM_153145.1,1058-1076).
gataccttcctgtatcctt

SEQ ID NO: 491359 - DNA, 19 bp, Mus musculus
  siRNA target sequence for Abca8a (NM_153145.1,1125-1143).
ggtccagctcttacgttta

SEQ ID NO: 491360 - DNA, 19 bp, Mus musculus
  siRNA target sequence for Abca8a (NM_153145.1,1274-1292).
gtaagtcgttccatgataa

SEQ ID NO: 491361 - DNA, 19 bp, Mus musculus
  siRNA target sequence for Abca8a (NM_153145.1,1278-1296).
gtcgttccatgataagact

SEQ ID NO: 491362 - DNA, 19 bp, Mus musculus
  siRNA target sequence for Abca8a (NM_153145.1,1280-1298).
cgttccatgataagactta

SEQ ID NO: 491363 - DNA, 19 bp, Mus musculus
  siRNA target sequence for Abca8a (NM_153145.1,1295-1313).
cttactggcatgcttgtaa

SEQ ID NO: 491364 - DNA, 19 bp, Mus musculus
  siRNA target sequence for Abca8a (NM_153145.1,1299-1317).
ctggcatgcttgtaaatct

SEQ ID NO: 491365 - DNA, 19 bp, Mus musculus
  siRNA target sequence for Abca8a (NM_153145.1,1301-1319).
ggcatgcttgtaaatctca

SEQ ID NO: 491366 - DNA, 19 bp, Mus musculus
  siRNA target sequence for Abca8a (NM_153145.1,1302-1320).
gcatgcttgtaaatctcat

SEQ ID NO: 491367 - DNA, 19 bp, Mus musculus
  siRNA target sequence for Abca8a (NM_153145.1,1306-1324).
gcttgtaaatctcatttct

SEQ ID NO: 491368 - DNA, 19 bp, Mus musculus
  siRNA target sequence for Abca8a (NM_153145.1,1478-1496).
ctaagcgcacagaagcttt

SEQ ID NO: 491369 - DNA, 19 bp, Mus musculus
  siRNA target sequence for Abca8a (NM_153145.1,1504-1522).
ctgacactggatgtatata

SEQ ID NO: 491370 - DNA, 19 bp, Mus musculus
  siRNA target sequence for Abca8a (NM_153145.1,1607-1625).
ccaaaggttgggtcactat

SEQ ID NO: 491371 - DNA, 19 bp, Mus musculus
  siRNA target sequence for Abca8a (NM_153145.1,1716-1734).
cctcactgtaagagaaaat

SEQ ID NO: 491372 - DNA, 19 bp, Mus musculus
  siRNA target sequence for Abca8a (NM_153145.1,1719-1737).
cactgtaagagaaaatctt

SEQ ID NO: 491373 - DNA, 19 bp, Mus musculus
  siRNA target sequence for Abca8a (NM_153145.1,1769-1787).
cccacgaagtggataacga

SEQ ID NO: 491374 - DNA, 19 bp, Mus musculus
  siRNA target sequence for Abca8a (NM_153145.1,1777-1795).
gtggataacgaggtacaaa

SEQ ID NO: 491375 - DNA, 19 bp, Mus musculus
  siRNA target sequence for Abca8a (NM_153145.1,1779-1797).
ggataacgaggtacaaaga

SEQ ID NO: 491376 - DNA, 19 bp, Mus musculus
  siRNA target sequence for Abca8a (NM_153145.1,2117-2135).
gggggattggttatcactt

SEQ ID NO: 491377 - DNA, 19 bp, Mus musculus
  siRNA target sequence for Abca8a (NM_153145.1,2118-2136).
ggggattggttatcactta

SEQ ID NO: 491378 - DNA, 19 bp, Mus musculus
  siRNA target sequence for Abca8a (NM_153145.1,2163-2181).
gcatgaaagaataacatca

SEQ ID NO: 491379 - DNA, 19 bp, Mus musculus
  siRNA target sequence for Abca8a (NM_153145.1,2230-2248).
gggaaactgagctacatat

SEQ ID NO: 491380 - DNA, 19 bp, Mus musculus
  siRNA target sequence for Abca8a (NM_153145.1,2232-2250).
gaaactgagctacatatta

SEQ ID NO: 491381 - DNA, 19 bp, Mus musculus
  siRNA target sequence for Abca8a (NM_153145.1,2303-2321).
gtccagacctgggaattga

SEQ ID NO: 491382 - DNA, 19 bp, Mus musculus
  siRNA target sequence for Abca8a (NM_153145.1,2325-2343).
ctatggcgtttctataaca

SEQ ID NO: 491383 - DNA, 19 bp, Mus musculus
  siRNA target sequence for Abca8a (NM_153145.1,2368-2386).
ctggaaggaaaatcatcta

SEQ ID NO: 491384 - DNA, 19 bp, Mus musculus
  siRNA target sequence for Abca8a (NM_153145.1,2389-2407).
gaccaatcagatattggta

SEQ ID NO: 491385 - DNA, 19 bp, Mus musculus
  siRNA target sequence for Abca8a (NM_153145.1,2405-2423).
gtatgacagaagatgtaca

SEQ ID NO: 491386 - DNA, 19 bp, Mus musculus
  siRNA target sequence for Abca8a (NM_153145.1,2482-2500).
cttaatgggaggtgtaaga

SEQ ID NO: 491387 - DNA, 19 bp, Mus musculus
  siRNA target sequence for Abca8a (NM_153145.1,2546-2564).
ccaggcttcgcttcttgaa

SEQ ID NO: 491388 - DNA, 19 bp, Mus musculus
  siRNA target sequence for Abca8a (NM_153145.1,2549-2567).
ggcttcgcttcttgaagtt

SEQ ID NO: 491389 - DNA, 19 bp, Mus musculus
  siRNA target sequence for Abca8a (NM_153145.1,2556-2574).
cttcttgaagttaaagcat

SEQ ID NO: 491390 - DNA, 19 bp, Mus musculus
  siRNA target sequence for Abca8a (NM_153145.1,2575-2593).
gaaaggaaatccatcgtta

SEQ ID NO: 491391 - DNA, 19 bp, Mus musculus
  siRNA target sequence for Abca8a (NM_153145.1,2579-2597).
ggaaatccatcgttattct

SEQ ID NO: 491392 - DNA, 19 bp, Mus musculus
  siRNA target sequence for Abca8a (NM_153145.1,2613-2631).
gattggacttctgcatatt

SEQ ID NO: 491393 - DNA, 19 bp, Mus musculus
  siRNA target sequence for Abca8a (NM_153145.1,2649-2667).
caggatggtccgtcaaagt

SEQ ID NO: 491394 - DNA, 19 bp, Mus musculus
  siRNA target sequence for Abca8a (NM_153145.1,2651-2669).
ggatggtccgtcaaagtga

SEQ ID NO: 491395 - DNA, 19 bp, Mus musculus
  siRNA target sequence for Abca8a (NM_153145.1,2659-2677).
cgtcaaagtgactactgtt

SEQ ID NO: 491396 - DNA, 19 bp, Mus musculus
  siRNA target sequence for Abca8a (NM_153145.1,2678-2696).
gggagcttgcccctcatat

SEQ ID NO: 491397 - DNA, 19 bp, Mus musculus
  siRNA target sequence for Abca8a (NM_153145.1,2683-2701).
cttgcccctcatatgtact

SEQ ID NO: 491398 - DNA, 19 bp, Mus musculus
  siRNA target sequence for Abca8a (NM_153145.1,2742-2760).
cttactgatcgtcaacaaa

SEQ ID NO: 491399 - DNA, 19 bp, Mus musculus
  siRNA target sequence for Abca8a (NM_153145.1,2765-2783).
gagcaaaaatcgatgactt

SEQ ID NO: 491400 - DNA, 19 bp, Mus musculus
  siRNA target sequence for Abca8a (NM_153145.1,2767-2785).
gcaaaaatcgatgacttta

SEQ ID NO: 491401 - DNA, 19 bp, Mus musculus
  siRNA target sequence for Abca8a (NM_153145.1,2768-2786).
caaaaatcgatgactttat

SEQ ID NO: 491402 - DNA, 19 bp, Mus musculus
  siRNA target sequence for Abca8a (NM_153145.1,2792-2810).
cactggaacaacagaacat

SEQ ID NO: 491403 - DNA, 19 bp, Mus musculus
  siRNA target sequence for Abca8a (NM_153145.1,2847-2865).
caccgaggacagtcagtat

SEQ ID NO: 491404 - DNA, 19 bp, Mus musculus
  siRNA target sequence for Abca8a (NM_153145.1,2850-2868).
cgaggacagtcagtataat

SEQ ID NO: 491405 - DNA, 19 bp, Mus musculus
  siRNA target sequence for Abca8a (NM_153145.1,2885-2903).
caggtgacgagaagaatta

SEQ ID NO: 491406 - DNA, 19 bp, Mus musculus
  siRNA target sequence for Abca8a (NM_153145.1,2888-2906).
gtgacgagaagaattacaa

SEQ ID NO: 491407 - DNA, 19 bp, Mus musculus
  siRNA target sequence for Abca8a (NM_153145.1,2925-2943).
caccaagaggctgaattgt

SEQ ID NO: 491408 - DNA, 19 bp, Mus musculus
  siRNA target sequence for Abca8a (NM_153145.1,2948-2966).
cggttctggtggatattgt

SEQ ID NO: 491409 - DNA, 19 bp, Mus musculus
  siRNA target sequence for Abca8a (NM_153145.1,2950-2968).
gttctggtggatattgtga

SEQ ID NO: 491410 - DNA, 19 bp, Mus musculus
  siRNA target sequence for Abca8a (NM_153145.1,2955-2973).
ggtggatattgtgagtaat

SEQ ID NO: 491411 - DNA, 19 bp, Mus musculus
  siRNA target sequence for Abca8a (NM_153145.1,2991-3009).
cgcaccatcagcacacatt

SEQ ID NO: 491412 - DNA, 19 bp, Mus musculus
  siRNA target sequence for Abca8a (NM_153145.1,3119-3137).
ccatgaccagcattgatga

SEQ ID NO: 491413 - DNA, 19 bp, Mus musculus
  siRNA target sequence for Abca8a (NM_153145.1,3123-3141).
gaccagcattgatgactat

SEQ ID NO: 491414 - DNA, 19 bp, Mus musculus
  siRNA target sequence for Abca8a (NM_153145.1,3231-3249).
ctgtgcactcattttgtct

SEQ ID NO: 491415 - DNA, 19 bp, Mus musculus
  siRNA target sequence for Abca8a (NM_153145.1,3233-3251).
gtgcactcattttgtctat

SEQ ID NO: 491416 - DNA, 19 bp, Mus musculus
  siRNA target sequence for Abca8a (NM_153145.1,3277-3295).
cctccagagagtaagttca

SEQ ID NO: 491417 - DNA, 19 bp, Mus musculus
  siRNA target sequence for Abca8a (NM_153145.1,3334-3352).
ggctatgccatgtcagtta

SEQ ID NO: 491418 - DNA, 19 bp, Mus musculus
  siRNA target sequence for Abca8a (NM_153145.1,3335-3353).
gctatgccatgtcagttat

SEQ ID NO: 491419 - DNA, 19 bp, Mus musculus
  siRNA target sequence for Abca8a (NM_153145.1,3336-3354).
ctatgccatgtcagttatt

SEQ ID NO: 491420 - DNA, 19 bp, Mus musculus
  siRNA target sequence for Abca8a (NM_153145.1,3433-3451).
gtctctttcttctctatgt

SEQ ID NO: 491421 - DNA, 19 bp, Mus musculus
  siRNA target sequence for Abca8a (NM_153145.1,3446-3464).
ctatgtgttttatgcttat

SEQ ID NO: 491422 - DNA, 19 bp, Mus musculus
  siRNA target sequence for Abca8a (NM_153145.1,3459-3477).
gcttattgattactttaga

SEQ ID NO: 491423 - DNA, 19 bp, Mus musculus
  siRNA target sequence for Abca8a (NM_153145.1,3466-3484).
gattactttagagatatct

SEQ ID NO: 491424 - DNA, 19 bp, Mus musculus
  siRNA target sequence for Abca8a (NM_153145.1,3527-3545).
gaggctgcacattattaca

SEQ ID NO: 491425 - DNA, 19 bp, Mus musculus
  siRNA target sequence for Abca8a (NM_153145.1,3529-3547).
ggctgcacattattacatt

SEQ ID NO: 491426 - DNA, 19 bp, Mus musculus
  siRNA target sequence for Abca8a (NM_153145.1,3591-3609).
ggagtattcctatctgttt

SEQ ID NO: 491427 - DNA, 19 bp, Mus musculus
  siRNA target sequence for Abca8a (NM_153145.1,3592-3610).
gagtattcctatctgtttt

SEQ ID NO: 491428 - DNA, 19 bp, Mus musculus
  siRNA target sequence for Abca8a (NM_153145.1,3690-3708).
gagaacggatcctgtcttt

SEQ ID NO: 491429 - DNA, 19 bp, Mus musculus
  siRNA target sequence for Abca8a (NM_153145.1,3695-3713).
cggatcctgtctttagaat

SEQ ID NO: 491430 - DNA, 19 bp, Mus musculus
  siRNA target sequence for Abca8a (NM_153145.1,3696-3714).
ggatcctgtctttagaatt

SEQ ID NO: 491431 - DNA, 19 bp, Mus musculus
  siRNA target sequence for Abca8a (NM_153145.1,3719-3737).
caagaagcgatcgtgtatt

SEQ ID NO: 491432 - DNA, 19 bp, Mus musculus
  siRNA target sequence for Abca8a (NM_153145.1,3722-3740).
gaagcgatcgtgtatttaa

SEQ ID NO: 491433 - DNA, 19 bp, Mus musculus
  siRNA target sequence for Abca8a (NM_153145.1,3725-3743).
gcgatcgtgtatttaacaa

SEQ ID NO: 491434 - DNA, 19 bp, Mus musculus
  siRNA target sequence for Abca8a (NM_153145.1,3726-3744).
cgatcgtgtatttaacaat

SEQ ID NO: 491435 - DNA, 19 bp, Mus musculus
  siRNA target sequence for Abca8a (NM_153145.1,3930-3948).
ctctttttgcgttcgaaaa

SEQ ID NO: 491436 - DNA, 19 bp, Mus musculus
  siRNA target sequence for Abca8a (NM_153145.1,3985-4003).
ggtaaaagtacatccatta

SEQ ID NO: 491437 - DNA, 19 bp, Mus musculus
  siRNA target sequence for Abca8a (NM_153145.1,3986-4004).
gtaaaagtacatccattaa

SEQ ID NO: 491438 - DNA, 19 bp, Mus musculus
  siRNA target sequence for Abca8a (NM_153145.1,3992-4010).
gtacatccattaagatgat

SEQ ID NO: 491439 - DNA, 19 bp, Mus musculus
  siRNA target sequence for Abca8a (NM_153145.1,4384-4402).
caggccaccttttcaaaca

SEQ ID NO: 491440 - DNA, 19 bp, Mus musculus
  siRNA target sequence for Abca8a (NM_153145.1,4668-4686).
ggaagatgtgcaaccttta

SEQ ID NO: 491441 - DNA, 19 bp, Mus musculus
  siRNA target sequence for Abca8a (NM_153145.1,4689-4707).
ccaggccttcttcaaatta

SEQ ID NO: 491442 - DNA, 19 bp, Mus musculus
  siRNA target sequence for Abca8b (NM_013851.1,239-257).
caacaaacttgtgctttat

SEQ ID NO: 491443 - DNA, 19 bp, Mus musculus
  siRNA target sequence for Abca8b (NM_013851.1,334-352).
gcttttcttgtattggtat

SEQ ID NO: 491444 - DNA, 19 bp, Mus musculus
  siRNA target sequence for Abca8b (NM_013851.1,404-422).
ggacgagtcgattctttca

SEQ ID NO: 491445 - DNA, 19 bp, Mus musculus
  siRNA target sequence for Abca8b (NM_013851.1,423-441).
gacaatctgggttcatgat

SEQ ID NO: 491446 - DNA, 19 bp, Mus musculus
  siRNA target sequence for Abca8b (NM_013851.1,459-477).
ccagcatgacacaacagat

SEQ ID NO: 491447 - DNA, 19 bp, Mus musculus
  siRNA target sequence for Abca8b (NM_013851.1,460-478).
cagcatgacacaacagata

SEQ ID NO: 491448 - DNA, 19 bp, Mus musculus
  siRNA target sequence for Abca8b (NM_013851.1,499-517).
ccctttcatggcagataaa

SEQ ID NO: 491449 - DNA, 19 bp, Mus musculus
  siRNA target sequence for Abca8b (NM_013851.1,667-685).
ccataatgctcattgtgat

SEQ ID NO: 491450 - DNA, 19 bp, Mus musculus
  siRNA target sequence for Abca8b (NM_013851.1,816-834).
cagtgtcagggaaattcat

SEQ ID NO: 491451 - DNA, 19 bp, Mus musculus
  siRNA target sequence for Abca8b (NM_013851.1,818-836).
gtgtcagggaaattcatga

SEQ ID NO: 491452 - DNA, 19 bp, Mus musculus
  siRNA target sequence for Abca8b (NM_013851.1,909-927).
ccccaatcacctattatgt

SEQ ID NO: 491453 - DNA, 19 bp, Mus musculus
  siRNA target sequence for Abca8b (NM_013851.1,995-1013).
ccagcattctggctatctt

SEQ ID NO: 491454 - DNA, 19 bp, Mus musculus
  siRNA target sequence for Abca8b (NM_013851.1,1028-1046).
gctggctttgtcttcatta

SEQ ID NO: 491455 - DNA, 19 bp, Mus musculus
  siRNA target sequence for Abca8b (NM_013851.1,1052-1070).
ctatccctggcacttgtta

SEQ ID NO: 491456 - DNA, 19 bp, Mus musculus
  siRNA target sequence for Abca8b (NM_013851.1,1056-1074).
ccctggcacttgttatcaa

SEQ ID NO: 491457 - DNA, 19 bp, Mus musculus
  siRNA target sequence for Abca8b (NM_013851.1,1147-1165).
gatcactttggctttccta

SEQ ID NO: 491458 - DNA, 19 bp, Mus musculus
  siRNA target sequence for Abca8b (NM_013851.1,1232-1250).
ggaagtctaggcttcacat

SEQ ID NO: 491459 - DNA, 19 bp, Mus musculus
  siRNA target sequence for Abca8b (NM_013851.1,1343-1361).
gtggattatgatttaaatt

SEQ ID NO: 491460 - DNA, 19 bp, Mus musculus
  siRNA target sequence for Abca8b (NM_013851.1,1384-1402).
cagtggctcaaatctgatt

SEQ ID NO: 491461 - DNA, 19 bp, Mus musculus
  siRNA target sequence for Abca8b (NM_013851.1,1386-1404).
gtggctcaaatctgattat

SEQ ID NO: 491462 - DNA, 19 bp, Mus musculus
  siRNA target sequence for Abca8b (NM_013851.1,1390-1408).
ctcaaatctgattatagca

SEQ ID NO: 491463 - DNA, 19 bp, Mus musculus
  siRNA target sequence for Abca8b (NM_013851.1,1451-1469).
ctgatgatgtacttcgaaa

SEQ ID NO: 491464 - DNA, 19 bp, Mus musculus
  siRNA target sequence for Abca8b (NM_013851.1,1554-1572).
ctcatgtgattcttgaaga

SEQ ID NO: 491465 - DNA, 19 bp, Mus musculus
  siRNA target sequence for Abca8b (NM_013851.1,1709-1727).
gacctgacgttggacatat

SEQ ID NO: 491466 - DNA, 19 bp, Mus musculus
  siRNA target sequence for Abca8b (NM_013851.1,1711-1729).
cctgacgttggacatatat

SEQ ID NO: 491467 - DNA, 19 bp, Mus musculus
  siRNA target sequence for Abca8b (NM_013851.1,1714-1732).
gacgttggacatatatgaa

SEQ ID NO: 491468 - DNA, 19 bp, Mus musculus
  siRNA target sequence for Abca8b (NM_013851.1,1824-1842).
ctgtcaccatctataataa

SEQ ID NO: 491469 - DNA, 19 bp, Mus musculus
  siRNA target sequence for Abca8b (NM_013851.1,1896-1914).
gtccacaagccaatgttca

SEQ ID NO: 491470 - DNA, 19 bp, Mus musculus
  siRNA target sequence for Abca8b (NM_013851.1,1898-1916).
ccacaagccaatgttcaat

SEQ ID NO: 491471 - DNA, 19 bp, Mus musculus
  siRNA target sequence for Abca8b (NM_013851.1,1904-1922).
gccaatgttcaatttgact

SEQ ID NO: 491472 - DNA, 19 bp, Mus musculus
  siRNA target sequence for Abca8b (NM_013851.1,1968-1986).
gaattccaccccaagatgt

SEQ ID NO: 491473 - DNA, 19 bp, Mus musculus
  siRNA target sequence for Abca8b (NM_013851.1,2297-2315).
ggatcatcgctctttctga

SEQ ID NO: 491474 - DNA, 19 bp, Mus musculus
  siRNA target sequence for Abca8b (NM_013851.1,2298-2316).
gatcatcgctctttctgaa

SEQ ID NO: 491475 - DNA, 19 bp, Mus musculus
  siRNA target sequence for Abca8b (NM_013851.1,2435-2453).
gaaggaaagcttctctata

SEQ ID NO: 491476 - DNA, 19 bp, Mus musculus
  siRNA target sequence for Abca8b (NM_013851.1,2461-2479).
cttagaaacaacttataga

SEQ ID NO: 491477 - DNA, 19 bp, Mus musculus
  siRNA target sequence for Abca8b (NM_013851.1,2516-2534).
ggactgggaattgaaaact

SEQ ID NO: 491478 - DNA, 19 bp, Mus musculus
  siRNA target sequence for Abca8b (NM_013851.1,2583-2601).
gaaaagcatcaattgatga

SEQ ID NO: 491479 - DNA, 19 bp, Mus musculus
  siRNA target sequence for Abca8b (NM_013851.1,2674-2692).
gcaaactctctcttcactt

SEQ ID NO: 491480 - DNA, 19 bp, Mus musculus
  siRNA target sequence for Abca8b (NM_013851.1,2675-2693).
caaactctctcttcactta

SEQ ID NO: 491481 - DNA, 19 bp, Mus musculus
  siRNA target sequence for Abca8b (NM_013851.1,2740-2758).
ctgtgcgatcgcaaaggtt

SEQ ID NO: 491482 - DNA, 19 bp, Mus musculus
  siRNA target sequence for Abca8b (NM_013851.1,2756-2774).
gttcgcctgttgaagttaa

SEQ ID NO: 491483 - DNA, 19 bp, Mus musculus
  siRNA target sequence for Abca8b (NM_013851.1,2864-2882).
cgtcaaagctcttacactt

SEQ ID NO: 491484 - DNA, 19 bp, Mus musculus
  siRNA target sequence for Abca8b (NM_013851.1,2934-2952).
gcatgctcactcagttatt

SEQ ID NO: 491485 - DNA, 19 bp, Mus musculus
  siRNA target sequence for Abca8b (NM_013851.1,2943-2961).
ctcagttattgatcattaa

SEQ ID NO: 491486 - DNA, 19 bp, Mus musculus
  siRNA target sequence for Abca8b (NM_013851.1,2972-2990).
gcaagcattgacgacttta

SEQ ID NO: 491487 - DNA, 19 bp, Mus musculus
  siRNA target sequence for Abca8b (NM_013851.1,2976-2994).
gcattgacgactttatcca

SEQ ID NO: 491488 - DNA, 19 bp, Mus musculus
  siRNA target sequence for Abca8b (NM_013851.1,2977-2995).
cattgacgactttatccat

SEQ ID NO: 491489 - DNA, 19 bp, Mus musculus
  siRNA target sequence for Abca8b (NM_013851.1,3067-3085).
ctacaatggagcccttata

SEQ ID NO: 491490 - DNA, 19 bp, Mus musculus
  siRNA target sequence for Abca8b (NM_013851.1,3103-3121).
gaaccacagcttttcgttt

SEQ ID NO: 491491 - DNA, 19 bp, Mus musculus
  siRNA target sequence for Abca8b (NM_013851.1,3178-3196).
cgggctacttggaatggtt

SEQ ID NO: 491492 - DNA, 19 bp, Mus musculus
  siRNA target sequence for Abca8b (NM_013851.1,3179-3197).
gggctacttggaatggtta

SEQ ID NO: 491493 - DNA, 19 bp, Mus musculus
  siRNA target sequence for Abca8b (NM_013851.1,3180-3198).
ggctacttggaatggttaa

SEQ ID NO: 491494 - DNA, 19 bp, Mus musculus
  siRNA target sequence for Abca8b (NM_013851.1,3181-3199).
gctacttggaatggttaaa

SEQ ID NO: 491495 - DNA, 19 bp, Mus musculus
  siRNA target sequence for Abca8b (NM_013851.1,3200-3218).
ccgtcagcccgcatccaaa

SEQ ID NO: 491496 - DNA, 19 bp, Mus musculus
  siRNA target sequence for Abca8b (NM_013851.1,3221-3239).
gacagaagcacatatctca

SEQ ID NO: 491497 - DNA, 19 bp, Mus musculus
  siRNA target sequence for Abca8b (NM_013851.1,3303-3321).
ccgcttgccctccttatat

SEQ ID NO: 491498 - DNA, 19 bp, Mus musculus
  siRNA target sequence for Abca8b (NM_013851.1,3330-3348).
gcagtgtcacagattataa

SEQ ID NO: 491499 - DNA, 19 bp, Mus musculus
  siRNA target sequence for Abca8b (NM_013851.1,3459-3477).
cgttaatggactacctttt

SEQ ID NO: 491500 - DNA, 19 bp, Mus musculus
  siRNA target sequence for Abca8b (NM_013851.1,3485-3503).
ccagataccatgttttcta

SEQ ID NO: 491501 - DNA, 19 bp, Mus musculus
  siRNA target sequence for Abca8b (NM_013851.1,3486-3504).
cagataccatgttttctat

SEQ ID NO: 491502 - DNA, 19 bp, Mus musculus
  siRNA target sequence for Abca8b (NM_013851.1,3546-3564).
ccatatccctgatcttctt

SEQ ID NO: 491503 - DNA, 19 bp, Mus musculus
  siRNA target sequence for Abca8b (NM_013851.1,3646-3664).
gttctcagtggctgtaata

SEQ ID NO: 491504 - DNA, 19 bp, Mus musculus
  siRNA target sequence for Abca8b (NM_013851.1,3683-3701).
gatggtacacagtactaca

SEQ ID NO: 491505 - DNA, 19 bp, Mus musculus
  siRNA target sequence for Abca8b (NM_013851.1,3739-3757).
cttgatcttgtctttgcat

SEQ ID NO: 491506 - DNA, 19 bp, Mus musculus
  siRNA target sequence for Abca8b (NM_013851.1,3758-3776).
cttttcataggtcaaatct

SEQ ID NO: 491507 - DNA, 19 bp, Mus musculus
  siRNA target sequence for Abca8b (NM_013851.1,3763-3781).
cataggtcaaatctttgaa

SEQ ID NO: 491508 - DNA, 19 bp, Mus musculus
  siRNA target sequence for Abca8b (NM_013851.1,3806-3824).
ctggtattcctcattcctt

SEQ ID NO: 491509 - DNA, 19 bp, Mus musculus
  siRNA target sequence for Abca8b (NM_013851.1,3924-3942).
gaaacaatgatgtgtatca

SEQ ID NO: 491510 - DNA, 19 bp, Mus musculus
  siRNA target sequence for Abca8b (NM_013851.1,4017-4035).
ccaccagttttgatgagaa

SEQ ID NO: 491511 - DNA, 19 bp, Mus musculus
  siRNA target sequence for Abca8b (NM_013851.1,4053-4071).
gctgcctacgcaaagaata

SEQ ID NO: 491512 - DNA, 19 bp, Mus musculus
  siRNA target sequence for Abca8b (NM_013851.1,4111-4129).
caagatagccactaggaat

SEQ ID NO: 491513 - DNA, 19 bp, Mus musculus
  siRNA target sequence for Abca8b (NM_013851.1,4363-4381).
gaggggcttgcgcaaaagt

SEQ ID NO: 491514 - DNA, 19 bp, Mus musculus
  siRNA target sequence for Abca8b (NM_013851.1,4365-4383).
ggggcttgcgcaaaagtca

SEQ ID NO: 491515 - DNA, 19 bp, Mus musculus
  siRNA target sequence for Abca8b (NM_013851.1,4385-4403).
gctgcagtcgccatcacaa

SEQ ID NO: 491516 - DNA, 19 bp, Mus musculus
  siRNA target sequence for Abca8b (NM_013851.1,4506-4524).
ggaacccatctatattgct

SEQ ID NO: 491517 - DNA, 19 bp, Mus musculus
  siRNA target sequence for Abca8b (NM_013851.1,4507-4525).
gaacccatctatattgctt

SEQ ID NO: 491518 - DNA, 19 bp, Mus musculus
  siRNA target sequence for Abca8b (NM_013851.1,4512-4530).
catctatattgcttctaga

SEQ ID NO: 491519 - DNA, 19 bp, Mus musculus
  siRNA target sequence for Abca8b (NM_013851.1,4580-4598).
gcaatcagggccatcataa

SEQ ID NO: 491520 - DNA, 19 bp, Mus musculus
  siRNA target sequence for Abca8b (NM_013851.1,4581-4599).
caatcagggccatcataaa

SEQ ID NO: 491521 - DNA, 19 bp, Mus musculus
  siRNA target sequence for Abca8b (NM_013851.1,4585-4603).
cagggccatcataaaaaat

SEQ ID NO: 491522 - DNA, 19 bp, Mus musculus
  siRNA target sequence for Abca8b (NM_013851.1,4590-4608).
ccatcataaaaaatacaga

SEQ ID NO: 491523 - DNA, 19 bp, Mus musculus
  siRNA target sequence for Abca8b (NM_013851.1,4795-4813).
ggagatcctcaggcttttt

SEQ ID NO: 491524 - DNA, 19 bp, Mus musculus
  siRNA target sequence for Abca8b (NM_013851.1,4891-4909).
ccaagctttcttcaagtta

SEQ ID NO: 491525 - DNA, 19 bp, Mus musculus
  siRNA target sequence for Abca8b (NM_013851.1,5002-5020).
gctggatggccttgaatta

SEQ ID NO: 491526 - DNA, 19 bp, Mus musculus
  siRNA target sequence for Abca8b (NM_013851.1,5024-5042).
gaattagactcctccataa

SEQ ID NO: 491527 - DNA, 19 bp, Mus musculus
  siRNA target sequence for Abca9 (NM_147220.1,368-386).
cttctaatattgtttgtat

SEQ ID NO: 491528 - DNA, 19 bp, Mus musculus
  siRNA target sequence for Abca9 (NM_147220.1,443-461).
gatctgggacgtgttgata

SEQ ID NO: 491529 - DNA, 19 bp, Mus musculus
  siRNA target sequence for Abca9 (NM_147220.1,448-466).
gggacgtgttgataacttt

SEQ ID NO: 491530 - DNA, 19 bp, Mus musculus
  siRNA target sequence for Abca9 (NM_147220.1,449-467).
ggacgtgttgataacttta

SEQ ID NO: 491531 - DNA, 19 bp, Mus musculus
  siRNA target sequence for Abca9 (NM_147220.1,453-471).
gtgttgataactttaacga

SEQ ID NO: 491532 - DNA, 19 bp, Mus musculus
  siRNA target sequence for Abca9 (NM_147220.1,455-473).
gttgataactttaacgatt

SEQ ID NO: 491533 - DNA, 19 bp, Mus musculus
  siRNA target sequence for Abca9 (NM_147220.1,458-476).
gataactttaacgattcta

SEQ ID NO: 491534 - DNA, 19 bp, Mus musculus
  siRNA target sequence for Abca9 (NM_147220.1,463-481).
ctttaacgattctaattat

SEQ ID NO: 491535 - DNA, 19 bp, Mus musculus
  siRNA target sequence for Abca9 (NM_147220.1,504-522).
ccgaagccacccatgagat

SEQ ID NO: 491536 - DNA, 19 bp, Mus musculus
  siRNA target sequence for Abca9 (NM_147220.1,542-560).
gctccattcatgaaaggaa

SEQ ID NO: 491537 - DNA, 19 bp, Mus musculus
  siRNA target sequence for Abca9 (NM_147220.1,571-589).
ggcatgtcctgatgaaaaa

SEQ ID NO: 491538 - DNA, 19 bp, Mus musculus
  siRNA target sequence for Abca9 (NM_147220.1,607-625).
cttaaattactcgatagat

SEQ ID NO: 491539 - DNA, 19 bp, Mus musculus
  siRNA target sequence for Abca9 (NM_147220.1,646-664).
ggacactttctcatatcat

SEQ ID NO: 491540 - DNA, 19 bp, Mus musculus
  siRNA target sequence for Abca9 (NM_147220.1,647-665).
gacactttctcatatcatt

SEQ ID NO: 491541 - DNA, 19 bp, Mus musculus
  siRNA target sequence for Abca9 (NM_147220.1,683-701).
cagaggatccctaaaacaa

SEQ ID NO: 491542 - DNA, 19 bp, Mus musculus
  siRNA target sequence for Abca9 (NM_147220.1,685-703).
gaggatccctaaaacaaaa

SEQ ID NO: 491543 - DNA, 19 bp, Mus musculus
  siRNA target sequence for Abca9 (NM_147220.1,726-744).
cttgtgaaccactgaacaa

SEQ ID NO: 491544 - DNA, 19 bp, Mus musculus
  siRNA target sequence for Abca9 (NM_147220.1,793-811).
ctttcaagctgccattaat

SEQ ID NO: 491545 - DNA, 19 bp, Mus musculus
  siRNA target sequence for Abca9 (NM_147220.1,815-833).
ggtatcattgagatgatca

SEQ ID NO: 491546 - DNA, 19 bp, Mus musculus
  siRNA target sequence for Abca9 (NM_147220.1,866-884).
gtcattggttccaatatga

SEQ ID NO: 491547 - DNA, 19 bp, Mus musculus
  siRNA target sequence for Abca9 (NM_147220.1,908-926).
ggaggagttgcaactgatt

SEQ ID NO: 491548 - DNA, 19 bp, Mus musculus
  siRNA target sequence for Abca9 (NM_147220.1,914-932).
gttgcaactgattttttta

SEQ ID NO: 491549 - DNA, 19 bp, Mus musculus
  siRNA target sequence for Abca9 (NM_147220.1,999-1017).
gacagtacatgacaacatt

SEQ ID NO: 491550 - DNA, 19 bp, Mus musculus
  siRNA target sequence for Abca9 (NM_147220.1,1001-1019).
cagtacatgacaacattaa

SEQ ID NO: 491551 - DNA, 19 bp, Mus musculus
  siRNA target sequence for Abca9 (NM_147220.1,1072-1090).
gtatgctggctttatcctt

SEQ ID NO: 491552 - DNA, 19 bp, Mus musculus
  siRNA target sequence for Abca9 (NM_147220.1,1127-1145).
gcccaagttgtcgtcttaa

SEQ ID NO: 491553 - DNA, 19 bp, Mus musculus
  siRNA target sequence for Abca9 (NM_147220.1,1129-1147).
ccaagttgtcgtcttaact

SEQ ID NO: 491554 - DNA, 19 bp, Mus musculus
  siRNA target sequence for Abca9 (NM_147220.1,1185-1203).
gcctgtctttgataacttt

SEQ ID NO: 491555 - DNA, 19 bp, Mus musculus
  siRNA target sequence for Abca9 (NM_147220.1,1186-1204).
cctgtctttgataacttta

SEQ ID NO: 491556 - DNA, 19 bp, Mus musculus
  siRNA target sequence for Abca9 (NM_147220.1,1290-1308).
gattcacagcgttatacaa

SEQ ID NO: 491557 - DNA, 19 bp, Mus musculus
  siRNA target sequence for Abca9 (NM_147220.1,1294-1312).
cacagcgttatacaaacat

SEQ ID NO: 491558 - DNA, 19 bp, Mus musculus
  siRNA target sequence for Abca9 (NM_147220.1,1296-1314).
cagcgttatacaaacatct

SEQ ID NO: 491559 - DNA, 19 bp, Mus musculus
  siRNA target sequence for Abca9 (NM_147220.1,1325-1343).
gtggaatggaccttgtgtt

SEQ ID NO: 491560 - DNA, 19 bp, Mus musculus
  siRNA target sequence for Abca9 (NM_147220.1,1327-1345).
ggaatggaccttgtgtttt

SEQ ID NO: 491561 - DNA, 19 bp, Mus musculus
  siRNA target sequence for Abca9 (NM_147220.1,1430-1448).
ccaaacaactcgtacctaa

SEQ ID NO: 491562 - DNA, 19 bp, Mus musculus
  siRNA target sequence for Abca9 (NM_147220.1,1431-1449).
caaacaactcgtacctaat

SEQ ID NO: 491563 - DNA, 19 bp, Mus musculus
  siRNA target sequence for Abca9 (NM_147220.1,1495-1513).
ggtactggcgttatatttt

SEQ ID NO: 491564 - DNA, 19 bp, Mus musculus
  siRNA target sequence for Abca9 (NM_147220.1,1528-1546).
cagtaagtacggacatcaa

SEQ ID NO: 491565 - DNA, 19 bp, Mus musculus
  siRNA target sequence for Abca9 (NM_147220.1,1570-1588).
gtcgtcttactggtttaaa

SEQ ID NO: 491566 - DNA, 19 bp, Mus musculus
  siRNA target sequence for Abca9 (NM_147220.1,1602-1620).
gtcacgtggtccttgagaa

SEQ ID NO: 491567 - DNA, 19 bp, Mus musculus
  siRNA target sequence for Abca9 (NM_147220.1,1632-1650).
cggatccctcgctgaatga

SEQ ID NO: 491568 - DNA, 19 bp, Mus musculus
  siRNA target sequence for Abca9 (NM_147220.1,1634-1652).
gatccctcgctgaatgact

SEQ ID NO: 491569 - DNA, 19 bp, Mus musculus
  siRNA target sequence for Abca9 (NM_147220.1,1728-1746).
gaaagcatgggaaagtaga

SEQ ID NO: 491570 - DNA, 19 bp, Mus musculus
  siRNA target sequence for Abca9 (NM_147220.1,1757-1775).
ggtctggggtttgacatat

SEQ ID NO: 491571 - DNA, 19 bp, Mus musculus
  siRNA target sequence for Abca9 (NM_147220.1,1762-1780).
ggggtttgacatatatgaa

SEQ ID NO: 491572 - DNA, 19 bp, Mus musculus
  siRNA target sequence for Abca9 (NM_147220.1,1872-1890).
ccgtcaccatttataacca

SEQ ID NO: 491573 - DNA, 19 bp, Mus musculus
  siRNA target sequence for Abca9 (NM_147220.1,1947-1965).
cacagtccaacgtacagtt

SEQ ID NO: 491574 - DNA, 19 bp, Mus musculus
  siRNA target sequence for Abca9 (NM_147220.1,2003-2021).
gccaagataaagggaattt

SEQ ID NO: 491575 - DNA, 19 bp, Mus musculus
  siRNA target sequence for Abca9 (NM_147220.1,2014-2032).
gggaattttgccacatgaa

SEQ ID NO: 491576 - DNA, 19 bp, Mus musculus
  siRNA target sequence for Abca9 (NM_147220.1,2016-2034).
gaattttgccacatgaagt

SEQ ID NO: 491577 - DNA, 19 bp, Mus musculus
  siRNA target sequence for Abca9 (NM_147220.1,2025-2043).
cacatgaagtggaacaaga

SEQ ID NO: 491578 - DNA, 19 bp, Mus musculus
  siRNA target sequence for Abca9 (NM_147220.1,2054-2072).
gttctacaggacttagaaa

SEQ ID NO: 491579 - DNA, 19 bp, Mus musculus
  siRNA target sequence for Abca9 (NM_147220.1,2087-2105).
gacattcttgctcagaatt

SEQ ID NO: 491580 - DNA, 19 bp, Mus musculus
  siRNA target sequence for Abca9 (NM_147220.1,2208-2226).
cgaggcatcgcatatggaa

SEQ ID NO: 491581 - DNA, 19 bp, Mus musculus
  siRNA target sequence for Abca9 (NM_147220.1,2218-2236).
catatggaacctactgaaa

SEQ ID NO: 491582 - DNA, 19 bp, Mus musculus
  siRNA target sequence for Abca9 (NM_147220.1,2244-2262).
gagcaggcagagtaattgt

SEQ ID NO: 491583 - DNA, 19 bp, Mus musculus
  siRNA target sequence for Abca9 (NM_147220.1,2303-2321).
gacaggaaggtgtttatat

SEQ ID NO: 491584 - DNA, 19 bp, Mus musculus
  siRNA target sequence for Abca9 (NM_147220.1,2308-2326).
gaaggtgtttatatccaat

SEQ ID NO: 491585 - DNA, 19 bp, Mus musculus
  siRNA target sequence for Abca9 (NM_147220.1,2374-2392).
gggcattggctatcatcta

SEQ ID NO: 491586 - DNA, 19 bp, Mus musculus
  siRNA target sequence for Abca9 (NM_147220.1,2433-2451).
cgtcactggtcaaaaagca

SEQ ID NO: 491587 - DNA, 19 bp, Mus musculus
  siRNA target sequence for Abca9 (NM_147220.1,2481-2499).
gcgaagaacggcttgtcta

SEQ ID NO: 491588 - DNA, 19 bp, Mus musculus
  siRNA target sequence for Abca9 (NM_147220.1,2486-2504).
gaacggcttgtctatatct

SEQ ID NO: 491589 - DNA, 19 bp, Mus musculus
  siRNA target sequence for Abca9 (NM_147220.1,2536-2554).
cctttaccgggatcttgat

SEQ ID NO: 491590 - DNA, 19 bp, Mus musculus
  siRNA target sequence for Abca9 (NM_147220.1,2537-2555).
ctttaccgggatcttgata

SEQ ID NO: 491591 - DNA, 19 bp, Mus musculus
  siRNA target sequence for Abca9 (NM_147220.1,2542-2560).
ccgggatcttgatagatgt

SEQ ID NO: 491592 - DNA, 19 bp, Mus musculus
  siRNA target sequence for Abca9 (NM_147220.1,2543-2561).
cgggatcttgatagatgtt

SEQ ID NO: 491593 - DNA, 19 bp, Mus musculus
  siRNA target sequence for Abca9 (NM_147220.1,2545-2563).
ggatcttgatagatgttct

SEQ ID NO: 491594 - DNA, 19 bp, Mus musculus
  siRNA target sequence for Abca9 (NM_147220.1,2546-2564).
gatcttgatagatgttcta

SEQ ID NO: 491595 - DNA, 19 bp, Mus musculus
  siRNA target sequence for Abca9 (NM_147220.1,2635-2653).
gtcgatggctgatgaatca

SEQ ID NO: 491596 - DNA, 19 bp, Mus musculus
  siRNA target sequence for Abca9 (NM_147220.1,2722-2740).
gcaagtgttgtctttagat

SEQ ID NO: 491597 - DNA, 19 bp, Mus musculus
  siRNA target sequence for Abca9 (NM_147220.1,2798-2816).
gcgaaggttcgcttcttca

SEQ ID NO: 491598 - DNA, 19 bp, Mus musculus
  siRNA target sequence for Abca9 (NM_147220.1,2799-2817).
cgaaggttcgcttcttcaa

SEQ ID NO: 491599 - DNA, 19 bp, Mus musculus
  siRNA target sequence for Abca9 (NM_147220.1,2821-2839).
caagaatgaacggaaaagt

SEQ ID NO: 491600 - DNA, 19 bp, Mus musculus
  siRNA target sequence for Abca9 (NM_147220.1,2857-2875).
gctttttggcattagcttt

SEQ ID NO: 491601 - DNA, 19 bp, Mus musculus
  siRNA target sequence for Abca9 (NM_147220.1,2871-2889).
gctttgtcccccaactttt

SEQ ID NO: 491602 - DNA, 19 bp, Mus musculus
  siRNA target sequence for Abca9 (NM_147220.1,2894-2912).
catctcgtctacaaggtat

SEQ ID NO: 491603 - DNA, 19 bp, Mus musculus
  siRNA target sequence for Abca9 (NM_147220.1,2905-2923).
caaggtataccacaaaagt

SEQ ID NO: 491604 - DNA, 19 bp, Mus musculus
  siRNA target sequence for Abca9 (NM_147220.1,2908-2926).
ggtataccacaaaagttat

SEQ ID NO: 491605 - DNA, 19 bp, Mus musculus
  siRNA target sequence for Abca9 (NM_147220.1,2931-2949).
gggggctatctccaagtat

SEQ ID NO: 491606 - DNA, 19 bp, Mus musculus
  siRNA target sequence for Abca9 (NM_147220.1,2933-2951).
gggctatctccaagtatgt

SEQ ID NO: 491607 - DNA, 19 bp, Mus musculus
  siRNA target sequence for Abca9 (NM_147220.1,2934-2952).
ggctatctccaagtatgta

SEQ ID NO: 491608 - DNA, 19 bp, Mus musculus
  siRNA target sequence for Abca9 (NM_147220.1,2935-2953).
gctatctccaagtatgtat

SEQ ID NO: 491609 - DNA, 19 bp, Mus musculus
  siRNA target sequence for Abca9 (NM_147220.1,3015-3033).
caggttcaagcatcgataa

SEQ ID NO: 491610 - DNA, 19 bp, Mus musculus
  siRNA target sequence for Abca9 (NM_147220.1,3017-3035).
ggttcaagcatcgataact

SEQ ID NO: 491611 - DNA, 19 bp, Mus musculus
  siRNA target sequence for Abca9 (NM_147220.1,3018-3036).
gttcaagcatcgataactt

SEQ ID NO: 491612 - DNA, 19 bp, Mus musculus
  siRNA target sequence for Abca9 (NM_147220.1,3021-3039).
caagcatcgataactttgt

SEQ ID NO: 491613 - DNA, 19 bp, Mus musculus
  siRNA target sequence for Abca9 (NM_147220.1,3024-3042).
gcatcgataactttgtaca

SEQ ID NO: 491614 - DNA, 19 bp, Mus musculus
  siRNA target sequence for Abca9 (NM_147220.1,3034-3052).
ctttgtacacgcactaaga

SEQ ID NO: 491615 - DNA, 19 bp, Mus musculus
  siRNA target sequence for Abca9 (NM_147220.1,3051-3069).
gacagcagggcatagcatt

SEQ ID NO: 491616 - DNA, 19 bp, Mus musculus
  siRNA target sequence for Abca9 (NM_147220.1,3132-3150).
cggtgctgggtgaagaaaa

SEQ ID NO: 491617 - DNA, 19 bp, Mus musculus
  siRNA target sequence for Abca9 (NM_147220.1,3199-3217).
cccagtcctcatggatatt

SEQ ID NO: 491618 - DNA, 19 bp, Mus musculus
  siRNA target sequence for Abca9 (NM_147220.1,3223-3241).
caatgggctgcttggaata

SEQ ID NO: 491619 - DNA, 19 bp, Mus musculus
  siRNA target sequence for Abca9 (NM_147220.1,3228-3246).
ggctgcttggaatatttaa

SEQ ID NO: 491620 - DNA, 19 bp, Mus musculus
  siRNA target sequence for Abca9 (NM_147220.1,3230-3248).
ctgcttggaatatttaact

SEQ ID NO: 491621 - DNA, 19 bp, Mus musculus
  siRNA target sequence for Abca9 (NM_147220.1,3232-3250).
gcttggaatatttaactct

SEQ ID NO: 491622 - DNA, 19 bp, Mus musculus
  siRNA target sequence for Abca9 (NM_147220.1,3276-3294).
gcacagtctttgaagaaca

SEQ ID NO: 491623 - DNA, 19 bp, Mus musculus
  siRNA target sequence for Abca9 (NM_147220.1,3593-3611).
gcatcatctctcatattca

SEQ ID NO: 491624 - DNA, 19 bp, Mus musculus
  siRNA target sequence for Abca9 (NM_147220.1,3638-3656).
cgtaatggcagaaaaaata

SEQ ID NO: 491625 - DNA, 19 bp, Mus musculus
  siRNA target sequence for Abca9 (NM_147220.1,3657-3675).
gtggcatctggtcattttt

SEQ ID NO: 491626 - DNA, 19 bp, Mus musculus
  siRNA target sequence for Abca9 (NM_147220.1,3680-3698).
ctaattgtcaccatcttct

SEQ ID NO: 491627 - DNA, 19 bp, Mus musculus
  siRNA target sequence for Abca9 (NM_147220.1,3776-3794).
ctgattggctcactattga

SEQ ID NO: 491628 - DNA, 19 bp, Mus musculus
  siRNA target sequence for Abca9 (NM_147220.1,3778-3796).
gattggctcactattgatt

SEQ ID NO: 491629 - DNA, 19 bp, Mus musculus
  siRNA target sequence for Abca9 (NM_147220.1,3782-3800).
ggctcactattgatttttt

SEQ ID NO: 491630 - DNA, 19 bp, Mus musculus
  siRNA target sequence for Abca9 (NM_147220.1,3810-3828).
cctatgactctgtggatta

SEQ ID NO: 491631 - DNA, 19 bp, Mus musculus
  siRNA target sequence for Abca9 (NM_147220.1,3829-3847).
cttgggaacgtcagaatct

SEQ ID NO: 491632 - DNA, 19 bp, Mus musculus
  siRNA target sequence for Abca9 (NM_147220.1,3832-3850).
gggaacgtcagaatctcaa

SEQ ID NO: 491633 - DNA, 19 bp, Mus musculus
  siRNA target sequence for Abca9 (NM_147220.1,3840-3858).
cagaatctcaactcgtatt

SEQ ID NO: 491634 - DNA, 19 bp, Mus musculus
  siRNA target sequence for Abca9 (NM_147220.1,3871-3889).
gataccttaccttcacttt

SEQ ID NO: 491635 - DNA, 19 bp, Mus musculus
  siRNA target sequence for Abca9 (NM_147220.1,3908-3926).
ctgcgatgtctggaaagat

SEQ ID NO: 491636 - DNA, 19 bp, Mus musculus
  siRNA target sequence for Abca9 (NM_147220.1,4107-4125).
gctgtctgcggaaggaata

SEQ ID NO: 491637 - DNA, 19 bp, Mus musculus
  siRNA target sequence for Abca9 (NM_147220.1,4108-4126).
ctgtctgcggaaggaatat

SEQ ID NO: 491638 - DNA, 19 bp, Mus musculus
  siRNA target sequence for Abca9 (NM_147220.1,4289-4307).
gcaggtcaggtgtttttga

SEQ ID NO: 491639 - DNA, 19 bp, Mus musculus
  siRNA target sequence for Abca9 (NM_147220.1,4634-4652).
gcgatccgagccactttca

SEQ ID NO: 491640 - DNA, 19 bp, Mus musculus
  siRNA target sequence for Abca9 (NM_147220.1,4925-4943).
gaggacgtacgacctttat

SEQ ID NO: 491641 - DNA, 19 bp, Mus musculus
  siRNA target sequence for Abca9 (NM_147220.1,5078-5096).
gccaattcctcagtgaaat

SEQ ID NO: 491642 - DNA, 19 bp, Mus musculus
  siRNA target sequence for Abcb10 (NM_019552.1,507-525).
cctgggaaggatcattgat

SEQ ID NO: 491643 - DNA, 19 bp, Mus musculus
  siRNA target sequence for Abcb10 (NM_019552.1,512-530).
gaaggatcattgatgtcat

SEQ ID NO: 491644 - DNA, 19 bp, Mus musculus
  siRNA target sequence for Abcb10 (NM_019552.1,516-534).
gatcattgatgtcatctat

SEQ ID NO: 491645 - DNA, 19 bp, Mus musculus
  siRNA target sequence for Abcb10 (NM_019552.1,650-668).
caggtcagagcattgtgaa

SEQ ID NO: 491646 - DNA, 19 bp, Mus musculus
  siRNA target sequence for Abcb10 (NM_019552.1,729-747).
gacccgcacaggcgaatta

SEQ ID NO: 491647 - DNA, 19 bp, Mus musculus
  siRNA target sequence for Abcb10 (NM_019552.1,731-749).
cccgcacaggcgaattaat

SEQ ID NO: 491648 - DNA, 19 bp, Mus musculus
  siRNA target sequence for Abcb10 (NM_019552.1,732-750).
ccgcacaggcgaattaatt

SEQ ID NO: 491649 - DNA, 19 bp, Mus musculus
  siRNA target sequence for Abcb10 (NM_019552.1,733-751).
cgcacaggcgaattaatta

SEQ ID NO: 491650 - DNA, 19 bp, Mus musculus
  siRNA target sequence for Abcb10 (NM_019552.1,734-752).
gcacaggcgaattaattaa

SEQ ID NO: 491651 - DNA, 19 bp, Mus musculus
  siRNA target sequence for Abcb10 (NM_019552.1,838-856).
gttggtgttggcatgatgt

SEQ ID NO: 491652 - DNA, 19 bp, Mus musculus
  siRNA target sequence for Abcb10 (NM_019552.1,847-865).
ggcatgatgttttttgtgt

SEQ ID NO: 491653 - DNA, 19 bp, Mus musculus
  siRNA target sequence for Abcb10 (NM_019552.1,911-929).
ctgtcctcgctgtgattta

SEQ ID NO: 491654 - DNA, 19 bp, Mus musculus
  siRNA target sequence for Abcb10 (NM_019552.1,924-942).
gatttatgggcgatatcta

SEQ ID NO: 491655 - DNA, 19 bp, Mus musculus
  siRNA target sequence for Abcb10 (NM_019552.1,934-952).
cgatatctacggaaactgt

SEQ ID NO: 491656 - DNA, 19 bp, Mus musculus
  siRNA target sequence for Abcb10 (NM_019552.1,1000-1018).
gagcggattggaaacataa

SEQ ID NO: 491657 - DNA, 19 bp, Mus musculus
  siRNA target sequence for Abcb10 (NM_019552.1,1002-1020).
gcggattggaaacataaga

SEQ ID NO: 491658 - DNA, 19 bp, Mus musculus
  siRNA target sequence for Abcb10 (NM_019552.1,1003-1021).
cggattggaaacataagaa

SEQ ID NO: 491659 - DNA, 19 bp, Mus musculus
  siRNA target sequence for Abcb10 (NM_019552.1,1197-1215).
gggcagtgcccatatgaca

SEQ ID NO: 491660 - DNA, 19 bp, Mus musculus
  siRNA target sequence for Abcb10 (NM_019552.1,1287-1305).
ctactccgagctgatgaaa

SEQ ID NO: 491661 - DNA, 19 bp, Mus musculus
  siRNA target sequence for Abcb10 (NM_019552.1,1348-1366).
cagccacggctgcctttta

SEQ ID NO: 491662 - DNA, 19 bp, Mus musculus
  siRNA target sequence for Abcb10 (NM_019552.1,1352-1370).
cacggctgccttttaacga

SEQ ID NO: 491663 - DNA, 19 bp, Mus musculus
  siRNA target sequence for Abcb10 (NM_019552.1,1368-1386).
cgaggggatggtgttagat

SEQ ID NO: 491664 - DNA, 19 bp, Mus musculus
  siRNA target sequence for Abcb10 (NM_019552.1,1378-1396).
gtgttagatgagaaaacct

SEQ ID NO: 491665 - DNA, 19 bp, Mus musculus
  siRNA target sequence for Abcb10 (NM_019552.1,1448-1466).
cagaggtgtccgtattcca

SEQ ID NO: 491666 - DNA, 19 bp, Mus musculus
  siRNA target sequence for Abcb10 (NM_019552.1,1558-1576).
cggttgtacgaccctaatt

SEQ ID NO: 491667 - DNA, 19 bp, Mus musculus
  siRNA target sequence for Abcb10 (NM_019552.1,1560-1578).
gttgtacgaccctaattct

SEQ ID NO: 491668 - DNA, 19 bp, Mus musculus
  siRNA target sequence for Abcb10 (NM_019552.1,1589-1607).
gccttgatggccatgacat

SEQ ID NO: 491669 - DNA, 19 bp, Mus musculus
  siRNA target sequence for Abcb10 (NM_019552.1,1626-1644).
ctggctgagatccaagatt

SEQ ID NO: 491670 - DNA, 19 bp, Mus musculus
  siRNA target sequence for Abcb10 (NM_019552.1,1763-1781).
ccaacgccgctgagttcat

SEQ ID NO: 491671 - DNA, 19 bp, Mus musculus
  siRNA target sequence for Abcb10 (NM_019552.1,1980-1998).
gagaaccgtgctgatcata

SEQ ID NO: 491672 - DNA, 19 bp, Mus musculus
  siRNA target sequence for Abcb10 (NM_019552.1,2044-2062).
cttgaccacggaaagatct

SEQ ID NO: 491673 - DNA, 19 bp, Mus musculus
  siRNA target sequence for Abcb10 (NM_019552.1,2104-2122).
gggctttacagaaaactga

SEQ ID NO: 491674 - DNA, 19 bp, Mus musculus
  siRNA target sequence for Abcb11 (NM_021022.2,144-162).
gagaatcatgctttcgaat

SEQ ID NO: 491675 - DNA, 19 bp, Mus musculus
  siRNA target sequence for Abcb11 (NM_021022.2,154-172).
ctttcgaatcagatggttt

SEQ ID NO: 491676 - DNA, 19 bp, Mus musculus
  siRNA target sequence for Abcb11 (NM_021022.2,158-176).
cgaatcagatggtttccat

SEQ ID NO: 491677 - DNA, 19 bp, Mus musculus
  siRNA target sequence for Abcb11 (NM_021022.2,159-177).
gaatcagatggtttccata

SEQ ID NO: 491678 - DNA, 19 bp, Mus musculus
  siRNA target sequence for Abcb11 (NM_021022.2,168-186).
ggtttccataacaatgata

SEQ ID NO: 491679 - DNA, 19 bp, Mus musculus
  siRNA target sequence for Abcb11 (NM_021022.2,196-214).
ggttacaagataagaagaa

SEQ ID NO: 491680 - DNA, 19 bp, Mus musculus
  siRNA target sequence for Abcb11 (NM_021022.2,224-242).
cgctcgagttggcttcttt

SEQ ID NO: 491681 - DNA, 19 bp, Mus musculus
  siRNA target sequence for Abcb11 (NM_021022.2,248-266).
gtttcgattttcttcatca

SEQ ID NO: 491682 - DNA, 19 bp, Mus musculus
  siRNA target sequence for Abcb11 (NM_021022.2,270-288).
gacaactggctgatgttta

SEQ ID NO: 491683 - DNA, 19 bp, Mus musculus
  siRNA target sequence for Abcb11 (NM_021022.2,301-319).
gcgcattgctccatggaat

SEQ ID NO: 491684 - DNA, 19 bp, Mus musculus
  siRNA target sequence for Abcb11 (NM_021022.2,322-340).
cccagccaggcatgattat

SEQ ID NO: 491685 - DNA, 19 bp, Mus musculus
  siRNA target sequence for Abcb11 (NM_021022.2,448-466).
gctccttcaaccagaacat

SEQ ID NO: 491686 - DNA, 19 bp, Mus musculus
  siRNA target sequence for Abcb11 (NM_021022.2,486-504).
gggttggtggacattaaca

SEQ ID NO: 491687 - DNA, 19 bp, Mus musculus
  siRNA target sequence for Abcb11 (NM_021022.2,506-524).
cgaagtcatcaaattttct

SEQ ID NO: 491688 - DNA, 19 bp, Mus musculus
  siRNA target sequence for Abcb11 (NM_021022.2,544-562).
gtgtggctgtccttatcct

SEQ ID NO: 491689 - DNA, 19 bp, Mus musculus
  siRNA target sequence for Abcb11 (NM_021022.2,565-583).
gatactttcaaataaggtt

SEQ ID NO: 491690 - DNA, 19 bp, Mus musculus
  siRNA target sequence for Abcb11 (NM_021022.2,593-611).
cactggggctcgtcagata

SEQ ID NO: 491691 - DNA, 19 bp, Mus musculus
  siRNA target sequence for Abcb11 (NM_021022.2,597-615).
ggggctcgtcagataagga

SEQ ID NO: 491692 - DNA, 19 bp, Mus musculus
  siRNA target sequence for Abcb11 (NM_021022.2,598-616).
gggctcgtcagataaggaa

SEQ ID NO: 491693 - DNA, 19 bp, Mus musculus
  siRNA target sequence for Abcb11 (NM_021022.2,599-617).
ggctcgtcagataaggaaa

SEQ ID NO: 491694 - DNA, 19 bp, Mus musculus
  siRNA target sequence for Abcb11 (NM_021022.2,600-618).
gctcgtcagataaggaaaa

SEQ ID NO: 491695 - DNA, 19 bp, Mus musculus
  siRNA target sequence for Abcb11 (NM_021022.2,601-619).
ctcgtcagataaggaaaat

SEQ ID NO: 491696 - DNA, 19 bp, Mus musculus
  siRNA target sequence for Abcb11 (NM_021022.2,603-621).
cgtcagataaggaaaatga

SEQ ID NO: 491697 - DNA, 19 bp, Mus musculus
  siRNA target sequence for Abcb11 (NM_021022.2,654-672).
gaaatcggatggtttgact

SEQ ID NO: 491698 - DNA, 19 bp, Mus musculus
  siRNA target sequence for Abcb11 (NM_021022.2,683-701).
gggagagctcaattcaaga

SEQ ID NO: 491699 - DNA, 19 bp, Mus musculus
  siRNA target sequence for Abcb11 (NM_021022.2,684-702).
ggagagctcaattcaagat

SEQ ID NO: 491700 - DNA, 19 bp, Mus musculus
  siRNA target sequence for Abcb11 (NM_021022.2,685-703).
gagagctcaattcaagatt

SEQ ID NO: 491701 - DNA, 19 bp, Mus musculus
  siRNA target sequence for Abcb11 (NM_021022.2,767-785).
cctgtcgacagctttgtct

SEQ ID NO: 491702 - DNA, 19 bp, Mus musculus
  siRNA target sequence for Abcb11 (NM_021022.2,803-821).
ctacaggggttggaaatta

SEQ ID NO: 491703 - DNA, 19 bp, Mus musculus
  siRNA target sequence for Abcb11 (NM_021022.2,808-826).
ggggttggaaattaacctt

SEQ ID NO: 491704 - DNA, 19 bp, Mus musculus
  siRNA target sequence for Abcb11 (NM_021022.2,908-926).
gttgaaggcttatgctaaa

SEQ ID NO: 491705 - DNA, 19 bp, Mus musculus
  siRNA target sequence for Abcb11 (NM_021022.2,911-929).
gaaggcttatgctaaagct

SEQ ID NO: 491706 - DNA, 19 bp, Mus musculus
  siRNA target sequence for Abcb11 (NM_021022.2,931-949).
ggtctattgccgatgaagt

SEQ ID NO: 491707 - DNA, 19 bp, Mus musculus
  siRNA target sequence for Abcb11 (NM_021022.2,948-966).
gtcctctcatctattcgaa

SEQ ID NO: 491708 - DNA, 19 bp, Mus musculus
  siRNA target sequence for Abcb11 (NM_021022.2,996-1014).
gaggtggaaaggtatgaga

SEQ ID NO: 491709 - DNA, 19 bp, Mus musculus
  siRNA target sequence for Abcb11 (NM_021022.2,999-1017).
gtggaaaggtatgagaaaa

SEQ ID NO: 491710 - DNA, 19 bp, Mus musculus
  siRNA target sequence for Abcb11 (NM_021022.2,1079-1097).
gtacatgtggtgtctcatt

SEQ ID NO: 491711 - DNA, 19 bp, Mus musculus
  siRNA target sequence for Abcb11 (NM_021022.2,1218-1236).
ggcaatgcatcttcttgtt

SEQ ID NO: 491712 - DNA, 19 bp, Mus musculus
  siRNA target sequence for Abcb11 (NM_021022.2,1271-1289).
cagtattttccaaacaata

SEQ ID NO: 491713 - DNA, 19 bp, Mus musculus
  siRNA target sequence for Abcb11 (NM_021022.2,1312-1330).
gcatgtcaggagatggtta

SEQ ID NO: 491714 - DNA, 19 bp, Mus musculus
  siRNA target sequence for Abcb11 (NM_021022.2,1327-1345).
gttacaagctagatcgaat

SEQ ID NO: 491715 - DNA, 19 bp, Mus musculus
  siRNA target sequence for Abcb11 (NM_021022.2,1342-1360).
gaatcaagggcgaaattga

SEQ ID NO: 491716 - DNA, 19 bp, Mus musculus
  siRNA target sequence for Abcb11 (NM_021022.2,1390-1408).
ctcgaccagaggtgaagat

SEQ ID NO: 491717 - DNA, 19 bp, Mus musculus
  siRNA target sequence for Abcb11 (NM_021022.2,1395-1413).
ccagaggtgaagattttaa

SEQ ID NO: 491718 - DNA, 19 bp, Mus musculus
  siRNA target sequence for Abcb11 (NM_021022.2,1547-1565).
ccatgacattcgttctctt

SEQ ID NO: 491719 - DNA, 19 bp, Mus musculus
  siRNA target sequence for Abcb11 (NM_021022.2,1551-1569).
gacattcgttctcttaaca

SEQ ID NO: 491720 - DNA, 19 bp, Mus musculus
  siRNA target sequence for Abcb11 (NM_021022.2,1572-1590).
cggtggctgagagatcaaa

SEQ ID NO: 491721 - DNA, 19 bp, Mus musculus
  siRNA target sequence for Abcb11 (NM_021022.2,1624-1642).
ccaccactatcgcagaaaa

SEQ ID NO: 491722 - DNA, 19 bp, Mus musculus
  siRNA target sequence for Abcb11 (NM_021022.2,1627-1645).
ccactatcgcagaaaacat

SEQ ID NO: 491723 - DNA, 19 bp, Mus musculus
  siRNA target sequence for Abcb11 (NM_021022.2,1692-1710).
gccaaggatgctaatgcat

SEQ ID NO: 491724 - DNA, 19 bp, Mus musculus
  siRNA target sequence for Abcb11 (NM_021022.2,1724-1742).
ggccctgccacagcaattt

SEQ ID NO: 491725 - DNA, 19 bp, Mus musculus
  siRNA target sequence for Abcb11 (NM_021022.2,1887-1905).
gtacagggagcactgaata

SEQ ID NO: 491726 - DNA, 19 bp, Mus musculus
  siRNA target sequence for Abcb11 (NM_021022.2,1911-1929).
caacatggacacacaatca

SEQ ID NO: 491727 - DNA, 19 bp, Mus musculus
  siRNA target sequence for Abcb11 (NM_021022.2,1914-1932).
catggacacacaatcatct

SEQ ID NO: 491728 - DNA, 19 bp, Mus musculus
  siRNA target sequence for Abcb11 (NM_021022.2,1935-1953).
gttgcccatcgcctatcaa

SEQ ID NO: 491729 - DNA, 19 bp, Mus musculus
  siRNA target sequence for Abcb11 (NM_021022.2,2067-2085).
caaagccaagaagataata

SEQ ID NO: 491730 - DNA, 19 bp, Mus musculus
  siRNA target sequence for Abcb11 (NM_021022.2,2071-2089).
gccaagaagataatactca

SEQ ID NO: 491731 - DNA, 19 bp, Mus musculus
  siRNA target sequence for Abcb11 (NM_021022.2,2185-2203).
ccatccgtcaacgatctaa

SEQ ID NO: 491732 - DNA, 19 bp, Mus musculus
  siRNA target sequence for Abcb11 (NM_021022.2,2189-2207).
ccgtcaacgatctaagtct

SEQ ID NO: 491733 - DNA, 19 bp, Mus musculus
  siRNA target sequence for Abcb11 (NM_021022.2,2260-2278).
cctcttacgaagacagaaa

SEQ ID NO: 491734 - DNA, 19 bp, Mus musculus
  siRNA target sequence for Abcb11 (NM_021022.2,2315-2333).
cccagttaggaggattcta

SEQ ID NO: 491735 - DNA, 19 bp, Mus musculus
  siRNA target sequence for Abcb11 (NM_021022.2,2319-2337).
gttaggaggattctaaaat

SEQ ID NO: 491736 - DNA, 19 bp, Mus musculus
  siRNA target sequence for Abcb11 (NM_021022.2,2345-2363).
ctcagaatggccctacata

SEQ ID NO: 491737 - DNA, 19 bp, Mus musculus
  siRNA target sequence for Abcb11 (NM_021022.2,2347-2365).
cagaatggccctacatact

SEQ ID NO: 491738 - DNA, 19 bp, Mus musculus
  siRNA target sequence for Abcb11 (NM_021022.2,2374-2392).
ctttgtgtgcagccattaa

SEQ ID NO: 491739 - DNA, 19 bp, Mus musculus
  siRNA target sequence for Abcb11 (NM_021022.2,2443-2461).
ctttttcactcgttgataa

SEQ ID NO: 491740 - DNA, 19 bp, Mus musculus
  siRNA target sequence for Abcb11 (NM_021022.2,2449-2467).
cactcgttgataaagaaca

SEQ ID NO: 491741 - DNA, 19 bp, Mus musculus
  siRNA target sequence for Abcb11 (NM_021022.2,2466-2484).
caacaaaggtcagagattt

SEQ ID NO: 491742 - DNA, 19 bp, Mus musculus
  siRNA target sequence for Abcb11 (NM_021022.2,2511-2529).
ctgggctgtgtatcacttt

SEQ ID NO: 491743 - DNA, 19 bp, Mus musculus
  siRNA target sequence for Abcb11 (NM_021022.2,2524-2542).
cacttttcacacaatttct

SEQ ID NO: 491744 - DNA, 19 bp, Mus musculus
  siRNA target sequence for Abcb11 (NM_021022.2,2587-2605).
ggctgcgtaaatttggttt

SEQ ID NO: 491745 - DNA, 19 bp, Mus musculus
  siRNA target sequence for Abcb11 (NM_021022.2,2606-2624).
caaggcaatgttaagacaa

SEQ ID NO: 491746 - DNA, 19 bp, Mus musculus
  siRNA target sequence for Abcb11 (NM_021022.2,2609-2627).
ggcaatgttaagacaagat

SEQ ID NO: 491747 - DNA, 19 bp, Mus musculus
  siRNA target sequence for Abcb11 (NM_021022.2,2610-2628).
gcaatgttaagacaagata

SEQ ID NO: 491748 - DNA, 19 bp, Mus musculus
  siRNA target sequence for Abcb11 (NM_021022.2,2611-2629).
caatgttaagacaagatat

SEQ ID NO: 491749 - DNA, 19 bp, Mus musculus
  siRNA target sequence for Abcb11 (NM_021022.2,2635-2653).
ggttcgatgacctcaaaaa

SEQ ID NO: 491750 - DNA, 19 bp, Mus musculus
  siRNA target sequence for Abcb11 (NM_021022.2,2636-2654).
gttcgatgacctcaaaaat

SEQ ID NO: 491751 - DNA, 19 bp, Mus musculus
  siRNA target sequence for Abcb11 (NM_021022.2,2639-2657).
cgatgacctcaaaaataat

SEQ ID NO: 491752 - DNA, 19 bp, Mus musculus
  siRNA target sequence for Abcb11 (NM_021022.2,2658-2676).
cctggagtactaacaacta

SEQ ID NO: 491753 - DNA, 19 bp, Mus musculus
  siRNA target sequence for Abcb11 (NM_021022.2,2724-2742).
gttgggatgatggtcaatt

SEQ ID NO: 491754 - DNA, 19 bp, Mus musculus
  siRNA target sequence for Abcb11 (NM_021022.2,2727-2745).
gggatgatggtcaattcct

SEQ ID NO: 491755 - DNA, 19 bp, Mus musculus
  siRNA target sequence for Abcb11 (NM_021022.2,2728-2746).
ggatgatggtcaattcctt

SEQ ID NO: 491756 - DNA, 19 bp, Mus musculus
  siRNA target sequence for Abcb11 (NM_021022.2,2795-2813).
gctcagtctggttatatca

SEQ ID NO: 491757 - DNA, 19 bp, Mus musculus
  siRNA target sequence for Abcb11 (NM_021022.2,2840-2858).
gggagctgtacagacaaaa

SEQ ID NO: 491758 - DNA, 19 bp, Mus musculus
  siRNA target sequence for Abcb11 (NM_021022.2,2841-2859).
ggagctgtacagacaaaaa

SEQ ID NO: 491759 - DNA, 19 bp, Mus musculus
  siRNA target sequence for Abcb11 (NM_021022.2,2845-2863).
ctgtacagacaaaaatgct

SEQ ID NO: 491760 - DNA, 19 bp, Mus musculus
  siRNA target sequence for Abcb11 (NM_021022.2,2864-2882).
gacaggattcgcttctcaa

SEQ ID NO: 491761 - DNA, 19 bp, Mus musculus
  siRNA target sequence for Abcb11 (NM_021022.2,2869-2887).
gattcgcttctcaagacaa

SEQ ID NO: 491762 - DNA, 19 bp, Mus musculus
  siRNA target sequence for Abcb11 (NM_021022.2,2878-2896).
ctcaagacaaggaaattct

SEQ ID NO: 491763 - DNA, 19 bp, Mus musculus
  siRNA target sequence for Abcb11 (NM_021022.2,2917-2935).
ccaacgaagcccttagcaa

SEQ ID NO: 491764 - DNA, 19 bp, Mus musculus
  siRNA target sequence for Abcb11 (NM_021022.2,2958-2976).
ggagtggagggaagattta

SEQ ID NO: 491765 - DNA, 19 bp, Mus musculus
  siRNA target sequence for Abcb11 (NM_021022.2,2967-2985).
ggaagatttattaaagcat

SEQ ID NO: 491766 - DNA, 19 bp, Mus musculus
  siRNA target sequence for Abcb11 (NM_021022.2,3056-3074).
cttttcccaggggatatca

SEQ ID NO: 491767 - DNA, 19 bp, Mus musculus
  siRNA target sequence for Abcb11 (NM_021022.2,3062-3080).
ccaggggatatcatttctt

SEQ ID NO: 491768 - DNA, 19 bp, Mus musculus
  siRNA target sequence for Abcb11 (NM_021022.2,3083-3101).
caattctgcagcctataga

SEQ ID NO: 491769 - DNA, 19 bp, Mus musculus
  siRNA target sequence for Abcb11 (NM_021022.2,3105-3123).
ggaggttacttaatagtct

SEQ ID NO: 491770 - DNA, 19 bp, Mus musculus
  siRNA target sequence for Abcb11 (NM_021022.2,3106-3124).
gaggttacttaatagtcta

SEQ ID NO: 491771 - DNA, 19 bp, Mus musculus
  siRNA target sequence for Abcb11 (NM_021022.2,3132-3150).
ctgaacttcagctatgttt

SEQ ID NO: 491772 - DNA, 19 bp, Mus musculus
  siRNA target sequence for Abcb11 (NM_021022.2,3152-3170).
cagggtggtctcttccatt

SEQ ID NO: 491773 - DNA, 19 bp, Mus musculus
  siRNA target sequence for Abcb11 (NM_021022.2,3215-3233).
gagctatgccaaagctaaa

SEQ ID NO: 491774 - DNA, 19 bp, Mus musculus
  siRNA target sequence for Abcb11 (NM_021022.2,3217-3235).
gctatgccaaagctaaaat

SEQ ID NO: 491775 - DNA, 19 bp, Mus musculus
  siRNA target sequence for Abcb11 (NM_021022.2,3218-3236).
ctatgccaaagctaaaata

SEQ ID NO: 491776 - DNA, 19 bp, Mus musculus
  siRNA target sequence for Abcb11 (NM_021022.2,3238-3256).
cagctgcacgcttttttca

SEQ ID NO: 491777 - DNA, 19 bp, Mus musculus
  siRNA target sequence for Abcb11 (NM_021022.2,3241-3259).
ctgcacgcttttttcaact

SEQ ID NO: 491778 - DNA, 19 bp, Mus musculus
  siRNA target sequence for Abcb11 (NM_021022.2,3325-3343).
ggaagattgattttatcga

SEQ ID NO: 491779 - DNA, 19 bp, Mus musculus
  siRNA target sequence for Abcb11 (NM_021022.2,3367-3385).
gacctgatatacaagttct

SEQ ID NO: 491780 - DNA, 19 bp, Mus musculus
  siRNA target sequence for Abcb11 (NM_021022.2,3500-3518).
gggaacggtgatgatagat

SEQ ID NO: 491781 - DNA, 19 bp, Mus musculus
  siRNA target sequence for Abcb11 (NM_021022.2,3522-3540).
cacgacagcaaaaaagtca

SEQ ID NO: 491782 - DNA, 19 bp, Mus musculus
  siRNA target sequence for Abcb11 (NM_021022.2,3546-3564).
cagttcctccgttcaaaca

SEQ ID NO: 491783 - DNA, 19 bp, Mus musculus
  siRNA target sequence for Abcb11 (NM_021022.2,3548-3566).
gttcctccgttcaaacatt

SEQ ID NO: 491784 - DNA, 19 bp, Mus musculus
  siRNA target sequence for Abcb11 (NM_021022.2,3604-3622).
gcataatggacaacatcaa

SEQ ID NO: 491785 - DNA, 19 bp, Mus musculus
  siRNA target sequence for Abcb11 (NM_021022.2,3647-3665).
ctccgtggagagagctata

SEQ ID NO: 491786 - DNA, 19 bp, Mus musculus
  siRNA target sequence for Abcb11 (NM_021022.2,3701-3719).
catgtcactcccagagaaa

SEQ ID NO: 491787 - DNA, 19 bp, Mus musculus
  siRNA target sequence for Abcb11 (NM_021022.2,3706-3724).
cactcccagagaaatatga

SEQ ID NO: 491788 - DNA, 19 bp, Mus musculus
  siRNA target sequence for Abcb11 (NM_021022.2,3765-3783).
gagaaacaacgcattgcta

SEQ ID NO: 491789 - DNA, 19 bp, Mus musculus
  siRNA target sequence for Abcb11 (NM_021022.2,3793-3811).
ccattgtacgagatcctaa

SEQ ID NO: 491790 - DNA, 19 bp, Mus musculus
  siRNA target sequence for Abcb11 (NM_021022.2,3794-3812).
cattgtacgagatcctaaa

SEQ ID NO: 491791 - DNA, 19 bp, Mus musculus
  siRNA target sequence for Abcb11 (NM_021022.2,3798-3816).
gtacgagatcctaaaatct

SEQ ID NO: 491792 - DNA, 19 bp, Mus musculus
  siRNA target sequence for Abcb11 (NM_021022.2,3897-3915).
ggtcggacctgtattgtca

SEQ ID NO: 491793 - DNA, 19 bp, Mus musculus
  siRNA target sequence for Abcb11 (NM_021022.2,3898-3916).
gtcggacctgtattgtcat

SEQ ID NO: 491794 - DNA, 19 bp, Mus musculus
  siRNA target sequence for Abcb11 (NM_021022.2,3990-4008).
gggacccataagaaactga

SEQ ID NO: 491795 - DNA, 19 bp, Mus musculus
  siRNA target sequence for Abcb1a (NM_011076.1,230-248).
gcagtcagtgtgcttacaa

SEQ ID NO: 491796 - DNA, 19 bp, Mus musculus
  siRNA target sequence for Abcb1a (NM_011076.1,239-257).
gtgcttacaatgtttcgtt

SEQ ID NO: 491797 - DNA, 19 bp, Mus musculus
  siRNA target sequence for Abcb1a (NM_011076.1,241-259).
gcttacaatgtttcgttat

SEQ ID NO: 491798 - DNA, 19 bp, Mus musculus
  siRNA target sequence for Abcb1a (NM_011076.1,318-336).
gagtggcgctcccacttat

SEQ ID NO: 491799 - DNA, 19 bp, Mus musculus
  siRNA target sequence for Abcb1a (NM_011076.1,320-338).
gtggcgctcccacttatga

SEQ ID NO: 491800 - DNA, 19 bp, Mus musculus
  siRNA target sequence for Abcb1a (NM_011076.1,351-369).
gtgacatgacagatagctt

SEQ ID NO: 491801 - DNA, 19 bp, Mus musculus
  siRNA target sequence for Abcb1a (NM_011076.1,366-384).
gctttgcaagtgtaggaaa

SEQ ID NO: 491802 - DNA, 19 bp, Mus musculus
  siRNA target sequence for Abcb1a (NM_011076.1,377-395).
gtaggaaacgtctctaaaa

SEQ ID NO: 491803 - DNA, 19 bp, Mus musculus
  siRNA target sequence for Abcb1a (NM_011076.1,409-427).
gagtgaggccgataaaaga

SEQ ID NO: 491804 - DNA, 19 bp, Mus musculus
  siRNA target sequence for Abcb1a (NM_011076.1,418-436).
cgataaaagagccatgttt

SEQ ID NO: 491805 - DNA, 19 bp, Mus musculus
  siRNA target sequence for Abcb1a (NM_011076.1,457-475).
gaccacgtacgcctactat

SEQ ID NO: 491806 - DNA, 19 bp, Mus musculus
  siRNA target sequence for Abcb1a (NM_011076.1,686-704).
gacaaaatcggaatgttct

SEQ ID NO: 491807 - DNA, 19 bp, Mus musculus
  siRNA target sequence for Abcb1a (NM_011076.1,706-724).
ccaggcaatggcaacattt

SEQ ID NO: 491808 - DNA, 19 bp, Mus musculus
  siRNA target sequence for Abcb1a (NM_011076.1,728-746).
ggtggttttataataggat

SEQ ID NO: 491809 - DNA, 19 bp, Mus musculus
  siRNA target sequence for Abcb1a (NM_011076.1,729-747).
gtggttttataataggatt

SEQ ID NO: 491810 - DNA, 19 bp, Mus musculus
  siRNA target sequence for Abcb1a (NM_011076.1,810-828).
ctggtatttgggcaaagat

SEQ ID NO: 491811 - DNA, 19 bp, Mus musculus
  siRNA target sequence for Abcb1a (NM_011076.1,812-830).
ggtatttgggcaaagatat

SEQ ID NO: 491812 - DNA, 19 bp, Mus musculus
  siRNA target sequence for Abcb1a (NM_011076.1,813-831).
gtatttgggcaaagatatt

SEQ ID NO: 491813 - DNA, 19 bp, Mus musculus
  siRNA target sequence for Abcb1a (NM_011076.1,1015-1033).
ctccatgggtgcagctttt

SEQ ID NO: 491814 - DNA, 19 bp, Mus musculus
  siRNA target sequence for Abcb1a (NM_011076.1,1025-1043).
gcagcttttctccttatct

SEQ ID NO: 491815 - DNA, 19 bp, Mus musculus
  siRNA target sequence for Abcb1a (NM_011076.1,1093-1111).
caaagaatactctattgga

SEQ ID NO: 491816 - DNA, 19 bp, Mus musculus
  siRNA target sequence for Abcb1a (NM_011076.1,1124-1142).
gtcttcttttccgtgttaa

SEQ ID NO: 491817 - DNA, 19 bp, Mus musculus
  siRNA target sequence for Abcb1a (NM_011076.1,1129-1147).
cttttccgtgttaattgga

SEQ ID NO: 491818 - DNA, 19 bp, Mus musculus
  siRNA target sequence for Abcb1a (NM_011076.1,1138-1156).
gttaattggagcattcagt

SEQ ID NO: 491819 - DNA, 19 bp, Mus musculus
  siRNA target sequence for Abcb1a (NM_011076.1,1165-1183).
ggcatctccaaatattgaa

SEQ ID NO: 491820 - DNA, 19 bp, Mus musculus
  siRNA target sequence for Abcb1a (NM_011076.1,1197-1215).
cacgaggagcagcttatga

SEQ ID NO: 491821 - DNA, 19 bp, Mus musculus
  siRNA target sequence for Abcb1a (NM_011076.1,1321-1339).
cagttacccatctcgaaaa

SEQ ID NO: 491822 - DNA, 19 bp, Mus musculus
  siRNA target sequence for Abcb1a (NM_011076.1,1329-1347).
catctcgaaaagaagttca

SEQ ID NO: 491823 - DNA, 19 bp, Mus musculus
  siRNA target sequence for Abcb1a (NM_011076.1,2069-2087).
gataatttagacatgtctt

SEQ ID NO: 491824 - DNA, 19 bp, Mus musculus
  siRNA target sequence for Abcb1a (NM_011076.1,2093-2111).
gattcaggatccagtctaa

SEQ ID NO: 491825 - DNA, 19 bp, Mus musculus
  siRNA target sequence for Abcb1a (NM_011076.1,2104-2122).
cagtctaataagaagaaga

SEQ ID NO: 491826 - DNA, 19 bp, Mus musculus
  siRNA target sequence for Abcb1a (NM_011076.1,2121-2139).
gatcaactcgcaaaagcat

SEQ ID NO: 491827 - DNA, 19 bp, Mus musculus
  siRNA target sequence for Abcb1a (NM_011076.1,2156-2174).
caagacaggaagcttagta

SEQ ID NO: 491828 - DNA, 19 bp, Mus musculus
  siRNA target sequence for Abcb1a (NM_011076.1,2161-2179).
caggaagcttagtaccaaa

SEQ ID NO: 491829 - DNA, 19 bp, Mus musculus
  siRNA target sequence for Abcb1a (NM_011076.1,2217-2235).
ggcggatcctgaagttgaa

SEQ ID NO: 491830 - DNA, 19 bp, Mus musculus
  siRNA target sequence for Abcb1a (NM_011076.1,2241-2259).
ctgaatggccttattttgt

SEQ ID NO: 491831 - DNA, 19 bp, Mus musculus
  siRNA target sequence for Abcb1a (NM_011076.1,2299-2317).
gccagcattctccgtaata

SEQ ID NO: 491832 - DNA, 19 bp, Mus musculus
  siRNA target sequence for Abcb1a (NM_011076.1,2300-2318).
ccagcattctccgtaatat

SEQ ID NO: 491833 - DNA, 19 bp, Mus musculus
  siRNA target sequence for Abcb1a (NM_011076.1,2301-2319).
cagcattctccgtaatatt

SEQ ID NO: 491834 - DNA, 19 bp, Mus musculus
  siRNA target sequence for Abcb1a (NM_011076.1,2311-2329).
cgtaatattttcaaaagtt

SEQ ID NO: 491835 - DNA, 19 bp, Mus musculus
  siRNA target sequence for Abcb1a (NM_011076.1,2614-2632).
gtctaggcttgctgtgatt

SEQ ID NO: 491836 - DNA, 19 bp, Mus musculus
  siRNA target sequence for Abcb1a (NM_011076.1,2665-2683).
catcatatccctaatctat

SEQ ID NO: 491837 - DNA, 19 bp, Mus musculus
  siRNA target sequence for Abcb1a (NM_011076.1,2684-2702).
ggctggcaactaacacttt

SEQ ID NO: 491838 - DNA, 19 bp, Mus musculus
  siRNA target sequence for Abcb1a (NM_011076.1,2685-2703).
gctggcaactaacactttt

SEQ ID NO: 491839 - DNA, 19 bp, Mus musculus
  siRNA target sequence for Abcb1a (NM_011076.1,2688-2706).
ggcaactaacacttttact

SEQ ID NO: 491840 - DNA, 19 bp, Mus musculus
  siRNA target sequence for Abcb1a (NM_011076.1,2690-2708).
caactaacacttttactct

SEQ ID NO: 491841 - DNA, 19 bp, Mus musculus
  siRNA target sequence for Abcb1a (NM_011076.1,2761-2779).
gtctggacaagcactgaaa

SEQ ID NO: 491842 - DNA, 19 bp, Mus musculus
  siRNA target sequence for Abcb1a (NM_011076.1,3053-3071).
gtattctcagctattgtct

SEQ ID NO: 491843 - DNA, 19 bp, Mus musculus
  siRNA target sequence for Abcb1a (NM_011076.1,3086-3104).
gtggggcaggtcagttcat

SEQ ID NO: 491844 - DNA, 19 bp, Mus musculus
  siRNA target sequence for Abcb1a (NM_011076.1,3197-3215).
ggcctaaagccgaatatgt

SEQ ID NO: 491845 - DNA, 19 bp, Mus musculus
  siRNA target sequence for Abcb1a (NM_011076.1,3198-3216).
gcctaaagccgaatatgtt

SEQ ID NO: 491846 - DNA, 19 bp, Mus musculus
  siRNA target sequence for Abcb1b (NM_011075.1,368-386).
ccaagcattactaatcaaa

SEQ ID NO: 491847 - DNA, 19 bp, Mus musculus
  siRNA target sequence for Abcb1b (NM_011075.1,393-411).
ccaacagtactctgatcat

SEQ ID NO: 491848 - DNA, 19 bp, Mus musculus
  siRNA target sequence for Abcb1b (NM_011075.1,439-457).
ggccatatacgcctactat

SEQ ID NO: 491849 - DNA, 19 bp, Mus musculus
  siRNA target sequence for Abcb1b (NM_011075.1,440-458).
gccatatacgcctactatt

SEQ ID NO: 491850 - DNA, 19 bp, Mus musculus
  siRNA target sequence for Abcb1b (NM_011075.1,668-686).
gacaaaattgggatgtttt

SEQ ID NO: 491851 - DNA, 19 bp, Mus musculus
  siRNA target sequence for Abcb1b (NM_011075.1,691-709).
gtccataaccacattttta

SEQ ID NO: 491852 - DNA, 19 bp, Mus musculus
  siRNA target sequence for Abcb1b (NM_011075.1,702-720).
catttttagccggttttat

SEQ ID NO: 491853 - DNA, 19 bp, Mus musculus
  siRNA target sequence for Abcb1b (NM_011075.1,710-728).
gccggttttatcataggat

SEQ ID NO: 491854 - DNA, 19 bp, Mus musculus
  siRNA target sequence for Abcb1b (NM_011075.1,711-729).
ccggttttatcataggatt

SEQ ID NO: 491855 - DNA, 19 bp, Mus musculus
  siRNA target sequence for Abcb1b (NM_011075.1,763-781).
ggctgtcagccctcttatt

SEQ ID NO: 491856 - DNA, 19 bp, Mus musculus
  siRNA target sequence for Abcb1b (NM_011075.1,772-790).
ccctcttattggattgtca

SEQ ID NO: 491857 - DNA, 19 bp, Mus musculus
  siRNA target sequence for Abcb1b (NM_011075.1,773-791).
cctcttattggattgtcat

SEQ ID NO: 491858 - DNA, 19 bp, Mus musculus
  siRNA target sequence for Abcb1b (NM_011075.1,799-817).
gtgggcaaaggtattgact

SEQ ID NO: 491859 - DNA, 19 bp, Mus musculus
  siRNA target sequence for Abcb1b (NM_011075.1,933-951).
ggtacaataaaaatttaga

SEQ ID NO: 491860 - DNA, 19 bp, Mus musculus
  siRNA target sequence for Abcb1b (NM_011075.1,934-952).
gtacaataaaaatttagaa

SEQ ID NO: 491861 - DNA, 19 bp, Mus musculus
  siRNA target sequence for Abcb1b (NM_011075.1,957-975).
ctaaaaatgttggcataaa

SEQ ID NO: 491862 - DNA, 19 bp, Mus musculus
  siRNA target sequence for Abcb1b (NM_011075.1,985-1003).
cacagccagcatttcgata

SEQ ID NO: 491863 - DNA, 19 bp, Mus musculus
  siRNA target sequence for Abcb1b (NM_011075.1,1059-1077).
catccttggtcctctcaaa

SEQ ID NO: 491864 - DNA, 19 bp, Mus musculus
  siRNA target sequence for Abcb1b (NM_011075.1,1106-1124).
gtcttcttctctattttgt

SEQ ID NO: 491865 - DNA, 19 bp, Mus musculus
  siRNA target sequence for Abcb1b (NM_011075.1,1123-1141).
gttggggacttttagtatt

SEQ ID NO: 491866 - DNA, 19 bp, Mus musculus
  siRNA target sequence for Abcb1b (NM_011075.1,1240-1258).
ctcaacaaagggctacaaa

SEQ ID NO: 491867 - DNA, 19 bp, Mus musculus
  siRNA target sequence for Abcb1b (NM_011075.1,1251-1269).
gctacaaaccagacagtat

SEQ ID NO: 491868 - DNA, 19 bp, Mus musculus
  siRNA target sequence for Abcb1b (NM_011075.1,1266-1284).
gtataatgggaaacttaga

SEQ ID NO: 491869 - DNA, 19 bp, Mus musculus
  siRNA target sequence for Abcb1b (NM_011075.1,1311-1329).
catcgagaagcgaagttca

SEQ ID NO: 491870 - DNA, 19 bp, Mus musculus
  siRNA target sequence for Abcb1b (NM_011075.1,1314-1332).
cgagaagcgaagttcagat

SEQ ID NO: 491871 - DNA, 19 bp, Mus musculus
  siRNA target sequence for Abcb1b (NM_011075.1,1995-2013).
ctagaggaaatgaaattga

SEQ ID NO: 491872 - DNA, 19 bp, Mus musculus
  siRNA target sequence for Abcb1b (NM_011075.1,2088-2106).
ctttaataaggagatcaat

SEQ ID NO: 491873 - DNA, 19 bp, Mus musculus
  siRNA target sequence for Abcb1b (NM_011075.1,2135-2153).
caagagagaagacttagta

SEQ ID NO: 491874 - DNA, 19 bp, Mus musculus
  siRNA target sequence for Abcb1b (NM_011075.1,2138-2156).
gagagaagacttagtatga

SEQ ID NO: 491875 - DNA, 19 bp, Mus musculus
  siRNA target sequence for Abcb1b (NM_011075.1,2196-2214).
ggcggatcctaaatctaaa

SEQ ID NO: 491876 - DNA, 19 bp, Mus musculus
  siRNA target sequence for Abcb1b (NM_011075.1,2197-2215).
gcggatcctaaatctaaat

SEQ ID NO: 491877 - DNA, 19 bp, Mus musculus
  siRNA target sequence for Abcb1b (NM_011075.1,2199-2217).
ggatcctaaatctaaatct

SEQ ID NO: 491878 - DNA, 19 bp, Mus musculus
  siRNA target sequence for Abcb1b (NM_011075.1,2220-2238).
gtgaatggccttatttact

SEQ ID NO: 491879 - DNA, 19 bp, Mus musculus
  siRNA target sequence for Abcb1b (NM_011075.1,2244-2262).
gcgtactttgcgctgttat

SEQ ID NO: 491880 - DNA, 19 bp, Mus musculus
  siRNA target sequence for Abcb1b (NM_011075.1,2245-2263).
cgtactttgcgctgttata

SEQ ID NO: 491881 - DNA, 19 bp, Mus musculus
  siRNA target sequence for Abcb1b (NM_011075.1,2246-2264).
gtactttgcgctgttataa

SEQ ID NO: 491882 - DNA, 19 bp, Mus musculus
  siRNA target sequence for Abcb1b (NM_011075.1,2305-2323).
gattgtaggggttttttca

SEQ ID NO: 491883 - DNA, 19 bp, Mus musculus
  siRNA target sequence for Abcb1b (NM_011075.1,2314-2332).
ggttttttcaagagatgat

SEQ ID NO: 491884 - DNA, 19 bp, Mus musculus
  siRNA target sequence for Abcb1b (NM_011075.1,2339-2357).
gaaactaaacgacagaatt

SEQ ID NO: 491885 - DNA, 19 bp, Mus musculus
  siRNA target sequence for Abcb1b (NM_011075.1,2343-2361).
ctaaacgacagaattgtaa

SEQ ID NO: 491886 - DNA, 19 bp, Mus musculus
  siRNA target sequence for Abcb1b (NM_011075.1,2395-2413).
gatttcttttgttacatat

SEQ ID NO: 491887 - DNA, 19 bp, Mus musculus
  siRNA target sequence for Abcb1b (NM_011075.1,2511-2529).
ggttcgatgaccataagaa

SEQ ID NO: 491888 - DNA, 19 bp, Mus musculus
  siRNA target sequence for Abcb1b (NM_011075.1,2557-2575).
cgccagtgatgcttctagt

SEQ ID NO: 491889 - DNA, 19 bp, Mus musculus
  siRNA target sequence for Abcb1b (NM_011075.1,2593-2611).
cgccaggcttgctgtagtt

SEQ ID NO: 491890 - DNA, 19 bp, Mus musculus
  siRNA target sequence for Abcb1b (NM_011075.1,2678-2696).
cttctacttgtagtaatta

SEQ ID NO: 491891 - DNA, 19 bp, Mus musculus
  siRNA target sequence for Abcb1b (NM_011075.1,2714-2732).
ggcggaattattgaaatga

SEQ ID NO: 491892 - DNA, 19 bp, Mus musculus
  siRNA target sequence for Abcb1b (NM_011075.1,3058-3076).
catggcagctgggaatact

SEQ ID NO: 491893 - DNA, 19 bp, Mus musculus
  siRNA target sequence for Abcb1b (NM_011075.1,3061-3079).
ggcagctgggaatactagt

SEQ ID NO: 491894 - DNA, 19 bp, Mus musculus
  siRNA target sequence for Abcb1b (NM_011075.1,3062-3080).
gcagctgggaatactagtt

SEQ ID NO: 491895 - DNA, 19 bp, Mus musculus
  siRNA target sequence for Abcb1b (NM_011075.1,3065-3083).
gctgggaatactagttcat

SEQ ID NO: 491896 - DNA, 19 bp, Mus musculus
  siRNA target sequence for Abcb1b (NM_011075.1,3066-3084).
ctgggaatactagttcatt

SEQ ID NO: 491897 - DNA, 19 bp, Mus musculus
  siRNA target sequence for Abcb1b (NM_011075.1,3070-3088).
gaatactagttcatttgct

SEQ ID NO: 491898 - DNA, 19 bp, Mus musculus
  siRNA target sequence for Abcb1b (NM_011075.1,3178-3196).
cttgaagcctactctgtta

SEQ ID NO: 491899 - DNA, 19 bp, Mus musculus
  siRNA target sequence for Abcb1b (NM_011075.1,3193-3211).
gttagaaggaaatgtaaaa

SEQ ID NO: 491900 - DNA, 19 bp, Mus musculus
  siRNA target sequence for Abcb4 (NM_008830.1,490-508).
gctaaatccaggaagaatt

SEQ ID NO: 491901 - DNA, 19 bp, Mus musculus
  siRNA target sequence for Abcb4 (NM_008830.1,525-543).
ctagatatgcatactacta

SEQ ID NO: 491902 - DNA, 19 bp, Mus musculus
  siRNA target sequence for Abcb4 (NM_008830.1,576-594).
cctatatccaagtctcatt

SEQ ID NO: 491903 - DNA, 19 bp, Mus musculus
  siRNA target sequence for Abcb4 (NM_008830.1,605-623).
gcagctggccgacaaataa

SEQ ID NO: 491904 - DNA, 19 bp, Mus musculus
  siRNA target sequence for Abcb4 (NM_008830.1,608-626).
gctggccgacaaataaaga

SEQ ID NO: 491905 - DNA, 19 bp, Mus musculus
  siRNA target sequence for Abcb4 (NM_008830.1,703-721).
caacacacgtctaacagat

SEQ ID NO: 491906 - DNA, 19 bp, Mus musculus
  siRNA target sequence for Abcb4 (NM_008830.1,752-770).
gacaaggttggaatgttct

SEQ ID NO: 491907 - DNA, 19 bp, Mus musculus
  siRNA target sequence for Abcb4 (NM_008830.1,754-772).
caaggttggaatgttcttt

SEQ ID NO: 491908 - DNA, 19 bp, Mus musculus
  siRNA target sequence for Abcb4 (NM_008830.1,757-775).
ggttggaatgttctttcaa

SEQ ID NO: 491909 - DNA, 19 bp, Mus musculus
  siRNA target sequence for Abcb4 (NM_008830.1,773-791).
caagcaatagccacgtttt

SEQ ID NO: 491910 - DNA, 19 bp, Mus musculus
  siRNA target sequence for Abcb4 (NM_008830.1,786-804).
cgttttttgcaggattcat

SEQ ID NO: 491911 - DNA, 19 bp, Mus musculus
  siRNA target sequence for Abcb4 (NM_008830.1,876-894).
cagctgtttgggcaaagat

SEQ ID NO: 491912 - DNA, 19 bp, Mus musculus
  siRNA target sequence for Abcb4 (NM_008830.1,892-910).
gatactctcaacatttagt

SEQ ID NO: 491913 - DNA, 19 bp, Mus musculus
  siRNA target sequence for Abcb4 (NM_008830.1,917-935).
gagctagctgcatatgcaa

SEQ ID NO: 491914 - DNA, 19 bp, Mus musculus
  siRNA target sequence for Abcb4 (NM_008830.1,919-937).
gctagctgcatatgcaaaa

SEQ ID NO: 491915 - DNA, 19 bp, Mus musculus
  siRNA target sequence for Abcb4 (NM_008830.1,1040-1058).
gccaaaaagattggaatta

SEQ ID NO: 491916 - DNA, 19 bp, Mus musculus
  siRNA target sequence for Abcb4 (NM_008830.1,1078-1096).
catctccatgggtattgct

SEQ ID NO: 491917 - DNA, 19 bp, Mus musculus
  siRNA target sequence for Abcb4 (NM_008830.1,1139-1157).
ggatccactctggttatat

SEQ ID NO: 491918 - DNA, 19 bp, Mus musculus
  siRNA target sequence for Abcb4 (NM_008830.1,1144-1162).
cactctggttatatcaaaa

SEQ ID NO: 491919 - DNA, 19 bp, Mus musculus
  siRNA target sequence for Abcb4 (NM_008830.1,1151-1169).
gttatatcaaaagaatata

SEQ ID NO: 491920 - DNA, 19 bp, Mus musculus
  siRNA target sequence for Abcb4 (NM_008830.1,1181-1199).
gcaatgacagtcttcttct

SEQ ID NO: 491921 - DNA, 19 bp, Mus musculus
  siRNA target sequence for Abcb4 (NM_008830.1,1204-1222).
cctcatcggggctttcagt

SEQ ID NO: 491922 - DNA, 19 bp, Mus musculus
  siRNA target sequence for Abcb4 (NM_008830.1,1228-1246).
gcaggctgccccctgtatt

SEQ ID NO: 491923 - DNA, 19 bp, Mus musculus
  siRNA target sequence for Abcb4 (NM_008830.1,1247-1265).
gatgctttcgctaatgcaa

SEQ ID NO: 491924 - DNA, 19 bp, Mus musculus
  siRNA target sequence for Abcb4 (NM_008830.1,1269-1287).
gagcagcctatgtgatctt

SEQ ID NO: 491925 - DNA, 19 bp, Mus musculus
  siRNA target sequence for Abcb4 (NM_008830.1,1291-1309).
cattattgataataatcct

SEQ ID NO: 491926 - DNA, 19 bp, Mus musculus
  siRNA target sequence for Abcb4 (NM_008830.1,1394-1412).
ccatctcgggctaatatca

SEQ ID NO: 491927 - DNA, 19 bp, Mus musculus
  siRNA target sequence for Abcb4 (NM_008830.1,1395-1413).
catctcgggctaatatcaa

SEQ ID NO: 491928 - DNA, 19 bp, Mus musculus
  siRNA target sequence for Abcb4 (NM_008830.1,1398-1416).
ctcgggctaatatcaagat

SEQ ID NO: 491929 - DNA, 19 bp, Mus musculus
  siRNA target sequence for Abcb4 (NM_008830.1,1400-1418).
cgggctaatatcaagatct

SEQ ID NO: 491930 - DNA, 19 bp, Mus musculus
  siRNA target sequence for Abcb4 (NM_008830.1,1401-1419).
gggctaatatcaagatctt

SEQ ID NO: 491931 - DNA, 19 bp, Mus musculus
  siRNA target sequence for Abcb4 (NM_008830.1,1403-1421).
gctaatatcaagatcttga

SEQ ID NO: 491932 - DNA, 19 bp, Mus musculus
  siRNA target sequence for Abcb4 (NM_008830.1,1404-1422).
ctaatatcaagatcttgaa

SEQ ID NO: 491933 - DNA, 19 bp, Mus musculus
  siRNA target sequence for Abcb4 (NM_008830.1,1525-1543).
ccccacagagggtaagatt

SEQ ID NO: 491934 - DNA, 19 bp, Mus musculus
  siRNA target sequence for Abcb4 (NM_008830.1,1526-1544).
cccacagagggtaagatta

SEQ ID NO: 491935 - DNA, 19 bp, Mus musculus
  siRNA target sequence for Abcb4 (NM_008830.1,1530-1548).
cagagggtaagattagcat

SEQ ID NO: 491936 - DNA, 19 bp, Mus musculus
  siRNA target sequence for Abcb4 (NM_008830.1,1581-1599).
ggtgtctaagggaaatcat

SEQ ID NO: 491937 - DNA, 19 bp, Mus musculus
  siRNA target sequence for Abcb4 (NM_008830.1,1616-1634).
gagcccgtgctgttctcta

SEQ ID NO: 491938 - DNA, 19 bp, Mus musculus
  siRNA target sequence for Abcb4 (NM_008830.1,1619-1637).
cccgtgctgttctctacta

SEQ ID NO: 491939 - DNA, 19 bp, Mus musculus
  siRNA target sequence for Abcb4 (NM_008830.1,1632-1650).
ctactacgatcgctgaaaa

SEQ ID NO: 491940 - DNA, 19 bp, Mus musculus
  siRNA target sequence for Abcb4 (NM_008830.1,1635-1653).
ctacgatcgctgaaaatat

SEQ ID NO: 491941 - DNA, 19 bp, Mus musculus
  siRNA target sequence for Abcb4 (NM_008830.1,1662-1680).
gccgtgggaatgtaacgat

SEQ ID NO: 491942 - DNA, 19 bp, Mus musculus
  siRNA target sequence for Abcb4 (NM_008830.1,2092-2110).
gatcctgtcagaagaattt

SEQ ID NO: 491943 - DNA, 19 bp, Mus musculus
  siRNA target sequence for Abcb4 (NM_008830.1,2160-2178).
gctggaaagcacgcatatt

SEQ ID NO: 491944 - DNA, 19 bp, Mus musculus
  siRNA target sequence for Abcb4 (NM_008830.1,2161-2179).
ctggaaagcacgcatattt

SEQ ID NO: 491945 - DNA, 19 bp, Mus musculus
  siRNA target sequence for Abcb4 (NM_008830.1,2168-2186).
gcacgcatatttaggaatt

SEQ ID NO: 491946 - DNA, 19 bp, Mus musculus
  siRNA target sequence for Abcb4 (NM_008830.1,2171-2189).
cgcatatttaggaattcta

SEQ ID NO: 491947 - DNA, 19 bp, Mus musculus
  siRNA target sequence for Abcb4 (NM_008830.1,2173-2191).
catatttaggaattctaca

SEQ ID NO: 491948 - DNA, 19 bp, Mus musculus
  siRNA target sequence for Abcb4 (NM_008830.1,2261-2279).
ccaccagtgtcttttctga

SEQ ID NO: 491949 - DNA, 19 bp, Mus musculus
  siRNA target sequence for Abcb4 (NM_008830.1,2420-2438).
gtgaagcagcaaaagtgta

SEQ ID NO: 491950 - DNA, 19 bp, Mus musculus
  siRNA target sequence for Abcb4 (NM_008830.1,2429-2447).
caaaagtgtaacatgttct

SEQ ID NO: 491951 - DNA, 19 bp, Mus musculus
  siRNA target sequence for Abcb4 (NM_008830.1,2545-2563).
ccggtccatggcctttaaa

SEQ ID NO: 491952 - DNA, 19 bp, Mus musculus
  siRNA target sequence for Abcb4 (NM_008830.1,2555-2573).
gcctttaaagcgatgctaa

SEQ ID NO: 491953 - DNA, 19 bp, Mus musculus
  siRNA target sequence for Abcb4 (NM_008830.1,2707-2725).
ccttggaaccggtattatt

SEQ ID NO: 491954 - DNA, 19 bp, Mus musculus
  siRNA target sequence for Abcb4 (NM_008830.1,2708-2726).
cttggaaccggtattatta

SEQ ID NO: 491955 - DNA, 19 bp, Mus musculus
  siRNA target sequence for Abcb4 (NM_008830.1,2711-2729).
ggaaccggtattattatat

SEQ ID NO: 491956 - DNA, 19 bp, Mus musculus
  siRNA target sequence for Abcb4 (NM_008830.1,2715-2733).
ccggtattattatatcatt

SEQ ID NO: 491957 - DNA, 19 bp, Mus musculus
  siRNA target sequence for Abcb4 (NM_008830.1,2716-2734).
cggtattattatatcattt

SEQ ID NO: 491958 - DNA, 19 bp, Mus musculus
  siRNA target sequence for Abcb4 (NM_008830.1,2717-2735).
ggtattattatatcattta

SEQ ID NO: 491959 - DNA, 19 bp, Mus musculus
  siRNA target sequence for Abcb4 (NM_008830.1,2822-2840).
ggcaatgccaagagagata

SEQ ID NO: 491960 - DNA, 19 bp, Mus musculus
  siRNA target sequence for Abcb4 (NM_008830.1,2823-2841).
gcaatgccaagagagataa

SEQ ID NO: 491961 - DNA, 19 bp, Mus musculus
  siRNA target sequence for Abcb4 (NM_008830.1,2878-2896).
ggcaatagaaaatattcga

SEQ ID NO: 491962 - DNA, 19 bp, Mus musculus
  siRNA target sequence for Abcb4 (NM_008830.1,2903-2921).
gtatccttgacccaagaaa

SEQ ID NO: 491963 - DNA, 19 bp, Mus musculus
  siRNA target sequence for Abcb4 (NM_008830.1,2930-2948).
gagtcaatgtatgttgaaa

SEQ ID NO: 491964 - DNA, 19 bp, Mus musculus
  siRNA target sequence for Abcb4 (NM_008830.1,2932-2950).
gtcaatgtatgttgaaaaa

SEQ ID NO: 491965 - DNA, 19 bp, Mus musculus
  siRNA target sequence for Abcb4 (NM_008830.1,2934-2952).
caatgtatgttgaaaaatt

SEQ ID NO: 491966 - DNA, 19 bp, Mus musculus
  siRNA target sequence for Abcb4 (NM_008830.1,2954-2972).
catggaccttacaggaatt

SEQ ID NO: 491967 - DNA, 19 bp, Mus musculus
  siRNA target sequence for Abcb4 (NM_008830.1,2987-3005).
cacatctacggcatcactt

SEQ ID NO: 491968 - DNA, 19 bp, Mus musculus
  siRNA target sequence for Abcb4 (NM_008830.1,3013-3031).
ctcccaagcattcatgtat

SEQ ID NO: 491969 - DNA, 19 bp, Mus musculus
  siRNA target sequence for Abcb4 (NM_008830.1,3053-3071).
cgatttggttcttacctaa

SEQ ID NO: 491970 - DNA, 19 bp, Mus musculus
  siRNA target sequence for Abcb4 (NM_008830.1,3059-3077).
ggttcttacctaattgtga

SEQ ID NO: 491971 - DNA, 19 bp, Mus musculus
  siRNA target sequence for Abcb4 (NM_008830.1,3060-3078).
gttcttacctaattgtgaa

SEQ ID NO: 491972 - DNA, 19 bp, Mus musculus
  siRNA target sequence for Abcb4 (NM_008830.1,3081-3099).
gacatatgcgcttcaaaga

SEQ ID NO: 491973 - DNA, 19 bp, Mus musculus
  siRNA target sequence for Abcb4 (NM_008830.1,3098-3116).
gatgtcattctggtctttt

SEQ ID NO: 491974 - DNA, 19 bp, Mus musculus
  siRNA target sequence for Abcb4 (NM_008830.1,3255-3273).
ggctgtggcctgataagtt

SEQ ID NO: 491975 - DNA, 19 bp, Mus musculus
  siRNA target sequence for Abcb4 (NM_008830.1,3256-3274).
gctgtggcctgataagttt

SEQ ID NO: 491976 - DNA, 19 bp, Mus musculus
  siRNA target sequence for Abcb4 (NM_008830.1,3282-3300).
gcgtgacatttaatgaagt

SEQ ID NO: 491977 - DNA, 19 bp, Mus musculus
  siRNA target sequence for Abcb4 (NM_008830.1,3592-3610).
ccgggtcgtgcctcatgat

SEQ ID NO: 491978 - DNA, 19 bp, Mus musculus
  siRNA target sequence for Abcb4 (NM_008830.1,3594-3612).
gggtcgtgcctcatgatga

SEQ ID NO: 491979 - DNA, 19 bp, Mus musculus
  siRNA target sequence for Abcb6 (NM_023732.2,368-386).
ctcgggtggccccatatgt

SEQ ID NO: 491980 - DNA, 19 bp, Mus musculus
  siRNA target sequence for Abcb6 (NM_023732.2,646-664).
gagaacttggccctagtat

SEQ ID NO: 491981 - DNA, 19 bp, Mus musculus
  siRNA target sequence for Abcb6 (NM_023732.2,747-765).
gacctctggagggctattt

SEQ ID NO: 491982 - DNA, 19 bp, Mus musculus
  siRNA target sequence for Abcb6 (NM_023732.2,749-767).
cctctggagggctatttat

SEQ ID NO: 491983 - DNA, 19 bp, Mus musculus
  siRNA target sequence for Abcb6 (NM_023732.2,809-827).
ctctacacgttcatgaaga

SEQ ID NO: 491984 - DNA, 19 bp, Mus musculus
  siRNA target sequence for Abcb6 (NM_023732.2,907-925).
ctgctgagtagctacttgt

SEQ ID NO: 491985 - DNA, 19 bp, Mus musculus
  siRNA target sequence for Abcb6 (NM_023732.2,949-967).
cagctgatagtgctcatat

SEQ ID NO: 491986 - DNA, 19 bp, Mus musculus
  siRNA target sequence for Abcb6 (NM_023732.2,984-1002).
gttggaacgagcactcaat

SEQ ID NO: 491987 - DNA, 19 bp, Mus musculus
  siRNA target sequence for Abcb6 (NM_023732.2,988-1006).
gaacgagcactcaatgtgt

SEQ ID NO: 491988 - DNA, 19 bp, Mus musculus
  siRNA target sequence for Abcb6 (NM_023732.2,1281-1299).
cgtggaccggggaacatct

SEQ ID NO: 491989 - DNA, 19 bp, Mus musculus
  siRNA target sequence for Abcb6 (NM_023732.2,1282-1300).
gtggaccggggaacatcta

SEQ ID NO: 491990 - DNA, 19 bp, Mus musculus
  siRNA target sequence for Abcb6 (NM_023732.2,1284-1302).
ggaccggggaacatctagt

SEQ ID NO: 491991 - DNA, 19 bp, Mus musculus
  siRNA target sequence for Abcb6 (NM_023732.2,1377-1395).
cttcagcatgttcttcaat

SEQ ID NO: 491992 - DNA, 19 bp, Mus musculus
  siRNA target sequence for Abcb6 (NM_023732.2,1461-1479).
cgagtggagagccaagttt

SEQ ID NO: 491993 - DNA, 19 bp, Mus musculus
  siRNA target sequence for Abcb6 (NM_023732.2,1472-1490).
ccaagtttcgccgtgatat

SEQ ID NO: 491994 - DNA, 19 bp, Mus musculus
  siRNA target sequence for Abcb6 (NM_023732.2,1565-1583).
gtgccgagggttatgaagt

SEQ ID NO: 491995 - DNA, 19 bp, Mus musculus
  siRNA target sequence for Abcb6 (NM_023732.2,1568-1586).
ccgagggttatgaagtaga

SEQ ID NO: 491996 - DNA, 19 bp, Mus musculus
  siRNA target sequence for Abcb6 (NM_023732.2,1618-1636).
ggtttggagtggaagtcaa

SEQ ID NO: 491997 - DNA, 19 bp, Mus musculus
  siRNA target sequence for Abcb6 (NM_023732.2,1703-1721).
ccttgctttgcgcatactt

SEQ ID NO: 491998 - DNA, 19 bp, Mus musculus
  siRNA target sequence for Abcb6 (NM_023732.2,1769-1787).
cttacatcacccaactgta

SEQ ID NO: 491999 - DNA, 19 bp, Mus musculus
  siRNA target sequence for Abcb6 (NM_023732.2,1820-1838).
ggatgatccagactaactt

SEQ ID NO: 492000 - DNA, 19 bp, Mus musculus
  siRNA target sequence for Abcb6 (NM_023732.2,1824-1842).
gatccagactaacttcatt

SEQ ID NO: 492001 - DNA, 19 bp, Mus musculus
  siRNA target sequence for Abcb6 (NM_023732.2,1828-1846).
cagactaacttcattgaca

SEQ ID NO: 492002 - DNA, 19 bp, Mus musculus
  siRNA target sequence for Abcb6 (NM_023732.2,1970-1988).
ggcaggagaccttacaaga

SEQ ID NO: 492003 - DNA, 19 bp, Mus musculus
  siRNA target sequence for Abcb6 (NM_023732.2,2044-2062).
gcaggaaagagcacaattt

SEQ ID NO: 492004 - DNA, 19 bp, Mus musculus
  siRNA target sequence for Abcb6 (NM_023732.2,2045-2063).
caggaaagagcacaatttt

SEQ ID NO: 492005 - DNA, 19 bp, Mus musculus
  siRNA target sequence for Abcb6 (NM_023732.2,2057-2075).
caattttgcgcctgctatt

SEQ ID NO: 492006 - DNA, 19 bp, Mus musculus
  siRNA target sequence for Abcb6 (NM_023732.2,2096-2114).
ctggctgcatccgaataga

SEQ ID NO: 492007 - DNA, 19 bp, Mus musculus
  siRNA target sequence for Abcb6 (NM_023732.2,2145-2163).
ctctctccgatctcacatt

SEQ ID NO: 492008 - DNA, 19 bp, Mus musculus
  siRNA target sequence for Abcb6 (NM_023732.2,2196-2214).
cgacaccattgctaacaat

SEQ ID NO: 492009 - DNA, 19 bp, Mus musculus
  siRNA target sequence for Abcb6 (NM_023732.2,2197-2215).
gacaccattgctaacaata

SEQ ID NO: 492010 - DNA, 19 bp, Mus musculus
  siRNA target sequence for Abcb6 (NM_023732.2,2429-2447).
cagcactggatacatctaa

SEQ ID NO: 492011 - DNA, 19 bp, Mus musculus
  siRNA target sequence for Abcb6 (NM_023732.2,2556-2574).
caaggacggttgcatcata

SEQ ID NO: 492012 - DNA, 19 bp, Mus musculus
  siRNA target sequence for Abcb6 (NM_023732.2,2560-2578).
gacggttgcatcatagaga

SEQ ID NO: 492013 - DNA, 19 bp, Mus musculus
  siRNA target sequence for Abcb6 (NM_023732.2,2601-2619).
gtcccgaggtggcgtttat

SEQ ID NO: 492014 - DNA, 19 bp, Mus musculus
  siRNA target sequence for Abcb9 (NM_019875.1,337-355).
ggaggacatccgacacttt

SEQ ID NO: 492015 - DNA, 19 bp, Mus musculus
  siRNA target sequence for Abcb9 (NM_019875.1,338-356).
gaggacatccgacacttta

SEQ ID NO: 492016 - DNA, 19 bp, Mus musculus
  siRNA target sequence for Abcb9 (NM_019875.1,341-359).
gacatccgacactttaaca

SEQ ID NO: 492017 - DNA, 19 bp, Mus musculus
  siRNA target sequence for Abcb9 (NM_019875.1,729-747).
cgggagccacactacagaa

SEQ ID NO: 492018 - DNA, 19 bp, Mus musculus
  siRNA target sequence for Abcb9 (NM_019875.1,937-955).
ctcattggccgcaggtatt

SEQ ID NO: 492019 - DNA, 19 bp, Mus musculus
  siRNA target sequence for Abcb9 (NM_019875.1,1036-1054).
ggagacaagcttctttgat

SEQ ID NO: 492020 - DNA, 19 bp, Mus musculus
  siRNA target sequence for Abcb9 (NM_019875.1,1122-1140).
cccagaacatcaacatctt

SEQ ID NO: 492021 - DNA, 19 bp, Mus musculus
  siRNA target sequence for Abcb9 (NM_019875.1,1164-1182).
cgggcgtggtggtcttcat

SEQ ID NO: 492022 - DNA, 19 bp, Mus musculus
  siRNA target sequence for Abcb9 (NM_019875.1,1317-1335).
ccacagccgaggaaaccat

SEQ ID NO: 492023 - DNA, 19 bp, Mus musculus
  siRNA target sequence for Abcb9 (NM_019875.1,1559-1577).
gccttcatcatctacgaat

SEQ ID NO: 492024 - DNA, 19 bp, Mus musculus
  siRNA target sequence for Abcb9 (NM_019875.1,1778-1796).
caggtcctacagaatgtct

SEQ ID NO: 492025 - DNA, 19 bp, Mus musculus
  siRNA target sequence for Abcb9 (NM_019875.1,1932-1950).
gcgcctatgaccacaagta

SEQ ID NO: 492026 - DNA, 19 bp, Mus musculus
  siRNA target sequence for Abcb9 (NM_019875.1,2196-2214).
ggaacccacctgtgcttat

SEQ ID NO: 492027 - DNA, 19 bp, Mus musculus
  siRNA target sequence for Abcb9 (NM_019875.1,2292-2310).
gacacacggtgctcatcat

SEQ ID NO: 492028 - DNA, 19 bp, Mus musculus
  siRNA target sequence for Abcb9 (NM_019875.1,2496-2514).
ccagcaacactgaacacaa

SEQ ID NO: 492029 - DNA, 19 bp, Mus musculus
  siRNA target sequence for Abcc1 (NM_008576.1,74-92).
gcaaccccgactttaccaa

SEQ ID NO: 492030 - DNA, 19 bp, Mus musculus
  siRNA target sequence for Abcc1 (NM_008576.1,152-170).
ccctctacttcttctatct

SEQ ID NO: 492031 - DNA, 19 bp, Mus musculus
  siRNA target sequence for Abcc1 (NM_008576.1,254-272).
gctgggcagacctcttcta

SEQ ID NO: 492032 - DNA, 19 bp, Mus musculus
  siRNA target sequence for Abcc1 (NM_008576.1,260-278).
cagacctcttctactcttt

SEQ ID NO: 492033 - DNA, 19 bp, Mus musculus
  siRNA target sequence for Abcc1 (NM_008576.1,352-370).
ctgctcgccacctttttga

SEQ ID NO: 492034 - DNA, 19 bp, Mus musculus
  siRNA target sequence for Abcc1 (NM_008576.1,354-372).
gctcgccacctttttgata

SEQ ID NO: 492035 - DNA, 19 bp, Mus musculus
  siRNA target sequence for Abcc1 (NM_008576.1,394-412).
gtccaatcctcgggaatta

SEQ ID NO: 492036 - DNA, 19 bp, Mus musculus
  siRNA target sequence for Abcc1 (NM_008576.1,404-422).
cgggaattatgcttacttt

SEQ ID NO: 492037 - DNA, 19 bp, Mus musculus
  siRNA target sequence for Abcc1 (NM_008576.1,406-424).
ggaattatgcttactttct

SEQ ID NO: 492038 - DNA, 19 bp, Mus musculus
  siRNA target sequence for Abcc1 (NM_008576.1,448-466).
cttgccatcttgagatcta

SEQ ID NO: 492039 - DNA, 19 bp, Mus musculus
  siRNA target sequence for Abcc1 (NM_008576.1,468-486).
gatcatctctgccttaaaa

SEQ ID NO: 492040 - DNA, 19 bp, Mus musculus
  siRNA target sequence for Abcc1 (NM_008576.1,512-530).
gagattccacgttctatct

SEQ ID NO: 492041 - DNA, 19 bp, Mus musculus
  siRNA target sequence for Abcc1 (NM_008576.1,514-532).
gattccacgttctatctgt

SEQ ID NO: 492042 - DNA, 19 bp, Mus musculus
  siRNA target sequence for Abcc1 (NM_008576.1,518-536).
ccacgttctatctgtactt

SEQ ID NO: 492043 - DNA, 19 bp, Mus musculus
  siRNA target sequence for Abcc1 (NM_008576.1,604-622).
gtccatgaccggaatccat

SEQ ID NO: 492044 - DNA, 19 bp, Mus musculus
  siRNA target sequence for Abcc1 (NM_008576.1,716-734).
gtgacctctggtcattgaa

SEQ ID NO: 492045 - DNA, 19 bp, Mus musculus
  siRNA target sequence for Abcc1 (NM_008576.1,811-829).
cagcctgtacggattgtgt

SEQ ID NO: 492046 - DNA, 19 bp, Mus musculus
  siRNA target sequence for Abcc1 (NM_008576.1,828-846).
gtatgcccctcccaaagat

SEQ ID NO: 492047 - DNA, 19 bp, Mus musculus
  siRNA target sequence for Abcc1 (NM_008576.1,938-956).
ctctgttcaaggtgttata

SEQ ID NO: 492048 - DNA, 19 bp, Mus musculus
  siRNA target sequence for Abcc1 (NM_008576.1,940-958).
ctgttcaaggtgttataca

SEQ ID NO: 492049 - DNA, 19 bp, Mus musculus
  siRNA target sequence for Abcc1 (NM_008576.1,948-966).
ggtgttatacaagactttt

SEQ ID NO: 492050 - DNA, 19 bp, Mus musculus
  siRNA target sequence for Abcc1 (NM_008576.1,951-969).
gttatacaagacttttggt

SEQ ID NO: 492051 - DNA, 19 bp, Mus musculus
  siRNA target sequence for Abcc1 (NM_008576.1,1080-1098).
cgactggcagggctacttt

SEQ ID NO: 492052 - DNA, 19 bp, Mus musculus
  siRNA target sequence for Abcc1 (NM_008576.1,1081-1099).
gactggcagggctactttt

SEQ ID NO: 492053 - DNA, 19 bp, Mus musculus
  siRNA target sequence for Abcc1 (NM_008576.1,1144-1162).
ctccaccagtactttcata

SEQ ID NO: 492054 - DNA, 19 bp, Mus musculus
  siRNA target sequence for Abcc1 (NM_008576.1,1201-1219).
gtgggcgctgtctatcgta

SEQ ID NO: 492055 - DNA, 19 bp, Mus musculus
  siRNA target sequence for Abcc1 (NM_008576.1,1216-1234).
cgtaaggctcttttgatca

SEQ ID NO: 492056 - DNA, 19 bp, Mus musculus
  siRNA target sequence for Abcc1 (NM_008576.1,1256-1274).
ccacggtcggagagattgt

SEQ ID NO: 492057 - DNA, 19 bp, Mus musculus
  siRNA target sequence for Abcc1 (NM_008576.1,1259-1277).
cggtcggagagattgtcaa

SEQ ID NO: 492058 - DNA, 19 bp, Mus musculus
  siRNA target sequence for Abcc1 (NM_008576.1,1315-1333).
gccacgtacattaacatga

SEQ ID NO: 492059 - DNA, 19 bp, Mus musculus
  siRNA target sequence for Abcc1 (NM_008576.1,1316-1334).
ccacgtacattaacatgat

SEQ ID NO: 492060 - DNA, 19 bp, Mus musculus
  siRNA target sequence for Abcc1 (NM_008576.1,1409-1427).
gagtggctgtgatgattct

SEQ ID NO: 492061 - DNA, 19 bp, Mus musculus
  siRNA target sequence for Abcc1 (NM_008576.1,1691-1709).
caacctttgctgtctttgt

SEQ ID NO: 492062 - DNA, 19 bp, Mus musculus
  siRNA target sequence for Abcc1 (NM_008576.1,1724-1742).
gaaatatcctagatgcaaa

SEQ ID NO: 492063 - DNA, 19 bp, Mus musculus
  siRNA target sequence for Abcc1 (NM_008576.1,1755-1773).
gtccctagccctgttcaat

SEQ ID NO: 492064 - DNA, 19 bp, Mus musculus
  siRNA target sequence for Abcc1 (NM_008576.1,1759-1777).
ctagccctgttcaatatct

SEQ ID NO: 492065 - DNA, 19 bp, Mus musculus
  siRNA target sequence for Abcc1 (NM_008576.1,1840-1858).
ctcaagcgtctcaggattt

SEQ ID NO: 492066 - DNA, 19 bp, Mus musculus
  siRNA target sequence for Abcc1 (NM_008576.1,1894-1912).
gagcggaggtcgatcaaga

SEQ ID NO: 492067 - DNA, 19 bp, Mus musculus
  siRNA target sequence for Abcc1 (NM_008576.1,2143-2161).
gcctggattcagaatgact

SEQ ID NO: 492068 - DNA, 19 bp, Mus musculus
  siRNA target sequence for Abcc1 (NM_008576.1,2162-2180).
ctctccgagagaacatact

SEQ ID NO: 492069 - DNA, 19 bp, Mus musculus
  siRNA target sequence for Abcc1 (NM_008576.1,2166-2184).
ccgagagaacatactgttt

SEQ ID NO: 492070 - DNA, 19 bp, Mus musculus
  siRNA target sequence for Abcc1 (NM_008576.1,2208-2226).
ctacaaggcagttatggaa

SEQ ID NO: 492071 - DNA, 19 bp, Mus musculus
  siRNA target sequence for Abcc1 (NM_008576.1,2538-2556).
ctcagagatgggttcttat

SEQ ID NO: 492072 - DNA, 19 bp, Mus musculus
  siRNA target sequence for Abcc1 (NM_008576.1,2654-2672).
gttcagggaaggagtcaaa

SEQ ID NO: 492073 - DNA, 19 bp, Mus musculus
  siRNA target sequence for Abcc1 (NM_008576.1,2667-2685).
gtcaaagccggtggaaaat

SEQ ID NO: 492074 - DNA, 19 bp, Mus musculus
  siRNA target sequence for Abcc1 (NM_008576.1,2817-2835).
gacgtggaagctaatggaa

SEQ ID NO: 492075 - DNA, 19 bp, Mus musculus
  siRNA target sequence for Abcc1 (NM_008576.1,2870-2888).
cagtgtactggaactacat

SEQ ID NO: 492076 - DNA, 19 bp, Mus musculus
  siRNA target sequence for Abcc1 (NM_008576.1,2872-2890).
gtgtactggaactacatga

SEQ ID NO: 492077 - DNA, 19 bp, Mus musculus
  siRNA target sequence for Abcc1 (NM_008576.1,2934-2952).
cctgtgcaaccatgtatct

SEQ ID NO: 492078 - DNA, 19 bp, Mus musculus
  siRNA target sequence for Abcc1 (NM_008576.1,3136-3154).
cacctggacctgctataca

SEQ ID NO: 492079 - DNA, 19 bp, Mus musculus
  siRNA target sequence for Abcc1 (NM_008576.1,3138-3156).
cctggacctgctatacaat

SEQ ID NO: 492080 - DNA, 19 bp, Mus musculus
  siRNA target sequence for Abcc1 (NM_008576.1,3163-3181).
cgatcacccatgagtttct

SEQ ID NO: 492081 - DNA, 19 bp, Mus musculus
  siRNA target sequence for Abcc1 (NM_008576.1,3254-3272).
cgcaggtcatcaagatgtt

SEQ ID NO: 492082 - DNA, 19 bp, Mus musculus
  siRNA target sequence for Abcc1 (NM_008576.1,3352-3370).
cccttgggtctggtttact

SEQ ID NO: 492083 - DNA, 19 bp, Mus musculus
  siRNA target sequence for Abcc1 (NM_008576.1,3357-3375).
gggtctggtttacttcttt

SEQ ID NO: 492084 - DNA, 19 bp, Mus musculus
  siRNA target sequence for Abcc1 (NM_008576.1,3479-3497).
gtgtcatccgtgcttttga

SEQ ID NO: 492085 - DNA, 19 bp, Mus musculus
  siRNA target sequence for Abcc1 (NM_008576.1,3706-3724).
cagataactgcatacttga

SEQ ID NO: 492086 - DNA, 19 bp, Mus musculus
  siRNA target sequence for Abcc1 (NM_008576.1,3868-3886).
gtagagttccgggattact

SEQ ID NO: 492087 - DNA, 19 bp, Mus musculus
  siRNA target sequence for Abcc1 (NM_008576.1,3915-3933).
ggttctcaagcacataaat

SEQ ID NO: 492088 - DNA, 19 bp, Mus musculus
  siRNA target sequence for Abcc1 (NM_008576.1,3938-3956).
ccattgagggtggagaaaa

SEQ ID NO: 492089 - DNA, 19 bp, Mus musculus
  siRNA target sequence for Abcc1 (NM_008576.1,4005-4023).
gggtttgttccggatcaat

SEQ ID NO: 492090 - DNA, 19 bp, Mus musculus
  siRNA target sequence for Abcc1 (NM_008576.1,4007-4025).
gtttgttccggatcaatga

SEQ ID NO: 492091 - DNA, 19 bp, Mus musculus
  siRNA target sequence for Abcc1 (NM_008576.1,4031-4049).
cagaaggggagatcatcat

SEQ ID NO: 492092 - DNA, 19 bp, Mus musculus
  siRNA target sequence for Abcc1 (NM_008576.1,4135-4153).
ggttccctccgcatgaact

SEQ ID NO: 492093 - DNA, 19 bp, Mus musculus
  siRNA target sequence for Abcc1 (NM_008576.1,4136-4154).
gttccctccgcatgaactt

SEQ ID NO: 492094 - DNA, 19 bp, Mus musculus
  siRNA target sequence for Abcc1 (NM_008576.1,4155-4173).
ggaccctttcagtcagtat

SEQ ID NO: 492095 - DNA, 19 bp, Mus musculus
  siRNA target sequence for Abcc1 (NM_008576.1,4158-4176).
ccctttcagtcagtattct

SEQ ID NO: 492096 - DNA, 19 bp, Mus musculus
  siRNA target sequence for Abcc1 (NM_008576.1,4210-4228).
cacctaaagggctttgtgt

SEQ ID NO: 492097 - DNA, 19 bp, Mus musculus
  siRNA target sequence for Abcc1 (NM_008576.1,4447-4465).
catcggcttaacaccataa

SEQ ID NO: 492098 - DNA, 19 bp, Mus musculus
  siRNA target sequence for Abcc1 (NM_008576.1,4451-4469).
ggcttaacaccataatgga

SEQ ID NO: 492099 - DNA, 19 bp, Mus musculus
  siRNA target sequence for Abcc10 (NM_145140.1,1046-1064).
ctgtgggcactggttcatt

SEQ ID NO: 492100 - DNA, 19 bp, Mus musculus
  siRNA target sequence for Abcc10 (NM_145140.1,1155-1173).
gccagcgaggtacatttct

SEQ ID NO: 492101 - DNA, 19 bp, Mus musculus
  siRNA target sequence for Abcc10 (NM_145140.1,1464-1482).
ccttcctggcccgagtttt

SEQ ID NO: 492102 - DNA, 19 bp, Mus musculus
  siRNA target sequence for Abcc10 (NM_145140.1,1468-1486).
cctggcccgagttttccaa

SEQ ID NO: 492103 - DNA, 19 bp, Mus musculus
  siRNA target sequence for Abcc10 (NM_145140.1,1523-1541).
ctgtacagggcctttggat

SEQ ID NO: 492104 - DNA, 19 bp, Mus musculus
  siRNA target sequence for Abcc10 (NM_145140.1,1728-1746).
ggtatgaggtccgtaaagt

SEQ ID NO: 492105 - DNA, 19 bp, Mus musculus
  siRNA target sequence for Abcc10 (NM_145140.1,1990-2008).
gctggtacctgtcaacaaa

SEQ ID NO: 492106 - DNA, 19 bp, Mus musculus
  siRNA target sequence for Abcc10 (NM_145140.1,1994-2012).
gtacctgtcaacaaagtga

SEQ ID NO: 492107 - DNA, 19 bp, Mus musculus
  siRNA target sequence for Abcc10 (NM_145140.1,2094-2112).
gtggcattcgagtcatcaa

SEQ ID NO: 492108 - DNA, 19 bp, Mus musculus
  siRNA target sequence for Abcc10 (NM_145140.1,2096-2114).
ggcattcgagtcatcaaat

SEQ ID NO: 492109 - DNA, 19 bp, Mus musculus
  siRNA target sequence for Abcc10 (NM_145140.1,2097-2115).
gcattcgagtcatcaaatt

SEQ ID NO: 492110 - DNA, 19 bp, Mus musculus
  siRNA target sequence for Abcc10 (NM_145140.1,2149-2167).
gaaggcttgccggactaaa

SEQ ID NO: 492111 - DNA, 19 bp, Mus musculus
  siRNA target sequence for Abcc10 (NM_145140.1,2174-2192).
ggacgactccgtgttatca

SEQ ID NO: 492112 - DNA, 19 bp, Mus musculus
  siRNA target sequence for Abcc10 (NM_145140.1,2175-2193).
gacgactccgtgttatcaa

SEQ ID NO: 492113 - DNA, 19 bp, Mus musculus
  siRNA target sequence for Abcc10 (NM_145140.1,2177-2195).
cgactccgtgttatcaaat

SEQ ID NO: 492114 - DNA, 19 bp, Mus musculus
  siRNA target sequence for Abcc10 (NM_145140.1,2178-2196).
gactccgtgttatcaaata

SEQ ID NO: 492115 - DNA, 19 bp, Mus musculus
  siRNA target sequence for Abcc10 (NM_145140.1,2180-2198).
ctccgtgttatcaaatact

SEQ ID NO: 492116 - DNA, 19 bp, Mus musculus
  siRNA target sequence for Abcc10 (NM_145140.1,2353-2371).
cttcccctgggtgatcaat

SEQ ID NO: 492117 - DNA, 19 bp, Mus musculus
  siRNA target sequence for Abcc10 (NM_145140.1,2375-2393).
ctcttggaatccaaagtat

SEQ ID NO: 492118 - DNA, 19 bp, Mus musculus
  siRNA target sequence for Abcc10 (NM_145140.1,2437-2455).
ccctgaggcctattacagt

SEQ ID NO: 492119 - DNA, 19 bp, Mus musculus
  siRNA target sequence for Abcc10 (NM_145140.1,2548-2566).
cagtcacctccaagtgaaa

SEQ ID NO: 492120 - DNA, 19 bp, Mus musculus
  siRNA target sequence for Abcc10 (NM_145140.1,2550-2568).
gtcacctccaagtgaaaaa

SEQ ID NO: 492121 - DNA, 19 bp, Mus musculus
  siRNA target sequence for Abcc10 (NM_145140.1,2746-2764).
cctctttgggaagacattt

SEQ ID NO: 492122 - DNA, 19 bp, Mus musculus
  siRNA target sequence for Abcc10 (NM_145140.1,2794-2812).
ggcctgcgccctcaatgat

SEQ ID NO: 492123 - DNA, 19 bp, Mus musculus
  siRNA target sequence for Abcc10 (NM_145140.1,2796-2814).
cctgcgccctcaatgatga

SEQ ID NO: 492124 - DNA, 19 bp, Mus musculus
  siRNA target sequence for Abcc10 (NM_145140.1,2797-2815).
ctgcgccctcaatgatgat

SEQ ID NO: 492125 - DNA, 19 bp, Mus musculus
  siRNA target sequence for Abcc10 (NM_145140.1,2799-2817).
gcgccctcaatgatgatct

SEQ ID NO: 492126 - DNA, 19 bp, Mus musculus
  siRNA target sequence for Abcc10 (NM_145140.1,2804-2822).
ctcaatgatgatctaagta

SEQ ID NO: 492127 - DNA, 19 bp, Mus musculus
  siRNA target sequence for Abcc10 (NM_145140.1,2975-2993).
gccaaccacctgttacaca

SEQ ID NO: 492128 - DNA, 19 bp, Mus musculus
  siRNA target sequence for Abcc10 (NM_145140.1,3188-3206).
ggccagtccccatctgtat

SEQ ID NO: 492129 - DNA, 19 bp, Mus musculus
  siRNA target sequence for Abcc10 (NM_145140.1,3565-3583).
gcacaaggctgcttccaat

SEQ ID NO: 492130 - DNA, 19 bp, Mus musculus
  siRNA target sequence for Abcc10 (NM_145140.1,3588-3606).
ccgcagacgtccacttcta

SEQ ID NO: 492131 - DNA, 19 bp, Mus musculus
  siRNA target sequence for Abcc10 (NM_145140.1,3610-3628).
catcgtgtatgcaaccatt

SEQ ID NO: 492132 - DNA, 19 bp, Mus musculus
  siRNA target sequence for Abcc10 (NM_145140.1,3736-3754).
ggcaccggtgactttctat

SEQ ID NO: 492133 - DNA, 19 bp, Mus musculus
  siRNA target sequence for Abcc10 (NM_145140.1,3738-3756).
caccggtgactttctatga

SEQ ID NO: 492134 - DNA, 19 bp, Mus musculus
  siRNA target sequence for Abcc10 (NM_145140.1,3740-3758).
ccggtgactttctatgact

SEQ ID NO: 492135 - DNA, 19 bp, Mus musculus
  siRNA target sequence for Abcc10 (NM_145140.1,3776-3794).
gtcttgaaccgcttctcat

SEQ ID NO: 492136 - DNA, 19 bp, Mus musculus
  siRNA target sequence for Abcc10 (NM_145140.1,4304-4322).
ggtctggtgagcagtttca

SEQ ID NO: 492137 - DNA, 19 bp, Mus musculus
  siRNA target sequence for Abcc10 (NM_145140.1,4355-4373).
cgactggaggagtattcct

SEQ ID NO: 492138 - DNA, 19 bp, Mus musculus
  siRNA target sequence for Abcc10 (NM_145140.1,4711-4729).
cctgttcagcgggactatt

SEQ ID NO: 492139 - DNA, 19 bp, Mus musculus
  siRNA target sequence for Abcc10 (NM_145140.1,4892-4910).
ctggcaagggctcttctta

SEQ ID NO: 492140 - DNA, 19 bp, Mus musculus
  siRNA target sequence for Abcc10 (NM_145140.1,4907-4925).
cttacagatgctaaaatct

SEQ ID NO: 492141 - DNA, 19 bp, Mus musculus
  siRNA target sequence for Abcc10 (NM_145140.1,5036-5054).
ctcaacacgatcctaaact

SEQ ID NO: 492142 - DNA, 19 bp, Mus musculus
  siRNA target sequence for Abcc10 (NM_145140.1,5038-5056).
caacacgatcctaaactct

SEQ ID NO: 492143 - DNA, 19 bp, Mus musculus
  siRNA target sequence for Abcc10 (NM_170680.1,225-243).
caccccaaggactaccaat

SEQ ID NO: 492144 - DNA, 19 bp, Mus musculus
  siRNA target sequence for Abcc12 (NM_172912.2,43-61).
gaaggcccgtaccttatct

SEQ ID NO: 492145 - DNA, 19 bp, Mus musculus
  siRNA target sequence for Abcc12 (NM_172912.2,89-107).
gatcctttgccgagagata

SEQ ID NO: 492146 - DNA, 19 bp, Mus musculus
  siRNA target sequence for Abcc12 (NM_172912.2,92-110).
cctttgccgagagatatga

SEQ ID NO: 492147 - DNA, 19 bp, Mus musculus
  siRNA target sequence for Abcc12 (NM_172912.2,187-205).
ctgtccttcgccacgtttt

SEQ ID NO: 492148 - DNA, 19 bp, Mus musculus
  siRNA target sequence for Abcc12 (NM_172912.2,209-227).
ggctcacaccggtgatgat

SEQ ID NO: 492149 - DNA, 19 bp, Mus musculus
  siRNA target sequence for Abcc12 (NM_172912.2,210-228).
gctcacaccggtgatgatt

SEQ ID NO: 492150 - DNA, 19 bp, Mus musculus
  siRNA target sequence for Abcc12 (NM_172912.2,218-236).
cggtgatgattcgaagtta

SEQ ID NO: 492151 - DNA, 19 bp, Mus musculus
  siRNA target sequence for Abcc12 (NM_172912.2,264-282).
gcccccactgtctccttat

SEQ ID NO: 492152 - DNA, 19 bp, Mus musculus
  siRNA target sequence for Abcc12 (NM_172912.2,268-286).
ccactgtctccttatgact

SEQ ID NO: 492153 - DNA, 19 bp, Mus musculus
  siRNA target sequence for Abcc12 (NM_172912.2,371-389).
gcgtggtctggaaattcca

SEQ ID NO: 492154 - DNA, 19 bp, Mus musculus
  siRNA target sequence for Abcc12 (NM_172912.2,578-596).
cccttgcctgggccataaa

SEQ ID NO: 492155 - DNA, 19 bp, Mus musculus
  siRNA target sequence for Abcc12 (NM_172912.2,579-597).
ccttgcctgggccataaat

SEQ ID NO: 492156 - DNA, 19 bp, Mus musculus
  siRNA target sequence for Abcc12 (NM_172912.2,580-598).
cttgcctgggccataaatt

SEQ ID NO: 492157 - DNA, 19 bp, Mus musculus
  siRNA target sequence for Abcc12 (NM_172912.2,632-650).
ccacgctaatcttcgaaaa

SEQ ID NO: 492158 - DNA, 19 bp, Mus musculus
  siRNA target sequence for Abcc12 (NM_172912.2,635-653).
cgctaatcttcgaaaacct

SEQ ID NO: 492159 - DNA, 19 bp, Mus musculus
  siRNA target sequence for Abcc12 (NM_172912.2,659-677).
cctttaagacgttaactca

SEQ ID NO: 492160 - DNA, 19 bp, Mus musculus
  siRNA target sequence for Abcc12 (NM_172912.2,683-701).
ctgcaggcgaggtactcaa

SEQ ID NO: 492161 - DNA, 19 bp, Mus musculus
  siRNA target sequence for Abcc12 (NM_172912.2,685-703).
gcaggcgaggtactcaata

SEQ ID NO: 492162 - DNA, 19 bp, Mus musculus
  siRNA target sequence for Abcc12 (NM_172912.2,686-704).
caggcgaggtactcaatat

SEQ ID NO: 492163 - DNA, 19 bp, Mus musculus
  siRNA target sequence for Abcc12 (NM_172912.2,689-707).
gcgaggtactcaatatact

SEQ ID NO: 492164 - DNA, 19 bp, Mus musculus
  siRNA target sequence for Abcc12 (NM_172912.2,690-708).
cgaggtactcaatatacta

SEQ ID NO: 492165 - DNA, 19 bp, Mus musculus
  siRNA target sequence for Abcc12 (NM_172912.2,691-709).
gaggtactcaatatactat

SEQ ID NO: 492166 - DNA, 19 bp, Mus musculus
  siRNA target sequence for Abcc12 (NM_172912.2,693-711).
ggtactcaatatactatca

SEQ ID NO: 492167 - DNA, 19 bp, Mus musculus
  siRNA target sequence for Abcc12 (NM_172912.2,699-717).
caatatactatcaagtgat

SEQ ID NO: 492168 - DNA, 19 bp, Mus musculus
  siRNA target sequence for Abcc12 (NM_172912.2,706-724).
ctatcaagtgatagctatt

SEQ ID NO: 492169 - DNA, 19 bp, Mus musculus
  siRNA target sequence for Abcc12 (NM_172912.2,764-782).
ccatcccgatcctaatggt

SEQ ID NO: 492170 - DNA, 19 bp, Mus musculus
  siRNA target sequence for Abcc12 (NM_172912.2,791-809).
cagtgtacgcctttttcat

SEQ ID NO: 492171 - DNA, 19 bp, Mus musculus
  siRNA target sequence for Abcc12 (NM_172912.2,897-915).
ccgaaggtcagcaatttca

SEQ ID NO: 492172 - DNA, 19 bp, Mus musculus
  siRNA target sequence for Abcc12 (NM_172912.2,899-917).
gaaggtcagcaatttcagt

SEQ ID NO: 492173 - DNA, 19 bp, Mus musculus
  siRNA target sequence for Abcc12 (NM_172912.2,931-949).
gttcagacaatgaatgagt

SEQ ID NO: 492174 - DNA, 19 bp, Mus musculus
  siRNA target sequence for Abcc12 (NM_172912.2,956-974).
cctgcatcaagctgattaa

SEQ ID NO: 492175 - DNA, 19 bp, Mus musculus
  siRNA target sequence for Abcc12 (NM_172912.2,983-1001).
cctgggaggaatcttttat

SEQ ID NO: 492176 - DNA, 19 bp, Mus musculus
  siRNA target sequence for Abcc12 (NM_172912.2,984-1002).
ctgggaggaatcttttata

SEQ ID NO: 492177 - DNA, 19 bp, Mus musculus
  siRNA target sequence for Abcc12 (NM_172912.2,986-1004).
gggaggaatcttttataaa

SEQ ID NO: 492178 - DNA, 19 bp, Mus musculus
  siRNA target sequence for Abcc12 (NM_172912.2,988-1006).
gaggaatcttttataaaca

SEQ ID NO: 492179 - DNA, 19 bp, Mus musculus
  siRNA target sequence for Abcc12 (NM_172912.2,1005-1023).
caccattcacgacataaga

SEQ ID NO: 492180 - DNA, 19 bp, Mus musculus
  siRNA target sequence for Abcc12 (NM_172912.2,1157-1175).
cccctgtggcatttagtgt

SEQ ID NO: 492181 - DNA, 19 bp, Mus musculus
  siRNA target sequence for Abcc12 (NM_172912.2,1172-1190).
gtgtgattgccatgtttaa

SEQ ID NO: 492182 - DNA, 19 bp, Mus musculus
  siRNA target sequence for Abcc12 (NM_172912.2,1180-1198).
gccatgtttaatgtaatga

SEQ ID NO: 492183 - DNA, 19 bp, Mus musculus
  siRNA target sequence for Abcc12 (NM_172912.2,1272-1290).
gaaaatcctcatagctaaa

SEQ ID NO: 492184 - DNA, 19 bp, Mus musculus
  siRNA target sequence for Abcc12 (NM_172912.2,1316-1334).
ctgaagacccagatactat

SEQ ID NO: 492185 - DNA, 19 bp, Mus musculus
  siRNA target sequence for Abcc12 (NM_172912.2,1331-1349).
ctatcttgcttttagcaaa

SEQ ID NO: 492186 - DNA, 19 bp, Mus musculus
  siRNA target sequence for Abcc12 (NM_172912.2,1356-1374).
cttgacatgggaacaagaa

SEQ ID NO: 492187 - DNA, 19 bp, Mus musculus
  siRNA target sequence for Abcc12 (NM_172912.2,1455-1473).
cgagcaaagtcgatcagat

SEQ ID NO: 492188 - DNA, 19 bp, Mus musculus
  siRNA target sequence for Abcc12 (NM_172912.2,1563-1581).
gggaatatgcgggaatgtt

SEQ ID NO: 492189 - DNA, 19 bp, Mus musculus
  siRNA target sequence for Abcc12 (NM_172912.2,1579-1597).
gttggaagcgggaagagtt

SEQ ID NO: 492190 - DNA, 19 bp, Mus musculus
  siRNA target sequence for Abcc12 (NM_172912.2,1590-1608).
gaagagttccctcatttca

SEQ ID NO: 492191 - DNA, 19 bp, Mus musculus
  siRNA target sequence for Abcc12 (NM_172912.2,1705-1723).
gtgagggagaacatactgt

SEQ ID NO: 492192 - DNA, 19 bp, Mus musculus
  siRNA target sequence for Abcc12 (NM_172912.2,1720-1738).
ctgtttggagagaaataca

SEQ ID NO: 492193 - DNA, 19 bp, Mus musculus
  siRNA target sequence for Abcc12 (NM_172912.2,1876-1894).
gcccgtgctgtgtatgcta

SEQ ID NO: 492194 - DNA, 19 bp, Mus musculus
  siRNA target sequence for Abcc12 (NM_172912.2,1877-1895).
cccgtgctgtgtatgctaa

SEQ ID NO: 492195 - DNA, 19 bp, Mus musculus
  siRNA target sequence for Abcc12 (NM_172912.2,1878-1896).
ccgtgctgtgtatgctaat

SEQ ID NO: 492196 - DNA, 19 bp, Mus musculus
  siRNA target sequence for Abcc12 (NM_172912.2,1944-1962).
cgtggggaagcatgtcttt

SEQ ID NO: 492197 - DNA, 19 bp, Mus musculus
  siRNA target sequence for Abcc12 (NM_172912.2,2036-2054).
cttgtgatgaggtcattct

SEQ ID NO: 492198 - DNA, 19 bp, Mus musculus
  siRNA target sequence for Abcc12 (NM_172912.2,2046-2064).
ggtcattctgttagaagat

SEQ ID NO: 492199 - DNA, 19 bp, Mus musculus
  siRNA target sequence for Abcc12 (NM_172912.2,2140-2158).
ctccggggactgcaattca

SEQ ID NO: 492200 - DNA, 19 bp, Mus musculus
  siRNA target sequence for Abcc12 (NM_172912.2,2161-2179).
gatccagagcacatttaca

SEQ ID NO: 492201 - DNA, 19 bp, Mus musculus
  siRNA target sequence for Abcc12 (NM_172912.2,2321-2339).
gatctcagaatgttaaaat

SEQ ID NO: 492202 - DNA, 19 bp, Mus musculus
  siRNA target sequence for Abcc2 (NM_013806.1,4-22).
gacgaattctgcaactcta

SEQ ID NO: 492203 - DNA, 19 bp, Mus musculus
  siRNA target sequence for Abcc2 (NM_013806.1,7-25).
gaattctgcaactctactt

SEQ ID NO: 492204 - DNA, 19 bp, Mus musculus
  siRNA target sequence for Abcc2 (NM_013806.1,14-32).
gcaactctactttttggaa

SEQ ID NO: 492205 - DNA, 19 bp, Mus musculus
  siRNA target sequence for Abcc2 (NM_013806.1,67-85).
cctctttgttttgaacaaa

SEQ ID NO: 492206 - DNA, 19 bp, Mus musculus
  siRNA target sequence for Abcc2 (NM_013806.1,134-152).
ggcaactttacagaatata

SEQ ID NO: 492207 - DNA, 19 bp, Mus musculus
  siRNA target sequence for Abcc2 (NM_013806.1,165-183).
caagagatttgctataact

SEQ ID NO: 492208 - DNA, 19 bp, Mus musculus
  siRNA target sequence for Abcc2 (NM_013806.1,207-225).
gttcgttgtgtgtcttctt

SEQ ID NO: 492209 - DNA, 19 bp, Mus musculus
  siRNA target sequence for Abcc2 (NM_013806.1,286-304).
cctcctgttaaatatacaa

SEQ ID NO: 492210 - DNA, 19 bp, Mus musculus
  siRNA target sequence for Abcc2 (NM_013806.1,287-305).
ctcctgttaaatatacaaa

SEQ ID NO: 492211 - DNA, 19 bp, Mus musculus
  siRNA target sequence for Abcc2 (NM_013806.1,356-374).
gcaggcaatgctgtataca

SEQ ID NO: 492212 - DNA, 19 bp, Mus musculus
  siRNA target sequence for Abcc2 (NM_013806.1,402-420).
ctggattctctctctatta

SEQ ID NO: 492213 - DNA, 19 bp, Mus musculus
  siRNA target sequence for Abcc2 (NM_013806.1,455-473).
cactcctgcaggatagcaa

SEQ ID NO: 492214 - DNA, 19 bp, Mus musculus
  siRNA target sequence for Abcc2 (NM_013806.1,485-503).
cctattcctgcctgttctt

SEQ ID NO: 492215 - DNA, 19 bp, Mus musculus
  siRNA target sequence for Abcc2 (NM_013806.1,583-601).
gctacagcttcatttctga

SEQ ID NO: 492216 - DNA, 19 bp, Mus musculus
  siRNA target sequence for Abcc2 (NM_013806.1,598-616).
ctgagtagcgttacgttta

SEQ ID NO: 492217 - DNA, 19 bp, Mus musculus
  siRNA target sequence for Abcc2 (NM_013806.1,600-618).
gagtagcgttacgtttagt

SEQ ID NO: 492218 - DNA, 19 bp, Mus musculus
  siRNA target sequence for Abcc2 (NM_013806.1,606-624).
cgttacgtttagttggtat

SEQ ID NO: 492219 - DNA, 19 bp, Mus musculus
  siRNA target sequence for Abcc2 (NM_013806.1,648-666).
caagcatccattgacaata

SEQ ID NO: 492220 - DNA, 19 bp, Mus musculus
  siRNA target sequence for Abcc2 (NM_013806.1,986-1004).
cacatgatattcttttgtt

SEQ ID NO: 492221 - DNA, 19 bp, Mus musculus
  siRNA target sequence for Abcc2 (NM_013806.1,1064-1082).
cgtgggttggatatatcta

SEQ ID NO: 492222 - DNA, 19 bp, Mus musculus
  siRNA target sequence for Abcc2 (NM_013806.1,1069-1087).
gttggatatatctatgcaa

SEQ ID NO: 492223 - DNA, 19 bp, Mus musculus
  siRNA target sequence for Abcc2 (NM_013806.1,1171-1189).
cggacaaccatcatagctt

SEQ ID NO: 492224 - DNA, 19 bp, Mus musculus
  siRNA target sequence for Abcc2 (NM_013806.1,1179-1197).
catcatagcttccgtatat

SEQ ID NO: 492225 - DNA, 19 bp, Mus musculus
  siRNA target sequence for Abcc2 (NM_013806.1,1182-1200).
catagcttccgtatataaa

SEQ ID NO: 492226 - DNA, 19 bp, Mus musculus
  siRNA target sequence for Abcc2 (NM_013806.1,1290-1308).
ggacgtgaccaactacata

SEQ ID NO: 492227 - DNA, 19 bp, Mus musculus
  siRNA target sequence for Abcc2 (NM_013806.1,1294-1312).
gtgaccaactacatacact

SEQ ID NO: 492228 - DNA, 19 bp, Mus musculus
  siRNA target sequence for Abcc2 (NM_013806.1,1314-1332).
gcggtggtccagtgtttta

SEQ ID NO: 492229 - DNA, 19 bp, Mus musculus
  siRNA target sequence for Abcc2 (NM_013806.1,1368-1386).
gttgggaccttcgatttta

SEQ ID NO: 492230 - DNA, 19 bp, Mus musculus
  siRNA target sequence for Abcc2 (NM_013806.1,1371-1389).
gggaccttcgattttagca

SEQ ID NO: 492231 - DNA, 19 bp, Mus musculus
  siRNA target sequence for Abcc2 (NM_013806.1,1480-1498).
gacaaacgcttaaaaatca

SEQ ID NO: 492232 - DNA, 19 bp, Mus musculus
  siRNA target sequence for Abcc2 (NM_013806.1,1517-1535).
ggattaagatcctgaaata

SEQ ID NO: 492233 - DNA, 19 bp, Mus musculus
  siRNA target sequence for Abcc2 (NM_013806.1,1617-1635).
gctgcagacgattttgatt

SEQ ID NO: 492234 - DNA, 19 bp, Mus musculus
  siRNA target sequence for Abcc2 (NM_013806.1,1618-1636).
ctgcagacgattttgattt

SEQ ID NO: 492235 - DNA, 19 bp, Mus musculus
  siRNA target sequence for Abcc2 (NM_013806.1,1621-1639).
cagacgattttgattttca

SEQ ID NO: 492236 - DNA, 19 bp, Mus musculus
  siRNA target sequence for Abcc2 (NM_013806.1,1662-1680).
ggtgtccgtgatcacattt

SEQ ID NO: 492237 - DNA, 19 bp, Mus musculus
  siRNA target sequence for Abcc2 (NM_013806.1,1667-1685).
ccgtgatcacattttctgt

SEQ ID NO: 492238 - DNA, 19 bp, Mus musculus
  siRNA target sequence for Abcc2 (NM_013806.1,1689-1707).
cgtcctggtggatagtcaa

SEQ ID NO: 492239 - DNA, 19 bp, Mus musculus
  siRNA target sequence for Abcc2 (NM_013806.1,1949-1967).
ccacaatccaagatgtgaa

SEQ ID NO: 492240 - DNA, 19 bp, Mus musculus
  siRNA target sequence for Abcc2 (NM_013806.1,2020-2038).
gggaagtcctctttgatat

SEQ ID NO: 492241 - DNA, 19 bp, Mus musculus
  siRNA target sequence for Abcc2 (NM_013806.1,2042-2060).
ccatgctgggagaaatgga

SEQ ID NO: 492242 - DNA, 19 bp, Mus musculus
  siRNA target sequence for Abcc2 (NM_013806.1,2131-2149).
gggaccatcaaagataaca

SEQ ID NO: 492243 - DNA, 19 bp, Mus musculus
  siRNA target sequence for Abcc2 (NM_013806.1,2154-2172).
gtttgggtcagaatacgat

SEQ ID NO: 492244 - DNA, 19 bp, Mus musculus
  siRNA target sequence for Abcc2 (NM_013806.1,2158-2176).
gggtcagaatacgatgaaa

SEQ ID NO: 492245 - DNA, 19 bp, Mus musculus
  siRNA target sequence for Abcc2 (NM_013806.1,2181-2199).
gtaccagcgagttatcgaa

SEQ ID NO: 492246 - DNA, 19 bp, Mus musculus
  siRNA target sequence for Abcc2 (NM_013806.1,2256-2274).
cggagagaagggtataaat

SEQ ID NO: 492247 - DNA, 19 bp, Mus musculus
  siRNA target sequence for Abcc2 (NM_013806.1,2260-2278).
gagaagggtataaatctca

SEQ ID NO: 492248 - DNA, 19 bp, Mus musculus
  siRNA target sequence for Abcc2 (NM_013806.1,2330-2348).
cagacatctatattctaga

SEQ ID NO: 492249 - DNA, 19 bp, Mus musculus
  siRNA target sequence for Abcc2 (NM_013806.1,2446-2464).
gttacacatggcattcact

SEQ ID NO: 492250 - DNA, 19 bp, Mus musculus
  siRNA target sequence for Abcc2 (NM_013806.1,2496-2514).
ggggaaaggcaccatctta

SEQ ID NO: 492251 - DNA, 19 bp, Mus musculus
  siRNA target sequence for Abcc2 (NM_013806.1,2498-2516).
ggaaaggcaccatcttaga

SEQ ID NO: 492252 - DNA, 19 bp, Mus musculus
  siRNA target sequence for Abcc2 (NM_013806.1,2551-2569).
ggagtgttcgctaagaact

SEQ ID NO: 492253 - DNA, 19 bp, Mus musculus
  siRNA target sequence for Abcc2 (NM_013806.1,2603-2621).
gagaggctacagtcgataa

SEQ ID NO: 492254 - DNA, 19 bp, Mus musculus
  siRNA target sequence for Abcc2 (NM_013806.1,2800-2818).
gtgaatgccttgaataaga

SEQ ID NO: 492255 - DNA, 19 bp, Mus musculus
  siRNA target sequence for Abcc2 (NM_013806.1,2830-2848).
gtgaaaggacaaaaactaa

SEQ ID NO: 492256 - DNA, 19 bp, Mus musculus
  siRNA target sequence for Abcc2 (NM_013806.1,2886-2904).
ctccatctacctgaaatat

SEQ ID NO: 492257 - DNA, 19 bp, Mus musculus
  siRNA target sequence for Abcc2 (NM_013806.1,2921-2939).
ggtggtccctgctcttcat

SEQ ID NO: 492258 - DNA, 19 bp, Mus musculus
  siRNA target sequence for Abcc2 (NM_013806.1,3003-3021).
gaccagtgactctgaaaaa

SEQ ID NO: 492259 - DNA, 19 bp, Mus musculus
  siRNA target sequence for Abcc2 (NM_013806.1,3022-3040).
cagaatgggaccgacaatt

SEQ ID NO: 492260 - DNA, 19 bp, Mus musculus
  siRNA target sequence for Abcc2 (NM_013806.1,3024-3042).
gaatgggaccgacaattca

SEQ ID NO: 492261 - DNA, 19 bp, Mus musculus
  siRNA target sequence for Abcc2 (NM_013806.1,3084-3102).
gggaatagcacaaggtata

SEQ ID NO: 492262 - DNA, 19 bp, Mus musculus
  siRNA target sequence for Abcc2 (NM_013806.1,3121-3139).
ctatggagtatatatgctt

SEQ ID NO: 492263 - DNA, 19 bp, Mus musculus
  siRNA target sequence for Abcc2 (NM_013806.1,3163-3181).
cacaggcagctgttaacca

SEQ ID NO: 492264 - DNA, 19 bp, Mus musculus
  siRNA target sequence for Abcc2 (NM_013806.1,3168-3186).
gcagctgttaaccaacatt

SEQ ID NO: 492265 - DNA, 19 bp, Mus musculus
  siRNA target sequence for Abcc2 (NM_013806.1,3187-3205).
ctccgcgcacccatgagtt

SEQ ID NO: 492266 - DNA, 19 bp, Mus musculus
  siRNA target sequence for Abcc2 (NM_013806.1,3189-3207).
ccgcgcacccatgagtttt

SEQ ID NO: 492267 - DNA, 19 bp, Mus musculus
  siRNA target sequence for Abcc2 (NM_013806.1,3190-3208).
cgcgcacccatgagttttt

SEQ ID NO: 492268 - DNA, 19 bp, Mus musculus
  siRNA target sequence for Abcc2 (NM_013806.1,3191-3209).
gcgcacccatgagtttttt

SEQ ID NO: 492269 - DNA, 19 bp, Mus musculus
  siRNA target sequence for Abcc2 (NM_013806.1,3192-3210).
cgcacccatgagttttttt

SEQ ID NO: 492270 - DNA, 19 bp, Mus musculus
  siRNA target sequence for Abcc2 (NM_013806.1,3220-3238).
cccacaggccggattgtga

SEQ ID NO: 492271 - DNA, 19 bp, Mus musculus
  siRNA target sequence for Abcc2 (NM_013806.1,3221-3239).
ccacaggccggattgtgaa

SEQ ID NO: 492272 - DNA, 19 bp, Mus musculus
  siRNA target sequence for Abcc2 (NM_013806.1,3227-3245).
gccggattgtgaacagatt

SEQ ID NO: 492273 - DNA, 19 bp, Mus musculus
  siRNA target sequence for Abcc2 (NM_013806.1,3228-3246).
ccggattgtgaacagattt

SEQ ID NO: 492274 - DNA, 19 bp, Mus musculus
  siRNA target sequence for Abcc2 (NM_013806.1,3306-3324).
gtgtttcttcggcatagtt

SEQ ID NO: 492275 - DNA, 19 bp, Mus musculus
  siRNA target sequence for Abcc2 (NM_013806.1,3401-3419).
ctgtgcaggtgttttatgt

SEQ ID NO: 492276 - DNA, 19 bp, Mus musculus
  siRNA target sequence for Abcc2 (NM_013806.1,3447-3465).
ggattctgtcaccaaatct

SEQ ID NO: 492277 - DNA, 19 bp, Mus musculus
  siRNA target sequence for Abcc2 (NM_013806.1,3456-3474).
caccaaatctccgatctat

SEQ ID NO: 492278 - DNA, 19 bp, Mus musculus
  siRNA target sequence for Abcc2 (NM_013806.1,3459-3477).
caaatctccgatctattct

SEQ ID NO: 492279 - DNA, 19 bp, Mus musculus
  siRNA target sequence for Abcc2 (NM_013806.1,3466-3484).
ccgatctattctcacttta

SEQ ID NO: 492280 - DNA, 19 bp, Mus musculus
  siRNA target sequence for Abcc2 (NM_013806.1,3468-3486).
gatctattctcactttagt

SEQ ID NO: 492281 - DNA, 19 bp, Mus musculus
  siRNA target sequence for Abcc2 (NM_013806.1,3634-3652).
gttggaaacctgattgtct

SEQ ID NO: 492282 - DNA, 19 bp, Mus musculus
  siRNA target sequence for Abcc2 (NM_013806.1,3662-3680).
ccttgcttctggttattta

SEQ ID NO: 492283 - DNA, 19 bp, Mus musculus
  siRNA target sequence for Abcc2 (NM_013806.1,3762-3780).
gaggatgacgtcagaagta

SEQ ID NO: 492284 - DNA, 19 bp, Mus musculus
  siRNA target sequence for Abcc2 (NM_013806.1,3793-3811).
gtggctgttgagcgaataa

SEQ ID NO: 492285 - DNA, 19 bp, Mus musculus
  siRNA target sequence for Abcc2 (NM_013806.1,3795-3813).
ggctgttgagcgaataaat

SEQ ID NO: 492286 - DNA, 19 bp, Mus musculus
  siRNA target sequence for Abcc2 (NM_013806.1,3797-3815).
ctgttgagcgaataaatga

SEQ ID NO: 492287 - DNA, 19 bp, Mus musculus
  siRNA target sequence for Abcc2 (NM_013806.1,3842-3860).
cgtgggtgaccgacaagaa

SEQ ID NO: 492288 - DNA, 19 bp, Mus musculus
  siRNA target sequence for Abcc2 (NM_013806.1,3866-3884).
cggcagattggcccaaaaa

SEQ ID NO: 492289 - DNA, 19 bp, Mus musculus
  siRNA target sequence for Abcc2 (NM_013806.1,3867-3885).
ggcagattggcccaaaaaa

SEQ ID NO: 492290 - DNA, 19 bp, Mus musculus
  siRNA target sequence for Abcc2 (NM_013806.1,3886-3904).
ggtgagatccagttcaaca

SEQ ID NO: 492291 - DNA, 19 bp, Mus musculus
  siRNA target sequence for Abcc2 (NM_013806.1,3940-3958).
gtcctgaaagggattactt

SEQ ID NO: 492292 - DNA, 19 bp, Mus musculus
  siRNA target sequence for Abcc2 (NM_013806.1,3942-3960).
cctgaaagggattacttgt

SEQ ID NO: 492293 - DNA, 19 bp, Mus musculus
  siRNA target sequence for Abcc2 (NM_013806.1,3949-3967).
gggattacttgtaacatca

SEQ ID NO: 492294 - DNA, 19 bp, Mus musculus
  siRNA target sequence for Abcc2 (NM_013806.1,4031-4049).
gcctcttcagaatcttaga

SEQ ID NO: 492295 - DNA, 19 bp, Mus musculus
  siRNA target sequence for Abcc2 (NM_013806.1,4071-4089).
cattgatgggattgatatt

SEQ ID NO: 492296 - DNA, 19 bp, Mus musculus
  siRNA target sequence for Abcc2 (NM_013806.1,4135-4153).
ccccaggaccccattttgt

SEQ ID NO: 492297 - DNA, 19 bp, Mus musculus
  siRNA target sequence for Abcc2 (NM_013806.1,4160-4178).
ggaatctgaggatgaatct

SEQ ID NO: 492298 - DNA, 19 bp, Mus musculus
  siRNA target sequence for Abcc2 (NM_013806.1,4177-4195).
ctcgaccctttcaacaaat

SEQ ID NO: 492299 - DNA, 19 bp, Mus musculus
  siRNA target sequence for Abcc2 (NM_013806.1,4225-4243).
gaattggctcatctcaaat

SEQ ID NO: 492300 - DNA, 19 bp, Mus musculus
  siRNA target sequence for Abcc2 (NM_013806.1,4337-4355).
gtagggccgtgcttcgaaa

SEQ ID NO: 492301 - DNA, 19 bp, Mus musculus
  siRNA target sequence for Abcc2 (NM_013806.1,4512-4530).
cctagacagcggcaagatt

SEQ ID NO: 492302 - DNA, 19 bp, Mus musculus
  siRNA target sequence for Abcc2 (NM_013806.1,4593-4611).
ggaagccggcattgaaagt

SEQ ID NO: 492303 - DNA, 19 bp, Mus musculus
  siRNA target sequence for Abcc5 (NM_013790.1,364-382).
ctggacgaggagcattcta

SEQ ID NO: 492304 - DNA, 19 bp, Mus musculus
  siRNA target sequence for Abcc5 (NM_013790.1,506-524).
cccgagtggttcacaagaa

SEQ ID NO: 492305 - DNA, 19 bp, Mus musculus
  siRNA target sequence for Abcc5 (NM_013790.1,551-569).
ggcctttgtccaagtatga

SEQ ID NO: 492306 - DNA, 19 bp, Mus musculus
  siRNA target sequence for Abcc5 (NM_013790.1,862-880).
ctgacttgggcattgaatt

SEQ ID NO: 492307 - DNA, 19 bp, Mus musculus
  siRNA target sequence for Abcc5 (NM_013790.1,1068-1086).
gggcatgatttataatgta

SEQ ID NO: 492308 - DNA, 19 bp, Mus musculus
  siRNA target sequence for Abcc5 (NM_013790.1,1069-1087).
ggcatgatttataatgtaa

SEQ ID NO: 492309 - DNA, 19 bp, Mus musculus
  siRNA target sequence for Abcc5 (NM_013790.1,1110-1128).
cctgggatcagcggttttt

SEQ ID NO: 492310 - DNA, 19 bp, Mus musculus
  siRNA target sequence for Abcc5 (NM_013790.1,1115-1133).
gatcagcggtttttatcct

SEQ ID NO: 492311 - DNA, 19 bp, Mus musculus
  siRNA target sequence for Abcc5 (NM_013790.1,1120-1138).
gcggtttttatcctctttt

SEQ ID NO: 492312 - DNA, 19 bp, Mus musculus
  siRNA target sequence for Abcc5 (NM_013790.1,1158-1176).
gtcacggctaactgcatat

SEQ ID NO: 492313 - DNA, 19 bp, Mus musculus
  siRNA target sequence for Abcc5 (NM_013790.1,1162-1180).
cggctaactgcatatttca

SEQ ID NO: 492314 - DNA, 19 bp, Mus musculus
  siRNA target sequence for Abcc5 (NM_013790.1,1209-1227).
ccgtgtccagaagatgaat

SEQ ID NO: 492315 - DNA, 19 bp, Mus musculus
  siRNA target sequence for Abcc5 (NM_013790.1,1234-1252).
cttacctacattaaattca

SEQ ID NO: 492316 - DNA, 19 bp, Mus musculus
  siRNA target sequence for Abcc5 (NM_013790.1,1238-1256).
cctacattaaattcattaa

SEQ ID NO: 492317 - DNA, 19 bp, Mus musculus
  siRNA target sequence for Abcc5 (NM_013790.1,1268-1286).
gggtcaaagcgttttctca

SEQ ID NO: 492318 - DNA, 19 bp, Mus musculus
  siRNA target sequence for Abcc5 (NM_013790.1,1367-1385).
ctcctattgtggtagtgat

SEQ ID NO: 492319 - DNA, 19 bp, Mus musculus
  siRNA target sequence for Abcc5 (NM_013790.1,1540-1558).
gttgacagatttaagagtt

SEQ ID NO: 492320 - DNA, 19 bp, Mus musculus
  siRNA target sequence for Abcc5 (NM_013790.1,1547-1565).
gatttaagagtttgtttct

SEQ ID NO: 492321 - DNA, 19 bp, Mus musculus
  siRNA target sequence for Abcc5 (NM_013790.1,1598-1616).
cggccagtcctcacatcaa

SEQ ID NO: 492322 - DNA, 19 bp, Mus musculus
  siRNA target sequence for Abcc5 (NM_013790.1,1604-1622).
gtcctcacatcaagataga

SEQ ID NO: 492323 - DNA, 19 bp, Mus musculus
  siRNA target sequence for Abcc5 (NM_013790.1,1611-1629).
catcaagatagagatgaaa

SEQ ID NO: 492324 - DNA, 19 bp, Mus musculus
  siRNA target sequence for Abcc5 (NM_013790.1,1652-1670).
cctcccactccagtataca

SEQ ID NO: 492325 - DNA, 19 bp, Mus musculus
  siRNA target sequence for Abcc5 (NM_013790.1,1655-1673).
cccactccagtatacagaa

SEQ ID NO: 492326 - DNA, 19 bp, Mus musculus
  siRNA target sequence for Abcc5 (NM_013790.1,1769-1787).
cggtgctggcagaacagaa

SEQ ID NO: 492327 - DNA, 19 bp, Mus musculus
  siRNA target sequence for Abcc5 (NM_013790.1,1958-1976).
ctctcgtttcagccatttt

SEQ ID NO: 492328 - DNA, 19 bp, Mus musculus
  siRNA target sequence for Abcc5 (NM_013790.1,1979-1997).
gccagatgacgcttttgga

SEQ ID NO: 492329 - DNA, 19 bp, Mus musculus
  siRNA target sequence for Abcc5 (NM_013790.1,2011-2029).
gtcagtgggacctttgctt

SEQ ID NO: 492330 - DNA, 19 bp, Mus musculus
  siRNA target sequence for Abcc5 (NM_013790.1,2067-2085).
gagagacaacattctcttt

SEQ ID NO: 492331 - DNA, 19 bp, Mus musculus
  siRNA target sequence for Abcc5 (NM_013790.1,2166-2184).
cagcgacctgactgagatt

SEQ ID NO: 492332 - DNA, 19 bp, Mus musculus
  siRNA target sequence for Abcc5 (NM_013790.1,2210-2228).
gtggacagcgccagagaat

SEQ ID NO: 492333 - DNA, 19 bp, Mus musculus
  siRNA target sequence for Abcc5 (NM_013790.1,2242-2260).
gccttgtacagtgatagaa

SEQ ID NO: 492334 - DNA, 19 bp, Mus musculus
  siRNA target sequence for Abcc5 (NM_013790.1,2280-2298).
ccccctcagtgccttagat

SEQ ID NO: 492335 - DNA, 19 bp, Mus musculus
  siRNA target sequence for Abcc5 (NM_013790.1,2308-2326).
ggcaaccacatcttcaaca

SEQ ID NO: 492336 - DNA, 19 bp, Mus musculus
  siRNA target sequence for Abcc5 (NM_013790.1,2351-2369).
ctaagacggttctgtttgt

SEQ ID NO: 492337 - DNA, 19 bp, Mus musculus
  siRNA target sequence for Abcc5 (NM_013790.1,2355-2373).
gacggttctgtttgttaca

SEQ ID NO: 492338 - DNA, 19 bp, Mus musculus
  siRNA target sequence for Abcc5 (NM_013790.1,2357-2375).
cggttctgtttgttacaca

SEQ ID NO: 492339 - DNA, 19 bp, Mus musculus
  siRNA target sequence for Abcc5 (NM_013790.1,2399-2417).
gtgatgaggtgatcttcat

SEQ ID NO: 492340 - DNA, 19 bp, Mus musculus
  siRNA target sequence for Abcc5 (NM_013790.1,2418-2436).
gaaggaaggctgtatcaca

SEQ ID NO: 492341 - DNA, 19 bp, Mus musculus
  siRNA target sequence for Abcc5 (NM_013790.1,2449-2467).
catgaggagctgatgaact

SEQ ID NO: 492342 - DNA, 19 bp, Mus musculus
  siRNA target sequence for Abcc5 (NM_013790.1,2473-2491).
ggggattacgctacgattt

SEQ ID NO: 492343 - DNA, 19 bp, Mus musculus
  siRNA target sequence for Abcc5 (NM_013790.1,2474-2492).
gggattacgctacgatttt

SEQ ID NO: 492344 - DNA, 19 bp, Mus musculus
  siRNA target sequence for Abcc5 (NM_013790.1,2475-2493).
ggattacgctacgattttt

SEQ ID NO: 492345 - DNA, 19 bp, Mus musculus
  siRNA target sequence for Abcc5 (NM_013790.1,2476-2494).
gattacgctacgattttta

SEQ ID NO: 492346 - DNA, 19 bp, Mus musculus
  siRNA target sequence for Abcc5 (NM_013790.1,2521-2539).
ccagttgagattaattcga

SEQ ID NO: 492347 - DNA, 19 bp, Mus musculus
  siRNA target sequence for Abcc5 (NM_013790.1,2522-2540).
cagttgagattaattcgaa

SEQ ID NO: 492348 - DNA, 19 bp, Mus musculus
  siRNA target sequence for Abcc5 (NM_013790.1,2524-2542).
gttgagattaattcgaaaa

SEQ ID NO: 492349 - DNA, 19 bp, Mus musculus
  siRNA target sequence for Abcc5 (NM_013790.1,2545-2563).
gaagctactggttcacaaa

SEQ ID NO: 492350 - DNA, 19 bp, Mus musculus
  siRNA target sequence for Abcc5 (NM_013790.1,2548-2566).
gctactggttcacaaaaat

SEQ ID NO: 492351 - DNA, 19 bp, Mus musculus
  siRNA target sequence for Abcc5 (NM_013790.1,2552-2570).
ctggttcacaaaaatcaca

SEQ ID NO: 492352 - DNA, 19 bp, Mus musculus
  siRNA target sequence for Abcc5 (NM_013790.1,2774-2792).
gcacctggtggcttagcta

SEQ ID NO: 492353 - DNA, 19 bp, Mus musculus
  siRNA target sequence for Abcc5 (NM_013790.1,2814-2832).
gaacagcacagtgtatcaa

SEQ ID NO: 492354 - DNA, 19 bp, Mus musculus
  siRNA target sequence for Abcc5 (NM_013790.1,2824-2842).
gtgtatcaagggaacagaa

SEQ ID NO: 492355 - DNA, 19 bp, Mus musculus
  siRNA target sequence for Abcc5 (NM_013790.1,2915-2933).
cagtcatgctgatcttgaa

SEQ ID NO: 492356 - DNA, 19 bp, Mus musculus
  siRNA target sequence for Abcc5 (NM_013790.1,2936-2954).
ccattcgaggagttgtctt

SEQ ID NO: 492357 - DNA, 19 bp, Mus musculus
  siRNA target sequence for Abcc5 (NM_013790.1,2984-3002).
ggctccatgatgagctatt

SEQ ID NO: 492358 - DNA, 19 bp, Mus musculus
  siRNA target sequence for Abcc5 (NM_013790.1,2998-3016).
ctattccgaaggatcctta

SEQ ID NO: 492359 - DNA, 19 bp, Mus musculus
  siRNA target sequence for Abcc5 (NM_013790.1,3013-3031).
cttaggagccccatgaagt

SEQ ID NO: 492360 - DNA, 19 bp, Mus musculus
  siRNA target sequence for Abcc5 (NM_013790.1,3021-3039).
ccccatgaagttttttgat

SEQ ID NO: 492361 - DNA, 19 bp, Mus musculus
  siRNA target sequence for Abcc5 (NM_013790.1,3046-3064).
ccaacaggaaggattctca

SEQ ID NO: 492362 - DNA, 19 bp, Mus musculus
  siRNA target sequence for Abcc5 (NM_013790.1,3150-3168).
cttctgtgttggaatgatt

SEQ ID NO: 492363 - DNA, 19 bp, Mus musculus
  siRNA target sequence for Abcc5 (NM_013790.1,3262-3280).
ctaaagcggttggacaata

SEQ ID NO: 492364 - DNA, 19 bp, Mus musculus
  siRNA target sequence for Abcc5 (NM_013790.1,3628-3646).
gagaggatcaaccactata

SEQ ID NO: 492365 - DNA, 19 bp, Mus musculus
  siRNA target sequence for Abcc5 (NM_013790.1,3714-3732).
ggagggagaagtaaccttt

SEQ ID NO: 492366 - DNA, 19 bp, Mus musculus
  siRNA target sequence for Abcc5 (NM_013790.1,3896-3914).
gcatcaagattgatggaat

SEQ ID NO: 492367 - DNA, 19 bp, Mus musculus
  siRNA target sequence for Abcc5 (NM_013790.1,3900-3918).
caagattgatggaataaga

SEQ ID NO: 492368 - DNA, 19 bp, Mus musculus
  siRNA target sequence for Abcc5 (NM_013790.1,3936-3954).
ggccgacctccgaagcaaa

SEQ ID NO: 492369 - DNA, 19 bp, Mus musculus
  siRNA target sequence for Abcc5 (NM_013790.1,4064-4082).
cgcacatgaaggaatgtat

SEQ ID NO: 492370 - DNA, 19 bp, Mus musculus
  siRNA target sequence for Abcc5 (NM_013790.1,4153-4171).
cagctgttgtgcatagcaa

SEQ ID NO: 492371 - DNA, 19 bp, Mus musculus
  siRNA target sequence for Abcc5 (NM_013790.1,4179-4197).
gctgcgtcactgtaagatt

SEQ ID NO: 492372 - DNA, 19 bp, Mus musculus
  siRNA target sequence for Abcc5 (NM_013790.1,4186-4204).
cactgtaagattctgattt

SEQ ID NO: 492373 - DNA, 19 bp, Mus musculus
  siRNA target sequence for Abcc5 (NM_013790.1,4257-4275).
gaccatccgggaagcattt

SEQ ID NO: 492374 - DNA, 19 bp, Mus musculus
  siRNA target sequence for Abcc5 (NM_013790.1,4379-4397).
catcggtccttctgtctaa

SEQ ID NO: 492375 - DNA, 19 bp, Mus musculus
  siRNA target sequence for Abcc5 (NM_013790.1,4382-4400).
cggtccttctgtctaatga

SEQ ID NO: 492376 - DNA, 19 bp, Mus musculus
  siRNA target sequence for Abcc5 (NM_013790.1,4384-4402).
gtccttctgtctaatgaca

SEQ ID NO: 492377 - DNA, 19 bp, Mus musculus
  siRNA target sequence for Abcc5 (NM_013790.1,4392-4410).
gtctaatgacagttcaaga

SEQ ID NO: 492378 - DNA, 19 bp, Mus musculus
  siRNA target sequence for Abcc5 (NM_013790.1,4394-4412).
ctaatgacagttcaagatt

SEQ ID NO: 492379 - DNA, 19 bp, Mus musculus
  siRNA target sequence for Abcc6 (NM_018795.1,175-193).
ccatctaccttctctacat

SEQ ID NO: 492380 - DNA, 19 bp, Mus musculus
  siRNA target sequence for Abcc6 (NM_018795.1,220-238).
ggatgtcccacctcttcaa

SEQ ID NO: 492381 - DNA, 19 bp, Mus musculus
  siRNA target sequence for Abcc6 (NM_018795.1,221-239).
gatgtcccacctcttcaaa

SEQ ID NO: 492382 - DNA, 19 bp, Mus musculus
  siRNA target sequence for Abcc6 (NM_018795.1,227-245).
ccacctcttcaaaaccaaa

SEQ ID NO: 492383 - DNA, 19 bp, Mus musculus
  siRNA target sequence for Abcc6 (NM_018795.1,327-345).
caggccccagagcttctaa

SEQ ID NO: 492384 - DNA, 19 bp, Mus musculus
  siRNA target sequence for Abcc6 (NM_018795.1,421-439).
ggtcatccggggtgttgtt

SEQ ID NO: 492385 - DNA, 19 bp, Mus musculus
  siRNA target sequence for Abcc6 (NM_018795.1,460-478).
gcatcttgccaggaatcaa

SEQ ID NO: 492386 - DNA, 19 bp, Mus musculus
  siRNA target sequence for Abcc6 (NM_018795.1,695-713).
gctatggaggggctacaaa

SEQ ID NO: 492387 - DNA, 19 bp, Mus musculus
  siRNA target sequence for Abcc6 (NM_018795.1,696-714).
ctatggaggggctacaaaa

SEQ ID NO: 492388 - DNA, 19 bp, Mus musculus
  siRNA target sequence for Abcc6 (NM_018795.1,1085-1103).
ctgcctacagacgttgttt

SEQ ID NO: 492389 - DNA, 19 bp, Mus musculus
  siRNA target sequence for Abcc6 (NM_018795.1,1087-1105).
gcctacagacgttgtttga

SEQ ID NO: 492390 - DNA, 19 bp, Mus musculus
  siRNA target sequence for Abcc6 (NM_018795.1,1301-1319).
gctcttcctgtggatcttt

SEQ ID NO: 492391 - DNA, 19 bp, Mus musculus
  siRNA target sequence for Abcc6 (NM_018795.1,1725-1743).
gtgctcagcatccttaaca

SEQ ID NO: 492392 - DNA, 19 bp, Mus musculus
  siRNA target sequence for Abcc6 (NM_018795.1,1873-1891).
gctcctcgaaggatcgaat

SEQ ID NO: 492393 - DNA, 19 bp, Mus musculus
  siRNA target sequence for Abcc6 (NM_018795.1,1877-1895).
ctcgaaggatcgaatttct

SEQ ID NO: 492394 - DNA, 19 bp, Mus musculus
  siRNA target sequence for Abcc6 (NM_018795.1,1879-1897).
cgaaggatcgaatttctgt

SEQ ID NO: 492395 - DNA, 19 bp, Mus musculus
  siRNA target sequence for Abcc6 (NM_018795.1,1880-1898).
gaaggatcgaatttctgta

SEQ ID NO: 492396 - DNA, 19 bp, Mus musculus
  siRNA target sequence for Abcc6 (NM_018795.1,2103-2121).
gcctgggtccagaatacct

SEQ ID NO: 492397 - DNA, 19 bp, Mus musculus
  siRNA target sequence for Abcc6 (NM_018795.1,2164-2182).
cctggttgcagaaagttct

SEQ ID NO: 492398 - DNA, 19 bp, Mus musculus
  siRNA target sequence for Abcc6 (NM_018795.1,2294-2312).
ggctcgggctgtgtacaaa

SEQ ID NO: 492399 - DNA, 19 bp, Mus musculus
  siRNA target sequence for Abcc6 (NM_018795.1,2295-2313).
gctcgggctgtgtacaaaa

SEQ ID NO: 492400 - DNA, 19 bp, Mus musculus
  siRNA target sequence for Abcc6 (NM_018795.1,2368-2386).
gccagcaggtcttcaaaca

SEQ ID NO: 492401 - DNA, 19 bp, Mus musculus
  siRNA target sequence for Abcc6 (NM_018795.1,2422-2440).
ctcggatccttgtaacaca

SEQ ID NO: 492402 - DNA, 19 bp, Mus musculus
  siRNA target sequence for Abcc6 (NM_018795.1,2695-2713).
gcacatctgaggtacagat

SEQ ID NO: 492403 - DNA, 19 bp, Mus musculus
  siRNA target sequence for Abcc6 (NM_018795.1,2987-3005).
gcaagccatcggactgttt

SEQ ID NO: 492404 - DNA, 19 bp, Mus musculus
  siRNA target sequence for Abcc6 (NM_018795.1,3532-3550).
ggaatggcttggtattcgt

SEQ ID NO: 492405 - DNA, 19 bp, Mus musculus
  siRNA target sequence for Abcc6 (NM_018795.1,3773-3791).
gccttgtgggggacagatt

SEQ ID NO: 492406 - DNA, 19 bp, Mus musculus
  siRNA target sequence for Abcc6 (NM_018795.1,3945-3963).
gaggctgccgagggtaata

SEQ ID NO: 492407 - DNA, 19 bp, Mus musculus
  siRNA target sequence for Abcc6 (NM_018795.1,3948-3966).
gctgccgagggtaatatct

SEQ ID NO: 492408 - DNA, 19 bp, Mus musculus
  siRNA target sequence for Abcc6 (NM_018795.1,4393-4411).
gtgccagagtcctagtcat

SEQ ID NO: 492409 - DNA, 19 bp, Mus musculus
  siRNA target sequence for Abcc8 (NM_011510.1,307-325).
ccctagtgagtgtgcaaaa

SEQ ID NO: 492410 - DNA, 19 bp, Mus musculus
  siRNA target sequence for Abcc8 (NM_011510.1,559-577).
cctggacccctgatggaat

SEQ ID NO: 492411 - DNA, 19 bp, Mus musculus
  siRNA target sequence for Abcc8 (NM_011510.1,884-902).
cttcgagagtcccttcaat

SEQ ID NO: 492412 - DNA, 19 bp, Mus musculus
  siRNA target sequence for Abcc8 (NM_011510.1,895-913).
ccttcaataagcaaaggta

SEQ ID NO: 492413 - DNA, 19 bp, Mus musculus
  siRNA target sequence for Abcc8 (NM_011510.1,990-1008).
gaacggggcatcaacttgt

SEQ ID NO: 492414 - DNA, 19 bp, Mus musculus
  siRNA target sequence for Abcc8 (NM_011510.1,1049-1067).
ctaccagcacaccaatgtt

SEQ ID NO: 492415 - DNA, 19 bp, Mus musculus
  siRNA target sequence for Abcc8 (NM_011510.1,1206-1224).
gcagactggatcattgcta

SEQ ID NO: 492416 - DNA, 19 bp, Mus musculus
  siRNA target sequence for Abcc8 (NM_011510.1,1457-1475).
cgaggaagatgacaactta

SEQ ID NO: 492417 - DNA, 19 bp, Mus musculus
  siRNA target sequence for Abcc8 (NM_011510.1,1592-1610).
ggtcttggtggccattgat

SEQ ID NO: 492418 - DNA, 19 bp, Mus musculus
  siRNA target sequence for Abcc8 (NM_011510.1,1593-1611).
gtcttggtggccattgatt

SEQ ID NO: 492419 - DNA, 19 bp, Mus musculus
  siRNA target sequence for Abcc8 (NM_011510.1,1872-1890).
gggagtatcctgaacagat

SEQ ID NO: 492420 - DNA, 19 bp, Mus musculus
  siRNA target sequence for Abcc8 (NM_011510.1,1873-1891).
ggagtatcctgaacagatt

SEQ ID NO: 492421 - DNA, 19 bp, Mus musculus
  siRNA target sequence for Abcc8 (NM_011510.1,1874-1892).
gagtatcctgaacagattt

SEQ ID NO: 492422 - DNA, 19 bp, Mus musculus
  siRNA target sequence for Abcc8 (NM_011510.1,1888-1906).
gattttcatctgactgtaa

SEQ ID NO: 492423 - DNA, 19 bp, Mus musculus
  siRNA target sequence for Abcc8 (NM_011510.1,2041-2059).
gctacttcatccagaaata

SEQ ID NO: 492424 - DNA, 19 bp, Mus musculus
  siRNA target sequence for Abcc8 (NM_011510.1,2248-2266).
ccaacaggtggctagaagt

SEQ ID NO: 492425 - DNA, 19 bp, Mus musculus
  siRNA target sequence for Abcc8 (NM_011510.1,2284-2302).
gagcatgcgtggtactcat

SEQ ID NO: 492426 - DNA, 19 bp, Mus musculus
  siRNA target sequence for Abcc8 (NM_011510.1,2424-2442).
gcagacatggagatccaat

SEQ ID NO: 492427 - DNA, 19 bp, Mus musculus
  siRNA target sequence for Abcc8 (NM_011510.1,2425-2443).
cagacatggagatccaatt

SEQ ID NO: 492428 - DNA, 19 bp, Mus musculus
  siRNA target sequence for Abcc8 (NM_011510.1,2536-2554).
cagaccaagggaagattca

SEQ ID NO: 492429 - DNA, 19 bp, Mus musculus
  siRNA target sequence for Abcc8 (NM_011510.1,2714-2732).
cgaagggcgcatcatcatt

SEQ ID NO: 492430 - DNA, 19 bp, Mus musculus
  siRNA target sequence for Abcc8 (NM_011510.1,2815-2833).
gcggcaccatcagattcaa

SEQ ID NO: 492431 - DNA, 19 bp, Mus musculus
  siRNA target sequence for Abcc8 (NM_011510.1,2944-2962).
cagaaggaggggagaattt

SEQ ID NO: 492432 - DNA, 19 bp, Mus musculus
  siRNA target sequence for Abcc8 (NM_011510.1,2950-2968).
gaggggagaattttagtca

SEQ ID NO: 492433 - DNA, 19 bp, Mus musculus
  siRNA target sequence for Abcc9 (NM_011511.1,172-190).
ctttttgtgggaacaacat

SEQ ID NO: 492434 - DNA, 19 bp, Mus musculus
  siRNA target sequence for Abcc9 (NM_011511.1,275-293).
gtttatcacctttccaata

SEQ ID NO: 492435 - DNA, 19 bp, Mus musculus
  siRNA target sequence for Abcc9 (NM_011511.1,283-301).
cctttccaatactgttcat

SEQ ID NO: 492436 - DNA, 19 bp, Mus musculus
  siRNA target sequence for Abcc9 (NM_011511.1,339-357).
cataacacgtggcttcatt

SEQ ID NO: 492437 - DNA, 19 bp, Mus musculus
  siRNA target sequence for Abcc9 (NM_011511.1,388-406).
cgtttgcgctcctgtttgt

SEQ ID NO: 492438 - DNA, 19 bp, Mus musculus
  siRNA target sequence for Abcc9 (NM_011511.1,424-442).
cggaaggcatcgtttcaga

SEQ ID NO: 492439 - DNA, 19 bp, Mus musculus
  siRNA target sequence for Abcc9 (NM_011511.1,492-510).
ggatttgtcgccacaacaa

SEQ ID NO: 492440 - DNA, 19 bp, Mus musculus
  siRNA target sequence for Abcc9 (NM_011511.1,508-526).
caacgtccatcgtctatta

SEQ ID NO: 492441 - DNA, 19 bp, Mus musculus
  siRNA target sequence for Abcc9 (NM_011511.1,511-529).
cgtccatcgtctattatca

SEQ ID NO: 492442 - DNA, 19 bp, Mus musculus
  siRNA target sequence for Abcc9 (NM_011511.1,512-530).
gtccatcgtctattatcat

SEQ ID NO: 492443 - DNA, 19 bp, Mus musculus
  siRNA target sequence for Abcc9 (NM_011511.1,514-532).
ccatcgtctattatcataa

SEQ ID NO: 492444 - DNA, 19 bp, Mus musculus
  siRNA target sequence for Abcc9 (NM_011511.1,544-562).
caaatttccctaaattact

SEQ ID NO: 492445 - DNA, 19 bp, Mus musculus
  siRNA target sequence for Abcc9 (NM_011511.1,584-602).
ggtaatggcctttattaca

SEQ ID NO: 492446 - DNA, 19 bp, Mus musculus
  siRNA target sequence for Abcc9 (NM_011511.1,585-603).
gtaatggcctttattacaa

SEQ ID NO: 492447 - DNA, 19 bp, Mus musculus
  siRNA target sequence for Abcc9 (NM_011511.1,670-688).
caggagtgatggtcatctt

SEQ ID NO: 492448 - DNA, 19 bp, Mus musculus
  siRNA target sequence for Abcc9 (NM_011511.1,722-740).
catccgggtcagaagatat

SEQ ID NO: 492449 - DNA, 19 bp, Mus musculus
  siRNA target sequence for Abcc9 (NM_011511.1,725-743).
ccgggtcagaagatatgtt

SEQ ID NO: 492450 - DNA, 19 bp, Mus musculus
  siRNA target sequence for Abcc9 (NM_011511.1,726-744).
cgggtcagaagatatgttt

SEQ ID NO: 492451 - DNA, 19 bp, Mus musculus
  siRNA target sequence for Abcc9 (NM_011511.1,736-754).
gatatgttttcttcatgaa

SEQ ID NO: 492452 - DNA, 19 bp, Mus musculus
  siRNA target sequence for Abcc9 (NM_011511.1,802-820).
ggttcctccagccatttgt

SEQ ID NO: 492453 - DNA, 19 bp, Mus musculus
  siRNA target sequence for Abcc9 (NM_011511.1,828-846).
ctgtccaaagctacttact

SEQ ID NO: 492454 - DNA, 19 bp, Mus musculus
  siRNA target sequence for Abcc9 (NM_011511.1,847-865).
ggtggatgaacacacttat

SEQ ID NO: 492455 - DNA, 19 bp, Mus musculus
  siRNA target sequence for Abcc9 (NM_011511.1,850-868).
ggatgaacacacttatcat

SEQ ID NO: 492456 - DNA, 19 bp, Mus musculus
  siRNA target sequence for Abcc9 (NM_011511.1,851-869).
gatgaacacacttatcata

SEQ ID NO: 492457 - DNA, 19 bp, Mus musculus
  siRNA target sequence for Abcc9 (NM_011511.1,854-872).
gaacacacttatcatatca

SEQ ID NO: 492458 - DNA, 19 bp, Mus musculus
  siRNA target sequence for Abcc9 (NM_011511.1,880-898).
ggaaacctatcgatctgaa

SEQ ID NO: 492459 - DNA, 19 bp, Mus musculus
  siRNA target sequence for Abcc9 (NM_011511.1,928-946).
gggcggtgaccaattatgt

SEQ ID NO: 492460 - DNA, 19 bp, Mus musculus
  siRNA target sequence for Abcc9 (NM_011511.1,930-948).
gcggtgaccaattatgtct

SEQ ID NO: 492461 - DNA, 19 bp, Mus musculus
  siRNA target sequence for Abcc9 (NM_011511.1,983-1001).
ggctgccgatcatccaaat

SEQ ID NO: 492462 - DNA, 19 bp, Mus musculus
  siRNA target sequence for Abcc9 (NM_011511.1,1022-1040).
ggccatgtacagagctttt

SEQ ID NO: 492463 - DNA, 19 bp, Mus musculus
  siRNA target sequence for Abcc9 (NM_011511.1,1120-1138).
ggatagtccagcgagtaaa

SEQ ID NO: 492464 - DNA, 19 bp, Mus musculus
  siRNA target sequence for Abcc9 (NM_011511.1,1121-1139).
gatagtccagcgagtaaat

SEQ ID NO: 492465 - DNA, 19 bp, Mus musculus
  siRNA target sequence for Abcc9 (NM_011511.1,1125-1143).
gtccagcgagtaaatgaaa

SEQ ID NO: 492466 - DNA, 19 bp, Mus musculus
  siRNA target sequence for Abcc9 (NM_011511.1,1130-1148).
gcgagtaaatgaaaagact

SEQ ID NO: 492467 - DNA, 19 bp, Mus musculus
  siRNA target sequence for Abcc9 (NM_011511.1,1131-1149).
cgagtaaatgaaaagacta

SEQ ID NO: 492468 - DNA, 19 bp, Mus musculus
  siRNA target sequence for Abcc9 (NM_011511.1,1175-1193).
gacactctcatcaaaggaa

SEQ ID NO: 492469 - DNA, 19 bp, Mus musculus
  siRNA target sequence for Abcc9 (NM_011511.1,1263-1281).
caggcttcctactatgtga

SEQ ID NO: 492470 - DNA, 19 bp, Mus musculus
  siRNA target sequence for Abcc9 (NM_011511.1,1309-1327).
gggctctgctggctatgat

SEQ ID NO: 492471 - DNA, 19 bp, Mus musculus
  siRNA target sequence for Abcc9 (NM_011511.1,1311-1329).
gctctgctggctatgatat

SEQ ID NO: 492472 - DNA, 19 bp, Mus musculus
  siRNA target sequence for Abcc9 (NM_011511.1,1320-1338).
gctatgatatacaataaaa

SEQ ID NO: 492473 - DNA, 19 bp, Mus musculus
  siRNA target sequence for Abcc9 (NM_011511.1,1341-1359).
cttcggctctcgacttcta

SEQ ID NO: 492474 - DNA, 19 bp, Mus musculus
  siRNA target sequence for Abcc9 (NM_011511.1,1351-1369).
cgacttctaacctatccat

SEQ ID NO: 492475 - DNA, 19 bp, Mus musculus
  siRNA target sequence for Abcc9 (NM_011511.1,1397-1415).
caacttggttgccatagaa

SEQ ID NO: 492476 - DNA, 19 bp, Mus musculus
  siRNA target sequence for Abcc9 (NM_011511.1,1462-1480).
ccatgcctgttcagatcat

SEQ ID NO: 492477 - DNA, 19 bp, Mus musculus
  siRNA target sequence for Abcc9 (NM_011511.1,1463-1481).
catgcctgttcagatcata

SEQ ID NO: 492478 - DNA, 19 bp, Mus musculus
  siRNA target sequence for Abcc9 (NM_011511.1,1493-1511).
cctgctctacaatttgctt

SEQ ID NO: 492479 - DNA, 19 bp, Mus musculus
  siRNA target sequence for Abcc9 (NM_011511.1,1548-1566).
ctccttgcaccgattcagt

SEQ ID NO: 492480 - DNA, 19 bp, Mus musculus
  siRNA target sequence for Abcc9 (NM_011511.1,1555-1573).
caccgattcagtacttcat

SEQ ID NO: 492481 - DNA, 19 bp, Mus musculus
  siRNA target sequence for Abcc9 (NM_011511.1,1618-1636).
ccaccgagaggttgaagaa

SEQ ID NO: 492482 - DNA, 19 bp, Mus musculus
  siRNA target sequence for Abcc9 (NM_011511.1,1752-1770).
gcgctctacacgtcacttt

SEQ ID NO: 492483 - DNA, 19 bp, Mus musculus
  siRNA target sequence for Abcc9 (NM_011511.1,1762-1780).
cgtcactttccatcttcat

SEQ ID NO: 492484 - DNA, 19 bp, Mus musculus
  siRNA target sequence for Abcc9 (NM_011511.1,1775-1793).
cttcatgaacgcagcaatt

SEQ ID NO: 492485 - DNA, 19 bp, Mus musculus
  siRNA target sequence for Abcc9 (NM_011511.1,1831-1849).
cgtacgccagtggaaacaa

SEQ ID NO: 492486 - DNA, 19 bp, Mus musculus
  siRNA target sequence for Abcc9 (NM_011511.1,2055-2073).
cacaccggagtgcaatcaa

SEQ ID NO: 492487 - DNA, 19 bp, Mus musculus
  siRNA target sequence for Abcc9 (NM_011511.1,2057-2075).
caccggagtgcaatcaaaa

SEQ ID NO: 492488 - DNA, 19 bp, Mus musculus
  siRNA target sequence for Abcc9 (NM_011511.1,2060-2078).
cggagtgcaatcaaaacca

SEQ ID NO: 492489 - DNA, 19 bp, Mus musculus
  siRNA target sequence for Abcc9 (NM_011511.1,2064-2082).
gtgcaatcaaaaccaataa

SEQ ID NO: 492490 - DNA, 19 bp, Mus musculus
  siRNA target sequence for Abcc9 (NM_011511.1,2143-2161).
ccgctgagacggaagacat

SEQ ID NO: 492491 - DNA, 19 bp, Mus musculus
  siRNA target sequence for Abcc9 (NM_011511.1,2144-2162).
cgctgagacggaagacatt

SEQ ID NO: 492492 - DNA, 19 bp, Mus musculus
  siRNA target sequence for Abcc9 (NM_011511.1,2152-2170).
cggaagacattgccataaa

SEQ ID NO: 492493 - DNA, 19 bp, Mus musculus
  siRNA target sequence for Abcc9 (NM_011511.1,2189-2207).
ctcatggggcagtggttta

SEQ ID NO: 492494 - DNA, 19 bp, Mus musculus
  siRNA target sequence for Abcc9 (NM_011511.1,2197-2215).
gcagtggtttagctacatt

SEQ ID NO: 492495 - DNA, 19 bp, Mus musculus
  siRNA target sequence for Abcc9 (NM_011511.1,2209-2227).
ctacattgtccaatattga

SEQ ID NO: 492496 - DNA, 19 bp, Mus musculus
  siRNA target sequence for Abcc9 (NM_011511.1,2212-2230).
cattgtccaatattgacat

SEQ ID NO: 492497 - DNA, 19 bp, Mus musculus
  siRNA target sequence for Abcc9 (NM_011511.1,2442-2460).
gctacagttgaggaaaata

SEQ ID NO: 492498 - DNA, 19 bp, Mus musculus
  siRNA target sequence for Abcc9 (NM_011511.1,2464-2482).
cttttggaagtcctttcaa

SEQ ID NO: 492499 - DNA, 19 bp, Mus musculus
  siRNA target sequence for Abcc9 (NM_011511.1,2525-2543).
gccagacattgatttgcta

SEQ ID NO: 492500 - DNA, 19 bp, Mus musculus
  siRNA target sequence for Abcc9 (NM_011511.1,2545-2563).
catttggagaccaaactga

SEQ ID NO: 492501 - DNA, 19 bp, Mus musculus
  siRNA target sequence for Abcc9 (NM_011511.1,2619-2637).
gcacgggcactctaccaaa

SEQ ID NO: 492502 - DNA, 19 bp, Mus musculus
  siRNA target sequence for Abcc9 (NM_011511.1,2620-2638).
cacgggcactctaccaaaa

SEQ ID NO: 492503 - DNA, 19 bp, Mus musculus
  siRNA target sequence for Abcc9 (NM_011511.1,2641-2659).
ccaacatcgtctttttgga

SEQ ID NO: 492504 - DNA, 19 bp, Mus musculus
  siRNA target sequence for Abcc9 (NM_011511.1,2685-2703).
cacctgagcgatcatttga

SEQ ID NO: 492505 - DNA, 19 bp, Mus musculus
  siRNA target sequence for Abcc9 (NM_011511.1,2899-2917).
gacaggatcaagaattaga

SEQ ID NO: 492506 - DNA, 19 bp, Mus musculus
  siRNA target sequence for Abcc9 (NM_011511.1,2966-2984).
gagagccatgtattcaaga

SEQ ID NO: 492507 - DNA, 19 bp, Mus musculus
  siRNA target sequence for Abcc9 (NM_011511.1,3169-3187).
cggtgattgtggctataga

SEQ ID NO: 492508 - DNA, 19 bp, Mus musculus
  siRNA target sequence for Abcc9 (NM_011511.1,3205-3223).
ggacatccgaatacagtat

SEQ ID NO: 492509 - DNA, 19 bp, Mus musculus
  siRNA target sequence for Abcc9 (NM_011511.1,3206-3224).
gacatccgaatacagtata

SEQ ID NO: 492510 - DNA, 19 bp, Mus musculus
  siRNA target sequence for Abcc9 (NM_011511.1,3211-3229).
ccgaatacagtataaacca

SEQ ID NO: 492511 - DNA, 19 bp, Mus musculus
  siRNA target sequence for Abcc9 (NM_011511.1,3212-3230).
cgaatacagtataaaccat

SEQ ID NO: 492512 - DNA, 19 bp, Mus musculus
  siRNA target sequence for Abcc9 (NM_011511.1,3241-3259).
ctgaccagaccttctatgt

SEQ ID NO: 492513 - DNA, 19 bp, Mus musculus
  siRNA target sequence for Abcc9 (NM_011511.1,3313-3331).
ccctcaccgtggaatggat

SEQ ID NO: 492514 - DNA, 19 bp, Mus musculus
  siRNA target sequence for Abcc9 (NM_011511.1,3362-3380).
caacctcctcaataagata

SEQ ID NO: 492515 - DNA, 19 bp, Mus musculus
  siRNA target sequence for Abcc9 (NM_011511.1,3386-3404).
cgggccaataaggttcttt

SEQ ID NO: 492516 - DNA, 19 bp, Mus musculus
  siRNA target sequence for Abcc9 (NM_011511.1,3388-3406).
ggccaataaggttctttga

SEQ ID NO: 492517 - DNA, 19 bp, Mus musculus
  siRNA target sequence for Abcc9 (NM_011511.1,3389-3407).
gccaataaggttctttgat

SEQ ID NO: 492518 - DNA, 19 bp, Mus musculus
  siRNA target sequence for Abcc9 (NM_011511.1,3390-3408).
ccaataaggttctttgata

SEQ ID NO: 492519 - DNA, 19 bp, Mus musculus
  siRNA target sequence for Abcc9 (NM_011511.1,3425-3443).
gatcctcaatcggttttct

SEQ ID NO: 492520 - DNA, 19 bp, Mus musculus
  siRNA target sequence for Abcc9 (NM_011511.1,3436-3454).
ggttttctgctgatacgaa

SEQ ID NO: 492521 - DNA, 19 bp, Mus musculus
  siRNA target sequence for Abcc9 (NM_011511.1,3442-3460).
ctgctgatacgaacatcat

SEQ ID NO: 492522 - DNA, 19 bp, Mus musculus
  siRNA target sequence for Abcc9 (NM_011511.1,3528-3546).
gggatgatctcctatgcta

SEQ ID NO: 492523 - DNA, 19 bp, Mus musculus
  siRNA target sequence for Abcc9 (NM_011511.1,3575-3593).
cctgggtgtagccttttat

SEQ ID NO: 492524 - DNA, 19 bp, Mus musculus
  siRNA target sequence for Abcc9 (NM_011511.1,3579-3597).
ggtgtagccttttatttca

SEQ ID NO: 492525 - DNA, 19 bp, Mus musculus
  siRNA target sequence for Abcc9 (NM_011511.1,3718-3736).
ggcatgaaaccagattcaa

SEQ ID NO: 492526 - DNA, 19 bp, Mus musculus
  siRNA target sequence for Abcc9 (NM_011511.1,3755-3773).
gacagacacgaacaacatt

SEQ ID NO: 492527 - DNA, 19 bp, Mus musculus
  siRNA target sequence for Abcc9 (NM_011511.1,3846-3864).
ctgacagcctccattgcat

SEQ ID NO: 492528 - DNA, 19 bp, Mus musculus
  siRNA target sequence for Abcc9 (NM_011511.1,3852-3870).
gcctccattgcatccatta

SEQ ID NO: 492529 - DNA, 19 bp, Mus musculus
  siRNA target sequence for Abcc9 (NM_011511.1,3909-3927).
ctctatgccctcacgataa

SEQ ID NO: 492530 - DNA, 19 bp, Mus musculus
  siRNA target sequence for Abcc9 (NM_011511.1,3915-3933).
gccctcacgataaccaatt

SEQ ID NO: 492531 - DNA, 19 bp, Mus musculus
  siRNA target sequence for Abcc9 (NM_011511.1,3916-3934).
ccctcacgataaccaatta

SEQ ID NO: 492532 - DNA, 19 bp, Mus musculus
  siRNA target sequence for Abcc9 (NM_011511.1,3920-3938).
cacgataaccaattaccta

SEQ ID NO: 492533 - DNA, 19 bp, Mus musculus
  siRNA target sequence for Abcc9 (NM_011511.1,3922-3940).
cgataaccaattacctaaa

SEQ ID NO: 492534 - DNA, 19 bp, Mus musculus
  siRNA target sequence for Abcc9 (NM_011511.1,3996-4014).
gtgaacagtttcttgacta

SEQ ID NO: 492535 - DNA, 19 bp, Mus musculus
  siRNA target sequence for Abcc9 (NM_011511.1,4012-4030).
ctatggagtccgagaacta

SEQ ID NO: 492536 - DNA, 19 bp, Mus musculus
  siRNA target sequence for Abcc9 (NM_011511.1,4076-4094).
ggaaggcgagatcaagatt

SEQ ID NO: 492537 - DNA, 19 bp, Mus musculus
  siRNA target sequence for Abcc9 (NM_011511.1,4097-4115).
cgatctgtgtgtcagatat

SEQ ID NO: 492538 - DNA, 19 bp, Mus musculus
  siRNA target sequence for Abcc9 (NM_011511.1,4232-4250).
cagaatggtcgacatattt

SEQ ID NO: 492539 - DNA, 19 bp, Mus musculus
  siRNA target sequence for Abcc9 (NM_011511.1,4234-4252).
gaatggtcgacatatttga

SEQ ID NO: 492540 - DNA, 19 bp, Mus musculus
  siRNA target sequence for Abcc9 (NM_011511.1,4244-4262).
catatttgacggaaagata

SEQ ID NO: 492541 - DNA, 19 bp, Mus musculus
  siRNA target sequence for Abcc9 (NM_011511.1,4253-4271).
cggaaagatagtcattgat

SEQ ID NO: 492542 - DNA, 19 bp, Mus musculus
  siRNA target sequence for Abcc9 (NM_011511.1,4263-4281).
gtcattgatgggatagaca

SEQ ID NO: 492543 - DNA, 19 bp, Mus musculus
  siRNA target sequence for Abcc9 (NM_011511.1,4310-4328).
ctccaggctgtccatcatt

SEQ ID NO: 492544 - DNA, 19 bp, Mus musculus
  siRNA target sequence for Abcc9 (NM_011511.1,4480-4498).
ccgaaggtggtgagaactt

SEQ ID NO: 492545 - DNA, 19 bp, Mus musculus
  siRNA target sequence for Abcc9 (NM_011511.1,4482-4500).
gaaggtggtgagaacttca

SEQ ID NO: 492546 - DNA, 19 bp, Mus musculus
  siRNA target sequence for Abcc9 (NM_011511.1,4545-4563).
cggaagagcagtatactca

SEQ ID NO: 492547 - DNA, 19 bp, Mus musculus
  siRNA target sequence for Abcc9 (NM_011511.1,4668-4686).
cgggttcacaccattctga

SEQ ID NO: 492548 - DNA, 19 bp, Mus musculus
  siRNA target sequence for Abcc9 (NM_011511.1,4687-4705).
ctgcagacctggttattgt

SEQ ID NO: 492549 - DNA, 19 bp, Mus musculus
  siRNA target sequence for Abcc9 (NM_011511.1,4717-4735).
gaaatattttggaatacga

SEQ ID NO: 492550 - DNA, 19 bp, Mus musculus
  siRNA target sequence for Abcc9 (NM_021041.1,4685-4703).
ggatgcaggccttgtttta

SEQ ID NO: 492551 - DNA, 19 bp, Mus musculus
  siRNA target sequence for Abcc9 (NM_021041.1,4689-4707).
gcaggccttgttttagtct

SEQ ID NO: 492552 - DNA, 19 bp, Mus musculus
  siRNA target sequence for Abcc9 (NM_021041.1,4704-4722).
gtcttttctgagggtattt

SEQ ID NO: 492553 - DNA, 19 bp, Mus musculus
  siRNA target sequence for Abcc9 (NM_021041.1,4758-4776).
cacaagaatggcctctttt

SEQ ID NO: 492554 - DNA, 19 bp, Mus musculus
  siRNA target sequence for Abcd1 (NM_007435.1,521-539).
cctatggagtccacaaaat

SEQ ID NO: 492555 - DNA, 19 bp, Mus musculus
  siRNA target sequence for Abcd1 (NM_007435.1,534-552).
caaaatctaccctctagta

SEQ ID NO: 492556 - DNA, 19 bp, Mus musculus
  siRNA target sequence for Abcd1 (NM_007435.1,743-761).
ccctggtaagccgaacttt

SEQ ID NO: 492557 - DNA, 19 bp, Mus musculus
  siRNA target sequence for Abcd1 (NM_007435.1,980-998).
cttactaccgagtaagcaa

SEQ ID NO: 492558 - DNA, 19 bp, Mus musculus
  siRNA target sequence for Abcd1 (NM_007435.1,1061-1079).
cctctgtagcccaccttta

SEQ ID NO: 492559 - DNA, 19 bp, Mus musculus
  siRNA target sequence for Abcd1 (NM_007435.1,1066-1084).
gtagcccacctttattcca

SEQ ID NO: 492560 - DNA, 19 bp, Mus musculus
  siRNA target sequence for Abcd1 (NM_007435.1,1305-1323).
ggccaactcagaggaaatt

SEQ ID NO: 492561 - DNA, 19 bp, Mus musculus
  siRNA target sequence for Abcd1 (NM_007435.1,1407-1425).
gcttgagcgcctatggtat

SEQ ID NO: 492562 - DNA, 19 bp, Mus musculus
  siRNA target sequence for Abcd1 (NM_007435.1,1411-1429).
gagcgcctatggtatgtca

SEQ ID NO: 492563 - DNA, 19 bp, Mus musculus
  siRNA target sequence for Abcd1 (NM_007435.1,1435-1453).
gaacagttcctcatgaaat

SEQ ID NO: 492564 - DNA, 19 bp, Mus musculus
  siRNA target sequence for Abcd1 (NM_007435.1,1575-1593).
ggttagtgagcgtacagaa

SEQ ID NO: 492565 - DNA, 19 bp, Mus musculus
  siRNA target sequence for Abcd1 (NM_007435.1,1580-1598).
gtgagcgtacagaagcttt

SEQ ID NO: 492566 - DNA, 19 bp, Mus musculus
  siRNA target sequence for Abcd1 (NM_007435.1,1631-1649).
cagatgccaccgaaaggat

SEQ ID NO: 492567 - DNA, 19 bp, Mus musculus
  siRNA target sequence for Abcd1 (NM_007435.1,1636-1654).
gccaccgaaaggatcatgt

SEQ ID NO: 492568 - DNA, 19 bp, Mus musculus
  siRNA target sequence for Abcd1 (NM_007435.1,1704-1722).
cgagatgttccaggtattt

SEQ ID NO: 492569 - DNA, 19 bp, Mus musculus
  siRNA target sequence for Abcd1 (NM_007435.1,1729-1747).
gtcaaacactgtcgtttta

SEQ ID NO: 492570 - DNA, 19 bp, Mus musculus
  siRNA target sequence for Abcd1 (NM_007435.1,1852-1870).
gtggagcaggggatcatct

SEQ ID NO: 492571 - DNA, 19 bp, Mus musculus
  siRNA target sequence for Abcd1 (NM_007435.1,2021-2039).
catacagtggtgtactcta

SEQ ID NO: 492572 - DNA, 19 bp, Mus musculus
  siRNA target sequence for Abcd1 (NM_007435.1,2050-2068).
ccccagcgcatgttctata

SEQ ID NO: 492573 - DNA, 19 bp, Mus musculus
  siRNA target sequence for Abcd1 (NM_007435.1,2051-2069).
cccagcgcatgttctatat

SEQ ID NO: 492574 - DNA, 19 bp, Mus musculus
  siRNA target sequence for Abcd1 (NM_007435.1,2103-2121).
gcgtgaccaagtgatctat

SEQ ID NO: 492575 - DNA, 19 bp, Mus musculus
  siRNA target sequence for Abcd1 (NM_007435.1,2123-2141).
ccgactctgcggaagacat

SEQ ID NO: 492576 - DNA, 19 bp, Mus musculus
  siRNA target sequence for Abcd2 (NM_011994.1,225-243).
gcagcctatcgggtgaaat

SEQ ID NO: 492577 - DNA, 19 bp, Mus musculus
  siRNA target sequence for Abcd2 (NM_011994.1,228-246).
gcctatcgggtgaaatgga

SEQ ID NO: 492578 - DNA, 19 bp, Mus musculus
  siRNA target sequence for Abcd2 (NM_011994.1,248-266).
cagatccggtgctgctaaa

SEQ ID NO: 492579 - DNA, 19 bp, Mus musculus
  siRNA target sequence for Abcd2 (NM_011994.1,281-299).
ggtggctgcggcatatgct

SEQ ID NO: 492580 - DNA, 19 bp, Mus musculus
  siRNA target sequence for Abcd2 (NM_011994.1,288-306).
gcggcatatgctctgaaaa

SEQ ID NO: 492581 - DNA, 19 bp, Mus musculus
  siRNA target sequence for Abcd2 (NM_011994.1,402-420).
cattgcacggagatcatct

SEQ ID NO: 492582 - DNA, 19 bp, Mus musculus
  siRNA target sequence for Abcd2 (NM_011994.1,413-431).
gatcatctgtaaaaaacct

SEQ ID NO: 492583 - DNA, 19 bp, Mus musculus
  siRNA target sequence for Abcd2 (NM_011994.1,437-455).
gggactaaatgcagctttt

SEQ ID NO: 492584 - DNA, 19 bp, Mus musculus
  siRNA target sequence for Abcd2 (NM_011994.1,531-549).
cactcggtggctctaatct

SEQ ID NO: 492585 - DNA, 19 bp, Mus musculus
  siRNA target sequence for Abcd2 (NM_011994.1,533-551).
ctcggtggctctaatctca

SEQ ID NO: 492586 - DNA, 19 bp, Mus musculus
  siRNA target sequence for Abcd2 (NM_011994.1,540-558).
gctctaatctcaagaacat

SEQ ID NO: 492587 - DNA, 19 bp, Mus musculus
  siRNA target sequence for Abcd2 (NM_011994.1,585-603).
gatgggaaaatcgtgaaaa

SEQ ID NO: 492588 - DNA, 19 bp, Mus musculus
  siRNA target sequence for Abcd2 (NM_011994.1,621-639).
cctcggactttcatcatca

SEQ ID NO: 492589 - DNA, 19 bp, Mus musculus
  siRNA target sequence for Abcd2 (NM_011994.1,624-642).
cggactttcatcatcaaat

SEQ ID NO: 492590 - DNA, 19 bp, Mus musculus
  siRNA target sequence for Abcd2 (NM_011994.1,725-743).
ctttagaactcgcttagta

SEQ ID NO: 492591 - DNA, 19 bp, Mus musculus
  siRNA target sequence for Abcd2 (NM_011994.1,747-765).
catgcctatgagacctatt

SEQ ID NO: 492592 - DNA, 19 bp, Mus musculus
  siRNA target sequence for Abcd2 (NM_011994.1,829-847).
ctcttaccgaagacattat

SEQ ID NO: 492593 - DNA, 19 bp, Mus musculus
  siRNA target sequence for Abcd2 (NM_011994.1,831-849).
cttaccgaagacattatga

SEQ ID NO: 492594 - DNA, 19 bp, Mus musculus
  siRNA target sequence for Abcd2 (NM_011994.1,835-853).
ccgaagacattatgatgtt

SEQ ID NO: 492595 - DNA, 19 bp, Mus musculus
  siRNA target sequence for Abcd2 (NM_011994.1,864-882).
gtggctcacctgtattcca

SEQ ID NO: 492596 - DNA, 19 bp, Mus musculus
  siRNA target sequence for Abcd2 (NM_011994.1,875-893).
gtattccaaccttaccaaa

SEQ ID NO: 492597 - DNA, 19 bp, Mus musculus
  siRNA target sequence for Abcd2 (NM_011994.1,880-898).
ccaaccttaccaaacctat

SEQ ID NO: 492598 - DNA, 19 bp, Mus musculus
  siRNA target sequence for Abcd2 (NM_011994.1,881-899).
caaccttaccaaacctatt

SEQ ID NO: 492599 - DNA, 19 bp, Mus musculus
  siRNA target sequence for Abcd2 (NM_011994.1,884-902).
ccttaccaaacctatttta

SEQ ID NO: 492600 - DNA, 19 bp, Mus musculus
  siRNA target sequence for Abcd2 (NM_011994.1,889-907).
ccaaacctattttagatgt

SEQ ID NO: 492601 - DNA, 19 bp, Mus musculus
  siRNA target sequence for Abcd2 (NM_011994.1,906-924).
gtcattctaacctcctata

SEQ ID NO: 492602 - DNA, 19 bp, Mus musculus
  siRNA target sequence for Abcd2 (NM_011994.1,908-926).
cattctaacctcctatact

SEQ ID NO: 492603 - DNA, 19 bp, Mus musculus
  siRNA target sequence for Abcd2 (NM_011994.1,992-1010).
cgtgtatgccactgctaaa

SEQ ID NO: 492604 - DNA, 19 bp, Mus musculus
  siRNA target sequence for Abcd2 (NM_011994.1,995-1013).
gtatgccactgctaaagta

SEQ ID NO: 492605 - DNA, 19 bp, Mus musculus
  siRNA target sequence for Abcd2 (NM_011994.1,1000-1018).
ccactgctaaagtactgaa

SEQ ID NO: 492606 - DNA, 19 bp, Mus musculus
  siRNA target sequence for Abcd2 (NM_011994.1,1001-1019).
cactgctaaagtactgaaa

SEQ ID NO: 492607 - DNA, 19 bp, Mus musculus
  siRNA target sequence for Abcd2 (NM_011994.1,1094-1112).
ccgaatcatagccaatgta

SEQ ID NO: 492608 - DNA, 19 bp, Mus musculus
  siRNA target sequence for Abcd2 (NM_011994.1,1096-1114).
gaatcatagccaatgtaga

SEQ ID NO: 492609 - DNA, 19 bp, Mus musculus
  siRNA target sequence for Abcd2 (NM_011994.1,1168-1186).
gttacaaggctttagctta

SEQ ID NO: 492610 - DNA, 19 bp, Mus musculus
  siRNA target sequence for Abcd2 (NM_011994.1,1197-1215).
ctgattttatccaaacgtt

SEQ ID NO: 492611 - DNA, 19 bp, Mus musculus
  siRNA target sequence for Abcd2 (NM_011994.1,1199-1217).
gattttatccaaacgttta

SEQ ID NO: 492612 - DNA, 19 bp, Mus musculus
  siRNA target sequence for Abcd2 (NM_011994.1,1212-1230).
cgtttatggtacatcatga

SEQ ID NO: 492613 - DNA, 19 bp, Mus musculus
  siRNA target sequence for Abcd2 (NM_011994.1,1213-1231).
gtttatggtacatcatgat

SEQ ID NO: 492614 - DNA, 19 bp, Mus musculus
  siRNA target sequence for Abcd2 (NM_011994.1,1219-1237).
ggtacatcatgatagaaca

SEQ ID NO: 492615 - DNA, 19 bp, Mus musculus
  siRNA target sequence for Abcd2 (NM_011994.1,1220-1238).
gtacatcatgatagaacaa

SEQ ID NO: 492616 - DNA, 19 bp, Mus musculus
  siRNA target sequence for Abcd2 (NM_011994.1,1233-1251).
gaacaattcttgatgaagt

SEQ ID NO: 492617 - DNA, 19 bp, Mus musculus
  siRNA target sequence for Abcd2 (NM_011994.1,1258-1276).
ggagcagctgtggactaat

SEQ ID NO: 492618 - DNA, 19 bp, Mus musculus
  siRNA target sequence for Abcd2 (NM_011994.1,1259-1277).
gagcagctgtggactaatt

SEQ ID NO: 492619 - DNA, 19 bp, Mus musculus
  siRNA target sequence for Abcd2 (NM_011994.1,1261-1279).
gcagctgtggactaattat

SEQ ID NO: 492620 - DNA, 19 bp, Mus musculus
  siRNA target sequence for Abcd2 (NM_011994.1,1281-1299).
gtggctatacccattatca

SEQ ID NO: 492621 - DNA, 19 bp, Mus musculus
  siRNA target sequence for Abcd2 (NM_011994.1,1423-1441).
ggattatgtcttcatacaa

SEQ ID NO: 492622 - DNA, 19 bp, Mus musculus
  siRNA target sequence for Abcd2 (NM_011994.1,1424-1442).
gattatgtcttcatacaaa

SEQ ID NO: 492623 - DNA, 19 bp, Mus musculus
  siRNA target sequence for Abcd2 (NM_011994.1,1439-1457).
caaagagatcactgaacta

SEQ ID NO: 492624 - DNA, 19 bp, Mus musculus
  siRNA target sequence for Abcd2 (NM_011994.1,1461-1479).
ggttatactgctagagtat

SEQ ID NO: 492625 - DNA, 19 bp, Mus musculus
  siRNA target sequence for Abcd2 (NM_011994.1,1462-1480).
gttatactgctagagtata

SEQ ID NO: 492626 - DNA, 19 bp, Mus musculus
  siRNA target sequence for Abcd2 (NM_011994.1,1468-1486).
ctgctagagtatacaatat

SEQ ID NO: 492627 - DNA, 19 bp, Mus musculus
  siRNA target sequence for Abcd2 (NM_011994.1,1470-1488).
gctagagtatacaatatgt

SEQ ID NO: 492628 - DNA, 19 bp, Mus musculus
  siRNA target sequence for Abcd2 (NM_011994.1,1471-1489).
ctagagtatacaatatgtt

SEQ ID NO: 492629 - DNA, 19 bp, Mus musculus
  siRNA target sequence for Abcd2 (NM_011994.1,1511-1529).
gagaggcatttataagaga

SEQ ID NO: 492630 - DNA, 19 bp, Mus musculus
  siRNA target sequence for Abcd2 (NM_011994.1,1539-1557).
caggaacctgaaaaccata

SEQ ID NO: 492631 - DNA, 19 bp, Mus musculus
  siRNA target sequence for Abcd2 (NM_011994.1,1602-1620).
gccatcaaaggaacagtta

SEQ ID NO: 492632 - DNA, 19 bp, Mus musculus
  siRNA target sequence for Abcd2 (NM_011994.1,1683-1701).
gtggcttccaggctaaact

SEQ ID NO: 492633 - DNA, 19 bp, Mus musculus
  siRNA target sequence for Abcd2 (NM_011994.1,1687-1705).
cttccaggctaaacttcaa

SEQ ID NO: 492634 - DNA, 19 bp, Mus musculus
  siRNA target sequence for Abcd2 (NM_011994.1,1718-1736).
gatgcatctcttgataact

SEQ ID NO: 492635 - DNA, 19 bp, Mus musculus
  siRNA target sequence for Abcd2 (NM_011994.1,1796-1814).
gtatgaaggagtcctttat

SEQ ID NO: 492636 - DNA, 19 bp, Mus musculus
  siRNA target sequence for Abcd2 (NM_011994.1,1818-1836).
ccgcctccccaacatatgt

SEQ ID NO: 492637 - DNA, 19 bp, Mus musculus
  siRNA target sequence for Abcd2 (NM_011994.1,1819-1837).
cgcctccccaacatatgtt

SEQ ID NO: 492638 - DNA, 19 bp, Mus musculus
  siRNA target sequence for Abcd2 (NM_011994.1,1821-1839).
cctccccaacatatgttct

SEQ ID NO: 492639 - DNA, 19 bp, Mus musculus
  siRNA target sequence for Abcd2 (NM_011994.1,1824-1842).
ccccaacatatgttctata

SEQ ID NO: 492640 - DNA, 19 bp, Mus musculus
  siRNA target sequence for Abcd2 (NM_011994.1,1826-1844).
ccaacatatgttctatatt

SEQ ID NO: 492641 - DNA, 19 bp, Mus musculus
  siRNA target sequence for Abcd2 (NM_011994.1,1870-1888).
gaagtctccgggatcaagt

SEQ ID NO: 492642 - DNA, 19 bp, Mus musculus
  siRNA target sequence for Abcd2 (NM_011994.1,1916-1934).
gcgtgagaaaggttacact

SEQ ID NO: 492643 - DNA, 19 bp, Mus musculus
  siRNA target sequence for Abcd2 (NM_011994.1,1970-1988).
cctctaccacatagttcaa

SEQ ID NO: 492644 - DNA, 19 bp, Mus musculus
  siRNA target sequence for Abcd2 (NM_011994.1,1971-1989).
ctctaccacatagttcaaa

SEQ ID NO: 492645 - DNA, 19 bp, Mus musculus
  siRNA target sequence for Abcd2 (NM_011994.1,2066-2084).
gcggatgttttaccataaa

SEQ ID NO: 492646 - DNA, 19 bp, Mus musculus
  siRNA target sequence for Abcd2 (NM_011994.1,2079-2097).
cataaaccgaagtatgcat

SEQ ID NO: 492647 - DNA, 19 bp, Mus musculus
  siRNA target sequence for Abcd2 (NM_011994.1,2125-2143).
gcatcgacgttgaaggaaa

SEQ ID NO: 492648 - DNA, 19 bp, Mus musculus
  siRNA target sequence for Abcd2 (NM_011994.1,2129-2147).
cgacgttgaaggaaagata

SEQ ID NO: 492649 - DNA, 19 bp, Mus musculus
  siRNA target sequence for Abcd2 (NM_011994.1,2130-2148).
gacgttgaaggaaagatat

SEQ ID NO: 492650 - DNA, 19 bp, Mus musculus
  siRNA target sequence for Abcd2 (NM_011994.1,2144-2162).
gatatttcaggctgctatt

SEQ ID NO: 492651 - DNA, 19 bp, Mus musculus
  siRNA target sequence for Abcd2 (NM_011994.1,2176-2194).
ccctactctccataacaca

SEQ ID NO: 492652 - DNA, 19 bp, Mus musculus
  siRNA target sequence for Abcd2 (NM_011994.1,2210-2228).
gaaataccacactcatcta

SEQ ID NO: 492653 - DNA, 19 bp, Mus musculus
  siRNA target sequence for Abcd2 (NM_011994.1,2221-2239).
ctcatctattacaattcga

SEQ ID NO: 492654 - DNA, 19 bp, Mus musculus
  siRNA target sequence for Abcd2 (NM_011994.1,2271-2289).
gacactgctatccgtttaa

SEQ ID NO: 492655 - DNA, 19 bp, Mus musculus
  siRNA target sequence for Abcd2 (NM_011994.1,2275-2293).
ctgctatccgtttaacgtt

SEQ ID NO: 492656 - DNA, 19 bp, Mus musculus
  siRNA target sequence for Abcd2 (NM_011994.1,2318-2336).
gtcgcagctcgctggaatt

SEQ ID NO: 492657 - DNA, 19 bp, Mus musculus
  siRNA target sequence for Abcd2 (NM_011994.1,2349-2367).
cagagactcaacgaactat

SEQ ID NO: 492658 - DNA, 19 bp, Mus musculus
  siRNA target sequence for Abcd2 (NM_011994.1,2353-2371).
gactcaacgaactatgcaa

SEQ ID NO: 492659 - DNA, 19 bp, Mus musculus
  siRNA target sequence for Abcd2 (NM_011994.1,2355-2373).
ctcaacgaactatgcaaaa

SEQ ID NO: 492660 - DNA, 19 bp, Mus musculus
  siRNA target sequence for Abcd2 (NM_011994.1,2357-2375).
caacgaactatgcaaaatt

SEQ ID NO: 492661 - DNA, 19 bp, Mus musculus
  siRNA target sequence for Abcd2 (NM_011994.1,2385-2403).
gactcggtgctgaaaacaa

SEQ ID NO: 492662 - DNA, 19 bp, Mus musculus
  siRNA target sequence for Abcd3 (NM_008991.1,99-117).
cggcctgcacggtaagaaa

SEQ ID NO: 492663 - DNA, 19 bp, Mus musculus
  siRNA target sequence for Abcd3 (NM_008991.1,100-118).
ggcctgcacggtaagaaaa

SEQ ID NO: 492664 - DNA, 19 bp, Mus musculus
  siRNA target sequence for Abcd3 (NM_008991.1,102-120).
cctgcacggtaagaaaagt

SEQ ID NO: 492665 - DNA, 19 bp, Mus musculus
  siRNA target sequence for Abcd3 (NM_008991.1,119-137).
gtggaaaaccgccattaca

SEQ ID NO: 492666 - DNA, 19 bp, Mus musculus
  siRNA target sequence for Abcd3 (NM_008991.1,121-139).
ggaaaaccgccattacaga

SEQ ID NO: 492667 - DNA, 19 bp, Mus musculus
  siRNA target sequence for Abcd3 (NM_008991.1,128-146).
cgccattacagaataatga

SEQ ID NO: 492668 - DNA, 19 bp, Mus musculus
  siRNA target sequence for Abcd3 (NM_008991.1,175-193).
gtggacaaagtgtttttat

SEQ ID NO: 492669 - DNA, 19 bp, Mus musculus
  siRNA target sequence for Abcd3 (NM_008991.1,201-219).
ctcacagatcctaaaaatt

SEQ ID NO: 492670 - DNA, 19 bp, Mus musculus
  siRNA target sequence for Abcd3 (NM_008991.1,207-225).
gatcctaaaaattatggtt

SEQ ID NO: 492671 - DNA, 19 bp, Mus musculus
  siRNA target sequence for Abcd3 (NM_008991.1,223-241).
gttcctagaacattttgta

SEQ ID NO: 492672 - DNA, 19 bp, Mus musculus
  siRNA target sequence for Abcd3 (NM_008991.1,246-264).
gacaggctacttgttactt

SEQ ID NO: 492673 - DNA, 19 bp, Mus musculus
  siRNA target sequence for Abcd3 (NM_008991.1,248-266).
caggctacttgttacttat

SEQ ID NO: 492674 - DNA, 19 bp, Mus musculus
  siRNA target sequence for Abcd3 (NM_008991.1,277-295).
ctggtatctcgaacatact

SEQ ID NO: 492675 - DNA, 19 bp, Mus musculus
  siRNA target sequence for Abcd3 (NM_008991.1,279-297).
ggtatctcgaacatactgt

SEQ ID NO: 492676 - DNA, 19 bp, Mus musculus
  siRNA target sequence for Abcd3 (NM_008991.1,298-316).
gatgtttggatgattcaga

SEQ ID NO: 492677 - DNA, 19 bp, Mus musculus
  siRNA target sequence for Abcd3 (NM_008991.1,347-365).
gtcgcagcagcaaagattt

SEQ ID NO: 492678 - DNA, 19 bp, Mus musculus
  siRNA target sequence for Abcd3 (NM_008991.1,349-367).
cgcagcagcaaagatttca

SEQ ID NO: 492679 - DNA, 19 bp, Mus musculus
  siRNA target sequence for Abcd3 (NM_008991.1,361-379).
gatttcaagagatacttat

SEQ ID NO: 492680 - DNA, 19 bp, Mus musculus
  siRNA target sequence for Abcd3 (NM_008991.1,401-419).
ctcttatctctctggttaa

SEQ ID NO: 492681 - DNA, 19 bp, Mus musculus
  siRNA target sequence for Abcd3 (NM_008991.1,403-421).
cttatctctctggttaata

SEQ ID NO: 492682 - DNA, 19 bp, Mus musculus
  siRNA target sequence for Abcd3 (NM_008991.1,410-428).
ctctggttaataacttctt

SEQ ID NO: 492683 - DNA, 19 bp, Mus musculus
  siRNA target sequence for Abcd3 (NM_008991.1,412-430).
ctggttaataacttcttga

SEQ ID NO: 492684 - DNA, 19 bp, Mus musculus
  siRNA target sequence for Abcd3 (NM_008991.1,415-433).
gttaataacttcttgaagt

SEQ ID NO: 492685 - DNA, 19 bp, Mus musculus
  siRNA target sequence for Abcd3 (NM_008991.1,426-444).
cttgaagtatgggttaaat

SEQ ID NO: 492686 - DNA, 19 bp, Mus musculus
  siRNA target sequence for Abcd3 (NM_008991.1,501-519).
ccaagctttcacctattat

SEQ ID NO: 492687 - DNA, 19 bp, Mus musculus
  siRNA target sequence for Abcd3 (NM_008991.1,502-520).
caagctttcacctattata

SEQ ID NO: 492688 - DNA, 19 bp, Mus musculus
  siRNA target sequence for Abcd3 (NM_008991.1,526-544).
ggcaacctggataacagaa

SEQ ID NO: 492689 - DNA, 19 bp, Mus musculus
  siRNA target sequence for Abcd3 (NM_008991.1,527-545).
gcaacctggataacagaat

SEQ ID NO: 492690 - DNA, 19 bp, Mus musculus
  siRNA target sequence for Abcd3 (NM_008991.1,528-546).
caacctggataacagaata

SEQ ID NO: 492691 - DNA, 19 bp, Mus musculus
  siRNA target sequence for Abcd3 (NM_008991.1,531-549).
cctggataacagaatagca

SEQ ID NO: 492692 - DNA, 19 bp, Mus musculus
  siRNA target sequence for Abcd3 (NM_008991.1,534-552).
ggataacagaatagcaaat

SEQ ID NO: 492693 - DNA, 19 bp, Mus musculus
  siRNA target sequence for Abcd3 (NM_008991.1,564-582).
gcttacacaggatgtagaa

SEQ ID NO: 492694 - DNA, 19 bp, Mus musculus
  siRNA target sequence for Abcd3 (NM_008991.1,573-591).
ggatgtagaaaaattttgt

SEQ ID NO: 492695 - DNA, 19 bp, Mus musculus
  siRNA target sequence for Abcd3 (NM_008991.1,594-612).
cagtgtagtcgatctgtat

SEQ ID NO: 492696 - DNA, 19 bp, Mus musculus
  siRNA target sequence for Abcd3 (NM_008991.1,598-616).
gtagtcgatctgtattcaa

SEQ ID NO: 492697 - DNA, 19 bp, Mus musculus
  siRNA target sequence for Abcd3 (NM_008991.1,660-678).
gttaacaagtgcaattgga

SEQ ID NO: 492698 - DNA, 19 bp, Mus musculus
  siRNA target sequence for Abcd3 (NM_008991.1,715-733).
gtttctgggctattcctaa

SEQ ID NO: 492699 - DNA, 19 bp, Mus musculus
  siRNA target sequence for Abcd3 (NM_008991.1,750-768).
cattggtaagatgacaatt

SEQ ID NO: 492700 - DNA, 19 bp, Mus musculus
  siRNA target sequence for Abcd3 (NM_008991.1,790-808).
gaatacagatacgtgaatt

SEQ ID NO: 492701 - DNA, 19 bp, Mus musculus
  siRNA target sequence for Abcd3 (NM_008991.1,813-831).
gcttatcactaatagtgaa

SEQ ID NO: 492702 - DNA, 19 bp, Mus musculus
  siRNA target sequence for Abcd3 (NM_008991.1,819-837).
cactaatagtgaagaaatt

SEQ ID NO: 492703 - DNA, 19 bp, Mus musculus
  siRNA target sequence for Abcd3 (NM_008991.1,895-913).
ctggtggaacacctacata

SEQ ID NO: 492704 - DNA, 19 bp, Mus musculus
  siRNA target sequence for Abcd3 (NM_008991.1,898-916).
gtggaacacctacataatt

SEQ ID NO: 492705 - DNA, 19 bp, Mus musculus
  siRNA target sequence for Abcd3 (NM_008991.1,901-919).
gaacacctacataatttca

SEQ ID NO: 492706 - DNA, 19 bp, Mus musculus
  siRNA target sequence for Abcd3 (NM_008991.1,904-922).
cacctacataatttcattt

SEQ ID NO: 492707 - DNA, 19 bp, Mus musculus
  siRNA target sequence for Abcd3 (NM_008991.1,953-971).
gcatcattgccaaatatgt

SEQ ID NO: 492708 - DNA, 19 bp, Mus musculus
  siRNA target sequence for Abcd3 (NM_008991.1,954-972).
catcattgccaaatatgtt

SEQ ID NO: 492709 - DNA, 19 bp, Mus musculus
  siRNA target sequence for Abcd3 (NM_008991.1,1001-1019).
gtcgccccttcctagatct

SEQ ID NO: 492710 - DNA, 19 bp, Mus musculus
  siRNA target sequence for Abcd3 (NM_008991.1,1108-1126).
gctttgggtcgtatagttt

SEQ ID NO: 492711 - DNA, 19 bp, Mus musculus
  siRNA target sequence for Abcd3 (NM_008991.1,1132-1150).
gggcgtgaaatgactagat

SEQ ID NO: 492712 - DNA, 19 bp, Mus musculus
  siRNA target sequence for Abcd3 (NM_008991.1,1133-1151).
ggcgtgaaatgactagatt

SEQ ID NO: 492713 - DNA, 19 bp, Mus musculus
  siRNA target sequence for Abcd3 (NM_008991.1,1163-1181).
cggctcggattacagaatt

SEQ ID NO: 492714 - DNA, 19 bp, Mus musculus
  siRNA target sequence for Abcd3 (NM_008991.1,1164-1182).
ggctcggattacagaatta

SEQ ID NO: 492715 - DNA, 19 bp, Mus musculus
  siRNA target sequence for Abcd3 (NM_008991.1,1165-1183).
gctcggattacagaattaa

SEQ ID NO: 492716 - DNA, 19 bp, Mus musculus
  siRNA target sequence for Abcd3 (NM_008991.1,1166-1184).
ctcggattacagaattaat

SEQ ID NO: 492717 - DNA, 19 bp, Mus musculus
  siRNA target sequence for Abcd3 (NM_008991.1,1175-1193).
cagaattaatgcaagtact

SEQ ID NO: 492718 - DNA, 19 bp, Mus musculus
  siRNA target sequence for Abcd3 (NM_008991.1,1200-1218).
cttaaatcatggcagatat

SEQ ID NO: 492719 - DNA, 19 bp, Mus musculus
  siRNA target sequence for Abcd3 (NM_008991.1,1211-1229).
gcagatatgaacgtacaat

SEQ ID NO: 492720 - DNA, 19 bp, Mus musculus
  siRNA target sequence for Abcd3 (NM_008991.1,1302-1320).
caatacagacaacattata

SEQ ID NO: 492721 - DNA, 19 bp, Mus musculus
  siRNA target sequence for Abcd3 (NM_008991.1,1307-1325).
cagacaacattataaagtt

SEQ ID NO: 492722 - DNA, 19 bp, Mus musculus
  siRNA target sequence for Abcd3 (NM_008991.1,1314-1332).
cattataaagtttgatcat

SEQ ID NO: 492723 - DNA, 19 bp, Mus musculus
  siRNA target sequence for Abcd3 (NM_008991.1,1323-1341).
gtttgatcatgttccttta

SEQ ID NO: 492724 - DNA, 19 bp, Mus musculus
  siRNA target sequence for Abcd3 (NM_008991.1,1365-1383).
gatccaagaccttagtttt

SEQ ID NO: 492725 - DNA, 19 bp, Mus musculus
  siRNA target sequence for Abcd3 (NM_008991.1,1449-1467).
ccgtgttcttggtgagtta

SEQ ID NO: 492726 - DNA, 19 bp, Mus musculus
  siRNA target sequence for Abcd3 (NM_008991.1,1525-1543).
cctcagcgaccctatatga

SEQ ID NO: 492727 - DNA, 19 bp, Mus musculus
  siRNA target sequence for Abcd3 (NM_008991.1,1737-1755).
ggcgatggcaagactgttt

SEQ ID NO: 492728 - DNA, 19 bp, Mus musculus
  siRNA target sequence for Abcd3 (NM_008991.1,1738-1756).
gcgatggcaagactgtttt

SEQ ID NO: 492729 - DNA, 19 bp, Mus musculus
  siRNA target sequence for Abcd3 (NM_008991.1,1766-1784).
cccagtttgccattttgga

SEQ ID NO: 492730 - DNA, 19 bp, Mus musculus
  siRNA target sequence for Abcd3 (NM_008991.1,1767-1785).
ccagtttgccattttggat

SEQ ID NO: 492731 - DNA, 19 bp, Mus musculus
  siRNA target sequence for Abcd3 (NM_008991.1,1846-1864).
gttggcatcaccctcttta

SEQ ID NO: 492732 - DNA, 19 bp, Mus musculus
  siRNA target sequence for Abcd3 (NM_008991.1,1889-1907).
ggaagcaccacgagtacta

SEQ ID NO: 492733 - DNA, 19 bp, Mus musculus
  siRNA target sequence for Abcd3 (NM_008991.1,1921-1939).
gggagaggcaattatgaat

SEQ ID NO: 492734 - DNA, 19 bp, Mus musculus
  siRNA target sequence for Abcd3 (NM_008991.1,1922-1940).
ggagaggcaattatgaatt

SEQ ID NO: 492735 - DNA, 19 bp, Mus musculus
  siRNA target sequence for Abcd3 (NM_008991.1,1947-1965).
gatcacagaagatacagtt

SEQ ID NO: 492736 - DNA, 19 bp, Mus musculus
  siRNA target sequence for Abcd4 (NM_008992.1,82-100).
gtgccaggcccagattaga

SEQ ID NO: 492737 - DNA, 19 bp, Mus musculus
  siRNA target sequence for Abcd4 (NM_008992.1,85-103).
ccaggcccagattagatct

SEQ ID NO: 492738 - DNA, 19 bp, Mus musculus
  siRNA target sequence for Abcd4 (NM_008992.1,94-112).
gattagatctgcaacttgt

SEQ ID NO: 492739 - DNA, 19 bp, Mus musculus
  siRNA target sequence for Abcd4 (NM_008992.1,118-136).
ggttcgtgaggatacagaa

SEQ ID NO: 492740 - DNA, 19 bp, Mus musculus
  siRNA target sequence for Abcd4 (NM_008992.1,151-169).
cttggtcatcacagaatgt

SEQ ID NO: 492741 - DNA, 19 bp, Mus musculus
  siRNA target sequence for Abcd4 (NM_008992.1,233-251).
cttgatccccagtcagtat

SEQ ID NO: 492742 - DNA, 19 bp, Mus musculus
  siRNA target sequence for Abcd4 (NM_008992.1,236-254).
gatccccagtcagtattat

SEQ ID NO: 492743 - DNA, 19 bp, Mus musculus
  siRNA target sequence for Abcd4 (NM_008992.1,239-257).
ccccagtcagtattatgga

SEQ ID NO: 492744 - DNA, 19 bp, Mus musculus
  siRNA target sequence for Abcd4 (NM_008992.1,302-320).
gctggccgtgacacttatt

SEQ ID NO: 492745 - DNA, 19 bp, Mus musculus
  siRNA target sequence for Abcd4 (NM_008992.1,452-470).
gctgcgggacgacattgat

SEQ ID NO: 492746 - DNA, 19 bp, Mus musculus
  siRNA target sequence for Abcd4 (NM_008992.1,453-471).
ctgcgggacgacattgata

SEQ ID NO: 492747 - DNA, 19 bp, Mus musculus
  siRNA target sequence for Abcd4 (NM_008992.1,455-473).
gcgggacgacattgataat

SEQ ID NO: 492748 - DNA, 19 bp, Mus musculus
  siRNA target sequence for Abcd4 (NM_008992.1,559-577).
ctcttacctactacactta

SEQ ID NO: 492749 - DNA, 19 bp, Mus musculus
  siRNA target sequence for Abcd4 (NM_008992.1,609-627).
cctgtgagcatctttggat

SEQ ID NO: 492750 - DNA, 19 bp, Mus musculus
  siRNA target sequence for Abcd4 (NM_008992.1,638-656).
ggggaccatggtgaacaaa

SEQ ID NO: 492751 - DNA, 19 bp, Mus musculus
  siRNA target sequence for Abcd4 (NM_008992.1,641-659).
gaccatggtgaacaaaact

SEQ ID NO: 492752 - DNA, 19 bp, Mus musculus
  siRNA target sequence for Abcd4 (NM_008992.1,702-720).
ctggagggggattttaggt

SEQ ID NO: 492753 - DNA, 19 bp, Mus musculus
  siRNA target sequence for Abcd4 (NM_008992.1,748-766).
cagagcctgcggctttcta

SEQ ID NO: 492754 - DNA, 19 bp, Mus musculus
  siRNA target sequence for Abcd4 (NM_008992.1,750-768).
gagcctgcggctttctata

SEQ ID NO: 492755 - DNA, 19 bp, Mus musculus
  siRNA target sequence for Abcd4 (NM_008992.1,752-770).
gcctgcggctttctataga

SEQ ID NO: 492756 - DNA, 19 bp, Mus musculus
  siRNA target sequence for Abcd4 (NM_008992.1,847-865).
gggagctctggctgtacat

SEQ ID NO: 492757 - DNA, 19 bp, Mus musculus
  siRNA target sequence for Abcd4 (NM_008992.1,1055-1073).
ggatgttgccggttacaca

SEQ ID NO: 492758 - DNA, 19 bp, Mus musculus
  siRNA target sequence for Abcd4 (NM_008992.1,1104-1122).
ctggacatgtcccgaaaat

SEQ ID NO: 492759 - DNA, 19 bp, Mus musculus
  siRNA target sequence for Abcd4 (NM_008992.1,1106-1124).
ggacatgtcccgaaaatca

SEQ ID NO: 492760 - DNA, 19 bp, Mus musculus
  siRNA target sequence for Abcd4 (NM_008992.1,1109-1127).
catgtcccgaaaatcacaa

SEQ ID NO: 492761 - DNA, 19 bp, Mus musculus
  siRNA target sequence for Abcd4 (NM_008992.1,1152-1170).
gagtgggacttggacaaaa

SEQ ID NO: 492762 - DNA, 19 bp, Mus musculus
  siRNA target sequence for Abcd4 (NM_008992.1,1214-1232).
gctcgatcgggtttccata

SEQ ID NO: 492763 - DNA, 19 bp, Mus musculus
  siRNA target sequence for Abcd4 (NM_008992.1,1215-1233).
ctcgatcgggtttccatat

SEQ ID NO: 492764 - DNA, 19 bp, Mus musculus
  siRNA target sequence for Abcd4 (NM_008992.1,1358-1376).
cctgtgggagggcatgaaa

SEQ ID NO: 492765 - DNA, 19 bp, Mus musculus
  siRNA target sequence for Abcd4 (NM_008992.1,1458-1476).
cttcgggagcaggtgatat

SEQ ID NO: 492766 - DNA, 19 bp, Mus musculus
  siRNA target sequence for Abcd4 (NM_008992.1,1515-1533).
gacgatgagaggattgtga

SEQ ID NO: 492767 - DNA, 19 bp, Mus musculus
  siRNA target sequence for Abcd4 (NM_008992.1,1598-1616).
ggattggaactggtatgat

SEQ ID NO: 492768 - DNA, 19 bp, Mus musculus
  siRNA target sequence for Abcd4 (NM_008992.1,1752-1770).
caactggggatgacattta

SEQ ID NO: 492769 - DNA, 19 bp, Mus musculus
  siRNA target sequence for Abcd4 (NM_008992.1,1840-1858).
gctgggagctgactagaat

SEQ ID NO: 492770 - DNA, 19 bp, Mus musculus
  siRNA target sequence for Abce1 (NM_015751.1,145-163).
gtcaaccacgacaaatgca

SEQ ID NO: 492771 - DNA, 19 bp, Mus musculus
  siRNA target sequence for Abce1 (NM_015751.1,176-194).
gtcgacaggagtgcaaaaa

SEQ ID NO: 492772 - DNA, 19 bp, Mus musculus
  siRNA target sequence for Abce1 (NM_015751.1,178-196).
cgacaggagtgcaaaaaga

SEQ ID NO: 492773 - DNA, 19 bp, Mus musculus
  siRNA target sequence for Abce1 (NM_015751.1,432-450).
gggattagttggaactaat

SEQ ID NO: 492774 - DNA, 19 bp, Mus musculus
  siRNA target sequence for Abce1 (NM_015751.1,701-719).
cacaggcaattgtatgtca

SEQ ID NO: 492775 - DNA, 19 bp, Mus musculus
  siRNA target sequence for Abce1 (NM_015751.1,845-863).
ctagttacctcgatgtcaa

SEQ ID NO: 492776 - DNA, 19 bp, Mus musculus
  siRNA target sequence for Abce1 (NM_015751.1,898-916).
ctaataaatccagatagat

SEQ ID NO: 492777 - DNA, 19 bp, Mus musculus
  siRNA target sequence for Abce1 (NM_015751.1,1191-1209).
gttcgagctagcaattgta

SEQ ID NO: 492778 - DNA, 19 bp, Mus musculus
  siRNA target sequence for Abce1 (NM_015751.1,1379-1397).
gaagtgttcgccagttact

SEQ ID NO: 492779 - DNA, 19 bp, Mus musculus
  siRNA target sequence for Abce1 (NM_015751.1,1557-1575).
cgtctatttgattgatgaa

SEQ ID NO: 492780 - DNA, 19 bp, Mus musculus
  siRNA target sequence for Abce1 (NM_015751.1,1699-1717).
gcagatcgcgtcatcgttt

SEQ ID NO: 492781 - DNA, 19 bp, Mus musculus
  siRNA target sequence for Abce1 (NM_015751.1,1700-1718).
cagatcgcgtcatcgtttt

SEQ ID NO: 492782 - DNA, 19 bp, Mus musculus
  siRNA target sequence for Abce1 (NM_015751.1,1723-1741).
ggtgttccatcaaagaaca

SEQ ID NO: 492783 - DNA, 19 bp, Mus musculus
  siRNA target sequence for Abce1 (NM_015751.1,1733-1751).
caaagaacacagttgcaaa

SEQ ID NO: 492784 - DNA, 19 bp, Mus musculus
  siRNA target sequence for Abce1 (NM_015751.1,1737-1755).
gaacacagttgcaaacagt

SEQ ID NO: 492785 - DNA, 19 bp, Mus musculus
  siRNA target sequence for Abce1 (NM_015751.1,1771-1789).
gctggcatgaacaaatttt

SEQ ID NO: 492786 - DNA, 19 bp, Mus musculus
  siRNA target sequence for Abce1 (NM_015751.1,1772-1790).
ctggcatgaacaaattttt

SEQ ID NO: 492787 - DNA, 19 bp, Mus musculus
  siRNA target sequence for Abce1 (NM_015751.1,1774-1792).
ggcatgaacaaatttttgt

SEQ ID NO: 492788 - DNA, 19 bp, Mus musculus
  siRNA target sequence for Abce1 (NM_015751.1,1791-1809).
gtctcagctcgaaattaca

SEQ ID NO: 492789 - DNA, 19 bp, Mus musculus
  siRNA target sequence for Abce1 (NM_015751.1,1793-1811).
ctcagctcgaaattacatt

SEQ ID NO: 492790 - DNA, 19 bp, Mus musculus
  siRNA target sequence for Abce1 (NM_015751.1,1797-1815).
gctcgaaattacattcaga

SEQ ID NO: 492791 - DNA, 19 bp, Mus musculus
  siRNA target sequence for Abce1 (NM_015751.1,1827-1845).
caactacaggccacgaata

SEQ ID NO: 492792 - DNA, 19 bp, Mus musculus
  siRNA target sequence for Abce1 (NM_015751.1,1835-1853).
ggccacgaataaataagct

SEQ ID NO: 492793 - DNA, 19 bp, Mus musculus
  siRNA target sequence for Abcf2 (NM_013853.1,300-318).
gcttctcaccccaacagta

SEQ ID NO: 492794 - DNA, 19 bp, Mus musculus
  siRNA target sequence for Abcf2 (NM_013853.1,316-334).
gtactgatgtccacattat

SEQ ID NO: 492795 - DNA, 19 bp, Mus musculus
  siRNA target sequence for Abcf2 (NM_013853.1,373-391).
gcgacaccaaactggaatt

SEQ ID NO: 492796 - DNA, 19 bp, Mus musculus
  siRNA target sequence for Abcf2 (NM_013853.1,374-392).
cgacaccaaactggaatta

SEQ ID NO: 492797 - DNA, 19 bp, Mus musculus
  siRNA target sequence for Abcf2 (NM_013853.1,521-539).
gcctcctagcgaaaaaaca

SEQ ID NO: 492798 - DNA, 19 bp, Mus musculus
  siRNA target sequence for Abcf2 (NM_013853.1,694-712).
caaggatcttacatggatt

SEQ ID NO: 492799 - DNA, 19 bp, Mus musculus
  siRNA target sequence for Abcf2 (NM_013853.1,783-801).
cttgctagagccctcttta

SEQ ID NO: 492800 - DNA, 19 bp, Mus musculus
  siRNA target sequence for Abcf2 (NM_013853.1,869-887).
ggaagaggaacttaagact

SEQ ID NO: 492801 - DNA, 19 bp, Mus musculus
  siRNA target sequence for Abcf2 (NM_013853.1,932-950).
gaatggggtctgtaccaat

SEQ ID NO: 492802 - DNA, 19 bp, Mus musculus
  siRNA target sequence for Abcf2 (NM_013853.1,936-954).
ggggtctgtaccaatatca

SEQ ID NO: 492803 - DNA, 19 bp, Mus musculus
  siRNA target sequence for Abcf2 (NM_013853.1,965-983).
caacaagaaactcaagtat

SEQ ID NO: 492804 - DNA, 19 bp, Mus musculus
  siRNA target sequence for Abcf2 (NM_013853.1,988-1006).
cgggtaattatgatcagta

SEQ ID NO: 492805 - DNA, 19 bp, Mus musculus
  siRNA target sequence for Abcf2 (NM_013853.1,991-1009).
gtaattatgatcagtatgt

SEQ ID NO: 492806 - DNA, 19 bp, Mus musculus
  siRNA target sequence for Abcf2 (NM_013853.1,1133-1151).
ggcccaaagcaaagagaaa

SEQ ID NO: 492807 - DNA, 19 bp, Mus musculus
  siRNA target sequence for Abcf2 (NM_013853.1,1170-1188).
gcatccggactgacagaaa

SEQ ID NO: 492808 - DNA, 19 bp, Mus musculus
  siRNA target sequence for Abcf2 (NM_013853.1,1198-1216).
gtgacaagacgctgtcatt

SEQ ID NO: 492809 - DNA, 19 bp, Mus musculus
  siRNA target sequence for Abcf2 (NM_013853.1,1202-1220).
caagacgctgtcattttat

SEQ ID NO: 492810 - DNA, 19 bp, Mus musculus
  siRNA target sequence for Abcf2 (NM_013853.1,1265-1283).
gaacgtgagcttcaaatat

SEQ ID NO: 492811 - DNA, 19 bp, Mus musculus
  siRNA target sequence for Abcf2 (NM_013853.1,1269-1287).
gtgagcttcaaatatacga

SEQ ID NO: 492812 - DNA, 19 bp, Mus musculus
  siRNA target sequence for Abcf2 (NM_013853.1,1271-1289).
gagcttcaaatatacgaaa

SEQ ID NO: 492813 - DNA, 19 bp, Mus musculus
  siRNA target sequence for Abcf2 (NM_013853.1,1290-1308).
gacgggccttgcatctaca

SEQ ID NO: 492814 - DNA, 19 bp, Mus musculus
  siRNA target sequence for Abcf2 (NM_013853.1,1292-1310).
cgggccttgcatctacaat

SEQ ID NO: 492815 - DNA, 19 bp, Mus musculus
  siRNA target sequence for Abcf2 (NM_013853.1,1297-1315).
cttgcatctacaataatct

SEQ ID NO: 492816 - DNA, 19 bp, Mus musculus
  siRNA target sequence for Abcf2 (NM_013853.1,1301-1319).
catctacaataatctagaa

SEQ ID NO: 492817 - DNA, 19 bp, Mus musculus
  siRNA target sequence for Abcf2 (NM_013853.1,1422-1440).
ggaatgatccggaagcatt

SEQ ID NO: 492818 - DNA, 19 bp, Mus musculus
  siRNA target sequence for Abcf2 (NM_013853.1,1427-1445).
gatccggaagcattctcat

SEQ ID NO: 492819 - DNA, 19 bp, Mus musculus
  siRNA target sequence for Abcf2 (NM_013853.1,1436-1454).
gcattctcatgtcaagata

SEQ ID NO: 492820 - DNA, 19 bp, Mus musculus
  siRNA target sequence for Abcf2 (NM_013853.1,1448-1466).
caagatagggcgttaccat

SEQ ID NO: 492821 - DNA, 19 bp, Mus musculus
  siRNA target sequence for Abcf2 (NM_013853.1,1494-1512).
gacctttcaccattggaat

SEQ ID NO: 492822 - DNA, 19 bp, Mus musculus
  siRNA target sequence for Abcf3 (NM_013852.1,16-34).
cgacttgcgctgatatcct

SEQ ID NO: 492823 - DNA, 19 bp, Mus musculus
  siRNA target sequence for Abcf3 (NM_013852.1,37-55).
gaagcgagttccctgaaat

SEQ ID NO: 492824 - DNA, 19 bp, Mus musculus
  siRNA target sequence for Abcf3 (NM_013852.1,40-58).
gcgagttccctgaaattga

SEQ ID NO: 492825 - DNA, 19 bp, Mus musculus
  siRNA target sequence for Abcf3 (NM_013852.1,97-115).
gtggcagcgcggatttcga

SEQ ID NO: 492826 - DNA, 19 bp, Mus musculus
  siRNA target sequence for Abcf3 (NM_013852.1,135-153).
gaagctgtcggggaactat

SEQ ID NO: 492827 - DNA, 19 bp, Mus musculus
  siRNA target sequence for Abcf3 (NM_013852.1,201-219).
gtctgtcagcgcatgtaca

SEQ ID NO: 492828 - DNA, 19 bp, Mus musculus
  siRNA target sequence for Abcf3 (NM_013852.1,281-299).
catccagttgtcgaagata

SEQ ID NO: 492829 - DNA, 19 bp, Mus musculus
  siRNA target sequence for Abcf3 (NM_013852.1,287-305).
gttgtcgaagataatggaa

SEQ ID NO: 492830 - DNA, 19 bp, Mus musculus
  siRNA target sequence for Abcf3 (NM_013852.1,292-310).
cgaagataatggaaaacta

SEQ ID NO: 492831 - DNA, 19 bp, Mus musculus
  siRNA target sequence for Abcf3 (NM_013852.1,348-366).
gaacagtcctcgacagtaa

SEQ ID NO: 492832 - DNA, 19 bp, Mus musculus
  siRNA target sequence for Abcf3 (NM_013852.1,361-379).
cagtaaatgcgaagaaact

SEQ ID NO: 492833 - DNA, 19 bp, Mus musculus
  siRNA target sequence for Abcf3 (NM_013852.1,445-463).
ccagcaaccctctagtctt

SEQ ID NO: 492834 - DNA, 19 bp, Mus musculus
  siRNA target sequence for Abcf3 (NM_013852.1,513-531).
gaatcatctggcaagaaca

SEQ ID NO: 492835 - DNA, 19 bp, Mus musculus
  siRNA target sequence for Abcf3 (NM_013852.1,524-542).
caagaacaagtcctatgat

SEQ ID NO: 492836 - DNA, 19 bp, Mus musculus
  siRNA target sequence for Abcf3 (NM_013852.1,535-553).
cctatgatgtgcgaattga

SEQ ID NO: 492837 - DNA, 19 bp, Mus musculus
  siRNA target sequence for Abcf3 (NM_013852.1,545-563).
gcgaattgagaactttgat

SEQ ID NO: 492838 - DNA, 19 bp, Mus musculus
  siRNA target sequence for Abcf3 (NM_013852.1,547-565).
gaattgagaactttgatgt

SEQ ID NO: 492839 - DNA, 19 bp, Mus musculus
  siRNA target sequence for Abcf3 (NM_013852.1,591-609).
gctggagcagatgtaaact

SEQ ID NO: 492840 - DNA, 19 bp, Mus musculus
  siRNA target sequence for Abcf3 (NM_013852.1,654-672).
gggaagacgacattgctaa

SEQ ID NO: 492841 - DNA, 19 bp, Mus musculus
  siRNA target sequence for Abcf3 (NM_013852.1,655-673).
ggaagacgacattgctaaa

SEQ ID NO: 492842 - DNA, 19 bp, Mus musculus
  siRNA target sequence for Abcf3 (NM_013852.1,696-714).
cgtgtcccagcccatattt

SEQ ID NO: 492843 - DNA, 19 bp, Mus musculus
  siRNA target sequence for Abcf3 (NM_013852.1,926-944).
cagagcatcagtcattctt

SEQ ID NO: 492844 - DNA, 19 bp, Mus musculus
  siRNA target sequence for Abcf3 (NM_013852.1,950-968).
ccttggttttactcctaaa

SEQ ID NO: 492845 - DNA, 19 bp, Mus musculus
  siRNA target sequence for Abcf3 (NM_013852.1,955-973).
gttttactcctaaaatgca

SEQ ID NO: 492846 - DNA, 19 bp, Mus musculus
  siRNA target sequence for Abcf3 (NM_013852.1,1127-1145).
gtggccctccactatccta

SEQ ID NO: 492847 - DNA, 19 bp, Mus musculus
  siRNA target sequence for Abcf3 (NM_013852.1,1334-1352).
cgaccgttttcgatacaat

SEQ ID NO: 492848 - DNA, 19 bp, Mus musculus
  siRNA target sequence for Abcf3 (NM_013852.1,1338-1356).
cgttttcgatacaatgcaa

SEQ ID NO: 492849 - DNA, 19 bp, Mus musculus
  siRNA target sequence for Abcf3 (NM_013852.1,1366-1384).
ctcaagtgcagagtaaact

SEQ ID NO: 492850 - DNA, 19 bp, Mus musculus
  siRNA target sequence for Abcf3 (NM_013852.1,1397-1415).
gaagctacctgaactaaaa

SEQ ID NO: 492851 - DNA, 19 bp, Mus musculus
  siRNA target sequence for Abcf3 (NM_013852.1,1453-1471).
ccgatggatttgagaagtt

SEQ ID NO: 492852 - DNA, 19 bp, Mus musculus
  siRNA target sequence for Abcf3 (NM_013852.1,1494-1512).
gatgaggtggatttctact

SEQ ID NO: 492853 - DNA, 19 bp, Mus musculus
  siRNA target sequence for Abcf3 (NM_013852.1,1762-1780).
ggctacctgaagaggaata

SEQ ID NO: 492854 - DNA, 19 bp, Mus musculus
  siRNA target sequence for Abcf3 (NM_013852.1,1763-1781).
gctacctgaagaggaatat

SEQ ID NO: 492855 - DNA, 19 bp, Mus musculus
  siRNA target sequence for Abcf3 (NM_013852.1,1827-1845).
cgtcctgttgcgagcttat

SEQ ID NO: 492856 - DNA, 19 bp, Mus musculus
  siRNA target sequence for Abcf3 (NM_013852.1,1889-1907).
gccttgccccaacttctat

SEQ ID NO: 492857 - DNA, 19 bp, Mus musculus
  siRNA target sequence for Abcf3 (NM_013852.1,1890-1908).
ccttgccccaacttctata

SEQ ID NO: 492858 - DNA, 19 bp, Mus musculus
  siRNA target sequence for Abcf3 (NM_013852.1,1962-1980).
caggctctcaacaacttca

SEQ ID NO: 492859 - DNA, 19 bp, Mus musculus
  siRNA target sequence for Abcg1 (NM_009593.1,106-124).
ggtcggcaccgccatgaat

SEQ ID NO: 492860 - DNA, 19 bp, Mus musculus
  siRNA target sequence for Abcg1 (NM_009593.1,299-317).
gccgtgaacatcgaattca

SEQ ID NO: 492861 - DNA, 19 bp, Mus musculus
  siRNA target sequence for Abcg1 (NM_009593.1,300-318).
ccgtgaacatcgaattcaa

SEQ ID NO: 492862 - DNA, 19 bp, Mus musculus
  siRNA target sequence for Abcg1 (NM_009593.1,365-383).
ggatacaagacccttttga

SEQ ID NO: 492863 - DNA, 19 bp, Mus musculus
  siRNA target sequence for Abcg1 (NM_009593.1,366-384).
gatacaagacccttttgaa

SEQ ID NO: 492864 - DNA, 19 bp, Mus musculus
  siRNA target sequence for Abcg1 (NM_009593.1,937-955).
gctttatgtcctaagtcaa

SEQ ID NO: 492865 - DNA, 19 bp, Mus musculus
  siRNA target sequence for Abcg1 (NM_009593.1,1071-1089).
gggagtacggggatcagaa

SEQ ID NO: 492866 - DNA, 19 bp, Mus musculus
  siRNA target sequence for Abcg1 (NM_009593.1,1162-1180).
cgatgtgaacccgtttctt

SEQ ID NO: 492867 - DNA, 19 bp, Mus musculus
  siRNA target sequence for Abcg1 (NM_009593.1,1557-1575).
ccgatgtcccctttcagat

SEQ ID NO: 492868 - DNA, 19 bp, Mus musculus
  siRNA target sequence for Abcg1 (NM_009593.1,1588-1606).
ggcctactgcagtatcgta

SEQ ID NO: 492869 - DNA, 19 bp, Mus musculus
  siRNA target sequence for Abcg1 (NM_009593.1,1589-1607).
gcctactgcagtatcgtat

SEQ ID NO: 492870 - DNA, 19 bp, Mus musculus
  siRNA target sequence for Abcg1 (NM_009593.1,1590-1608).
cctactgcagtatcgtata

SEQ ID NO: 492871 - DNA, 19 bp, Mus musculus
  siRNA target sequence for Abcg1 (NM_009593.1,1629-1647).
cggacgctgtgcgttttgt

SEQ ID NO: 492872 - DNA, 19 bp, Mus musculus
  siRNA target sequence for Abcg1 (NM_009593.1,1980-1998).
cgaagctgtacctggattt

SEQ ID NO: 492873 - DNA, 19 bp, Mus musculus
  siRNA target sequence for Abcg1 (NM_009593.1,2031-2049).
ggctcatcgcctatttcgt

SEQ ID NO: 492874 - DNA, 19 bp, Mus musculus
  siRNA target sequence for Abcg2 (NM_011920.1,181-199).
ccggaaaacagttgagaaa

SEQ ID NO: 492875 - DNA, 19 bp, Mus musculus
  siRNA target sequence for Abcg2 (NM_011920.1,351-369).
ctcaacctgcccatttcaa

SEQ ID NO: 492876 - DNA, 19 bp, Mus musculus
  siRNA target sequence for Abcg2 (NM_011920.1,452-470).
cttcgacttccaacaacta

SEQ ID NO: 492877 - DNA, 19 bp, Mus musculus
  siRNA target sequence for Abcg2 (NM_011920.1,462-480).
caacaactatgaagaatca

SEQ ID NO: 492878 - DNA, 19 bp, Mus musculus
  siRNA target sequence for Abcg2 (NM_011920.1,465-483).
caactatgaagaatcatga

SEQ ID NO: 492879 - DNA, 19 bp, Mus musculus
  siRNA target sequence for Abcg2 (NM_011920.1,491-509).
gaacggattaacacaatca

SEQ ID NO: 492880 - DNA, 19 bp, Mus musculus
  siRNA target sequence for Abcg2 (NM_011920.1,494-512).
cggattaacacaatcatta

SEQ ID NO: 492881 - DNA, 19 bp, Mus musculus
  siRNA target sequence for Abcg2 (NM_011920.1,678-696).
cgaatgctgtccttttgct

SEQ ID NO: 492882 - DNA, 19 bp, Mus musculus
  siRNA target sequence for Abcg2 (NM_011920.1,689-707).
cttttgctcctgaaaagga

SEQ ID NO: 492883 - DNA, 19 bp, Mus musculus
  siRNA target sequence for Abcg2 (NM_011920.1,711-729).
ctaaacagggtcgaacaat

SEQ ID NO: 492884 - DNA, 19 bp, Mus musculus
  siRNA target sequence for Abcg2 (NM_011920.1,716-734).
cagggtcgaacaatcatct

SEQ ID NO: 492885 - DNA, 19 bp, Mus musculus
  siRNA target sequence for Abcg2 (NM_011920.1,719-737).
ggtcgaacaatcatcttct

SEQ ID NO: 492886 - DNA, 19 bp, Mus musculus
  siRNA target sequence for Abcg2 (NM_011920.1,752-770).
cggtattccatctttaagt

SEQ ID NO: 492887 - DNA, 19 bp, Mus musculus
  siRNA target sequence for Abcg2 (NM_011920.1,753-771).
ggtattccatctttaagtt

SEQ ID NO: 492888 - DNA, 19 bp, Mus musculus
  siRNA target sequence for Abcg2 (NM_011920.1,759-777).
ccatctttaagttgtttga

SEQ ID NO: 492889 - DNA, 19 bp, Mus musculus
  siRNA target sequence for Abcg2 (NM_011920.1,863-881).
cactgtgagccctacaaca

SEQ ID NO: 492890 - DNA, 19 bp, Mus musculus
  siRNA target sequence for Abcg2 (NM_011920.1,888-906).
cggattttttccttgatgt

SEQ ID NO: 492891 - DNA, 19 bp, Mus musculus
  siRNA target sequence for Abcg2 (NM_011920.1,907-925).
catcaatggagattcttct

SEQ ID NO: 492892 - DNA, 19 bp, Mus musculus
  siRNA target sequence for Abcg2 (NM_011920.1,1037-1055).
gccatctatggagaaacaa

SEQ ID NO: 492893 - DNA, 19 bp, Mus musculus
  siRNA target sequence for Abcg2 (NM_011920.1,1053-1071).
caaaagctgaattagatca

SEQ ID NO: 492894 - DNA, 19 bp, Mus musculus
  siRNA target sequence for Abcg2 (NM_011920.1,1098-1116).
gaacatcggccttcaaaga

SEQ ID NO: 492895 - DNA, 19 bp, Mus musculus
  siRNA target sequence for Abcg2 (NM_011920.1,1111-1129).
caaagagccagtctatgtt

SEQ ID NO: 492896 - DNA, 19 bp, Mus musculus
  siRNA target sequence for Abcg2 (NM_011920.1,1160-1178).
gccaggcgctcatttaaaa

SEQ ID NO: 492897 - DNA, 19 bp, Mus musculus
  siRNA target sequence for Abcg2 (NM_011920.1,1164-1182).
ggcgctcatttaaaaactt

SEQ ID NO: 492898 - DNA, 19 bp, Mus musculus
  siRNA target sequence for Abcg2 (NM_011920.1,1199-1217).
gcttctgttgctcagttaa

SEQ ID NO: 492899 - DNA, 19 bp, Mus musculus
  siRNA target sequence for Abcg2 (NM_011920.1,1200-1218).
cttctgttgctcagttaat

SEQ ID NO: 492900 - DNA, 19 bp, Mus musculus
  siRNA target sequence for Abcg2 (NM_011920.1,1205-1223).
gttgctcagttaattgtta

SEQ ID NO: 492901 - DNA, 19 bp, Mus musculus
  siRNA target sequence for Abcg2 (NM_011920.1,1213-1231).
gttaattgttacagtcata

SEQ ID NO: 492902 - DNA, 19 bp, Mus musculus
  siRNA target sequence for Abcg2 (NM_011920.1,1226-1244).
gtcatactggggcttatta

SEQ ID NO: 492903 - DNA, 19 bp, Mus musculus
  siRNA target sequence for Abcg2 (NM_011920.1,1251-1269).
ccatttactttgatctgaa

SEQ ID NO: 492904 - DNA, 19 bp, Mus musculus
  siRNA target sequence for Abcg2 (NM_011920.1,1252-1270).
catttactttgatctgaaa

SEQ ID NO: 492905 - DNA, 19 bp, Mus musculus
  siRNA target sequence for Abcg2 (NM_011920.1,1258-1276).
ctttgatctgaaatatgat

SEQ ID NO: 492906 - DNA, 19 bp, Mus musculus
  siRNA target sequence for Abcg2 (NM_011920.1,1277-1295).
gccgctggaatgcaaaata

SEQ ID NO: 492907 - DNA, 19 bp, Mus musculus
  siRNA target sequence for Abcg2 (NM_011920.1,1372-1390).
gaagaaactcttcatacat

SEQ ID NO: 492908 - DNA, 19 bp, Mus musculus
  siRNA target sequence for Abcg2 (NM_011920.1,1391-1409).
gagtacatcagtggatatt

SEQ ID NO: 492909 - DNA, 19 bp, Mus musculus
  siRNA target sequence for Abcg2 (NM_011920.1,1478-1496).
gttatattcacttgtatat

SEQ ID NO: 492910 - DNA, 19 bp, Mus musculus
  siRNA target sequence for Abcg2 (NM_011920.1,1519-1537).
gaagacggtggatgctttt

SEQ ID NO: 492911 - DNA, 19 bp, Mus musculus
  siRNA target sequence for Abcg2 (NM_011920.1,1524-1542).
cggtggatgcttttttcat

SEQ ID NO: 492912 - DNA, 19 bp, Mus musculus
  siRNA target sequence for Abcg2 (NM_011920.1,1543-1561).
catgatgtttacccttata

SEQ ID NO: 492913 - DNA, 19 bp, Mus musculus
  siRNA target sequence for Abcg2 (NM_011920.1,1623-1641).
ctgtagcaacacttctcat

SEQ ID NO: 492914 - DNA, 19 bp, Mus musculus
  siRNA target sequence for Abcg2 (NM_011920.1,1628-1646).
gcaacacttctcatgacaa

SEQ ID NO: 492915 - DNA, 19 bp, Mus musculus
  siRNA target sequence for Abcg2 (NM_011920.1,1629-1647).
caacacttctcatgacaat

SEQ ID NO: 492916 - DNA, 19 bp, Mus musculus
  siRNA target sequence for Abcg2 (NM_011920.1,1639-1657).
catgacaatcgcttttgta

SEQ ID NO: 492917 - DNA, 19 bp, Mus musculus
  siRNA target sequence for Abcg2 (NM_011920.1,1642-1660).
gacaatcgcttttgtattt

SEQ ID NO: 492918 - DNA, 19 bp, Mus musculus
  siRNA target sequence for Abcg2 (NM_011920.1,1676-1694).
ggcctcttggtgaatctca

SEQ ID NO: 492919 - DNA, 19 bp, Mus musculus
  siRNA target sequence for Abcg2 (NM_011920.1,1714-1732).
gtcctggcttcagtacttt

SEQ ID NO: 492920 - DNA, 19 bp, Mus musculus
  siRNA target sequence for Abcg2 (NM_011920.1,1753-1771).
cacagctttgcagtataat

SEQ ID NO: 492921 - DNA, 19 bp, Mus musculus
  siRNA target sequence for Abcg2 (NM_011920.1,1755-1773).
cagctttgcagtataatga

SEQ ID NO: 492922 - DNA, 19 bp, Mus musculus
  siRNA target sequence for Abcg2 (NM_011920.1,1777-1795).
cttgggacaagagttttgt

SEQ ID NO: 492923 - DNA, 19 bp, Mus musculus
  siRNA target sequence for Abcg2 (NM_011920.1,1789-1807).
gttttgtccaggattcaat

SEQ ID NO: 492924 - DNA, 19 bp, Mus musculus
  siRNA target sequence for Abcg2 (NM_011920.1,1814-1832).
gacaacagcacttgtgtta

SEQ ID NO: 492925 - DNA, 19 bp, Mus musculus
  siRNA target sequence for Abcg2 (NM_011920.1,1827-1845).
gtgttaacagctatgcaat

SEQ ID NO: 492926 - DNA, 19 bp, Mus musculus
  siRNA target sequence for Abcg2 (NM_011920.1,1834-1852).
cagctatgcaatatgtact

SEQ ID NO: 492927 - DNA, 19 bp, Mus musculus
  siRNA target sequence for Abcg2 (NM_011920.1,1848-1866).
gtactggtaacgagtactt

SEQ ID NO: 492928 - DNA, 19 bp, Mus musculus
  siRNA target sequence for Abcg2 (NM_011920.1,1853-1871).
ggtaacgagtacttgataa

SEQ ID NO: 492929 - DNA, 19 bp, Mus musculus
  siRNA target sequence for Abcg2 (NM_011920.1,1854-1872).
gtaacgagtacttgataaa

SEQ ID NO: 492930 - DNA, 19 bp, Mus musculus
  siRNA target sequence for Abcg2 (NM_011920.1,1896-1914).
ggggactgtggaagaatca

SEQ ID NO: 492931 - DNA, 19 bp, Mus musculus
  siRNA target sequence for Abcg2 (NM_011920.1,1918-1936).
ggccctggcttgtatgatt

SEQ ID NO: 492932 - DNA, 19 bp, Mus musculus
  siRNA target sequence for Abcg2 (NM_011920.1,1919-1937).
gccctggcttgtatgatta

SEQ ID NO: 492933 - DNA, 19 bp, Mus musculus
  siRNA target sequence for Abcg2 (NM_011920.1,1920-1938).
ccctggcttgtatgattat

SEQ ID NO: 492934 - DNA, 19 bp, Mus musculus
  siRNA target sequence for Abcg2 (NM_011920.1,1955-1973).
gcctacctgaaattgttgt

SEQ ID NO: 492935 - DNA, 19 bp, Mus musculus
  siRNA target sequence for Abcg2 (NM_011920.1,1956-1974).
cctacctgaaattgttgtt

SEQ ID NO: 492936 - DNA, 19 bp, Mus musculus
  siRNA target sequence for Abcg2 (NM_011920.1,1957-1975).
ctacctgaaattgttgttt

SEQ ID NO: 492937 - DNA, 19 bp, Mus musculus
  siRNA target sequence for Abcg3 (NM_030239.1,156-174).
gaccccactgtaatctcaa

SEQ ID NO: 492938 - DNA, 19 bp, Mus musculus
  siRNA target sequence for Abcg3 (NM_030239.1,159-177).
cccactgtaatctcaatga

SEQ ID NO: 492939 - DNA, 19 bp, Mus musculus
  siRNA target sequence for Abcg3 (NM_030239.1,160-178).
ccactgtaatctcaatgat

SEQ ID NO: 492940 - DNA, 19 bp, Mus musculus
  siRNA target sequence for Abcg3 (NM_030239.1,243-261).
gctgtgttgagttttcaca

SEQ ID NO: 492941 - DNA, 19 bp, Mus musculus
  siRNA target sequence for Abcg3 (NM_030239.1,289-307).
gtggctttccacttcgtaa

SEQ ID NO: 492942 - DNA, 19 bp, Mus musculus
  siRNA target sequence for Abcg3 (NM_030239.1,292-310).
gctttccacttcgtaaaaa

SEQ ID NO: 492943 - DNA, 19 bp, Mus musculus
  siRNA target sequence for Abcg3 (NM_030239.1,303-321).
cgtaaaaaggcatatgtga

SEQ ID NO: 492944 - DNA, 19 bp, Mus musculus
  siRNA target sequence for Abcg3 (NM_030239.1,318-336).
gtgatagaaagactatcaa

SEQ ID NO: 492945 - DNA, 19 bp, Mus musculus
  siRNA target sequence for Abcg3 (NM_030239.1,358-376).
ctggcctcaatgccattat

SEQ ID NO: 492946 - DNA, 19 bp, Mus musculus
  siRNA target sequence for Abcg3 (NM_030239.1,397-415).
gatctttgttgttagatgt

SEQ ID NO: 492947 - DNA, 19 bp, Mus musculus
  siRNA target sequence for Abcg3 (NM_030239.1,428-446).
gagagatccgcgtggatta

SEQ ID NO: 492948 - DNA, 19 bp, Mus musculus
  siRNA target sequence for Abcg3 (NM_030239.1,470-488).
caaacctcgacctgctaat

SEQ ID NO: 492949 - DNA, 19 bp, Mus musculus
  siRNA target sequence for Abcg3 (NM_030239.1,474-492).
cctcgacctgctaatttca

SEQ ID NO: 492950 - DNA, 19 bp, Mus musculus
  siRNA target sequence for Abcg3 (NM_030239.1,475-493).
ctcgacctgctaatttcaa

SEQ ID NO: 492951 - DNA, 19 bp, Mus musculus
  siRNA target sequence for Abcg3 (NM_030239.1,480-498).
cctgctaatttcaagtgta

SEQ ID NO: 492952 - DNA, 19 bp, Mus musculus
  siRNA target sequence for Abcg3 (NM_030239.1,483-501).
gctaatttcaagtgtactt

SEQ ID NO: 492953 - DNA, 19 bp, Mus musculus
  siRNA target sequence for Abcg3 (NM_030239.1,542-560).
gaccgtgagagacaattta

SEQ ID NO: 492954 - DNA, 19 bp, Mus musculus
  siRNA target sequence for Abcg3 (NM_030239.1,544-562).
ccgtgagagacaatttaga

SEQ ID NO: 492955 - DNA, 19 bp, Mus musculus
  siRNA target sequence for Abcg3 (NM_030239.1,579-597).
cgtctcccagtgactataa

SEQ ID NO: 492956 - DNA, 19 bp, Mus musculus
  siRNA target sequence for Abcg3 (NM_030239.1,584-602).
cccagtgactataacaaga

SEQ ID NO: 492957 - DNA, 19 bp, Mus musculus
  siRNA target sequence for Abcg3 (NM_030239.1,689-707).
caggaaaaggaccagtata

SEQ ID NO: 492958 - DNA, 19 bp, Mus musculus
  siRNA target sequence for Abcg3 (NM_030239.1,692-710).
gaaaaggaccagtatagca

SEQ ID NO: 492959 - DNA, 19 bp, Mus musculus
  siRNA target sequence for Abcg3 (NM_030239.1,724-742).
ctgagcatcccattttgtt

SEQ ID NO: 492960 - DNA, 19 bp, Mus musculus
  siRNA target sequence for Abcg3 (NM_030239.1,726-744).
gagcatcccattttgttct

SEQ ID NO: 492961 - DNA, 19 bp, Mus musculus
  siRNA target sequence for Abcg3 (NM_030239.1,753-771).
cccacaactggcttagatt

SEQ ID NO: 492962 - DNA, 19 bp, Mus musculus
  siRNA target sequence for Abcg3 (NM_030239.1,754-772).
ccacaactggcttagattt

SEQ ID NO: 492963 - DNA, 19 bp, Mus musculus
  siRNA target sequence for Abcg3 (NM_030239.1,762-780).
ggcttagatttgagaacta

SEQ ID NO: 492964 - DNA, 19 bp, Mus musculus
  siRNA target sequence for Abcg3 (NM_030239.1,775-793).
gaactacgactgatgtcat

SEQ ID NO: 492965 - DNA, 19 bp, Mus musculus
  siRNA target sequence for Abcg3 (NM_030239.1,778-796).
ctacgactgatgtcatttt

SEQ ID NO: 492966 - DNA, 19 bp, Mus musculus
  siRNA target sequence for Abcg3 (NM_030239.1,781-799).
cgactgatgtcattttagt

SEQ ID NO: 492967 - DNA, 19 bp, Mus musculus
  siRNA target sequence for Abcg3 (NM_030239.1,897-915).
gcttcaggaaaagttatgt

SEQ ID NO: 492968 - DNA, 19 bp, Mus musculus
  siRNA target sequence for Abcg3 (NM_030239.1,1010-1028).
cattaatggaggtttctct

SEQ ID NO: 492969 - DNA, 19 bp, Mus musculus
  siRNA target sequence for Abcg3 (NM_030239.1,1017-1035).
ggaggtttctctaatatat

SEQ ID NO: 492970 - DNA, 19 bp, Mus musculus
  siRNA target sequence for Abcg3 (NM_030239.1,1021-1039).
gtttctctaatatattaga

SEQ ID NO: 492971 - DNA, 19 bp, Mus musculus
  siRNA target sequence for Abcg3 (NM_030239.1,1052-1070).
cggccatgaagatgacaaa

SEQ ID NO: 492972 - DNA, 19 bp, Mus musculus
  siRNA target sequence for Abcg3 (NM_030239.1,1054-1072).
gccatgaagatgacaaata

SEQ ID NO: 492973 - DNA, 19 bp, Mus musculus
  siRNA target sequence for Abcg3 (NM_030239.1,1105-1123).
caggaaaactggccaatat

SEQ ID NO: 492974 - DNA, 19 bp, Mus musculus
  siRNA target sequence for Abcg3 (NM_030239.1,1128-1146).
gcccagtccccattataca

SEQ ID NO: 492975 - DNA, 19 bp, Mus musculus
  siRNA target sequence for Abcg3 (NM_030239.1,1130-1148).
ccagtccccattatacagt

SEQ ID NO: 492976 - DNA, 19 bp, Mus musculus
  siRNA target sequence for Abcg3 (NM_030239.1,1252-1270).
ggattatctgtcaatcatt

SEQ ID NO: 492977 - DNA, 19 bp, Mus musculus
  siRNA target sequence for Abcg3 (NM_030239.1,1291-1309).
catgggtcactgtgattca

SEQ ID NO: 492978 - DNA, 19 bp, Mus musculus
  siRNA target sequence for Abcg3 (NM_030239.1,1304-1322).
gattcaggccattatcaca

SEQ ID NO: 492979 - DNA, 19 bp, Mus musculus
  siRNA target sequence for Abcg3 (NM_030239.1,1348-1366).
ctgctttccgtgtcctaaa

SEQ ID NO: 492980 - DNA, 19 bp, Mus musculus
  siRNA target sequence for Abcg3 (NM_030239.1,1356-1374).
cgtgtcctaaaaaatgatt

SEQ ID NO: 492981 - DNA, 19 bp, Mus musculus
  siRNA target sequence for Abcg3 (NM_030239.1,1469-1487).
cagggttcgctttctacat

SEQ ID NO: 492982 - DNA, 19 bp, Mus musculus
  siRNA target sequence for Abcg3 (NM_030239.1,1471-1489).
gggttcgctttctacatga

SEQ ID NO: 492983 - DNA, 19 bp, Mus musculus
  siRNA target sequence for Abcg3 (NM_030239.1,1570-1588).
caagtactgtattttctct

SEQ ID NO: 492984 - DNA, 19 bp, Mus musculus
  siRNA target sequence for Abcg3 (NM_030239.1,1573-1591).
gtactgtattttctctaat

SEQ ID NO: 492985 - DNA, 19 bp, Mus musculus
  siRNA target sequence for Abcg3 (NM_030239.1,1608-1626).
ggagtaaaaatgagtatga

SEQ ID NO: 492986 - DNA, 19 bp, Mus musculus
  siRNA target sequence for Abcg3 (NM_030239.1,1731-1749).
ctgcttgtgaccatctact

SEQ ID NO: 492987 - DNA, 19 bp, Mus musculus
  siRNA target sequence for Abcg3 (NM_030239.1,1737-1755).
gtgaccatctactttgtgt

SEQ ID NO: 492988 - DNA, 19 bp, Mus musculus
  siRNA target sequence for Abcg3 (NM_030239.1,1831-1849).
gcattcctcattatggatt

SEQ ID NO: 492989 - DNA, 19 bp, Mus musculus
  siRNA target sequence for Abcg3 (NM_030239.1,1852-1870).
gggctctgctgcataatga

SEQ ID NO: 492990 - DNA, 19 bp, Mus musculus
  siRNA target sequence for Abcg3 (NM_030239.1,1854-1872).
gctctgctgcataatgaat

SEQ ID NO: 492991 - DNA, 19 bp, Mus musculus
  siRNA target sequence for Abcg3 (NM_030239.1,1921-1939).
gatgccataactatgttat

SEQ ID NO: 492992 - DNA, 19 bp, Mus musculus
  siRNA target sequence for Abcg3 (NM_030239.1,1948-1966).
gtgaagaattcttgatgat

SEQ ID NO: 492993 - DNA, 19 bp, Mus musculus
  siRNA target sequence for Abcg3 (NM_030239.1,2067-2085).
caggttaagaatattagaa

SEQ ID NO: 492994 - DNA, 19 bp, Mus musculus
  siRNA target sequence for Abcg3 (NM_030239.1,2069-2087).
ggttaagaatattagaaat

SEQ ID NO: 492995 - DNA, 19 bp, Mus musculus
  siRNA target sequence for Abcg4 (NM_138955.2,341-359).
ctgaccacgcacctaaaga

SEQ ID NO: 492996 - DNA, 19 bp, Mus musculus
  siRNA target sequence for Abcg4 (NM_138955.2,471-489).
ggcgcaaacggggttacaa

SEQ ID NO: 492997 - DNA, 19 bp, Mus musculus
  siRNA target sequence for Abcg4 (NM_138955.2,473-491).
cgcaaacggggttacaaga

SEQ ID NO: 492998 - DNA, 19 bp, Mus musculus
  siRNA target sequence for Abcg4 (NM_138955.2,935-953).
ctagacagcgcttcttgtt

SEQ ID NO: 492999 - DNA, 19 bp, Mus musculus
  siRNA target sequence for Abcg4 (NM_138955.2,940-958).
cagcgcttcttgtttccaa

SEQ ID NO: 493000 - DNA, 19 bp, Mus musculus
  siRNA target sequence for Abcg4 (NM_138955.2,1156-1174).
ccccgctgacttcatcatt

SEQ ID NO: 493001 - DNA, 19 bp, Mus musculus
  siRNA target sequence for Abcg4 (NM_138955.2,1311-1329).
cggagctggatcctattga

SEQ ID NO: 493002 - DNA, 19 bp, Mus musculus
  siRNA target sequence for Abcg4 (NM_138955.2,1589-1607).
gagatggcggtcttcatga

SEQ ID NO: 493003 - DNA, 19 bp, Mus musculus
  siRNA target sequence for Abcg4 (NM_138955.2,1621-1639).
ctactggtatactctcaaa

SEQ ID NO: 493004 - DNA, 19 bp, Mus musculus
  siRNA target sequence for Abcg4 (NM_138955.2,1774-1792).
catagccaccgccttagtt

SEQ ID NO: 493005 - DNA, 19 bp, Mus musculus
  siRNA target sequence for Abcg4 (NM_138955.2,1834-1852).
cttgcaggtggccactttt

SEQ ID NO: 493006 - DNA, 19 bp, Mus musculus
  siRNA target sequence for Abcg4 (NM_138955.2,1890-1908).
ccggcttcttcgtcagttt

SEQ ID NO: 493007 - DNA, 19 bp, Mus musculus
  siRNA target sequence for Abcg4 (NM_138955.2,1892-1910).
ggcttcttcgtcagtttca

SEQ ID NO: 493008 - DNA, 19 bp, Mus musculus
  siRNA target sequence for Abcg4 (NM_138955.2,1945-1963).
cctctcctatgttaggtat

SEQ ID NO: 493009 - DNA, 19 bp, Mus musculus
  siRNA target sequence for Abcg4 (NM_138955.2,2037-2055).
cattccgggacccacaaat

SEQ ID NO: 493010 - DNA, 19 bp, Mus musculus
  siRNA target sequence for Abcg4 (NM_138955.2,2041-2059).
ccgggacccacaaatcatt

SEQ ID NO: 493011 - DNA, 19 bp, Mus musculus
  siRNA target sequence for Abcg4 (NM_138955.2,2042-2060).
cgggacccacaaatcattt

SEQ ID NO: 493012 - DNA, 19 bp, Mus musculus
  siRNA target sequence for Abcg4 (NM_138955.2,2075-2093).
gtagaggaggccaaactct

SEQ ID NO: 493013 - DNA, 19 bp, Mus musculus
  siRNA target sequence for Abcg5 (NM_031884.1,208-226).
ggccttggtggaacatcaa

SEQ ID NO: 493014 - DNA, 19 bp, Mus musculus
  siRNA target sequence for Abcg5 (NM_031884.1,209-227).
gccttggtggaacatcaaa

SEQ ID NO: 493015 - DNA, 19 bp, Mus musculus
  siRNA target sequence for Abcg5 (NM_031884.1,210-228).
ccttggtggaacatcaaat

SEQ ID NO: 493016 - DNA, 19 bp, Mus musculus
  siRNA target sequence for Abcg5 (NM_031884.1,282-300).
gagagtggccagattatgt

SEQ ID NO: 493017 - DNA, 19 bp, Mus musculus
  siRNA target sequence for Abcg5 (NM_031884.1,290-308).
ccagattatgtgcatctta

SEQ ID NO: 493018 - DNA, 19 bp, Mus musculus
  siRNA target sequence for Abcg5 (NM_031884.1,449-467).
cctgcagagcgacgttttt

SEQ ID NO: 493019 - DNA, 19 bp, Mus musculus
  siRNA target sequence for Abcg5 (NM_031884.1,488-506).
cgagacgttgcgatacaca

SEQ ID NO: 493020 - DNA, 19 bp, Mus musculus
  siRNA target sequence for Abcg5 (NM_031884.1,526-544).
gcagctccgcggacttcta

SEQ ID NO: 493021 - DNA, 19 bp, Mus musculus
  siRNA target sequence for Abcg5 (NM_031884.1,534-552).
gcggacttctacaacaaga

SEQ ID NO: 493022 - DNA, 19 bp, Mus musculus
  siRNA target sequence for Abcg5 (NM_031884.1,535-553).
cggacttctacaacaagaa

SEQ ID NO: 493023 - DNA, 19 bp, Mus musculus
  siRNA target sequence for Abcg5 (NM_031884.1,586-604).
gccacgtggcggaccaaat

SEQ ID NO: 493024 - DNA, 19 bp, Mus musculus
  siRNA target sequence for Abcg5 (NM_031884.1,588-606).
cacgtggcggaccaaatga

SEQ ID NO: 493025 - DNA, 19 bp, Mus musculus
  siRNA target sequence for Abcg5 (NM_031884.1,590-608).
cgtggcggaccaaatgatt

SEQ ID NO: 493026 - DNA, 19 bp, Mus musculus
  siRNA target sequence for Abcg5 (NM_031884.1,600-618).
caaatgattggcagctata

SEQ ID NO: 493027 - DNA, 19 bp, Mus musculus
  siRNA target sequence for Abcg5 (NM_031884.1,725-743).
ctgcatgactgcaaatcaa

SEQ ID NO: 493028 - DNA, 19 bp, Mus musculus
  siRNA target sequence for Abcg5 (NM_031884.1,727-745).
gcatgactgcaaatcaaat

SEQ ID NO: 493029 - DNA, 19 bp, Mus musculus
  siRNA target sequence for Abcg5 (NM_031884.1,769-787).
ctcgcagggaccgaattgt

SEQ ID NO: 493030 - DNA, 19 bp, Mus musculus
  siRNA target sequence for Abcg5 (NM_031884.1,771-789).
cgcagggaccgaattgtga

SEQ ID NO: 493031 - DNA, 19 bp, Mus musculus
  siRNA target sequence for Abcg5 (NM_031884.1,772-790).
gcagggaccgaattgtgat

SEQ ID NO: 493032 - DNA, 19 bp, Mus musculus
  siRNA target sequence for Abcg5 (NM_031884.1,773-791).
cagggaccgaattgtgatt

SEQ ID NO: 493033 - DNA, 19 bp, Mus musculus
  siRNA target sequence for Abcg5 (NM_031884.1,775-793).
gggaccgaattgtgattgt

SEQ ID NO: 493034 - DNA, 19 bp, Mus musculus
  siRNA target sequence for Abcg5 (NM_031884.1,894-912).
cttggcttcttcaataact

SEQ ID NO: 493035 - DNA, 19 bp, Mus musculus
  siRNA target sequence for Abcg5 (NM_031884.1,933-951).
cattccaatccctttgatt

SEQ ID NO: 493036 - DNA, 19 bp, Mus musculus
  siRNA target sequence for Abcg5 (NM_031884.1,1006-1024).
cgtacaagcgagtacagat

SEQ ID NO: 493037 - DNA, 19 bp, Mus musculus
  siRNA target sequence for Abcg5 (NM_031884.1,1044-1062).
gaatctgacatctatcaca

SEQ ID NO: 493038 - DNA, 19 bp, Mus musculus
  siRNA target sequence for Abcg5 (NM_031884.1,1087-1105).
cacgatacctgaaaacctt

SEQ ID NO: 493039 - DNA, 19 bp, Mus musculus
  siRNA target sequence for Abcg5 (NM_031884.1,1107-1125).
cccacggttcctttcaaaa

SEQ ID NO: 493040 - DNA, 19 bp, Mus musculus
  siRNA target sequence for Abcg5 (NM_031884.1,1109-1127).
cacggttcctttcaaaaca

SEQ ID NO: 493041 - DNA, 19 bp, Mus musculus
  siRNA target sequence for Abcg5 (NM_031884.1,1163-1181).
cctgctgaggcgagtaaca

SEQ ID NO: 493042 - DNA, 19 bp, Mus musculus
  siRNA target sequence for Abcg5 (NM_031884.1,1164-1182).
ctgctgaggcgagtaacaa

SEQ ID NO: 493043 - DNA, 19 bp, Mus musculus
  siRNA target sequence for Abcg5 (NM_031884.1,1167-1185).
ctgaggcgagtaacaagaa

SEQ ID NO: 493044 - DNA, 19 bp, Mus musculus
  siRNA target sequence for Abcg5 (NM_031884.1,1171-1189).
ggcgagtaacaagaaactt

SEQ ID NO: 493045 - DNA, 19 bp, Mus musculus
  siRNA target sequence for Abcg5 (NM_031884.1,1172-1190).
gcgagtaacaagaaactta

SEQ ID NO: 493046 - DNA, 19 bp, Mus musculus
  siRNA target sequence for Abcg5 (NM_031884.1,1173-1191).
cgagtaacaagaaacttaa

SEQ ID NO: 493047 - DNA, 19 bp, Mus musculus
  siRNA target sequence for Abcg5 (NM_031884.1,1174-1192).
gagtaacaagaaacttaat

SEQ ID NO: 493048 - DNA, 19 bp, Mus musculus
  siRNA target sequence for Abcg5 (NM_031884.1,1219-1237).
gtctcgttcagaatctgat

SEQ ID NO: 493049 - DNA, 19 bp, Mus musculus
  siRNA target sequence for Abcg5 (NM_031884.1,1266-1284).
ctccgcgtccagaacaaca

SEQ ID NO: 493050 - DNA, 19 bp, Mus musculus
  siRNA target sequence for Abcg5 (NM_031884.1,1309-1327).
gcgtggggctgctctatca

SEQ ID NO: 493051 - DNA, 19 bp, Mus musculus
  siRNA target sequence for Abcg5 (NM_031884.1,1361-1379).
caatgctgtgaatctgttt

SEQ ID NO: 493052 - DNA, 19 bp, Mus musculus
  siRNA target sequence for Abcg5 (NM_031884.1,1416-1434).
gatggcctgtatcataagt

SEQ ID NO: 493053 - DNA, 19 bp, Mus musculus
  siRNA target sequence for Abcg5 (NM_031884.1,1479-1497).
gtcatcgccacggtcattt

SEQ ID NO: 493054 - DNA, 19 bp, Mus musculus
  siRNA target sequence for Abcg5 (NM_031884.1,1523-1541).
gggcttgtatcctgaagtt

SEQ ID NO: 493055 - DNA, 19 bp, Mus musculus
  siRNA target sequence for Abcg5 (NM_031884.1,1536-1554).
gaagttgccagatttggat

SEQ ID NO: 493056 - DNA, 19 bp, Mus musculus
  siRNA target sequence for Abcg5 (NM_031884.1,1569-1587).
cttttggcccctcacttaa

SEQ ID NO: 493057 - DNA, 19 bp, Mus musculus
  siRNA target sequence for Abcg5 (NM_031884.1,1583-1601).
cttaattggagaatttcta

SEQ ID NO: 493058 - DNA, 19 bp, Mus musculus
  siRNA target sequence for Abcg5 (NM_031884.1,1633-1651).
ctaatattgtcaacagtat

SEQ ID NO: 493059 - DNA, 19 bp, Mus musculus
  siRNA target sequence for Abcg5 (NM_031884.1,1686-1704).
ggatctggatttatcagaa

SEQ ID NO: 493060 - DNA, 19 bp, Mus musculus
  siRNA target sequence for Abcg5 (NM_031884.1,1687-1705).
gatctggatttatcagaaa

SEQ ID NO: 493061 - DNA, 19 bp, Mus musculus
  siRNA target sequence for Abcg5 (NM_031884.1,1776-1794).
ctcgtggtcaatgagtttt

SEQ ID NO: 493062 - DNA, 19 bp, Mus musculus
  siRNA target sequence for Abcg5 (NM_031884.1,1822-1840).
ccaacacctctatgctaaa

SEQ ID NO: 493063 - DNA, 19 bp, Mus musculus
  siRNA target sequence for Abcg5 (NM_031884.1,1823-1841).
caacacctctatgctaaat

SEQ ID NO: 493064 - DNA, 19 bp, Mus musculus
  siRNA target sequence for Abcg5 (NM_031884.1,1872-1890).
cagttcatcgagaaaacct

SEQ ID NO: 493065 - DNA, 19 bp, Mus musculus
  siRNA target sequence for Abcg5 (NM_031884.1,1906-1924).
ccagattcacggcaaactt

SEQ ID NO: 493066 - DNA, 19 bp, Mus musculus
  siRNA target sequence for Abcg5 (NM_031884.1,1983-2001).
gtcagggactacctgatta

SEQ ID NO: 493067 - DNA, 19 bp, Mus musculus
  siRNA target sequence for Abcg8 (NM_026180.2,134-152).
gtggaatgggactgtactt

SEQ ID NO: 493068 - DNA, 19 bp, Mus musculus
  siRNA target sequence for Abcg8 (NM_026180.2,359-377).
gctgggcatccgaaatcta

SEQ ID NO: 493069 - DNA, 19 bp, Mus musculus
  siRNA target sequence for Abcg8 (NM_026180.2,360-378).
ctgggcatccgaaatctaa

SEQ ID NO: 493070 - DNA, 19 bp, Mus musculus
  siRNA target sequence for Abcg8 (NM_026180.2,364-382).
gcatccgaaatctaagctt

SEQ ID NO: 493071 - DNA, 19 bp, Mus musculus
  siRNA target sequence for Abcg8 (NM_026180.2,368-386).
ccgaaatctaagcttcaaa

SEQ ID NO: 493072 - DNA, 19 bp, Mus musculus
  siRNA target sequence for Abcg8 (NM_026180.2,370-388).
gaaatctaagcttcaaagt

SEQ ID NO: 493073 - DNA, 19 bp, Mus musculus
  siRNA target sequence for Abcg8 (NM_026180.2,468-486).
ggccacggtggcaagatga

SEQ ID NO: 493074 - DNA, 19 bp, Mus musculus
  siRNA target sequence for Abcg8 (NM_026180.2,469-487).
gccacggtggcaagatgaa

SEQ ID NO: 493075 - DNA, 19 bp, Mus musculus
  siRNA target sequence for Abcg8 (NM_026180.2,471-489).
cacggtggcaagatgaaat

SEQ ID NO: 493076 - DNA, 19 bp, Mus musculus
  siRNA target sequence for Abcg8 (NM_026180.2,595-613).
gagagaccctggctttcat

SEQ ID NO: 493077 - DNA, 19 bp, Mus musculus
  siRNA target sequence for Abcg8 (NM_026180.2,918-936).
cctcgctctgacatcttca

SEQ ID NO: 493078 - DNA, 19 bp, Mus musculus
  siRNA target sequence for Abcg8 (NM_026180.2,1007-1025).
gcagtacttcacatccatt

SEQ ID NO: 493079 - DNA, 19 bp, Mus musculus
  siRNA target sequence for Abcg8 (NM_026180.2,1032-1050).
ccttgtcctcgctatagca

SEQ ID NO: 493080 - DNA, 19 bp, Mus musculus
  siRNA target sequence for Abcg8 (NM_026180.2,1033-1051).
cttgtcctcgctatagcaa

SEQ ID NO: 493081 - DNA, 19 bp, Mus musculus
  siRNA target sequence for Abcg8 (NM_026180.2,1048-1066).
gcaaccctgcggacttcta

SEQ ID NO: 493082 - DNA, 19 bp, Mus musculus
  siRNA target sequence for Abcg8 (NM_026180.2,1145-1163).
cctgttcctagaaaaagta

SEQ ID NO: 493083 - DNA, 19 bp, Mus musculus
  siRNA target sequence for Abcg8 (NM_026180.2,1304-1322).
cctgatccgtcgtcagatt

SEQ ID NO: 493084 - DNA, 19 bp, Mus musculus
  siRNA target sequence for Abcg8 (NM_026180.2,1305-1323).
ctgatccgtcgtcagattt

SEQ ID NO: 493085 - DNA, 19 bp, Mus musculus
  siRNA target sequence for Abcg8 (NM_026180.2,1310-1328).
ccgtcgtcagatttccaat

SEQ ID NO: 493086 - DNA, 19 bp, Mus musculus
  siRNA target sequence for Abcg8 (NM_026180.2,1314-1332).
cgtcagatttccaatgact

SEQ ID NO: 493087 - DNA, 19 bp, Mus musculus
  siRNA target sequence for Abcg8 (NM_026180.2,1315-1333).
gtcagatttccaatgactt

SEQ ID NO: 493088 - DNA, 19 bp, Mus musculus
  siRNA target sequence for Abcg8 (NM_026180.2,1343-1361).
gcccacgctgctcattcat

SEQ ID NO: 493089 - DNA, 19 bp, Mus musculus
  siRNA target sequence for Abcg8 (NM_026180.2,1473-1491).
ctcattcctttcaatgtca

SEQ ID NO: 493090 - DNA, 19 bp, Mus musculus
  siRNA target sequence for Abcg8 (NM_026180.2,1494-1512).
ctggatgtcgtctccaaat

SEQ ID NO: 493091 - DNA, 19 bp, Mus musculus
  siRNA target sequence for Abcg8 (NM_026180.2,1525-1543).
ggtcaatgctgtactatga

SEQ ID NO: 493092 - DNA, 19 bp, Mus musculus
  siRNA target sequence for Abcg8 (NM_026180.2,1615-1633).
gtgcctacgtcatcatcta

SEQ ID NO: 493093 - DNA, 19 bp, Mus musculus
  siRNA target sequence for Abcg8 (NM_026180.2,1815-1833).
cttactgccggcttcatga

SEQ ID NO: 493094 - DNA, 19 bp, Mus musculus
  siRNA target sequence for Abcg8 (NM_026180.2,1903-1921).
cggggctgatgcagattca

SEQ ID NO: 493095 - DNA, 19 bp, Mus musculus
  siRNA target sequence for Abcg8 (NM_026180.2,1904-1922).
ggggctgatgcagattcaa

SEQ ID NO: 493096 - DNA, 19 bp, Mus musculus
  siRNA target sequence for Abcg8 (NM_026180.2,1974-1992).
ctcggagacacgatgatca

SEQ ID NO: 493097 - DNA, 19 bp, Mus musculus
  siRNA target sequence for Abcg8 (NM_026180.2,2006-2024).
gaactcgcatccactctat

SEQ ID NO: 493098 - DNA, 19 bp, Mus musculus
  siRNA target sequence for Abcg8 (NM_026180.2,2025-2043).
gcgatctacctcattgtca

SEQ ID NO: 493099 - DNA, 19 bp, Mus musculus
  siRNA target sequence for Abcg8 (NM_026180.2,2026-2044).
cgatctacctcattgtcat

SEQ ID NO: 493100 - DNA, 19 bp, Mus musculus
  siRNA target sequence for Abcg8 (NM_026180.2,2063-2081).
cctgttcctgtactatcta

SEQ ID NO: 493101 - DNA, 19 bp, Mus musculus
  siRNA target sequence for Abcg8 (NM_026180.2,2064-2082).
ctgttcctgtactatctat

SEQ ID NO: 493102 - DNA, 19 bp, Mus musculus
  siRNA target sequence for Abcg8 (NM_026180.2,2083-2101).
ccttgaagctcatcaaaca

SEQ ID NO: 493103 - DNA, 19 bp, Mus musculus
  siRNA target sequence for Abcg8 (NM_026180.2,2093-2111).
catcaaacagaagtcaatt

SEQ ID NO: 493104 - DNA, 19 bp, Mus musculus
  siRNA target sequence for Abcg8 (NM_026180.2,2096-2114).
caaacagaagtcaattcaa

SEQ ID NO: 493105 - DNA, 19 bp, Mus musculus
  siRNA target sequence for Abl1 (NM_009594.1,149-167).
gccagtggcatctgacttt

SEQ ID NO: 493106 - DNA, 19 bp, Mus musculus
  siRNA target sequence for Abl1 (NM_009594.1,151-169).
cagtggcatctgactttga

SEQ ID NO: 493107 - DNA, 19 bp, Mus musculus
  siRNA target sequence for Abl1 (NM_009594.1,195-213).
cgatggaactccaaggaaa

SEQ ID NO: 493108 - DNA, 19 bp, Mus musculus
  siRNA target sequence for Abl1 (NM_009594.1,234-252).
gaaaatgaccccaaccttt

SEQ ID NO: 493109 - DNA, 19 bp, Mus musculus
  siRNA target sequence for Abl1 (NM_009594.1,318-336).
ctccgggtcttgggttata

SEQ ID NO: 493110 - DNA, 19 bp, Mus musculus
  siRNA target sequence for Abl1 (NM_009594.1,320-338).
ccgggtcttgggttataat

SEQ ID NO: 493111 - DNA, 19 bp, Mus musculus
  siRNA target sequence for Abl1 (NM_009594.1,352-370).
ggtgtgaagcccaaacgaa

SEQ ID NO: 493112 - DNA, 19 bp, Mus musculus
  siRNA target sequence for Abl1 (NM_009594.1,353-371).
gtgtgaagcccaaacgaaa

SEQ ID NO: 493113 - DNA, 19 bp, Mus musculus
  siRNA target sequence for Abl1 (NM_009594.1,437-455).
gtatcatggccctgtatct

SEQ ID NO: 493114 - DNA, 19 bp, Mus musculus
  siRNA target sequence for Abl1 (NM_009594.1,457-475).
ggaatgctgctgagtatct

SEQ ID NO: 493115 - DNA, 19 bp, Mus musculus
  siRNA target sequence for Abl1 (NM_009594.1,542-560).
catctcgctgcggtatgaa

SEQ ID NO: 493116 - DNA, 19 bp, Mus musculus
  siRNA target sequence for Abl1 (NM_009594.1,632-650).
caacactctggctgagtta

SEQ ID NO: 493117 - DNA, 19 bp, Mus musculus
  siRNA target sequence for Abl1 (NM_009594.1,637-655).
ctctggctgagttagttca

SEQ ID NO: 493118 - DNA, 19 bp, Mus musculus
  siRNA target sequence for Abl1 (NM_009594.1,828-846).
gagggcgtttggaagaagt

SEQ ID NO: 493119 - DNA, 19 bp, Mus musculus
  siRNA target sequence for Abl1 (NM_009594.1,973-991).
cccgggaaccaccattcta

SEQ ID NO: 493120 - DNA, 19 bp, Mus musculus
  siRNA target sequence for Abl1 (NM_009594.1,976-994).
gggaaccaccattctacat

SEQ ID NO: 493121 - DNA, 19 bp, Mus musculus
  siRNA target sequence for Abl1 (NM_009594.1,977-995).
ggaaccaccattctacata

SEQ ID NO: 493122 - DNA, 19 bp, Mus musculus
  siRNA target sequence for Abl1 (NM_009594.1,978-996).
gaaccaccattctacataa

SEQ ID NO: 493123 - DNA, 19 bp, Mus musculus
  siRNA target sequence for Abl1 (NM_009594.1,1547-1565).
ccaggaatccagtatctca

SEQ ID NO: 493124 - DNA, 19 bp, Mus musculus
  siRNA target sequence for Abl1 (NM_009594.1,1795-1813).
cagacggcagcctaaatga

SEQ ID NO: 493125 - DNA, 19 bp, Mus musculus
  siRNA target sequence for Abl1 (NM_009594.1,1851-1869).
ctgttcagcgctttgatca

SEQ ID NO: 493126 - DNA, 19 bp, Mus musculus
  siRNA target sequence for Abl1 (NM_009594.1,2048-2066).
ggctggcgtccctaatgga

SEQ ID NO: 493127 - DNA, 19 bp, Mus musculus
  siRNA target sequence for Abl1 (NM_009594.1,2103-2121).
ccccacatgtggaaaaagt

SEQ ID NO: 493128 - DNA, 19 bp, Mus musculus
  siRNA target sequence for Abl1 (NM_009594.1,2186-2204).
gcgcttcctgcgttcttgt

SEQ ID NO: 493129 - DNA, 19 bp, Mus musculus
  siRNA target sequence for Abl1 (NM_009594.1,2187-2205).
cgcttcctgcgttcttgtt

SEQ ID NO: 493130 - DNA, 19 bp, Mus musculus
  siRNA target sequence for Abl1 (NM_009594.1,2278-2296).
ctgctggcaagcagtttga

SEQ ID NO: 493131 - DNA, 19 bp, Mus musculus
  siRNA target sequence for Abl1 (NM_009594.1,2280-2298).
gctggcaagcagtttgact

SEQ ID NO: 493132 - DNA, 19 bp, Mus musculus
  siRNA target sequence for Abl1 (NM_009594.1,2370-2388).
gagcaggtggccaaaagca

SEQ ID NO: 493133 - DNA, 19 bp, Mus musculus
  siRNA target sequence for Abl1 (NM_009594.1,2831-2849).
cacgagtctggctatggat

SEQ ID NO: 493134 - DNA, 19 bp, Mus musculus
  siRNA target sequence for Abp1 (NM_029638.1,79-97).
cggctgggcagctgtcata

SEQ ID NO: 493135 - DNA, 19 bp, Mus musculus
  siRNA target sequence for Abp1 (NM_029638.1,80-98).
ggctgggcagctgtcatat

SEQ ID NO: 493136 - DNA, 19 bp, Mus musculus
  siRNA target sequence for Abp1 (NM_029638.1,81-99).
gctgggcagctgtcatatt

SEQ ID NO: 493137 - DNA, 19 bp, Mus musculus
  siRNA target sequence for Abp1 (NM_029638.1,82-100).
ctgggcagctgtcatatta

SEQ ID NO: 493138 - DNA, 19 bp, Mus musculus
  siRNA target sequence for Abp1 (NM_029638.1,84-102).
gggcagctgtcatattact

SEQ ID NO: 493139 - DNA, 19 bp, Mus musculus
  siRNA target sequence for Abp1 (NM_029638.1,85-103).
ggcagctgtcatattactt

SEQ ID NO: 493140 - DNA, 19 bp, Mus musculus
  siRNA target sequence for Abp1 (NM_029638.1,90-108).
ctgtcatattacttctaca

SEQ ID NO: 493141 - DNA, 19 bp, Mus musculus
  siRNA target sequence for Abp1 (NM_029638.1,133-151).
gacgactcctcatgacaaa

SEQ ID NO: 493142 - DNA, 19 bp, Mus musculus
  siRNA target sequence for Abp1 (NM_029638.1,423-441).
cacggccctgctatgttca

SEQ ID NO: 493143 - DNA, 19 bp, Mus musculus
  siRNA target sequence for Abp1 (NM_029638.1,543-561).
cgcctctgcaccagttttt

SEQ ID NO: 493144 - DNA, 19 bp, Mus musculus
  siRNA target sequence for Abp1 (NM_029638.1,596-614).
gatgaccggttcttgactt

SEQ ID NO: 493145 - DNA, 19 bp, Mus musculus
  siRNA target sequence for Abp1 (NM_029638.1,599-617).
gaccggttcttgactttta

SEQ ID NO: 493146 - DNA, 19 bp, Mus musculus
  siRNA target sequence for Abp1 (NM_029638.1,654-672).
gtagaagctggcttatcgt

SEQ ID NO: 493147 - DNA, 19 bp, Mus musculus
  siRNA target sequence for Abp1 (NM_029638.1,712-730).
gctggagatccttgtagat

SEQ ID NO: 493148 - DNA, 19 bp, Mus musculus
  siRNA target sequence for Abp1 (NM_029638.1,761-779).
gtggaacagctctggtata

SEQ ID NO: 493149 - DNA, 19 bp, Mus musculus
  siRNA target sequence for Abp1 (NM_029638.1,976-994).
gcccagtggccccagatat

SEQ ID NO: 493150 - DNA, 19 bp, Mus musculus
  siRNA target sequence for Abp1 (NM_029638.1,977-995).
cccagtggccccagatata

SEQ ID NO: 493151 - DNA, 19 bp, Mus musculus
  siRNA target sequence for Abp1 (NM_029638.1,978-996).
ccagtggccccagatataa

SEQ ID NO: 493152 - DNA, 19 bp, Mus musculus
  siRNA target sequence for Abp1 (NM_029638.1,1160-1178).
ggcatgcagactaagtata

SEQ ID NO: 493153 - DNA, 19 bp, Mus musculus
  siRNA target sequence for Abp1 (NM_029638.1,1161-1179).
gcatgcagactaagtatat

SEQ ID NO: 493154 - DNA, 19 bp, Mus musculus
  siRNA target sequence for Abp1 (NM_029638.1,1162-1180).
catgcagactaagtatatt

SEQ ID NO: 493155 - DNA, 19 bp, Mus musculus
  siRNA target sequence for Abp1 (NM_029638.1,1168-1186).
gactaagtatattgatgtt

SEQ ID NO: 493156 - DNA, 19 bp, Mus musculus
  siRNA target sequence for Abp1 (NM_029638.1,1213-1231).
cgagctggcccctggtatt

SEQ ID NO: 493157 - DNA, 19 bp, Mus musculus
  siRNA target sequence for Abp1 (NM_029638.1,1236-1254).
gtccagagaccgctacttt

SEQ ID NO: 493158 - DNA, 19 bp, Mus musculus
  siRNA target sequence for Abp1 (NM_029638.1,1281-1299).
gcgatggccctgtccttta

SEQ ID NO: 493159 - DNA, 19 bp, Mus musculus
  siRNA target sequence for Abp1 (NM_029638.1,1341-1359).
cccttaggcgccactttga

SEQ ID NO: 493160 - DNA, 19 bp, Mus musculus
  siRNA target sequence for Abp1 (NM_029638.1,1343-1361).
cttaggcgccactttgact

SEQ ID NO: 493161 - DNA, 19 bp, Mus musculus
  siRNA target sequence for Abp1 (NM_029638.1,1347-1365).
ggcgccactttgactcaaa

SEQ ID NO: 493162 - DNA, 19 bp, Mus musculus
  siRNA target sequence for Abp1 (NM_029638.1,1349-1367).
cgccactttgactcaaact

SEQ ID NO: 493163 - DNA, 19 bp, Mus musculus
  siRNA target sequence for Abp1 (NM_029638.1,1350-1368).
gccactttgactcaaactt

SEQ ID NO: 493164 - DNA, 19 bp, Mus musculus
  siRNA target sequence for Abp1 (NM_029638.1,1351-1369).
ccactttgactcaaacttt

SEQ ID NO: 493165 - DNA, 19 bp, Mus musculus
  siRNA target sequence for Abp1 (NM_029638.1,1352-1370).
cactttgactcaaacttta

SEQ ID NO: 493166 - DNA, 19 bp, Mus musculus
  siRNA target sequence for Abp1 (NM_029638.1,1354-1372).
ctttgactcaaactttaaa

SEQ ID NO: 493167 - DNA, 19 bp, Mus musculus
  siRNA target sequence for Abp1 (NM_029638.1,1384-1402).
cttctatgcgggtttgaaa

SEQ ID NO: 493168 - DNA, 19 bp, Mus musculus
  siRNA target sequence for Abp1 (NM_029638.1,1392-1410).
cgggtttgaaaggatatgt

SEQ ID NO: 493169 - DNA, 19 bp, Mus musculus
  siRNA target sequence for Abp1 (NM_029638.1,1423-1441).
gacgacatcgacagtctat

SEQ ID NO: 493170 - DNA, 19 bp, Mus musculus
  siRNA target sequence for Abp1 (NM_029638.1,1425-1443).
cgacatcgacagtctataa

SEQ ID NO: 493171 - DNA, 19 bp, Mus musculus
  siRNA target sequence for Abp1 (NM_029638.1,1426-1444).
gacatcgacagtctataat

SEQ ID NO: 493172 - DNA, 19 bp, Mus musculus
  siRNA target sequence for Abp1 (NM_029638.1,1428-1446).
catcgacagtctataatta

SEQ ID NO: 493173 - DNA, 19 bp, Mus musculus
  siRNA target sequence for Abp1 (NM_029638.1,1431-1449).
cgacagtctataattatga

SEQ ID NO: 493174 - DNA, 19 bp, Mus musculus
  siRNA target sequence for Abp1 (NM_029638.1,1434-1452).
cagtctataattatgacta

SEQ ID NO: 493175 - DNA, 19 bp, Mus musculus
  siRNA target sequence for Abp1 (NM_029638.1,1448-1466).
gactatatctgggatttca

SEQ ID NO: 493176 - DNA, 19 bp, Mus musculus
  siRNA target sequence for Abp1 (NM_029638.1,1465-1483).
catcttctaccctaatggt

SEQ ID NO: 493177 - DNA, 19 bp, Mus musculus
  siRNA target sequence for Abp1 (NM_029638.1,1498-1516).
gatgcatgccactggatat

SEQ ID NO: 493178 - DNA, 19 bp, Mus musculus
  siRNA target sequence for Abp1 (NM_029638.1,1517-1535).
gtccacgcaaccttctaca

SEQ ID NO: 493179 - DNA, 19 bp, Mus musculus
  siRNA target sequence for Abp1 (NM_029638.1,1552-1570).
ccatggcactcgcttacaa

SEQ ID NO: 493180 - DNA, 19 bp, Mus musculus
  siRNA target sequence for Abp1 (NM_029638.1,1553-1571).
catggcactcgcttacaaa

SEQ ID NO: 493181 - DNA, 19 bp, Mus musculus
  siRNA target sequence for Abp1 (NM_029638.1,2193-2211).
ctagagacactgtgatagt

SEQ ID NO: 493182 - DNA, 19 bp, Mus musculus
  siRNA target sequence for Acly (NM_134037.2,133-151).
gtcagccaaggcaatttca

SEQ ID NO: 493183 - DNA, 19 bp, Mus musculus
  siRNA target sequence for Acly (NM_134037.2,285-303).
gccagagcttggttgtcaa

SEQ ID NO: 493184 - DNA, 19 bp, Mus musculus
  siRNA target sequence for Acly (NM_134037.2,299-317).
gtcaagccagaccagttaa

SEQ ID NO: 493185 - DNA, 19 bp, Mus musculus
  siRNA target sequence for Acly (NM_134037.2,304-322).
gccagaccagttaatcaaa

SEQ ID NO: 493186 - DNA, 19 bp, Mus musculus
  siRNA target sequence for Acly (NM_134037.2,339-357).
gcctcgtcggggtcaatct

SEQ ID NO: 493187 - DNA, 19 bp, Mus musculus
  siRNA target sequence for Acly (NM_134037.2,341-359).
ctcgtcggggtcaatctct

SEQ ID NO: 493188 - DNA, 19 bp, Mus musculus
  siRNA target sequence for Acly (NM_134037.2,358-376).
ctctctggatggagtcaaa

SEQ ID NO: 493189 - DNA, 19 bp, Mus musculus
  siRNA target sequence for Acly (NM_134037.2,484-502).
gttctacgtgtgcatctat

SEQ ID NO: 493190 - DNA, 19 bp, Mus musculus
  siRNA target sequence for Acly (NM_134037.2,608-626).
ctgaataccgaggacatta

SEQ ID NO: 493191 - DNA, 19 bp, Mus musculus
  siRNA target sequence for Acly (NM_134037.2,687-705).
ctggtctattcaatttcta

SEQ ID NO: 493192 - DNA, 19 bp, Mus musculus
  siRNA target sequence for Acly (NM_134037.2,762-780).
gtgtctacatccttgactt

SEQ ID NO: 493193 - DNA, 19 bp, Mus musculus
  siRNA target sequence for Acly (NM_134037.2,804-822).
ctgactacatctgtaaagt

SEQ ID NO: 493194 - DNA, 19 bp, Mus musculus
  siRNA target sequence for Acly (NM_134037.2,1034-1052).
gcgaattacggggaatact

SEQ ID NO: 493195 - DNA, 19 bp, Mus musculus
  siRNA target sequence for Acly (NM_134037.2,1054-1072).
gggtgcccccagtgaacaa

SEQ ID NO: 493196 - DNA, 19 bp, Mus musculus
  siRNA target sequence for Acly (NM_134037.2,1067-1085).
gaacaacagacctatgact

SEQ ID NO: 493197 - DNA, 19 bp, Mus musculus
  siRNA target sequence for Acly (NM_134037.2,1154-1172).
ggcagcattgcaaacttca

SEQ ID NO: 493198 - DNA, 19 bp, Mus musculus
  siRNA target sequence for Acly (NM_134037.2,1206-1224).
gagcgattcgagattacca

SEQ ID NO: 493199 - DNA, 19 bp, Mus musculus
  siRNA target sequence for Acly (NM_134037.2,1279-1297).
ctatcaagagggattacga

SEQ ID NO: 493200 - DNA, 19 bp, Mus musculus
  siRNA target sequence for Acly (NM_134037.2,1326-1344).
ggatccccatccatgtctt

SEQ ID NO: 493201 - DNA, 19 bp, Mus musculus
  siRNA target sequence for Acly (NM_134037.2,1327-1345).
gatccccatccatgtcttt

SEQ ID NO: 493202 - DNA, 19 bp, Mus musculus
  siRNA target sequence for Acly (NM_134037.2,1479-1497).
ccagtaggacagcatcttt

SEQ ID NO: 493203 - DNA, 19 bp, Mus musculus
  siRNA target sequence for Acly (NM_134037.2,1704-1722).
gggatcacaagcagaagtt

SEQ ID NO: 493204 - DNA, 19 bp, Mus musculus
  siRNA target sequence for Acly (NM_134037.2,1706-1724).
gatcacaagcagaagtttt

SEQ ID NO: 493205 - DNA, 19 bp, Mus musculus
  siRNA target sequence for Acly (NM_134037.2,1709-1727).
cacaagcagaagttttact

SEQ ID NO: 493206 - DNA, 19 bp, Mus musculus
  siRNA target sequence for Acly (NM_134037.2,1728-1746).
ggggacacaaggaaatcct

SEQ ID NO: 493207 - DNA, 19 bp, Mus musculus
  siRNA target sequence for Acly (NM_134037.2,1796-1814).
gtagacgtgctgatcaact

SEQ ID NO: 493208 - DNA, 19 bp, Mus musculus
  siRNA target sequence for Acly (NM_134037.2,1884-1902).
ccatcatagcagaaggtat

SEQ ID NO: 493209 - DNA, 19 bp, Mus musculus
  siRNA target sequence for Acly (NM_134037.2,1917-1935).
cacggaagctcatcaagaa

SEQ ID NO: 493210 - DNA, 19 bp, Mus musculus
  siRNA target sequence for Acly (NM_134037.2,1999-2017).
ctttaagatcgggaatact

SEQ ID NO: 493211 - DNA, 19 bp, Mus musculus
  siRNA target sequence for Acly (NM_134037.2,2088-2106).
caggaggcatgtctaatga

SEQ ID NO: 493212 - DNA, 19 bp, Mus musculus
  siRNA target sequence for Acly (NM_134037.2,2105-2123).
gaactcaataacatcatct

SEQ ID NO: 493213 - DNA, 19 bp, Mus musculus
  siRNA target sequence for Acly (NM_134037.2,2230-2248).
caagatgatcgtagttctt

SEQ ID NO: 493214 - DNA, 19 bp, Mus musculus
  siRNA target sequence for Acly (NM_134037.2,2258-2276).
gggggcacagaggaatata

SEQ ID NO: 493215 - DNA, 19 bp, Mus musculus
  siRNA target sequence for Acly (NM_134037.2,2261-2279).
ggcacagaggaatataaga

SEQ ID NO: 493216 - DNA, 19 bp, Mus musculus
  siRNA target sequence for Acly (NM_134037.2,2262-2280).
gcacagaggaatataagat

SEQ ID NO: 493217 - DNA, 19 bp, Mus musculus
  siRNA target sequence for Acly (NM_134037.2,2488-2506).
cattcagtctgtgtatgaa

SEQ ID NO: 493218 - DNA, 19 bp, Mus musculus
  siRNA target sequence for Acly (NM_134037.2,2515-2533).
ggccaaaggagccattgta

SEQ ID NO: 493219 - DNA, 19 bp, Mus musculus
  siRNA target sequence for Acly (NM_134037.2,2561-2579).
gtgcccatggactactctt

SEQ ID NO: 493220 - DNA, 19 bp, Mus musculus
  siRNA target sequence for Acly (NM_134037.2,2593-2611).
gggtttgatccgaaaacct

SEQ ID NO: 493221 - DNA, 19 bp, Mus musculus
  siRNA target sequence for Acly (NM_134037.2,2642-2660).
cgagggcaggagctcattt

SEQ ID NO: 493222 - DNA, 19 bp, Mus musculus
  siRNA target sequence for Acly (NM_134037.2,2819-2837).
gcccataacaccatcatct

SEQ ID NO: 493223 - DNA, 19 bp, Mus musculus
  siRNA target sequence for Acly (NM_134037.2,2918-2936).
gatgccgcagcaaagatgt

SEQ ID NO: 493224 - DNA, 19 bp, Mus musculus
  siRNA target sequence for Acly (NM_134037.2,2921-2939).
gccgcagcaaagatgttca

SEQ ID NO: 493225 - DNA, 19 bp, Mus musculus
  siRNA target sequence for Acly (NM_134037.2,2924-2942).
gcagcaaagatgttcagta

SEQ ID NO: 493226 - DNA, 19 bp, Mus musculus
  siRNA target sequence for Acly (NM_134037.2,3015-3033).
gcatcggccatcgagtaaa

SEQ ID NO: 493227 - DNA, 19 bp, Mus musculus
  siRNA target sequence for Acly (NM_134037.2,3016-3034).
catcggccatcgagtaaaa

SEQ ID NO: 493228 - DNA, 19 bp, Mus musculus
  siRNA target sequence for Acly (NM_134037.2,3020-3038).
ggccatcgagtaaaatcga

SEQ ID NO: 493229 - DNA, 19 bp, Mus musculus
  siRNA target sequence for Acly (NM_134037.2,3021-3039).
gccatcgagtaaaatcgat

SEQ ID NO: 493230 - DNA, 19 bp, Mus musculus
  siRNA target sequence for Acly (NM_134037.2,3022-3040).
ccatcgagtaaaatcgata

SEQ ID NO: 493231 - DNA, 19 bp, Mus musculus
  siRNA target sequence for Acly (NM_134037.2,3023-3041).
catcgagtaaaatcgataa

SEQ ID NO: 493232 - DNA, 19 bp, Mus musculus
  siRNA target sequence for Acly (NM_134037.2,3026-3044).
cgagtaaaatcgataaaca

SEQ ID NO: 493233 - DNA, 19 bp, Mus musculus
  siRNA target sequence for Acly (NM_134037.2,3027-3045).
gagtaaaatcgataaacaa

SEQ ID NO: 493234 - DNA, 19 bp, Mus musculus
  siRNA target sequence for Acly (NM_134037.2,3232-3250).
ccgggaggaagctgatgaa

SEQ ID NO: 493235 - DNA, 19 bp, Mus musculus
  siRNA target sequence for Acly (NM_134037.2,3359-3377).
ccctgggatgacatttcct

SEQ ID NO: 493236 - DNA, 19 bp, Mus musculus
  siRNA target sequence for Acvr1 (NM_007394.2,165-183).
cttcctgtgctaatgatga

SEQ ID NO: 493237 - DNA, 19 bp, Mus musculus
  siRNA target sequence for Acvr1 (NM_007394.2,291-309).
ggccagcagtgtttttctt

SEQ ID NO: 493238 - DNA, 19 bp, Mus musculus
  siRNA target sequence for Acvr1 (NM_007394.2,426-444).
caaggggactggtgtaaca

SEQ ID NO: 493239 - DNA, 19 bp, Mus musculus
  siRNA target sequence for Acvr1 (NM_007394.2,482-500).
cttccccggaacacagaat

SEQ ID NO: 493240 - DNA, 19 bp, Mus musculus
  siRNA target sequence for Acvr1 (NM_007394.2,487-505).
ccggaacacagaatttcca

SEQ ID NO: 493241 - DNA, 19 bp, Mus musculus
  siRNA target sequence for Acvr1 (NM_007394.2,576-594).
gctctcaggaagtttaaga

SEQ ID NO: 493242 - DNA, 19 bp, Mus musculus
  siRNA target sequence for Acvr1 (NM_007394.2,587-605).
gtttaagagacgcaatcaa

SEQ ID NO: 493243 - DNA, 19 bp, Mus musculus
  siRNA target sequence for Acvr1 (NM_007394.2,626-644).
cgtggagtatggtaccatt

SEQ ID NO: 493244 - DNA, 19 bp, Mus musculus
  siRNA target sequence for Acvr1 (NM_007394.2,676-694).
gcactctagcggaactact

SEQ ID NO: 493245 - DNA, 19 bp, Mus musculus
  siRNA target sequence for Acvr1 (NM_007394.2,693-711).
ctagatcactcgtgtacat

SEQ ID NO: 493246 - DNA, 19 bp, Mus musculus
  siRNA target sequence for Acvr1 (NM_007394.2,818-836).
cagctggcaaggcgaaaat

SEQ ID NO: 493247 - DNA, 19 bp, Mus musculus
  siRNA target sequence for Acvr1 (NM_007394.2,820-838).
gctggcaaggcgaaaatgt

SEQ ID NO: 493248 - DNA, 19 bp, Mus musculus
  siRNA target sequence for Acvr1 (NM_007394.2,883-901).
gggagacggaattgtacaa

SEQ ID NO: 493249 - DNA, 19 bp, Mus musculus
  siRNA target sequence for Acvr1 (NM_007394.2,885-903).
gagacggaattgtacaaca

SEQ ID NO: 493250 - DNA, 19 bp, Mus musculus
  siRNA target sequence for Acvr1 (NM_007394.2,1054-1072).
gctgccttcggattgtact

SEQ ID NO: 493251 - DNA, 19 bp, Mus musculus
  siRNA target sequence for Acvr1 (NM_007394.2,1084-1102).
gcggccttgcccatttgca

SEQ ID NO: 493252 - DNA, 19 bp, Mus musculus
  siRNA target sequence for Acvr1 (NM_007394.2,1209-1227).
ggcctggcagtcatgcatt

SEQ ID NO: 493253 - DNA, 19 bp, Mus musculus
  siRNA target sequence for Acvr1 (NM_007394.2,1312-1330).
ccatccaagtggattgctt

SEQ ID NO: 493254 - DNA, 19 bp, Mus musculus
  siRNA target sequence for Acvr1 (NM_007394.2,1313-1331).
catccaagtggattgcttt

SEQ ID NO: 493255 - DNA, 19 bp, Mus musculus
  siRNA target sequence for Acvr1 (NM_007394.2,1317-1335).
caagtggattgctttgatt

SEQ ID NO: 493256 - DNA, 19 bp, Mus musculus
  siRNA target sequence for Acvr1 (NM_007394.2,1336-1354).
cttataagagggtcgatat

SEQ ID NO: 493257 - DNA, 19 bp, Mus musculus
  siRNA target sequence for Acvr1 (NM_007394.2,1392-1410).
cgaatggtgagcaatggta

SEQ ID NO: 493258 - DNA, 19 bp, Mus musculus
  siRNA target sequence for Acvr1 (NM_007394.2,1424-1442).
caagccaccattctatgat

SEQ ID NO: 493259 - DNA, 19 bp, Mus musculus
  siRNA target sequence for Acvr1 (NM_007394.2,1500-1518).
cagaggccaaacataccta

SEQ ID NO: 493260 - DNA, 19 bp, Mus musculus
  siRNA target sequence for Acvr1 (NM_007394.2,1597-1615).
gactcacagctctacgtat

SEQ ID NO: 493261 - DNA, 19 bp, Mus musculus
  siRNA target sequence for Acvr1 (NM_007394.2,1603-1621).
cagctctacgtatcaaaaa

SEQ ID NO: 493262 - DNA, 19 bp, Mus musculus
  siRNA target sequence for Acvr1 (NM_007394.2,1605-1623).
gctctacgtatcaaaaaga

SEQ ID NO: 493263 - DNA, 19 bp, Mus musculus
  siRNA target sequence for Acvr1 (NM_007394.2,1608-1626).
ctacgtatcaaaaagactt

SEQ ID NO: 493264 - DNA, 19 bp, Mus musculus
  siRNA target sequence for Acvr1 (NM_007394.2,1624-1642).
ctttgaccaaaatcgataa

SEQ ID NO: 493265 - DNA, 19 bp, Mus musculus
  siRNA target sequence for Acvr1 (NM_007394.2,1637-1655).
cgataattccctagacaaa

SEQ ID NO: 493266 - DNA, 19 bp, Mus musculus
  siRNA target sequence for Acvr1 (NM_007394.2,1638-1656).
gataattccctagacaaat

SEQ ID NO: 493267 - DNA, 19 bp, Mus musculus
  siRNA target sequence for Acvr1b (NM_007395.1,285-303).
cacacactgctgctatatt

SEQ ID NO: 493268 - DNA, 19 bp, Mus musculus
  siRNA target sequence for Acvr1b (NM_007395.1,289-307).
cactgctgctatattgact

SEQ ID NO: 493269 - DNA, 19 bp, Mus musculus
  siRNA target sequence for Acvr1b (NM_007395.1,463-481).
caccagcgtgtctaccata

SEQ ID NO: 493270 - DNA, 19 bp, Mus musculus
  siRNA target sequence for Acvr1b (NM_007395.1,585-603).
ctcagggttaccccttttt

SEQ ID NO: 493271 - DNA, 19 bp, Mus musculus
  siRNA target sequence for Acvr1b (NM_007395.1,587-605).
cagggttacccctttttgt

SEQ ID NO: 493272 - DNA, 19 bp, Mus musculus
  siRNA target sequence for Acvr1b (NM_007395.1,620-638).
cccgaaccattgttttaca

SEQ ID NO: 493273 - DNA, 19 bp, Mus musculus
  siRNA target sequence for Acvr1b (NM_007395.1,769-787).
gtcatgctgcgccatgaaa

SEQ ID NO: 493274 - DNA, 19 bp, Mus musculus
  siRNA target sequence for Acvr1b (NM_007395.1,864-882).
cgagcatggctcactgttt

SEQ ID NO: 493275 - DNA, 19 bp, Mus musculus
  siRNA target sequence for Acvr1b (NM_007395.1,906-924).
gaccattgagggaatgatt

SEQ ID NO: 493276 - DNA, 19 bp, Mus musculus
  siRNA target sequence for Acvr1b (NM_007395.1,908-926).
ccattgagggaatgattaa

SEQ ID NO: 493277 - DNA, 19 bp, Mus musculus
  siRNA target sequence for Acvr1b (NM_007395.1,950-968).
gtttggcacacctgcatat

SEQ ID NO: 493278 - DNA, 19 bp, Mus musculus
  siRNA target sequence for Acvr1b (NM_007395.1,1107-1125).
catagacattgctccaaat

SEQ ID NO: 493279 - DNA, 19 bp, Mus musculus
  siRNA target sequence for Acvr1b (NM_007395.1,1165-1183).
cttgacgagacaatcaaca

SEQ ID NO: 493280 - DNA, 19 bp, Mus musculus
  siRNA target sequence for Acvr1b (NM_007395.1,1245-1263).
gattgcacgaagatgcaat

SEQ ID NO: 493281 - DNA, 19 bp, Mus musculus
  siRNA target sequence for Acvr1b (NM_007395.1,1311-1329).
gccctccgacccttccatt

SEQ ID NO: 493282 - DNA, 19 bp, Mus musculus
  siRNA target sequence for Acvr1b (NM_007395.1,1333-1351).
gagatgcgaaaggttgtat

SEQ ID NO: 493283 - DNA, 19 bp, Mus musculus
  siRNA target sequence for Acvr1b (NM_007395.1,1335-1353).
gatgcgaaaggttgtatgt

SEQ ID NO: 493284 - DNA, 19 bp, Mus musculus
  siRNA target sequence for Acvr1b (NM_007395.1,1379-1397).
ccaactggtggcagagtta

SEQ ID NO: 493285 - DNA, 19 bp, Mus musculus
  siRNA target sequence for Acvr1b (NM_007395.1,1466-1484).
cagctctgcgcatcaagaa

SEQ ID NO: 493286 - DNA, 19 bp, Mus musculus
  siRNA target sequence for Acvr2 (NM_007396.2,638-656).
gcgttcgccgtctttctta

SEQ ID NO: 493287 - DNA, 19 bp, Mus musculus
  siRNA target sequence for Acvr2 (NM_007396.2,639-657).
cgttcgccgtctttcttat

SEQ ID NO: 493288 - DNA, 19 bp, Mus musculus
  siRNA target sequence for Acvr2 (NM_007396.2,643-661).
cgccgtctttcttatctct

SEQ ID NO: 493289 - DNA, 19 bp, Mus musculus
  siRNA target sequence for Acvr2 (NM_007396.2,644-662).
gccgtctttcttatctctt

SEQ ID NO: 493290 - DNA, 19 bp, Mus musculus
  siRNA target sequence for Acvr2 (NM_007396.2,663-681).
gctcttcaggtgctatact

SEQ ID NO: 493291 - DNA, 19 bp, Mus musculus
  siRNA target sequence for Acvr2 (NM_007396.2,700-718).
ggagtgtcttttctttaat

SEQ ID NO: 493292 - DNA, 19 bp, Mus musculus
  siRNA target sequence for Acvr2 (NM_007396.2,762-780).
cttgctatggtgataaaga

SEQ ID NO: 493293 - DNA, 19 bp, Mus musculus
  siRNA target sequence for Acvr2 (NM_007396.2,779-797).
gataaacggcgacattgtt

SEQ ID NO: 493294 - DNA, 19 bp, Mus musculus
  siRNA target sequence for Acvr2 (NM_007396.2,785-803).
cggcgacattgttttgcta

SEQ ID NO: 493295 - DNA, 19 bp, Mus musculus
  siRNA target sequence for Acvr2 (NM_007396.2,871-889).
ctatgacaggactgattgt

SEQ ID NO: 493296 - DNA, 19 bp, Mus musculus
  siRNA target sequence for Acvr2 (NM_007396.2,877-895).
caggactgattgtatagaa

SEQ ID NO: 493297 - DNA, 19 bp, Mus musculus
  siRNA target sequence for Acvr2 (NM_007396.2,880-898).
gactgattgtatagaaaaa

SEQ ID NO: 493298 - DNA, 19 bp, Mus musculus
  siRNA target sequence for Acvr2 (NM_007396.2,907-925).
ccctgaagtgtacttttgt

SEQ ID NO: 493299 - DNA, 19 bp, Mus musculus
  siRNA target sequence for Acvr2 (NM_007396.2,930-948).
gtgagggcaatatgtgtaa

SEQ ID NO: 493300 - DNA, 19 bp, Mus musculus
  siRNA target sequence for Acvr2 (NM_007396.2,934-952).
gggcaatatgtgtaatgaa

SEQ ID NO: 493301 - DNA, 19 bp, Mus musculus
  siRNA target sequence for Acvr2 (NM_007396.2,935-953).
ggcaatatgtgtaatgaaa

SEQ ID NO: 493302 - DNA, 19 bp, Mus musculus
  siRNA target sequence for Acvr2 (NM_007396.2,1010-1028).
ccgaagccaccctattaca

SEQ ID NO: 493303 - DNA, 19 bp, Mus musculus
  siRNA target sequence for Acvr2 (NM_007396.2,1011-1029).
cgaagccaccctattacaa

SEQ ID NO: 493304 - DNA, 19 bp, Mus musculus
  siRNA target sequence for Acvr2 (NM_007396.2,1015-1033).
gccaccctattacaacatt

SEQ ID NO: 493305 - DNA, 19 bp, Mus musculus
  siRNA target sequence for Acvr2 (NM_007396.2,1017-1035).
caccctattacaacattct

SEQ ID NO: 493306 - DNA, 19 bp, Mus musculus
  siRNA target sequence for Acvr2 (NM_007396.2,1092-1110).
gggtgtacagacatcacaa

SEQ ID NO: 493307 - DNA, 19 bp, Mus musculus
  siRNA target sequence for Acvr2 (NM_007396.2,1114-1132).
ggcctaccctcctgtactt

SEQ ID NO: 493308 - DNA, 19 bp, Mus musculus
  siRNA target sequence for Acvr2 (NM_007396.2,1192-1210).
gcagctgttagaagtgaaa

SEQ ID NO: 493309 - DNA, 19 bp, Mus musculus
  siRNA target sequence for Acvr2 (NM_007396.2,1196-1214).
ctgttagaagtgaaagcaa

SEQ ID NO: 493310 - DNA, 19 bp, Mus musculus
  siRNA target sequence for Acvr2 (NM_007396.2,1241-1259).
gcccagttgctcaatgaat

SEQ ID NO: 493311 - DNA, 19 bp, Mus musculus
  siRNA target sequence for Acvr2 (NM_007396.2,1266-1284).
ctgtcaaaatatttccaat

SEQ ID NO: 493312 - DNA, 19 bp, Mus musculus
  siRNA target sequence for Acvr2 (NM_007396.2,1468-1486).
ctcttggaatgaactttgt

SEQ ID NO: 493313 - DNA, 19 bp, Mus musculus
  siRNA target sequence for Acvr2 (NM_007396.2,1474-1492).
gaatgaactttgtcatatt

SEQ ID NO: 493314 - DNA, 19 bp, Mus musculus
  siRNA target sequence for Acvr2 (NM_007396.2,1485-1503).
gtcatattgcagaaaccat

SEQ ID NO: 493315 - DNA, 19 bp, Mus musculus
  siRNA target sequence for Acvr2 (NM_007396.2,1505-1523).
gctagaggattggcatatt

SEQ ID NO: 493316 - DNA, 19 bp, Mus musculus
  siRNA target sequence for Acvr2 (NM_007396.2,1506-1524).
ctagaggattggcatattt

SEQ ID NO: 493317 - DNA, 19 bp, Mus musculus
  siRNA target sequence for Acvr2 (NM_007396.2,1512-1530).
gattggcatatttacatga

SEQ ID NO: 493318 - DNA, 19 bp, Mus musculus
  siRNA target sequence for Acvr2 (NM_007396.2,1694-1712).
gttggtacccggaggtata

SEQ ID NO: 493319 - DNA, 19 bp, Mus musculus
  siRNA target sequence for Acvr2 (NM_007396.2,1723-1741).
ggtgttggagggtgctata

SEQ ID NO: 493320 - DNA, 19 bp, Mus musculus
  siRNA target sequence for Acvr2 (NM_007396.2,1724-1742).
gtgttggagggtgctataa

SEQ ID NO: 493321 - DNA, 19 bp, Mus musculus
  siRNA target sequence for Acvr2 (NM_007396.2,1756-1774).
cgcatttctgaggatagat

SEQ ID NO: 493322 - DNA, 19 bp, Mus musculus
  siRNA target sequence for Acvr2 (NM_007396.2,1833-1851).
gacccgtagatgagtacat

SEQ ID NO: 493323 - DNA, 19 bp, Mus musculus
  siRNA target sequence for Acvr2 (NM_007396.2,1841-1859).
gatgagtacatgttaccat

SEQ ID NO: 493324 - DNA, 19 bp, Mus musculus
  siRNA target sequence for Acvr2 (NM_007396.2,1903-1921).
ggaagttgttgtgcataaa

SEQ ID NO: 493325 - DNA, 19 bp, Mus musculus
  siRNA target sequence for Acvr2 (NM_007396.2,1929-1947).
ggcctgttttaagagatta

SEQ ID NO: 493326 - DNA, 19 bp, Mus musculus
  siRNA target sequence for Acvr2 (NM_007396.2,1975-1993).
gctctgtgaaacgatagaa

SEQ ID NO: 493327 - DNA, 19 bp, Mus musculus
  siRNA target sequence for Acvr2 (NM_007396.2,2033-2051).
ggatgtgtaggtgaaagaa

SEQ ID NO: 493328 - DNA, 19 bp, Mus musculus
  siRNA target sequence for Acvr2 (NM_007396.2,2034-2052).
gatgtgtaggtgaaagaat

SEQ ID NO: 493329 - DNA, 19 bp, Mus musculus
  siRNA target sequence for Acvr2 (NM_007396.2,2107-2125).
ggtcacaatggtgacaaat

SEQ ID NO: 493330 - DNA, 19 bp, Mus musculus
  siRNA target sequence for Acvr2 (NM_007396.2,2110-2128).
cacaatggtgacaaatgtt

SEQ ID NO: 493331 - DNA, 19 bp, Mus musculus
  siRNA target sequence for Acvr2 (NM_007396.2,2138-2156).
cccaaagaatctagtctat

SEQ ID NO: 493332 - DNA, 19 bp, Mus musculus
  siRNA target sequence for Acvr2b (NM_007397.1,120-138).
ctcgggagtgcatctacta

SEQ ID NO: 493333 - DNA, 19 bp, Mus musculus
  siRNA target sequence for Acvr2b (NM_007397.1,122-140).
cgggagtgcatctactaca

SEQ ID NO: 493334 - DNA, 19 bp, Mus musculus
  siRNA target sequence for Acvr2b (NM_007397.1,123-141).
gggagtgcatctactacaa

SEQ ID NO: 493335 - DNA, 19 bp, Mus musculus
  siRNA target sequence for Acvr2b (NM_007397.1,273-291).
gctggctagatgacttcaa

SEQ ID NO: 493336 - DNA, 19 bp, Mus musculus
  siRNA target sequence for Acvr2b (NM_007397.1,274-292).
ctggctagatgacttcaat

SEQ ID NO: 493337 - DNA, 19 bp, Mus musculus
  siRNA target sequence for Acvr2b (NM_007397.1,278-296).
ctagatgacttcaattgct

SEQ ID NO: 493338 - DNA, 19 bp, Mus musculus
  siRNA target sequence for Acvr2b (NM_007397.1,603-621).
gctgtgcggactcctttaa

SEQ ID NO: 493339 - DNA, 19 bp, Mus musculus
  siRNA target sequence for Acvr2b (NM_007397.1,714-732).
gctttggctgcgtttggaa

SEQ ID NO: 493340 - DNA, 19 bp, Mus musculus
  siRNA target sequence for Acvr2b (NM_007397.1,797-815).
cagagtgaacgggaaatct

SEQ ID NO: 493341 - DNA, 19 bp, Mus musculus
  siRNA target sequence for Acvr2b (NM_007397.1,827-845).
ggcatgaagcacgaaaact

SEQ ID NO: 493342 - DNA, 19 bp, Mus musculus
  siRNA target sequence for Acvr2b (NM_007397.1,828-846).
gcatgaagcacgaaaactt

SEQ ID NO: 493343 - DNA, 19 bp, Mus musculus
  siRNA target sequence for Acvr2b (NM_007397.1,927-945).
gctccctcacggattacct

SEQ ID NO: 493344 - DNA, 19 bp, Mus musculus
  siRNA target sequence for Acvr2b (NM_007397.1,1223-1241).
ctggaaggagccatcaact

SEQ ID NO: 493345 - DNA, 19 bp, Mus musculus
  siRNA target sequence for Acvr2b (NM_007397.1,1329-1347).
ggcctgtcgatgagtacat

SEQ ID NO: 493346 - DNA, 19 bp, Mus musculus
  siRNA target sequence for Acvr2b (NM_007397.1,1423-1441).
gaggcccacgattaaggat

SEQ ID NO: 493347 - DNA, 19 bp, Mus musculus
  siRNA target sequence for Acvrl1 (NM_009612.1,505-523).
gggacgtcccacagagttt

SEQ ID NO: 493348 - DNA, 19 bp, Mus musculus
  siRNA target sequence for Acvrl1 (NM_009612.1,507-525).
gacgtcccacagagtttct

SEQ ID NO: 493349 - DNA, 19 bp, Mus musculus
  siRNA target sequence for Acvrl1 (NM_009612.1,509-527).
cgtcccacagagtttctga

SEQ ID NO: 493350 - DNA, 19 bp, Mus musculus
  siRNA target sequence for Acvrl1 (NM_009612.1,529-547).
ccatcactgctgctataga

SEQ ID NO: 493351 - DNA, 19 bp, Mus musculus
  siRNA target sequence for Acvrl1 (NM_009612.1,600-618).
cggaggagccagaagttga

SEQ ID NO: 493352 - DNA, 19 bp, Mus musculus
  siRNA target sequence for Acvrl1 (NM_009612.1,803-821).
ctggacagcgactgtacta

SEQ ID NO: 493353 - DNA, 19 bp, Mus musculus
  siRNA target sequence for Acvrl1 (NM_009612.1,943-961).
gagtgtggcggtcaagatt

SEQ ID NO: 493354 - DNA, 19 bp, Mus musculus
  siRNA target sequence for Acvrl1 (NM_009612.1,945-963).
gtgtggcggtcaagatttt

SEQ ID NO: 493355 - DNA, 19 bp, Mus musculus
  siRNA target sequence for Acvrl1 (NM_009612.1,947-965).
gtggcggtcaagattttct

SEQ ID NO: 493356 - DNA, 19 bp, Mus musculus
  siRNA target sequence for Acvrl1 (NM_009612.1,1197-1215).
gcctggcgcacctacatgt

SEQ ID NO: 493357 - DNA, 19 bp, Mus musculus
  siRNA target sequence for Acvrl1 (NM_009612.1,1713-1731).
ccgcactgcgcataaagaa

SEQ ID NO: 493358 - DNA, 19 bp, Mus musculus
  siRNA target sequence for Adrbk1 (NM_130863.1,334-352).
gatctttgactcctatatt

SEQ ID NO: 493359 - DNA, 19 bp, Mus musculus
  siRNA target sequence for Adrbk1 (NM_130863.1,537-555).
gccagtggaagaatgttga

SEQ ID NO: 493360 - DNA, 19 bp, Mus musculus
  siRNA target sequence for Adrbk1 (NM_130863.1,670-688).
gaagtgtctggacaagaaa

SEQ ID NO: 493361 - DNA, 19 bp, Mus musculus
  siRNA target sequence for Adrbk1 (NM_130863.1,772-790).
catcgtgtgcatgtcatat

SEQ ID NO: 493362 - DNA, 19 bp, Mus musculus
  siRNA target sequence for Adrbk1 (NM_130863.1,775-793).
cgtgtgcatgtcatatgca

SEQ ID NO: 493363 - DNA, 19 bp, Mus musculus
  siRNA target sequence for Adrbk1 (NM_130863.1,1149-1167).
gcatgctcttcaagttgtt

SEQ ID NO: 493364 - DNA, 19 bp, Mus musculus
  siRNA target sequence for Adrbk1 (NM_130863.1,1281-1299).
ccctgctggaaggtttgtt

SEQ ID NO: 493365 - DNA, 19 bp, Mus musculus
  siRNA target sequence for Adrbk1 (NM_130863.1,1386-1404).
ggcagatggtcttcttaca

SEQ ID NO: 493366 - DNA, 19 bp, Mus musculus
  siRNA target sequence for Adrbk1 (NM_130863.1,1462-1480).
cgacattggctcctttgat

SEQ ID NO: 493367 - DNA, 19 bp, Mus musculus
  siRNA target sequence for Adrbk1 (NM_130863.1,1491-1509).
caaaaggaatcaagttact

SEQ ID NO: 493368 - DNA, 19 bp, Mus musculus
  siRNA target sequence for Adrbk1 (NM_130863.1,1596-1614).
ccatcaatgctgaaacaga

SEQ ID NO: 493369 - DNA, 19 bp, Mus musculus
  siRNA target sequence for Adrbk1 (NM_130863.1,1626-1644).
cacgaaagaaggccaaaaa

SEQ ID NO: 493370 - DNA, 19 bp, Mus musculus
  siRNA target sequence for Adrbk1 (NM_130863.1,1740-1758).
ggcagcggcgatacttcta

SEQ ID NO: 493371 - DNA, 19 bp, Mus musculus
  siRNA target sequence for Adrbk1 (NM_130863.1,1742-1760).
cagcggcgatacttctact

SEQ ID NO: 493372 - DNA, 19 bp, Mus musculus
  siRNA target sequence for Adrbk1 (NM_130863.1,1745-1763).
cggcgatacttctacttgt

SEQ ID NO: 493373 - DNA, 19 bp, Mus musculus
  siRNA target sequence for Adrbk1 (NM_130863.1,1746-1764).
ggcgatacttctacttgtt

SEQ ID NO: 493374 - DNA, 19 bp, Mus musculus
  siRNA target sequence for Adrbk1 (NM_130863.1,1887-1905).
gaggtggcaagcagtttgt

SEQ ID NO: 493375 - DNA, 19 bp, Mus musculus
  siRNA target sequence for Adrbk1 (NM_130863.1,1906-1924).
cctgcagtgtgatagtgat

SEQ ID NO: 493376 - DNA, 19 bp, Mus musculus
  siRNA target sequence for Adrbk1 (NM_130863.1,1988-2006).
cagcgagtacccaagatga

SEQ ID NO: 493377 - DNA, 19 bp, Mus musculus
  siRNA target sequence for Adrbk1 (NM_130863.1,1992-2010).
gagtacccaagatgaagaa

SEQ ID NO: 493378 - DNA, 19 bp, Mus musculus
  siRNA target sequence for Afg3l1 (NM_054070.1,432-450).
gtgtggctgcgggattttt

SEQ ID NO: 493379 - DNA, 19 bp, Mus musculus
  siRNA target sequence for Afg3l1 (NM_054070.1,434-452).
gtggctgcgggatttttat

SEQ ID NO: 493380 - DNA, 19 bp, Mus musculus
  siRNA target sequence for Afg3l1 (NM_054070.1,436-454).
ggctgcgggatttttatat

SEQ ID NO: 493381 - DNA, 19 bp, Mus musculus
  siRNA target sequence for Afg3l1 (NM_054070.1,437-455).
gctgcgggatttttatatt

SEQ ID NO: 493382 - DNA, 19 bp, Mus musculus
  siRNA target sequence for Afg3l1 (NM_054070.1,440-458).
gcgggatttttatattttt

SEQ ID NO: 493383 - DNA, 19 bp, Mus musculus
  siRNA target sequence for Afg3l1 (NM_054070.1,464-482).
cgagatcccggaaaagaga

SEQ ID NO: 493384 - DNA, 19 bp, Mus musculus
  siRNA target sequence for Afg3l1 (NM_054070.1,556-574).
gtttgtgcgtgttattcct

SEQ ID NO: 493385 - DNA, 19 bp, Mus musculus
  siRNA target sequence for Afg3l1 (NM_054070.1,593-611).
gagaggttcgtgtggttta

SEQ ID NO: 493386 - DNA, 19 bp, Mus musculus
  siRNA target sequence for Afg3l1 (NM_054070.1,597-615).
ggttcgtgtggtttaacat

SEQ ID NO: 493387 - DNA, 19 bp, Mus musculus
  siRNA target sequence for Afg3l1 (NM_054070.1,598-616).
gttcgtgtggtttaacatt

SEQ ID NO: 493388 - DNA, 19 bp, Mus musculus
  siRNA target sequence for Afg3l1 (NM_054070.1,747-765).
ctctggtcctggttagcat

SEQ ID NO: 493389 - DNA, 19 bp, Mus musculus
  siRNA target sequence for Afg3l1 (NM_054070.1,762-780).
gcatcctcctatatgctat

SEQ ID NO: 493390 - DNA, 19 bp, Mus musculus
  siRNA target sequence for Afg3l1 (NM_054070.1,844-862).
gacaacagccaagatctta

SEQ ID NO: 493391 - DNA, 19 bp, Mus musculus
  siRNA target sequence for Afg3l1 (NM_054070.1,967-985).
ggacttaggagccaaaatt

SEQ ID NO: 493392 - DNA, 19 bp, Mus musculus
  siRNA target sequence for Afg3l1 (NM_054070.1,1058-1076).
gccaacgtgcccttcatca

SEQ ID NO: 493393 - DNA, 19 bp, Mus musculus
  siRNA target sequence for Afg3l1 (NM_054070.1,1125-1143).
cacgggtccgtgacatgtt

SEQ ID NO: 493394 - DNA, 19 bp, Mus musculus
  siRNA target sequence for Afg3l1 (NM_054070.1,1130-1148).
gtccgtgacatgtttgcaa

SEQ ID NO: 493395 - DNA, 19 bp, Mus musculus
  siRNA target sequence for Afg3l1 (NM_054070.1,1155-1173).
gaaaacacgctccttgtat

SEQ ID NO: 493396 - DNA, 19 bp, Mus musculus
  siRNA target sequence for Afg3l1 (NM_054070.1,1160-1178).
cacgctccttgtattttat

SEQ ID NO: 493397 - DNA, 19 bp, Mus musculus
  siRNA target sequence for Afg3l1 (NM_054070.1,1296-1314).
ccactaatgtggtagtgtt

SEQ ID NO: 493398 - DNA, 19 bp, Mus musculus
  siRNA target sequence for Afg3l1 (NM_054070.1,1297-1315).
cactaatgtggtagtgtta

SEQ ID NO: 493399 - DNA, 19 bp, Mus musculus
  siRNA target sequence for Afg3l1 (NM_054070.1,1323-1341).
ccaatcgccctgatatcct

SEQ ID NO: 493400 - DNA, 19 bp, Mus musculus
  siRNA target sequence for Afg3l1 (NM_054070.1,1324-1342).
caatcgccctgatatcctt

SEQ ID NO: 493401 - DNA, 19 bp, Mus musculus
  siRNA target sequence for Afg3l1 (NM_054070.1,1390-1408).
cggtccccctgatatcaaa

SEQ ID NO: 493402 - DNA, 19 bp, Mus musculus
  siRNA target sequence for Afg3l1 (NM_054070.1,1405-1423).
caaaggcaggtcctctatt

SEQ ID NO: 493403 - DNA, 19 bp, Mus musculus
  siRNA target sequence for Afg3l1 (NM_054070.1,1410-1428).
gcaggtcctctattttcaa

SEQ ID NO: 493404 - DNA, 19 bp, Mus musculus
  siRNA target sequence for Afg3l1 (NM_054070.1,1520-1538).
gctgatatttccaatgttt

SEQ ID NO: 493405 - DNA, 19 bp, Mus musculus
  siRNA target sequence for Afg3l1 (NM_054070.1,1652-1670).
ctacaacccagtgaaaaga

SEQ ID NO: 493406 - DNA, 19 bp, Mus musculus
  siRNA target sequence for Afg3l1 (NM_054070.1,2077-2095).
cgtcaggtctgcctataat

SEQ ID NO: 493407 - DNA, 19 bp, Mus musculus
  siRNA target sequence for Afg3l1 (NM_054070.1,2148-2166).
ggcgtctcctggagaaaga

SEQ ID NO: 493408 - DNA, 19 bp, Mus musculus
  siRNA target sequence for Afg3l1 (NM_054070.1,2149-2167).
gcgtctcctggagaaagaa

SEQ ID NO: 493409 - DNA, 19 bp, Mus musculus
  siRNA target sequence for Afg3l1 (NM_054070.1,2288-2306).
gggctgaaagactggaata

SEQ ID NO: 493410 - DNA, 19 bp, Mus musculus
  siRNA target sequence for AI256725 (NM_177606.2,93-111).
ctgagccagaaggactaat

SEQ ID NO: 493411 - DNA, 19 bp, Mus musculus
  siRNA target sequence for AI256725 (NM_177606.2,140-158).
gaggctcagctcatgaaat

SEQ ID NO: 493412 - DNA, 19 bp, Mus musculus
  siRNA target sequence for AI256725 (NM_177606.2,151-169).
catgaaattccgagttcaa

SEQ ID NO: 493413 - DNA, 19 bp, Mus musculus
  siRNA target sequence for AI256725 (NM_177606.2,209-227).
cagttggagagacaagtta

SEQ ID NO: 493414 - DNA, 19 bp, Mus musculus
  siRNA target sequence for AI256725 (NM_177606.2,458-476).
gcagctaagatcaaagaat

SEQ ID NO: 493415 - DNA, 19 bp, Mus musculus
  siRNA target sequence for AI256725 (NM_177606.2,477-495).
gggtaacagttaagttaaa

SEQ ID NO: 493416 - DNA, 19 bp, Mus musculus
  siRNA target sequence for AI256725 (NM_177606.2,490-508).
gttaaacgagctagaagta

SEQ ID NO: 493417 - DNA, 19 bp, Mus musculus
  siRNA target sequence for AI256725 (NM_177606.2,496-514).
cgagctagaagtagagaat

SEQ ID NO: 493418 - DNA, 19 bp, Mus musculus
  siRNA target sequence for AI256725 (NM_177606.2,500-518).
ctagaagtagagaatcaga

SEQ ID NO: 493419 - DNA, 19 bp, Mus musculus
  siRNA target sequence for AI256725 (NM_177606.2,515-533).
cagaatcttcgtttcatca

SEQ ID NO: 493420 - DNA, 19 bp, Mus musculus
  siRNA target sequence for AI256725 (NM_177606.2,627-645).
cagaagggcaacgcaattt

SEQ ID NO: 493421 - DNA, 19 bp, Mus musculus
  siRNA target sequence for AI256725 (NM_177606.2,629-647).
gaagggcaacgcaatttga

SEQ ID NO: 493422 - DNA, 19 bp, Mus musculus
  siRNA target sequence for AI256725 (NM_177606.2,632-650).
gggcaacgcaatttgacat

SEQ ID NO: 493423 - DNA, 19 bp, Mus musculus
  siRNA target sequence for AI256725 (NM_177606.2,638-656).
cgcaatttgacatttggat

SEQ ID NO: 493424 - DNA, 19 bp, Mus musculus
  siRNA target sequence for AI256725 (NM_177606.2,680-698).
cctccttgtgtcgtaagat

SEQ ID NO: 493425 - DNA, 19 bp, Mus musculus
  siRNA target sequence for AI256725 (NM_177606.2,840-858).
cttgcagctcggaacagaa

SEQ ID NO: 493426 - DNA, 19 bp, Mus musculus
  siRNA target sequence for AI256725 (NM_177606.2,890-908).
ggtggtacgtcccagaatt

SEQ ID NO: 493427 - DNA, 19 bp, Mus musculus
  siRNA target sequence for AI256725 (NM_177606.2,1055-1073).
gcatctgatgacagtagtt

SEQ ID NO: 493428 - DNA, 19 bp, Mus musculus
  siRNA target sequence for AI256725 (NM_177606.2,1071-1089).
gttctatattcgaagaaga

SEQ ID NO: 493429 - DNA, 19 bp, Mus musculus
  siRNA target sequence for AI256725 (NM_177606.2,1081-1099).
cgaagaagagacttttgat

SEQ ID NO: 493430 - DNA, 19 bp, Mus musculus
  siRNA target sequence for AI256725 (NM_177606.2,1101-1119).
ggaatagacctgagcaaaa

SEQ ID NO: 493431 - DNA, 19 bp, Mus musculus
  siRNA target sequence for AI256725 (NM_177606.2,1158-1176).
ctcagggtaaccttgcaaa

SEQ ID NO: 493432 - DNA, 19 bp, Mus musculus
  siRNA target sequence for AI256725 (NM_177606.2,1182-1200).
ggtctcagtcaggagtaaa

SEQ ID NO: 493433 - DNA, 19 bp, Mus musculus
  siRNA target sequence for AI256725 (NM_177606.2,1246-1264).
gcagagactggattataca

SEQ ID NO: 493434 - DNA, 19 bp, Mus musculus
  siRNA target sequence for AI256725 (NM_177606.2,1394-1412).
ctcagggtccccaacgttt

SEQ ID NO: 493435 - DNA, 19 bp, Mus musculus
  siRNA target sequence for AI256725 (NM_177606.2,1399-1417).
ggtccccaacgttttcagt

SEQ ID NO: 493436 - DNA, 19 bp, Mus musculus
  siRNA target sequence for AI256725 (NM_177606.2,1403-1421).
cccaacgttttcagtataa

SEQ ID NO: 493437 - DNA, 19 bp, Mus musculus
  siRNA target sequence for AI256725 (NM_177606.2,1563-1581).
ccgaggctgtgaacagaat

SEQ ID NO: 493438 - DNA, 19 bp, Mus musculus
  siRNA target sequence for AI256725 (NM_177606.2,1590-1608).
gttgcgatgacggcttatt

SEQ ID NO: 493439 - DNA, 19 bp, Mus musculus
  siRNA target sequence for AI256725 (NM_177606.2,1770-1788).
ctgaggccttcaatatgga

SEQ ID NO: 493440 - DNA, 19 bp, Mus musculus
  siRNA target sequence for AI256725 (NM_177606.2,1786-1804).
ggagcatgctaataaaaat

SEQ ID NO: 493441 - DNA, 19 bp, Mus musculus
  siRNA target sequence for AI256725 (NM_177606.2,1789-1807).
gcatgctaataaaaattct

SEQ ID NO: 493442 - DNA, 19 bp, Mus musculus
  siRNA target sequence for AI256725 (NM_177606.2,1838-1856).
ctttatacgtctctcatat

SEQ ID NO: 493443 - DNA, 19 bp, Mus musculus
  siRNA target sequence for AI256725 (NM_177606.2,1864-1882).
catgacgaccccagtctat

SEQ ID NO: 493444 - DNA, 19 bp, Mus musculus
  siRNA target sequence for AI256725 (NM_177606.2,1867-1885).
gacgaccccagtctataca

SEQ ID NO: 493445 - DNA, 19 bp, Mus musculus
  siRNA target sequence for AI256725 (NM_177606.2,1895-1913).
gggaaggcgacacaaataa

SEQ ID NO: 493446 - DNA, 19 bp, Mus musculus
  siRNA target sequence for AI256725 (NM_177606.2,1949-1967).
gacgaagaggacagttcta

SEQ ID NO: 493447 - DNA, 19 bp, Mus musculus
  siRNA target sequence for AI256725 (NM_177606.2,2058-2076).
ccgcagcttctgaaagtga

SEQ ID NO: 493448 - DNA, 19 bp, Mus musculus
  siRNA target sequence for AI256725 (NM_177606.2,2125-2143).
gcccgagcagaaacttcta

SEQ ID NO: 493449 - DNA, 19 bp, Mus musculus
  siRNA target sequence for AI256725 (NM_177606.2,2127-2145).
ccgagcagaaacttctaaa

SEQ ID NO: 493450 - DNA, 19 bp, Mus musculus
  siRNA target sequence for AI256725 (NM_177606.2,2128-2146).
cgagcagaaacttctaaaa

SEQ ID NO: 493451 - DNA, 19 bp, Mus musculus
  siRNA target sequence for AI256725 (NM_177606.2,2172-2190).
ggaaaaatgaaccattaga

SEQ ID NO: 493452 - DNA, 19 bp, Mus musculus
  siRNA target sequence for AI256725 (NM_177606.2,2196-2214).
ctgggtacctactgaaaat

SEQ ID NO: 493453 - DNA, 19 bp, Mus musculus
  siRNA target sequence for AI256725 (NM_177606.2,2198-2216).
gggtacctactgaaaatga

SEQ ID NO: 493454 - DNA, 19 bp, Mus musculus
  siRNA target sequence for AI256725 (NM_177606.2,2261-2279).
ggaggcgaattactttact

SEQ ID NO: 493455 - DNA, 19 bp, Mus musculus
  siRNA target sequence for AI256725 (NM_177606.2,2262-2280).
gaggcgaattactttacta

SEQ ID NO: 493456 - DNA, 19 bp, Mus musculus
  siRNA target sequence for AI256725 (NM_177606.2,2264-2282).
ggcgaattactttactaca

SEQ ID NO: 493457 - DNA, 19 bp, Mus musculus
  siRNA target sequence for AI256725 (NM_177606.2,2265-2283).
gcgaattactttactacaa

SEQ ID NO: 493458 - DNA, 19 bp, Mus musculus
  siRNA target sequence for AI256725 (NM_177606.2,2267-2285).
gaattactttactacaagt

SEQ ID NO: 493459 - DNA, 19 bp, Mus musculus
  siRNA target sequence for AI256725 (NM_177606.2,2284-2302).
gtcaccaagcgatgtgatt

SEQ ID NO: 493460 - DNA, 19 bp, Mus musculus
  siRNA target sequence for AI256725 (NM_177606.2,2310-2328).
cccagggccacattgaact

SEQ ID NO: 493461 - DNA, 19 bp, Mus musculus
  siRNA target sequence for AI256725 (NM_177606.2,2409-2427).
cggcggattctcccaatat

SEQ ID NO: 493462 - DNA, 19 bp, Mus musculus
  siRNA target sequence for AI256725 (NM_177606.2,2410-2428).
ggcggattctcccaatata

SEQ ID NO: 493463 - DNA, 19 bp, Mus musculus
  siRNA target sequence for AI256725 (NM_177606.2,2412-2430).
cggattctcccaatatact

SEQ ID NO: 493464 - DNA, 19 bp, Mus musculus
  siRNA target sequence for AI256725 (NM_177606.2,2420-2438).
cccaatatactggaagaat

SEQ ID NO: 493465 - DNA, 19 bp, Mus musculus
  siRNA target sequence for AI256725 (NM_177606.2,2455-2473).
gagcgttctgcgagtacaa

SEQ ID NO: 493466 - DNA, 19 bp, Mus musculus
  siRNA target sequence for AI256725 (NM_177606.2,2600-2618).
cgcaatcaagaggataagt

SEQ ID NO: 493467 - DNA, 19 bp, Mus musculus
  siRNA target sequence for AI256725 (NM_177606.2,2622-2640).
ctctaggtcagctcaaact

SEQ ID NO: 493468 - DNA, 19 bp, Mus musculus
  siRNA target sequence for AI256725 (NM_177606.2,2624-2642).
ctaggtcagctcaaactct

SEQ ID NO: 493469 - DNA, 19 bp, Mus musculus
  siRNA target sequence for AI256725 (NM_177606.2,2722-2740).
cactcactacaccatcatt

SEQ ID NO: 493470 - DNA, 19 bp, Mus musculus
  siRNA target sequence for AI256725 (NM_177606.2,2832-2850).
gaagcaacaatataaatgt

SEQ ID NO: 493471 - DNA, 19 bp, Mus musculus
  siRNA target sequence for AI256725 (NM_177606.2,2853-2871).
gatccgaatttgaacaact

SEQ ID NO: 493472 - DNA, 19 bp, Mus musculus
  siRNA target sequence for AI256725 (NM_177606.2,2873-2891).
gtttgcaagttgctgaata

SEQ ID NO: 493473 - DNA, 19 bp, Mus musculus
  siRNA target sequence for AI256725 (NM_177606.2,2937-2955).
gtcacagcaaagaaggaat

SEQ ID NO: 493474 - DNA, 19 bp, Mus musculus
  siRNA target sequence for AI256725 (NM_177606.2,2995-3013).
gaccgaggccattaagcta

SEQ ID NO: 493475 - DNA, 19 bp, Mus musculus
  siRNA target sequence for AI256725 (NM_177606.2,2997-3015).
ccgaggccattaagctatt

SEQ ID NO: 493476 - DNA, 19 bp, Mus musculus
  siRNA target sequence for AI256725 (NM_177606.2,2998-3016).
cgaggccattaagctattt

SEQ ID NO: 493477 - DNA, 19 bp, Mus musculus
  siRNA target sequence for AI256725 (NM_177606.2,2999-3017).
gaggccattaagctattta

SEQ ID NO: 493478 - DNA, 19 bp, Mus musculus
  siRNA target sequence for AI256725 (NM_177606.2,3002-3020).
gccattaagctatttaaga

SEQ ID NO: 493479 - DNA, 19 bp, Mus musculus
  siRNA target sequence for AI256725 (NM_177606.2,3111-3129).
cgcatcccgagctacagaa

SEQ ID NO: 493480 - DNA, 19 bp, Mus musculus
  siRNA target sequence for AI256725 (NM_177606.2,3138-3156).
gctgccagcttattaagca

SEQ ID NO: 493481 - DNA, 19 bp, Mus musculus
  siRNA target sequence for AI256725 (NM_177606.2,3308-3326).
gggaaatatgccatttact

SEQ ID NO: 493482 - DNA, 19 bp, Mus musculus
  siRNA target sequence for AI256725 (NM_177606.2,3378-3396).
cgtccaggatggagatact

SEQ ID NO: 493483 - DNA, 19 bp, Mus musculus
  siRNA target sequence for AI256725 (NM_177606.2,3391-3409).
gatactctccactcttctt

SEQ ID NO: 493484 - DNA, 19 bp, Mus musculus
  siRNA target sequence for AI256725 (NM_177606.2,3441-3459).
gcatacccgtgcacttcat

SEQ ID NO: 493485 - DNA, 19 bp, Mus musculus
  siRNA target sequence for AI256725 (NM_177606.2,3614-3632).
cttcagggaaatatcaaga

SEQ ID NO: 493486 - DNA, 19 bp, Mus musculus
  siRNA target sequence for AI256725 (NM_177606.2,3702-3720).
ggactgtccgtctgactta

SEQ ID NO: 493487 - DNA, 19 bp, Mus musculus
  siRNA target sequence for AI256725 (NM_177606.2,3707-3725).
gtccgtctgacttacaaaa

SEQ ID NO: 493488 - DNA, 19 bp, Mus musculus
  siRNA target sequence for AI256725 (NM_177606.2,3710-3728).
cgtctgacttacaaaaaca

SEQ ID NO: 493489 - DNA, 19 bp, Mus musculus
  siRNA target sequence for AI256725 (NM_177606.2,3753-3771).
gtggagaaaccgatagaga

SEQ ID NO: 493490 - DNA, 19 bp, Mus musculus
  siRNA target sequence for AI256725 (NM_177606.2,3808-3826).
cataaacggcctttttcct

SEQ ID NO: 493491 - DNA, 19 bp, Mus musculus
  siRNA target sequence for AI256725 (NM_177606.2,3814-3832).
cggcctttttcctctgaat

SEQ ID NO: 493492 - DNA, 19 bp, Mus musculus
  siRNA target sequence for AI256725 (NM_177606.2,3815-3833).
ggcctttttcctctgaata

SEQ ID NO: 493493 - DNA, 19 bp, Mus musculus
  siRNA target sequence for AI256725 (NM_177606.2,4074-4092).
ctgactgcattcgaattta

SEQ ID NO: 493494 - DNA, 19 bp, Mus musculus
  siRNA target sequence for AI256725 (NM_177606.2,4076-4094).
gactgcattcgaatttact

SEQ ID NO: 493495 - DNA, 19 bp, Mus musculus
  siRNA target sequence for AI256725 (NM_177606.2,4105-4123).
caggaagtggccgttcttt

SEQ ID NO: 493496 - DNA, 19 bp, Mus musculus
  siRNA target sequence for AI256725 (NM_177606.2,4127-4145).
gccaagttgttctttgcaa

SEQ ID NO: 493497 - DNA, 19 bp, Mus musculus
  siRNA target sequence for AI256725 (NM_177606.2,4205-4223).
gggttgagcatcctagaat

SEQ ID NO: 493498 - DNA, 19 bp, Mus musculus
  siRNA target sequence for AI256725 (NM_177606.2,4206-4224).
ggttgagcatcctagaata

SEQ ID NO: 493499 - DNA, 19 bp, Mus musculus
  siRNA target sequence for AI256725 (NM_177606.2,4236-4254).
gattagtgaccagctatat

SEQ ID NO: 493500 - DNA, 19 bp, Mus musculus
  siRNA target sequence for AI256725 (NM_177606.2,4278-4296).
ggggctatcaagaggattt

SEQ ID NO: 493501 - DNA, 19 bp, Mus musculus
  siRNA target sequence for AI256725 (NM_177606.2,4280-4298).
ggctatcaagaggatttca

SEQ ID NO: 493502 - DNA, 19 bp, Mus musculus
  siRNA target sequence for AI256725 (NM_177606.2,4297-4315).
catggtagtcgttagtaca

SEQ ID NO: 493503 - DNA, 19 bp, Mus musculus
  siRNA target sequence for AI256725 (NM_177606.2,4306-4324).
cgttagtacacagtcaaaa

SEQ ID NO: 493504 - DNA, 19 bp, Mus musculus
  siRNA target sequence for AI256725 (NM_177606.2,4388-4406).
ctgatcgccagttacatca

SEQ ID NO: 493505 - DNA, 19 bp, Mus musculus
  siRNA target sequence for AI325941 (NM_178900.2,943-961).
cggccaccttcgaggattt

SEQ ID NO: 493506 - DNA, 19 bp, Mus musculus
  siRNA target sequence for AI325941 (NM_178900.2,1072-1090).
gctgcgggctgaattacca

SEQ ID NO: 493507 - DNA, 19 bp, Mus musculus
  siRNA target sequence for AI325941 (NM_178900.2,1303-1321).
caggccgacccattgagtt

SEQ ID NO: 493508 - DNA, 19 bp, Mus musculus
  siRNA target sequence for AI325941 (NM_178900.2,1356-1374).
cacaccttccttatacata

SEQ ID NO: 493509 - DNA, 19 bp, Mus musculus
  siRNA target sequence for AI325941 (NM_178900.2,1360-1378).
ccttccttatacatagcta

SEQ ID NO: 493510 - DNA, 19 bp, Mus musculus
  siRNA target sequence for AI325941 (NM_178900.2,1457-1475).
caagtttaactgtcacaaa

SEQ ID NO: 493511 - DNA, 19 bp, Mus musculus
  siRNA target sequence for AI325941 (NM_178900.2,1508-1526).
gggggaggcgctcatcaat

SEQ ID NO: 493512 - DNA, 19 bp, Mus musculus
  siRNA target sequence for AI325941 (NM_178900.2,1821-1839).
cgtctagactgtaaatgca

SEQ ID NO: 493513 - DNA, 19 bp, Mus musculus
  siRNA target sequence for AI325941 (NM_178900.2,1822-1840).
gtctagactgtaaatgcat

SEQ ID NO: 493514 - DNA, 19 bp, Mus musculus
  siRNA target sequence for AI325941 (NM_178900.2,1861-1879).
cgaccaacagatactacaa

SEQ ID NO: 493515 - DNA, 19 bp, Mus musculus
  siRNA target sequence for AI325941 (NM_178900.2,1881-1899).
gaaatcccgctgtctgaaa

SEQ ID NO: 493516 - DNA, 19 bp, Mus musculus
  siRNA target sequence for AI325941 (NM_178900.2,1911-1929).
gaaccggctcagaacttca

SEQ ID NO: 493517 - DNA, 19 bp, Mus musculus
  siRNA target sequence for AI325941 (NM_178900.2,1956-1974).
cactgcttcgagatcatca

SEQ ID NO: 493518 - DNA, 19 bp, Mus musculus
  siRNA target sequence for AI325941 (NM_178900.2,1976-1994).
ggccaatgtcacctacttt

SEQ ID NO: 493519 - DNA, 19 bp, Mus musculus
  siRNA target sequence for AI325941 (NM_178900.2,2083-2101).
cactgatgcccgttatcct

SEQ ID NO: 493520 - DNA, 19 bp, Mus musculus
  siRNA target sequence for AI325941 (NM_178900.2,2243-2261).
gcagtttggagtggtttat

SEQ ID NO: 493521 - DNA, 19 bp, Mus musculus
  siRNA target sequence for AI325941 (NM_178900.2,2415-2433).
gagactcctgagaaggtat

SEQ ID NO: 493522 - DNA, 19 bp, Mus musculus
  siRNA target sequence for AI325941 (NM_178900.2,2419-2437).
ctcctgagaaggtattcgt

SEQ ID NO: 493523 - DNA, 19 bp, Mus musculus
  siRNA target sequence for AI325941 (NM_178900.2,2877-2895).
ccctggagccacatctcat

SEQ ID NO: 493524 - DNA, 19 bp, Mus musculus
  siRNA target sequence for AI325941 (NM_178900.2,3013-3031).
gagagctagagggaaagat

SEQ ID NO: 493525 - DNA, 19 bp, Mus musculus
  siRNA target sequence for AI325941 (NM_178900.2,3067-3085).
cacgctgggatcagtttgt

SEQ ID NO: 493526 - DNA, 19 bp, Mus musculus
  siRNA target sequence for AI326477 (NM_172891.1,916-934).
gagagaagcagtatgaagt

SEQ ID NO: 493527 - DNA, 19 bp, Mus musculus
  siRNA target sequence for AI326477 (NM_172891.1,954-972).
ctggttggcggctttctca

SEQ ID NO: 493528 - DNA, 19 bp, Mus musculus
  siRNA target sequence for AI326477 (NM_172891.1,1231-1249).
gttgtgggaccctctatca

SEQ ID NO: 493529 - DNA, 19 bp, Mus musculus
  siRNA target sequence for AI326477 (NM_172891.1,1242-1260).
ctctatcatgcaacaatga

SEQ ID NO: 493530 - DNA, 19 bp, Mus musculus
  siRNA target sequence for AI326477 (NM_172891.1,1269-1287).
gatcaccctaagccaaaaa

SEQ ID NO: 493531 - DNA, 19 bp, Mus musculus
  siRNA target sequence for AI326477 (NM_172891.1,1348-1366).
gacgaatccaattctatca

SEQ ID NO: 493532 - DNA, 19 bp, Mus musculus
  siRNA target sequence for AI326477 (NM_172891.1,1350-1368).
cgaatccaattctatcagt

SEQ ID NO: 493533 - DNA, 19 bp, Mus musculus
  siRNA target sequence for AI326477 (NM_172891.1,1351-1369).
gaatccaattctatcagta

SEQ ID NO: 493534 - DNA, 19 bp, Mus musculus
  siRNA target sequence for AI326477 (NM_172891.1,1400-1418).
ggagggctgctgtacagaa

SEQ ID NO: 493535 - DNA, 19 bp, Mus musculus
  siRNA target sequence for AI326477 (NM_172891.1,1483-1501).
cctgtcgaagggatgtgat

SEQ ID NO: 493536 - DNA, 19 bp, Mus musculus
  siRNA target sequence for AI326477 (NM_172891.1,1649-1667).
gactcccaaactttgtcat

SEQ ID NO: 493537 - DNA, 19 bp, Mus musculus
  siRNA target sequence for AI326477 (NM_172891.1,2003-2021).
cctagaagctgcttctaga

SEQ ID NO: 493538 - DNA, 19 bp, Mus musculus
  siRNA target sequence for AI326477 (NM_172891.1,2004-2022).
ctagaagctgcttctagat

SEQ ID NO: 493539 - DNA, 19 bp, Mus musculus
  siRNA target sequence for AI463719 (NM_134002.1,492-510).
ccgagtcggcaagaagata

SEQ ID NO: 493540 - DNA, 19 bp, Mus musculus
  siRNA target sequence for AI463719 (NM_134002.1,527-545).
gggagcttcgcctaggaaa

SEQ ID NO: 493541 - DNA, 19 bp, Mus musculus
  siRNA target sequence for AI463719 (NM_134002.1,531-549).
gcttcgcctaggaaagaat

SEQ ID NO: 493542 - DNA, 19 bp, Mus musculus
  siRNA target sequence for AI463719 (NM_134002.1,535-553).
cgcctaggaaagaatctgt

SEQ ID NO: 493543 - DNA, 19 bp, Mus musculus
  siRNA target sequence for AI463719 (NM_134002.1,737-755).
gcgtccctcaggtctacta

SEQ ID NO: 493544 - DNA, 19 bp, Mus musculus
  siRNA target sequence for AI463719 (NM_134002.1,1075-1093).
ggcactgcgcgctacatga

SEQ ID NO: 493545 - DNA, 19 bp, Mus musculus
  siRNA target sequence for AI463719 (NM_134002.1,1144-1162).
gcgctgggacacatgttca

SEQ ID NO: 493546 - DNA, 19 bp, Mus musculus
  siRNA target sequence for AI463719 (NM_134002.1,1145-1163).
cgctgggacacatgttcat

SEQ ID NO: 493547 - DNA, 19 bp, Mus musculus
  siRNA target sequence for AI463719 (NM_134002.1,1322-1340).
gcctagacttttttgagaa

SEQ ID NO: 493548 - DNA, 19 bp, Mus musculus
  siRNA target sequence for AI463719 (NM_134002.1,1391-1409).
gcggctacgtgtttgacta

SEQ ID NO: 493549 - DNA, 19 bp, Mus musculus
  siRNA target sequence for AI463719 (NM_134002.1,1521-1539).
ggcgctcaactccactaat

SEQ ID NO: 493550 - DNA, 19 bp, Mus musculus
  siRNA target sequence for AI463719 (NM_134002.1,1524-1542).
gctcaactccactaatgga

SEQ ID NO: 493551 - DNA, 19 bp, Mus musculus
  siRNA target sequence for AI553587 (NM_178909.3,129-147).
cctgcagtgccaaattcgt

SEQ ID NO: 493552 - DNA, 19 bp, Mus musculus
  siRNA target sequence for AI553587 (NM_178909.3,145-163).
cgtgacgatgggcaacttt

SEQ ID NO: 493553 - DNA, 19 bp, Mus musculus
  siRNA target sequence for AI553587 (NM_178909.3,218-236).
ctgctgcgggagattgaaa

SEQ ID NO: 493554 - DNA, 19 bp, Mus musculus
  siRNA target sequence for AI553587 (NM_178909.3,303-321).
gagattttggtggaaatct

SEQ ID NO: 493555 - DNA, 19 bp, Mus musculus
  siRNA target sequence for AI553587 (NM_178909.3,311-329).
ggtggaaatcttcatatat

SEQ ID NO: 493556 - DNA, 19 bp, Mus musculus
  siRNA target sequence for AI553587 (NM_178909.3,349-367).
gatgccagtgtattctgta

SEQ ID NO: 493557 - DNA, 19 bp, Mus musculus
  siRNA target sequence for AI553587 (NM_178909.3,370-388).
gggccacaaagaaatcata

SEQ ID NO: 493558 - DNA, 19 bp, Mus musculus
  siRNA target sequence for AI553587 (NM_178909.3,371-389).
ggccacaaagaaatcataa

SEQ ID NO: 493559 - DNA, 19 bp, Mus musculus
  siRNA target sequence for AI553587 (NM_178909.3,453-471).
gccgtgatggaactgtaaa

SEQ ID NO: 493560 - DNA, 19 bp, Mus musculus
  siRNA target sequence for AI553587 (NM_178909.3,475-493).
gtgggacccaaggcaaaaa

SEQ ID NO: 493561 - DNA, 19 bp, Mus musculus
  siRNA target sequence for AI553587 (NM_178909.3,564-582).
gcaatgcttataatcaaga

SEQ ID NO: 493562 - DNA, 19 bp, Mus musculus
  siRNA target sequence for AI553587 (NM_178909.3,565-583).
caatgcttataatcaagaa

SEQ ID NO: 493563 - DNA, 19 bp, Mus musculus
  siRNA target sequence for AI553587 (NM_178909.3,595-613).
ctgtgctggctatgacaat

SEQ ID NO: 493564 - DNA, 19 bp, Mus musculus
  siRNA target sequence for AI553587 (NM_178909.3,648-666).
cactgcggtgggagacaaa

SEQ ID NO: 493565 - DNA, 19 bp, Mus musculus
  siRNA target sequence for AI553587 (NM_178909.3,677-695).
ggggtatgcagcttggaat

SEQ ID NO: 493566 - DNA, 19 bp, Mus musculus
  siRNA target sequence for AI553587 (NM_178909.3,678-696).
gggtatgcagcttggaatt

SEQ ID NO: 493567 - DNA, 19 bp, Mus musculus
  siRNA target sequence for AI553587 (NM_178909.3,679-697).
ggtatgcagcttggaattt

SEQ ID NO: 493568 - DNA, 19 bp, Mus musculus
  siRNA target sequence for AI553587 (NM_178909.3,698-716).
gacagaaaggacatcagta

SEQ ID NO: 493569 - DNA, 19 bp, Mus musculus
  siRNA target sequence for AI553587 (NM_178909.3,707-725).
gacatcagtatgaataagt

SEQ ID NO: 493570 - DNA, 19 bp, Mus musculus
  siRNA target sequence for AI553587 (NM_178909.3,755-773).
cacgtcttcgacatgagaa

SEQ ID NO: 493571 - DNA, 19 bp, Mus musculus
  siRNA target sequence for AI553587 (NM_178909.3,815-833).
gcccataaatccactgtat

SEQ ID NO: 493572 - DNA, 19 bp, Mus musculus
  siRNA target sequence for AI553587 (NM_178909.3,920-938).
ccaactcagcggtcaaaga

SEQ ID NO: 493573 - DNA, 19 bp, Mus musculus
  siRNA target sequence for AI553587 (NM_178909.3,921-939).
caactcagcggtcaaagaa

SEQ ID NO: 493574 - DNA, 19 bp, Mus musculus
  siRNA target sequence for AI553587 (NM_178909.3,924-942).
ctcagcggtcaaagaaaga

SEQ ID NO: 493575 - DNA, 19 bp, Mus musculus
  siRNA target sequence for AI553587 (NM_178909.3,926-944).
cagcggtcaaagaaagatt

SEQ ID NO: 493576 - DNA, 19 bp, Mus musculus
  siRNA target sequence for AI553587 (NM_178909.3,1051-1069).
gctctgcgtctgtagttca

SEQ ID NO: 493577 - DNA, 19 bp, Mus musculus
  siRNA target sequence for AI553587 (NM_178909.3,1052-1070).
ctctgcgtctgtagttcat

SEQ ID NO: 493578 - DNA, 19 bp, Mus musculus
  siRNA target sequence for AI553587 (NM_178909.3,1054-1072).
ctgcgtctgtagttcattt

SEQ ID NO: 493579 - DNA, 19 bp, Mus musculus
  siRNA target sequence for AI553587 (NM_178909.3,1056-1074).
gcgtctgtagttcatttga

SEQ ID NO: 493580 - DNA, 19 bp, Mus musculus
  siRNA target sequence for AI553587 (NM_178909.3,1081-1099).
ggtgcgtgtgctgatagtt

SEQ ID NO: 493581 - DNA, 19 bp, Mus musculus
  siRNA target sequence for AI553587 (NM_178909.3,1082-1100).
gtgcgtgtgctgatagtta

SEQ ID NO: 493582 - DNA, 19 bp, Mus musculus
  siRNA target sequence for AI553587 (NM_178909.3,1084-1102).
gcgtgtgctgatagttaca

SEQ ID NO: 493583 - DNA, 19 bp, Mus musculus
  siRNA target sequence for AI553587 (NM_178909.3,1085-1103).
cgtgtgctgatagttacaa

SEQ ID NO: 493584 - DNA, 19 bp, Mus musculus
  siRNA target sequence for AI790298 (NM_134148.1,661-679).
ctgggctggggcaatgcta

SEQ ID NO: 493585 - DNA, 19 bp, Mus musculus
  siRNA target sequence for AI790298 (NM_134148.1,938-956).
caaggctcatcgagattaa

SEQ ID NO: 493586 - DNA, 19 bp, Mus musculus
  siRNA target sequence for AI790298 (NM_134148.1,1170-1188).
ccatgaccaggggcaatta

SEQ ID NO: 493587 - DNA, 19 bp, Mus musculus
  siRNA target sequence for AI838661 (NM_133884.1,382-400).
cctgcgaggccactacttt

SEQ ID NO: 493588 - DNA, 19 bp, Mus musculus
  siRNA target sequence for AI838661 (NM_133884.1,387-405).
gaggccactactttctctt

SEQ ID NO: 493589 - DNA, 19 bp, Mus musculus
  siRNA target sequence for AI838661 (NM_133884.1,446-464).
gccctacgcagcatcttct

SEQ ID NO: 493590 - DNA, 19 bp, Mus musculus
  siRNA target sequence for AI838661 (NM_133884.1,530-548).
gacccagccaagttcatct

SEQ ID NO: 493591 - DNA, 19 bp, Mus musculus
  siRNA target sequence for AI838661 (NM_133884.1,573-591).
ccatgctgcacgtggaatt

SEQ ID NO: 493592 - DNA, 19 bp, Mus musculus
  siRNA target sequence for AI838661 (NM_133884.1,619-637).
ggaccttattgaacactat

SEQ ID NO: 493593 - DNA, 19 bp, Mus musculus
  siRNA target sequence for AI838661 (NM_133884.1,729-747).
gctaccgacagctcaatga

SEQ ID NO: 493594 - DNA, 19 bp, Mus musculus
  siRNA target sequence for AI838661 (NM_133884.1,817-835).
cagcatccagcgagtctta

SEQ ID NO: 493595 - DNA, 19 bp, Mus musculus
  siRNA target sequence for AI838661 (NM_133884.1,819-837).
gcatccagcgagtcttaca

SEQ ID NO: 493596 - DNA, 19 bp, Mus musculus
  siRNA target sequence for AI874665 (NM_178907.1,502-520).
cgacgggaacccaagaagt

SEQ ID NO: 493597 - DNA, 19 bp, Mus musculus
  siRNA target sequence for AI874665 (NM_178907.1,503-521).
gacgggaacccaagaagta

SEQ ID NO: 493598 - DNA, 19 bp, Mus musculus
  siRNA target sequence for AI874665 (NM_178907.1,712-730).
ctggacgtgtatgagaata

SEQ ID NO: 493599 - DNA, 19 bp, Mus musculus
  siRNA target sequence for AI874665 (NM_178907.1,879-897).
cttgcacagccggaacatt

SEQ ID NO: 493600 - DNA, 19 bp, Mus musculus
  siRNA target sequence for AI874665 (NM_178907.1,943-961).
gagaaggatgctgtactta

SEQ ID NO: 493601 - DNA, 19 bp, Mus musculus
  siRNA target sequence for AI874665 (NM_178907.1,945-963).
gaaggatgctgtacttaaa

SEQ ID NO: 493602 - DNA, 19 bp, Mus musculus
  siRNA target sequence for AI874665 (NM_178907.1,1016-1034).
cctgctacactccctatta

SEQ ID NO: 493603 - DNA, 19 bp, Mus musculus
  siRNA target sequence for AI874665 (NM_178907.1,1017-1035).
ctgctacactccctattat

SEQ ID NO: 493604 - DNA, 19 bp, Mus musculus
  siRNA target sequence for AI874665 (NM_178907.1,1186-1204).
cgcttgggccagtatagct

SEQ ID NO: 493605 - DNA, 19 bp, Mus musculus
  siRNA target sequence for AI874665 (NM_178907.1,1187-1205).
gcttgggccagtatagctt

SEQ ID NO: 493606 - DNA, 19 bp, Mus musculus
  siRNA target sequence for AI874665 (NM_178907.1,1288-1306).
ctaacgatcatgcagttta

SEQ ID NO: 493607 - DNA, 19 bp, Mus musculus
  siRNA target sequence for AI874665 (NM_178907.1,1292-1310).
cgatcatgcagtttatgaa

SEQ ID NO: 493608 - DNA, 19 bp, Mus musculus
  siRNA target sequence for AI874665 (NM_178907.1,1308-1326).
gaaccatccttggatcaat

SEQ ID NO: 493609 - DNA, 19 bp, Mus musculus
  siRNA target sequence for AI874665 (NM_178907.1,1316-1334).
cttggatcaatcaatccat

SEQ ID NO: 493610 - DNA, 19 bp, Mus musculus
  siRNA target sequence for AI874665 (NM_178907.1,1430-1448).
ccactatgcgggtagacta

SEQ ID NO: 493611 - DNA, 19 bp, Mus musculus
  siRNA target sequence for AI874665 (NM_178907.1,1431-1449).
cactatgcgggtagactat

SEQ ID NO: 493612 - DNA, 19 bp, Mus musculus
  siRNA target sequence for AI874665 (NM_178907.1,1433-1451).
ctatgcgggtagactatga

SEQ ID NO: 493613 - DNA, 19 bp, Mus musculus
  siRNA target sequence for Ak1 (NM_021515.1,174-192).
cccagtgcgagaagattgt

SEQ ID NO: 493614 - DNA, 19 bp, Mus musculus
  siRNA target sequence for Ak1 (NM_021515.1,180-198).
gcgagaagattgtacagaa

SEQ ID NO: 493615 - DNA, 19 bp, Mus musculus
  siRNA target sequence for Ak1 (NM_021515.1,331-349).
gctccgagatgctatgtta

SEQ ID NO: 493616 - DNA, 19 bp, Mus musculus
  siRNA target sequence for Ak2 (NM_016895.2,219-237).
gctgaaggcgacaatggat

SEQ ID NO: 493617 - DNA, 19 bp, Mus musculus
  siRNA target sequence for Ak2 (NM_016895.2,249-267).
ggtgagtgacgaaatggtt

SEQ ID NO: 493618 - DNA, 19 bp, Mus musculus
  siRNA target sequence for Ak2 (NM_016895.2,265-283).
gttgtggagctaattgaga

SEQ ID NO: 493619 - DNA, 19 bp, Mus musculus
  siRNA target sequence for Ak2 (NM_016895.2,292-310).
gagactccttcgtgcaaaa

SEQ ID NO: 493620 - DNA, 19 bp, Mus musculus
  siRNA target sequence for Ak2 (NM_016895.2,294-312).
gactccttcgtgcaaaaat

SEQ ID NO: 493621 - DNA, 19 bp, Mus musculus
  siRNA target sequence for Ak2 (NM_016895.2,303-321).
gtgcaaaaatggctttctt

SEQ ID NO: 493622 - DNA, 19 bp, Mus musculus
  siRNA target sequence for Ak2 (NM_016895.2,345-363).
gaggcaggctgaaatgctt

SEQ ID NO: 493623 - DNA, 19 bp, Mus musculus
  siRNA target sequence for Ak2 (NM_016895.2,390-408).
gaagctcgattcagtcatt

SEQ ID NO: 493624 - DNA, 19 bp, Mus musculus
  siRNA target sequence for Ak2 (NM_016895.2,394-412).
ctcgattcagtcattgagt

SEQ ID NO: 493625 - DNA, 19 bp, Mus musculus
  siRNA target sequence for Ak2 (NM_016895.2,479-497).
ggtcctaccatgaggaatt

SEQ ID NO: 493626 - DNA, 19 bp, Mus musculus
  siRNA target sequence for Ak2 (NM_016895.2,614-632).
ctccgctcgtggagtacta

SEQ ID NO: 493627 - DNA, 19 bp, Mus musculus
  siRNA target sequence for Ak2 (NM_016895.2,616-634).
ccgctcgtggagtactaca

SEQ ID NO: 493628 - DNA, 19 bp, Mus musculus
  siRNA target sequence for Ak3l (NM_021299.1,147-165).
cacgcatcaccaaacactt

SEQ ID NO: 493629 - DNA, 19 bp, Mus musculus
  siRNA target sequence for Ak3l (NM_021299.1,335-353).
ctgttggatggatttccaa

SEQ ID NO: 493630 - DNA, 19 bp, Mus musculus
  siRNA target sequence for Ak3l (NM_021299.1,377-395).
ctggataaagtttatcaga

SEQ ID NO: 493631 - DNA, 19 bp, Mus musculus
  siRNA target sequence for Ak3l (NM_021299.1,421-439).
gccctttgaggtcattaaa

SEQ ID NO: 493632 - DNA, 19 bp, Mus musculus
  siRNA target sequence for Ak3l (NM_021299.1,468-486).
ctgccagtggtcgagtata

SEQ ID NO: 493633 - DNA, 19 bp, Mus musculus
  siRNA target sequence for Ak3l (NM_021299.1,470-488).
gccagtggtcgagtataca

SEQ ID NO: 493634 - DNA, 19 bp, Mus musculus
  siRNA target sequence for Ak3l (NM_021299.1,471-489).
ccagtggtcgagtatacaa

SEQ ID NO: 493635 - DNA, 19 bp, Mus musculus
  siRNA target sequence for Ak3l (NM_021299.1,474-492).
gtggtcgagtatacaacat

SEQ ID NO: 493636 - DNA, 19 bp, Mus musculus
  siRNA target sequence for Ak3l (NM_021299.1,477-495).
gtcgagtatacaacattga

SEQ ID NO: 493637 - DNA, 19 bp, Mus musculus
  siRNA target sequence for Ak3l (NM_021299.1,479-497).
cgagtatacaacattgaat

SEQ ID NO: 493638 - DNA, 19 bp, Mus musculus
  siRNA target sequence for Ak3l (NM_021299.1,532-550).
gaccggagaacctctgatt

SEQ ID NO: 493639 - DNA, 19 bp, Mus musculus
  siRNA target sequence for Ak3l (NM_021299.1,534-552).
ccggagaacctctgattca

SEQ ID NO: 493640 - DNA, 19 bp, Mus musculus
  siRNA target sequence for Ak3l (NM_021299.1,576-594).
cagtgatcaagagactaaa

SEQ ID NO: 493641 - DNA, 19 bp, Mus musculus
  siRNA target sequence for Ak3l (NM_021299.1,703-721).
cttcctacagacgaaagtt

SEQ ID NO: 493642 - DNA, 19 bp, Mus musculus
  siRNA target sequence for Ak3l (NM_021299.1,712-730).
gacgaaagttccagaaact

SEQ ID NO: 493643 - DNA, 19 bp, Mus musculus
  siRNA target sequence for Ak4 (NM_009647.1,234-252).
gtgacgtggcaaaacagta

SEQ ID NO: 493644 - DNA, 19 bp, Mus musculus
  siRNA target sequence for Ak4 (NM_009647.1,242-260).
gcaaaacagtacctagaaa

SEQ ID NO: 493645 - DNA, 19 bp, Mus musculus
  siRNA target sequence for Ak4 (NM_009647.1,284-302).
gtgatcacacgcctaatga

SEQ ID NO: 493646 - DNA, 19 bp, Mus musculus
  siRNA target sequence for Ak4 (NM_009647.1,327-345).
cccagcactggctgttaga

SEQ ID NO: 493647 - DNA, 19 bp, Mus musculus
  siRNA target sequence for Ak5 (NM_153066.1,12-30).
gaggaagtgtaaaattatt

SEQ ID NO: 493648 - DNA, 19 bp, Mus musculus
  siRNA target sequence for Ak5 (NM_153066.1,500-518).
cacagctacggaaggtaaa

SEQ ID NO: 493649 - DNA, 19 bp, Mus musculus
  siRNA target sequence for Ak5 (NM_153066.1,504-522).
gctacggaaggtaaatgca

SEQ ID NO: 493650 - DNA, 19 bp, Mus musculus
  siRNA target sequence for Ak5 (NM_153066.1,560-578).
cagctattgactctgtttt

SEQ ID NO: 493651 - DNA, 19 bp, Mus musculus
  siRNA target sequence for Akt1 (NM_009652.1,319-337).
gcacaaacgaggggaatat

SEQ ID NO: 493652 - DNA, 19 bp, Mus musculus
  siRNA target sequence for Akt1 (NM_009652.1,329-347).
ggggaatatattaaaacct

SEQ ID NO: 493653 - DNA, 19 bp, Mus musculus
  siRNA target sequence for Akt1 (NM_009652.1,560-578).
cctgaggagcgggaagaat

SEQ ID NO: 493654 - DNA, 19 bp, Mus musculus
  siRNA target sequence for Akt1 (NM_009652.1,720-738).
ccatgaacgagtttgagta

SEQ ID NO: 493655 - DNA, 19 bp, Mus musculus
  siRNA target sequence for Akt1 (NM_009652.1,915-933).
cggccctcaagtactcatt

SEQ ID NO: 493656 - DNA, 19 bp, Mus musculus
  siRNA target sequence for Akt1 (NM_009652.1,1190-1208).
ggtgccactatgaagacat

SEQ ID NO: 493657 - DNA, 19 bp, Mus musculus
  siRNA target sequence for Akt1 (NM_009652.1,1191-1209).
gtgccactatgaagacatt

SEQ ID NO: 493658 - DNA, 19 bp, Mus musculus
  siRNA target sequence for Akt2 (NM_007434.2,223-241).
cacaaacgtggtgaataca

SEQ ID NO: 493659 - DNA, 19 bp, Mus musculus
  siRNA target sequence for Akt2 (NM_007434.2,229-247).
cgtggtgaatacatcaaga

SEQ ID NO: 493660 - DNA, 19 bp, Mus musculus
  siRNA target sequence for Akt2 (NM_007434.2,257-275).
cacggtacttccttctgaa

SEQ ID NO: 493661 - DNA, 19 bp, Mus musculus
  siRNA target sequence for Akt2 (NM_007434.2,391-409).
cgacccaacacctttgtca

SEQ ID NO: 493662 - DNA, 19 bp, Mus musculus
  siRNA target sequence for Akt2 (NM_007434.2,533-551).
gtgaggacgccatggatta

SEQ ID NO: 493663 - DNA, 19 bp, Mus musculus
  siRNA target sequence for Akt2 (NM_007434.2,538-556).
gacgccatggattacaagt

SEQ ID NO: 493664 - DNA, 19 bp, Mus musculus
  siRNA target sequence for Akt2 (NM_007434.2,630-648).
catgaatgacttcgattat

SEQ ID NO: 493665 - DNA, 19 bp, Mus musculus
  siRNA target sequence for Akt2 (NM_007434.2,671-689).
ccttcggcaaggtcattct

SEQ ID NO: 493666 - DNA, 19 bp, Mus musculus
  siRNA target sequence for Akt2 (NM_007434.2,735-753).
gcgcaaggaggtcatcatt

SEQ ID NO: 493667 - DNA, 19 bp, Mus musculus
  siRNA target sequence for Akt2 (NM_007434.2,1538-1556).
cacccccagaccgatatga

SEQ ID NO: 493668 - DNA, 19 bp, Mus musculus
  siRNA target sequence for Akt3 (NM_011785.1,41-59).
gcgatgttaccattgtgaa

SEQ ID NO: 493669 - DNA, 19 bp, Mus musculus
  siRNA target sequence for Akt3 (NM_011785.1,42-60).
cgatgttaccattgtgaaa

SEQ ID NO: 493670 - DNA, 19 bp, Mus musculus
  siRNA target sequence for Akt3 (NM_011785.1,126-144).
gacagatggctcattcata

SEQ ID NO: 493671 - DNA, 19 bp, Mus musculus
  siRNA target sequence for Akt3 (NM_011785.1,134-152).
gctcattcataggctataa

SEQ ID NO: 493672 - DNA, 19 bp, Mus musculus
  siRNA target sequence for Akt3 (NM_011785.1,137-155).
cattcataggctataagga

SEQ ID NO: 493673 - DNA, 19 bp, Mus musculus
  siRNA target sequence for Akt3 (NM_011785.1,178-196).
ccttatcccctcaacaact

SEQ ID NO: 493674 - DNA, 19 bp, Mus musculus
  siRNA target sequence for Akt3 (NM_011785.1,179-197).
cttatcccctcaacaactt

SEQ ID NO: 493675 - DNA, 19 bp, Mus musculus
  siRNA target sequence for Akt3 (NM_011785.1,202-220).
gtggcaaaatgtcagttaa

SEQ ID NO: 493676 - DNA, 19 bp, Mus musculus
  siRNA target sequence for Akt3 (NM_011785.1,232-250).
cgaccaaagccaaatacat

SEQ ID NO: 493677 - DNA, 19 bp, Mus musculus
  siRNA target sequence for Akt3 (NM_011785.1,241-259).
ccaaatacatttattatca

SEQ ID NO: 493678 - DNA, 19 bp, Mus musculus
  siRNA target sequence for Akt3 (NM_011785.1,327-345).
gtggacggaagctatccaa

SEQ ID NO: 493679 - DNA, 19 bp, Mus musculus
  siRNA target sequence for Akt3 (NM_011785.1,395-413).
gcccaacctcacagattga

SEQ ID NO: 493680 - DNA, 19 bp, Mus musculus
  siRNA target sequence for Akt3 (NM_011785.1,396-414).
cccaacctcacagattgat

SEQ ID NO: 493681 - DNA, 19 bp, Mus musculus
  siRNA target sequence for Akt3 (NM_011785.1,401-419).
cctcacagattgataatat

SEQ ID NO: 493682 - DNA, 19 bp, Mus musculus
  siRNA target sequence for Akt3 (NM_011785.1,430-448).
gagatggatgcgtctacaa

SEQ ID NO: 493683 - DNA, 19 bp, Mus musculus
  siRNA target sequence for Akt3 (NM_011785.1,441-459).
gtctacaacccatcataaa

SEQ ID NO: 493684 - DNA, 19 bp, Mus musculus
  siRNA target sequence for Akt3 (NM_011785.1,467-485).
cgatgaatgattttgacta

SEQ ID NO: 493685 - DNA, 19 bp, Mus musculus
  siRNA target sequence for Akt3 (NM_011785.1,506-524).
gcacttttgggaaagttat

SEQ ID NO: 493686 - DNA, 19 bp, Mus musculus
  siRNA target sequence for Akt3 (NM_011785.1,540-558).
ggcaagtggaaaatactat

SEQ ID NO: 493687 - DNA, 19 bp, Mus musculus
  siRNA target sequence for Akt3 (NM_011785.1,606-624).
ggcacacactcttactgaa

SEQ ID NO: 493688 - DNA, 19 bp, Mus musculus
  siRNA target sequence for Akt3 (NM_011785.1,691-709).
gaccgtttgtgttttgtga

SEQ ID NO: 493689 - DNA, 19 bp, Mus musculus
  siRNA target sequence for Akt3 (NM_011785.1,771-789).
ggaccgcacacgtttctat

SEQ ID NO: 493690 - DNA, 19 bp, Mus musculus
  siRNA target sequence for Akt3 (NM_011785.1,782-800).
gtttctatggtgcagaaat

SEQ ID NO: 493691 - DNA, 19 bp, Mus musculus
  siRNA target sequence for Akt3 (NM_011785.1,879-897).
ggatggccatataaaaatt

SEQ ID NO: 493692 - DNA, 19 bp, Mus musculus
  siRNA target sequence for Akt3 (NM_011785.1,880-898).
gatggccatataaaaatta

SEQ ID NO: 493693 - DNA, 19 bp, Mus musculus
  siRNA target sequence for Akt3 (NM_011785.1,931-949).
gatgcagctaccatgaaga

SEQ ID NO: 493694 - DNA, 19 bp, Mus musculus
  siRNA target sequence for Akt3 (NM_011785.1,934-952).
gcagctaccatgaagacat

SEQ ID NO: 493695 - DNA, 19 bp, Mus musculus
  siRNA target sequence for Akt3 (NM_011785.1,975-993).
ggcaccagaggtattagaa

SEQ ID NO: 493696 - DNA, 19 bp, Mus musculus
  siRNA target sequence for Akt3 (NM_011785.1,1025-1043).
ggggcttaggtgttgtcat

SEQ ID NO: 493697 - DNA, 19 bp, Mus musculus
  siRNA target sequence for Akt3 (NM_011785.1,1058-1076).
gtggaaggttgcctttcta

SEQ ID NO: 493698 - DNA, 19 bp, Mus musculus
  siRNA target sequence for Akt3 (NM_011785.1,1060-1078).
ggaaggttgcctttctaca

SEQ ID NO: 493699 - DNA, 19 bp, Mus musculus
  siRNA target sequence for Akt3 (NM_011785.1,1061-1079).
gaaggttgcctttctacaa

SEQ ID NO: 493700 - DNA, 19 bp, Mus musculus
  siRNA target sequence for Akt3 (NM_011785.1,1096-1114).
ctctttgaattaatactaa

SEQ ID NO: 493701 - DNA, 19 bp, Mus musculus
  siRNA target sequence for Akt3 (NM_011785.1,1139-1157).
cactctcttcagatgcaaa

SEQ ID NO: 493702 - DNA, 19 bp, Mus musculus
  siRNA target sequence for Akt3 (NM_011785.1,1169-1187).
cagggctcttgataaagga

SEQ ID NO: 493703 - DNA, 19 bp, Mus musculus
  siRNA target sequence for Akt3 (NM_011785.1,1176-1194).
cttgataaaggatccaaat

SEQ ID NO: 493704 - DNA, 19 bp, Mus musculus
  siRNA target sequence for Akt3 (NM_011785.1,1179-1197).
gataaaggatccaaataaa

SEQ ID NO: 493705 - DNA, 19 bp, Mus musculus
  siRNA target sequence for Akt3 (NM_011785.1,1208-1226).
gagggccagatgatgcaaa

SEQ ID NO: 493706 - DNA, 19 bp, Mus musculus
  siRNA target sequence for Akt3 (NM_011785.1,1219-1237).
gatgcaaaagaaatcatga

SEQ ID NO: 493707 - DNA, 19 bp, Mus musculus
  siRNA target sequence for Akt3 (NM_011785.1,1233-1251).
catgaggcatagttttttt

SEQ ID NO: 493708 - DNA, 19 bp, Mus musculus
  siRNA target sequence for Akt3 (NM_011785.1,1258-1276).
gtaaactggcaagatgtat

SEQ ID NO: 493709 - DNA, 19 bp, Mus musculus
  siRNA target sequence for Akt3 (NM_011785.1,1297-1315).
ccttttaagcctcaagtaa

SEQ ID NO: 493710 - DNA, 19 bp, Mus musculus
  siRNA target sequence for Akt3 (NM_011785.1,1321-1339).
gaaacagacacccgatatt

SEQ ID NO: 493711 - DNA, 19 bp, Mus musculus
  siRNA target sequence for Akt3 (NM_011785.1,1325-1343).
cagacacccgatattttga

SEQ ID NO: 493712 - DNA, 19 bp, Mus musculus
  siRNA target sequence for Akt3 (NM_011785.1,1329-1347).
cacccgatattttgatgaa

SEQ ID NO: 493713 - DNA, 19 bp, Mus musculus
  siRNA target sequence for Akt3 (NM_011785.1,1355-1373).
cagctcagactattacaat

SEQ ID NO: 493714 - DNA, 19 bp, Mus musculus
  siRNA target sequence for Akt3 (NM_011785.1,1357-1375).
gctcagactattacaataa

SEQ ID NO: 493715 - DNA, 19 bp, Mus musculus
  siRNA target sequence for Alk (NM_007439.1,1813-1831).
ctcgggcaagcctgtgatt

SEQ ID NO: 493716 - DNA, 19 bp, Mus musculus
  siRNA target sequence for Alk (NM_007439.1,1865-1883).
gccagctgtgcagtaaact

SEQ ID NO: 493717 - DNA, 19 bp, Mus musculus
  siRNA target sequence for Alk (NM_007439.1,1866-1884).
ccagctgtgcagtaaactt

SEQ ID NO: 493718 - DNA, 19 bp, Mus musculus
  siRNA target sequence for Alk (NM_007439.1,1886-1904).
ctgctggattttactgtaa

SEQ ID NO: 493719 - DNA, 19 bp, Mus musculus
  siRNA target sequence for Alk (NM_007439.1,1888-1906).
gctggattttactgtaact

SEQ ID NO: 493720 - DNA, 19 bp, Mus musculus
  siRNA target sequence for Alk (NM_007439.1,1892-1910).
gattttactgtaactttga

SEQ ID NO: 493721 - DNA, 19 bp, Mus musculus
  siRNA target sequence for Alk (NM_007439.1,2076-2094).
cttccctgcaccaatgaaa

SEQ ID NO: 493722 - DNA, 19 bp, Mus musculus
  siRNA target sequence for Alk (NM_007439.1,2079-2097).
ccctgcaccaatgaaaaat

SEQ ID NO: 493723 - DNA, 19 bp, Mus musculus
  siRNA target sequence for Alk (NM_007439.1,2080-2098).
cctgcaccaatgaaaaatt

SEQ ID NO: 493724 - DNA, 19 bp, Mus musculus
  siRNA target sequence for Alk (NM_007439.1,2136-2154).
ggttttgagaggaaacgta

SEQ ID NO: 493725 - DNA, 19 bp, Mus musculus
  siRNA target sequence for Alk (NM_007439.1,2625-2643).
gggagtccagatttggaaa

SEQ ID NO: 493726 - DNA, 19 bp, Mus musculus
  siRNA target sequence for Alk (NM_007439.1,2813-2831).
ccagggcaaaccaactaat

SEQ ID NO: 493727 - DNA, 19 bp, Mus musculus
  siRNA target sequence for Alk (NM_007439.1,2824-2842).
caactaatccagaaagtct

SEQ ID NO: 493728 - DNA, 19 bp, Mus musculus
  siRNA target sequence for Alk (NM_007439.1,2929-2947).
ggagccacctacgtgttta

SEQ ID NO: 493729 - DNA, 19 bp, Mus musculus
  siRNA target sequence for Alk (NM_007439.1,2930-2948).
gagccacctacgtgtttaa

SEQ ID NO: 493730 - DNA, 19 bp, Mus musculus
  siRNA target sequence for Alk (NM_007439.1,2933-2951).
ccacctacgtgtttaagat

SEQ ID NO: 493731 - DNA, 19 bp, Mus musculus
  siRNA target sequence for Alk (NM_007439.1,2940-2958).
cgtgtttaagatgaaagat

SEQ ID NO: 493732 - DNA, 19 bp, Mus musculus
  siRNA target sequence for Alk (NM_007439.1,2964-2982).
gcctgtacccctgatcatt

SEQ ID NO: 493733 - DNA, 19 bp, Mus musculus
  siRNA target sequence for Alk (NM_007439.1,3011-3029).
gggccaagagagaaacgtt

SEQ ID NO: 493734 - DNA, 19 bp, Mus musculus
  siRNA target sequence for Alk (NM_007439.1,3035-3053).
cagagagactggagagtaa

SEQ ID NO: 493735 - DNA, 19 bp, Mus musculus
  siRNA target sequence for Alk (NM_007439.1,3100-3118).
ggaggcggctggaatgata

SEQ ID NO: 493736 - DNA, 19 bp, Mus musculus
  siRNA target sequence for Alk (NM_007439.1,3103-3121).
ggcggctggaatgataaca

SEQ ID NO: 493737 - DNA, 19 bp, Mus musculus
  siRNA target sequence for Alk (NM_007439.1,3106-3124).
ggctggaatgataacactt

SEQ ID NO: 493738 - DNA, 19 bp, Mus musculus
  siRNA target sequence for Alk (NM_007439.1,3280-3298).
ggcaacgcagcatcaaaca

SEQ ID NO: 493739 - DNA, 19 bp, Mus musculus
  siRNA target sequence for Alk (NM_007439.1,3282-3300).
caacgcagcatcaaacaat

SEQ ID NO: 493740 - DNA, 19 bp, Mus musculus
  siRNA target sequence for Alk (NM_007439.1,3297-3315).
caatgaccccgaaatggat

SEQ ID NO: 493741 - DNA, 19 bp, Mus musculus
  siRNA target sequence for Alk (NM_007439.1,3388-3406).
cacggggaagtgaatatca

SEQ ID NO: 493742 - DNA, 19 bp, Mus musculus
  siRNA target sequence for Alk (NM_007439.1,3399-3417).
gaatatcaagcattatcta

SEQ ID NO: 493743 - DNA, 19 bp, Mus musculus
  siRNA target sequence for Alk (NM_007439.1,3431-3449).
gcgaggtagacgaatgtca

SEQ ID NO: 493744 - DNA, 19 bp, Mus musculus
  siRNA target sequence for Alk (NM_007439.1,3458-3476).
ccgagagccacaaagtcat

SEQ ID NO: 493745 - DNA, 19 bp, Mus musculus
  siRNA target sequence for Alk (NM_007439.1,3550-3568).
cacctgccgctctcattga

SEQ ID NO: 493746 - DNA, 19 bp, Mus musculus
  siRNA target sequence for Alk (NM_007439.1,3613-3631).
gcattctccggcatcatga

SEQ ID NO: 493747 - DNA, 19 bp, Mus musculus
  siRNA target sequence for Alk (NM_007439.1,3614-3632).
cattctccggcatcatgat

SEQ ID NO: 493748 - DNA, 19 bp, Mus musculus
  siRNA target sequence for Alk (NM_007439.1,3620-3638).
ccggcatcatgattgtgta

SEQ ID NO: 493749 - DNA, 19 bp, Mus musculus
  siRNA target sequence for Alk (NM_007439.1,3712-3730).
cggacctcgaccatcatga

SEQ ID NO: 493750 - DNA, 19 bp, Mus musculus
  siRNA target sequence for Alk (NM_007439.1,3793-3811).
gtgccacggaaaaacatca

SEQ ID NO: 493751 - DNA, 19 bp, Mus musculus
  siRNA target sequence for Alk (NM_007439.1,3984-4002).
caaccaccagaatattgtt

SEQ ID NO: 493752 - DNA, 19 bp, Mus musculus
  siRNA target sequence for Alk (NM_007439.1,4008-4026).
catcggggtgagtctacaa

SEQ ID NO: 493753 - DNA, 19 bp, Mus musculus
  siRNA target sequence for Alk (NM_007439.1,4243-4261).
ggagctggaagaatagcaa

SEQ ID NO: 493754 - DNA, 19 bp, Mus musculus
  siRNA target sequence for Alk (NM_007439.1,4276-4294).
gggatggcccgagatatct

SEQ ID NO: 493755 - DNA, 19 bp, Mus musculus
  siRNA target sequence for Alk (NM_007439.1,4277-4295).
ggatggcccgagatatcta

SEQ ID NO: 493756 - DNA, 19 bp, Mus musculus
  siRNA target sequence for Alk (NM_007439.1,4361-4379).
ccttcatggaagggatatt

SEQ ID NO: 493757 - DNA, 19 bp, Mus musculus
  siRNA target sequence for Alk (NM_007439.1,4372-4390).
gggatatttacctctaaaa

SEQ ID NO: 493758 - DNA, 19 bp, Mus musculus
  siRNA target sequence for Alk (NM_007439.1,4374-4392).
gatatttacctctaaaaca

SEQ ID NO: 493759 - DNA, 19 bp, Mus musculus
  siRNA target sequence for Alk (NM_007439.1,4531-4549).
cctgtataccggataatga

SEQ ID NO: 493760 - DNA, 19 bp, Mus musculus
  siRNA target sequence for Alk (NM_007439.1,4582-4600).
cccaacttcgccatcattt

SEQ ID NO: 493761 - DNA, 19 bp, Mus musculus
  siRNA target sequence for Alk (NM_007439.1,4622-4640).
cccaggaccccgatgtgat

SEQ ID NO: 493762 - DNA, 19 bp, Mus musculus
  siRNA target sequence for Alk (NM_007439.1,4646-4664).
cagctctgcccatcgaata

SEQ ID NO: 493763 - DNA, 19 bp, Mus musculus
  siRNA target sequence for Alk (NM_007439.1,4659-4677).
cgaatacggtccagtagta

SEQ ID NO: 493764 - DNA, 19 bp, Mus musculus
  siRNA target sequence for Alk (NM_007439.1,5202-5220).
ctgcccgaacgtcaactat

SEQ ID NO: 493765 - DNA, 19 bp, Mus musculus
  siRNA target sequence for Alk (NM_007439.1,5206-5224).
ccgaacgtcaactatggtt

SEQ ID NO: 493766 - DNA, 19 bp, Mus musculus
  siRNA target sequence for Alk (NM_007439.1,5207-5225).
cgaacgtcaactatggtta

SEQ ID NO: 493767 - DNA, 19 bp, Mus musculus
  siRNA target sequence for Als2cr2 (NM_172656.3,388-406).
ctcagacccgaaaaacagt

SEQ ID NO: 493768 - DNA, 19 bp, Mus musculus
  siRNA target sequence for Als2cr2 (NM_172656.3,495-513).
cactgacgtgtctcactat

SEQ ID NO: 493769 - DNA, 19 bp, Mus musculus
  siRNA target sequence for Als2cr2 (NM_172656.3,517-535).
ctgcaagtggagataggaa

SEQ ID NO: 493770 - DNA, 19 bp, Mus musculus
  siRNA target sequence for Als2cr2 (NM_172656.3,586-604).
ggaacactggtaactgtaa

SEQ ID NO: 493771 - DNA, 19 bp, Mus musculus
  siRNA target sequence for Als2cr2 (NM_172656.3,590-608).
cactggtaactgtaaagat

SEQ ID NO: 493772 - DNA, 19 bp, Mus musculus
  siRNA target sequence for Als2cr2 (NM_172656.3,594-612).
ggtaactgtaaagattaca

SEQ ID NO: 493773 - DNA, 19 bp, Mus musculus
  siRNA target sequence for Als2cr2 (NM_172656.3,595-613).
gtaactgtaaagattacaa

SEQ ID NO: 493774 - DNA, 19 bp, Mus musculus
  siRNA target sequence for Als2cr2 (NM_172656.3,656-674).
gagcagtgattctatctca

SEQ ID NO: 493775 - DNA, 19 bp, Mus musculus
  siRNA target sequence for Als2cr2 (NM_172656.3,661-679).
gtgattctatctcactttt

SEQ ID NO: 493776 - DNA, 19 bp, Mus musculus
  siRNA target sequence for Als2cr2 (NM_172656.3,777-795).
gctcctaaggacctacttt

SEQ ID NO: 493777 - DNA, 19 bp, Mus musculus
  siRNA target sequence for Als2cr2 (NM_172656.3,792-810).
ctttcctgatggaatgagt

SEQ ID NO: 493778 - DNA, 19 bp, Mus musculus
  siRNA target sequence for Als2cr2 (NM_172656.3,802-820).
ggaatgagtgagactttaa

SEQ ID NO: 493779 - DNA, 19 bp, Mus musculus
  siRNA target sequence for Als2cr2 (NM_172656.3,807-825).
gagtgagactttaataaga

SEQ ID NO: 493780 - DNA, 19 bp, Mus musculus
  siRNA target sequence for Als2cr2 (NM_172656.3,842-860).
cagtacaagggttgaacta

SEQ ID NO: 493781 - DNA, 19 bp, Mus musculus
  siRNA target sequence for Als2cr2 (NM_172656.3,855-873).
gaactatctgcaccaaaat

SEQ ID NO: 493782 - DNA, 19 bp, Mus musculus
  siRNA target sequence for Als2cr2 (NM_172656.3,867-885).
ccaaaatggctgtatccat

SEQ ID NO: 493783 - DNA, 19 bp, Mus musculus
  siRNA target sequence for Als2cr2 (NM_172656.3,868-886).
caaaatggctgtatccata

SEQ ID NO: 493784 - DNA, 19 bp, Mus musculus
  siRNA target sequence for Als2cr2 (NM_172656.3,878-896).
gtatccataggagttttaa

SEQ ID NO: 493785 - DNA, 19 bp, Mus musculus
  siRNA target sequence for Als2cr2 (NM_172656.3,898-916).
gccagccatatcctcattt

SEQ ID NO: 493786 - DNA, 19 bp, Mus musculus
  siRNA target sequence for Als2cr2 (NM_172656.3,946-964).
ctgtcccacctgcatagtt

SEQ ID NO: 493787 - DNA, 19 bp, Mus musculus
  siRNA target sequence for Als2cr2 (NM_172656.3,951-969).
ccacctgcatagtttgctt

SEQ ID NO: 493788 - DNA, 19 bp, Mus musculus
  siRNA target sequence for Als2cr2 (NM_172656.3,952-970).
cacctgcatagtttgctta

SEQ ID NO: 493789 - DNA, 19 bp, Mus musculus
  siRNA target sequence for Als2cr2 (NM_172656.3,983-1001).
ggcatagggctgtgtttga

SEQ ID NO: 493790 - DNA, 19 bp, Mus musculus
  siRNA target sequence for Als2cr2 (NM_172656.3,1102-1120).
gggatcacagcctgtgaat

SEQ ID NO: 493791 - DNA, 19 bp, Mus musculus
  siRNA target sequence for Als2cr2 (NM_172656.3,1138-1156).
cctttccaggacatgcata

SEQ ID NO: 493792 - DNA, 19 bp, Mus musculus
  siRNA target sequence for Als2cr2 (NM_172656.3,1199-1217).
gcccactggatgtcagtat

SEQ ID NO: 493793 - DNA, 19 bp, Mus musculus
  siRNA target sequence for Als2cr2 (NM_172656.3,1200-1218).
cccactggatgtcagtatt

SEQ ID NO: 493794 - DNA, 19 bp, Mus musculus
  siRNA target sequence for Als2cr2 (NM_172656.3,1304-1322).
ctcacacagtcaatagtga

SEQ ID NO: 493795 - DNA, 19 bp, Mus musculus
  siRNA target sequence for Als2cr2 (NM_172656.3,1330-1348).
catacgccatccacaaaga

SEQ ID NO: 493796 - DNA, 19 bp, Mus musculus
  siRNA target sequence for Als2cr2 (NM_172656.3,1390-1408).
cagcaagatcctgagaaaa

SEQ ID NO: 493797 - DNA, 19 bp, Mus musculus
  siRNA target sequence for Als2cr2 (NM_172656.3,1538-1556).
cgtggagcgagctggaatt

SEQ ID NO: 493798 - DNA, 19 bp, Mus musculus
  siRNA target sequence for Als2cr2 (NM_172656.3,1541-1559).
ggagcgagctggaattcca

SEQ ID NO: 493799 - DNA, 19 bp, Mus musculus
  siRNA target sequence for Als2cr2 (NM_172656.3,1557-1575).
ccagtttcctgatgacaaa

SEQ ID NO: 493800 - DNA, 19 bp, Mus musculus
  siRNA target sequence for Amhr2 (NM_144547.1,88-106).
cctgcggcagcacaagtat

SEQ ID NO: 493801 - DNA, 19 bp, Mus musculus
  siRNA target sequence for Amhr2 (NM_144547.1,148-166).
gtgcggggaagcacaaaga

SEQ ID NO: 493802 - DNA, 19 bp, Mus musculus
  siRNA target sequence for Amhr2 (NM_144547.1,423-441).
gcctccttcgggaaaccaa

SEQ ID NO: 493803 - DNA, 19 bp, Mus musculus
  siRNA target sequence for Amhr2 (NM_144547.1,512-530).
gaatgtttctcgtgttgtt

SEQ ID NO: 493804 - DNA, 19 bp, Mus musculus
  siRNA target sequence for Amhr2 (NM_144547.1,653-671).
gtttctcccaggtaatcca

SEQ ID NO: 493805 - DNA, 19 bp, Mus musculus
  siRNA target sequence for Amhr2 (NM_144547.1,808-826).
catatcgttcgctttatca

SEQ ID NO: 493806 - DNA, 19 bp, Mus musculus
  siRNA target sequence for Amhr2 (NM_144547.1,896-914).
gctccttatgccactactt

SEQ ID NO: 493807 - DNA, 19 bp, Mus musculus
  siRNA target sequence for Amhr2 (NM_144547.1,1002-1020).
gcaggatggccagtacaaa

SEQ ID NO: 493808 - DNA, 19 bp, Mus musculus
  siRNA target sequence for Amhr2 (NM_144547.1,1057-1075).
gtgctcattcgggaagata

SEQ ID NO: 493809 - DNA, 19 bp, Mus musculus
  siRNA target sequence for Amhr2 (NM_144547.1,1255-1273).
ctccagagagcggatgttt

SEQ ID NO: 493810 - DNA, 19 bp, Mus musculus
  siRNA target sequence for Amhr2 (NM_144547.1,1258-1276).
cagagagcggatgtttact

SEQ ID NO: 493811 - DNA, 19 bp, Mus musculus
  siRNA target sequence for Amhr2 (NM_144547.1,1335-1353).
cagaccaccacctttccaa

SEQ ID NO: 493812 - DNA, 19 bp, Mus musculus
  siRNA target sequence for Amhr2 (NM_144547.1,1337-1355).
gaccaccacctttccaatt

SEQ ID NO: 493813 - DNA, 19 bp, Mus musculus
  siRNA target sequence for Ankrd3 (NM_023663.3,274-292).
ggccaagttccgatacatt

SEQ ID NO: 493814 - DNA, 19 bp, Mus musculus
  siRNA target sequence for Ankrd3 (NM_023663.3,277-295).
caagttccgatacattcta

SEQ ID NO: 493815 - DNA, 19 bp, Mus musculus
  siRNA target sequence for Ankrd3 (NM_023663.3,327-345).
gcttggtcatggagtacat

SEQ ID NO: 493816 - DNA, 19 bp, Mus musculus
  siRNA target sequence for Ankrd3 (NM_023663.3,507-525).
cccactaccatgtcaagat

SEQ ID NO: 493817 - DNA, 19 bp, Mus musculus
  siRNA target sequence for Ankrd3 (NM_023663.3,613-631).
ccctccagagcgaattcgt

SEQ ID NO: 493818 - DNA, 19 bp, Mus musculus
  siRNA target sequence for Ankrd3 (NM_023663.3,650-668).
gacaccaaacatgatgtat

SEQ ID NO: 493819 - DNA, 19 bp, Mus musculus
  siRNA target sequence for Ankrd3 (NM_023663.3,869-887).
cccaccttccaagaaatta

SEQ ID NO: 493820 - DNA, 19 bp, Mus musculus
  siRNA target sequence for Ankrd3 (NM_023663.3,1020-1038).
ctgctccccccttcgataa

SEQ ID NO: 493821 - DNA, 19 bp, Mus musculus
  siRNA target sequence for Ankrd3 (NM_023663.3,1023-1041).
ctccccccttcgataacga

SEQ ID NO: 493822 - DNA, 19 bp, Mus musculus
  siRNA target sequence for Ankrd3 (NM_023663.3,1209-1227).
gatcgctgtcactgtcttt

SEQ ID NO: 493823 - DNA, 19 bp, Mus musculus
  siRNA target sequence for Ankrd3 (NM_023663.3,1282-1300).
gctagtggatgccatcata

SEQ ID NO: 493824 - DNA, 19 bp, Mus musculus
  siRNA target sequence for Ankrd3 (NM_023663.3,1283-1301).
ctagtggatgccatcatat

SEQ ID NO: 493825 - DNA, 19 bp, Mus musculus
  siRNA target sequence for Ankrd3 (NM_023663.3,1420-1438).
gtggctgctgcttaacaat

SEQ ID NO: 493826 - DNA, 19 bp, Mus musculus
  siRNA target sequence for Ankrd3 (NM_023663.3,1495-1513).
gcggaagggacgtggaatt

SEQ ID NO: 493827 - DNA, 19 bp, Mus musculus
  siRNA target sequence for Ankrd3 (NM_023663.3,1796-1814).
ggccaccttcccattgtta

SEQ ID NO: 493828 - DNA, 19 bp, Mus musculus
  siRNA target sequence for Ankrd3 (NM_023663.3,1797-1815).
gccaccttcccattgttaa

SEQ ID NO: 493829 - DNA, 19 bp, Mus musculus
  siRNA target sequence for Ankrd3 (NM_023663.3,1907-1925).
cgtgtggctcgcattctca

SEQ ID NO: 493830 - DNA, 19 bp, Mus musculus
  siRNA target sequence for Ankrd3 (NM_023663.3,1908-1926).
gtgtggctcgcattctcat

SEQ ID NO: 493831 - DNA, 19 bp, Mus musculus
  siRNA target sequence for Ankrd3 (NM_023663.3,1928-1946).
gacctgtgctctgatgtta

SEQ ID NO: 493832 - DNA, 19 bp, Mus musculus
  siRNA target sequence for Ankrd3 (NM_023663.3,1991-2009).
gagactggacacactagta

SEQ ID NO: 493833 - DNA, 19 bp, Mus musculus
  siRNA target sequence for Ankrd3 (NM_023663.3,2053-2071).
gacctcagagggctatact

SEQ ID NO: 493834 - DNA, 19 bp, Mus musculus
  siRNA target sequence for Ankrd3 (NM_023663.3,2308-2326).
ggagacactgctcaaacat

SEQ ID NO: 493835 - DNA, 19 bp, Mus musculus
  siRNA target sequence for Apaf1 (NM_009684.1,683-701).
gcgtcttgtcagtgataga

SEQ ID NO: 493836 - DNA, 19 bp, Mus musculus
  siRNA target sequence for Apaf1 (NM_009684.1,719-737).
gtcaggccactcaatatca

SEQ ID NO: 493837 - DNA, 19 bp, Mus musculus
  siRNA target sequence for Apaf1 (NM_009684.1,736-754).
caacgagcagccgctttaa

SEQ ID NO: 493838 - DNA, 19 bp, Mus musculus
  siRNA target sequence for Apaf1 (NM_009684.1,739-757).
cgagcagccgctttaatta

SEQ ID NO: 493839 - DNA, 19 bp, Mus musculus
  siRNA target sequence for Apaf1 (NM_009684.1,740-758).
gagcagccgctttaattaa

SEQ ID NO: 493840 - DNA, 19 bp, Mus musculus
  siRNA target sequence for Apaf1 (NM_009684.1,742-760).
gcagccgctttaattaaaa

SEQ ID NO: 493841 - DNA, 19 bp, Mus musculus
  siRNA target sequence for Apaf1 (NM_009684.1,747-765).
cgctttaattaaaatgata

SEQ ID NO: 493842 - DNA, 19 bp, Mus musculus
  siRNA target sequence for Apaf1 (NM_009684.1,777-795).
caactgtgcctacatttca

SEQ ID NO: 493843 - DNA, 19 bp, Mus musculus
  siRNA target sequence for Apaf1 (NM_009684.1,782-800).
gtgcctacatttcattcta

SEQ ID NO: 493844 - DNA, 19 bp, Mus musculus
  siRNA target sequence for Apaf1 (NM_009684.1,910-928).
ccccagaggccggttattt

SEQ ID NO: 493845 - DNA, 19 bp, Mus musculus
  siRNA target sequence for Apaf1 (NM_009684.1,911-929).
cccagaggccggttatttt

SEQ ID NO: 493846 - DNA, 19 bp, Mus musculus
  siRNA target sequence for Apaf1 (NM_009684.1,915-933).
gaggccggttattttcgtt

SEQ ID NO: 493847 - DNA, 19 bp, Mus musculus
  siRNA target sequence for Apaf1 (NM_009684.1,966-984).
gaagctctggaaactgaat

SEQ ID NO: 493848 - DNA, 19 bp, Mus musculus
  siRNA target sequence for Apaf1 (NM_009684.1,1023-1041).
ctgcggcaagtctgtgtta

SEQ ID NO: 493849 - DNA, 19 bp, Mus musculus
  siRNA target sequence for Apaf1 (NM_009684.1,1058-1076).
gagatcactccctcttaga

SEQ ID NO: 493850 - DNA, 19 bp, Mus musculus
  siRNA target sequence for Apaf1 (NM_009684.1,1099-1117).
cactgggtttccattggaa

SEQ ID NO: 493851 - DNA, 19 bp, Mus musculus
  siRNA target sequence for Apaf1 (NM_009684.1,1190-1208).
ctcagaggcttccacttaa

SEQ ID NO: 493852 - DNA, 19 bp, Mus musculus
  siRNA target sequence for Apaf1 (NM_009684.1,1192-1210).
cagaggcttccacttaata

SEQ ID NO: 493853 - DNA, 19 bp, Mus musculus
  siRNA target sequence for Apaf1 (NM_009684.1,1194-1212).
gaggcttccacttaatatt

SEQ ID NO: 493854 - DNA, 19 bp, Mus musculus
  siRNA target sequence for Apaf1 (NM_009684.1,1196-1214).
ggcttccacttaatattga

SEQ ID NO: 493855 - DNA, 19 bp, Mus musculus
  siRNA target sequence for Apaf1 (NM_009684.1,1258-1276).
ccaaggtctctgttgatct

SEQ ID NO: 493856 - DNA, 19 bp, Mus musculus
  siRNA target sequence for Apaf1 (NM_009684.1,1294-1312).
ccttgggtgttaaaagctt

SEQ ID NO: 493857 - DNA, 19 bp, Mus musculus
  siRNA target sequence for Apaf1 (NM_009684.1,1295-1313).
cttgggtgttaaaagcttt

SEQ ID NO: 493858 - DNA, 19 bp, Mus musculus
  siRNA target sequence for Apaf1 (NM_009684.1,1348-1366).
gataagagtgttacagatt

SEQ ID NO: 493859 - DNA, 19 bp, Mus musculus
  siRNA target sequence for Apaf1 (NM_009684.1,1353-1371).
gagtgttacagattcagta

SEQ ID NO: 493860 - DNA, 19 bp, Mus musculus
  siRNA target sequence for Apaf1 (NM_009684.1,1355-1373).
gtgttacagattcagtaat

SEQ ID NO: 493861 - DNA, 19 bp, Mus musculus
  siRNA target sequence for Apaf1 (NM_009684.1,1474-1492).
gcggaggctcacagtatta

SEQ ID NO: 493862 - DNA, 19 bp, Mus musculus
  siRNA target sequence for Apaf1 (NM_009684.1,1475-1493).
cggaggctcacagtattat

SEQ ID NO: 493863 - DNA, 19 bp, Mus musculus
  siRNA target sequence for Apaf1 (NM_009684.1,1476-1494).
ggaggctcacagtattata

SEQ ID NO: 493864 - DNA, 19 bp, Mus musculus
  siRNA target sequence for Apaf1 (NM_009684.1,1481-1499).
ctcacagtattataaagga

SEQ ID NO: 493865 - DNA, 19 bp, Mus musculus
  siRNA target sequence for Apaf1 (NM_009684.1,1483-1501).
cacagtattataaaggaat

SEQ ID NO: 493866 - DNA, 19 bp, Mus musculus
  siRNA target sequence for Apaf1 (NM_009684.1,1513-1531).
cctcttgtagtgtctttaa

SEQ ID NO: 493867 - DNA, 19 bp, Mus musculus
  siRNA target sequence for Apaf1 (NM_009684.1,1514-1532).
ctcttgtagtgtctttaat

SEQ ID NO: 493868 - DNA, 19 bp, Mus musculus
  siRNA target sequence for Apaf1 (NM_009684.1,1585-1603).
cttcagaataagcagttta

SEQ ID NO: 493869 - DNA, 19 bp, Mus musculus
  siRNA target sequence for Apaf1 (NM_009684.1,1645-1663).
gatgaagccatgtcgataa

SEQ ID NO: 493870 - DNA, 19 bp, Mus musculus
  siRNA target sequence for Apaf1 (NM_009684.1,1653-1671).
catgtcgataagtgttgaa

SEQ ID NO: 493871 - DNA, 19 bp, Mus musculus
  siRNA target sequence for Apaf1 (NM_009684.1,1658-1676).
cgataagtgttgaaatgct

SEQ ID NO: 493872 - DNA, 19 bp, Mus musculus
  siRNA target sequence for Apaf1 (NM_009684.1,1798-1816).
caggagttcgttaataagt

SEQ ID NO: 493873 - DNA, 19 bp, Mus musculus
  siRNA target sequence for Apaf1 (NM_009684.1,1800-1818).
ggagttcgttaataagtct

SEQ ID NO: 493874 - DNA, 19 bp, Mus musculus
  siRNA target sequence for Apaf1 (NM_009684.1,1806-1824).
cgttaataagtctctctta

SEQ ID NO: 493875 - DNA, 19 bp, Mus musculus
  siRNA target sequence for Apaf1 (NM_009684.1,1980-1998).
ccaggaggactgcatgtat

SEQ ID NO: 493876 - DNA, 19 bp, Mus musculus
  siRNA target sequence for Apaf1 (NM_009684.1,1981-1999).
caggaggactgcatgtatt

SEQ ID NO: 493877 - DNA, 19 bp, Mus musculus
  siRNA target sequence for Apaf1 (NM_009684.1,2122-2140).
cacgagttcgtggcatata

SEQ ID NO: 493878 - DNA, 19 bp, Mus musculus
  siRNA target sequence for Apaf1 (NM_009684.1,2141-2159).
ggcatatattggatgaaaa

SEQ ID NO: 493879 - DNA, 19 bp, Mus musculus
  siRNA target sequence for Apaf1 (NM_009684.1,2218-2236).
ggacgacagccatttccta

SEQ ID NO: 493880 - DNA, 19 bp, Mus musculus
  siRNA target sequence for Apaf1 (NM_009684.1,2226-2244).
gccatttcctaatattgta

SEQ ID NO: 493881 - DNA, 19 bp, Mus musculus
  siRNA target sequence for Apaf1 (NM_009684.1,2228-2246).
catttcctaatattgtaca

SEQ ID NO: 493882 - DNA, 19 bp, Mus musculus
  siRNA target sequence for Apaf1 (NM_009684.1,2264-2282).
cagaaacttccgaagttta

SEQ ID NO: 493883 - DNA, 19 bp, Mus musculus
  siRNA target sequence for Apaf1 (NM_009684.1,2342-2360).
ggataaacaaaaaaactat

SEQ ID NO: 493884 - DNA, 19 bp, Mus musculus
  siRNA target sequence for Apaf1 (NM_009684.1,2404-2422).
gtttaccacgcgtgttttt

SEQ ID NO: 493885 - DNA, 19 bp, Mus musculus
  siRNA target sequence for Apaf1 (NM_009684.1,2444-2462).
cttcttgtggggctgataa

SEQ ID NO: 493886 - DNA, 19 bp, Mus musculus
  siRNA target sequence for Apaf1 (NM_009684.1,2549-2567).
cctcagacgacagttacat

SEQ ID NO: 493887 - DNA, 19 bp, Mus musculus
  siRNA target sequence for Apaf1 (NM_009684.1,2550-2568).
ctcagacgacagttacata

SEQ ID NO: 493888 - DNA, 19 bp, Mus musculus
  siRNA target sequence for Apaf1 (NM_009684.1,2573-2591).
cctgctcagcggataagaa

SEQ ID NO: 493889 - DNA, 19 bp, Mus musculus
  siRNA target sequence for Apaf1 (NM_009684.1,2643-2661).
gcactcggagcaagtcaat

SEQ ID NO: 493890 - DNA, 19 bp, Mus musculus
  siRNA target sequence for Apaf1 (NM_009684.1,2644-2662).
cactcggagcaagtcaatt

SEQ ID NO: 493891 - DNA, 19 bp, Mus musculus
  siRNA target sequence for Apaf1 (NM_009684.1,2656-2674).
gtcaattgctgccatttca

SEQ ID NO: 493892 - DNA, 19 bp, Mus musculus
  siRNA target sequence for Apaf1 (NM_009684.1,2725-2743).
ctcaagctctgggatttga

SEQ ID NO: 493893 - DNA, 19 bp, Mus musculus
  siRNA target sequence for Apaf1 (NM_009684.1,2735-2753).
gggatttgaatcaaaaaga

SEQ ID NO: 493894 - DNA, 19 bp, Mus musculus
  siRNA target sequence for Apaf1 (NM_009684.1,2737-2755).
gatttgaatcaaaaagaat

SEQ ID NO: 493895 - DNA, 19 bp, Mus musculus
  siRNA target sequence for Apaf1 (NM_009684.1,2944-2962).
gaggtgatcgtgaagtgtt

SEQ ID NO: 493896 - DNA, 19 bp, Mus musculus
  siRNA target sequence for Apaf1 (NM_009684.1,2972-2990).
ctgcagatggtgacaaaat

SEQ ID NO: 493897 - DNA, 19 bp, Mus musculus
  siRNA target sequence for Apaf1 (NM_009684.1,3015-3033).
cctcctttttgatattcat

SEQ ID NO: 493898 - DNA, 19 bp, Mus musculus
  siRNA target sequence for Apaf1 (NM_009684.1,3145-3163).
gagttgtggaacatagact

SEQ ID NO: 493899 - DNA, 19 bp, Mus musculus
  siRNA target sequence for Apaf1 (NM_009684.1,3203-3221).
gggttcacggtgtgatgtt

SEQ ID NO: 493900 - DNA, 19 bp, Mus musculus
  siRNA target sequence for Apaf1 (NM_009684.1,3204-3222).
ggttcacggtgtgatgttt

SEQ ID NO: 493901 - DNA, 19 bp, Mus musculus
  siRNA target sequence for Apaf1 (NM_009684.1,3205-3223).
gttcacggtgtgatgtttt

SEQ ID NO: 493902 - DNA, 19 bp, Mus musculus
  siRNA target sequence for Apaf1 (NM_009684.1,3226-3244).
cccgatggctcctcatttt

SEQ ID NO: 493903 - DNA, 19 bp, Mus musculus
  siRNA target sequence for Apaf1 (NM_009684.1,3410-3428).
caggccagattgattacct

SEQ ID NO: 493904 - DNA, 19 bp, Mus musculus
  siRNA target sequence for Apaf1 (NM_009684.1,3477-3495).
cgtggcattcggagatgaa

SEQ ID NO: 493905 - DNA, 19 bp, Mus musculus
  siRNA target sequence for Apaf1 (NM_009684.1,3545-3563).
ctggggttgggcacaagaa

SEQ ID NO: 493906 - DNA, 19 bp, Mus musculus
  siRNA target sequence for Apaf1 (NM_009684.1,3606-3624).
gatttcaagttctgaagat

SEQ ID NO: 493907 - DNA, 19 bp, Mus musculus
  siRNA target sequence for Apaf1 (NM_009684.1,3626-3644).
ctgtgattcaggtatggaa

SEQ ID NO: 493908 - DNA, 19 bp, Mus musculus
  siRNA target sequence for Apaf1 (NM_009684.1,3628-3646).
gtgattcaggtatggaatt

SEQ ID NO: 493909 - DNA, 19 bp, Mus musculus
  siRNA target sequence for Apaf1 (NM_009684.1,3647-3665).
ggcagacaggggactatgt

SEQ ID NO: 493910 - DNA, 19 bp, Mus musculus
  siRNA target sequence for Apaf1 (NM_009684.1,3649-3667).
cagacaggggactatgtat

SEQ ID NO: 493911 - DNA, 19 bp, Mus musculus
  siRNA target sequence for Apaf1 (NM_009684.1,3651-3669).
gacaggggactatgtattt

SEQ ID NO: 493912 - DNA, 19 bp, Mus musculus
  siRNA target sequence for Apaf1 (NM_009684.1,3656-3674).
gggactatgtatttttgca

SEQ ID NO: 493913 - DNA, 19 bp, Mus musculus
  siRNA target sequence for Apaf1 (NM_009684.1,3657-3675).
ggactatgtatttttgcaa

SEQ ID NO: 493914 - DNA, 19 bp, Mus musculus
  siRNA target sequence for Apaf1 (NM_009684.1,3773-3791).
ccggaagaatagaaagaga

SEQ ID NO: 493915 - DNA, 19 bp, Mus musculus
  siRNA target sequence for Apaf1 (NM_009684.1,3868-3886).
gataagactgccaagatct

SEQ ID NO: 493916 - DNA, 19 bp, Mus musculus
  siRNA target sequence for Apaf1 (NM_009684.1,3997-4015).
ggagaaatccggatatgga

SEQ ID NO: 493917 - DNA, 19 bp, Mus musculus
  siRNA target sequence for Apaf1 (NM_009684.1,4188-4206).
gaccttctacacaaatgga

SEQ ID NO: 493918 - DNA, 19 bp, Mus musculus
  siRNA target sequence for Apaf1 (NM_009684.1,4247-4265).
cctatgtgactgtcgataa

SEQ ID NO: 493919 - DNA, 19 bp, Mus musculus
  siRNA target sequence for Apaf1 (NM_009684.1,4248-4266).
ctatgtgactgtcgataat

SEQ ID NO: 493920 - DNA, 19 bp, Mus musculus
  siRNA target sequence for Apaf1 (NM_009684.1,4260-4278).
cgataatctcggtatttta

SEQ ID NO: 493921 - DNA, 19 bp, Mus musculus
  siRNA target sequence for Apeg1 (NM_007463.2,842-860).
gcgggcatcgcgagctaat

SEQ ID NO: 493922 - DNA, 19 bp, Mus musculus
  siRNA target sequence for Apeg1 (NM_007463.2,844-862).
gggcatcgcgagctaatct

SEQ ID NO: 493923 - DNA, 19 bp, Mus musculus
  siRNA target sequence for Apeg1 (NM_007463.2,1558-1576).
gtcgcctgttccagcaaaa

SEQ ID NO: 493924 - DNA, 19 bp, Mus musculus
  siRNA target sequence for Apeg1 (NM_007463.2,2316-2334).
gaggcacccgtgtttgaga

SEQ ID NO: 493925 - DNA, 19 bp, Mus musculus
  siRNA target sequence for Apeg1 (NM_007463.2,2364-2382).
ggagctgacgtgctactta

SEQ ID NO: 493926 - DNA, 19 bp, Mus musculus
  siRNA target sequence for Apeg1 (NM_007463.2,2365-2383).
gagctgacgtgctacttaa

SEQ ID NO: 493927 - DNA, 19 bp, Mus musculus
  siRNA target sequence for Apeg1 (NM_007463.2,2367-2385).
gctgacgtgctacttaagt

SEQ ID NO: 493928 - DNA, 19 bp, Mus musculus
  siRNA target sequence for Apeg1 (NM_007463.2,2370-2388).
gacgtgctacttaagtgta

SEQ ID NO: 493929 - DNA, 19 bp, Mus musculus
  siRNA target sequence for Apeg1 (NM_007463.2,2373-2391).
gtgctacttaagtgtatca

SEQ ID NO: 493930 - DNA, 19 bp, Mus musculus
  siRNA target sequence for Apeg1 (NM_007463.2,2449-2467).
gcgagggtcgtcttctcat

SEQ ID NO: 493931 - DNA, 19 bp, Mus musculus
  siRNA target sequence for Apeg1 (NM_007463.2,2795-2813).
ggtgagagaaggtcaagat

SEQ ID NO: 493932 - DNA, 19 bp, Mus musculus
  siRNA target sequence for Apeg1 (NM_007463.2,2961-2979).
ggcgatgctggtttctaca

SEQ ID NO: 493933 - DNA, 19 bp, Mus musculus
  siRNA target sequence for Apeg1 (NM_007463.2,2964-2982).
gatgctggtttctacacat

SEQ ID NO: 493934 - DNA, 19 bp, Mus musculus
  siRNA target sequence for Apeg1 (NM_007463.2,2983-3001).
gcaaggcggtcaacgaata

SEQ ID NO: 493935 - DNA, 19 bp, Mus musculus
  siRNA target sequence for Apeg1 (NM_007463.2,2984-3002).
caaggcggtcaacgaatat

SEQ ID NO: 493936 - DNA, 19 bp, Mus musculus
  siRNA target sequence for Apeg1 (NM_007463.2,3289-3307).
gcacagccaaagatgaact

SEQ ID NO: 493937 - DNA, 19 bp, Mus musculus
  siRNA target sequence for Apeg1 (NM_007463.2,3393-3411).
cgtgctgcccgcttggatt

SEQ ID NO: 493938 - DNA, 19 bp, Mus musculus
  siRNA target sequence for Apeg1 (NM_007463.2,3397-3415).
ctgcccgcttggattgcaa

SEQ ID NO: 493939 - DNA, 19 bp, Mus musculus
  siRNA target sequence for Apeg1 (NM_007463.2,3402-3420).
cgcttggattgcaagatca

SEQ ID NO: 493940 - DNA, 19 bp, Mus musculus
  siRNA target sequence for Apeg1 (NM_007463.2,3440-3458).
cgttacctggactcatttt

SEQ ID NO: 493941 - DNA, 19 bp, Mus musculus
  siRNA target sequence for Apeg1 (NM_007463.2,3545-3563).
ggacgaaggactctatgaa

SEQ ID NO: 493942 - DNA, 19 bp, Mus musculus
  siRNA target sequence for Apeg1 (NM_007463.2,3649-3667).
gctcgaagctggagaagat

SEQ ID NO: 493943 - DNA, 19 bp, Mus musculus
  siRNA target sequence for Apeg1 (NM_007463.2,3688-3706).
cggagcacggagatctaga

SEQ ID NO: 493944 - DNA, 19 bp, Mus musculus
  siRNA target sequence for Apeg1 (NM_007463.2,3924-3942).
ggtgtctataagagtgtaa

SEQ ID NO: 493945 - DNA, 19 bp, Mus musculus
  siRNA target sequence for Apeg1 (NM_007463.2,3968-3986).
ctgctacgcccatctctat

SEQ ID NO: 493946 - DNA, 19 bp, Mus musculus
  siRNA target sequence for Apeg1 (NM_007463.2,3970-3988).
gctacgcccatctctatgt

SEQ ID NO: 493947 - DNA, 19 bp, Mus musculus
  siRNA target sequence for Apeg1 (NM_007463.2,4098-4116).
gacccagattccctaacat

SEQ ID NO: 493948 - DNA, 19 bp, Mus musculus
  siRNA target sequence for Apeg1 (NM_007463.2,4101-4119).
ccagattccctaacataca

SEQ ID NO: 493949 - DNA, 19 bp, Mus musculus
  siRNA target sequence for Apeg1 (NM_007463.2,4381-4399).
gtgtcaccgtcacttttaa

SEQ ID NO: 493950 - DNA, 19 bp, Mus musculus
  siRNA target sequence for Apeg1 (NM_007463.2,4454-4472).
gcgcacaggtgtgtatgaa

SEQ ID NO: 493951 - DNA, 19 bp, Mus musculus
  siRNA target sequence for Apeg1 (NM_007463.2,4456-4474).
gcacaggtgtgtatgaact

SEQ ID NO: 493952 - DNA, 19 bp, Mus musculus
  siRNA target sequence for Apeg1 (NM_007463.2,4530-4548).
gacctgggaccccttactt

SEQ ID NO: 493953 - DNA, 19 bp, Mus musculus
  siRNA target sequence for Apeg1 (NM_007463.2,4605-4623).
gaggcacctcggtttgagt

SEQ ID NO: 493954 - DNA, 19 bp, Mus musculus
  siRNA target sequence for Apeg1 (NM_007463.2,4609-4627).
cacctcggtttgagtctat

SEQ ID NO: 493955 - DNA, 19 bp, Mus musculus
  siRNA target sequence for Apeg1 (NM_007463.2,4611-4629).
cctcggtttgagtctatca

SEQ ID NO: 493956 - DNA, 19 bp, Mus musculus
  siRNA target sequence for Apeg1 (NM_007463.2,4612-4630).
ctcggtttgagtctatcat

SEQ ID NO: 493957 - DNA, 19 bp, Mus musculus
  siRNA target sequence for Apeg1 (NM_007463.2,4806-4824).
caggatggaggcgtctata

SEQ ID NO: 493958 - DNA, 19 bp, Mus musculus
  siRNA target sequence for Apeg1 (NM_007463.2,4932-4950).
caccgaggaagaagactta

SEQ ID NO: 493959 - DNA, 19 bp, Mus musculus
  siRNA target sequence for Apeg1 (NM_007463.2,4942-4960).
gaagacttagcgactacta

SEQ ID NO: 493960 - DNA, 19 bp, Mus musculus
  siRNA target sequence for Apeg1 (NM_007463.2,4961-4979).
cgacatccaccaagagatt

SEQ ID NO: 493961 - DNA, 19 bp, Mus musculus
  siRNA target sequence for Apeg1 (NM_007463.2,5060-5078).
ccaggctaagcctaaagca

SEQ ID NO: 493962 - DNA, 19 bp, Mus musculus
  siRNA target sequence for Apeg1 (NM_007463.2,5061-5079).
caggctaagcctaaagcat

SEQ ID NO: 493963 - DNA, 19 bp, Mus musculus
  siRNA target sequence for Apeg1 (NM_007463.2,5156-5174).
gcgcaggggacttgtcata

SEQ ID NO: 493964 - DNA, 19 bp, Mus musculus
  siRNA target sequence for Apeg1 (NM_007463.2,5158-5176).
gcaggggacttgtcatagt

SEQ ID NO: 493965 - DNA, 19 bp, Mus musculus
  siRNA target sequence for Apeg1 (NM_007463.2,5239-5257).
ctgagactcggacctatat

SEQ ID NO: 493966 - DNA, 19 bp, Mus musculus
  siRNA target sequence for Apeg1 (NM_007463.2,5265-5283).
gtgctagaggggatatgct

SEQ ID NO: 493967 - DNA, 19 bp, Mus musculus
  siRNA target sequence for Apeg1 (NM_007463.2,5267-5285).
gctagaggggatatgctat

SEQ ID NO: 493968 - DNA, 19 bp, Mus musculus
  siRNA target sequence for Apeg1 (NM_007463.2,5414-5432).
gccccagtactgtcagtat

SEQ ID NO: 493969 - DNA, 19 bp, Mus musculus
  siRNA target sequence for Apeg1 (NM_007463.2,5429-5447).
gtatggcacgccagagttt

SEQ ID NO: 493970 - DNA, 19 bp, Mus musculus
  siRNA target sequence for Apeg1 (NM_007463.2,5508-5526).
ggcgtcgttgcctttctct

SEQ ID NO: 493971 - DNA, 19 bp, Mus musculus
  siRNA target sequence for Apeg1 (NM_007463.2,5514-5532).
gttgcctttctctgtttga

SEQ ID NO: 493972 - DNA, 19 bp, Mus musculus
  siRNA target sequence for Apeg1 (NM_007463.2,5533-5551).
cgggcatctccccatttgt

SEQ ID NO: 493973 - DNA, 19 bp, Mus musculus
  siRNA target sequence for Apeg1 (NM_007463.2,5565-5583).
cggacaacactcatgaata

SEQ ID NO: 493974 - DNA, 19 bp, Mus musculus
  siRNA target sequence for Apeg1 (NM_007463.2,5705-5723).
ggaacatccttggttcaaa

SEQ ID NO: 493975 - DNA, 19 bp, Mus musculus
  siRNA target sequence for Apeg1 (NM_007463.2,5706-5724).
gaacatccttggttcaaaa

SEQ ID NO: 493976 - DNA, 19 bp, Mus musculus
  siRNA target sequence for Apeg1 (NM_007463.2,5785-5803).
ggtggcagcgctctcaaat

SEQ ID NO: 493977 - DNA, 19 bp, Mus musculus
  siRNA target sequence for Apeg1 (NM_007463.2,6781-6799).
ctcagcctgtcccagaaaa

SEQ ID NO: 493978 - DNA, 19 bp, Mus musculus
  siRNA target sequence for Apeg1 (NM_007463.2,6974-6992).
gccccacgcggctgtgttt

SEQ ID NO: 493979 - DNA, 19 bp, Mus musculus
  siRNA target sequence for Apeg1 (NM_007463.2,7147-7165).
ctgtgttcgaggctaagtt

SEQ ID NO: 493980 - DNA, 19 bp, Mus musculus
  siRNA target sequence for Apeg1 (NM_007463.2,7151-7169).
gttcgaggctaagttcaaa

SEQ ID NO: 493981 - DNA, 19 bp, Mus musculus
  siRNA target sequence for Apeg1 (NM_007463.2,7252-7270).
cggaggacgacggcatata

SEQ ID NO: 493982 - DNA, 19 bp, Mus musculus
  siRNA target sequence for Apeg1 (NM_007463.2,7809-7827).
cgcaaggacaagggattat

SEQ ID NO: 493983 - DNA, 19 bp, Mus musculus
  siRNA target sequence for Apeg1 (NM_007463.2,7878-7896).
gtgcccagtgagtcagatt

SEQ ID NO: 493984 - DNA, 19 bp, Mus musculus
  siRNA target sequence for Apeg1 (NM_007463.2,7991-8009).
ccgcatctcctggatgaaa

SEQ ID NO: 493985 - DNA, 19 bp, Mus musculus
  siRNA target sequence for Apeg1 (NM_007463.2,8103-8121).
catgctgggctctatgagt

SEQ ID NO: 493986 - DNA, 19 bp, Mus musculus
  siRNA target sequence for Apeg1 (NM_007463.2,8262-8280).
cgggcaccttgcacataca

SEQ ID NO: 493987 - DNA, 19 bp, Mus musculus
  siRNA target sequence for Apeg1 (NM_007463.2,8329-8347).
caggcatccccgactgtta

SEQ ID NO: 493988 - DNA, 19 bp, Mus musculus
  siRNA target sequence for Apeg1 (NM_007463.2,8331-8349).
ggcatccccgactgttatt

SEQ ID NO: 493989 - DNA, 19 bp, Mus musculus
  siRNA target sequence for Apeg1 (NM_007463.2,8332-8350).
gcatccccgactgttatta

SEQ ID NO: 493990 - DNA, 19 bp, Mus musculus
  siRNA target sequence for Apeg1 (NM_007463.2,8336-8354).
ccccgactgttattacaat

SEQ ID NO: 493991 - DNA, 19 bp, Mus musculus
  siRNA target sequence for Apeg1 (NM_007463.2,8338-8356).
ccgactgttattacaatgt

SEQ ID NO: 493992 - DNA, 19 bp, Mus musculus
  siRNA target sequence for Apeg1 (NM_007463.2,8390-8408).
ccgtgtggcctgttccaat

SEQ ID NO: 493993 - DNA, 19 bp, Mus musculus
  siRNA target sequence for Apeg1 (NM_007463.2,8747-8765).
cgtggtcaccccaagtgaa

SEQ ID NO: 493994 - DNA, 19 bp, Mus musculus
  siRNA target sequence for Apeg1 (NM_007463.2,9142-9160).
gacgcgtgctgcaggaata

SEQ ID NO: 493995 - DNA, 19 bp, Mus musculus
  siRNA target sequence for Apeg1 (NM_007463.2,9284-9302).
cgacagattccggtattca

SEQ ID NO: 493996 - DNA, 19 bp, Mus musculus
  siRNA target sequence for Apeg1 (NM_007463.2,9383-9401).
catcaagccggacaatcta

SEQ ID NO: 493997 - DNA, 19 bp, Mus musculus
  siRNA target sequence for Apeg1 (NM_007463.2,9411-9429).
gctgacaatgcccttaaaa

SEQ ID NO: 493998 - DNA, 19 bp, Mus musculus
  siRNA target sequence for Apeg1 (NM_007463.2,9412-9430).
ctgacaatgcccttaaaat

SEQ ID NO: 493999 - DNA, 19 bp, Mus musculus
  siRNA target sequence for Apeg1 (NM_007463.2,9493-9511).
caggcactctggagttcat

SEQ ID NO: 494000 - DNA, 19 bp, Mus musculus
  siRNA target sequence for Apeg1 (NM_007463.2,9672-9690).
cagttgtatcctaacacat

SEQ ID NO: 494001 - DNA, 19 bp, Mus musculus
  siRNA target sequence for Araf (NM_009703.1,141-159).
ggcagttggcactgtcaaa

SEQ ID NO: 494002 - DNA, 19 bp, Mus musculus
  siRNA target sequence for Araf (NM_009703.1,143-161).
cagttggcactgtcaaagt

SEQ ID NO: 494003 - DNA, 19 bp, Mus musculus
  siRNA target sequence for Araf (NM_009703.1,201-219).
ggaaggcatgagtgtctat

SEQ ID NO: 494004 - DNA, 19 bp, Mus musculus
  siRNA target sequence for Araf (NM_009703.1,205-223).
ggcatgagtgtctatgact

SEQ ID NO: 494005 - DNA, 19 bp, Mus musculus
  siRNA target sequence for Araf (NM_009703.1,377-395).
cactgaccatgcacaattt

SEQ ID NO: 494006 - DNA, 19 bp, Mus musculus
  siRNA target sequence for Araf (NM_009703.1,381-399).
gaccatgcacaattttgta

SEQ ID NO: 494007 - DNA, 19 bp, Mus musculus
  siRNA target sequence for Araf (NM_009703.1,520-538).
gtctgcgttgacatgagta

SEQ ID NO: 494008 - DNA, 19 bp, Mus musculus
  siRNA target sequence for Araf (NM_009703.1,539-557).
ccaaccgccgacagttcta

SEQ ID NO: 494009 - DNA, 19 bp, Mus musculus
  siRNA target sequence for Araf (NM_009703.1,598-616).
gaggctccctcaaatctct

SEQ ID NO: 494010 - DNA, 19 bp, Mus musculus
  siRNA target sequence for Araf (NM_009703.1,670-688).
gaccaggagcacttctcat

SEQ ID NO: 494011 - DNA, 19 bp, Mus musculus
  siRNA target sequence for Araf (NM_009703.1,718-736).
cgcatccgctccacatcta

SEQ ID NO: 494012 - DNA, 19 bp, Mus musculus
  siRNA target sequence for Araf (NM_009703.1,780-798).
cagcctcatgcagtttact

SEQ ID NO: 494013 - DNA, 19 bp, Mus musculus
  siRNA target sequence for Araf (NM_009703.1,895-913).
ccacattccaagttacctt

SEQ ID NO: 494014 - DNA, 19 bp, Mus musculus
  siRNA target sequence for Araf (NM_009703.1,976-994).
cgggactcaggctattact

SEQ ID NO: 494015 - DNA, 19 bp, Mus musculus
  siRNA target sequence for Araf (NM_009703.1,1032-1050).
gatcgggacaggctctttt

SEQ ID NO: 494016 - DNA, 19 bp, Mus musculus
  siRNA target sequence for Araf (NM_009703.1,1079-1097).
gcgatgtagctgtgaaagt

SEQ ID NO: 494017 - DNA, 19 bp, Mus musculus
  siRNA target sequence for Araf (NM_009703.1,1167-1185).
gacacggcatgtcaacatt

SEQ ID NO: 494018 - DNA, 19 bp, Mus musculus
  siRNA target sequence for Araf (NM_009703.1,1276-1294).
gctgacacgcgctttgaca

SEQ ID NO: 494019 - DNA, 19 bp, Mus musculus
  siRNA target sequence for Araf (NM_009703.1,1277-1295).
ctgacacgcgctttgacat

SEQ ID NO: 494020 - DNA, 19 bp, Mus musculus
  siRNA target sequence for Araf (NM_009703.1,1382-1400).
ccaacaatatcttcttaca

SEQ ID NO: 494021 - DNA, 19 bp, Mus musculus
  siRNA target sequence for Araf (NM_009703.1,1487-1505).
cagggtctgtgctatggat

SEQ ID NO: 494022 - DNA, 19 bp, Mus musculus
  siRNA target sequence for Araf (NM_009703.1,1547-1565).
gcttccagtcggatgtcta

SEQ ID NO: 494023 - DNA, 19 bp, Mus musculus
  siRNA target sequence for Araf (NM_009703.1,1548-1566).
cttccagtcggatgtctat

SEQ ID NO: 494024 - DNA, 19 bp, Mus musculus
  siRNA target sequence for Araf (NM_009703.1,1678-1696).
ctcagcaaaatcttcagta

SEQ ID NO: 494025 - DNA, 19 bp, Mus musculus
  siRNA target sequence for Araf (NM_009703.1,1850-1868).
gcacccaggctgatgagtt

SEQ ID NO: 494026 - DNA, 19 bp, Mus musculus
  siRNA target sequence for Asna1 (NM_019652.1,85-103).
ggaacccacgcttagcaat

SEQ ID NO: 494027 - DNA, 19 bp, Mus musculus
  siRNA target sequence for Asna1 (NM_019652.1,86-104).
gaacccacgcttagcaata

SEQ ID NO: 494028 - DNA, 19 bp, Mus musculus
  siRNA target sequence for Asna1 (NM_019652.1,89-107).
cccacgcttagcaatatca

SEQ ID NO: 494029 - DNA, 19 bp, Mus musculus
  siRNA target sequence for Asna1 (NM_019652.1,90-108).
ccacgcttagcaatatcat

SEQ ID NO: 494030 - DNA, 19 bp, Mus musculus
  siRNA target sequence for Asna1 (NM_019652.1,110-128).
gagcagcgtagccttaagt

SEQ ID NO: 494031 - DNA, 19 bp, Mus musculus
  siRNA target sequence for Asna1 (NM_019652.1,204-222).
gacgtgagagtgttctgat

SEQ ID NO: 494032 - DNA, 19 bp, Mus musculus
  siRNA target sequence for Asna1 (NM_019652.1,244-262).
caacatctcagatgctttt

SEQ ID NO: 494033 - DNA, 19 bp, Mus musculus
  siRNA target sequence for Asna1 (NM_019652.1,257-275).
gcttttgaccagaagttct

SEQ ID NO: 494034 - DNA, 19 bp, Mus musculus
  siRNA target sequence for Asna1 (NM_019652.1,579-597).
gcctgatgcagatcaagaa

SEQ ID NO: 494035 - DNA, 19 bp, Mus musculus
  siRNA target sequence for Asna1 (NM_019652.1,692-710).
cctgtcatccgatctgtta

SEQ ID NO: 494036 - DNA, 19 bp, Mus musculus
  siRNA target sequence for Asna1 (NM_019652.1,705-723).
ctgttagcgaacagttcaa

SEQ ID NO: 494037 - DNA, 19 bp, Mus musculus
  siRNA target sequence for Asna1 (NM_019652.1,888-906).
gtgaggcccgacacaagat

SEQ ID NO: 494038 - DNA, 19 bp, Mus musculus
  siRNA target sequence for Asna1 (NM_019652.1,925-943).
ccagatggaagacctatat

SEQ ID NO: 494039 - DNA, 19 bp, Mus musculus
  siRNA target sequence for Asna1 (NM_019652.1,938-956).
ctatatgaagactttcaca

SEQ ID NO: 494040 - DNA, 19 bp, Mus musculus
  siRNA target sequence for Asna1 (NM_019652.1,989-1007).
cggggagccgacaaagtca

SEQ ID NO: 494041 - DNA, 19 bp, Mus musculus
  siRNA target sequence for Asna1 (NM_019652.1,990-1008).
ggggagccgacaaagtcaa

SEQ ID NO: 494042 - DNA, 19 bp, Mus musculus
  siRNA target sequence for Ass1 (NM_007494.2,235-253).
cgcctacctggccaacatt

SEQ ID NO: 494043 - DNA, 19 bp, Mus musculus
  siRNA target sequence for Ass1 (NM_007494.2,306-324).
ccaaaaaggtgttcattga

SEQ ID NO: 494044 - DNA, 19 bp, Mus musculus
  siRNA target sequence for Ass1 (NM_007494.2,325-343).
ggatgtgagcaaggaattt

SEQ ID NO: 494045 - DNA, 19 bp, Mus musculus
  siRNA target sequence for Ass1 (NM_007494.2,464-482).
gaaggggccaagtatgtgt

SEQ ID NO: 494046 - DNA, 19 bp, Mus musculus
  siRNA target sequence for Ass1 (NM_007494.2,540-558).
cactggcaccccagattaa

SEQ ID NO: 494047 - DNA, 19 bp, Mus musculus
  siRNA target sequence for Ass1 (NM_007494.2,598-616).
gttcaagggccgaaatgat

SEQ ID NO: 494048 - DNA, 19 bp, Mus musculus
  siRNA target sequence for Ass1 (NM_007494.2,614-632).
gatctgatggagtatgcaa

SEQ ID NO: 494049 - DNA, 19 bp, Mus musculus
  siRNA target sequence for Ass1 (NM_007494.2,675-693).
ggagtatggatgaaaacct

SEQ ID NO: 494050 - DNA, 19 bp, Mus musculus
  siRNA target sequence for Ass1 (NM_007494.2,747-765).
ctccgggtctctacacaaa

SEQ ID NO: 494051 - DNA, 19 bp, Mus musculus
  siRNA target sequence for Ass1 (NM_007494.2,749-767).
ccgggtctctacacaaaaa

SEQ ID NO: 494052 - DNA, 19 bp, Mus musculus
  siRNA target sequence for Ass1 (NM_007494.2,751-769).
gggtctctacacaaaaact

SEQ ID NO: 494053 - DNA, 19 bp, Mus musculus
  siRNA target sequence for Atp10a (NM_009728.1,385-403).
caccgcctagccaatgtgt

SEQ ID NO: 494054 - DNA, 19 bp, Mus musculus
  siRNA target sequence for Atp10a (NM_009728.1,414-432).
catcgcgctgctcaacttt

SEQ ID NO: 494055 - DNA, 19 bp, Mus musculus
  siRNA target sequence for Atp10a (NM_009728.1,535-553).
caccgctcggaccatgaaa

SEQ ID NO: 494056 - DNA, 19 bp, Mus musculus
  siRNA target sequence for Atp10a (NM_009728.1,538-556).
cgctcggaccatgaaatca

SEQ ID NO: 494057 - DNA, 19 bp, Mus musculus
  siRNA target sequence for Atp10a (NM_009728.1,780-798).
ctcggagcttgtttctgaa

SEQ ID NO: 494058 - DNA, 19 bp, Mus musculus
  siRNA target sequence for Atp10a (NM_009728.1,782-800).
cggagcttgtttctgaatt

SEQ ID NO: 494059 - DNA, 19 bp, Mus musculus
  siRNA target sequence for Atp10a (NM_009728.1,808-826).
ctgacgttcaccagtgtaa

SEQ ID NO: 494060 - DNA, 19 bp, Mus musculus
  siRNA target sequence for Atp10a (NM_009728.1,812-830).
cgttcaccagtgtaatcga

SEQ ID NO: 494061 - DNA, 19 bp, Mus musculus
  siRNA target sequence for Atp10a (NM_009728.1,902-920).
ggctgcataaggaaaactt

SEQ ID NO: 494062 - DNA, 19 bp, Mus musculus
  siRNA target sequence for Atp10a (NM_009728.1,972-990).
catctacgcaggacatgaa

SEQ ID NO: 494063 - DNA, 19 bp, Mus musculus
  siRNA target sequence for Atp10a (NM_009728.1,1039-1057).
cttgaaaggcagatgaact

SEQ ID NO: 494064 - DNA, 19 bp, Mus musculus
  siRNA target sequence for Atp10a (NM_009728.1,1075-1093).
gtccttctcctcgtttgta

SEQ ID NO: 494065 - DNA, 19 bp, Mus musculus
  siRNA target sequence for Atp10a (NM_009728.1,1083-1101).
cctcgtttgtatatctcta

SEQ ID NO: 494066 - DNA, 19 bp, Mus musculus
  siRNA target sequence for Atp10a (NM_009728.1,1084-1102).
ctcgtttgtatatctctat

SEQ ID NO: 494067 - DNA, 19 bp, Mus musculus
  siRNA target sequence for Atp10a (NM_009728.1,1106-1124).
cagcggttgggcatggatt

SEQ ID NO: 494068 - DNA, 19 bp, Mus musculus
  siRNA target sequence for Atp10a (NM_009728.1,1125-1143).
gtgggttcggcgctatcaa

SEQ ID NO: 494069 - DNA, 19 bp, Mus musculus
  siRNA target sequence for Atp10a (NM_009728.1,1127-1145).
gggttcggcgctatcaaga

SEQ ID NO: 494070 - DNA, 19 bp, Mus musculus
  siRNA target sequence for Atp10a (NM_009728.1,1132-1150).
cggcgctatcaagagaaaa

SEQ ID NO: 494071 - DNA, 19 bp, Mus musculus
  siRNA target sequence for Atp10a (NM_009728.1,1133-1151).
ggcgctatcaagagaaaaa

SEQ ID NO: 494072 - DNA, 19 bp, Mus musculus
  siRNA target sequence for Atp10a (NM_009728.1,1173-1191).
gtctgatggcagctcttta

SEQ ID NO: 494073 - DNA, 19 bp, Mus musculus
  siRNA target sequence for Atp10a (NM_009728.1,1204-1222).
gctgcagtttactcatttt

SEQ ID NO: 494074 - DNA, 19 bp, Mus musculus
  siRNA target sequence for Atp10a (NM_009728.1,1210-1228).
gtttactcattttttacaa

SEQ ID NO: 494075 - DNA, 19 bp, Mus musculus
  siRNA target sequence for Atp10a (NM_009728.1,1240-1258).
ctgcaggttttgattccaa

SEQ ID NO: 494076 - DNA, 19 bp, Mus musculus
  siRNA target sequence for Atp10a (NM_009728.1,1242-1260).
gcaggttttgattccaatt

SEQ ID NO: 494077 - DNA, 19 bp, Mus musculus
  siRNA target sequence for Atp10a (NM_009728.1,1243-1261).
caggttttgattccaattt

SEQ ID NO: 494078 - DNA, 19 bp, Mus musculus
  siRNA target sequence for Atp10a (NM_009728.1,1274-1292).
ccattgaaattgttaaagt

SEQ ID NO: 494079 - DNA, 19 bp, Mus musculus
  siRNA target sequence for Atp10a (NM_009728.1,1293-1311).
gtgccaagtatacttcatt

SEQ ID NO: 494080 - DNA, 19 bp, Mus musculus
  siRNA target sequence for Atp10a (NM_009728.1,1295-1313).
gccaagtatacttcattaa

SEQ ID NO: 494081 - DNA, 19 bp, Mus musculus
  siRNA target sequence for Atp10a (NM_009728.1,1371-1389).
gaacataacagaagactta

SEQ ID NO: 494082 - DNA, 19 bp, Mus musculus
  siRNA target sequence for Atp10a (NM_009728.1,1390-1408).
gggcagataaaatacatct

SEQ ID NO: 494083 - DNA, 19 bp, Mus musculus
  siRNA target sequence for Atp10a (NM_009728.1,1413-1431).
ggacaaaaccggcacatta

SEQ ID NO: 494084 - DNA, 19 bp, Mus musculus
  siRNA target sequence for Atp10a (NM_009728.1,1414-1432).
gacaaaaccggcacattaa

SEQ ID NO: 494085 - DNA, 19 bp, Mus musculus
  siRNA target sequence for Atp10a (NM_009728.1,1416-1434).
caaaaccggcacattaact

SEQ ID NO: 494086 - DNA, 19 bp, Mus musculus
  siRNA target sequence for Atp10a (NM_009728.1,1463-1481).
ctgtgtccggcatagaata

SEQ ID NO: 494087 - DNA, 19 bp, Mus musculus
  siRNA target sequence for Atp10a (NM_009728.1,1465-1483).
gtgtccggcatagaatatt

SEQ ID NO: 494088 - DNA, 19 bp, Mus musculus
  siRNA target sequence for Atp10a (NM_009728.1,1467-1485).
gtccggcatagaatattct

SEQ ID NO: 494089 - DNA, 19 bp, Mus musculus
  siRNA target sequence for Atp10a (NM_009728.1,1469-1487).
ccggcatagaatattctca

SEQ ID NO: 494090 - DNA, 19 bp, Mus musculus
  siRNA target sequence for Atp10a (NM_009728.1,1503-1521).
gcgactggccaggtatcaa

SEQ ID NO: 494091 - DNA, 19 bp, Mus musculus
  siRNA target sequence for Atp10a (NM_009728.1,1551-1569).
gtccaaggtgggcacaata

SEQ ID NO: 494092 - DNA, 19 bp, Mus musculus
  siRNA target sequence for Atp10a (NM_009728.1,1613-1631).
ctcataagacccaaagtat

SEQ ID NO: 494093 - DNA, 19 bp, Mus musculus
  siRNA target sequence for Atp10a (NM_009728.1,1771-1789).
cgattcctcgccattgcaa

SEQ ID NO: 494094 - DNA, 19 bp, Mus musculus
  siRNA target sequence for Atp10a (NM_009728.1,1822-1840).
cccgagctgtctgatgttt

SEQ ID NO: 494095 - DNA, 19 bp, Mus musculus
  siRNA target sequence for Atp10a (NM_009728.1,1823-1841).
ccgagctgtctgatgtttt

SEQ ID NO: 494096 - DNA, 19 bp, Mus musculus
  siRNA target sequence for Atp10a (NM_009728.1,1824-1842).
cgagctgtctgatgttttt

SEQ ID NO: 494097 - DNA, 19 bp, Mus musculus
  siRNA target sequence for Atp10a (NM_009728.1,1855-1873).
gcactcaccatctgcaata

SEQ ID NO: 494098 - DNA, 19 bp, Mus musculus
  siRNA target sequence for Atp10a (NM_009728.1,1860-1878).
caccatctgcaatacagta

SEQ ID NO: 494099 - DNA, 19 bp, Mus musculus
  siRNA target sequence for Atp10a (NM_009728.1,1863-1881).
catctgcaatacagtagtt

SEQ ID NO: 494100 - DNA, 19 bp, Mus musculus
  siRNA target sequence for Atp10a (NM_009728.1,1892-1910).
cagaccaaccacgacaaaa

SEQ ID NO: 494101 - DNA, 19 bp, Mus musculus
  siRNA target sequence for Atp10a (NM_009728.1,1938-1956).
cccagtaaagaccatagaa

SEQ ID NO: 494102 - DNA, 19 bp, Mus musculus
  siRNA target sequence for Atp10a (NM_009728.1,2013-2031).
gaacctgagcaccagtaaa

SEQ ID NO: 494103 - DNA, 19 bp, Mus musculus
  siRNA target sequence for Atp10a (NM_009728.1,2040-2058).
caaatctggatcagctttt

SEQ ID NO: 494104 - DNA, 19 bp, Mus musculus
  siRNA target sequence for Atp10a (NM_009728.1,2284-2302).
gcagccagagcctataact

SEQ ID NO: 494105 - DNA, 19 bp, Mus musculus
  siRNA target sequence for Atp10a (NM_009728.1,2439-2457).
gactgacgagatcaatgta

SEQ ID NO: 494106 - DNA, 19 bp, Mus musculus
  siRNA target sequence for Atp10a (NM_009728.1,2441-2459).
ctgacgagatcaatgtata

SEQ ID NO: 494107 - DNA, 19 bp, Mus musculus
  siRNA target sequence for Atp10a (NM_009728.1,2443-2461).
gacgagatcaatgtataca

SEQ ID NO: 494108 - DNA, 19 bp, Mus musculus
  siRNA target sequence for Atp10a (NM_009728.1,2535-2553).
gaaaaagatccggagtaaa

SEQ ID NO: 494109 - DNA, 19 bp, Mus musculus
  siRNA target sequence for Atp10a (NM_009728.1,2545-2563).
cggagtaaaacacagaatt

SEQ ID NO: 494110 - DNA, 19 bp, Mus musculus
  siRNA target sequence for Atp10a (NM_009728.1,2546-2564).
ggagtaaaacacagaatta

SEQ ID NO: 494111 - DNA, 19 bp, Mus musculus
  siRNA target sequence for Atp10a (NM_009728.1,2555-2573).
cacagaattacctcaatct

SEQ ID NO: 494112 - DNA, 19 bp, Mus musculus
  siRNA target sequence for Atp10a (NM_009728.1,2559-2577).
gaattacctcaatctttat

SEQ ID NO: 494113 - DNA, 19 bp, Mus musculus
  siRNA target sequence for Atp10a (NM_009728.1,2646-2664).
gttgcagagccacatagaa

SEQ ID NO: 494114 - DNA, 19 bp, Mus musculus
  siRNA target sequence for Atp10a (NM_009728.1,2744-2762).
gtgccacggggatagaaga

SEQ ID NO: 494115 - DNA, 19 bp, Mus musculus
  siRNA target sequence for Atp10a (NM_009728.1,2847-2865).
ggaaacagccattaacatt

SEQ ID NO: 494116 - DNA, 19 bp, Mus musculus
  siRNA target sequence for Atp10a (NM_009728.1,2949-2967).
ggaccagtgcctcagttat

SEQ ID NO: 494117 - DNA, 19 bp, Mus musculus
  siRNA target sequence for Atp10a (NM_009728.1,3071-3089).
gcccaagccttgtgattga

SEQ ID NO: 494118 - DNA, 19 bp, Mus musculus
  siRNA target sequence for Atp10a (NM_009728.1,3124-3142).
ctggaggacaaatttcttt

SEQ ID NO: 494119 - DNA, 19 bp, Mus musculus
  siRNA target sequence for Atp10a (NM_009728.1,3177-3195).
ccgatcgacccctttgcaa

SEQ ID NO: 494120 - DNA, 19 bp, Mus musculus
  siRNA target sequence for Atp10a (NM_009728.1,3367-3385).
cgatacctggagagacttt

SEQ ID NO: 494121 - DNA, 19 bp, Mus musculus
  siRNA target sequence for Atp10a (NM_009728.1,3413-3431).
ccagactggccaatatggt

SEQ ID NO: 494122 - DNA, 19 bp, Mus musculus
  siRNA target sequence for Atp10a (NM_009728.1,3421-3439).
gccaatatggtgctgtatt

SEQ ID NO: 494123 - DNA, 19 bp, Mus musculus
  siRNA target sequence for Atp10a (NM_009728.1,3506-3524).
catctgccatgattgatca

SEQ ID NO: 494124 - DNA, 19 bp, Mus musculus
  siRNA target sequence for Atp10a (NM_009728.1,3520-3538).
gatcagtggtatctgattt

SEQ ID NO: 494125 - DNA, 19 bp, Mus musculus
  siRNA target sequence for Atp10a (NM_009728.1,3527-3545).
ggtatctgattttctttaa

SEQ ID NO: 494126 - DNA, 19 bp, Mus musculus
  siRNA target sequence for Atp10a (NM_009728.1,3581-3599).
gggtgctggataaagatgt

SEQ ID NO: 494127 - DNA, 19 bp, Mus musculus
  siRNA target sequence for Atp10a (NM_009728.1,3670-3688).
cgagcattctggttaaaca

SEQ ID NO: 494128 - DNA, 19 bp, Mus musculus
  siRNA target sequence for Atp10a (NM_009728.1,3691-3709).
gtggatgctgcctttcaaa

SEQ ID NO: 494129 - DNA, 19 bp, Mus musculus
  siRNA target sequence for Atp10a (NM_009728.1,3711-3729).
cctggtatgctttttcatt

SEQ ID NO: 494130 - DNA, 19 bp, Mus musculus
  siRNA target sequence for Atp10a (NM_009728.1,3777-3795).
gacccctgtcacagcaata

SEQ ID NO: 494131 - DNA, 19 bp, Mus musculus
  siRNA target sequence for Atp10a (NM_009728.1,3813-3831).
gctgcacctgggtattgaa

SEQ ID NO: 494132 - DNA, 19 bp, Mus musculus
  siRNA target sequence for Atp10a (NM_009728.1,3814-3832).
ctgcacctgggtattgaaa

SEQ ID NO: 494133 - DNA, 19 bp, Mus musculus
  siRNA target sequence for Atp10a (NM_009728.1,3820-3838).
ctgggtattgaaaccaaaa

SEQ ID NO: 494134 - DNA, 19 bp, Mus musculus
  siRNA target sequence for Atp10a (NM_009728.1,3898-3916).
gctctgatttacaacactt

SEQ ID NO: 494135 - DNA, 19 bp, Mus musculus
  siRNA target sequence for Atp10a (NM_009728.1,3951-3969).
ctggaccatgcagacatta

SEQ ID NO: 494136 - DNA, 19 bp, Mus musculus
  siRNA target sequence for Atp10a (NM_009728.1,3979-3997).
cctctgttctacttgactt

SEQ ID NO: 494137 - DNA, 19 bp, Mus musculus
  siRNA target sequence for Atp10a (NM_009728.1,4007-4025).
cacctattgctgcattgtt

SEQ ID NO: 494138 - DNA, 19 bp, Mus musculus
  siRNA target sequence for Atp10a (NM_009728.1,4018-4036).
gcattgttgcccagattgt

SEQ ID NO: 494139 - DNA, 19 bp, Mus musculus
  siRNA target sequence for Atp10a (NM_009728.1,4019-4037).
cattgttgcccagattgtt

SEQ ID NO: 494140 - DNA, 19 bp, Mus musculus
  siRNA target sequence for Atp10a (NM_009728.1,4045-4063).
gccctccaggggagtcttt

SEQ ID NO: 494141 - DNA, 19 bp, Mus musculus
  siRNA target sequence for Atp10a (NM_009728.1,4121-4139).
gtgatcccaaagagacttt

SEQ ID NO: 494142 - DNA, 19 bp, Mus musculus
  siRNA target sequence for Atp10a (NM_009728.1,4300-4318).
gatacaaacatgccattaa

SEQ ID NO: 494143 - DNA, 19 bp, Mus musculus
  siRNA target sequence for Atp10a (NM_009728.1,4393-4411).
gtatgtcctggggattcta

SEQ ID NO: 494144 - DNA, 19 bp, Mus musculus
  siRNA target sequence for Atp10a (NM_009728.1,4533-4551).
gcaattgtctggaagtagt

SEQ ID NO: 494145 - DNA, 19 bp, Mus musculus
  siRNA target sequence for Atp10a (NM_009728.1,4541-4559).
ctggaagtagtttacagat

SEQ ID NO: 494146 - DNA, 19 bp, Mus musculus
  siRNA target sequence for Atp10a (NM_009728.1,4547-4565).
gtagtttacagatggataa

SEQ ID NO: 494147 - DNA, 19 bp, Mus musculus
  siRNA target sequence for Atp10a (NM_009728.1,4550-4568).
gtttacagatggataagca

SEQ ID NO: 494148 - DNA, 19 bp, Mus musculus
  siRNA target sequence for Atp10a (NM_009728.1,4630-4648).
caagtcacgggctacttat

SEQ ID NO: 494149 - DNA, 19 bp, Mus musculus
  siRNA target sequence for Atp10d (NM_153389.2,423-441).
ccaccttcagtgcttcaaa

SEQ ID NO: 494150 - DNA, 19 bp, Mus musculus
  siRNA target sequence for Atp10d (NM_153389.2,442-460).
gatgagtacgaaaggtttt

SEQ ID NO: 494151 - DNA, 19 bp, Mus musculus
  siRNA target sequence for Atp10d (NM_153389.2,513-531).
ctttgtgccaagaaactta

SEQ ID NO: 494152 - DNA, 19 bp, Mus musculus
  siRNA target sequence for Atp10d (NM_153389.2,548-566).
gggctgccaatttatattt

SEQ ID NO: 494153 - DNA, 19 bp, Mus musculus
  siRNA target sequence for Atp10d (NM_153389.2,639-657).
ggtggtggtcctcacaatt

SEQ ID NO: 494154 - DNA, 19 bp, Mus musculus
  siRNA target sequence for Atp10d (NM_153389.2,642-660).
ggtggtcctcacaattatt

SEQ ID NO: 494155 - DNA, 19 bp, Mus musculus
  siRNA target sequence for Atp10d (NM_153389.2,717-735).
caacttaataaccaaagtt

SEQ ID NO: 494156 - DNA, 19 bp, Mus musculus
  siRNA target sequence for Atp10d (NM_153389.2,802-820).
cgcctgtcctgcaatgaga

SEQ ID NO: 494157 - DNA, 19 bp, Mus musculus
  siRNA target sequence for Atp10d (NM_153389.2,803-821).
gcctgtcctgcaatgagat

SEQ ID NO: 494158 - DNA, 19 bp, Mus musculus
  siRNA target sequence for Atp10d (NM_153389.2,972-990).
gttctccagcaggatagaa

SEQ ID NO: 494159 - DNA, 19 bp, Mus musculus
  siRNA target sequence for Atp10d (NM_153389.2,977-995).
ccagcaggatagaatgtga

SEQ ID NO: 494160 - DNA, 19 bp, Mus musculus
  siRNA target sequence for Atp10d (NM_153389.2,1059-1077).
gggcctcagcaaagagaat

SEQ ID NO: 494161 - DNA, 19 bp, Mus musculus
  siRNA target sequence for Atp10d (NM_153389.2,1062-1080).
cctcagcaaagagaattta

SEQ ID NO: 494162 - DNA, 19 bp, Mus musculus
  siRNA target sequence for Atp10d (NM_153389.2,1063-1081).
ctcagcaaagagaatttat

SEQ ID NO: 494163 - DNA, 19 bp, Mus musculus
  siRNA target sequence for Atp10d (NM_153389.2,1180-1198).
cggtataagcgcagtaagt

SEQ ID NO: 494164 - DNA, 19 bp, Mus musculus
  siRNA target sequence for Atp10d (NM_153389.2,1181-1199).
ggtataagcgcagtaagtt

SEQ ID NO: 494165 - DNA, 19 bp, Mus musculus
  siRNA target sequence for Atp10d (NM_153389.2,1182-1200).
gtataagcgcagtaagtta

SEQ ID NO: 494166 - DNA, 19 bp, Mus musculus
  siRNA target sequence for Atp10d (NM_153389.2,1245-1263).
gattgtcatgtgcttaact

SEQ ID NO: 494167 - DNA, 19 bp, Mus musculus
  siRNA target sequence for Atp10d (NM_153389.2,1352-1370).
ccgtgctgactggattcta

SEQ ID NO: 494168 - DNA, 19 bp, Mus musculus
  siRNA target sequence for Atp10d (NM_153389.2,1443-1461).
gaagcttgggcagatctat

SEQ ID NO: 494169 - DNA, 19 bp, Mus musculus
  siRNA target sequence for Atp10d (NM_153389.2,1464-1482).
catccagagcgatgtagat

SEQ ID NO: 494170 - DNA, 19 bp, Mus musculus
  siRNA target sequence for Atp10d (NM_153389.2,1472-1490).
gcgatgtagatttctacaa

SEQ ID NO: 494171 - DNA, 19 bp, Mus musculus
  siRNA target sequence for Atp10d (NM_153389.2,1480-1498).
gatttctacaacgagaaaa

SEQ ID NO: 494172 - DNA, 19 bp, Mus musculus
  siRNA target sequence for Atp10d (NM_153389.2,1540-1558).
gaccttgggcagattcaat

SEQ ID NO: 494173 - DNA, 19 bp, Mus musculus
  siRNA target sequence for Atp10d (NM_153389.2,1619-1637).
gtgtagcagggtttgacta

SEQ ID NO: 494174 - DNA, 19 bp, Mus musculus
  siRNA target sequence for Atp10d (NM_153389.2,1814-1832).
gcacctctgctgtaggaaa

SEQ ID NO: 494175 - DNA, 19 bp, Mus musculus
  siRNA target sequence for Atp10d (NM_153389.2,1880-1898).
gtagtcccatggaaacaga

SEQ ID NO: 494176 - DNA, 19 bp, Mus musculus
  siRNA target sequence for Atp10d (NM_153389.2,1903-1921).
gtaccagataccagacttt

SEQ ID NO: 494177 - DNA, 19 bp, Mus musculus
  siRNA target sequence for Atp10d (NM_153389.2,1982-2000).
gttcaccgctggagacttt

SEQ ID NO: 494178 - DNA, 19 bp, Mus musculus
  siRNA target sequence for Atp10d (NM_153389.2,1985-2003).
caccgctggagactttgta

SEQ ID NO: 494179 - DNA, 19 bp, Mus musculus
  siRNA target sequence for Atp10d (NM_153389.2,2004-2022).
catcatggacttctttatt

SEQ ID NO: 494180 - DNA, 19 bp, Mus musculus
  siRNA target sequence for Atp10d (NM_153389.2,2007-2025).
catggacttctttattgca

SEQ ID NO: 494181 - DNA, 19 bp, Mus musculus
  siRNA target sequence for Atp10d (NM_153389.2,2098-2116).
ggtggaatgcccatcaagt

SEQ ID NO: 494182 - DNA, 19 bp, Mus musculus
  siRNA target sequence for Atp10d (NM_153389.2,2151-2169).
gtccgtccggagatcaagt

SEQ ID NO: 494183 - DNA, 19 bp, Mus musculus
  siRNA target sequence for Atp10d (NM_153389.2,2154-2172).
cgtccggagatcaagttca

SEQ ID NO: 494184 - DNA, 19 bp, Mus musculus
  siRNA target sequence for Atp10d (NM_153389.2,2179-2197).
cttgccagtgggaaggatt

SEQ ID NO: 494185 - DNA, 19 bp, Mus musculus
  siRNA target sequence for Atp10d (NM_153389.2,2182-2200).
gccagtgggaaggattcat

SEQ ID NO: 494186 - DNA, 19 bp, Mus musculus
  siRNA target sequence for Atp10d (NM_153389.2,2277-2295).
cgagtcttcccaaatggat

SEQ ID NO: 494187 - DNA, 19 bp, Mus musculus
  siRNA target sequence for Atp10d (NM_153389.2,2427-2445).
ggcggagagtccagatgaa

SEQ ID NO: 494188 - DNA, 19 bp, Mus musculus
  siRNA target sequence for Atp10d (NM_153389.2,2471-2489).
cttaccgttgcactttaca

SEQ ID NO: 494189 - DNA, 19 bp, Mus musculus
  siRNA target sequence for Atp10d (NM_153389.2,2527-2545).
gctttgggctcattaacat

SEQ ID NO: 494190 - DNA, 19 bp, Mus musculus
  siRNA target sequence for Atp10d (NM_153389.2,2557-2575).
cacattctgccctttgact

SEQ ID NO: 494191 - DNA, 19 bp, Mus musculus
  siRNA target sequence for Atp10d (NM_153389.2,2604-2622).
caggcatcctctttccaaa

SEQ ID NO: 494192 - DNA, 19 bp, Mus musculus
  siRNA target sequence for Atp10d (NM_153389.2,2623-2641).
caagtcgtggtgtatacaa

SEQ ID NO: 494193 - DNA, 19 bp, Mus musculus
  siRNA target sequence for Atp10d (NM_153389.2,2639-2657).
caaaaggcgctgattctgt

SEQ ID NO: 494194 - DNA, 19 bp, Mus musculus
  siRNA target sequence for Atp10d (NM_153389.2,2644-2662).
ggcgctgattctgttatca

SEQ ID NO: 494195 - DNA, 19 bp, Mus musculus
  siRNA target sequence for Atp10d (NM_153389.2,2645-2663).
gcgctgattctgttatcat

SEQ ID NO: 494196 - DNA, 19 bp, Mus musculus
  siRNA target sequence for Atp10d (NM_153389.2,2761-2779).
cgagggctgcgcactctat

SEQ ID NO: 494197 - DNA, 19 bp, Mus musculus
  siRNA target sequence for Atp10d (NM_153389.2,2765-2783).
ggctgcgcactctatgtgt

SEQ ID NO: 494198 - DNA, 19 bp, Mus musculus
  siRNA target sequence for Atp10d (NM_153389.2,2766-2784).
gctgcgcactctatgtgta

SEQ ID NO: 494199 - DNA, 19 bp, Mus musculus
  siRNA target sequence for Atp10d (NM_153389.2,2771-2789).
gcactctatgtgtagcaaa

SEQ ID NO: 494200 - DNA, 19 bp, Mus musculus
  siRNA target sequence for Atp10d (NM_153389.2,2822-2840).
ggctgaggaatcactttct

SEQ ID NO: 494201 - DNA, 19 bp, Mus musculus
  siRNA target sequence for Atp10d (NM_153389.2,2823-2841).
gctgaggaatcactttcta

SEQ ID NO: 494202 - DNA, 19 bp, Mus musculus
  siRNA target sequence for Atp10d (NM_153389.2,2868-2886).
ggaactgctagttgaatct

SEQ ID NO: 494203 - DNA, 19 bp, Mus musculus
  siRNA target sequence for Atp10d (NM_153389.2,2885-2903).
ctgccatgagactagaaaa

SEQ ID NO: 494204 - DNA, 19 bp, Mus musculus
  siRNA target sequence for Atp10d (NM_153389.2,2887-2905).
gccatgagactagaaaaca

SEQ ID NO: 494205 - DNA, 19 bp, Mus musculus
  siRNA target sequence for Atp10d (NM_153389.2,2888-2906).
ccatgagactagaaaacaa

SEQ ID NO: 494206 - DNA, 19 bp, Mus musculus
  siRNA target sequence for Atp10d (NM_153389.2,2952-2970).
gggggtccctgagtctata

SEQ ID NO: 494207 - DNA, 19 bp, Mus musculus
  siRNA target sequence for Atp10d (NM_153389.2,3039-3057).
catagcttatgcatgcaaa

SEQ ID NO: 494208 - DNA, 19 bp, Mus musculus
  siRNA target sequence for Atp10d (NM_153389.2,3117-3135).
gatgctgatgagtgcaatt

SEQ ID NO: 494209 - DNA, 19 bp, Mus musculus
  siRNA target sequence for Atp10d (NM_153389.2,3128-3146).
gtgcaattttggaagaact

SEQ ID NO: 494210 - DNA, 19 bp, Mus musculus
  siRNA target sequence for Atp10d (NM_153389.2,3227-3245).
gacgtgcgggacttgttat

SEQ ID NO: 494211 - DNA, 19 bp, Mus musculus
  siRNA target sequence for Atp10d (NM_153389.2,3229-3247).
cgtgcgggacttgttatca

SEQ ID NO: 494212 - DNA, 19 bp, Mus musculus
  siRNA target sequence for Atp10d (NM_153389.2,3359-3377).
gtgaggtggtgaaattggt

SEQ ID NO: 494213 - DNA, 19 bp, Mus musculus
  siRNA target sequence for Atp10d (NM_153389.2,3572-3590).
cccggctctccaacatgat

SEQ ID NO: 494214 - DNA, 19 bp, Mus musculus
  siRNA target sequence for Atp10d (NM_153389.2,3573-3591).
ccggctctccaacatgatt

SEQ ID NO: 494215 - DNA, 19 bp, Mus musculus
  siRNA target sequence for Atp10d (NM_153389.2,3609-3627).
gaatgtggcctatgtgaat

SEQ ID NO: 494216 - DNA, 19 bp, Mus musculus
  siRNA target sequence for Atp10d (NM_153389.2,3655-3673).
gggttttcaggaacatcta

SEQ ID NO: 494217 - DNA, 19 bp, Mus musculus
  siRNA target sequence for Atp10d (NM_153389.2,3740-3758).
gcgttttggagaaagatgt

SEQ ID NO: 494218 - DNA, 19 bp, Mus musculus
  siRNA target sequence for Atp10d (NM_153389.2,3953-3971).
cggctctgttcatcattct

SEQ ID NO: 494219 - DNA, 19 bp, Mus musculus
  siRNA target sequence for Atp10d (NM_153389.2,4032-4050).
gagcatcttgtcctacttt

SEQ ID NO: 494220 - DNA, 19 bp, Mus musculus
  siRNA target sequence for Atp10d (NM_153389.2,4034-4052).
gcatcttgtcctacttttt

SEQ ID NO: 494221 - DNA, 19 bp, Mus musculus
  siRNA target sequence for Atp10d (NM_153389.2,4179-4197).
gctcctgccgaggtttctt

SEQ ID NO: 494222 - DNA, 19 bp, Mus musculus
  siRNA target sequence for Atp10d (NM_153389.2,4180-4198).
ctcctgccgaggtttcttt

SEQ ID NO: 494223 - DNA, 19 bp, Mus musculus
  siRNA target sequence for Atp10d (NM_153389.2,4210-4228).
cagggatccgtgtttccat

SEQ ID NO: 494224 - DNA, 19 bp, Mus musculus
  siRNA target sequence for Atp10d (NM_153389.2,4382-4400).
cttctgctgtccttgcaat

SEQ ID NO: 494225 - DNA, 19 bp, Mus musculus
  siRNA target sequence for Atp11a (NM_015804.1,206-224).
cctacattccacagagata

SEQ ID NO: 494226 - DNA, 19 bp, Mus musculus
  siRNA target sequence for Atp11a (NM_015804.1,217-235).
cagagataccccgacaata

SEQ ID NO: 494227 - DNA, 19 bp, Mus musculus
  siRNA target sequence for Atp11a (NM_015804.1,219-237).
gagataccccgacaataga

SEQ ID NO: 494228 - DNA, 19 bp, Mus musculus
  siRNA target sequence for Atp11a (NM_015804.1,221-239).
gataccccgacaatagaat

SEQ ID NO: 494229 - DNA, 19 bp, Mus musculus
  siRNA target sequence for Atp11a (NM_015804.1,241-259).
gtctcctccaagtacacat

SEQ ID NO: 494230 - DNA, 19 bp, Mus musculus
  siRNA target sequence for Atp11a (NM_015804.1,377-395).
gcgggctcccactcttctt

SEQ ID NO: 494231 - DNA, 19 bp, Mus musculus
  siRNA target sequence for Atp11a (NM_015804.1,473-491).
gtcccgtgcactttatcca

SEQ ID NO: 494232 - DNA, 19 bp, Mus musculus
  siRNA target sequence for Atp11a (NM_015804.1,642-660).
cggagagtcgagccataaa

SEQ ID NO: 494233 - DNA, 19 bp, Mus musculus
  siRNA target sequence for Atp11a (NM_015804.1,843-861).
cagaggagccacactcaaa

SEQ ID NO: 494234 - DNA, 19 bp, Mus musculus
  siRNA target sequence for Atp11a (NM_015804.1,950-968).
ctgctgtggaaaagtcaat

SEQ ID NO: 494235 - DNA, 19 bp, Mus musculus
  siRNA target sequence for Atp11a (NM_015804.1,1094-1112).
ccgagcgccagaggaattt

SEQ ID NO: 494236 - DNA, 19 bp, Mus musculus
  siRNA target sequence for Atp11a (NM_015804.1,1229-1247).
cctgggatgaggacatgtt

SEQ ID NO: 494237 - DNA, 19 bp, Mus musculus
  siRNA target sequence for Atp11a (NM_015804.1,1267-1285).
gggcctctggtcaacacat

SEQ ID NO: 494238 - DNA, 19 bp, Mus musculus
  siRNA target sequence for Atp11a (NM_015804.1,1343-1361).
cgcttacagagaacaacat

SEQ ID NO: 494239 - DNA, 19 bp, Mus musculus
  siRNA target sequence for Atp11a (NM_015804.1,1379-1397).
gcatcgagggccatgtcta

SEQ ID NO: 494240 - DNA, 19 bp, Mus musculus
  siRNA target sequence for Atp11a (NM_015804.1,1444-1462).
ggcattgacatgatcgatt

SEQ ID NO: 494241 - DNA, 19 bp, Mus musculus
  siRNA target sequence for Atp11a (NM_015804.1,1523-1541).
gccacactgtccaagtgaa

SEQ ID NO: 494242 - DNA, 19 bp, Mus musculus
  siRNA target sequence for Atp11a (NM_015804.1,1524-1542).
ccacactgtccaagtgaaa

SEQ ID NO: 494243 - DNA, 19 bp, Mus musculus
  siRNA target sequence for Atp11a (NM_015804.1,1564-1582).
gtcgatggtccccagaaat

SEQ ID NO: 494244 - DNA, 19 bp, Mus musculus
  siRNA target sequence for Atp11a (NM_015804.1,1676-1694).
ggctgaaggacaattacat

SEQ ID NO: 494245 - DNA, 19 bp, Mus musculus
  siRNA target sequence for Atp11a (NM_015804.1,1683-1701).
ggacaattacatggaaata

SEQ ID NO: 494246 - DNA, 19 bp, Mus musculus
  siRNA target sequence for Atp11a (NM_015804.1,1793-1811).
ctactacaggagaaattta

SEQ ID NO: 494247 - DNA, 19 bp, Mus musculus
  siRNA target sequence for Atp11a (NM_015804.1,2029-2047).
gcctacgagcagatagaga

SEQ ID NO: 494248 - DNA, 19 bp, Mus musculus
  siRNA target sequence for Atp11a (NM_015804.1,2030-2048).
cctacgagcagatagagaa

SEQ ID NO: 494249 - DNA, 19 bp, Mus musculus
  siRNA target sequence for Atp11a (NM_015804.1,2339-2357).
ggctctccacagatatgca

SEQ ID NO: 494250 - DNA, 19 bp, Mus musculus
  siRNA target sequence for Atp11a (NM_015804.1,2350-2368).
gatatgcacgactatggtt

SEQ ID NO: 494251 - DNA, 19 bp, Mus musculus
  siRNA target sequence for Atp11a (NM_015804.1,2386-2404).
gcactgtccttgataatga

SEQ ID NO: 494252 - DNA, 19 bp, Mus musculus
  siRNA target sequence for Atp11a (NM_015804.1,2511-2529).
ggcccagatcgttaagtta

SEQ ID NO: 494253 - DNA, 19 bp, Mus musculus
  siRNA target sequence for Atp11a (NM_015804.1,2512-2530).
gcccagatcgttaagttaa

SEQ ID NO: 494254 - DNA, 19 bp, Mus musculus
  siRNA target sequence for Atp11a (NM_015804.1,2513-2531).
cccagatcgttaagttaat

SEQ ID NO: 494255 - DNA, 19 bp, Mus musculus
  siRNA target sequence for Atp11a (NM_015804.1,2515-2533).
cagatcgttaagttaatca

SEQ ID NO: 494256 - DNA, 19 bp, Mus musculus
  siRNA target sequence for Atp11a (NM_015804.1,2520-2538).
cgttaagttaatcaaattt

SEQ ID NO: 494257 - DNA, 19 bp, Mus musculus
  siRNA target sequence for Atp11a (NM_015804.1,2544-2562).
ggagcatcctattacctta

SEQ ID NO: 494258 - DNA, 19 bp, Mus musculus
  siRNA target sequence for Atp11a (NM_015804.1,2548-2566).
catcctattaccttagcaa

SEQ ID NO: 494259 - DNA, 19 bp, Mus musculus
  siRNA target sequence for Atp11a (NM_015804.1,2664-2682).
ctatgcaatacccaagttt

SEQ ID NO: 494260 - DNA, 19 bp, Mus musculus
  siRNA target sequence for Atp11a (NM_015804.1,2669-2687).
caatacccaagtttaaaca

SEQ ID NO: 494261 - DNA, 19 bp, Mus musculus
  siRNA target sequence for Atp11a (NM_015804.1,2674-2692).
cccaagtttaaacacttaa

SEQ ID NO: 494262 - DNA, 19 bp, Mus musculus
  siRNA target sequence for Atp11a (NM_015804.1,2675-2693).
ccaagtttaaacacttaaa

SEQ ID NO: 494263 - DNA, 19 bp, Mus musculus
  siRNA target sequence for Atp11a (NM_015804.1,2694-2712).
gaagatgcttcttgttcat

SEQ ID NO: 494264 - DNA, 19 bp, Mus musculus
  siRNA target sequence for Atp11a (NM_015804.1,2740-2758).
gagcttgtgcaatacttct

SEQ ID NO: 494265 - DNA, 19 bp, Mus musculus
  siRNA target sequence for Atp11a (NM_015804.1,2821-2839).
cagcagactttgtacgata

SEQ ID NO: 494266 - DNA, 19 bp, Mus musculus
  siRNA target sequence for Atp11a (NM_015804.1,2843-2861).
cgtatctgactctctacaa

SEQ ID NO: 494267 - DNA, 19 bp, Mus musculus
  siRNA target sequence for Atp11a (NM_015804.1,2943-2961).
gaccctctacagagacatt

SEQ ID NO: 494268 - DNA, 19 bp, Mus musculus
  siRNA target sequence for Atp11a (NM_015804.1,2979-2997).
gcgctggcgggtgttcatt

SEQ ID NO: 494269 - DNA, 19 bp, Mus musculus
  siRNA target sequence for Atp11a (NM_015804.1,2980-2998).
cgctggcgggtgttcattt

SEQ ID NO: 494270 - DNA, 19 bp, Mus musculus
  siRNA target sequence for Atp11a (NM_015804.1,2981-2999).
gctggcgggtgttcattta

SEQ ID NO: 494271 - DNA, 19 bp, Mus musculus
  siRNA target sequence for Atp11a (NM_015804.1,3003-3021).
gacgtttctcggcgttttt

SEQ ID NO: 494272 - DNA, 19 bp, Mus musculus
  siRNA target sequence for Atp11a (NM_015804.1,3005-3023).
cgtttctcggcgtttttga

SEQ ID NO: 494273 - DNA, 19 bp, Mus musculus
  siRNA target sequence for Atp11a (NM_015804.1,3015-3033).
cgtttttgacgctttggta

SEQ ID NO: 494274 - DNA, 19 bp, Mus musculus
  siRNA target sequence for Atp11a (NM_015804.1,3206-3224).
gggggtcgctgctcttcta

SEQ ID NO: 494275 - DNA, 19 bp, Mus musculus
  siRNA target sequence for Atp11a (NM_015804.1,3209-3227).
ggtcgctgctcttctacat

SEQ ID NO: 494276 - DNA, 19 bp, Mus musculus
  siRNA target sequence for Atp11a (NM_015804.1,3272-3290).
gttaccagaggatgtacta

SEQ ID NO: 494277 - DNA, 19 bp, Mus musculus
  siRNA target sequence for Atp12a (NM_138652.1,416-434).
gaccacagactcagtaata

SEQ ID NO: 494278 - DNA, 19 bp, Mus musculus
  siRNA target sequence for Atp12a (NM_138652.1,418-436).
ccacagactcagtaataca

SEQ ID NO: 494279 - DNA, 19 bp, Mus musculus
  siRNA target sequence for Atp12a (NM_138652.1,421-439).
cagactcagtaatacagat

SEQ ID NO: 494280 - DNA, 19 bp, Mus musculus
  siRNA target sequence for Atp12a (NM_138652.1,423-441).
gactcagtaatacagattt

SEQ ID NO: 494281 - DNA, 19 bp, Mus musculus
  siRNA target sequence for Atp12a (NM_138652.1,527-545).
ctcacccctcccaagcaaa

SEQ ID NO: 494282 - DNA, 19 bp, Mus musculus
  siRNA target sequence for Atp12a (NM_138652.1,621-639).
gctggatcgcatatgtgat

SEQ ID NO: 494283 - DNA, 19 bp, Mus musculus
  siRNA target sequence for Atp12a (NM_138652.1,740-758).
gccaaaagtaccaacatta

SEQ ID NO: 494284 - DNA, 19 bp, Mus musculus
  siRNA target sequence for Atp12a (NM_138652.1,741-759).
ccaaaagtaccaacattat

SEQ ID NO: 494285 - DNA, 19 bp, Mus musculus
  siRNA target sequence for Atp12a (NM_138652.1,751-769).
caacattatggcaagcttt

SEQ ID NO: 494286 - DNA, 19 bp, Mus musculus
  siRNA target sequence for Atp12a (NM_138652.1,761-779).
gcaagctttagtaagatga

SEQ ID NO: 494287 - DNA, 19 bp, Mus musculus
  siRNA target sequence for Atp12a (NM_138652.1,848-866).
ggggacgttgtggagatta

SEQ ID NO: 494288 - DNA, 19 bp, Mus musculus
  siRNA target sequence for Atp12a (NM_138652.1,849-867).
gggacgttgtggagattaa

SEQ ID NO: 494289 - DNA, 19 bp, Mus musculus
  siRNA target sequence for Atp12a (NM_138652.1,850-868).
ggacgttgtggagattaaa

SEQ ID NO: 494290 - DNA, 19 bp, Mus musculus
  siRNA target sequence for Atp12a (NM_138652.1,914-932).
gggtgcaaagtagataact

SEQ ID NO: 494291 - DNA, 19 bp, Mus musculus
  siRNA target sequence for Atp12a (NM_138652.1,961-979).
ggctcggtcaactgagttt

SEQ ID NO: 494292 - DNA, 19 bp, Mus musculus
  siRNA target sequence for Atp12a (NM_138652.1,1009-1027).
cataggcttctattctaca

SEQ ID NO: 494293 - DNA, 19 bp, Mus musculus
  siRNA target sequence for Atp12a (NM_138652.1,1047-1065).
caactggcattgtcatcaa

SEQ ID NO: 494294 - DNA, 19 bp, Mus musculus
  siRNA target sequence for Atp12a (NM_138652.1,1184-1202).
gtgtccgttggcgtcattt

SEQ ID NO: 494295 - DNA, 19 bp, Mus musculus
  siRNA target sequence for Atp12a (NM_138652.1,1188-1206).
ccgttggcgtcattttctt

SEQ ID NO: 494296 - DNA, 19 bp, Mus musculus
  siRNA target sequence for Atp12a (NM_138652.1,1190-1208).
gttggcgtcattttcttca

SEQ ID NO: 494297 - DNA, 19 bp, Mus musculus
  siRNA target sequence for Atp12a (NM_138652.1,1212-1230).
ccgccgtgtgcatgaagta

SEQ ID NO: 494298 - DNA, 19 bp, Mus musculus
  siRNA target sequence for Atp12a (NM_138652.1,1295-1313).
ctggctactgtcactgtta

SEQ ID NO: 494299 - DNA, 19 bp, Mus musculus
  siRNA target sequence for Atp12a (NM_138652.1,1329-1347).
caaagcggatggctaagaa

SEQ ID NO: 494300 - DNA, 19 bp, Mus musculus
  siRNA target sequence for Atp12a (NM_138652.1,1541-1559).
gcttccttgtccaagataa

SEQ ID NO: 494301 - DNA, 19 bp, Mus musculus
  siRNA target sequence for Atp12a (NM_138652.1,1542-1560).
cttccttgtccaagataat

SEQ ID NO: 494302 - DNA, 19 bp, Mus musculus
  siRNA target sequence for Atp12a (NM_138652.1,1598-1616).
gagagtgtccccatcatga

SEQ ID NO: 494303 - DNA, 19 bp, Mus musculus
  siRNA target sequence for Atp12a (NM_138652.1,1682-1700).
gatgtgatggacattagga

SEQ ID NO: 494304 - DNA, 19 bp, Mus musculus
  siRNA target sequence for Atp12a (NM_138652.1,1947-1965).
gtttctgtcacctctactt

SEQ ID NO: 494305 - DNA, 19 bp, Mus musculus
  siRNA target sequence for Atp12a (NM_138652.1,1963-1981).
cttgccagcagataagttt

SEQ ID NO: 494306 - DNA, 19 bp, Mus musculus
  siRNA target sequence for Atp12a (NM_138652.1,1989-2007).
gctacacatttgatgtaga

SEQ ID NO: 494307 - DNA, 19 bp, Mus musculus
  siRNA target sequence for Atp12a (NM_138652.1,2000-2018).
gatgtagactccataaact

SEQ ID NO: 494308 - DNA, 19 bp, Mus musculus
  siRNA target sequence for Atp12a (NM_138652.1,2044-2062).
ggggcttctgtccatgatt

SEQ ID NO: 494309 - DNA, 19 bp, Mus musculus
  siRNA target sequence for Atp12a (NM_138652.1,2046-2064).
ggcttctgtccatgattga

SEQ ID NO: 494310 - DNA, 19 bp, Mus musculus
  siRNA target sequence for Atp12a (NM_138652.1,2084-2102).
ccagatgcggtctccaaat

SEQ ID NO: 494311 - DNA, 19 bp, Mus musculus
  siRNA target sequence for Atp12a (NM_138652.1,2170-2188).
caagagtgtaggaatcata

SEQ ID NO: 494312 - DNA, 19 bp, Mus musculus
  siRNA target sequence for Atp12a (NM_138652.1,2173-2191).
gagtgtaggaatcatatca

SEQ ID NO: 494313 - DNA, 19 bp, Mus musculus
  siRNA target sequence for Atp12a (NM_138652.1,2218-2236).
cgcaaaacgccgcaacatt

SEQ ID NO: 494314 - DNA, 19 bp, Mus musculus
  siRNA target sequence for Atp12a (NM_138652.1,2242-2260).
ggagcaagtcaacaaaaga

SEQ ID NO: 494315 - DNA, 19 bp, Mus musculus
  siRNA target sequence for Atp12a (NM_138652.1,2330-2348).
ctaatcaactaccaagaaa

SEQ ID NO: 494316 - DNA, 19 bp, Mus musculus
  siRNA target sequence for Atp12a (NM_138652.1,2367-2385).
caccccagcagaagttgat

SEQ ID NO: 494317 - DNA, 19 bp, Mus musculus
  siRNA target sequence for Atp12a (NM_138652.1,2369-2387).
ccccagcagaagttgatca

SEQ ID NO: 494318 - DNA, 19 bp, Mus musculus
  siRNA target sequence for Atp12a (NM_138652.1,2370-2388).
cccagcagaagttgatcat

SEQ ID NO: 494319 - DNA, 19 bp, Mus musculus
  siRNA target sequence for Atp12a (NM_138652.1,2430-2448).
cgggtgatggagtaaacga

SEQ ID NO: 494320 - DNA, 19 bp, Mus musculus
  siRNA target sequence for Atp12a (NM_138652.1,2468-2486).
gcagacatcgggattgcta

SEQ ID NO: 494321 - DNA, 19 bp, Mus musculus
  siRNA target sequence for Atp12a (NM_138652.1,2469-2487).
cagacatcgggattgctat

SEQ ID NO: 494322 - DNA, 19 bp, Mus musculus
  siRNA target sequence for Atp12a (NM_138652.1,2615-2633).
gcttacaccctgacaaaga

SEQ ID NO: 494323 - DNA, 19 bp, Mus musculus
  siRNA target sequence for Atp12a (NM_138652.1,2616-2634).
cttacaccctgacaaagaa

SEQ ID NO: 494324 - DNA, 19 bp, Mus musculus
  siRNA target sequence for Atp12a (NM_138652.1,2639-2657).
gctgagctctgcccttttt

SEQ ID NO: 494325 - DNA, 19 bp, Mus musculus
  siRNA target sequence for Atp12a (NM_138652.1,2645-2663).
ctctgcccttttttgatct

SEQ ID NO: 494326 - DNA, 19 bp, Mus musculus
  siRNA target sequence for Atp12a (NM_138652.1,2694-2712).
gcaccatcactatcctatt

SEQ ID NO: 494327 - DNA, 19 bp, Mus musculus
  siRNA target sequence for Atp12a (NM_138652.1,2697-2715).
ccatcactatcctattcat

SEQ ID NO: 494328 - DNA, 19 bp, Mus musculus
  siRNA target sequence for Atp12a (NM_138652.1,2772-2790).
gtgacattatgaataggaa

SEQ ID NO: 494329 - DNA, 19 bp, Mus musculus
  siRNA target sequence for Atp12a (NM_138652.1,2787-2805).
ggaaacctcgccacaagaa

SEQ ID NO: 494330 - DNA, 19 bp, Mus musculus
  siRNA target sequence for Atp12a (NM_138652.1,2828-2846).
cagctggccatctactctt

SEQ ID NO: 494331 - DNA, 19 bp, Mus musculus
  siRNA target sequence for Atp12a (NM_138652.1,2876-2894).
ggaggtttcctcgtctatt

SEQ ID NO: 494332 - DNA, 19 bp, Mus musculus
  siRNA target sequence for Atp12a (NM_138652.1,2877-2895).
gaggtttcctcgtctattt

SEQ ID NO: 494333 - DNA, 19 bp, Mus musculus
  siRNA target sequence for Atp12a (NM_138652.1,2879-2897).
ggtttcctcgtctatttca

SEQ ID NO: 494334 - DNA, 19 bp, Mus musculus
  siRNA target sequence for Atp12a (NM_138652.1,2887-2905).
cgtctatttcactgtctat

SEQ ID NO: 494335 - DNA, 19 bp, Mus musculus
  siRNA target sequence for Atp12a (NM_138652.1,2946-2964).
gggtatcatgggaaacaga

SEQ ID NO: 494336 - DNA, 19 bp, Mus musculus
  siRNA target sequence for Atp12a (NM_138652.1,3003-3021).
ggacgaggtatcagagaaa

SEQ ID NO: 494337 - DNA, 19 bp, Mus musculus
  siRNA target sequence for Atp12a (NM_138652.1,3004-3022).
gacgaggtatcagagaaaa

SEQ ID NO: 494338 - DNA, 19 bp, Mus musculus
  siRNA target sequence for Atp12a (NM_138652.1,3006-3024).
cgaggtatcagagaaaata

SEQ ID NO: 494339 - DNA, 19 bp, Mus musculus
  siRNA target sequence for Atp12a (NM_138652.1,3036-3054).
caggctcaacggctttctt

SEQ ID NO: 494340 - DNA, 19 bp, Mus musculus
  siRNA target sequence for Atp12a (NM_138652.1,3059-3077).
gccatcatggtccaacaaa

SEQ ID NO: 494341 - DNA, 19 bp, Mus musculus
  siRNA target sequence for Atp12a (NM_138652.1,3060-3078).
ccatcatggtccaacaaat

SEQ ID NO: 494342 - DNA, 19 bp, Mus musculus
  siRNA target sequence for Atp12a (NM_138652.1,3061-3079).
catcatggtccaacaaatt

SEQ ID NO: 494343 - DNA, 19 bp, Mus musculus
  siRNA target sequence for Atp12a (NM_138652.1,3064-3082).
catggtccaacaaattgca

SEQ ID NO: 494344 - DNA, 19 bp, Mus musculus
  siRNA target sequence for Atp12a (NM_138652.1,3212-3230).
gtcacagctctgagcttta

SEQ ID NO: 494345 - DNA, 19 bp, Mus musculus
  siRNA target sequence for Atp12a (NM_138652.1,3261-3279).
ctgtcccgcatgccatttt

SEQ ID NO: 494346 - DNA, 19 bp, Mus musculus
  siRNA target sequence for Atp12a (NM_138652.1,3263-3281).
gtcccgcatgccattttga

SEQ ID NO: 494347 - DNA, 19 bp, Mus musculus
  siRNA target sequence for Atp12a (NM_138652.1,3265-3283).
cccgcatgccattttgatt

SEQ ID NO: 494348 - DNA, 19 bp, Mus musculus
  siRNA target sequence for Atp12a (NM_138652.1,3266-3284).
ccgcatgccattttgattt

SEQ ID NO: 494349 - DNA, 19 bp, Mus musculus
  siRNA target sequence for Atp12a (NM_138652.1,3293-3311).
gacgagatgcggaagttgt

SEQ ID NO: 494350 - DNA, 19 bp, Mus musculus
  siRNA target sequence for Atp12a (NM_138652.1,3333-3351).
gctggtgggacaagaacat

SEQ ID NO: 494351 - DNA, 19 bp, Mus musculus
  siRNA target sequence for Atp12a (NM_138652.1,3336-3354).
ggtgggacaagaacatgta

SEQ ID NO: 494352 - DNA, 19 bp, Mus musculus
  siRNA target sequence for Atp12a (NM_138652.1,3337-3355).
gtgggacaagaacatgtat

SEQ ID NO: 494353 - DNA, 19 bp, Mus musculus
  siRNA target sequence for Atp12a (NM_138652.1,3339-3357).
gggacaagaacatgtatta

SEQ ID NO: 494354 - DNA, 19 bp, Mus musculus
  siRNA target sequence for Atp12a (NM_138652.1,3340-3358).
ggacaagaacatgtattat

SEQ ID NO: 494355 - DNA, 19 bp, Mus musculus
  siRNA target sequence for Atp12a (NM_138652.1,3341-3359).
gacaagaacatgtattatt

SEQ ID NO: 494356 - DNA, 19 bp, Mus musculus
  siRNA target sequence for Atp1a1 (NM_144900.1,263-281).
gggttggacgagacaagta

SEQ ID NO: 494357 - DNA, 19 bp, Mus musculus
  siRNA target sequence for Atp1a1 (NM_144900.1,369-387).
gtctatggacgaccataaa

SEQ ID NO: 494358 - DNA, 19 bp, Mus musculus
  siRNA target sequence for Atp1a1 (NM_144900.1,371-389).
ctatggacgaccataaact

SEQ ID NO: 494359 - DNA, 19 bp, Mus musculus
  siRNA target sequence for Atp1a1 (NM_144900.1,397-415).
gatgaactccatcgtaaat

SEQ ID NO: 494360 - DNA, 19 bp, Mus musculus
  siRNA target sequence for Atp1a1 (NM_144900.1,409-427).
cgtaaatacggaacagatt

SEQ ID NO: 494361 - DNA, 19 bp, Mus musculus
  siRNA target sequence for Atp1a1 (NM_144900.1,424-442).
gatttgagccgaggattaa

SEQ ID NO: 494362 - DNA, 19 bp, Mus musculus
  siRNA target sequence for Atp1a1 (NM_144900.1,509-527).
ctcccgaatgggtgaaatt

SEQ ID NO: 494363 - DNA, 19 bp, Mus musculus
  siRNA target sequence for Atp1a1 (NM_144900.1,511-529).
cccgaatgggtgaaattct

SEQ ID NO: 494364 - DNA, 19 bp, Mus musculus
  siRNA target sequence for Atp1a1 (NM_144900.1,547-565).
ggcttttccatgttactgt

SEQ ID NO: 494365 - DNA, 19 bp, Mus musculus
  siRNA target sequence for Atp1a1 (NM_144900.1,660-678).
ctctgctgtagtcatcata

SEQ ID NO: 494366 - DNA, 19 bp, Mus musculus
  siRNA target sequence for Atp1a1 (NM_144900.1,680-698).
ctggctgtttctcctatta

SEQ ID NO: 494367 - DNA, 19 bp, Mus musculus
  siRNA target sequence for Atp1a1 (NM_144900.1,683-701).
gctgtttctcctattatca

SEQ ID NO: 494368 - DNA, 19 bp, Mus musculus
  siRNA target sequence for Atp1a1 (NM_144900.1,754-772).
caagcccttgtgattcgaa

SEQ ID NO: 494369 - DNA, 19 bp, Mus musculus
  siRNA target sequence for Atp1a1 (NM_144900.1,843-861).
ccggatccctgctgatctt

SEQ ID NO: 494370 - DNA, 19 bp, Mus musculus
  siRNA target sequence for Atp1a1 (NM_144900.1,844-862).
cggatccctgctgatctta

SEQ ID NO: 494371 - DNA, 19 bp, Mus musculus
  siRNA target sequence for Atp1a1 (NM_144900.1,931-949).
cggtccccggatttcacaa

SEQ ID NO: 494372 - DNA, 19 bp, Mus musculus
  siRNA target sequence for Atp1a1 (NM_144900.1,1097-1115).
cccccattgctgaagagat

SEQ ID NO: 494373 - DNA, 19 bp, Mus musculus
  siRNA target sequence for Atp1a1 (NM_144900.1,1300-1318).
cgcatggcgaggaagaact

SEQ ID NO: 494374 - DNA, 19 bp, Mus musculus
  siRNA target sequence for Atp1a1 (NM_144900.1,1506-1524).
gttcgctctgtccagaatt

SEQ ID NO: 494375 - DNA, 19 bp, Mus musculus
  siRNA target sequence for Atp1a1 (NM_144900.1,1509-1527).
cgctctgtccagaattgct

SEQ ID NO: 494376 - DNA, 19 bp, Mus musculus
  siRNA target sequence for Atp1a1 (NM_144900.1,1533-1551).
ctgtaacagggcagtgttt

SEQ ID NO: 494377 - DNA, 19 bp, Mus musculus
  siRNA target sequence for Atp1a1 (NM_144900.1,1535-1553).
gtaacagggcagtgtttca

SEQ ID NO: 494378 - DNA, 19 bp, Mus musculus
  siRNA target sequence for Atp1a1 (NM_144900.1,1607-1625).
ctgagtcggcgctcttaaa

SEQ ID NO: 494379 - DNA, 19 bp, Mus musculus
  siRNA target sequence for Atp1a1 (NM_144900.1,1609-1627).
gagtcggcgctcttaaagt

SEQ ID NO: 494380 - DNA, 19 bp, Mus musculus
  siRNA target sequence for Atp1a1 (NM_144900.1,1754-1772).
ccaaacacctgctagtgat

SEQ ID NO: 494381 - DNA, 19 bp, Mus musculus
  siRNA target sequence for Atp1a1 (NM_144900.1,1898-1916).
gagaacgtgtgctaggttt

SEQ ID NO: 494382 - DNA, 19 bp, Mus musculus
  siRNA target sequence for Atp1a1 (NM_144900.1,2078-2096).
ctgggattaaggtcatcat

SEQ ID NO: 494383 - DNA, 19 bp, Mus musculus
  siRNA target sequence for Atp1a1 (NM_144900.1,2139-2157).
gggggtaggcattatctca

SEQ ID NO: 494384 - DNA, 19 bp, Mus musculus
  siRNA target sequence for Atp1a1 (NM_144900.1,3007-3025).
catacagcgttctttgtca

SEQ ID NO: 494385 - DNA, 19 bp, Mus musculus
  siRNA target sequence for Atp1a1 (NM_144900.1,3177-3195).
ggcagcccttaggatgtat

SEQ ID NO: 494386 - DNA, 19 bp, Mus musculus
  siRNA target sequence for Atp1a1 (NM_144900.1,3259-3277).
gaggtgcggaagctcatta

SEQ ID NO: 494387 - DNA, 19 bp, Mus musculus
  siRNA target sequence for Atp1a1 (NM_144900.1,3262-3280).
gtgcggaagctcattatca

SEQ ID NO: 494388 - DNA, 19 bp, Mus musculus
  siRNA target sequence for Atp1a2 (NM_178405.2,297-315).
ggacattctggctagagat

SEQ ID NO: 494389 - DNA, 19 bp, Mus musculus
  siRNA target sequence for Atp1a2 (NM_178405.2,411-429).
ggcactcctctgcttctta

SEQ ID NO: 494390 - DNA, 19 bp, Mus musculus
  siRNA target sequence for Atp1a2 (NM_178405.2,492-510).
cgtgctagcggctgtagtt

SEQ ID NO: 494391 - DNA, 19 bp, Mus musculus
  siRNA target sequence for Atp1a2 (NM_178405.2,493-511).
gtgctagcggctgtagtta

SEQ ID NO: 494392 - DNA, 19 bp, Mus musculus
  siRNA target sequence for Atp1a2 (NM_178405.2,694-712).
gacctccggatcatctctt

SEQ ID NO: 494393 - DNA, 19 bp, Mus musculus
  siRNA target sequence for Atp1a2 (NM_178405.2,808-826).
cgcaatatctgtttcttct

SEQ ID NO: 494394 - DNA, 19 bp, Mus musculus
  siRNA target sequence for Atp1a2 (NM_178405.2,848-866).
ctgccaggggcattgtgat

SEQ ID NO: 494395 - DNA, 19 bp, Mus musculus
  siRNA target sequence for Atp1a2 (NM_178405.2,1305-1323).
ccagtctggggccactttt

SEQ ID NO: 494396 - DNA, 19 bp, Mus musculus
  siRNA target sequence for Atp1a2 (NM_178405.2,1393-1411).
gctggacaagagaacatct

SEQ ID NO: 494397 - DNA, 19 bp, Mus musculus
  siRNA target sequence for Atp1a2 (NM_178405.2,1522-1540).
gcagaaatccccttcaact

SEQ ID NO: 494398 - DNA, 19 bp, Mus musculus
  siRNA target sequence for Atp1a2 (NM_178405.2,1683-1701).
ggagatgcaagatgctttt

SEQ ID NO: 494399 - DNA, 19 bp, Mus musculus
  siRNA target sequence for Atp1a2 (NM_178405.2,1786-1804).
cggggcttcaaatttgata

SEQ ID NO: 494400 - DNA, 19 bp, Mus musculus
  siRNA target sequence for Atp1a2 (NM_178405.2,1788-1806).
gggcttcaaatttgataca

SEQ ID NO: 494401 - DNA, 19 bp, Mus musculus
  siRNA target sequence for Atp1a2 (NM_178405.2,2135-2153).
gggaccacacggagattgt

SEQ ID NO: 494402 - DNA, 19 bp, Mus musculus
  siRNA target sequence for Atp1a2 (NM_178405.2,2137-2155).
gaccacacggagattgtct

SEQ ID NO: 494403 - DNA, 19 bp, Mus musculus
  siRNA target sequence for Atp1a2 (NM_178405.2,2539-2557).
cctgctatctcattagcat

SEQ ID NO: 494404 - DNA, 19 bp, Mus musculus
  siRNA target sequence for Atp1a2 (NM_178405.2,2540-2558).
ctgctatctcattagcata

SEQ ID NO: 494405 - DNA, 19 bp, Mus musculus
  siRNA target sequence for Atp1a2 (NM_178405.2,2620-2638).
gtgaacgagaggcttatca

SEQ ID NO: 494406 - DNA, 19 bp, Mus musculus
  siRNA target sequence for Atp1a3 (NM_144921.1,234-252).
gcacaagatgtcagtagaa

SEQ ID NO: 494407 - DNA, 19 bp, Mus musculus
  siRNA target sequence for Atp1a3 (NM_144921.1,253-271).
gaggtctgccggaaataca

SEQ ID NO: 494408 - DNA, 19 bp, Mus musculus
  siRNA target sequence for Atp1a3 (NM_144921.1,255-273).
ggtctgccggaaatacaat

SEQ ID NO: 494409 - DNA, 19 bp, Mus musculus
  siRNA target sequence for Atp1a3 (NM_144921.1,258-276).
ctgccggaaatacaatact

SEQ ID NO: 494410 - DNA, 19 bp, Mus musculus
  siRNA target sequence for Atp1a3 (NM_144921.1,288-306).
gggtctgacacacagtaaa

SEQ ID NO: 494411 - DNA, 19 bp, Mus musculus
  siRNA target sequence for Atp1a3 (NM_144921.1,362-380).
ccccagaatgggtcaagtt

SEQ ID NO: 494412 - DNA, 19 bp, Mus musculus
  siRNA target sequence for Atp1a3 (NM_144921.1,478-496).
ccttccggtgacaatctgt

SEQ ID NO: 494413 - DNA, 19 bp, Mus musculus
  siRNA target sequence for Atp1a3 (NM_144921.1,479-497).
cttccggtgacaatctgta

SEQ ID NO: 494414 - DNA, 19 bp, Mus musculus
  siRNA target sequence for Atp1a3 (NM_144921.1,514-532).
gccgcagtcgtgatcatca

SEQ ID NO: 494415 - DNA, 19 bp, Mus musculus
  siRNA target sequence for Atp1a3 (NM_144921.1,755-773).
ccctgactggcgaatctga

SEQ ID NO: 494416 - DNA, 19 bp, Mus musculus
  siRNA target sequence for Atp1a3 (NM_144921.1,1460-1478).
ccgagtctgccctgcttaa

SEQ ID NO: 494417 - DNA, 19 bp, Mus musculus
  siRNA target sequence for Atp1a3 (NM_144921.1,1493-1511).
cctcgggttccgtaaagct

SEQ ID NO: 494418 - DNA, 19 bp, Mus musculus
  siRNA target sequence for Atp1a3 (NM_144921.1,1537-1555).
gctgagattccgttcaact

SEQ ID NO: 494419 - DNA, 19 bp, Mus musculus
  siRNA target sequence for Atp1a3 (NM_144921.1,2629-2647).
gacaaactggtcaacgaaa

SEQ ID NO: 494420 - DNA, 19 bp, Mus musculus
  siRNA target sequence for Atp1a3 (NM_144921.1,2775-2793).
ggatgatcgcactgtcaat

SEQ ID NO: 494421 - DNA, 19 bp, Mus musculus
  siRNA target sequence for Atp1a3 (NM_144921.1,3219-3237).
gatgtgtccgttcttcttt

SEQ ID NO: 494422 - DNA, 19 bp, Mus musculus
  siRNA target sequence for Atp2a2 (NM_009722.1,314-332).
gatggggctccaacgaatt

SEQ ID NO: 494423 - DNA, 19 bp, Mus musculus
  siRNA target sequence for Atp2a2 (NM_009722.1,327-345).
cgaattgccggctgaagaa

SEQ ID NO: 494424 - DNA, 19 bp, Mus musculus
  siRNA target sequence for Atp2a2 (NM_009722.1,353-371).
ccttgctggaacttgtgat

SEQ ID NO: 494425 - DNA, 19 bp, Mus musculus
  siRNA target sequence for Atp2a2 (NM_009722.1,375-393).
gcagtttgaagacttacta

SEQ ID NO: 494426 - DNA, 19 bp, Mus musculus
  siRNA target sequence for Atp2a2 (NM_009722.1,408-426).
gctggcagcatgtatatct

SEQ ID NO: 494427 - DNA, 19 bp, Mus musculus
  siRNA target sequence for Atp2a2 (NM_009722.1,409-427).
ctggcagcatgtatatctt

SEQ ID NO: 494428 - DNA, 19 bp, Mus musculus
  siRNA target sequence for Atp2a2 (NM_009722.1,415-433).
gcatgtatatctttcgttt

SEQ ID NO: 494429 - DNA, 19 bp, Mus musculus
  siRNA target sequence for Atp2a2 (NM_009722.1,461-479).
cgattacagcctttgtaga

SEQ ID NO: 494430 - DNA, 19 bp, Mus musculus
  siRNA target sequence for Atp2a2 (NM_009722.1,580-598).
cctgaaatgggcaaagtgt

SEQ ID NO: 494431 - DNA, 19 bp, Mus musculus
  siRNA target sequence for Atp2a2 (NM_009722.1,611-629).
gaaagagtgtgcaacgaat

SEQ ID NO: 494432 - DNA, 19 bp, Mus musculus
  siRNA target sequence for Atp2a2 (NM_009722.1,615-633).
gagtgtgcaacgaattaaa

SEQ ID NO: 494433 - DNA, 19 bp, Mus musculus
  siRNA target sequence for Atp2a2 (NM_009722.1,619-637).
gtgcaacgaattaaagcta

SEQ ID NO: 494434 - DNA, 19 bp, Mus musculus
  siRNA target sequence for Atp2a2 (NM_009722.1,642-660).
catagttcctggtgatata

SEQ ID NO: 494435 - DNA, 19 bp, Mus musculus
  siRNA target sequence for Atp2a2 (NM_009722.1,650-668).
ctggtgatatagtggaaat

SEQ ID NO: 494436 - DNA, 19 bp, Mus musculus
  siRNA target sequence for Atp2a2 (NM_009722.1,685-703).
gttcctgctgatattagat

SEQ ID NO: 494437 - DNA, 19 bp, Mus musculus
  siRNA target sequence for Atp2a2 (NM_009722.1,688-706).
cctgctgatattagattga

SEQ ID NO: 494438 - DNA, 19 bp, Mus musculus
  siRNA target sequence for Atp2a2 (NM_009722.1,711-729).
catcaagtctacaactcta

SEQ ID NO: 494439 - DNA, 19 bp, Mus musculus
  siRNA target sequence for Atp2a2 (NM_009722.1,731-749).
gagtcgaccagtcaattct

SEQ ID NO: 494440 - DNA, 19 bp, Mus musculus
  siRNA target sequence for Atp2a2 (NM_009722.1,733-751).
gtcgaccagtcaattctta

SEQ ID NO: 494441 - DNA, 19 bp, Mus musculus
  siRNA target sequence for Atp2a2 (NM_009722.1,767-785).
ccgtcatcaagcatactga

SEQ ID NO: 494442 - DNA, 19 bp, Mus musculus
  siRNA target sequence for Atp2a2 (NM_009722.1,798-816).
cccccgagctgttaatcaa

SEQ ID NO: 494443 - DNA, 19 bp, Mus musculus
  siRNA target sequence for Atp2a2 (NM_009722.1,800-818).
cccgagctgttaatcaaga

SEQ ID NO: 494444 - DNA, 19 bp, Mus musculus
  siRNA target sequence for Atp2a2 (NM_009722.1,882-900).
ggcaactggagttaatact

SEQ ID NO: 494445 - DNA, 19 bp, Mus musculus
  siRNA target sequence for Atp2a2 (NM_009722.1,884-902).
caactggagttaatactga

SEQ ID NO: 494446 - DNA, 19 bp, Mus musculus
  siRNA target sequence for Atp2a2 (NM_009722.1,908-926).
gcaagatccgggatgaaat

SEQ ID NO: 494447 - DNA, 19 bp, Mus musculus
  siRNA target sequence for Atp2a2 (NM_009722.1,1180-1198).
cgtaggatggcaaagaaaa

SEQ ID NO: 494448 - DNA, 19 bp, Mus musculus
  siRNA target sequence for Atp2a2 (NM_009722.1,1230-1248).
gacccttggttgtacttct

SEQ ID NO: 494449 - DNA, 19 bp, Mus musculus
  siRNA target sequence for Atp2a2 (NM_009722.1,1247-1265).
ctgttatctgctcagataa

SEQ ID NO: 494450 - DNA, 19 bp, Mus musculus
  siRNA target sequence for Atp2a2 (NM_009722.1,1324-1342).
gtagaaggtgacacttgtt

SEQ ID NO: 494451 - DNA, 19 bp, Mus musculus
  siRNA target sequence for Atp2a2 (NM_009722.1,1412-1430).
cagtgaagtgccatcagta

SEQ ID NO: 494452 - DNA, 19 bp, Mus musculus
  siRNA target sequence for Atp2a2 (NM_009722.1,1474-1492).
gactctgctttggattata

SEQ ID NO: 494453 - DNA, 19 bp, Mus musculus
  siRNA target sequence for Atp2a2 (NM_009722.1,1478-1496).
ctgctttggattataatga

SEQ ID NO: 494454 - DNA, 19 bp, Mus musculus
  siRNA target sequence for Atp2a2 (NM_009722.1,1656-1674).
gttcactctggagttttca

SEQ ID NO: 494455 - DNA, 19 bp, Mus musculus
  siRNA target sequence for Atp2a2 (NM_009722.1,1673-1691).
cacgggatagaaaatcaat

SEQ ID NO: 494456 - DNA, 19 bp, Mus musculus
  siRNA target sequence for Atp2a2 (NM_009722.1,1675-1693).
cgggatagaaaatcaatgt

SEQ ID NO: 494457 - DNA, 19 bp, Mus musculus
  siRNA target sequence for Atp2a2 (NM_009722.1,1727-1745).
catccatgagcaagatgtt

SEQ ID NO: 494458 - DNA, 19 bp, Mus musculus
  siRNA target sequence for Atp2a2 (NM_009722.1,1895-1913).
ctctggccactcatgacaa

SEQ ID NO: 494459 - DNA, 19 bp, Mus musculus
  siRNA target sequence for Atp2a2 (NM_009722.1,1942-1960).
gaagactctgctaacttca

SEQ ID NO: 494460 - DNA, 19 bp, Mus musculus
  siRNA target sequence for Atp2a2 (NM_009722.1,1945-1963).
gactctgctaacttcatca

SEQ ID NO: 494461 - DNA, 19 bp, Mus musculus
  siRNA target sequence for Atp2a2 (NM_009722.1,1947-1965).
ctctgctaacttcatcaaa

SEQ ID NO: 494462 - DNA, 19 bp, Mus musculus
  siRNA target sequence for Atp2a2 (NM_009722.1,2007-2025).
ggatcctcccaggattgaa

SEQ ID NO: 494463 - DNA, 19 bp, Mus musculus
  siRNA target sequence for Atp2a2 (NM_009722.1,2170-2188).
gggcgagagtttgatgaat

SEQ ID NO: 494464 - DNA, 19 bp, Mus musculus
  siRNA target sequence for Atp2a2 (NM_009722.1,2245-2263).
gaaccttcccacaagtcta

SEQ ID NO: 494465 - DNA, 19 bp, Mus musculus
  siRNA target sequence for Atp2a2 (NM_009722.1,2274-2292).
gttccttcagtcctttgat

SEQ ID NO: 494466 - DNA, 19 bp, Mus musculus
  siRNA target sequence for Atp2a2 (NM_009722.1,2376-2394).
gactgcagtggctaagact

SEQ ID NO: 494467 - DNA, 19 bp, Mus musculus
  siRNA target sequence for Atp2a2 (NM_009722.1,2452-2470).
gaggggcgagccatctaca

SEQ ID NO: 494468 - DNA, 19 bp, Mus musculus
  siRNA target sequence for Atp2a2 (NM_009722.1,2619-2637).
cactgcgctggggttcaat

SEQ ID NO: 494469 - DNA, 19 bp, Mus musculus
  siRNA target sequence for Atp2a2 (NM_009722.1,2721-2739).
ggctattggctgttatgtt

SEQ ID NO: 494470 - DNA, 19 bp, Mus musculus
  siRNA target sequence for Atp2a2 (NM_009722.1,2811-2829).
ccagctgagtcatttccta

SEQ ID NO: 494471 - DNA, 19 bp, Mus musculus
  siRNA target sequence for Atp2a2 (NM_009722.1,2861-2879).
gagtggattgtgcaatctt

SEQ ID NO: 494472 - DNA, 19 bp, Mus musculus
  siRNA target sequence for Atp2a2 (NM_009722.1,2866-2884).
gattgtgcaatctttgagt

SEQ ID NO: 494473 - DNA, 19 bp, Mus musculus
  siRNA target sequence for Atp2a3 (NM_016745.2,429-447).
caacgcagagagtgcaatt

SEQ ID NO: 494474 - DNA, 19 bp, Mus musculus
  siRNA target sequence for Atp2a3 (NM_016745.2,589-607).
cgtctcatcgagatcaagt

SEQ ID NO: 494475 - DNA, 19 bp, Mus musculus
  siRNA target sequence for Atp2a3 (NM_016745.2,721-739).
ctattttctggcaccaata

SEQ ID NO: 494476 - DNA, 19 bp, Mus musculus
  siRNA target sequence for Atp2a3 (NM_016745.2,849-867).
gcgcaagctggatgaattt

SEQ ID NO: 494477 - DNA, 19 bp, Mus musculus
  siRNA target sequence for Atp2a3 (NM_016745.2,967-985).
cgtggtgcagtctactact

SEQ ID NO: 494478 - DNA, 19 bp, Mus musculus
  siRNA target sequence for Atp2a3 (NM_016745.2,970-988).
ggtgcagtctactacttca

SEQ ID NO: 494479 - DNA, 19 bp, Mus musculus
  siRNA target sequence for Atp2a3 (NM_016745.2,971-989).
gtgcagtctactacttcaa

SEQ ID NO: 494480 - DNA, 19 bp, Mus musculus
  siRNA target sequence for Atp2a3 (NM_016745.2,1070-1088).
gacgtatggcacgtaagaa

SEQ ID NO: 494481 - DNA, 19 bp, Mus musculus
  siRNA target sequence for Atp2a3 (NM_016745.2,1305-1323).
gcgctgtgggcagtttgat

SEQ ID NO: 494482 - DNA, 19 bp, Mus musculus
  siRNA target sequence for Atp2a3 (NM_016745.2,1649-1667).
ctcctgagagtgtaattga

SEQ ID NO: 494483 - DNA, 19 bp, Mus musculus
  siRNA target sequence for Atp2a3 (NM_016745.2,1715-1733).
ccacttccagagagcatat

SEQ ID NO: 494484 - DNA, 19 bp, Mus musculus
  siRNA target sequence for Atp2a3 (NM_016745.2,1818-1836).
ggaggacatgcatctagat

SEQ ID NO: 494485 - DNA, 19 bp, Mus musculus
  siRNA target sequence for Atp2a3 (NM_016745.2,1841-1859).
gcagccggtttgtacagta

SEQ ID NO: 494486 - DNA, 19 bp, Mus musculus
  siRNA target sequence for Atp2a3 (NM_016745.2,1881-1899).
gggctgcgtgggcatgtta

SEQ ID NO: 494487 - DNA, 19 bp, Mus musculus
  siRNA target sequence for Atp2a3 (NM_016745.2,1883-1901).
gctgcgtgggcatgttaga

SEQ ID NO: 494488 - DNA, 19 bp, Mus musculus
  siRNA target sequence for Atp2a3 (NM_016745.2,1913-1931).
cagaggtggctgcttgtat

SEQ ID NO: 494489 - DNA, 19 bp, Mus musculus
  siRNA target sequence for Atp2a3 (NM_016745.2,1917-1935).
ggtggctgcttgtatcaca

SEQ ID NO: 494490 - DNA, 19 bp, Mus musculus
  siRNA target sequence for Atp2a3 (NM_016745.2,1952-1970).
gcattcgagtggtcatgat

SEQ ID NO: 494491 - DNA, 19 bp, Mus musculus
  siRNA target sequence for Atp2a3 (NM_016745.2,2132-2150).
gagtggaacccgcacataa

SEQ ID NO: 494492 - DNA, 19 bp, Mus musculus
  siRNA target sequence for Atp2a3 (NM_016745.2,2134-2152).
gtggaacccgcacataagt

SEQ ID NO: 494493 - DNA, 19 bp, Mus musculus
  siRNA target sequence for Atp2a3 (NM_016745.2,2136-2154).
ggaacccgcacataagtct

SEQ ID NO: 494494 - DNA, 19 bp, Mus musculus
  siRNA target sequence for Atp2a3 (NM_016745.2,2164-2182).
gagaacctacagtccttta

SEQ ID NO: 494495 - DNA, 19 bp, Mus musculus
  siRNA target sequence for Atp2a3 (NM_016745.2,2166-2184).
gaacctacagtcctttaat

SEQ ID NO: 494496 - DNA, 19 bp, Mus musculus
  siRNA target sequence for Atp2a3 (NM_016745.2,2421-2439).
catcttcctcacagcaatt

SEQ ID NO: 494497 - DNA, 19 bp, Mus musculus
  siRNA target sequence for Atp2a3 (NM_016745.2,2480-2498).
gggtgaacctggtaacaga

SEQ ID NO: 494498 - DNA, 19 bp, Mus musculus
  siRNA target sequence for Atp2a3 (NM_016745.2,2594-2612).
ggctttttttccgctattt

SEQ ID NO: 494499 - DNA, 19 bp, Mus musculus
  siRNA target sequence for Atp2a3 (NM_016745.2,2604-2622).
ccgctatttggctattgga

SEQ ID NO: 494500 - DNA, 19 bp, Mus musculus
  siRNA target sequence for Atp2a3 (NM_016745.2,2752-2770).
ggcattgactgcaaggttt

SEQ ID NO: 494501 - DNA, 19 bp, Mus musculus
  siRNA target sequence for Atp2a3 (NM_016745.2,2753-2771).
gcattgactgcaaggtttt

SEQ ID NO: 494502 - DNA, 19 bp, Mus musculus
  siRNA target sequence for Atp2a3 (NM_016745.2,2754-2772).
cattgactgcaaggttttt

SEQ ID NO: 494503 - DNA, 19 bp, Mus musculus
  siRNA target sequence for Atp2a3 (NM_016745.2,2758-2776).
gactgcaaggtttttgagt

SEQ ID NO: 494504 - DNA, 19 bp, Mus musculus
  siRNA target sequence for Atp2a3 (NM_016745.2,2806-2824).
gtgcttgtgaccattgaaa

SEQ ID NO: 494505 - DNA, 19 bp, Mus musculus
  siRNA target sequence for Atp2a3 (NM_016745.2,2916-2934).
gtccatggctctgcatttt

SEQ ID NO: 494506 - DNA, 19 bp, Mus musculus
  siRNA target sequence for Atp2a3 (NM_016745.2,3039-3057).
cgatgaggccctcaagtat

SEQ ID NO: 494507 - DNA, 19 bp, Mus musculus
  siRNA target sequence for Atp2a3 (NM_016745.2,3079-3097).
ggtgttctcgggacattta

SEQ ID NO: 494508 - DNA, 19 bp, Mus musculus
  siRNA target sequence for Atp2a3 (NM_016745.2,3080-3098).
gtgttctcgggacatttat

SEQ ID NO: 494509 - DNA, 19 bp, Mus musculus
  siRNA target sequence for Atp2a3 (NM_016745.2,3139-3157).
ccataccacaccggaaaaa

SEQ ID NO: 494510 - DNA, 19 bp, Mus musculus
  siRNA target sequence for Atp2a3 (NM_016745.2,3140-3158).
cataccacaccggaaaaaa

SEQ ID NO: 494511 - DNA, 19 bp, Mus musculus
  siRNA target sequence for Atp2b2 (NM_009723.1,637-655).
caaaacctcgcctgttgaa

SEQ ID NO: 494512 - DNA, 19 bp, Mus musculus
  siRNA target sequence for Atp2b2 (NM_009723.1,643-661).
ctcgcctgttgaaggttta

SEQ ID NO: 494513 - DNA, 19 bp, Mus musculus
  siRNA target sequence for Atp2b2 (NM_009723.1,695-713).
cagatttttgggcaaaact

SEQ ID NO: 494514 - DNA, 19 bp, Mus musculus
  siRNA target sequence for Atp2b2 (NM_009723.1,764-782).
ctacaggacgtgacactta

SEQ ID NO: 494515 - DNA, 19 bp, Mus musculus
  siRNA target sequence for Atp2b2 (NM_009723.1,1581-1599).
ccttcgtggtcaacaagaa

SEQ ID NO: 494516 - DNA, 19 bp, Mus musculus
  siRNA target sequence for Atp2b2 (NM_009723.1,1897-1915).
cgatcccagctccatcaat

SEQ ID NO: 494517 - DNA, 19 bp, Mus musculus
  siRNA target sequence for Atp2b2 (NM_009723.1,2271-2289).
cccgagacagggatgagat

SEQ ID NO: 494518 - DNA, 19 bp, Mus musculus
  siRNA target sequence for Atp2b2 (NM_009723.1,2383-2401).
ggacaatgagaatgacatt

SEQ ID NO: 494519 - DNA, 19 bp, Mus musculus
  siRNA target sequence for Atp2b2 (NM_009723.1,2547-2565).
ccatcaagtgtggcattat

SEQ ID NO: 494520 - DNA, 19 bp, Mus musculus
  siRNA target sequence for Atp2b2 (NM_009723.1,2648-2666).
gagcggattgacaagatct

SEQ ID NO: 494521 - DNA, 19 bp, Mus musculus
  siRNA target sequence for Atp2b2 (NM_009723.1,2694-2712).
cctcgcccacggataagca

SEQ ID NO: 494522 - DNA, 19 bp, Mus musculus
  siRNA target sequence for Atp2b2 (NM_009723.1,3375-3393).
gcgagcgcaacgtctttga

SEQ ID NO: 494523 - DNA, 19 bp, Mus musculus
  siRNA target sequence for Atp2b2 (NM_009723.1,3438-3456).
ctttcgccatccagatagt

SEQ ID NO: 494524 - DNA, 19 bp, Mus musculus
  siRNA target sequence for Atp2b2 (NM_009723.1,3634-3652).
ccccgaggaggagttaaat

SEQ ID NO: 494525 - DNA, 19 bp, Mus musculus
  siRNA target sequence for Atp2b2 (NM_009723.1,3760-3778).
gttccgtagctctctctat

SEQ ID NO: 494526 - DNA, 19 bp, Mus musculus
  siRNA target sequence for Atp2b2 (NM_009723.1,3763-3781).
ccgtagctctctctatgaa

SEQ ID NO: 494527 - DNA, 19 bp, Mus musculus
  siRNA target sequence for Atp2b2 (NM_009723.1,3801-3819).
ctcgaacctccatccataa

SEQ ID NO: 494528 - DNA, 19 bp, Mus musculus
  siRNA target sequence for Atp2b2 (NM_009723.1,3803-3821).
cgaacctccatccataact

SEQ ID NO: 494529 - DNA, 19 bp, Mus musculus
  siRNA target sequence for Atp2b2 (NM_009723.1,3836-3854).
gaattccggatcgaagatt

SEQ ID NO: 494530 - DNA, 19 bp, Mus musculus
  siRNA target sequence for Atp2b2 (NM_009723.1,3929-3947).
ccgtcctcgctcaacaaga

SEQ ID NO: 494531 - DNA, 19 bp, Mus musculus
  siRNA target sequence for Atp2b2 (NM_009723.1,3930-3948).
cgtcctcgctcaacaagaa

SEQ ID NO: 494532 - DNA, 19 bp, Mus musculus
  siRNA target sequence for Atp2b2 (NM_009723.1,3934-3952).
ctcgctcaacaagaacaat

SEQ ID NO: 494533 - DNA, 19 bp, Mus musculus
  siRNA target sequence for Atp2b3 (NM_177236.2,297-315).
gggcgacatggcaaacagt

SEQ ID NO: 494534 - DNA, 19 bp, Mus musculus
  siRNA target sequence for Atp2b3 (NM_177236.2,308-326).
caaacagttccattgagtt

SEQ ID NO: 494535 - DNA, 19 bp, Mus musculus
  siRNA target sequence for Atp2b3 (NM_177236.2,426-444).
ggcactgcagaagattcaa

SEQ ID NO: 494536 - DNA, 19 bp, Mus musculus
  siRNA target sequence for Atp2b3 (NM_177236.2,508-526).
gcagacaacaccaatgact

SEQ ID NO: 494537 - DNA, 19 bp, Mus musculus
  siRNA target sequence for Atp2b3 (NM_177236.2,509-527).
cagacaacaccaatgactt

SEQ ID NO: 494538 - DNA, 19 bp, Mus musculus
  siRNA target sequence for Atp2b3 (NM_177236.2,834-852).
gcagttccgaggtcttcaa

SEQ ID NO: 494539 - DNA, 19 bp, Mus musculus
  siRNA target sequence for Atp2b3 (NM_177236.2,835-853).
cagttccgaggtcttcaaa

SEQ ID NO: 494540 - DNA, 19 bp, Mus musculus
  siRNA target sequence for Atp2b3 (NM_177236.2,870-888).
gcagaagtttactgtcata

SEQ ID NO: 494541 - DNA, 19 bp, Mus musculus
  siRNA target sequence for Atp2b3 (NM_177236.2,876-894).
gtttactgtcatacgaaat

SEQ ID NO: 494542 - DNA, 19 bp, Mus musculus
  siRNA target sequence for Atp2b3 (NM_177236.2,948-966).
ggtcaaatatggagatctt

SEQ ID NO: 494543 - DNA, 19 bp, Mus musculus
  siRNA target sequence for Atp2b3 (NM_177236.2,1035-1053).
gtcggaccatgttcgaaaa

SEQ ID NO: 494544 - DNA, 19 bp, Mus musculus
  siRNA target sequence for Atp2b3 (NM_177236.2,1146-1164).
gacaggcatcatctttaca

SEQ ID NO: 494545 - DNA, 19 bp, Mus musculus
  siRNA target sequence for Atp2b3 (NM_177236.2,1148-1166).
caggcatcatctttacatt

SEQ ID NO: 494546 - DNA, 19 bp, Mus musculus
  siRNA target sequence for Atp2b3 (NM_177236.2,1152-1170).
catcatctttacattgctt

SEQ ID NO: 494547 - DNA, 19 bp, Mus musculus
  siRNA target sequence for Atp2b3 (NM_177236.2,1536-1554).
cgtgaagttcttcattatt

SEQ ID NO: 494548 - DNA, 19 bp, Mus musculus
  siRNA target sequence for Atp2b3 (NM_177236.2,1857-1875).
ctacaccaccaaaattcta

SEQ ID NO: 494549 - DNA, 19 bp, Mus musculus
  siRNA target sequence for Atp2b3 (NM_177236.2,1903-1921).
cgccaagtgggcaacaaaa

SEQ ID NO: 494550 - DNA, 19 bp, Mus musculus
  siRNA target sequence for Atp2b3 (NM_177236.2,1996-2014).
gatcagctttacaaagtgt

SEQ ID NO: 494551 - DNA, 19 bp, Mus musculus
  siRNA target sequence for Atp2b3 (NM_177236.2,2068-2086).
ggtggcttccgcctcttta

SEQ ID NO: 494552 - DNA, 19 bp, Mus musculus
  siRNA target sequence for Atp2b3 (NM_177236.2,2071-2089).
ggcttccgcctctttagca

SEQ ID NO: 494553 - DNA, 19 bp, Mus musculus
  siRNA target sequence for Atp2b3 (NM_177236.2,2072-2090).
gcttccgcctctttagcaa

SEQ ID NO: 494554 - DNA, 19 bp, Mus musculus
  siRNA target sequence for Atp2b3 (NM_177236.2,2164-2182).
cctcgggaccgggatgata

SEQ ID NO: 494555 - DNA, 19 bp, Mus musculus
  siRNA target sequence for Atp2b3 (NM_177236.2,2165-2183).
ctcgggaccgggatgatat

SEQ ID NO: 494556 - DNA, 19 bp, Mus musculus
  siRNA target sequence for Atp2b3 (NM_177236.2,2168-2186).
gggaccgggatgatatggt

SEQ ID NO: 494557 - DNA, 19 bp, Mus musculus
  siRNA target sequence for Atp2b3 (NM_177236.2,2353-2371).
gtccctgaagccattcgaa

SEQ ID NO: 494558 - DNA, 19 bp, Mus musculus
  siRNA target sequence for Atp2b3 (NM_177236.2,2507-2525).
gaagaattcgaaatgagaa

SEQ ID NO: 494559 - DNA, 19 bp, Mus musculus
  siRNA target sequence for Atp2b3 (NM_177236.2,2584-2602).
cggtcatctcccactgata

SEQ ID NO: 494560 - DNA, 19 bp, Mus musculus
  siRNA target sequence for Atp2b3 (NM_177236.2,2585-2603).
ggtcatctcccactgataa

SEQ ID NO: 494561 - DNA, 19 bp, Mus musculus
  siRNA target sequence for Atp2b3 (NM_177236.2,2586-2604).
gtcatctcccactgataaa

SEQ ID NO: 494562 - DNA, 19 bp, Mus musculus
  siRNA target sequence for Atp2b3 (NM_177236.2,2609-2627).
ctctggttaaaggcattat

SEQ ID NO: 494563 - DNA, 19 bp, Mus musculus
  siRNA target sequence for Atp2b3 (NM_177236.2,2614-2632).
gttaaaggcattattgaca

SEQ ID NO: 494564 - DNA, 19 bp, Mus musculus
  siRNA target sequence for Atp2b3 (NM_177236.2,2686-2704).
gatgggccagccctcaaaa

SEQ ID NO: 494565 - DNA, 19 bp, Mus musculus
  siRNA target sequence for Atp2b3 (NM_177236.2,2943-2961).
gatgttgtgggtgaactta

SEQ ID NO: 494566 - DNA, 19 bp, Mus musculus
  siRNA target sequence for Atp2b3 (NM_177236.2,3114-3132).
ctttaccctgctatttgtt

SEQ ID NO: 494567 - DNA, 19 bp, Mus musculus
  siRNA target sequence for Atp2b3 (NM_177236.2,3139-3157).
cttttctttgacattgaca

SEQ ID NO: 494568 - DNA, 19 bp, Mus musculus
  siRNA target sequence for Atp2b3 (NM_177236.2,3265-3283).
catggtgagaggaatgtct

SEQ ID NO: 494569 - DNA, 19 bp, Mus musculus
  siRNA target sequence for Atp2b3 (NM_177236.2,3324-3342).
cttgggcacctttggaatt

SEQ ID NO: 494570 - DNA, 19 bp, Mus musculus
  siRNA target sequence for Atp2b3 (NM_177236.2,3329-3347).
gcacctttggaattcagat

SEQ ID NO: 494571 - DNA, 19 bp, Mus musculus
  siRNA target sequence for Atp2b3 (NM_177236.2,3345-3363).
gattgtcattgtccaattt

SEQ ID NO: 494572 - DNA, 19 bp, Mus musculus
  siRNA target sequence for Atp2b3 (NM_177236.2,3636-3654).
ggcaactggcccgatttct

SEQ ID NO: 494573 - DNA, 19 bp, Mus musculus
  siRNA target sequence for Atp2b3 (NM_177236.2,3656-3674).
gatcttgtgaaccacaaaa

SEQ ID NO: 494574 - DNA, 19 bp, Mus musculus
  siRNA target sequence for Atp2c1 (NM_175025.2,391-409).
gttgcacgatttcaaaaga

SEQ ID NO: 494575 - DNA, 19 bp, Mus musculus
  siRNA target sequence for Atp2c1 (NM_175025.2,492-510).
ccttctccaggctgatctt

SEQ ID NO: 494576 - DNA, 19 bp, Mus musculus
  siRNA target sequence for Atp2c1 (NM_175025.2,513-531).
gaatggcttaaacaaatct

SEQ ID NO: 494577 - DNA, 19 bp, Mus musculus
  siRNA target sequence for Atp2c1 (NM_175025.2,559-577).
ggttggaatgaatttgata

SEQ ID NO: 494578 - DNA, 19 bp, Mus musculus
  siRNA target sequence for Atp2c1 (NM_175025.2,593-611).
cattatggaagaagtatat

SEQ ID NO: 494579 - DNA, 19 bp, Mus musculus
  siRNA target sequence for Atp2c1 (NM_175025.2,655-673).
gcggtcatcagcattttaa

SEQ ID NO: 494580 - DNA, 19 bp, Mus musculus
  siRNA target sequence for Atp2c1 (NM_175025.2,656-674).
cggtcatcagcattttaat

SEQ ID NO: 494581 - DNA, 19 bp, Mus musculus
  siRNA target sequence for Atp2c1 (NM_175025.2,685-703).
gatgatgccgtcagtatca

SEQ ID NO: 494582 - DNA, 19 bp, Mus musculus
  siRNA target sequence for Atp2c1 (NM_175025.2,818-836).
gaaaactggagcatacact

SEQ ID NO: 494583 - DNA, 19 bp, Mus musculus
  siRNA target sequence for Atp2c1 (NM_175025.2,893-911).
ctgcggacttacgcttatt

SEQ ID NO: 494584 - DNA, 19 bp, Mus musculus
  siRNA target sequence for Atp2c1 (NM_175025.2,961-979).
gctccgtgctctaaagtga

SEQ ID NO: 494585 - DNA, 19 bp, Mus musculus
  siRNA target sequence for Atp2c1 (NM_175025.2,1003-1021).
ggagatcttgcgtcaagaa

SEQ ID NO: 494586 - DNA, 19 bp, Mus musculus
  siRNA target sequence for Atp2c1 (NM_175025.2,1009-1027).
cttgcgtcaagaagtaaca

SEQ ID NO: 494587 - DNA, 19 bp, Mus musculus
  siRNA target sequence for Atp2c1 (NM_175025.2,1058-1076).
gcaaagcaaagggtattgt

SEQ ID NO: 494588 - DNA, 19 bp, Mus musculus
  siRNA target sequence for Atp2c1 (NM_175025.2,1105-1123).
ggagaggtctttaagatga

SEQ ID NO: 494589 - DNA, 19 bp, Mus musculus
  siRNA target sequence for Atp2c1 (NM_175025.2,1177-1195).
ggcaagcagctgtcctttt

SEQ ID NO: 494590 - DNA, 19 bp, Mus musculus
  siRNA target sequence for Atp2c1 (NM_175025.2,1178-1196).
gcaagcagctgtcctttta

SEQ ID NO: 494591 - DNA, 19 bp, Mus musculus
  siRNA target sequence for Atp2c1 (NM_175025.2,1199-1217).
cctttggtataataggtat

SEQ ID NO: 494592 - DNA, 19 bp, Mus musculus
  siRNA target sequence for Atp2c1 (NM_175025.2,1204-1222).
ggtataataggtatcatca

SEQ ID NO: 494593 - DNA, 19 bp, Mus musculus
  siRNA target sequence for Atp2c1 (NM_175025.2,1205-1223).
gtataataggtatcatcat

SEQ ID NO: 494594 - DNA, 19 bp, Mus musculus
  siRNA target sequence for Atp2c1 (NM_175025.2,1224-1242).
gttggttggctggttacta

SEQ ID NO: 494595 - DNA, 19 bp, Mus musculus
  siRNA target sequence for Atp2c1 (NM_175025.2,1301-1319).
ctgaaggcctgcctattgt

SEQ ID NO: 494596 - DNA, 19 bp, Mus musculus
  siRNA target sequence for Atp2c1 (NM_175025.2,1331-1349).
ctctagcccttggtgttat

SEQ ID NO: 494597 - DNA, 19 bp, Mus musculus
  siRNA target sequence for Atp2c1 (NM_175025.2,1400-1418).
cactgggctgctgtaatgt

SEQ ID NO: 494598 - DNA, 19 bp, Mus musculus
  siRNA target sequence for Atp2c1 (NM_175025.2,1452-1470).
gaacgagatgactgttact

SEQ ID NO: 494599 - DNA, 19 bp, Mus musculus
  siRNA target sequence for Atp2c1 (NM_175025.2,1539-1557).
gatcgttgatggtgatgtt

SEQ ID NO: 494600 - DNA, 19 bp, Mus musculus
  siRNA target sequence for Atp2c1 (NM_175025.2,1550-1568).
gtgatgttgttcatggatt

SEQ ID NO: 494601 - DNA, 19 bp, Mus musculus
  siRNA target sequence for Atp2c1 (NM_175025.2,1621-1639).
gctgtaattaggaacaaca

SEQ ID NO: 494602 - DNA, 19 bp, Mus musculus
  siRNA target sequence for Atp2c1 (NM_175025.2,1655-1673).
caactgaaggagccttaat

SEQ ID NO: 494603 - DNA, 19 bp, Mus musculus
  siRNA target sequence for Atp2c1 (NM_175025.2,1705-1723).
ctgcaacaagactacatca

SEQ ID NO: 494604 - DNA, 19 bp, Mus musculus
  siRNA target sequence for Atp2c1 (NM_175025.2,1729-1747).
gctgaatacccttttagtt

SEQ ID NO: 494605 - DNA, 19 bp, Mus musculus
  siRNA target sequence for Atp2c1 (NM_175025.2,1758-1776).
gtggatggctgttaagtgt

SEQ ID NO: 494606 - DNA, 19 bp, Mus musculus
  siRNA target sequence for Atp2c1 (NM_175025.2,1794-1812).
ggacagaccagagatttgt

SEQ ID NO: 494607 - DNA, 19 bp, Mus musculus
  siRNA target sequence for Atp2c1 (NM_175025.2,1795-1813).
gacagaccagagatttgtt

SEQ ID NO: 494608 - DNA, 19 bp, Mus musculus
  siRNA target sequence for Atp2c1 (NM_175025.2,1831-1849).
gagcaggtgattaagtatt

SEQ ID NO: 494609 - DNA, 19 bp, Mus musculus
  siRNA target sequence for Atp2c1 (NM_175025.2,1833-1851).
gcaggtgattaagtattgt

SEQ ID NO: 494610 - DNA, 19 bp, Mus musculus
  siRNA target sequence for Atp2c1 (NM_175025.2,1834-1852).
caggtgattaagtattgta

SEQ ID NO: 494611 - DNA, 19 bp, Mus musculus
  siRNA target sequence for Atp2c1 (NM_175025.2,1836-1854).
ggtgattaagtattgtact

SEQ ID NO: 494612 - DNA, 19 bp, Mus musculus
  siRNA target sequence for Atp2c1 (NM_175025.2,1837-1855).
gtgattaagtattgtacta

SEQ ID NO: 494613 - DNA, 19 bp, Mus musculus
  siRNA target sequence for Atp2c1 (NM_175025.2,1839-1857).
gattaagtattgtactaca

SEQ ID NO: 494614 - DNA, 19 bp, Mus musculus
  siRNA target sequence for Atp2c1 (NM_175025.2,1899-1917).
gagagatttgtatcaacaa

SEQ ID NO: 494615 - DNA, 19 bp, Mus musculus
  siRNA target sequence for Atp2c1 (NM_175025.2,2013-2031).
cattgaccctcctagaact

SEQ ID NO: 494616 - DNA, 19 bp, Mus musculus
  siRNA target sequence for Atp2c1 (NM_175025.2,2066-2084).
caggagtctccatcaaaat

SEQ ID NO: 494617 - DNA, 19 bp, Mus musculus
  siRNA target sequence for Atp2c1 (NM_175025.2,2068-2086).
ggagtctccatcaaaatga

SEQ ID NO: 494618 - DNA, 19 bp, Mus musculus
  siRNA target sequence for Atp2c1 (NM_175025.2,2069-2087).
gagtctccatcaaaatgat

SEQ ID NO: 494619 - DNA, 19 bp, Mus musculus
  siRNA target sequence for Atp2c1 (NM_175025.2,2123-2141).
ctagtcgtctgggattgta

SEQ ID NO: 494620 - DNA, 19 bp, Mus musculus
  siRNA target sequence for Atp2c1 (NM_175025.2,2128-2146).
cgtctgggattgtactcta

SEQ ID NO: 494621 - DNA, 19 bp, Mus musculus
  siRNA target sequence for Atp2c1 (NM_175025.2,2129-2147).
gtctgggattgtactctaa

SEQ ID NO: 494622 - DNA, 19 bp, Mus musculus
  siRNA target sequence for Atp2c1 (NM_175025.2,2131-2149).
ctgggattgtactctaaga

SEQ ID NO: 494623 - DNA, 19 bp, Mus musculus
  siRNA target sequence for Atp2c1 (NM_175025.2,2133-2151).
gggattgtactctaagact

SEQ ID NO: 494624 - DNA, 19 bp, Mus musculus
  siRNA target sequence for Atp2c1 (NM_175025.2,2214-2232).
gccaaaggttgcagtattt

SEQ ID NO: 494625 - DNA, 19 bp, Mus musculus
  siRNA target sequence for Atp2c1 (NM_175025.2,2280-2298).
gaagaacggggcagttgta

SEQ ID NO: 494626 - DNA, 19 bp, Mus musculus
  siRNA target sequence for Atp2c1 (NM_175025.2,2304-2322).
gacaggagatggggtaaat

SEQ ID NO: 494627 - DNA, 19 bp, Mus musculus
  siRNA target sequence for Atp2c1 (NM_175025.2,2368-2386).
cagactggcaccgatgttt

SEQ ID NO: 494628 - DNA, 19 bp, Mus musculus
  siRNA target sequence for Atp2c1 (NM_175025.2,2392-2410).
gaggctgcagacatgatct

SEQ ID NO: 494629 - DNA, 19 bp, Mus musculus
  siRNA target sequence for Atp2c1 (NM_175025.2,2422-2440).
gatttccaaaccatcatgt

SEQ ID NO: 494630 - DNA, 19 bp, Mus musculus
  siRNA target sequence for Atp2c1 (NM_175025.2,2432-2450).
ccatcatgtctgcaataga

SEQ ID NO: 494631 - DNA, 19 bp, Mus musculus
  siRNA target sequence for Atp2c1 (NM_175025.2,2433-2451).
catcatgtctgcaatagaa

SEQ ID NO: 494632 - DNA, 19 bp, Mus musculus
  siRNA target sequence for Atp2c1 (NM_175025.2,2505-2523).
cacgagtatagcagcatta

SEQ ID NO: 494633 - DNA, 19 bp, Mus musculus
  siRNA target sequence for Atp2c1 (NM_175025.2,2510-2528).
gtatagcagcattaacttt

SEQ ID NO: 494634 - DNA, 19 bp, Mus musculus
  siRNA target sequence for Atp2c1 (NM_175025.2,2534-2552).
cattggctacgttaatgaa

SEQ ID NO: 494635 - DNA, 19 bp, Mus musculus
  siRNA target sequence for Atp2c1 (NM_175025.2,2543-2561).
cgttaatgaactttcctaa

SEQ ID NO: 494636 - DNA, 19 bp, Mus musculus
  siRNA target sequence for Atp2c1 (NM_175025.2,2553-2571).
ctttcctaaccctctcaat

SEQ ID NO: 494637 - DNA, 19 bp, Mus musculus
  siRNA target sequence for Atp2c1 (NM_175025.2,2588-2606).
ggatcaatattataatgga

SEQ ID NO: 494638 - DNA, 19 bp, Mus musculus
  siRNA target sequence for Atp2c1 (NM_175025.2,2630-2648).
gagtagagccagtggataa

SEQ ID NO: 494639 - DNA, 19 bp, Mus musculus
  siRNA target sequence for Atp2c1 (NM_175025.2,2687-2705).
gcattttgacaaaaaactt

SEQ ID NO: 494640 - DNA, 19 bp, Mus musculus
  siRNA target sequence for Atp2c1 (NM_175025.2,2694-2712).
gacaaaaaacttgatactt

SEQ ID NO: 494641 - DNA, 19 bp, Mus musculus
  siRNA target sequence for Atp2c1 (NM_175025.2,2706-2724).
gatacttaaaatacttgtt

SEQ ID NO: 494642 - DNA, 19 bp, Mus musculus
  siRNA target sequence for Atp2c1 (NM_175025.2,2766-2784).
gcgagagcttcgagacaat

SEQ ID NO: 494643 - DNA, 19 bp, Mus musculus
  siRNA target sequence for Atp2c1 (NM_175025.2,2768-2786).
gagagcttcgagacaatgt

SEQ ID NO: 494644 - DNA, 19 bp, Mus musculus
  siRNA target sequence for Atp2c1 (NM_175025.2,2770-2788).
gagcttcgagacaatgtga

SEQ ID NO: 494645 - DNA, 19 bp, Mus musculus
  siRNA target sequence for Atp2c1 (NM_175025.2,2772-2790).
gcttcgagacaatgtgata

SEQ ID NO: 494646 - DNA, 19 bp, Mus musculus
  siRNA target sequence for Atp2c1 (NM_175025.2,2773-2791).
cttcgagacaatgtgataa

SEQ ID NO: 494647 - DNA, 19 bp, Mus musculus
  siRNA target sequence for Atp2c1 (NM_175025.2,2802-2820).
cacaaccatgactttcact

SEQ ID NO: 494648 - DNA, 19 bp, Mus musculus
  siRNA target sequence for Atp2c1 (NM_175025.2,2886-2904).
gattggactctgcagtaat

SEQ ID NO: 494649 - DNA, 19 bp, Mus musculus
  siRNA target sequence for Atp2c1 (NM_175025.2,2940-2958).
gggacagttgcttgtcatt

SEQ ID NO: 494650 - DNA, 19 bp, Mus musculus
  siRNA target sequence for Atp2c1 (NM_175025.2,2942-2960).
gacagttgcttgtcattta

SEQ ID NO: 494651 - DNA, 19 bp, Mus musculus
  siRNA target sequence for Atp2c1 (NM_175025.2,3002-3020).
gtatactggatctgttgtt

SEQ ID NO: 494652 - DNA, 19 bp, Mus musculus
  siRNA target sequence for Atp2c1 (NM_175025.2,3045-3063).
gtgcattgtgtctgagatt

SEQ ID NO: 494653 - DNA, 19 bp, Mus musculus
  siRNA target sequence for Atp2c1 (NM_175025.2,3048-3066).
cattgtgtctgagattata

SEQ ID NO: 494654 - DNA, 19 bp, Mus musculus
  siRNA target sequence for Atp2c1 (NM_175025.2,3119-3137).
catcgtctttccttgaagt

SEQ ID NO: 494655 - DNA, 19 bp, Mus musculus
  siRNA target sequence for Atp4a (NM_018731.1,290-308).
ggggcactcccgagtatgt

SEQ ID NO: 494656 - DNA, 19 bp, Mus musculus
  siRNA target sequence for Atp4a (NM_018731.1,296-314).
ctcccgagtatgtgaagtt

SEQ ID NO: 494657 - DNA, 19 bp, Mus musculus
  siRNA target sequence for Atp4a (NM_018731.1,406-424).
gacctgaccactgatgata

SEQ ID NO: 494658 - DNA, 19 bp, Mus musculus
  siRNA target sequence for Atp4a (NM_018731.1,408-426).
cctgaccactgatgataat

SEQ ID NO: 494659 - DNA, 19 bp, Mus musculus
  siRNA target sequence for Atp4a (NM_018731.1,413-431).
ccactgatgataatctgta

SEQ ID NO: 494660 - DNA, 19 bp, Mus musculus
  siRNA target sequence for Atp4a (NM_018731.1,490-508).
gagttcaagagcacaaata

SEQ ID NO: 494661 - DNA, 19 bp, Mus musculus
  siRNA target sequence for Atp4a (NM_018731.1,563-581).
gggacaagttccagatcaa

SEQ ID NO: 494662 - DNA, 19 bp, Mus musculus
  siRNA target sequence for Atp4a (NM_018731.1,720-738).
ctcgcccgagtgtacacat

SEQ ID NO: 494663 - DNA, 19 bp, Mus musculus
  siRNA target sequence for Atp4a (NM_018731.1,757-775).
cgcaacatcgccttcttct

SEQ ID NO: 494664 - DNA, 19 bp, Mus musculus
  siRNA target sequence for Atp4a (NM_018731.1,822-840).
cggcgatcgcaccatcatt

SEQ ID NO: 494665 - DNA, 19 bp, Mus musculus
  siRNA target sequence for Atp4a (NM_018731.1,860-878).
cctcgggtgtggaaaacga

SEQ ID NO: 494666 - DNA, 19 bp, Mus musculus
  siRNA target sequence for Atp4a (NM_018731.1,877-895).
gagaagactccgattgcaa

SEQ ID NO: 494667 - DNA, 19 bp, Mus musculus
  siRNA target sequence for Atp4a (NM_018731.1,887-905).
cgattgcaatcgagattga

SEQ ID NO: 494668 - DNA, 19 bp, Mus musculus
  siRNA target sequence for Atp4a (NM_018731.1,888-906).
gattgcaatcgagattgaa

SEQ ID NO: 494669 - DNA, 19 bp, Mus musculus
  siRNA target sequence for Atp4a (NM_018731.1,892-910).
gcaatcgagattgaacatt

SEQ ID NO: 494670 - DNA, 19 bp, Mus musculus
  siRNA target sequence for Atp4a (NM_018731.1,893-911).
caatcgagattgaacattt

SEQ ID NO: 494671 - DNA, 19 bp, Mus musculus
  siRNA target sequence for Atp4a (NM_018731.1,940-958).
ctcttcggtgccacattct

SEQ ID NO: 494672 - DNA, 19 bp, Mus musculus
  siRNA target sequence for Atp4a (NM_018731.1,942-960).
cttcggtgccacattcttt

SEQ ID NO: 494673 - DNA, 19 bp, Mus musculus
  siRNA target sequence for Atp4a (NM_018731.1,1097-1115).
gtaaaaactgcgtggttaa

SEQ ID NO: 494674 - DNA, 19 bp, Mus musculus
  siRNA target sequence for Atp4a (NM_018731.1,1104-1122).
ctgcgtggttaaaaactta

SEQ ID NO: 494675 - DNA, 19 bp, Mus musculus
  siRNA target sequence for Atp4a (NM_018731.1,1106-1124).
gcgtggttaaaaacttaga

SEQ ID NO: 494676 - DNA, 19 bp, Mus musculus
  siRNA target sequence for Atp4a (NM_018731.1,1107-1125).
cgtggttaaaaacttagaa

SEQ ID NO: 494677 - DNA, 19 bp, Mus musculus
  siRNA target sequence for Atp4a (NM_018731.1,1132-1150).
gagaccctaggttctacat

SEQ ID NO: 494678 - DNA, 19 bp, Mus musculus
  siRNA target sequence for Atp4a (NM_018731.1,1199-1217).
cggtgtctcatctatggtt

SEQ ID NO: 494679 - DNA, 19 bp, Mus musculus
  siRNA target sequence for Atp4a (NM_018731.1,1500-1518).
gttccagctgtccattcat

SEQ ID NO: 494680 - DNA, 19 bp, Mus musculus
  siRNA target sequence for Atp4a (NM_018731.1,1685-1703).
gcgaacgtgttcttggttt

SEQ ID NO: 494681 - DNA, 19 bp, Mus musculus
  siRNA target sequence for Atp4a (NM_018731.1,1788-1806).
ctgctttgcgggacttgta

SEQ ID NO: 494682 - DNA, 19 bp, Mus musculus
  siRNA target sequence for Atp4a (NM_018731.1,1797-1815).
gggacttgtatccatgatt

SEQ ID NO: 494683 - DNA, 19 bp, Mus musculus
  siRNA target sequence for Atp4a (NM_018731.1,1837-1855).
cctgatgctgtgctcaaat

SEQ ID NO: 494684 - DNA, 19 bp, Mus musculus
  siRNA target sequence for Atp4a (NM_018731.1,1922-1940).
cagccagcgtgggtatcat

SEQ ID NO: 494685 - DNA, 19 bp, Mus musculus
  siRNA target sequence for Atp4a (NM_018731.1,1924-1942).
gccagcgtgggtatcatct

SEQ ID NO: 494686 - DNA, 19 bp, Mus musculus
  siRNA target sequence for Atp4a (NM_018731.1,1989-2007).
gccggtggaccaggttaat

SEQ ID NO: 494687 - DNA, 19 bp, Mus musculus
  siRNA target sequence for Atp4a (NM_018731.1,1990-2008).
ccggtggaccaggttaata

SEQ ID NO: 494688 - DNA, 19 bp, Mus musculus
  siRNA target sequence for Atp4a (NM_018731.1,1993-2011).
gtggaccaggttaatagga

SEQ ID NO: 494689 - DNA, 19 bp, Mus musculus
  siRNA target sequence for Atp4a (NM_018731.1,2251-2269).
ggctcggatgctgctaaaa

SEQ ID NO: 494690 - DNA, 19 bp, Mus musculus
  siRNA target sequence for Atp4a (NM_018731.1,2252-2270).
gctcggatgctgctaaaaa

SEQ ID NO: 494691 - DNA, 19 bp, Mus musculus
  siRNA target sequence for Atp4a (NM_018731.1,2253-2271).
ctcggatgctgctaaaaat

SEQ ID NO: 494692 - DNA, 19 bp, Mus musculus
  siRNA target sequence for Atp4a (NM_018731.1,2395-2413).
gaactgacaccctacctta

SEQ ID NO: 494693 - DNA, 19 bp, Mus musculus
  siRNA target sequence for Atp4a (NM_018731.1,2398-2416).
ctgacaccctaccttatct

SEQ ID NO: 494694 - DNA, 19 bp, Mus musculus
  siRNA target sequence for Atp4a (NM_018731.1,2404-2422).
ccctaccttatctatatca

SEQ ID NO: 494695 - DNA, 19 bp, Mus musculus
  siRNA target sequence for Atp4a (NM_018731.1,2446-2464).
gggtgtatcaccattctct

SEQ ID NO: 494696 - DNA, 19 bp, Mus musculus
  siRNA target sequence for Atp4a (NM_018731.1,2578-2596).
gaacccctggctgcttatt

SEQ ID NO: 494697 - DNA, 19 bp, Mus musculus
  siRNA target sequence for Atp4a (NM_018731.1,2584-2602).
ctggctgcttattcctatt

SEQ ID NO: 494698 - DNA, 19 bp, Mus musculus
  siRNA target sequence for Atp4a (NM_018731.1,2605-2623).
cagattggtgccattcagt

SEQ ID NO: 494699 - DNA, 19 bp, Mus musculus
  siRNA target sequence for Atp4a (NM_018731.1,2630-2648).
ccggctttgctgactactt

SEQ ID NO: 494700 - DNA, 19 bp, Mus musculus
  siRNA target sequence for Atp4a (NM_018731.1,2718-2736).
ccatctacaagatcttcaa

SEQ ID NO: 494701 - DNA, 19 bp, Mus musculus
  siRNA target sequence for Atp4a (NM_018731.1,2789-2807).
cctgttacaccgtgttctt

SEQ ID NO: 494702 - DNA, 19 bp, Mus musculus
  siRNA target sequence for Atp4a (NM_018731.1,2882-2900).
gattcttcaggaacaagat

SEQ ID NO: 494703 - DNA, 19 bp, Mus musculus
  siRNA target sequence for Atp4a (NM_018731.1,2954-2972).
gcccagggatgcctaacat

SEQ ID NO: 494704 - DNA, 19 bp, Mus musculus
  siRNA target sequence for Atp4a (NM_018731.1,3089-3107).
ggtgggaccaagatttcta

SEQ ID NO: 494705 - DNA, 19 bp, Mus musculus
  siRNA target sequence for Atp5a1 (NM_007505.1,245-263).
ggagactgggcgtgtgtta

SEQ ID NO: 494706 - DNA, 19 bp, Mus musculus
  siRNA target sequence for Atp5a1 (NM_007505.1,246-264).
gagactgggcgtgtgttaa

SEQ ID NO: 494707 - DNA, 19 bp, Mus musculus
  siRNA target sequence for Atp5a1 (NM_007505.1,290-308).
gcacgggctgaggaatgtt

SEQ ID NO: 494708 - DNA, 19 bp, Mus musculus
  siRNA target sequence for Atp5a1 (NM_007505.1,318-336).
gagatggtggaattctctt

SEQ ID NO: 494709 - DNA, 19 bp, Mus musculus
  siRNA target sequence for Atp5a1 (NM_007505.1,492-510).
gacgccctcggtaatgcta

SEQ ID NO: 494710 - DNA, 19 bp, Mus musculus
  siRNA target sequence for Atp5a1 (NM_007505.1,494-512).
cgccctcggtaatgctatt

SEQ ID NO: 494711 - DNA, 19 bp, Mus musculus
  siRNA target sequence for Atp5a1 (NM_007505.1,497-515).
cctcggtaatgctattgat

SEQ ID NO: 494712 - DNA, 19 bp, Mus musculus
  siRNA target sequence for Atp5a1 (NM_007505.1,651-669).
ggtcagcgtgagctgatta

SEQ ID NO: 494713 - DNA, 19 bp, Mus musculus
  siRNA target sequence for Atp5a1 (NM_007505.1,652-670).
gtcagcgtgagctgattat

SEQ ID NO: 494714 - DNA, 19 bp, Mus musculus
  siRNA target sequence for Atp5a1 (NM_007505.1,656-674).
gcgtgagctgattattggt

SEQ ID NO: 494715 - DNA, 19 bp, Mus musculus
  siRNA target sequence for Atp5a1 (NM_007505.1,697-715).
cgattgccattgacacaat

SEQ ID NO: 494716 - DNA, 19 bp, Mus musculus
  siRNA target sequence for Atp5a1 (NM_007505.1,834-852).
gcggatgccatgaagtaca

SEQ ID NO: 494717 - DNA, 19 bp, Mus musculus
  siRNA target sequence for Atp5a1 (NM_007505.1,923-941).
catgggagagtactttaga

SEQ ID NO: 494718 - DNA, 19 bp, Mus musculus
  siRNA target sequence for Atp5a1 (NM_007505.1,948-966).
ggcaagcacgctttgatca

SEQ ID NO: 494719 - DNA, 19 bp, Mus musculus
  siRNA target sequence for Atp5a1 (NM_007505.1,949-967).
gcaagcacgctttgatcat

SEQ ID NO: 494720 - DNA, 19 bp, Mus musculus
  siRNA target sequence for Atp5a1 (NM_007505.1,1096-1114).
ccaagatgaacgattcctt

SEQ ID NO: 494721 - DNA, 19 bp, Mus musculus
  siRNA target sequence for Atp5a1 (NM_007505.1,1167-1185).
gtgtccgcttacattccaa

SEQ ID NO: 494722 - DNA, 19 bp, Mus musculus
  siRNA target sequence for Atp5a1 (NM_007505.1,1246-1264).
gcatccgccctgccattaa

SEQ ID NO: 494723 - DNA, 19 bp, Mus musculus
  siRNA target sequence for Atp5a1 (NM_007505.1,1247-1265).
catccgccctgccattaat

SEQ ID NO: 494724 - DNA, 19 bp, Mus musculus
  siRNA target sequence for Atp5a1 (NM_007505.1,1259-1277).
cattaatgtgggtttgtct

SEQ ID NO: 494725 - DNA, 19 bp, Mus musculus
  siRNA target sequence for Atp5a1 (NM_007505.1,1371-1389).
gcgtttgcccagtttggtt

SEQ ID NO: 494726 - DNA, 19 bp, Mus musculus
  siRNA target sequence for Atp5a1 (NM_007505.1,1434-1452).
cgtctgaccgagttgctaa

SEQ ID NO: 494727 - DNA, 19 bp, Mus musculus
  siRNA target sequence for Atp5a1 (NM_007505.1,1435-1453).
gtctgaccgagttgctaaa

SEQ ID NO: 494728 - DNA, 19 bp, Mus musculus
  siRNA target sequence for Atp5a1 (NM_007505.1,1439-1457).
gaccgagttgctaaagcaa

SEQ ID NO: 494729 - DNA, 19 bp, Mus musculus
  siRNA target sequence for Atp5a1 (NM_007505.1,1466-1484).
ctctcccatggctattgaa

SEQ ID NO: 494730 - DNA, 19 bp, Mus musculus
  siRNA target sequence for Atp5a1 (NM_007505.1,1507-1525).
cgggtgtacggggttatct

SEQ ID NO: 494731 - DNA, 19 bp, Mus musculus
  siRNA target sequence for Atp5a1 (NM_007505.1,1508-1526).
gggtgtacggggttatctt

SEQ ID NO: 494732 - DNA, 19 bp, Mus musculus
  siRNA target sequence for Atp5a1 (NM_007505.1,1510-1528).
gtgtacggggttatcttga

SEQ ID NO: 494733 - DNA, 19 bp, Mus musculus
  siRNA target sequence for Atp5a1 (NM_007505.1,1516-1534).
ggggttatcttgacaaact

SEQ ID NO: 494734 - DNA, 19 bp, Mus musculus
  siRNA target sequence for Atp5a1 (NM_007505.1,1539-1557).
cccagcaagatcacaaagt

SEQ ID NO: 494735 - DNA, 19 bp, Mus musculus
  siRNA target sequence for Atp5a1 (NM_007505.1,1540-1558).
ccagcaagatcacaaagtt

SEQ ID NO: 494736 - DNA, 19 bp, Mus musculus
  siRNA target sequence for Atp5a1 (NM_007505.1,1567-1585).
ctttcttgtctcacgttat

SEQ ID NO: 494737 - DNA, 19 bp, Mus musculus
  siRNA target sequence for Atp5a1 (NM_007505.1,1619-1637).
gtctgatgggaaaatctca

SEQ ID NO: 494738 - DNA, 19 bp, Mus musculus
  siRNA target sequence for Atp5a1 (NM_007505.1,1655-1673).
gctcaaagagattgtaaca

SEQ ID NO: 494739 - DNA, 19 bp, Mus musculus
  siRNA target sequence for Atp5a1 (NM_007505.1,1662-1680).
gagattgtaacaaacttct

SEQ ID NO: 494740 - DNA, 19 bp, Mus musculus
  siRNA target sequence for Atp5b (NM_016774.2,242-260).
gttcgatgagggattacca

SEQ ID NO: 494741 - DNA, 19 bp, Mus musculus
  siRNA target sequence for Atp5b (NM_016774.2,252-270).
ggattaccacccatcctaa

SEQ ID NO: 494742 - DNA, 19 bp, Mus musculus
  siRNA target sequence for Atp5b (NM_016774.2,333-351).
gagagcacggtcagaacta

SEQ ID NO: 494743 - DNA, 19 bp, Mus musculus
  siRNA target sequence for Atp5b (NM_016774.2,335-353).
gagcacggtcagaactatt

SEQ ID NO: 494744 - DNA, 19 bp, Mus musculus
  siRNA target sequence for Atp5b (NM_016774.2,407-425).
ggcaccaatcaaaattcct

SEQ ID NO: 494745 - DNA, 19 bp, Mus musculus
  siRNA target sequence for Atp5b (NM_016774.2,490-508).
ctatcaaaaccaaacaatt

SEQ ID NO: 494746 - DNA, 19 bp, Mus musculus
  siRNA target sequence for Atp5b (NM_016774.2,550-568).
gtgttgagcaggagattct

SEQ ID NO: 494747 - DNA, 19 bp, Mus musculus
  siRNA target sequence for Atp5b (NM_016774.2,652-670).
gaaagacagtactgatcat

SEQ ID NO: 494748 - DNA, 19 bp, Mus musculus
  siRNA target sequence for Atp5b (NM_016774.2,663-681).
ctgatcatggagctaatca

SEQ ID NO: 494749 - DNA, 19 bp, Mus musculus
  siRNA target sequence for Atp5b (NM_016774.2,668-686).
catggagctaatcaacaat

SEQ ID NO: 494750 - DNA, 19 bp, Mus musculus
  siRNA target sequence for Atp5b (NM_016774.2,737-755).
gacccgtgagggcaatgat

SEQ ID NO: 494751 - DNA, 19 bp, Mus musculus
  siRNA target sequence for Atp5b (NM_016774.2,739-757).
cccgtgagggcaatgattt

SEQ ID NO: 494752 - DNA, 19 bp, Mus musculus
  siRNA target sequence for Atp5b (NM_016774.2,740-758).
ccgtgagggcaatgattta

SEQ ID NO: 494753 - DNA, 19 bp, Mus musculus
  siRNA target sequence for Atp5b (NM_016774.2,741-759).
cgtgagggcaatgatttat

SEQ ID NO: 494754 - DNA, 19 bp, Mus musculus
  siRNA target sequence for Atp5b (NM_016774.2,746-764).
gggcaatgatttataccat

SEQ ID NO: 494755 - DNA, 19 bp, Mus musculus
  siRNA target sequence for Atp5b (NM_016774.2,761-779).
ccatgaaatgattgaatct

SEQ ID NO: 494756 - DNA, 19 bp, Mus musculus
  siRNA target sequence for Atp5b (NM_016774.2,808-826).
ccaaggtagcgttggtata

SEQ ID NO: 494757 - DNA, 19 bp, Mus musculus
  siRNA target sequence for Atp5b (NM_016774.2,809-827).
caaggtagcgttggtatat

SEQ ID NO: 494758 - DNA, 19 bp, Mus musculus
  siRNA target sequence for Atp5b (NM_016774.2,812-830).
ggtagcgttggtatatgga

SEQ ID NO: 494759 - DNA, 19 bp, Mus musculus
  siRNA target sequence for Atp5b (NM_016774.2,877-895).
gtttgaccgttgctgaata

SEQ ID NO: 494760 - DNA, 19 bp, Mus musculus
  siRNA target sequence for Atp5b (NM_016774.2,921-939).
gtcctgctgtttattgaca

SEQ ID NO: 494761 - DNA, 19 bp, Mus musculus
  siRNA target sequence for Atp5b (NM_016774.2,1039-1057).
gcacaatgcaggaaaggat

SEQ ID NO: 494762 - DNA, 19 bp, Mus musculus
  siRNA target sequence for Atp5b (NM_016774.2,1084-1102).
cctcggtgcaggctatcta

SEQ ID NO: 494763 - DNA, 19 bp, Mus musculus
  siRNA target sequence for Atp5b (NM_016774.2,1085-1103).
ctcggtgcaggctatctat

SEQ ID NO: 494764 - DNA, 19 bp, Mus musculus
  siRNA target sequence for Atp5b (NM_016774.2,1087-1105).
cggtgcaggctatctatgt

SEQ ID NO: 494765 - DNA, 19 bp, Mus musculus
  siRNA target sequence for Atp5b (NM_016774.2,1223-1241).
ggactccacctctcgaatt

SEQ ID NO: 494766 - DNA, 19 bp, Mus musculus
  siRNA target sequence for Atp5b (NM_016774.2,1228-1246).
ccacctctcgaattatgga

SEQ ID NO: 494767 - DNA, 19 bp, Mus musculus
  siRNA target sequence for Atp5b (NM_016774.2,1229-1247).
cacctctcgaattatggat

SEQ ID NO: 494768 - DNA, 19 bp, Mus musculus
  siRNA target sequence for Atp5b (NM_016774.2,1301-1319).
cctgcaggactacaaatct

SEQ ID NO: 494769 - DNA, 19 bp, Mus musculus
  siRNA target sequence for Atp6ap1 (NM_018794.2,232-250).
gcagctttctacctactta

SEQ ID NO: 494770 - DNA, 19 bp, Mus musculus
  siRNA target sequence for Atp6ap1 (NM_018794.2,265-283).
gctgggtccccgtaatgta

SEQ ID NO: 494771 - DNA, 19 bp, Mus musculus
  siRNA target sequence for Atp6ap1 (NM_018794.2,491-509).
gtggatctagctaccttaa

SEQ ID NO: 494772 - DNA, 19 bp, Mus musculus
  siRNA target sequence for Atp6ap1 (NM_018794.2,642-660).
cactcaagtctgaagatgt

SEQ ID NO: 494773 - DNA, 19 bp, Mus musculus
  siRNA target sequence for Atp6ap1 (NM_018794.2,696-714).
ctagagtggcccgtgatat

SEQ ID NO: 494774 - DNA, 19 bp, Mus musculus
  siRNA target sequence for Atp6ap1 (NM_018794.2,701-719).
gtggcccgtgatataacca

SEQ ID NO: 494775 - DNA, 19 bp, Mus musculus
  siRNA target sequence for Atp6ap1 (NM_018794.2,835-853).
cttctctgtggcatacaaa

SEQ ID NO: 494776 - DNA, 19 bp, Mus musculus
  siRNA target sequence for Atp6ap1 (NM_018794.2,888-906).
gtgtggagaatcttaactt

SEQ ID NO: 494777 - DNA, 19 bp, Mus musculus
  siRNA target sequence for Atp6ap1 (NM_018794.2,890-908).
gtggagaatcttaacttga

SEQ ID NO: 494778 - DNA, 19 bp, Mus musculus
  siRNA target sequence for Atp6ap1 (NM_018794.2,949-967).
gacctatgagccactcttt

SEQ ID NO: 494779 - DNA, 19 bp, Mus musculus
  siRNA target sequence for Atp6ap1 (NM_018794.2,971-989).
gcaacagtgacattcaagt

SEQ ID NO: 494780 - DNA, 19 bp, Mus musculus
  siRNA target sequence for Atp6ap1 (NM_018794.2,1013-1031).
ccagtgtctgcccgatatt

SEQ ID NO: 494781 - DNA, 19 bp, Mus musculus
  siRNA target sequence for Atp6ap1 (NM_018794.2,1016-1034).
gtgtctgcccgatattggt

SEQ ID NO: 494782 - DNA, 19 bp, Mus musculus
  siRNA target sequence for Atp6ap1 (NM_018794.2,1018-1036).
gtctgcccgatattggttt

SEQ ID NO: 494783 - DNA, 19 bp, Mus musculus
  siRNA target sequence for Atp6ap1 (NM_018794.2,1037-1055).
gccatggaacgacttgaaa

SEQ ID NO: 494784 - DNA, 19 bp, Mus musculus
  siRNA target sequence for Atp6ap1 (NM_018794.2,1038-1056).
ccatggaacgacttgaaat

SEQ ID NO: 494785 - DNA, 19 bp, Mus musculus
  siRNA target sequence for Atp6ap1 (NM_018794.2,1103-1121).
ggacctagcatctattctt

SEQ ID NO: 494786 - DNA, 19 bp, Mus musculus
  siRNA target sequence for Atp6ap1 (NM_018794.2,1104-1122).
gacctagcatctattcttt

SEQ ID NO: 494787 - DNA, 19 bp, Mus musculus
  siRNA target sequence for Atp6ap1 (NM_018794.2,1191-1209).
ggcagatgactcttcataa

SEQ ID NO: 494788 - DNA, 19 bp, Mus musculus
  siRNA target sequence for Atp6ap1 (NM_018794.2,1193-1211).
cagatgactcttcataact

SEQ ID NO: 494789 - DNA, 19 bp, Mus musculus
  siRNA target sequence for Atp6ap1 (NM_018794.2,1260-1278).
gcgactgtgctggtttctt

SEQ ID NO: 494790 - DNA, 19 bp, Mus musculus
  siRNA target sequence for Atp6ap1 (NM_018794.2,1335-1353).
cctatggtctgcacatgat

SEQ ID NO: 494791 - DNA, 19 bp, Mus musculus
  siRNA target sequence for Atp6ap1 (NM_018794.2,1336-1354).
ctatggtctgcacatgata

SEQ ID NO: 494792 - DNA, 19 bp, Mus musculus
  siRNA target sequence for Atp6ap1 (NM_018794.2,1340-1358).
ggtctgcacatgatactca

SEQ ID NO: 494793 - DNA, 19 bp, Mus musculus
  siRNA target sequence for Atp6v1a1 (NM_007508.2,197-215).
gctggttggagaaattatt

SEQ ID NO: 494794 - DNA, 19 bp, Mus musculus
  siRNA target sequence for Atp6v1a1 (NM_007508.2,200-218).
ggttggagaaattattcga

SEQ ID NO: 494795 - DNA, 19 bp, Mus musculus
  siRNA target sequence for Atp6v1a1 (NM_007508.2,201-219).
gttggagaaattattcgat

SEQ ID NO: 494796 - DNA, 19 bp, Mus musculus
  siRNA target sequence for Atp6v1a1 (NM_007508.2,284-302).
cgtactccgcactggtaaa

SEQ ID NO: 494797 - DNA, 19 bp, Mus musculus
  siRNA target sequence for Atp6v1a1 (NM_007508.2,328-346).
ggattatgggagccatttt

SEQ ID NO: 494798 - DNA, 19 bp, Mus musculus
  siRNA target sequence for Atp6v1a1 (NM_007508.2,337-355).
gagccatttttgatggtat

SEQ ID NO: 494799 - DNA, 19 bp, Mus musculus
  siRNA target sequence for Atp6v1a1 (NM_007508.2,340-358).
ccatttttgatggtataca

SEQ ID NO: 494800 - DNA, 19 bp, Mus musculus
  siRNA target sequence for Atp6v1a1 (NM_007508.2,379-397).
gcagtcagacccaaagtat

SEQ ID NO: 494801 - DNA, 19 bp, Mus musculus
  siRNA target sequence for Atp6v1a1 (NM_007508.2,384-402).
cagacccaaagtatctaca

SEQ ID NO: 494802 - DNA, 19 bp, Mus musculus
  siRNA target sequence for Atp6v1a1 (NM_007508.2,401-419).
catccccagaggagtcaat

SEQ ID NO: 494803 - DNA, 19 bp, Mus musculus
  siRNA target sequence for Atp6v1a1 (NM_007508.2,426-444).
gctctcagcagagatatca

SEQ ID NO: 494804 - DNA, 19 bp, Mus musculus
  siRNA target sequence for Atp6v1a1 (NM_007508.2,429-447).
ctcagcagagatatcaaat

SEQ ID NO: 494805 - DNA, 19 bp, Mus musculus
  siRNA target sequence for Atp6v1a1 (NM_007508.2,470-488).
cctacgggttggtagtcat

SEQ ID NO: 494806 - DNA, 19 bp, Mus musculus
  siRNA target sequence for Atp6v1a1 (NM_007508.2,471-489).
ctacgggttggtagtcata

SEQ ID NO: 494807 - DNA, 19 bp, Mus musculus
  siRNA target sequence for Atp6v1a1 (NM_007508.2,474-492).
cgggttggtagtcatatca

SEQ ID NO: 494808 - DNA, 19 bp, Mus musculus
  siRNA target sequence for Atp6v1a1 (NM_007508.2,503-521).
catttatgggattgtcaat

SEQ ID NO: 494809 - DNA, 19 bp, Mus musculus
  siRNA target sequence for Atp6v1a1 (NM_007508.2,551-569).
gttgcccccacgtaacaga

SEQ ID NO: 494810 - DNA, 19 bp, Mus musculus
  siRNA target sequence for Atp6v1a1 (NM_007508.2,568-586).
gaggaagcgtgacttacat

SEQ ID NO: 494811 - DNA, 19 bp, Mus musculus
  siRNA target sequence for Atp6v1a1 (NM_007508.2,809-827).
ctgtggaaagactgtgatt

SEQ ID NO: 494812 - DNA, 19 bp, Mus musculus
  siRNA target sequence for Atp6v1a1 (NM_007508.2,850-868).
ccaacagtgacgtcatcat

SEQ ID NO: 494813 - DNA, 19 bp, Mus musculus
  siRNA target sequence for Atp6v1a1 (NM_007508.2,854-872).
cagtgacgtcatcatctat

SEQ ID NO: 494814 - DNA, 19 bp, Mus musculus
  siRNA target sequence for Atp6v1a1 (NM_007508.2,856-874).
gtgacgtcatcatctatgt

SEQ ID NO: 494815 - DNA, 19 bp, Mus musculus
  siRNA target sequence for Atp6v1a1 (NM_007508.2,893-911).
caacgagatgtcagaagtt

SEQ ID NO: 494816 - DNA, 19 bp, Mus musculus
  siRNA target sequence for Atp6v1a1 (NM_007508.2,938-956).
ggaggttgatgggaaagta

SEQ ID NO: 494817 - DNA, 19 bp, Mus musculus
  siRNA target sequence for Atp6v1a1 (NM_007508.2,1071-1089).
ggctaccacgtcagtatga

SEQ ID NO: 494818 - DNA, 19 bp, Mus musculus
  siRNA target sequence for Atp6v1a1 (NM_007508.2,1072-1090).
gctaccacgtcagtatgat

SEQ ID NO: 494819 - DNA, 19 bp, Mus musculus
  siRNA target sequence for Atp6v1a1 (NM_007508.2,1211-1229).
gcgagcaggcagagtgaaa

SEQ ID NO: 494820 - DNA, 19 bp, Mus musculus
  siRNA target sequence for Atp6v1a1 (NM_007508.2,1348-1366).
ggggcttggataagaagtt

SEQ ID NO: 494821 - DNA, 19 bp, Mus musculus
  siRNA target sequence for Atp6v1a1 (NM_007508.2,1349-1367).
gggcttggataagaagtta

SEQ ID NO: 494822 - DNA, 19 bp, Mus musculus
  siRNA target sequence for Atp6v1a1 (NM_007508.2,1429-1447).
ccctggacgagtactatga

SEQ ID NO: 494823 - DNA, 19 bp, Mus musculus
  siRNA target sequence for Atp6v1a1 (NM_007508.2,1451-1469).
gcacttcacggagtttgtt

SEQ ID NO: 494824 - DNA, 19 bp, Mus musculus
  siRNA target sequence for Atp6v1a1 (NM_007508.2,1575-1593).
ctggaggtagcaaaactta

SEQ ID NO: 494825 - DNA, 19 bp, Mus musculus
  siRNA target sequence for Atp6v1a1 (NM_007508.2,1577-1595).
ggaggtagcaaaacttatt

SEQ ID NO: 494826 - DNA, 19 bp, Mus musculus
  siRNA target sequence for Atp6v1a1 (NM_007508.2,1580-1598).
ggtagcaaaacttattaaa

SEQ ID NO: 494827 - DNA, 19 bp, Mus musculus
  siRNA target sequence for Atp6v1a1 (NM_007508.2,1675-1693).
ccaacatgatttcattcta

SEQ ID NO: 494828 - DNA, 19 bp, Mus musculus
  siRNA target sequence for Atp6v1a1 (NM_007508.2,1676-1694).
caacatgatttcattctat

SEQ ID NO: 494829 - DNA, 19 bp, Mus musculus
  siRNA target sequence for Atp6v1a1 (NM_007508.2,1769-1787).
catgggggagattctctat

SEQ ID NO: 494830 - DNA, 19 bp, Mus musculus
  siRNA target sequence for Atp6v1a1 (NM_007508.2,1776-1794).
gagattctctataaactct

SEQ ID NO: 494831 - DNA, 19 bp, Mus musculus
  siRNA target sequence for Atp6v1a1 (NM_007508.2,1882-1900).
cattccgtagccttgaaga

SEQ ID NO: 494832 - DNA, 19 bp, Mus musculus
  siRNA target sequence for Atp6v1b1 (NM_134157.2,89-107).
caggtcctcgggattcact

SEQ ID NO: 494833 - DNA, 19 bp, Mus musculus
  siRNA target sequence for Atp6v1b1 (NM_134157.2,150-168).
gctgtgacccgaaactaca

SEQ ID NO: 494834 - DNA, 19 bp, Mus musculus
  siRNA target sequence for Atp6v1b1 (NM_134157.2,151-169).
ctgtgacccgaaactacat

SEQ ID NO: 494835 - DNA, 19 bp, Mus musculus
  siRNA target sequence for Atp6v1b1 (NM_134157.2,153-171).
gtgacccgaaactacatca

SEQ ID NO: 494836 - DNA, 19 bp, Mus musculus
  siRNA target sequence for Atp6v1b1 (NM_134157.2,174-192).
cacccccgagtcacctata

SEQ ID NO: 494837 - DNA, 19 bp, Mus musculus
  siRNA target sequence for Atp6v1b1 (NM_134157.2,177-195).
ccccgagtcacctatagga

SEQ ID NO: 494838 - DNA, 19 bp, Mus musculus
  siRNA target sequence for Atp6v1b1 (NM_134157.2,298-316).
gtggccaggtgcttgaagt

SEQ ID NO: 494839 - DNA, 19 bp, Mus musculus
  siRNA target sequence for Atp6v1b1 (NM_134157.2,351-369).
gggacttcagggattgatt

SEQ ID NO: 494840 - DNA, 19 bp, Mus musculus
  siRNA target sequence for Atp6v1b1 (NM_134157.2,372-390).
cagaagaccacatgtgaat

SEQ ID NO: 494841 - DNA, 19 bp, Mus musculus
  siRNA target sequence for Atp6v1b1 (NM_134157.2,431-449).
gctgggtcggattttcaat

SEQ ID NO: 494842 - DNA, 19 bp, Mus musculus
  siRNA target sequence for Atp6v1b1 (NM_134157.2,494-512).
ggagtttctggacatcaat

SEQ ID NO: 494843 - DNA, 19 bp, Mus musculus
  siRNA target sequence for Atp6v1b1 (NM_134157.2,509-527).
caatggccagccaatcaat

SEQ ID NO: 494844 - DNA, 19 bp, Mus musculus
  siRNA target sequence for Atp6v1b1 (NM_134157.2,566-584).
gggaatctcccccattgat

SEQ ID NO: 494845 - DNA, 19 bp, Mus musculus
  siRNA target sequence for Atp6v1b1 (NM_134157.2,568-586).
gaatctcccccattgatgt

SEQ ID NO: 494846 - DNA, 19 bp, Mus musculus
  siRNA target sequence for Atp6v1b1 (NM_134157.2,574-592).
cccccattgatgtcatgaa

SEQ ID NO: 494847 - DNA, 19 bp, Mus musculus
  siRNA target sequence for Atp6v1b1 (NM_134157.2,723-741).
gacaacttcgccattgtct

SEQ ID NO: 494848 - DNA, 19 bp, Mus musculus
  siRNA target sequence for Atp6v1b1 (NM_134157.2,745-763).
cagccatgggggtgaacat

SEQ ID NO: 494849 - DNA, 19 bp, Mus musculus
  siRNA target sequence for Atp6v1b1 (NM_134157.2,804-822).
ggaaccatgggaaatgtct

SEQ ID NO: 494850 - DNA, 19 bp, Mus musculus
  siRNA target sequence for Atp6v1b1 (NM_134157.2,839-857).
ggccaatgaccctacgatt

SEQ ID NO: 494851 - DNA, 19 bp, Mus musculus
  siRNA target sequence for Atp6v1b1 (NM_134157.2,1011-1029).
cgtggctttcctggatata

SEQ ID NO: 494852 - DNA, 19 bp, Mus musculus
  siRNA target sequence for Atp6v1b1 (NM_134157.2,1168-1186).
cagaggggcagatttatgt

SEQ ID NO: 494853 - DNA, 19 bp, Mus musculus
  siRNA target sequence for Atp6v1b1 (NM_134157.2,1185-1203).
gtggaccgacagctacata

SEQ ID NO: 494854 - DNA, 19 bp, Mus musculus
  siRNA target sequence for Atp6v1b1 (NM_134157.2,1211-1229).
ggtctacccacccatcaat

SEQ ID NO: 494855 - DNA, 19 bp, Mus musculus
  siRNA target sequence for Atp6v1b1 (NM_134157.2,1240-1258).
ccctctcgcgactgatgaa

SEQ ID NO: 494856 - DNA, 19 bp, Mus musculus
  siRNA target sequence for Atp6v1b1 (NM_134157.2,1242-1260).
ctctcgcgactgatgaagt

SEQ ID NO: 494857 - DNA, 19 bp, Mus musculus
  siRNA target sequence for Atp6v1b1 (NM_134157.2,1493-1511).
gaaactgctgcgcatcttt

SEQ ID NO: 494858 - DNA, 19 bp, Mus musculus
  siRNA target sequence for Atp6v1b1 (NM_134157.2,1504-1522).
gcatctttccgaaagagat

SEQ ID NO: 494859 - DNA, 19 bp, Mus musculus
  siRNA target sequence for Atp6v1b2 (NM_007509.2,811-829).
ggctaatgacccaaccatt

SEQ ID NO: 494860 - DNA, 19 bp, Mus musculus
  siRNA target sequence for Atp6v1b2 (NM_007509.2,867-885).
ccgagtttctggcatatca

SEQ ID NO: 494861 - DNA, 19 bp, Mus musculus
  siRNA target sequence for Atp6v1b2 (NM_007509.2,1008-1026).
ccgacttagccacaatcta

SEQ ID NO: 494862 - DNA, 19 bp, Mus musculus
  siRNA target sequence for Atp6v1b2 (NM_007509.2,1009-1027).
cgacttagccacaatctat

SEQ ID NO: 494863 - DNA, 19 bp, Mus musculus
  siRNA target sequence for Atp6v1b2 (NM_007509.2,1090-1108).
gcccaatgacgatatcact

SEQ ID NO: 494864 - DNA, 19 bp, Mus musculus
  siRNA target sequence for Atp6v1b2 (NM_007509.2,1121-1139).
gacttgactgggtacatta

SEQ ID NO: 494865 - DNA, 19 bp, Mus musculus
  siRNA target sequence for Atp6v1b2 (NM_007509.2,1123-1141).
cttgactgggtacattact

SEQ ID NO: 494866 - DNA, 19 bp, Mus musculus
  siRNA target sequence for Atp6v1b2 (NM_007509.2,1168-1186).
gctgcacaacagacagatt

SEQ ID NO: 494867 - DNA, 19 bp, Mus musculus
  siRNA target sequence for Atp6v1b2 (NM_007509.2,1169-1187).
ctgcacaacagacagattt

SEQ ID NO: 494868 - DNA, 19 bp, Mus musculus
  siRNA target sequence for Atp6v1b2 (NM_007509.2,1181-1199).
cagatttaccctcctatta

SEQ ID NO: 494869 - DNA, 19 bp, Mus musculus
  siRNA target sequence for Atp6v1b2 (NM_007509.2,1183-1201).
gatttaccctcctattaat

SEQ ID NO: 494870 - DNA, 19 bp, Mus musculus
  siRNA target sequence for Atp6v1b2 (NM_007509.2,1209-1227).
cctcactctctcggttaat

SEQ ID NO: 494871 - DNA, 19 bp, Mus musculus
  siRNA target sequence for Atp6v1b2 (NM_007509.2,1212-1230).
cactctctcggttaatgaa

SEQ ID NO: 494872 - DNA, 19 bp, Mus musculus
  siRNA target sequence for Atp6v1b2 (NM_007509.2,1233-1251).
cagctatcggagaaggaat

SEQ ID NO: 494873 - DNA, 19 bp, Mus musculus
  siRNA target sequence for Atp6v1b2 (NM_007509.2,1461-1479).
gctggcagttgcttcgaat

SEQ ID NO: 494874 - DNA, 19 bp, Mus musculus
  siRNA target sequence for Atp6v1b2 (NM_007509.2,1513-1531).
gagcaccctgagcgaattt

SEQ ID NO: 494875 - DNA, 19 bp, Mus musculus
  siRNA target sequence for Atp6v1b2 (NM_007509.2,1534-1552).
ccctcgagactctgcaaaa

SEQ ID NO: 494876 - DNA, 19 bp, Mus musculus
  siRNA target sequence for Atp6v1b2 (NM_007509.2,1536-1554).
ctcgagactctgcaaaaca

SEQ ID NO: 494877 - DNA, 19 bp, Mus musculus
  siRNA target sequence for Atp6v1b2 (NM_007509.2,1538-1556).
cgagactctgcaaaacact

SEQ ID NO: 494878 - DNA, 19 bp, Mus musculus
  siRNA target sequence for Atp6v1c1 (NM_025494.1,238-256).
gaccaccaagaacaataat

SEQ ID NO: 494879 - DNA, 19 bp, Mus musculus
  siRNA target sequence for Atp6v1c1 (NM_025494.1,327-345).
cggatgaactggctaaact

SEQ ID NO: 494880 - DNA, 19 bp, Mus musculus
  siRNA target sequence for Atp6v1c1 (NM_025494.1,454-472).
cttggttacttacataaca

SEQ ID NO: 494881 - DNA, 19 bp, Mus musculus
  siRNA target sequence for Atp6v1c1 (NM_025494.1,479-497).
cagtgggatatggctaaat

SEQ ID NO: 494882 - DNA, 19 bp, Mus musculus
  siRNA target sequence for Atp6v1c1 (NM_025494.1,545-563).
ggagtgactcagatcgata

SEQ ID NO: 494883 - DNA, 19 bp, Mus musculus
  siRNA target sequence for Atp6v1c1 (NM_025494.1,546-564).
gagtgactcagatcgataa

SEQ ID NO: 494884 - DNA, 19 bp, Mus musculus
  siRNA target sequence for Atp6v1c1 (NM_025494.1,559-577).
cgataatgacctaaagtct

SEQ ID NO: 494885 - DNA, 19 bp, Mus musculus
  siRNA target sequence for Atp6v1c1 (NM_025494.1,576-594).
ctcgggcgtctgcatacaa

SEQ ID NO: 494886 - DNA, 19 bp, Mus musculus
  siRNA target sequence for Atp6v1c1 (NM_025494.1,578-596).
cgggcgtctgcatacaata

SEQ ID NO: 494887 - DNA, 19 bp, Mus musculus
  siRNA target sequence for Atp6v1c1 (NM_025494.1,579-597).
gggcgtctgcatacaataa

SEQ ID NO: 494888 - DNA, 19 bp, Mus musculus
  siRNA target sequence for Atp6v1c1 (NM_025494.1,582-600).
cgtctgcatacaataacct

SEQ ID NO: 494889 - DNA, 19 bp, Mus musculus
  siRNA target sequence for Atp6v1c1 (NM_025494.1,631-649).
gaacgcgggaagtttgcta

SEQ ID NO: 494890 - DNA, 19 bp, Mus musculus
  siRNA target sequence for Atp6v1c1 (NM_025494.1,661-679).
ggcggaaatcgtgaagaaa

SEQ ID NO: 494891 - DNA, 19 bp, Mus musculus
  siRNA target sequence for Atp6v1c1 (NM_025494.1,663-681).
cggaaatcgtgaagaaaga

SEQ ID NO: 494892 - DNA, 19 bp, Mus musculus
  siRNA target sequence for Atp6v1c1 (NM_025494.1,676-694).
gaaagatgactttgttctt

SEQ ID NO: 494893 - DNA, 19 bp, Mus musculus
  siRNA target sequence for Atp6v1c1 (NM_025494.1,792-810).
caaggtcaagcaatgttct

SEQ ID NO: 494894 - DNA, 19 bp, Mus musculus
  siRNA target sequence for Atp6v1c1 (NM_025494.1,817-835).
ggaccaagacagttatctt

SEQ ID NO: 494895 - DNA, 19 bp, Mus musculus
  siRNA target sequence for Atp6v1c1 (NM_025494.1,841-859).
cgtcaccttgtttagaaaa

SEQ ID NO: 494896 - DNA, 19 bp, Mus musculus
  siRNA target sequence for Atp6v1c1 (NM_025494.1,844-862).
caccttgtttagaaaagca

SEQ ID NO: 494897 - DNA, 19 bp, Mus musculus
  siRNA target sequence for Atp6v1c1 (NM_025494.1,963-981).
ggctgtctactgacaagaa

SEQ ID NO: 494898 - DNA, 19 bp, Mus musculus
  siRNA target sequence for Atp6v1c1 (NM_025494.1,1001-1019).
gtgcggtggcttaaagtga

SEQ ID NO: 494899 - DNA, 19 bp, Mus musculus
  siRNA target sequence for Atp6v1c1 (NM_025494.1,1003-1021).
gcggtggcttaaagtgaat

SEQ ID NO: 494900 - DNA, 19 bp, Mus musculus
  siRNA target sequence for Atp6v1c1 (NM_025494.1,1004-1022).
cggtggcttaaagtgaatt

SEQ ID NO: 494901 - DNA, 19 bp, Mus musculus
  siRNA target sequence for Atp6v1c1 (NM_025494.1,1005-1023).
ggtggcttaaagtgaattt

SEQ ID NO: 494902 - DNA, 19 bp, Mus musculus
  siRNA target sequence for Atp6v1c1 (NM_025494.1,1009-1027).
gcttaaagtgaatttcagt

SEQ ID NO: 494903 - DNA, 19 bp, Mus musculus
  siRNA target sequence for Atp6v1c1 (NM_025494.1,1033-1051).
gtttattgcgtggattcat

SEQ ID NO: 494904 - DNA, 19 bp, Mus musculus
  siRNA target sequence for Atp6v1c1 (NM_025494.1,1075-1093).
ggagtctgttttaaggtat

SEQ ID NO: 494905 - DNA, 19 bp, Mus musculus
  siRNA target sequence for Atp6v1c1 (NM_025494.1,1101-1119).
cggtgaacttccaagcaat

SEQ ID NO: 494906 - DNA, 19 bp, Mus musculus
  siRNA target sequence for Atp6v1c1 (NM_025494.1,1121-1139).
ctccttcagccgaataaga

SEQ ID NO: 494907 - DNA, 19 bp, Mus musculus
  siRNA target sequence for Atp6v1c1 (NM_025494.1,1124-1142).
cttcagccgaataagaagt

SEQ ID NO: 494908 - DNA, 19 bp, Mus musculus
  siRNA target sequence for Atp6v1c1 (NM_025494.1,1163-1181).
gtgctgcacgagttgtaca

SEQ ID NO: 494909 - DNA, 19 bp, Mus musculus
  siRNA target sequence for Atp6v1c1 (NM_025494.1,1256-1274).
gaatactacccctatgtgt

SEQ ID NO: 494910 - DNA, 19 bp, Mus musculus
  siRNA target sequence for Atp6v1c1 (NM_025494.1,1265-1283).
ccctatgtgtattacaaga

SEQ ID NO: 494911 - DNA, 19 bp, Mus musculus
  siRNA target sequence for Atp6v1c2 (NM_133699.1,304-322).
cctggcgataaggaaaatt

SEQ ID NO: 494912 - DNA, 19 bp, Mus musculus
  siRNA target sequence for Atp6v1c2 (NM_133699.1,305-323).
ctggcgataaggaaaattt

SEQ ID NO: 494913 - DNA, 19 bp, Mus musculus
  siRNA target sequence for Atp6v1c2 (NM_133699.1,695-713).
ccgcctacagcgttctgaa

SEQ ID NO: 494914 - DNA, 19 bp, Mus musculus
  siRNA target sequence for Atp6v1c2 (NM_133699.1,764-782).
ggacactgagcgatattgt

SEQ ID NO: 494915 - DNA, 19 bp, Mus musculus
  siRNA target sequence for Atp6v1c2 (NM_133699.1,790-808).
gaagacttcgtacttgatt

SEQ ID NO: 494916 - DNA, 19 bp, Mus musculus
  siRNA target sequence for Atp6v1c2 (NM_133699.1,805-823).
gattctgaatatctcataa

SEQ ID NO: 494917 - DNA, 19 bp, Mus musculus
  siRNA target sequence for Atp6v1c2 (NM_133699.1,837-855).
cgtccccaagtcaagcttt

SEQ ID NO: 494918 - DNA, 19 bp, Mus musculus
  siRNA target sequence for Atp6v1c2 (NM_133699.1,897-915).
ggtccctcggtcaaccaaa

SEQ ID NO: 494919 - DNA, 19 bp, Mus musculus
  siRNA target sequence for Atp6v1c2 (NM_133699.1,898-916).
gtccctcggtcaaccaaat

SEQ ID NO: 494920 - DNA, 19 bp, Mus musculus
  siRNA target sequence for Atp6v1c2 (NM_133699.1,902-920).
ctcggtcaaccaaattgat

SEQ ID NO: 494921 - DNA, 19 bp, Mus musculus
  siRNA target sequence for Atp6v1c2 (NM_133699.1,956-974).
ctctcttccgaaaagtgat

SEQ ID NO: 494922 - DNA, 19 bp, Mus musculus
  siRNA target sequence for Atp6v1c2 (NM_133699.1,964-982).
cgaaaagtgatcgaagatt

SEQ ID NO: 494923 - DNA, 19 bp, Mus musculus
  siRNA target sequence for Atp6v1c2 (NM_133699.1,1008-1026).
gttcattgtccgggaattt

SEQ ID NO: 494924 - DNA, 19 bp, Mus musculus
  siRNA target sequence for Atp6v1c2 (NM_133699.1,1368-1386).
gctcctacagccccataaa

SEQ ID NO: 494925 - DNA, 19 bp, Mus musculus
  siRNA target sequence for Atp6v1c2 (NM_133699.1,1369-1387).
ctcctacagccccataaaa

SEQ ID NO: 494926 - DNA, 19 bp, Mus musculus
  siRNA target sequence for Atp6v1c2 (NM_133699.1,1431-1449).
ccggcacctggatgaagtt

SEQ ID NO: 494927 - DNA, 19 bp, Mus musculus
  siRNA target sequence for Atp6v1c2 (NM_133699.1,1519-1537).
ccctatgtgtacttccata

SEQ ID NO: 494928 - DNA, 19 bp, Mus musculus
  siRNA target sequence for Atp6v1c2 (NM_133699.1,1520-1538).
cctatgtgtacttccatat

SEQ ID NO: 494929 - DNA, 19 bp, Mus musculus
  siRNA target sequence for Atp6v1h (NM_133826.2,179-197).
ctgtcccaactaacatcat

SEQ ID NO: 494930 - DNA, 19 bp, Mus musculus
  siRNA target sequence for Atp6v1h (NM_133826.2,234-252).
gaactggcagtcttatctt

SEQ ID NO: 494931 - DNA, 19 bp, Mus musculus
  siRNA target sequence for Atp6v1h (NM_133826.2,250-268).
cttcaggggcagatgattt

SEQ ID NO: 494932 - DNA, 19 bp, Mus musculus
  siRNA target sequence for Atp6v1h (NM_133826.2,297-315).
gtttgaaatgaaaagaagt

SEQ ID NO: 494933 - DNA, 19 bp, Mus musculus
  siRNA target sequence for Atp6v1h (NM_133826.2,384-402).
gacgcacatctccaaagaa

SEQ ID NO: 494934 - DNA, 19 bp, Mus musculus
  siRNA target sequence for Atp6v1h (NM_133826.2,386-404).
cgcacatctccaaagaaca

SEQ ID NO: 494935 - DNA, 19 bp, Mus musculus
  siRNA target sequence for Atp6v1h (NM_133826.2,536-554).
gccaggatccctttactgt

SEQ ID NO: 494936 - DNA, 19 bp, Mus musculus
  siRNA target sequence for Atp6v1h (NM_133826.2,537-555).
ccaggatccctttactgtt

SEQ ID NO: 494937 - DNA, 19 bp, Mus musculus
  siRNA target sequence for Atp6v1h (NM_133826.2,609-627).
ggaaggcagtgacttaaat

SEQ ID NO: 494938 - DNA, 19 bp, Mus musculus
  siRNA target sequence for Atp6v1h (NM_133826.2,610-628).
gaaggcagtgacttaaatt

SEQ ID NO: 494939 - DNA, 19 bp, Mus musculus
  siRNA target sequence for Atp6v1h (NM_133826.2,614-632).
gcagtgacttaaattacta

SEQ ID NO: 494940 - DNA, 19 bp, Mus musculus
  siRNA target sequence for Atp6v1h (NM_133826.2,630-648).
ctatttcaattggataaaa

SEQ ID NO: 494941 - DNA, 19 bp, Mus musculus
  siRNA target sequence for Atp6v1h (NM_133826.2,681-699).
cggtgttgctgttgaaaca

SEQ ID NO: 494942 - DNA, 19 bp, Mus musculus
  siRNA target sequence for Atp6v1h (NM_133826.2,691-709).
gttgaaacaggaacaatct

SEQ ID NO: 494943 - DNA, 19 bp, Mus musculus
  siRNA target sequence for Atp6v1h (NM_133826.2,694-712).
gaaacaggaacaatctctt

SEQ ID NO: 494944 - DNA, 19 bp, Mus musculus
  siRNA target sequence for Atp6v1h (NM_133826.2,708-726).
ctcttcaagtgatagttct

SEQ ID NO: 494945 - DNA, 19 bp, Mus musculus
  siRNA target sequence for Atp6v1h (NM_133826.2,716-734).
gtgatagttctcagtatgt

SEQ ID NO: 494946 - DNA, 19 bp, Mus musculus
  siRNA target sequence for Atp6v1h (NM_133826.2,802-820).
gcagatggagtgaactgta

SEQ ID NO: 494947 - DNA, 19 bp, Mus musculus
  siRNA target sequence for Atp6v1h (NM_133826.2,803-821).
cagatggagtgaactgtat

SEQ ID NO: 494948 - DNA, 19 bp, Mus musculus
  siRNA target sequence for Atp6v1h (NM_133826.2,805-823).
gatggagtgaactgtataa

SEQ ID NO: 494949 - DNA, 19 bp, Mus musculus
  siRNA target sequence for Atp6v1h (NM_133826.2,826-844).
ggcgttttgagtaacaagt

SEQ ID NO: 494950 - DNA, 19 bp, Mus musculus
  siRNA target sequence for Atp6v1h (NM_133826.2,845-863).
gtggttttcaacttcaata

SEQ ID NO: 494951 - DNA, 19 bp, Mus musculus
  siRNA target sequence for Atp6v1h (NM_133826.2,848-866).
gttttcaacttcaatacca

SEQ ID NO: 494952 - DNA, 19 bp, Mus musculus
  siRNA target sequence for Atp6v1h (NM_133826.2,853-871).
caacttcaataccaaatga

SEQ ID NO: 494953 - DNA, 19 bp, Mus musculus
  siRNA target sequence for Atp6v1h (NM_133826.2,892-910).
gcattcagtcctcaaatgt

SEQ ID NO: 494954 - DNA, 19 bp, Mus musculus
  siRNA target sequence for Atp6v1h (NM_133826.2,915-933).
gcaccttcgtcgctataat

SEQ ID NO: 494955 - DNA, 19 bp, Mus musculus
  siRNA target sequence for Atp6v1h (NM_133826.2,916-934).
caccttcgtcgctataata

SEQ ID NO: 494956 - DNA, 19 bp, Mus musculus
  siRNA target sequence for Atp6v1h (NM_133826.2,919-937).
cttcgtcgctataatatca

SEQ ID NO: 494957 - DNA, 19 bp, Mus musculus
  siRNA target sequence for Atp6v1h (NM_133826.2,976-994).
gagaaagtaacaagaatca

SEQ ID NO: 494958 - DNA, 19 bp, Mus musculus
  siRNA target sequence for Atp6v1h (NM_133826.2,1001-1019).
cagcattccggaatttctt

SEQ ID NO: 494959 - DNA, 19 bp, Mus musculus
  siRNA target sequence for Atp6v1h (NM_133826.2,1008-1026).
ccggaatttcttagaaaaa

SEQ ID NO: 494960 - DNA, 19 bp, Mus musculus
  siRNA target sequence for Atp6v1h (NM_133826.2,1009-1027).
cggaatttcttagaaaaat

SEQ ID NO: 494961 - DNA, 19 bp, Mus musculus
  siRNA target sequence for Atp6v1h (NM_133826.2,1053-1071).
gtatgctctggctatgatt

SEQ ID NO: 494962 - DNA, 19 bp, Mus musculus
  siRNA target sequence for Atp6v1h (NM_133826.2,1062-1080).
ggctatgattcaatgcaaa

SEQ ID NO: 494963 - DNA, 19 bp, Mus musculus
  siRNA target sequence for Atp6v1h (NM_133826.2,1179-1197).
ccaggaccttagctcattt

SEQ ID NO: 494964 - DNA, 19 bp, Mus musculus
  siRNA target sequence for Atp6v1h (NM_133826.2,1182-1200).
ggaccttagctcatttgat

SEQ ID NO: 494965 - DNA, 19 bp, Mus musculus
  siRNA target sequence for Atp6v1h (NM_133826.2,1191-1209).
ctcatttgatgaatacagt

SEQ ID NO: 494966 - DNA, 19 bp, Mus musculus
  siRNA target sequence for Atp6v1h (NM_133826.2,1279-1297).
gccgtgaggttgaatgaga

SEQ ID NO: 494967 - DNA, 19 bp, Mus musculus
  siRNA target sequence for Atp6v1h (NM_133826.2,1373-1391).
ctcacgatgttggagaata

SEQ ID NO: 494968 - DNA, 19 bp, Mus musculus
  siRNA target sequence for Atp6v1h (NM_133826.2,1476-1494).
ccagcaggttcgctacaat

SEQ ID NO: 494969 - DNA, 19 bp, Mus musculus
  siRNA target sequence for Atp6v1h (NM_133826.2,1532-1550).
gggaatatcttggtaaaca

SEQ ID NO: 494970 - DNA, 19 bp, Mus musculus
  siRNA target sequence for Atp7a (NM_009726.2,88-106).
gccaagtgtggatgcaaat

SEQ ID NO: 494971 - DNA, 19 bp, Mus musculus
  siRNA target sequence for Atp7a (NM_009726.2,89-107).
ccaagtgtggatgcaaatt

SEQ ID NO: 494972 - DNA, 19 bp, Mus musculus
  siRNA target sequence for Atp7a (NM_009726.2,95-113).
gtggatgcaaattcaatta

SEQ ID NO: 494973 - DNA, 19 bp, Mus musculus
  siRNA target sequence for Atp7a (NM_009726.2,118-136).
cactgttgagggaatgaca

SEQ ID NO: 494974 - DNA, 19 bp, Mus musculus
  siRNA target sequence for Atp7a (NM_009726.2,125-143).
gagggaatgacatgtattt

SEQ ID NO: 494975 - DNA, 19 bp, Mus musculus
  siRNA target sequence for Atp7a (NM_009726.2,145-163).
ctgtgtccggaccattgaa

SEQ ID NO: 494976 - DNA, 19 bp, Mus musculus
  siRNA target sequence for Atp7a (NM_009726.2,166-184).
gcagattgggaaagtgaat

SEQ ID NO: 494977 - DNA, 19 bp, Mus musculus
  siRNA target sequence for Atp7a (NM_009726.2,222-240).
gtgcaaccattatttatga

SEQ ID NO: 494978 - DNA, 19 bp, Mus musculus
  siRNA target sequence for Atp7a (NM_009726.2,265-283).
cctccaagaagctatcgat

SEQ ID NO: 494979 - DNA, 19 bp, Mus musculus
  siRNA target sequence for Atp7a (NM_009726.2,321-339).
ccctccctgtcttaaccaa

SEQ ID NO: 494980 - DNA, 19 bp, Mus musculus
  siRNA target sequence for Atp7a (NM_009726.2,322-340).
cctccctgtcttaaccaat

SEQ ID NO: 494981 - DNA, 19 bp, Mus musculus
  siRNA target sequence for Atp7a (NM_009726.2,343-361).
cgtgttcctgactgttact

SEQ ID NO: 494982 - DNA, 19 bp, Mus musculus
  siRNA target sequence for Atp7a (NM_009726.2,458-476).
gtagtcaccataattccat

SEQ ID NO: 494983 - DNA, 19 bp, Mus musculus
  siRNA target sequence for Atp7a (NM_009726.2,512-530).
ccagacctcagtttagaca

SEQ ID NO: 494984 - DNA, 19 bp, Mus musculus
  siRNA target sequence for Atp7a (NM_009726.2,617-635).
gggatgacctgccattcat

SEQ ID NO: 494985 - DNA, 19 bp, Mus musculus
  siRNA target sequence for Atp7a (NM_009726.2,622-640).
gacctgccattcatgtact

SEQ ID NO: 494986 - DNA, 19 bp, Mus musculus
  siRNA target sequence for Atp7a (NM_009726.2,675-693).
gtgttcagcgcattaaagt

SEQ ID NO: 494987 - DNA, 19 bp, Mus musculus
  siRNA target sequence for Atp7a (NM_009726.2,677-695).
gttcagcgcattaaagtgt

SEQ ID NO: 494988 - DNA, 19 bp, Mus musculus
  siRNA target sequence for Atp7a (NM_009726.2,703-721).
caaccaagaagctactatt

SEQ ID NO: 494989 - DNA, 19 bp, Mus musculus
  siRNA target sequence for Atp7a (NM_009726.2,706-724).
ccaagaagctactattgtt

SEQ ID NO: 494990 - DNA, 19 bp, Mus musculus
  siRNA target sequence for Atp7a (NM_009726.2,778-796).
gggtttcccagccttcata

SEQ ID NO: 494991 - DNA, 19 bp, Mus musculus
  siRNA target sequence for Atp7a (NM_009726.2,817-835).
caaattgggagccattgat

SEQ ID NO: 494992 - DNA, 19 bp, Mus musculus
  siRNA target sequence for Atp7a (NM_009726.2,850-868).
gaacacaccggtcaaatct

SEQ ID NO: 494993 - DNA, 19 bp, Mus musculus
  siRNA target sequence for Atp7a (NM_009726.2,853-871).
cacaccggtcaaatcttca

SEQ ID NO: 494994 - DNA, 19 bp, Mus musculus
  siRNA target sequence for Atp7a (NM_009726.2,908-926).
gactccacaaccatgttca

SEQ ID NO: 494995 - DNA, 19 bp, Mus musculus
  siRNA target sequence for Atp7a (NM_009726.2,961-979).
caatattgaaagtgcttta

SEQ ID NO: 494996 - DNA, 19 bp, Mus musculus
  siRNA target sequence for Atp7a (NM_009726.2,999-1017).
gcagtatagtagtttcttt

SEQ ID NO: 494997 - DNA, 19 bp, Mus musculus
  siRNA target sequence for Atp7a (NM_009726.2,1000-1018).
cagtatagtagtttcttta

SEQ ID NO: 494998 - DNA, 19 bp, Mus musculus
  siRNA target sequence for Atp7a (NM_009726.2,1002-1020).
gtatagtagtttctttaga

SEQ ID NO: 494999 - DNA, 19 bp, Mus musculus
  siRNA target sequence for Atp7a (NM_009726.2,1007-1025).
gtagtttctttagagaata

SEQ ID NO: 495000 - DNA, 19 bp, Mus musculus
  siRNA target sequence for Atp7a (NM_009726.2,1021-1039).
gaataggtcagccattgta

SEQ ID NO: 495001 - DNA, 19 bp, Mus musculus
  siRNA target sequence for Atp7a (NM_009726.2,1026-1044).
ggtcagccattgtaaagta

SEQ ID NO: 495002 - DNA, 19 bp, Mus musculus
  siRNA target sequence for Atp7a (NM_009726.2,1103-1121).
gggcaatacagagttagta

SEQ ID NO: 495003 - DNA, 19 bp, Mus musculus
  siRNA target sequence for Atp7a (NM_009726.2,1104-1122).
ggcaatacagagttagtat

SEQ ID NO: 495004 - DNA, 19 bp, Mus musculus
  siRNA target sequence for Atp7a (NM_009726.2,1105-1123).
gcaatacagagttagtatt

SEQ ID NO: 495005 - DNA, 19 bp, Mus musculus
  siRNA target sequence for Atp7a (NM_009726.2,1251-1269).
cttgtgtgcagtctataga

SEQ ID NO: 495006 - DNA, 19 bp, Mus musculus
  siRNA target sequence for Atp7a (NM_009726.2,1329-1347).
cagggactattgaatttga

SEQ ID NO: 495007 - DNA, 19 bp, Mus musculus
  siRNA target sequence for Atp7a (NM_009726.2,1340-1358).
gaatttgatcctctactaa

SEQ ID NO: 495008 - DNA, 19 bp, Mus musculus
  siRNA target sequence for Atp7a (NM_009726.2,1371-1389).
ccttgcgagaagcaattga

SEQ ID NO: 495009 - DNA, 19 bp, Mus musculus
  siRNA target sequence for Atp7a (NM_009726.2,1455-1473).
cactggaaacacctctttt

SEQ ID NO: 495010 - DNA, 19 bp, Mus musculus
  siRNA target sequence for Atp7a (NM_009726.2,1467-1485).
ctcttttgccctcaagtaa

SEQ ID NO: 495011 - DNA, 19 bp, Mus musculus
  siRNA target sequence for Atp7a (NM_009726.2,1482-1500).
gtaatgagctagaaaatgt

SEQ ID NO: 495012 - DNA, 19 bp, Mus musculus
  siRNA target sequence for Atp7a (NM_009726.2,1509-1527).
cagttcagaacaagtgtta

SEQ ID NO: 495013 - DNA, 19 bp, Mus musculus
  siRNA target sequence for Atp7a (NM_009726.2,1551-1569).
gtgcttcttgtgtagcaaa

SEQ ID NO: 495014 - DNA, 19 bp, Mus musculus
  siRNA target sequence for Atp7a (NM_009726.2,1554-1572).
cttcttgtgtagcaaacat

SEQ ID NO: 495015 - DNA, 19 bp, Mus musculus
  siRNA target sequence for Atp7a (NM_009726.2,1566-1584).
caaacattgaacgcaattt

SEQ ID NO: 495016 - DNA, 19 bp, Mus musculus
  siRNA target sequence for Atp7a (NM_009726.2,1589-1607).
cgagaagaaggaatatatt

SEQ ID NO: 495017 - DNA, 19 bp, Mus musculus
  siRNA target sequence for Atp7a (NM_009726.2,1673-1691).
cgagtgatagcagagttta

SEQ ID NO: 495018 - DNA, 19 bp, Mus musculus
  siRNA target sequence for Atp7a (NM_009726.2,1820-1838).
cacaaagggatcttctact

SEQ ID NO: 495019 - DNA, 19 bp, Mus musculus
  siRNA target sequence for Atp7a (NM_009726.2,1844-1862).
gtggccctggcaactaaca

SEQ ID NO: 495020 - DNA, 19 bp, Mus musculus
  siRNA target sequence for Atp7a (NM_009726.2,1854-1872).
caactaacaaagcacatat

SEQ ID NO: 495021 - DNA, 19 bp, Mus musculus
  siRNA target sequence for Atp7a (NM_009726.2,1896-1914).
gtcccagagatattatcca

SEQ ID NO: 495022 - DNA, 19 bp, Mus musculus
  siRNA target sequence for Atp7a (NM_009726.2,1902-1920).
gagatattatccataccat

SEQ ID NO: 495023 - DNA, 19 bp, Mus musculus
  siRNA target sequence for Atp7a (NM_009726.2,1912-1930).
ccataccatcggaagctta

SEQ ID NO: 495024 - DNA, 19 bp, Mus musculus
  siRNA target sequence for Atp7a (NM_009726.2,1967-1985).
gccaaccacttagatcata

SEQ ID NO: 495025 - DNA, 19 bp, Mus musculus
  siRNA target sequence for Atp7a (NM_009726.2,1969-1987).
caaccacttagatcataaa

SEQ ID NO: 495026 - DNA, 19 bp, Mus musculus
  siRNA target sequence for Atp7a (NM_009726.2,1972-1990).
ccacttagatcataaacga

SEQ ID NO: 495027 - DNA, 19 bp, Mus musculus
  siRNA target sequence for Atp7a (NM_009726.2,2052-2070).
gactgatggtctatatgat

SEQ ID NO: 495028 - DNA, 19 bp, Mus musculus
  siRNA target sequence for Atp7a (NM_009726.2,2062-2080).
ctatatgatggttatggat

SEQ ID NO: 495029 - DNA, 19 bp, Mus musculus
  siRNA target sequence for Atp7a (NM_009726.2,2091-2109).
caactcttcaccataatca

SEQ ID NO: 495030 - DNA, 19 bp, Mus musculus
  siRNA target sequence for Atp7a (NM_009726.2,2094-2112).
ctcttcaccataatcagaa

SEQ ID NO: 495031 - DNA, 19 bp, Mus musculus
  siRNA target sequence for Atp7a (NM_009726.2,2099-2117).
caccataatcagaacatga

SEQ ID NO: 495032 - DNA, 19 bp, Mus musculus
  siRNA target sequence for Atp7a (NM_009726.2,2171-2189).
ctgccaggactgtccatta

SEQ ID NO: 495033 - DNA, 19 bp, Mus musculus
  siRNA target sequence for Atp7a (NM_009726.2,2174-2192).
ccaggactgtccattatga

SEQ ID NO: 495034 - DNA, 19 bp, Mus musculus
  siRNA target sequence for Atp7a (NM_009726.2,2175-2193).
caggactgtccattatgaa

SEQ ID NO: 495035 - DNA, 19 bp, Mus musculus
  siRNA target sequence for Atp7a (NM_009726.2,2177-2195).
ggactgtccattatgaatt

SEQ ID NO: 495036 - DNA, 19 bp, Mus musculus
  siRNA target sequence for Atp7a (NM_009726.2,2178-2196).
gactgtccattatgaattt

SEQ ID NO: 495037 - DNA, 19 bp, Mus musculus
  siRNA target sequence for Atp7a (NM_009726.2,2180-2198).
ctgtccattatgaatttgt

SEQ ID NO: 495038 - DNA, 19 bp, Mus musculus
  siRNA target sequence for Atp7a (NM_009726.2,2232-2250).
gtggcggctggtacttcta

SEQ ID NO: 495039 - DNA, 19 bp, Mus musculus
  siRNA target sequence for Atp7a (NM_009726.2,2236-2254).
cggctggtacttctacatt

SEQ ID NO: 495040 - DNA, 19 bp, Mus musculus
  siRNA target sequence for Atp7a (NM_009726.2,2384-2402).
cccattaccttctttgata

SEQ ID NO: 495041 - DNA, 19 bp, Mus musculus
  siRNA target sequence for Atp7a (NM_009726.2,2386-2404).
cattaccttctttgataca

SEQ ID NO: 495042 - DNA, 19 bp, Mus musculus
  siRNA target sequence for Atp7a (NM_009726.2,2408-2426).
cctatgctgtttgtgttta

SEQ ID NO: 495043 - DNA, 19 bp, Mus musculus
  siRNA target sequence for Atp7a (NM_009726.2,2409-2427).
ctatgctgtttgtgtttat

SEQ ID NO: 495044 - DNA, 19 bp, Mus musculus
  siRNA target sequence for Atp7a (NM_009726.2,2436-2454).
gacgatggctggaacatat

SEQ ID NO: 495045 - DNA, 19 bp, Mus musculus
  siRNA target sequence for Atp7a (NM_009726.2,2473-2491).
cgaggctcttgcaaagcta

SEQ ID NO: 495046 - DNA, 19 bp, Mus musculus
  siRNA target sequence for Atp7a (NM_009726.2,2474-2492).
gaggctcttgcaaagctaa

SEQ ID NO: 495047 - DNA, 19 bp, Mus musculus
  siRNA target sequence for Atp7a (NM_009726.2,2476-2494).
ggctcttgcaaagctaatt

SEQ ID NO: 495048 - DNA, 19 bp, Mus musculus
  siRNA target sequence for Atp7a (NM_009726.2,2505-2523).
caactgaagccactattgt

SEQ ID NO: 495049 - DNA, 19 bp, Mus musculus
  siRNA target sequence for Atp7a (NM_009726.2,2566-2584).
ggatgtggaacttgtacaa

SEQ ID NO: 495050 - DNA, 19 bp, Mus musculus
  siRNA target sequence for Atp7a (NM_009726.2,2579-2597).
gtacaacgtggagatatca

SEQ ID NO: 495051 - DNA, 19 bp, Mus musculus
  siRNA target sequence for Atp7a (NM_009726.2,2719-2737).
ggtgattgcaggttccatt

SEQ ID NO: 495052 - DNA, 19 bp, Mus musculus
  siRNA target sequence for Atp7a (NM_009726.2,2720-2738).
gtgattgcaggttccatta

SEQ ID NO: 495053 - DNA, 19 bp, Mus musculus
  siRNA target sequence for Atp7a (NM_009726.2,2755-2773).
cctcatccgagcaacacat

SEQ ID NO: 495054 - DNA, 19 bp, Mus musculus
  siRNA target sequence for Atp7a (NM_009726.2,2771-2789).
catgtgggagcagatacaa

SEQ ID NO: 495055 - DNA, 19 bp, Mus musculus
  siRNA target sequence for Atp7a (NM_009726.2,2887-2905).
catcgtcttggtttccatt

SEQ ID NO: 495056 - DNA, 19 bp, Mus musculus
  siRNA target sequence for Atp7a (NM_009726.2,2891-2909).
gtcttggtttccattgtta

SEQ ID NO: 495057 - DNA, 19 bp, Mus musculus
  siRNA target sequence for Atp7a (NM_009726.2,2911-2929).
cctcttggtgtggattata

SEQ ID NO: 495058 - DNA, 19 bp, Mus musculus
  siRNA target sequence for Atp7a (NM_009726.2,2912-2930).
ctcttggtgtggattataa

SEQ ID NO: 495059 - DNA, 19 bp, Mus musculus
  siRNA target sequence for Atp7a (NM_009726.2,2961-2979).
cctactttcccggctataa

SEQ ID NO: 495060 - DNA, 19 bp, Mus musculus
  siRNA target sequence for Atp7a (NM_009726.2,2962-2980).
ctactttcccggctataat

SEQ ID NO: 495061 - DNA, 19 bp, Mus musculus
  siRNA target sequence for Atp7a (NM_009726.2,2965-2983).
ctttcccggctataataga

SEQ ID NO: 495062 - DNA, 19 bp, Mus musculus
  siRNA target sequence for Atp7a (NM_009726.2,3017-3035).
gctttccaagcctctatca

SEQ ID NO: 495063 - DNA, 19 bp, Mus musculus
  siRNA target sequence for Atp7a (NM_009726.2,3030-3048).
ctatcacggttctgtgtat

SEQ ID NO: 495064 - DNA, 19 bp, Mus musculus
  siRNA target sequence for Atp7a (NM_009726.2,3118-3136).
gaatggcatacttatcaaa

SEQ ID NO: 495065 - DNA, 19 bp, Mus musculus
  siRNA target sequence for Atp7a (NM_009726.2,3147-3165).
cactggaaatggctcataa

SEQ ID NO: 495066 - DNA, 19 bp, Mus musculus
  siRNA target sequence for Atp7a (NM_009726.2,3166-3184).
ggtaaaggtagtggtattt

SEQ ID NO: 495067 - DNA, 19 bp, Mus musculus
  siRNA target sequence for Atp7a (NM_009726.2,3173-3191).
gtagtggtatttgataaga

SEQ ID NO: 495068 - DNA, 19 bp, Mus musculus
  siRNA target sequence for Atp7a (NM_009726.2,3210-3228).
gaaccccagtagtgaatca

SEQ ID NO: 495069 - DNA, 19 bp, Mus musculus
  siRNA target sequence for Atp7a (NM_009726.2,3213-3231).
ccccagtagtgaatcaagt

SEQ ID NO: 495070 - DNA, 19 bp, Mus musculus
  siRNA target sequence for Atp7a (NM_009726.2,3216-3234).
cagtagtgaatcaagtgaa

SEQ ID NO: 495071 - DNA, 19 bp, Mus musculus
  siRNA target sequence for Atp7a (NM_009726.2,3236-3254).
gttctcgtggaaagtaaca

SEQ ID NO: 495072 - DNA, 19 bp, Mus musculus
  siRNA target sequence for Atp7a (NM_009726.2,3239-3257).
ctcgtggaaagtaacaaga

SEQ ID NO: 495073 - DNA, 19 bp, Mus musculus
  siRNA target sequence for Atp7a (NM_009726.2,3244-3262).
ggaaagtaacaagatatca

SEQ ID NO: 495074 - DNA, 19 bp, Mus musculus
  siRNA target sequence for Atp7a (NM_009726.2,3284-3302).
gtggggactgcagaaagta

SEQ ID NO: 495075 - DNA, 19 bp, Mus musculus
  siRNA target sequence for Atp7a (NM_009726.2,3287-3305).
gggactgcagaaagtaaca

SEQ ID NO: 495076 - DNA, 19 bp, Mus musculus
  siRNA target sequence for Atp7a (NM_009726.2,3289-3307).
gactgcagaaagtaacagt

SEQ ID NO: 495077 - DNA, 19 bp, Mus musculus
  siRNA target sequence for Atp7a (NM_009726.2,3321-3339).
gagcagctgtaaccaaata

SEQ ID NO: 495078 - DNA, 19 bp, Mus musculus
  siRNA target sequence for Atp7a (NM_009726.2,3323-3341).
gcagctgtaaccaaatatt

SEQ ID NO: 495079 - DNA, 19 bp, Mus musculus
  siRNA target sequence for Atp7a (NM_009726.2,3327-3345).
ctgtaaccaaatattgcaa

SEQ ID NO: 495080 - DNA, 19 bp, Mus musculus
  siRNA target sequence for Atp7a (NM_009726.2,3329-3347).
gtaaccaaatattgcaaaa

SEQ ID NO: 495081 - DNA, 19 bp, Mus musculus
  siRNA target sequence for Atp7a (NM_009726.2,3407-3425).
ggtattagctgtaaagtca

SEQ ID NO: 495082 - DNA, 19 bp, Mus musculus
  siRNA target sequence for Atp7a (NM_009726.2,3427-3445).
caatattgaaggtttgcta

SEQ ID NO: 495083 - DNA, 19 bp, Mus musculus
  siRNA target sequence for Atp7a (NM_009726.2,3434-3452).
gaaggtttgctacataaga

SEQ ID NO: 495084 - DNA, 19 bp, Mus musculus
  siRNA target sequence for Atp7a (NM_009726.2,3437-3455).
ggtttgctacataagagta

SEQ ID NO: 495085 - DNA, 19 bp, Mus musculus
  siRNA target sequence for Atp7a (NM_009726.2,3443-3461).
ctacataagagtaacttga

SEQ ID NO: 495086 - DNA, 19 bp, Mus musculus
  siRNA target sequence for Atp7a (NM_009726.2,3489-3507).
catccctggttcaaattga

SEQ ID NO: 495087 - DNA, 19 bp, Mus musculus
  siRNA target sequence for Atp7a (NM_009726.2,3518-3536).
gaacagtcatcaacttcat

SEQ ID NO: 495088 - DNA, 19 bp, Mus musculus
  siRNA target sequence for Atp7a (NM_009726.2,3564-3582).
caaatgctgttaatactca

SEQ ID NO: 495089 - DNA, 19 bp, Mus musculus
  siRNA target sequence for Atp7a (NM_009726.2,3607-3625).
ccgggaatggatgattaga

SEQ ID NO: 495090 - DNA, 19 bp, Mus musculus
  siRNA target sequence for Atp7a (NM_009726.2,3608-3626).
cgggaatggatgattagaa

SEQ ID NO: 495091 - DNA, 19 bp, Mus musculus
  siRNA target sequence for Atp7a (NM_009726.2,3610-3628).
ggaatggatgattagaaat

SEQ ID NO: 495092 - DNA, 19 bp, Mus musculus
  siRNA target sequence for Atp7a (NM_009726.2,3630-3648).
gtcttgtcataagtaatga

SEQ ID NO: 495093 - DNA, 19 bp, Mus musculus
  siRNA target sequence for Atp7a (NM_009726.2,3762-3780).
ccgagttggctgtacacat

SEQ ID NO: 495094 - DNA, 19 bp, Mus musculus
  siRNA target sequence for Atp7a (NM_009726.2,3789-3807).
ctatgggtttagaagtagt

SEQ ID NO: 495095 - DNA, 19 bp, Mus musculus
  siRNA target sequence for Atp7a (NM_009726.2,3795-3813).
gtttagaagtagttctgat

SEQ ID NO: 495096 - DNA, 19 bp, Mus musculus
  siRNA target sequence for Atp7a (NM_009726.2,3852-3870).
ctcaggttggcattactaa

SEQ ID NO: 495097 - DNA, 19 bp, Mus musculus
  siRNA target sequence for Atp7a (NM_009726.2,3934-3952).
caaacgtgtagcaatggta

SEQ ID NO: 495098 - DNA, 19 bp, Mus musculus
  siRNA target sequence for Atp7a (NM_009726.2,3984-4002).
caatggcaaacgttggaat

SEQ ID NO: 495099 - DNA, 19 bp, Mus musculus
  siRNA target sequence for Atp7a (NM_009726.2,4076-4094).
gttgtggcaagtattgact

SEQ ID NO: 495100 - DNA, 19 bp, Mus musculus
  siRNA target sequence for Atp7a (NM_009726.2,4082-4100).
gcaagtattgacttgtcaa

SEQ ID NO: 495101 - DNA, 19 bp, Mus musculus
  siRNA target sequence for Atp7a (NM_009726.2,4107-4125).
cagtcaagaggattcgaat

SEQ ID NO: 495102 - DNA, 19 bp, Mus musculus
  siRNA target sequence for Atp7a (NM_009726.2,4111-4129).
caagaggattcgaatcaat

SEQ ID NO: 495103 - DNA, 19 bp, Mus musculus
  siRNA target sequence for Atp7a (NM_009726.2,4114-4132).
gaggattcgaatcaatttt

SEQ ID NO: 495104 - DNA, 19 bp, Mus musculus
  siRNA target sequence for Atp7a (NM_009726.2,4186-4204).
cctgcccatcggtttggtt

SEQ ID NO: 495105 - DNA, 19 bp, Mus musculus
  siRNA target sequence for Atp7a (NM_009726.2,4191-4209).
ccatcggtttggttttaca

SEQ ID NO: 495106 - DNA, 19 bp, Mus musculus
  siRNA target sequence for Atp7a (NM_009726.2,4192-4210).
catcggtttggttttacaa

SEQ ID NO: 495107 - DNA, 19 bp, Mus musculus
  siRNA target sequence for Atp7a (NM_009726.2,4287-4305).
ggaaacctacgtatgacaa

SEQ ID NO: 495108 - DNA, 19 bp, Mus musculus
  siRNA target sequence for Atp7a (NM_009726.2,4288-4306).
gaaacctacgtatgacaat

SEQ ID NO: 495109 - DNA, 19 bp, Mus musculus
  siRNA target sequence for Atp7a (NM_009726.2,4296-4314).
cgtatgacaattatgagtt

SEQ ID NO: 495110 - DNA, 19 bp, Mus musculus
  siRNA target sequence for Atp7a (NM_009726.2,4376-4394).
gatgacacctcaagaaatt

SEQ ID NO: 495111 - DNA, 19 bp, Mus musculus
  siRNA target sequence for Atp7a (NM_009726.2,4414-4432).
ggaccggattgtcaactat

SEQ ID NO: 495112 - DNA, 19 bp, Mus musculus
  siRNA target sequence for Atp7a (NM_009726.2,4418-4436).
cggattgtcaactatagca

SEQ ID NO: 495113 - DNA, 19 bp, Mus musculus
  siRNA target sequence for Atp7a (NM_009726.2,4437-4455).
gagcctccataaattcact

SEQ ID NO: 495114 - DNA, 19 bp, Mus musculus
  siRNA target sequence for Atp7a (NM_009726.2,4474-4492).
cctgaacagcgttgttact

SEQ ID NO: 495115 - DNA, 19 bp, Mus musculus
  siRNA target sequence for Atp7a (NM_009726.2,4475-4493).
ctgaacagcgttgttacta

SEQ ID NO: 495116 - DNA, 19 bp, Mus musculus
  siRNA target sequence for Atp7a (NM_009726.2,4477-4495).
gaacagcgttgttactagt

SEQ ID NO: 495117 - DNA, 19 bp, Mus musculus
  siRNA target sequence for Atp7a (NM_009726.2,4480-4498).
cagcgttgttactagtgaa

SEQ ID NO: 495118 - DNA, 19 bp, Mus musculus
  siRNA target sequence for Atp7a (NM_009726.2,4525-4543).
cgacttccgggaagatgat

SEQ ID NO: 495119 - DNA, 19 bp, Mus musculus
  siRNA target sequence for Atp7b (NM_007511.1,237-255).
cagtcggaaaatcttatct

SEQ ID NO: 495120 - DNA, 19 bp, Mus musculus
  siRNA target sequence for Atp7b (NM_007511.1,239-257).
gtcggaaaatcttatctaa

SEQ ID NO: 495121 - DNA, 19 bp, Mus musculus
  siRNA target sequence for Atp7b (NM_007511.1,302-320).
gcttcgccttcgacaatgt

SEQ ID NO: 495122 - DNA, 19 bp, Mus musculus
  siRNA target sequence for Atp7b (NM_007511.1,303-321).
cttcgccttcgacaatgtt

SEQ ID NO: 495123 - DNA, 19 bp, Mus musculus
  siRNA target sequence for Atp7b (NM_007511.1,385-403).
ctgggcatgacttgtcatt

SEQ ID NO: 495124 - DNA, 19 bp, Mus musculus
  siRNA target sequence for Atp7b (NM_007511.1,530-548).
gccttcagattgaggatat

SEQ ID NO: 495125 - DNA, 19 bp, Mus musculus
  siRNA target sequence for Atp7b (NM_007511.1,840-858).
cttaaggctgggaccaatt

SEQ ID NO: 495126 - DNA, 19 bp, Mus musculus
  siRNA target sequence for Atp7b (NM_007511.1,845-863).
ggctgggaccaattgatgt

SEQ ID NO: 495127 - DNA, 19 bp, Mus musculus
  siRNA target sequence for Atp7b (NM_007511.1,853-871).
ccaattgatgtcaacaagt

SEQ ID NO: 495128 - DNA, 19 bp, Mus musculus
  siRNA target sequence for Atp7b (NM_007511.1,854-872).
caattgatgtcaacaagtt

SEQ ID NO: 495129 - DNA, 19 bp, Mus musculus
  siRNA target sequence for Atp7b (NM_007511.1,874-892).
gaaagcactaacctaaaga

SEQ ID NO: 495130 - DNA, 19 bp, Mus musculus
  siRNA target sequence for Atp7b (NM_007511.1,905-923).
ctcctgtccagatttccaa

SEQ ID NO: 495131 - DNA, 19 bp, Mus musculus
  siRNA target sequence for Atp7b (NM_007511.1,910-928).
gtccagatttccaatcatt

SEQ ID NO: 495132 - DNA, 19 bp, Mus musculus
  siRNA target sequence for Atp7b (NM_007511.1,965-983).
ccctcccactaagaataga

SEQ ID NO: 495133 - DNA, 19 bp, Mus musculus
  siRNA target sequence for Atp7b (NM_007511.1,984-1002).
cggcatgcactgtaaatca

SEQ ID NO: 495134 - DNA, 19 bp, Mus musculus
  siRNA target sequence for Atp7b (NM_007511.1,1071-1089).
gaacaaaaccgcccaaata

SEQ ID NO: 495135 - DNA, 19 bp, Mus musculus
  siRNA target sequence for Atp7b (NM_007511.1,1079-1097).
ccgcccaaatacagtatga

SEQ ID NO: 495136 - DNA, 19 bp, Mus musculus
  siRNA target sequence for Atp7b (NM_007511.1,1144-1162).
ctaccacctgggcacttta

SEQ ID NO: 495137 - DNA, 19 bp, Mus musculus
  siRNA target sequence for Atp7b (NM_007511.1,1150-1168).
cctgggcactttaaagtgt

SEQ ID NO: 495138 - DNA, 19 bp, Mus musculus
  siRNA target sequence for Atp7b (NM_007511.1,1438-1456).
gtgtctgtgaattctgaaa

SEQ ID NO: 495139 - DNA, 19 bp, Mus musculus
  siRNA target sequence for Atp7b (NM_007511.1,1482-1500).
cttcaaatctgggaattct

SEQ ID NO: 495140 - DNA, 19 bp, Mus musculus
  siRNA target sequence for Atp7b (NM_007511.1,1664-1682).
gtgcgtcctgtgtgtctaa

SEQ ID NO: 495141 - DNA, 19 bp, Mus musculus
  siRNA target sequence for Atp7b (NM_007511.1,1698-1716).
ccagagacatgctggtatt

SEQ ID NO: 495142 - DNA, 19 bp, Mus musculus
  siRNA target sequence for Atp7b (NM_007511.1,1723-1741).
gtgttggtcgccttgatgt

SEQ ID NO: 495143 - DNA, 19 bp, Mus musculus
  siRNA target sequence for Atp7b (NM_007511.1,1858-1876).
ggtgacatcgaactgatta

SEQ ID NO: 495144 - DNA, 19 bp, Mus musculus
  siRNA target sequence for Atp7b (NM_007511.1,1859-1877).
gtgacatcgaactgattat

SEQ ID NO: 495145 - DNA, 19 bp, Mus musculus
  siRNA target sequence for Atp7b (NM_007511.1,1898-1916).
cctgtgtccacaacataga

SEQ ID NO: 495146 - DNA, 19 bp, Mus musculus
  siRNA target sequence for Atp7b (NM_007511.1,1920-1938).
caagctcacaaggacaaat

SEQ ID NO: 495147 - DNA, 19 bp, Mus musculus
  siRNA target sequence for Atp7b (NM_007511.1,1931-1949).
ggacaaatggcatcactta

SEQ ID NO: 495148 - DNA, 19 bp, Mus musculus
  siRNA target sequence for Atp7b (NM_007511.1,1986-2004).
gaagttcgatcctgaaatt

SEQ ID NO: 495149 - DNA, 19 bp, Mus musculus
  siRNA target sequence for Atp7b (NM_007511.1,1989-2007).
gttcgatcctgaaattgtt

SEQ ID NO: 495150 - DNA, 19 bp, Mus musculus
  siRNA target sequence for Atp7b (NM_007511.1,2012-2030).
cccgtgacatcatcaagat

SEQ ID NO: 495151 - DNA, 19 bp, Mus musculus
  siRNA target sequence for Atp7b (NM_007511.1,2091-2109).
ggaccacaagacggaaata

SEQ ID NO: 495152 - DNA, 19 bp, Mus musculus
  siRNA target sequence for Atp7b (NM_007511.1,2092-2110).
gaccacaagacggaaataa

SEQ ID NO: 495153 - DNA, 19 bp, Mus musculus
  siRNA target sequence for Atp7b (NM_007511.1,2164-2182).
ggattgatggtctacatgt

SEQ ID NO: 495154 - DNA, 19 bp, Mus musculus
  siRNA target sequence for Atp7b (NM_007511.1,2237-2255).
caggactgtccgttctcaa

SEQ ID NO: 495155 - DNA, 19 bp, Mus musculus
  siRNA target sequence for Atp7b (NM_007511.1,2240-2258).
gactgtccgttctcaatct

SEQ ID NO: 495156 - DNA, 19 bp, Mus musculus
  siRNA target sequence for Atp7b (NM_007511.1,2242-2260).
ctgtccgttctcaatctca

SEQ ID NO: 495157 - DNA, 19 bp, Mus musculus
  siRNA target sequence for Atp7b (NM_007511.1,2248-2266).
gttctcaatctcatcttct

SEQ ID NO: 495158 - DNA, 19 bp, Mus musculus
  siRNA target sequence for Atp7b (NM_007511.1,2274-2292).
gtgtacctttgtccaattt

SEQ ID NO: 495159 - DNA, 19 bp, Mus musculus
  siRNA target sequence for Atp7b (NM_007511.1,2310-2328).
ctacgtacaagcctacaaa

SEQ ID NO: 495160 - DNA, 19 bp, Mus musculus
  siRNA target sequence for Atp7b (NM_007511.1,2367-2385).
cgtgctcgccacaaccatt

SEQ ID NO: 495161 - DNA, 19 bp, Mus musculus
  siRNA target sequence for Atp7b (NM_007511.1,2442-2460).
gagccccgtgaccttcttt

SEQ ID NO: 495162 - DNA, 19 bp, Mus musculus
  siRNA target sequence for Atp7b (NM_007511.1,2444-2462).
gccccgtgaccttctttga

SEQ ID NO: 495163 - DNA, 19 bp, Mus musculus
  siRNA target sequence for Atp7b (NM_007511.1,2514-2532).
cgtggccaagagcaaaact

SEQ ID NO: 495164 - DNA, 19 bp, Mus musculus
  siRNA target sequence for Atp7b (NM_007511.1,2589-2607).
cctgggtgaggacaactta

SEQ ID NO: 495165 - DNA, 19 bp, Mus musculus
  siRNA target sequence for Atp7b (NM_007511.1,2590-2608).
ctgggtgaggacaacttaa

SEQ ID NO: 495166 - DNA, 19 bp, Mus musculus
  siRNA target sequence for Atp7b (NM_007511.1,2701-2719).
gtcctcgaaggcaatacca

SEQ ID NO: 495167 - DNA, 19 bp, Mus musculus
  siRNA target sequence for Atp7b (NM_007511.1,2750-2768).
ccatgcctgtcactaagaa

SEQ ID NO: 495168 - DNA, 19 bp, Mus musculus
  siRNA target sequence for Atp7b (NM_007511.1,2782-2800).
gtgattgctggctctatta

SEQ ID NO: 495169 - DNA, 19 bp, Mus musculus
  siRNA target sequence for Atp7b (NM_007511.1,2811-2829).
ctctgtgctccttaaagct

SEQ ID NO: 495170 - DNA, 19 bp, Mus musculus
  siRNA target sequence for Atp7b (NM_007511.1,2849-2867).
caactttggctcagattgt

SEQ ID NO: 495171 - DNA, 19 bp, Mus musculus
  siRNA target sequence for Atp7b (NM_007511.1,2920-2938).
gaccggttcagtggatatt

SEQ ID NO: 495172 - DNA, 19 bp, Mus musculus
  siRNA target sequence for Atp7b (NM_007511.1,2922-2940).
ccggttcagtggatatttt

SEQ ID NO: 495173 - DNA, 19 bp, Mus musculus
  siRNA target sequence for Atp7b (NM_007511.1,3016-3034).
gttcagaagtactttccta

SEQ ID NO: 495174 - DNA, 19 bp, Mus musculus
  siRNA target sequence for Atp7b (NM_007511.1,3053-3071).
cgcagacagaggtgatcat

SEQ ID NO: 495175 - DNA, 19 bp, Mus musculus
  siRNA target sequence for Atp7b (NM_007511.1,3176-3194).
cccagaacggtgtcctaat

SEQ ID NO: 495176 - DNA, 19 bp, Mus musculus
  siRNA target sequence for Atp7b (NM_007511.1,3178-3196).
cagaacggtgtcctaatca

SEQ ID NO: 495177 - DNA, 19 bp, Mus musculus
  siRNA target sequence for Atp7b (NM_007511.1,3180-3198).
gaacggtgtcctaatcaaa

SEQ ID NO: 495178 - DNA, 19 bp, Mus musculus
  siRNA target sequence for Atp7b (NM_007511.1,3213-3231).
ggagatggcacacaagata

SEQ ID NO: 495179 - DNA, 19 bp, Mus musculus
  siRNA target sequence for Atp7b (NM_007511.1,3234-3252).
gaccgttatgtttgacaaa

SEQ ID NO: 495180 - DNA, 19 bp, Mus musculus
  siRNA target sequence for Atp7b (NM_007511.1,3383-3401).
gcgtggccgtcactaaata

SEQ ID NO: 495181 - DNA, 19 bp, Mus musculus
  siRNA target sequence for Atp7b (NM_007511.1,3385-3403).
gtggccgtcactaaatact

SEQ ID NO: 495182 - DNA, 19 bp, Mus musculus
  siRNA target sequence for Atp7b (NM_007511.1,3616-3634).
cggcgaaacggtttaacca

SEQ ID NO: 495183 - DNA, 19 bp, Mus musculus
  siRNA target sequence for Atp7b (NM_007511.1,3617-3635).
ggcgaaacggtttaaccat

SEQ ID NO: 495184 - DNA, 19 bp, Mus musculus
  siRNA target sequence for Atp7b (NM_007511.1,3660-3678).
gacagatcacgagatgaaa

SEQ ID NO: 495185 - DNA, 19 bp, Mus musculus
  siRNA target sequence for Atp7b (NM_007511.1,4005-4023).
cgggactggcacagatgtt

SEQ ID NO: 495186 - DNA, 19 bp, Mus musculus
  siRNA target sequence for Atp7b (NM_007511.1,4045-4063).
gtcctgatcagaaatgact

SEQ ID NO: 495187 - DNA, 19 bp, Mus musculus
  siRNA target sequence for Atp7b (NM_007511.1,4048-4066).
ctgatcagaaatgacttat

SEQ ID NO: 495188 - DNA, 19 bp, Mus musculus
  siRNA target sequence for Atp7b (NM_007511.1,4109-4127).
ggaggatccgggtcaatct

SEQ ID NO: 495189 - DNA, 19 bp, Mus musculus
  siRNA target sequence for Atp7b (NM_007511.1,4128-4146).
ggtgctggcattgatttat

SEQ ID NO: 495190 - DNA, 19 bp, Mus musculus
  siRNA target sequence for Atp7b (NM_007511.1,4149-4167).
catggttgggatacctatt

SEQ ID NO: 495191 - DNA, 19 bp, Mus musculus
  siRNA target sequence for Atp7b (NM_007511.1,4152-4170).
ggttgggatacctattgct

SEQ ID NO: 495192 - DNA, 19 bp, Mus musculus
  siRNA target sequence for Atp7b (NM_007511.1,4452-4470).
gacgtcagacagattgtct

SEQ ID NO: 495193 - DNA, 19 bp, Mus musculus
  siRNA target sequence for Atp7b (NM_007511.1,4489-4507).
gaggacggtggcgacaaat

SEQ ID NO: 495194 - DNA, 19 bp, Mus musculus
  siRNA target sequence for Atp8a1 (NM_009727.1,103-121).
gaagtgagaaccatcttca

SEQ ID NO: 495195 - DNA, 19 bp, Mus musculus
  siRNA target sequence for Atp8a1 (NM_009727.1,126-144).
ccagcctcagctgacaaaa

SEQ ID NO: 495196 - DNA, 19 bp, Mus musculus
  siRNA target sequence for Atp8a1 (NM_009727.1,177-195).
caacgtgatcacattcctt

SEQ ID NO: 495197 - DNA, 19 bp, Mus musculus
  siRNA target sequence for Atp8a1 (NM_009727.1,193-211).
cttccgaggttcctctatt

SEQ ID NO: 495198 - DNA, 19 bp, Mus musculus
  siRNA target sequence for Atp8a1 (NM_009727.1,197-215).
cgaggttcctctattctca

SEQ ID NO: 495199 - DNA, 19 bp, Mus musculus
  siRNA target sequence for Atp8a1 (NM_009727.1,220-238).
cgaagagcggctaattcgt

SEQ ID NO: 495200 - DNA, 19 bp, Mus musculus
  siRNA target sequence for Atp8a1 (NM_009727.1,221-239).
gaagagcggctaattcgtt

SEQ ID NO: 495201 - DNA, 19 bp, Mus musculus
  siRNA target sequence for Atp8a1 (NM_009727.1,282-300).
gccgaccggtcgttacaca

SEQ ID NO: 495202 - DNA, 19 bp, Mus musculus
  siRNA target sequence for Atp8a1 (NM_009727.1,283-301).
ccgaccggtcgttacacaa

SEQ ID NO: 495203 - DNA, 19 bp, Mus musculus
  siRNA target sequence for Atp8a1 (NM_009727.1,329-347).
ctgtggctgctattaaaga

SEQ ID NO: 495204 - DNA, 19 bp, Mus musculus
  siRNA target sequence for Atp8a1 (NM_009727.1,402-420).
gacacaagttttgagaaat

SEQ ID NO: 495205 - DNA, 19 bp, Mus musculus
  siRNA target sequence for Atp8a1 (NM_009727.1,422-440).
gtgcatgggaaattgttca

SEQ ID NO: 495206 - DNA, 19 bp, Mus musculus
  siRNA target sequence for Atp8a1 (NM_009727.1,450-468).
ggtaaatgttggagatata

SEQ ID NO: 495207 - DNA, 19 bp, Mus musculus
  siRNA target sequence for Atp8a1 (NM_009727.1,457-475).
gttggagatatagttataa

SEQ ID NO: 495208 - DNA, 19 bp, Mus musculus
  siRNA target sequence for Atp8a1 (NM_009727.1,546-564).
catcgagacatccaactta

SEQ ID NO: 495209 - DNA, 19 bp, Mus musculus
  siRNA target sequence for Atp8a1 (NM_009727.1,549-567).
cgagacatccaacttagat

SEQ ID NO: 495210 - DNA, 19 bp, Mus musculus
  siRNA target sequence for Atp8a1 (NM_009727.1,565-583).
gatggtgaaacaaacttga

SEQ ID NO: 495211 - DNA, 19 bp, Mus musculus
  siRNA target sequence for Atp8a1 (NM_009727.1,601-619).
ccggcaacatcggatatca

SEQ ID NO: 495212 - DNA, 19 bp, Mus musculus
  siRNA target sequence for Atp8a1 (NM_009727.1,602-620).
cggcaacatcggatatcaa

SEQ ID NO: 495213 - DNA, 19 bp, Mus musculus
  siRNA target sequence for Atp8a1 (NM_009727.1,603-621).
ggcaacatcggatatcaaa

SEQ ID NO: 495214 - DNA, 19 bp, Mus musculus
  siRNA target sequence for Atp8a1 (NM_009727.1,608-626).
catcggatatcaaagacat

SEQ ID NO: 495215 - DNA, 19 bp, Mus musculus
  siRNA target sequence for Atp8a1 (NM_009727.1,675-693).
ccgacatctctacgatttt

SEQ ID NO: 495216 - DNA, 19 bp, Mus musculus
  siRNA target sequence for Atp8a1 (NM_009727.1,677-695).
gacatctctacgattttgt

SEQ ID NO: 495217 - DNA, 19 bp, Mus musculus
  siRNA target sequence for Atp8a1 (NM_009727.1,687-705).
cgattttgttgggaacata

SEQ ID NO: 495218 - DNA, 19 bp, Mus musculus
  siRNA target sequence for Atp8a1 (NM_009727.1,688-706).
gattttgttgggaacataa

SEQ ID NO: 495219 - DNA, 19 bp, Mus musculus
  siRNA target sequence for Atp8a1 (NM_009727.1,842-860).
caagcccaccacttaaact

SEQ ID NO: 495220 - DNA, 19 bp, Mus musculus
  siRNA target sequence for Atp8a1 (NM_009727.1,864-882).
caatgtggaacggattaca

SEQ ID NO: 495221 - DNA, 19 bp, Mus musculus
  siRNA target sequence for Atp8a1 (NM_009727.1,870-888).
ggaacggattacaaatgta

SEQ ID NO: 495222 - DNA, 19 bp, Mus musculus
  siRNA target sequence for Atp8a1 (NM_009727.1,984-1002).
gtacctccatctacactat

SEQ ID NO: 495223 - DNA, 19 bp, Mus musculus
  siRNA target sequence for Atp8a1 (NM_009727.1,1073-1091).
gcttgctggtcacattaga

SEQ ID NO: 495224 - DNA, 19 bp, Mus musculus
  siRNA target sequence for Atp8a1 (NM_009727.1,1108-1126).
caggcatacttcataaatt

SEQ ID NO: 495225 - DNA, 19 bp, Mus musculus
  siRNA target sequence for Atp8a1 (NM_009727.1,1166-1184).
caatggctcggacatctaa

SEQ ID NO: 495226 - DNA, 19 bp, Mus musculus
  siRNA target sequence for Atp8a1 (NM_009727.1,1171-1189).
gctcggacatctaatctga

SEQ ID NO: 495227 - DNA, 19 bp, Mus musculus
  siRNA target sequence for Atp8a1 (NM_009727.1,1172-1190).
ctcggacatctaatctgaa

SEQ ID NO: 495228 - DNA, 19 bp, Mus musculus
  siRNA target sequence for Atp8a1 (NM_009727.1,1195-1213).
gaacttggccaggttaaat

SEQ ID NO: 495229 - DNA, 19 bp, Mus musculus
  siRNA target sequence for Atp8a1 (NM_009727.1,1238-1256).
ccctgacatgcaatgtgat

SEQ ID NO: 495230 - DNA, 19 bp, Mus musculus
  siRNA target sequence for Atp8a1 (NM_009727.1,1337-1355).
cgtcgttgctggacaatct

SEQ ID NO: 495231 - DNA, 19 bp, Mus musculus
  siRNA target sequence for Atp8a1 (NM_009727.1,1369-1387).
ccaaccgcacctatcatct

SEQ ID NO: 495232 - DNA, 19 bp, Mus musculus
  siRNA target sequence for Atp8a1 (NM_009727.1,1376-1394).
cacctatcatctgtgaatt

SEQ ID NO: 495233 - DNA, 19 bp, Mus musculus
  siRNA target sequence for Atp8a1 (NM_009727.1,1442-1460).
gggacaagatcatttatca

SEQ ID NO: 495234 - DNA, 19 bp, Mus musculus
  siRNA target sequence for Atp8a1 (NM_009727.1,1493-1511).
gagccgccaagcagttgaa

SEQ ID NO: 495235 - DNA, 19 bp, Mus musculus
  siRNA target sequence for Atp8a1 (NM_009727.1,1495-1513).
gccgccaagcagttgaatt

SEQ ID NO: 495236 - DNA, 19 bp, Mus musculus
  siRNA target sequence for Atp8a1 (NM_009727.1,1496-1514).
ccgccaagcagttgaattt

SEQ ID NO: 495237 - DNA, 19 bp, Mus musculus
  siRNA target sequence for Atp8a1 (NM_009727.1,1497-1515).
cgccaagcagttgaatttt

SEQ ID NO: 495238 - DNA, 19 bp, Mus musculus
  siRNA target sequence for Atp8a1 (NM_009727.1,1541-1559).
ctgtcatcatagattcact

SEQ ID NO: 495239 - DNA, 19 bp, Mus musculus
  siRNA target sequence for Atp8a1 (NM_009727.1,1574-1592).
gatatgaattgctcaatgt

SEQ ID NO: 495240 - DNA, 19 bp, Mus musculus
  siRNA target sequence for Atp8a1 (NM_009727.1,1638-1656).
cactccatccgggaagtta

SEQ ID NO: 495241 - DNA, 19 bp, Mus musculus
  siRNA target sequence for Atp8a1 (NM_009727.1,1672-1690).
ggagctgacacagtaattt

SEQ ID NO: 495242 - DNA, 19 bp, Mus musculus
  siRNA target sequence for Atp8a1 (NM_009727.1,1673-1691).
gagctgacacagtaattta

SEQ ID NO: 495243 - DNA, 19 bp, Mus musculus
  siRNA target sequence for Atp8a1 (NM_009727.1,1699-1717).
cttgcagagacctcaaagt

SEQ ID NO: 495244 - DNA, 19 bp, Mus musculus
  siRNA target sequence for Atp8a1 (NM_009727.1,1738-1756).
cacttggaacagtttgcta

SEQ ID NO: 495245 - DNA, 19 bp, Mus musculus
  siRNA target sequence for Atp8a1 (NM_009727.1,1841-1859).
catccacgtcggtacagaa

SEQ ID NO: 495246 - DNA, 19 bp, Mus musculus
  siRNA target sequence for Atp8a1 (NM_009727.1,1876-1894).
gaggagagctacgaactaa

SEQ ID NO: 495247 - DNA, 19 bp, Mus musculus
  siRNA target sequence for Atp8a1 (NM_009727.1,1883-1901).
gctacgaactaattgaaaa

SEQ ID NO: 495248 - DNA, 19 bp, Mus musculus
  siRNA target sequence for Atp8a1 (NM_009727.1,1887-1905).
cgaactaattgaaaagaat

SEQ ID NO: 495249 - DNA, 19 bp, Mus musculus
  siRNA target sequence for Atp8a1 (NM_009727.1,1922-1940).
ctacagccattgaggataa

SEQ ID NO: 495250 - DNA, 19 bp, Mus musculus
  siRNA target sequence for Atp8a1 (NM_009727.1,1925-1943).
cagccattgaggataaatt

SEQ ID NO: 495251 - DNA, 19 bp, Mus musculus
  siRNA target sequence for Atp8a1 (NM_009727.1,1950-1968).
ccaagtgcctgaaaccata

SEQ ID NO: 495252 - DNA, 19 bp, Mus musculus
  siRNA target sequence for Atp8a1 (NM_009727.1,1954-1972).
gtgcctgaaaccatagaaa

SEQ ID NO: 495253 - DNA, 19 bp, Mus musculus
  siRNA target sequence for Atp8a1 (NM_009727.1,1964-1982).
ccatagaaacgctaatgaa

SEQ ID NO: 495254 - DNA, 19 bp, Mus musculus
  siRNA target sequence for Atp8a1 (NM_009727.1,1985-2003).
ctgacatcaaaatatggat

SEQ ID NO: 495255 - DNA, 19 bp, Mus musculus
  siRNA target sequence for Atp8a1 (NM_009727.1,2075-2093).
gaatgatcgtgataaacga

SEQ ID NO: 495256 - DNA, 19 bp, Mus musculus
  siRNA target sequence for Atp8a1 (NM_009727.1,2153-2171).
ctcttcggaaggaaaatga

SEQ ID NO: 495257 - DNA, 19 bp, Mus musculus
  siRNA target sequence for Atp8a1 (NM_009727.1,2188-2206).
gatgggaagaccctcaaat

SEQ ID NO: 495258 - DNA, 19 bp, Mus musculus
  siRNA target sequence for Atp8a1 (NM_009727.1,2200-2218).
ctcaaatatgccttaacct

SEQ ID NO: 495259 - DNA, 19 bp, Mus musculus
  siRNA target sequence for Atp8a1 (NM_009727.1,2279-2297).
gggtttctcctcttcagaa

SEQ ID NO: 495260 - DNA, 19 bp, Mus musculus
  siRNA target sequence for Atp8a1 (NM_009727.1,2302-2320).
gaggttgtcgagatggtta

SEQ ID NO: 495261 - DNA, 19 bp, Mus musculus
  siRNA target sequence for Atp8a1 (NM_009727.1,2305-2323).
gttgtcgagatggttaaga

SEQ ID NO: 495262 - DNA, 19 bp, Mus musculus
  siRNA target sequence for Atp8a1 (NM_009727.1,2434-2452).
gccaactcttcagattact

SEQ ID NO: 495263 - DNA, 19 bp, Mus musculus
  siRNA target sequence for Atp8a1 (NM_009727.1,2451-2469).
ctccatcgctcagttcaaa

SEQ ID NO: 495264 - DNA, 19 bp, Mus musculus
  siRNA target sequence for Atp8a1 (NM_009727.1,2453-2471).
ccatcgctcagttcaaata

SEQ ID NO: 495265 - DNA, 19 bp, Mus musculus
  siRNA target sequence for Atp8a1 (NM_009727.1,2454-2472).
catcgctcagttcaaatat

SEQ ID NO: 495266 - DNA, 19 bp, Mus musculus
  siRNA target sequence for Atp8a1 (NM_009727.1,2463-2481).
gttcaaatatttgaagaat

SEQ ID NO: 495267 - DNA, 19 bp, Mus musculus
  siRNA target sequence for Atp8a1 (NM_009727.1,2494-2512).
cacggtgcctggaattaca

SEQ ID NO: 495268 - DNA, 19 bp, Mus musculus
  siRNA target sequence for Atp8a1 (NM_009727.1,2501-2519).
cctggaattacaatagagt

SEQ ID NO: 495269 - DNA, 19 bp, Mus musculus
  siRNA target sequence for Atp8a1 (NM_009727.1,2608-2626).
cagatcctctttgaaagat

SEQ ID NO: 495270 - DNA, 19 bp, Mus musculus
  siRNA target sequence for Atp8a1 (NM_009727.1,2616-2634).
ctttgaaagatggtgtata

SEQ ID NO: 495271 - DNA, 19 bp, Mus musculus
  siRNA target sequence for Atp8a1 (NM_009727.1,2627-2645).
ggtgtatagggctttataa

SEQ ID NO: 495272 - DNA, 19 bp, Mus musculus
  siRNA target sequence for Atp8a1 (NM_009727.1,2628-2646).
gtgtatagggctttataat

SEQ ID NO: 495273 - DNA, 19 bp, Mus musculus
  siRNA target sequence for Atp8a1 (NM_009727.1,2630-2648).
gtatagggctttataatgt

SEQ ID NO: 495274 - DNA, 19 bp, Mus musculus
  siRNA target sequence for Atp8a1 (NM_009727.1,2668-2686).
cccttgacacttggaatat

SEQ ID NO: 495275 - DNA, 19 bp, Mus musculus
  siRNA target sequence for Atp8a1 (NM_009727.1,2753-2771).
ctctggacttcaataccaa

SEQ ID NO: 495276 - DNA, 19 bp, Mus musculus
  siRNA target sequence for Atp8a1 (NM_009727.1,2773-2791).
gttttctgggttcattgtt

SEQ ID NO: 495277 - DNA, 19 bp, Mus musculus
  siRNA target sequence for Atp8a1 (NM_009727.1,2778-2796).
ctgggttcattgtttgaat

SEQ ID NO: 495278 - DNA, 19 bp, Mus musculus
  siRNA target sequence for Atp8a1 (NM_009727.1,2799-2817).
cctcttccactccgttatt

SEQ ID NO: 495279 - DNA, 19 bp, Mus musculus
  siRNA target sequence for Atp8a1 (NM_009727.1,2810-2828).
ccgttattctgttttggtt

SEQ ID NO: 495280 - DNA, 19 bp, Mus musculus
  siRNA target sequence for Atp8a1 (NM_009727.1,2847-2865).
gtatggcacggtatttgga

SEQ ID NO: 495281 - DNA, 19 bp, Mus musculus
  siRNA target sequence for Atp8a1 (NM_009727.1,2893-2911).
ctgggaaactttgtttata

SEQ ID NO: 495282 - DNA, 19 bp, Mus musculus
  siRNA target sequence for Atp8a1 (NM_009727.1,3002-3020).
cgctctgggtggtgttctt

SEQ ID NO: 495283 - DNA, 19 bp, Mus musculus
  siRNA target sequence for Atp8a1 (NM_009727.1,3013-3031).
gtgttcttcgggatctact

SEQ ID NO: 495284 - DNA, 19 bp, Mus musculus
  siRNA target sequence for Atp8a1 (NM_009727.1,3239-3257).
gcgcagtcgtacttggaaa

SEQ ID NO: 495285 - DNA, 19 bp, Mus musculus
  siRNA target sequence for Atp8a2 (NM_015803.1,404-422).
ggtcatcattctaacgatt

SEQ ID NO: 495286 - DNA, 19 bp, Mus musculus
  siRNA target sequence for Atp8a2 (NM_015803.1,418-436).
cgattgcaggcatcaaaga

SEQ ID NO: 495287 - DNA, 19 bp, Mus musculus
  siRNA target sequence for Atp8a2 (NM_015803.1,427-445).
gcatcaaagagatcataga

SEQ ID NO: 495288 - DNA, 19 bp, Mus musculus
  siRNA target sequence for Atp8a2 (NM_015803.1,511-529).
gcatgtggcacactatcat

SEQ ID NO: 495289 - DNA, 19 bp, Mus musculus
  siRNA target sequence for Atp8a2 (NM_015803.1,620-638).
ccaggggatgtgctatgtt

SEQ ID NO: 495290 - DNA, 19 bp, Mus musculus
  siRNA target sequence for Atp8a2 (NM_015803.1,654-672).
gatggcgagacgaacctta

SEQ ID NO: 495291 - DNA, 19 bp, Mus musculus
  siRNA target sequence for Atp8a2 (NM_015803.1,657-675).
ggcgagacgaaccttaaaa

SEQ ID NO: 495292 - DNA, 19 bp, Mus musculus
  siRNA target sequence for Atp8a2 (NM_015803.1,658-676).
gcgagacgaaccttaaaat

SEQ ID NO: 495293 - DNA, 19 bp, Mus musculus
  siRNA target sequence for Atp8a2 (NM_015803.1,659-677).
cgagacgaaccttaaaata

SEQ ID NO: 495294 - DNA, 19 bp, Mus musculus
  siRNA target sequence for Atp8a2 (NM_015803.1,732-750).
ctgtcgggaaggatagagt

SEQ ID NO: 495295 - DNA, 19 bp, Mus musculus
  siRNA target sequence for Atp8a2 (NM_015803.1,920-938).
gcagaattcaacaaaagca

SEQ ID NO: 495296 - DNA, 19 bp, Mus musculus
  siRNA target sequence for Atp8a2 (NM_015803.1,940-958).
ctctcaagagatcaaatgt

SEQ ID NO: 495297 - DNA, 19 bp, Mus musculus
  siRNA target sequence for Atp8a2 (NM_015803.1,1052-1070).
gtctcatggcggaaagagt

SEQ ID NO: 495298 - DNA, 19 bp, Mus musculus
  siRNA target sequence for Atp8a2 (NM_015803.1,1063-1081).
gaaagagttggtacatcaa

SEQ ID NO: 495299 - DNA, 19 bp, Mus musculus
  siRNA target sequence for Atp8a2 (NM_015803.1,1069-1087).
gttggtacatcaagaagat

SEQ ID NO: 495300 - DNA, 19 bp, Mus musculus
  siRNA target sequence for Atp8a2 (NM_015803.1,1088-1106).
ggacacgaactcagataat

SEQ ID NO: 495301 - DNA, 19 bp, Mus musculus
  siRNA target sequence for Atp8a2 (NM_015803.1,1091-1109).
cacgaactcagataatttt

SEQ ID NO: 495302 - DNA, 19 bp, Mus musculus
  siRNA target sequence for Atp8a2 (NM_015803.1,1111-1129).
gctacaacttgctaacgtt

SEQ ID NO: 495303 - DNA, 19 bp, Mus musculus
  siRNA target sequence for Atp8a2 (NM_015803.1,1112-1130).
ctacaacttgctaacgttt

SEQ ID NO: 495304 - DNA, 19 bp, Mus musculus
  siRNA target sequence for Atp8a2 (NM_015803.1,1122-1140).
ctaacgtttatcatcttgt

SEQ ID NO: 495305 - DNA, 19 bp, Mus musculus
  siRNA target sequence for Atp8a2 (NM_015803.1,1172-1190).
gacacttgaggttgtgaaa

SEQ ID NO: 495306 - DNA, 19 bp, Mus musculus
  siRNA target sequence for Atp8a2 (NM_015803.1,1174-1192).
cacttgaggttgtgaaata

SEQ ID NO: 495307 - DNA, 19 bp, Mus musculus
  siRNA target sequence for Atp8a2 (NM_015803.1,1176-1194).
cttgaggttgtgaaataca

SEQ ID NO: 495308 - DNA, 19 bp, Mus musculus
  siRNA target sequence for Atp8a2 (NM_015803.1,1197-1215).
caagccctcttcataaact

SEQ ID NO: 495309 - DNA, 19 bp, Mus musculus
  siRNA target sequence for Atp8a2 (NM_015803.1,1216-1234).
gggacatggatatgtatta

SEQ ID NO: 495310 - DNA, 19 bp, Mus musculus
  siRNA target sequence for Atp8a2 (NM_015803.1,1217-1235).
ggacatggatatgtattat

SEQ ID NO: 495311 - DNA, 19 bp, Mus musculus
  siRNA target sequence for Atp8a2 (NM_015803.1,1254-1272).
gcaatggccaggacatcaa

SEQ ID NO: 495312 - DNA, 19 bp, Mus musculus
  siRNA target sequence for Atp8a2 (NM_015803.1,1284-1302).
gagctggggcaggtaaaat

SEQ ID NO: 495313 - DNA, 19 bp, Mus musculus
  siRNA target sequence for Atp8a2 (NM_015803.1,1321-1339).
ctggaactcttacatgtaa

SEQ ID NO: 495314 - DNA, 19 bp, Mus musculus
  siRNA target sequence for Atp8a2 (NM_015803.1,1323-1341).
ggaactcttacatgtaata

SEQ ID NO: 495315 - DNA, 19 bp, Mus musculus
  siRNA target sequence for Atp8a2 (NM_015803.1,1324-1342).
gaactcttacatgtaatat

SEQ ID NO: 495316 - DNA, 19 bp, Mus musculus
  siRNA target sequence for Atp8a2 (NM_015803.1,1327-1345).
ctcttacatgtaatatcat

SEQ ID NO: 495317 - DNA, 19 bp, Mus musculus
  siRNA target sequence for Atp8a2 (NM_015803.1,1329-1347).
cttacatgtaatatcatga

SEQ ID NO: 495318 - DNA, 19 bp, Mus musculus
  siRNA target sequence for Atp8a2 (NM_015803.1,1333-1351).
catgtaatatcatgaactt

SEQ ID NO: 495319 - DNA, 19 bp, Mus musculus
  siRNA target sequence for Atp8a2 (NM_015803.1,1422-1440).
gacttctgccggatgactt

SEQ ID NO: 495320 - DNA, 19 bp, Mus musculus
  siRNA target sequence for Atp8a2 (NM_015803.1,1669-1687).
cgccgtactcggtcatcat

SEQ ID NO: 495321 - DNA, 19 bp, Mus musculus
  siRNA target sequence for Atp8a2 (NM_015803.1,1688-1706).
cgaagcgatgggacaagaa

SEQ ID NO: 495322 - DNA, 19 bp, Mus musculus
  siRNA target sequence for Atp8a2 (NM_015803.1,1715-1733).
cgggatcctcaatgttcta

SEQ ID NO: 495323 - DNA, 19 bp, Mus musculus
  siRNA target sequence for Atp8a2 (NM_015803.1,1717-1735).
ggatcctcaatgttctaga

SEQ ID NO: 495324 - DNA, 19 bp, Mus musculus
  siRNA target sequence for Atp8a2 (NM_015803.1,1718-1736).
gatcctcaatgttctagaa

SEQ ID NO: 495325 - DNA, 19 bp, Mus musculus
  siRNA target sequence for Atp8a2 (NM_015803.1,1804-1822).
gcaagggagccgataacgt

SEQ ID NO: 495326 - DNA, 19 bp, Mus musculus
  siRNA target sequence for Atp8a2 (NM_015803.1,1810-1828).
gagccgataacgtcatctt

SEQ ID NO: 495327 - DNA, 19 bp, Mus musculus
  siRNA target sequence for Atp8a2 (NM_015803.1,1813-1831).
ccgataacgtcatctttga

SEQ ID NO: 495328 - DNA, 19 bp, Mus musculus
  siRNA target sequence for Atp8a2 (NM_015803.1,1814-1832).
cgataacgtcatctttgaa

SEQ ID NO: 495329 - DNA, 19 bp, Mus musculus
  siRNA target sequence for Atp8a2 (NM_015803.1,1815-1833).
gataacgtcatctttgaaa

SEQ ID NO: 495330 - DNA, 19 bp, Mus musculus
  siRNA target sequence for Atp8a2 (NM_015803.1,1867-1885).
cgctatgccatctggaata

SEQ ID NO: 495331 - DNA, 19 bp, Mus musculus
  siRNA target sequence for Atp8a2 (NM_015803.1,1868-1886).
gctatgccatctggaatat

SEQ ID NO: 495332 - DNA, 19 bp, Mus musculus
  siRNA target sequence for Atp8a2 (NM_015803.1,1869-1887).
ctatgccatctggaatatt

SEQ ID NO: 495333 - DNA, 19 bp, Mus musculus
  siRNA target sequence for Atp8a2 (NM_015803.1,1921-1939).
cctacgcagacctttctga

SEQ ID NO: 495334 - DNA, 19 bp, Mus musculus
  siRNA target sequence for Atp8a2 (NM_015803.1,1955-1973).
gtggctgaaagtctatcaa

SEQ ID NO: 495335 - DNA, 19 bp, Mus musculus
  siRNA target sequence for Atp8a2 (NM_015803.1,2027-2045).
gatcattgagaagaattta

SEQ ID NO: 495336 - DNA, 19 bp, Mus musculus
  siRNA target sequence for Atp8a2 (NM_015803.1,2066-2084).
catcgaagaccgtcttcaa

SEQ ID NO: 495337 - DNA, 19 bp, Mus musculus
  siRNA target sequence for Atp8a2 (NM_015803.1,2191-2209).
ggttggtgtcgcagaacat

SEQ ID NO: 495338 - DNA, 19 bp, Mus musculus
  siRNA target sequence for Atp8a2 (NM_015803.1,2342-2360).
gtatgcactctcctttgaa

SEQ ID NO: 495339 - DNA, 19 bp, Mus musculus
  siRNA target sequence for Atp8a2 (NM_015803.1,2381-2399).
cctggcgctctcatgcaaa

SEQ ID NO: 495340 - DNA, 19 bp, Mus musculus
  siRNA target sequence for Atp8a2 (NM_015803.1,2569-2587).
ctaccaacaactcagatta

SEQ ID NO: 495341 - DNA, 19 bp, Mus musculus
  siRNA target sequence for Atp8a2 (NM_015803.1,2589-2607).
gccatcgcacagttttcct

SEQ ID NO: 495342 - DNA, 19 bp, Mus musculus
  siRNA target sequence for Atp8a2 (NM_015803.1,2590-2608).
ccatcgcacagttttccta

SEQ ID NO: 495343 - DNA, 19 bp, Mus musculus
  siRNA target sequence for Atp8a2 (NM_015803.1,2712-2730).
ctatggttcgcctttgtga

SEQ ID NO: 495344 - DNA, 19 bp, Mus musculus
  siRNA target sequence for Atp8a2 (NM_015803.1,2740-2758).
ctgggcagattttattcga

SEQ ID NO: 495345 - DNA, 19 bp, Mus musculus
  siRNA target sequence for Atp8a2 (NM_015803.1,2764-2782).
ggtgcatcggcttgtacaa

SEQ ID NO: 495346 - DNA, 19 bp, Mus musculus
  siRNA target sequence for Atp8a2 (NM_015803.1,2765-2783).
gtgcatcggcttgtacaat

SEQ ID NO: 495347 - DNA, 19 bp, Mus musculus
  siRNA target sequence for Atp8a2 (NM_015803.1,2822-2840).
cttcgagaggtcttgtact

SEQ ID NO: 495348 - DNA, 19 bp, Mus musculus
  siRNA target sequence for Atp8a2 (NM_015803.1,2889-2907).
gctgaaggtttcaacacta

SEQ ID NO: 495349 - DNA, 19 bp, Mus musculus
  siRNA target sequence for Atp8a2 (NM_015803.1,2895-2913).
ggtttcaacactaaggttt

SEQ ID NO: 495350 - DNA, 19 bp, Mus musculus
  siRNA target sequence for Atp8a2 (NM_015803.1,3005-3023).
cggtcatgccacagactat

SEQ ID NO: 495351 - DNA, 19 bp, Mus musculus
  siRNA target sequence for Atp8a2 (NM_015803.1,3049-3067).
cgtacgttgtggttacagt

SEQ ID NO: 495352 - DNA, 19 bp, Mus musculus
  siRNA target sequence for Atp8a2 (NM_015803.1,3053-3071).
cgttgtggttacagtttgt

SEQ ID NO: 495353 - DNA, 19 bp, Mus musculus
  siRNA target sequence for Atp8a2 (NM_015803.1,3091-3109).
cgacagcttggacgaaatt

SEQ ID NO: 495354 - DNA, 19 bp, Mus musculus
  siRNA target sequence for Atp8a2 (NM_015803.1,3264-3282).
gttccgactgcgtgtttga

SEQ ID NO: 495355 - DNA, 19 bp, Mus musculus
  siRNA target sequence for Atp8a2 (NM_015803.1,3420-3438).
cgtgaccgtctgatcaaga

SEQ ID NO: 495356 - DNA, 19 bp, Mus musculus
  siRNA target sequence for Atp8a2 (NM_015803.1,3506-3524).
gtatgccttttctcaagaa

SEQ ID NO: 495357 - DNA, 19 bp, Mus musculus
  siRNA target sequence for Atp9a (NM_015731.2,703-721).
cagattcggtcctatgtgt

SEQ ID NO: 495358 - DNA, 19 bp, Mus musculus
  siRNA target sequence for Atp9a (NM_015731.2,733-751).
cccaacatcgacattcaca

SEQ ID NO: 495359 - DNA, 19 bp, Mus musculus
  siRNA target sequence for Atp9a (NM_015731.2,854-872).
ctgttgtaggcgttgttct

SEQ ID NO: 495360 - DNA, 19 bp, Mus musculus
  siRNA target sequence for Atp9a (NM_015731.2,889-907).
ctgcggagtgtcatgaata

SEQ ID NO: 495361 - DNA, 19 bp, Mus musculus
  siRNA target sequence for Atp9a (NM_015731.2,891-909).
gcggagtgtcatgaatact

SEQ ID NO: 495362 - DNA, 19 bp, Mus musculus
  siRNA target sequence for Atp9a (NM_015731.2,908-926).
cttccgaccccagaagtaa

SEQ ID NO: 495363 - DNA, 19 bp, Mus musculus
  siRNA target sequence for Atp9a (NM_015731.2,911-929).
ccgaccccagaagtaagat

SEQ ID NO: 495364 - DNA, 19 bp, Mus musculus
  siRNA target sequence for Atp9a (NM_015731.2,1062-1080).
cctgttttccaacatcatt

SEQ ID NO: 495365 - DNA, 19 bp, Mus musculus
  siRNA target sequence for Atp9a (NM_015731.2,1134-1152).
gatccgcagggattccaaa

SEQ ID NO: 495366 - DNA, 19 bp, Mus musculus
  siRNA target sequence for Atp9a (NM_015731.2,1167-1185).
ggttcgttccagcacaatt

SEQ ID NO: 495367 - DNA, 19 bp, Mus musculus
  siRNA target sequence for Atp9a (NM_015731.2,1319-1337).
gtcacatcttcagcattta

SEQ ID NO: 495368 - DNA, 19 bp, Mus musculus
  siRNA target sequence for Atp9a (NM_015731.2,1732-1750).
ggggaaatcacgttctaca

SEQ ID NO: 495369 - DNA, 19 bp, Mus musculus
  siRNA target sequence for Atp9a (NM_015731.2,1733-1751).
gggaaatcacgttctacat

SEQ ID NO: 495370 - DNA, 19 bp, Mus musculus
  siRNA target sequence for Atp9a (NM_015731.2,1775-1793).
ctggcattgtccagtacaa

SEQ ID NO: 495371 - DNA, 19 bp, Mus musculus
  siRNA target sequence for Atp9a (NM_015731.2,1878-1896).
gcagtaccaagactttgaa

SEQ ID NO: 495372 - DNA, 19 bp, Mus musculus
  siRNA target sequence for Atp9a (NM_015731.2,2131-2149).
gtgaccagaaaccaagata

SEQ ID NO: 495373 - DNA, 19 bp, Mus musculus
  siRNA target sequence for Atp9a (NM_015731.2,2254-2272).
gaggtttgcctcaaatact

SEQ ID NO: 495374 - DNA, 19 bp, Mus musculus
  siRNA target sequence for Atp9a (NM_015731.2,2256-2274).
ggtttgcctcaaatactat

SEQ ID NO: 495375 - DNA, 19 bp, Mus musculus
  siRNA target sequence for Atp9a (NM_015731.2,2723-2741).
ccctggttttggacaaaga

SEQ ID NO: 495376 - DNA, 19 bp, Mus musculus
  siRNA target sequence for Atp9a (NM_015731.2,2750-2768).
cggaagtcgccatgttgta

SEQ ID NO: 495377 - DNA, 19 bp, Mus musculus
  siRNA target sequence for Atp9a (NM_015731.2,2751-2769).
ggaagtcgccatgttgtat

SEQ ID NO: 495378 - DNA, 19 bp, Mus musculus
  siRNA target sequence for Atp9a (NM_015731.2,2808-2826).
gtcctacaagacgttctta

SEQ ID NO: 495379 - DNA, 19 bp, Mus musculus
  siRNA target sequence for Atp9a (NM_015731.2,2810-2828).
cctacaagacgttcttaat

SEQ ID NO: 495380 - DNA, 19 bp, Mus musculus
  siRNA target sequence for Atp9a (NM_015731.2,2832-2850).
ggtgttaatcagcatctat

SEQ ID NO: 495381 - DNA, 19 bp, Mus musculus
  siRNA target sequence for Atp9a (NM_015731.2,2835-2853).
gttaatcagcatctatcaa

SEQ ID NO: 495382 - DNA, 19 bp, Mus musculus
  siRNA target sequence for Atp9a (NM_015731.2,2851-2869).
caagggagcaccatcatgt

SEQ ID NO: 495383 - DNA, 19 bp, Mus musculus
  siRNA target sequence for Atp9a (NM_015731.2,2886-2904).
gttcgagtcggagtttgta

SEQ ID NO: 495384 - DNA, 19 bp, Mus musculus
  siRNA target sequence for Atp9b (NM_015805.2,270-288).
gaaatgccactgatgatgt

SEQ ID NO: 495385 - DNA, 19 bp, Mus musculus
  siRNA target sequence for Atp9b (NM_015805.2,417-435).
gattggctaataaatgttt

SEQ ID NO: 495386 - DNA, 19 bp, Mus musculus
  siRNA target sequence for Atp9b (NM_015805.2,421-439).
ggctaataaatgtttgtca

SEQ ID NO: 495387 - DNA, 19 bp, Mus musculus
  siRNA target sequence for Atp9b (NM_015805.2,422-440).
gctaataaatgtttgtcaa

SEQ ID NO: 495388 - DNA, 19 bp, Mus musculus
  siRNA target sequence for Atp9b (NM_015805.2,452-470).
gctaaaagctcgaacagta

SEQ ID NO: 495389 - DNA, 19 bp, Mus musculus
  siRNA target sequence for Atp9b (NM_015805.2,453-471).
ctaaaagctcgaacagtat

SEQ ID NO: 495390 - DNA, 19 bp, Mus musculus
  siRNA target sequence for Atp9b (NM_015805.2,500-518).
gaaacatcctaggaattct

SEQ ID NO: 495391 - DNA, 19 bp, Mus musculus
  siRNA target sequence for Atp9b (NM_015805.2,508-526).
ctaggaattctatcaaaaa

SEQ ID NO: 495392 - DNA, 19 bp, Mus musculus
  siRNA target sequence for Atp9b (NM_015805.2,556-574).
ctggggttttgtatgaaca

SEQ ID NO: 495393 - DNA, 19 bp, Mus musculus
  siRNA target sequence for Atp9b (NM_015805.2,558-576).
ggggttttgtatgaacaat

SEQ ID NO: 495394 - DNA, 19 bp, Mus musculus
  siRNA target sequence for Atp9b (NM_015805.2,559-577).
gggttttgtatgaacaatt

SEQ ID NO: 495395 - DNA, 19 bp, Mus musculus
  siRNA target sequence for Atp9b (NM_015805.2,561-579).
gttttgtatgaacaattca

SEQ ID NO: 495396 - DNA, 19 bp, Mus musculus
  siRNA target sequence for Atp9b (NM_015805.2,623-641).
gtttgtaccagcattgaaa

SEQ ID NO: 495397 - DNA, 19 bp, Mus musculus
  siRNA target sequence for Atp9b (NM_015805.2,666-684).
gctcctctgggatttgttt

SEQ ID NO: 495398 - DNA, 19 bp, Mus musculus
  siRNA target sequence for Atp9b (NM_015805.2,700-718).
cacgtgaagcgattgatga

SEQ ID NO: 495399 - DNA, 19 bp, Mus musculus
  siRNA target sequence for Atp9b (NM_015805.2,734-752).
gcgagacaaggaaatgaat

SEQ ID NO: 495400 - DNA, 19 bp, Mus musculus
  siRNA target sequence for Atp9b (NM_015805.2,770-788).
gcttacagtaagaggtaaa

SEQ ID NO: 495401 - DNA, 19 bp, Mus musculus
  siRNA target sequence for Atp9b (NM_015805.2,775-793).
cagtaagaggtaaagttca

SEQ ID NO: 495402 - DNA, 19 bp, Mus musculus
  siRNA target sequence for Atp9b (NM_015805.2,800-818).
gagctcagacatacaagtt

SEQ ID NO: 495403 - DNA, 19 bp, Mus musculus
  siRNA target sequence for Atp9b (NM_015805.2,846-864).
caaagaattccatcagata

SEQ ID NO: 495404 - DNA, 19 bp, Mus musculus
  siRNA target sequence for Atp9b (NM_015805.2,850-868).
gaattccatcagatatggt

SEQ ID NO: 495405 - DNA, 19 bp, Mus musculus
  siRNA target sequence for Atp9b (NM_015805.2,861-879).
gatatggtatttcttagaa

SEQ ID NO: 495406 - DNA, 19 bp, Mus musculus
  siRNA target sequence for Atp9b (NM_015805.2,866-884).
ggtatttcttagaacttca

SEQ ID NO: 495407 - DNA, 19 bp, Mus musculus
  siRNA target sequence for Atp9b (NM_015805.2,981-999).
gccctcggggacctttttt

SEQ ID NO: 495408 - DNA, 19 bp, Mus musculus
  siRNA target sequence for Atp9b (NM_015805.2,1025-1043).
gaagccacaactggatatt

SEQ ID NO: 495409 - DNA, 19 bp, Mus musculus
  siRNA target sequence for Atp9b (NM_015805.2,1028-1046).
gccacaactggatattcat

SEQ ID NO: 495410 - DNA, 19 bp, Mus musculus
  siRNA target sequence for Atp9b (NM_015805.2,1029-1047).
ccacaactggatattcata

SEQ ID NO: 495411 - DNA, 19 bp, Mus musculus
  siRNA target sequence for Atp9b (NM_015805.2,1076-1094).
cagtgatcctcccattcat

SEQ ID NO: 495412 - DNA, 19 bp, Mus musculus
  siRNA target sequence for Atp9b (NM_015805.2,1078-1096).
gtgatcctcccattcatga

SEQ ID NO: 495413 - DNA, 19 bp, Mus musculus
  siRNA target sequence for Atp9b (NM_015805.2,1121-1139).
gtgggcaagcactattgtt

SEQ ID NO: 495414 - DNA, 19 bp, Mus musculus
  siRNA target sequence for Atp9b (NM_015805.2,1137-1155).
gttgcatcaggtactgtaa

SEQ ID NO: 495415 - DNA, 19 bp, Mus musculus
  siRNA target sequence for Atp9b (NM_015805.2,1182-1200).
gagactcgaagtgtaatga

SEQ ID NO: 495416 - DNA, 19 bp, Mus musculus
  siRNA target sequence for Atp9b (NM_015805.2,1207-1225).
ccaatccaaaaaataaggt

SEQ ID NO: 495417 - DNA, 19 bp, Mus musculus
  siRNA target sequence for Atp9b (NM_015805.2,1208-1226).
caatccaaaaaataaggtt

SEQ ID NO: 495418 - DNA, 19 bp, Mus musculus
  siRNA target sequence for Atp9b (NM_015805.2,1253-1271).
gctgacaaaggcgctattt

SEQ ID NO: 495419 - DNA, 19 bp, Mus musculus
  siRNA target sequence for Atp9b (NM_015805.2,1291-1309).
ctgttgttatggtaacctt

SEQ ID NO: 495420 - DNA, 19 bp, Mus musculus
  siRNA target sequence for Atp9b (NM_015805.2,1324-1342).
gcccatggtaccgtaatct

SEQ ID NO: 495421 - DNA, 19 bp, Mus musculus
  siRNA target sequence for Atp9b (NM_015805.2,1325-1343).
cccatggtaccgtaatctt

SEQ ID NO: 495422 - DNA, 19 bp, Mus musculus
  siRNA target sequence for Atp9b (NM_015805.2,1326-1344).
ccatggtaccgtaatcttt

SEQ ID NO: 495423 - DNA, 19 bp, Mus musculus
  siRNA target sequence for Atp9b (NM_015805.2,1327-1345).
catggtaccgtaatctttt

SEQ ID NO: 495424 - DNA, 19 bp, Mus musculus
  siRNA target sequence for Atp9b (NM_015805.2,1347-1365).
cggttcctccttctctttt

SEQ ID NO: 495425 - DNA, 19 bp, Mus musculus
  siRNA target sequence for Atp9b (NM_015805.2,1378-1396).
ccataagtctgcgagtaaa

SEQ ID NO: 495426 - DNA, 19 bp, Mus musculus
  siRNA target sequence for Atp9b (NM_015805.2,1386-1404).
ctgcgagtaaacttggata

SEQ ID NO: 495427 - DNA, 19 bp, Mus musculus
  siRNA target sequence for Atp9b (NM_015805.2,1407-1425).
ggcaaagcagcatatggat

SEQ ID NO: 495428 - DNA, 19 bp, Mus musculus
  siRNA target sequence for Atp9b (NM_015805.2,1416-1434).
gcatatggatggatgatta

SEQ ID NO: 495429 - DNA, 19 bp, Mus musculus
  siRNA target sequence for Atp9b (NM_015805.2,1417-1435).
catatggatggatgattat

SEQ ID NO: 495430 - DNA, 19 bp, Mus musculus
  siRNA target sequence for Atp9b (NM_015805.2,1495-1513).
gacgcctggtgtacttact

SEQ ID NO: 495431 - DNA, 19 bp, Mus musculus
  siRNA target sequence for Atp9b (NM_015805.2,1497-1515).
cgcctggtgtacttactga

SEQ ID NO: 495432 - DNA, 19 bp, Mus musculus
  siRNA target sequence for Atp9b (NM_015805.2,1531-1549).
cgctcactcagaatgaaat

SEQ ID NO: 495433 - DNA, 19 bp, Mus musculus
  siRNA target sequence for Atp9b (NM_015805.2,1535-1553).
cactcagaatgaaatggta

SEQ ID NO: 495434 - DNA, 19 bp, Mus musculus
  siRNA target sequence for Atp9b (NM_015805.2,1537-1555).
ctcagaatgaaatggtatt

SEQ ID NO: 495435 - DNA, 19 bp, Mus musculus
  siRNA target sequence for Atp9b (NM_015805.2,1582-1600).
cctacggaacggacactat

SEQ ID NO: 495436 - DNA, 19 bp, Mus musculus
  siRNA target sequence for Atp9b (NM_015805.2,1591-1609).
cggacactatggacgaaat

SEQ ID NO: 495437 - DNA, 19 bp, Mus musculus
  siRNA target sequence for Atp9b (NM_015805.2,1611-1629).
caaagtcacgtcctgaatt

SEQ ID NO: 495438 - DNA, 19 bp, Mus musculus
  siRNA target sequence for Atp9b (NM_015805.2,1699-1717).
cctcaacgcctaaagtcaa

SEQ ID NO: 495439 - DNA, 19 bp, Mus musculus
  siRNA target sequence for Atp9b (NM_015805.2,1724-1742).
cgtcagcagtagaatccat

SEQ ID NO: 495440 - DNA, 19 bp, Mus musculus
  siRNA target sequence for Atp9b (NM_015805.2,1761-1779).
gccctttgtcataatgtca

SEQ ID NO: 495441 - DNA, 19 bp, Mus musculus
  siRNA target sequence for Atp9b (NM_015805.2,2031-2049).
cggatgggcatcatagtca

SEQ ID NO: 495442 - DNA, 19 bp, Mus musculus
  siRNA target sequence for Atp9b (NM_015805.2,2067-2085).
gaaattacattctatatga

SEQ ID NO: 495443 - DNA, 19 bp, Mus musculus
  siRNA target sequence for Atp9b (NM_015805.2,2197-2215).
ctctgacagaagagcaata

SEQ ID NO: 495444 - DNA, 19 bp, Mus musculus
  siRNA target sequence for Atp9b (NM_015805.2,2277-2295).
gtcgctgctgttgtagaaa

SEQ ID NO: 495445 - DNA, 19 bp, Mus musculus
  siRNA target sequence for Atp9b (NM_015805.2,2382-2400).
cgcaatgcagggatcaaga

SEQ ID NO: 495446 - DNA, 19 bp, Mus musculus
  siRNA target sequence for Atp9b (NM_015805.2,2383-2401).
gcaatgcagggatcaagat

SEQ ID NO: 495447 - DNA, 19 bp, Mus musculus
  siRNA target sequence for Atp9b (NM_015805.2,2384-2402).
caatgcagggatcaagatt

SEQ ID NO: 495448 - DNA, 19 bp, Mus musculus
  siRNA target sequence for Atp9b (NM_015805.2,2405-2423).
gatgctaacaggcgataaa

SEQ ID NO: 495449 - DNA, 19 bp, Mus musculus
  siRNA target sequence for Atp9b (NM_015805.2,2426-2444).
ggaaacagctacttgtatt

SEQ ID NO: 495450 - DNA, 19 bp, Mus musculus
  siRNA target sequence for Atp9b (NM_015805.2,2465-2483).
gtccagaacacaagacatt

SEQ ID NO: 495451 - DNA, 19 bp, Mus musculus
  siRNA target sequence for Atp9b (NM_015805.2,2475-2493).
caagacattcatgttttca

SEQ ID NO: 495452 - DNA, 19 bp, Mus musculus
  siRNA target sequence for Atp9b (NM_015805.2,2555-2573).
ctgtgcactggttatatct

SEQ ID NO: 495453 - DNA, 19 bp, Mus musculus
  siRNA target sequence for Atp9b (NM_015805.2,2599-2617).
ggtactacgagcatgaact

SEQ ID NO: 495454 - DNA, 19 bp, Mus musculus
  siRNA target sequence for Atp9b (NM_015805.2,2600-2618).
gtactacgagcatgaactt

SEQ ID NO: 495455 - DNA, 19 bp, Mus musculus
  siRNA target sequence for Atp9b (NM_015805.2,2779-2797).
ggattgggattgaaggaaa

SEQ ID NO: 495456 - DNA, 19 bp, Mus musculus
  siRNA target sequence for Atp9b (NM_015805.2,2999-3017).
ccagggattccttatggta

SEQ ID NO: 495457 - DNA, 19 bp, Mus musculus
  siRNA target sequence for Atp9b (NM_015805.2,3009-3027).
cttatggtagggtatgcaa

SEQ ID NO: 495458 - DNA, 19 bp, Mus musculus
  siRNA target sequence for Atp9b (NM_015805.2,3015-3033).
gtagggtatgcaactatct

SEQ ID NO: 495459 - DNA, 19 bp, Mus musculus
  siRNA target sequence for Atp9b (NM_015805.2,3018-3036).
gggtatgcaactatctaca

SEQ ID NO: 495460 - DNA, 19 bp, Mus musculus
  siRNA target sequence for Atp9b (NM_015805.2,3081-3099).
ccagagatggcgattctct

SEQ ID NO: 495461 - DNA, 19 bp, Mus musculus
  siRNA target sequence for Atp9b (NM_015805.2,3082-3100).
cagagatggcgattctcta

SEQ ID NO: 495462 - DNA, 19 bp, Mus musculus
  siRNA target sequence for Atp9b (NM_015805.2,3156-3174).
ctcatctgggttttgatca

SEQ ID NO: 495463 - DNA, 19 bp, Mus musculus
  siRNA target sequence for Atp9b (NM_015805.2,3369-3387).
gcttttctaaatgagtatt

SEQ ID NO: 495464 - DNA, 19 bp, Mus musculus
  siRNA target sequence for Atp9b (NM_015805.2,3460-3478).
cactctacgtgctcaagta

SEQ ID NO: 495465 - DNA, 19 bp, Mus musculus
  siRNA target sequence for Atp9b (NM_015805.2,3462-3480).
ctctacgtgctcaagtact

SEQ ID NO: 495466 - DNA, 19 bp, Mus musculus
  siRNA target sequence for AV006891 (NM_023057.1,56-74).
cctttgtgcaaattaagtt

SEQ ID NO: 495467 - DNA, 19 bp, Mus musculus
  siRNA target sequence for AV006891 (NM_023057.1,75-93).
cgacgacttgcagtttttt

SEQ ID NO: 495468 - DNA, 19 bp, Mus musculus
  siRNA target sequence for AV006891 (NM_023057.1,126-144).
gtatcgagccaaatggata

SEQ ID NO: 495469 - DNA, 19 bp, Mus musculus
  siRNA target sequence for AV006891 (NM_023057.1,224-242).
gaaacatcatccagtttta

SEQ ID NO: 495470 - DNA, 19 bp, Mus musculus
  siRNA target sequence for AV006891 (NM_023057.1,298-316).
ggctccctgtatgattaca

SEQ ID NO: 495471 - DNA, 19 bp, Mus musculus
  siRNA target sequence for AV006891 (NM_023057.1,302-320).
ccctgtatgattacattaa

SEQ ID NO: 495472 - DNA, 19 bp, Mus musculus
  siRNA target sequence for AV006891 (NM_023057.1,381-399).
caaagggatgcattactta

SEQ ID NO: 495473 - DNA, 19 bp, Mus musculus
  siRNA target sequence for AV006891 (NM_023057.1,385-403).
gggatgcattacttacaca

SEQ ID NO: 495474 - DNA, 19 bp, Mus musculus
  siRNA target sequence for AV006891 (NM_023057.1,386-404).
ggatgcattacttacacat

SEQ ID NO: 495475 - DNA, 19 bp, Mus musculus
  siRNA target sequence for AV006891 (NM_023057.1,435-453).
cctcaagtcaagaaacgtt

SEQ ID NO: 495476 - DNA, 19 bp, Mus musculus
  siRNA target sequence for AV006891 (NM_023057.1,464-482).
ctgacggagtgctgaagat

SEQ ID NO: 495477 - DNA, 19 bp, Mus musculus
  siRNA target sequence for AV006891 (NM_023057.1,493-511).
ggtgcctcgcggttccata

SEQ ID NO: 495478 - DNA, 19 bp, Mus musculus
  siRNA target sequence for AV006891 (NM_023057.1,494-512).
gtgcctcgcggttccataa

SEQ ID NO: 495479 - DNA, 19 bp, Mus musculus
  siRNA target sequence for AV006891 (NM_023057.1,497-515).
cctcgcggttccataacca

SEQ ID NO: 495480 - DNA, 19 bp, Mus musculus
  siRNA target sequence for AV006891 (NM_023057.1,589-607).
gaaacctgtgacacgtatt

SEQ ID NO: 495481 - DNA, 19 bp, Mus musculus
  siRNA target sequence for AV006891 (NM_023057.1,593-611).
cctgtgacacgtattccta

SEQ ID NO: 495482 - DNA, 19 bp, Mus musculus
  siRNA target sequence for AV006891 (NM_023057.1,622-640).
ctctgggagatgctaacaa

SEQ ID NO: 495483 - DNA, 19 bp, Mus musculus
  siRNA target sequence for AV006891 (NM_023057.1,643-661).
gaggtcccctttaaaggtt

SEQ ID NO: 495484 - DNA, 19 bp, Mus musculus
  siRNA target sequence for AV006891 (NM_023057.1,659-677).
gtttggaaggattacaagt

SEQ ID NO: 495485 - DNA, 19 bp, Mus musculus
  siRNA target sequence for AV006891 (NM_023057.1,703-721).
gagagattaaccattccaa

SEQ ID NO: 495486 - DNA, 19 bp, Mus musculus
  siRNA target sequence for AV006891 (NM_023057.1,723-741).
cagctgccccagaagcttt

SEQ ID NO: 495487 - DNA, 19 bp, Mus musculus
  siRNA target sequence for AV006891 (NM_023057.1,784-802).
cggccatcgttcaagcaaa

SEQ ID NO: 495488 - DNA, 19 bp, Mus musculus
  siRNA target sequence for AV006891 (NM_023057.1,785-803).
ggccatcgttcaagcaaat

SEQ ID NO: 495489 - DNA, 19 bp, Mus musculus
  siRNA target sequence for AV006891 (NM_023057.1,788-806).
catcgttcaagcaaatcat

SEQ ID NO: 495490 - DNA, 19 bp, Mus musculus
  siRNA target sequence for AV006891 (NM_023057.1,841-859).
cttcctgaccagtgtaact

SEQ ID NO: 495491 - DNA, 19 bp, Mus musculus
  siRNA target sequence for AV006891 (NM_023057.1,845-863).
ctgaccagtgtaactcatt

SEQ ID NO: 495492 - DNA, 19 bp, Mus musculus
  siRNA target sequence for AV006891 (NM_023057.1,928-946).
gagcgagatctcagcttta

SEQ ID NO: 495493 - DNA, 19 bp, Mus musculus
  siRNA target sequence for AV006891 (NM_023057.1,930-948).
gcgagatctcagctttaaa

SEQ ID NO: 495494 - DNA, 19 bp, Mus musculus
  siRNA target sequence for AV006891 (NM_023057.1,1052-1070).
ggactgaagacgatgtgta

SEQ ID NO: 495495 - DNA, 19 bp, Mus musculus
  siRNA target sequence for AV006891 (NM_023057.1,1100-1118).
gcgagtcttcagtagagat

SEQ ID NO: 495496 - DNA, 19 bp, Mus musculus
  siRNA target sequence for AV006891 (NM_023057.1,1121-1139).
gtggatacgcaagtttgtt

SEQ ID NO: 495497 - DNA, 19 bp, Mus musculus
  siRNA target sequence for AV006891 (NM_023057.1,1123-1141).
ggatacgcaagtttgttta

SEQ ID NO: 495498 - DNA, 19 bp, Mus musculus
  siRNA target sequence for AV006891 (NM_023057.1,1179-1197).
ggaagaggaagatctgaaa

SEQ ID NO: 495499 - DNA, 19 bp, Mus musculus
  siRNA target sequence for AV006891 (NM_023057.1,1212-1230).
ctccaagggacacatcatt

SEQ ID NO: 495500 - DNA, 19 bp, Mus musculus
  siRNA target sequence for AV006891 (NM_023057.1,1219-1237).
ggacacatcattcacttta

SEQ ID NO: 495501 - DNA, 19 bp, Mus musculus
  siRNA target sequence for AV006891 (NM_023057.1,1220-1238).
gacacatcattcactttaa

SEQ ID NO: 495502 - DNA, 19 bp, Mus musculus
  siRNA target sequence for AV006891 (NM_023057.1,1224-1242).
catcattcactttaagtca

SEQ ID NO: 495503 - DNA, 19 bp, Mus musculus
  siRNA target sequence for AV006891 (NM_023057.1,1255-1273).
ctaacccacgattatctga

SEQ ID NO: 495504 - DNA, 19 bp, Mus musculus
  siRNA target sequence for AV006891 (NM_023057.1,1288-1306).
ccaccactgattaaggatt

SEQ ID NO: 495505 - DNA, 19 bp, Mus musculus
  siRNA target sequence for AV006891 (NM_023057.1,1385-1403).
ctggcccacaggattgcaa

SEQ ID NO: 495506 - DNA, 19 bp, Mus musculus
  siRNA target sequence for AV006891 (NM_023057.1,1387-1405).
ggcccacaggattgcaaat

SEQ ID NO: 495507 - DNA, 19 bp, Mus musculus
  siRNA target sequence for AV006891 (NM_023057.1,1438-1456).
gttgcaatcacgtacataa

SEQ ID NO: 495508 - DNA, 19 bp, Mus musculus
  siRNA target sequence for AV006891 (NM_023057.1,1442-1460).
caatcacgtacataaaaga

SEQ ID NO: 495509 - DNA, 19 bp, Mus musculus
  siRNA target sequence for AV006891 (NM_023057.1,1508-1526).
caaagccaccatttgtaat

SEQ ID NO: 495510 - DNA, 19 bp, Mus musculus
  siRNA target sequence for AV006891 (NM_023057.1,1571-1589).
gcacggtcacctatgagaa

SEQ ID NO: 495511 - DNA, 19 bp, Mus musculus
  siRNA target sequence for AV006891 (NM_023057.1,1594-1612).
gtcagaacaccaaaactca

SEQ ID NO: 495512 - DNA, 19 bp, Mus musculus
  siRNA target sequence for AV006891 (NM_023057.1,1598-1616).
gaacaccaaaactcactaa

SEQ ID NO: 495513 - DNA, 19 bp, Mus musculus
  siRNA target sequence for AV006891 (NM_023057.1,1672-1690).
gtccagcttgccattcaga

SEQ ID NO: 495514 - DNA, 19 bp, Mus musculus
  siRNA target sequence for AV006891 (NM_023057.1,1739-1757).
gtgcggactgccaatggtt

SEQ ID NO: 495515 - DNA, 19 bp, Mus musculus
  siRNA target sequence for AV006891 (NM_023057.1,1768-1786).
cgcatgcggcagattgcat

SEQ ID NO: 495516 - DNA, 19 bp, Mus musculus
  siRNA target sequence for AV006891 (NM_023057.1,1889-1907).
cccagactccggtgaagta

SEQ ID NO: 495517 - DNA, 19 bp, Mus musculus
  siRNA target sequence for AV006891 (NM_023057.1,1900-1918).
gtgaagtaccagcagatta

SEQ ID NO: 495518 - DNA, 19 bp, Mus musculus
  siRNA target sequence for AV006891 (NM_023057.1,1902-1920).
gaagtaccagcagattaca

SEQ ID NO: 495519 - DNA, 19 bp, Mus musculus
  siRNA target sequence for AV006891 (NM_023057.1,2057-2075).
cagaccgaagcagaaacaa

SEQ ID NO: 495520 - DNA, 19 bp, Mus musculus
  siRNA target sequence for AV006891 (NM_023057.1,2062-2080).
cgaagcagaaacaagtact

SEQ ID NO: 495521 - DNA, 19 bp, Mus musculus
  siRNA target sequence for AV006891 (NM_023057.1,2086-2104).
ggtagtgtgtccctcaatt

SEQ ID NO: 495522 - DNA, 19 bp, Mus musculus
  siRNA target sequence for AV006891 (NM_023057.1,2334-2352).
cgaagggggctggactaaa

SEQ ID NO: 495523 - DNA, 19 bp, Mus musculus
  siRNA target sequence for AV006891 (NM_023057.1,2342-2360).
gctggactaaagtggaata

SEQ ID NO: 495524 - DNA, 19 bp, Mus musculus
  siRNA target sequence for AV006891 (NM_023057.1,2380-2398).
caactttcggccaagacta

SEQ ID NO: 495525 - DNA, 19 bp, Mus musculus
  siRNA target sequence for AW209059 (NM_023058.1,656-674).
gctcatatggagaagtctt

SEQ ID NO: 495526 - DNA, 19 bp, Mus musculus
  siRNA target sequence for AW209059 (NM_023058.1,675-693).
caaggtgcgctctaaggaa

SEQ ID NO: 495527 - DNA, 19 bp, Mus musculus
  siRNA target sequence for AW209059 (NM_023058.1,744-762).
caaagaccgaactcgtaaa

SEQ ID NO: 495528 - DNA, 19 bp, Mus musculus
  siRNA target sequence for AW209059 (NM_023058.1,935-953).
gctacttgcgggacattct

SEQ ID NO: 495529 - DNA, 19 bp, Mus musculus
  siRNA target sequence for AW209059 (NM_023058.1,958-976).
gctctggaccatctacata

SEQ ID NO: 495530 - DNA, 19 bp, Mus musculus
  siRNA target sequence for AW209059 (NM_023058.1,1383-1401).
gccacgtccctggaatgtt

SEQ ID NO: 495531 - DNA, 19 bp, Mus musculus
  siRNA target sequence for AW209059 (NM_023058.1,1385-1403).
cacgtccctggaatgttct

SEQ ID NO: 495532 - DNA, 19 bp, Mus musculus
  siRNA target sequence for AW209059 (NM_023058.1,1583-1601).
ccagcagctgggataatga

SEQ ID NO: 495533 - DNA, 19 bp, Mus musculus
  siRNA target sequence for AW209059 (NM_023058.1,1636-1654).
ctgtcccggatcactagaa

SEQ ID NO: 495534 - DNA, 19 bp, Mus musculus
  siRNA target sequence for AW209059 (NM_023058.1,1638-1656).
gtcccggatcactagaaga

SEQ ID NO: 495535 - DNA, 19 bp, Mus musculus
  siRNA target sequence for AW209059 (NM_023058.1,1665-1683).
ccctcggggcaggtacata

SEQ ID NO: 495536 - DNA, 19 bp, Mus musculus
  siRNA target sequence for AW209059 (NM_023058.1,1669-1687).
cggggcaggtacataccta

SEQ ID NO: 495537 - DNA, 19 bp, Mus musculus
  siRNA target sequence for AW319487 (NM_054085.1,130-148).
ccagccagtcgcaactact

SEQ ID NO: 495538 - DNA, 19 bp, Mus musculus
  siRNA target sequence for AW319487 (NM_054085.1,131-149).
cagccagtcgcaactactt

SEQ ID NO: 495539 - DNA, 19 bp, Mus musculus
  siRNA target sequence for AW319487 (NM_054085.1,162-180).
gccagaggctagcttatca

SEQ ID NO: 495540 - DNA, 19 bp, Mus musculus
  siRNA target sequence for AW319487 (NM_054085.1,163-181).
ccagaggctagcttatcaa

SEQ ID NO: 495541 - DNA, 19 bp, Mus musculus
  siRNA target sequence for AW319487 (NM_054085.1,360-378).
gtacaaggatgacatagaa

SEQ ID NO: 495542 - DNA, 19 bp, Mus musculus
  siRNA target sequence for AW319487 (NM_054085.1,539-557).
gcactatgacggagtacaa

SEQ ID NO: 495543 - DNA, 19 bp, Mus musculus
  siRNA target sequence for AW319487 (NM_054085.1,569-587).
gctggttcgccaagttgaa

SEQ ID NO: 495544 - DNA, 19 bp, Mus musculus
  siRNA target sequence for AW319487 (NM_054085.1,657-675).
ggctgacacgcttcttctt

SEQ ID NO: 495545 - DNA, 19 bp, Mus musculus
  siRNA target sequence for AW319487 (NM_054085.1,689-707).
ccgaccgcttccaaagaaa

SEQ ID NO: 495546 - DNA, 19 bp, Mus musculus
  siRNA target sequence for AW319487 (NM_054085.1,746-764).
cgccagtcagggaaatgga

SEQ ID NO: 495547 - DNA, 19 bp, Mus musculus
  siRNA target sequence for AW319487 (NM_054085.1,820-838).
gggttgggtttgatcaaca

SEQ ID NO: 495548 - DNA, 19 bp, Mus musculus
  siRNA target sequence for AW319487 (NM_054085.1,989-1007).
ggaaggatgaggaatctaa

SEQ ID NO: 495549 - DNA, 19 bp, Mus musculus
  siRNA target sequence for AW319487 (NM_054085.1,1522-1540).
cccattaagcctttgaaca

SEQ ID NO: 495550 - DNA, 19 bp, Mus musculus
  siRNA target sequence for AW319487 (NM_054085.1,1545-1563).
gagatttgcccctcctaaa

SEQ ID NO: 495551 - DNA, 19 bp, Mus musculus
  siRNA target sequence for AW319487 (NM_054085.1,1797-1815).
cgataccgtctctgttgat

SEQ ID NO: 495552 - DNA, 19 bp, Mus musculus
  siRNA target sequence for AW319487 (NM_054085.1,1848-1866).
gcccatggatacagaaact

SEQ ID NO: 495553 - DNA, 19 bp, Mus musculus
  siRNA target sequence for AW319487 (NM_054085.1,1850-1868).
ccatggatacagaaactca

SEQ ID NO: 495554 - DNA, 19 bp, Mus musculus
  siRNA target sequence for AW319487 (NM_054085.1,2199-2217).
cattcctgtagctttcgaa

SEQ ID NO: 495555 - DNA, 19 bp, Mus musculus
  siRNA target sequence for AW319487 (NM_054085.1,2303-2321).
cccaggctatagaatgttt

SEQ ID NO: 495556 - DNA, 19 bp, Mus musculus
  siRNA target sequence for AW319487 (NM_054085.1,2304-2322).
ccaggctatagaatgtttt

SEQ ID NO: 495557 - DNA, 19 bp, Mus musculus
  siRNA target sequence for AW319487 (NM_054085.1,2744-2762).
ctgctcccactctgcaatt

SEQ ID NO: 495558 - DNA, 19 bp, Mus musculus
  siRNA target sequence for AW319487 (NM_054085.1,2874-2892).
ctgtgaccctggccttata

SEQ ID NO: 495559 - DNA, 19 bp, Mus musculus
  siRNA target sequence for AW319487 (NM_054085.1,3066-3084).
ggaacgcgtggagaacaat

SEQ ID NO: 495560 - DNA, 19 bp, Mus musculus
  siRNA target sequence for AW319487 (NM_054085.1,3293-3311).
cgcaggaaagtgacaagaa

SEQ ID NO: 495561 - DNA, 19 bp, Mus musculus
  siRNA target sequence for AW319487 (NM_054085.1,3776-3794).
cacaggtgatccggaaaat

SEQ ID NO: 495562 - DNA, 19 bp, Mus musculus
  siRNA target sequence for AW319487 (NM_054085.1,3801-3819).
ggaacagtttccagattct

SEQ ID NO: 495563 - DNA, 19 bp, Mus musculus
  siRNA target sequence for AW319487 (NM_054085.1,3839-3857).
ggtgccagtttttcaacat

SEQ ID NO: 495564 - DNA, 19 bp, Mus musculus
  siRNA target sequence for AW319487 (NM_054085.1,3842-3860).
gccagtttttcaacattgt

SEQ ID NO: 495565 - DNA, 19 bp, Mus musculus
  siRNA target sequence for AW319487 (NM_054085.1,3846-3864).
gtttttcaacattgttagt

SEQ ID NO: 495566 - DNA, 19 bp, Mus musculus
  siRNA target sequence for AW319487 (NM_054085.1,3989-4007).
gctgtaccatccaaaacga

SEQ ID NO: 495567 - DNA, 19 bp, Mus musculus
  siRNA target sequence for AW319487 (NM_054085.1,4036-4054).
ctcagccccgaggtattgt

SEQ ID NO: 495568 - DNA, 19 bp, Mus musculus
  siRNA target sequence for AW319487 (NM_054085.1,4243-4261).
ctggaacccatcttcgaat

SEQ ID NO: 495569 - DNA, 19 bp, Mus musculus
  siRNA target sequence for AW319487 (NM_054085.1,4265-4283).
gccgcacgtgcatcatcaa

SEQ ID NO: 495570 - DNA, 19 bp, Mus musculus
  siRNA target sequence for AW319487 (NM_054085.1,4382-4400).
gtcgagagtactgcaaaat

SEQ ID NO: 495571 - DNA, 19 bp, Mus musculus
  siRNA target sequence for AW319487 (NM_054085.1,4385-4403).
gagagtactgcaaaatctt

SEQ ID NO: 495572 - DNA, 19 bp, Mus musculus
  siRNA target sequence for AW319487 (NM_054085.1,4470-4488).
ctaccggcctgcaaacaat

SEQ ID NO: 495573 - DNA, 19 bp, Mus musculus
  siRNA target sequence for AW319487 (NM_054085.1,4473-4491).
ccggcctgcaaacaatata

SEQ ID NO: 495574 - DNA, 19 bp, Mus musculus
  siRNA target sequence for AW319487 (NM_054085.1,4525-4543).
cccctgcagacttactgtt

SEQ ID NO: 495575 - DNA, 19 bp, Mus musculus
  siRNA target sequence for AW319487 (NM_054085.1,4638-4656).
gacaaacggcagctttctt

SEQ ID NO: 495576 - DNA, 19 bp, Mus musculus
  siRNA target sequence for AW319487 (NM_054085.1,4640-4658).
caaacggcagctttcttgt

SEQ ID NO: 495577 - DNA, 19 bp, Mus musculus
  siRNA target sequence for AW319487 (NM_054085.1,4710-4728).
caaacttcgaggataccaa

SEQ ID NO: 495578 - DNA, 19 bp, Mus musculus
  siRNA target sequence for AW319487 (NM_054085.1,4731-4749).
cctcaaggagagctgtttt

SEQ ID NO: 495579 - DNA, 19 bp, Mus musculus
  siRNA target sequence for AW319487 (NM_054085.1,4857-4875).
ggccaaaggctccaaaagt

SEQ ID NO: 495580 - DNA, 19 bp, Mus musculus
  siRNA target sequence for AW319517 (NM_144551.3,509-527).
caggtctacccctatcaca

SEQ ID NO: 495581 - DNA, 19 bp, Mus musculus
  siRNA target sequence for AW319517 (NM_144551.3,511-529).
ggtctacccctatcacaat

SEQ ID NO: 495582 - DNA, 19 bp, Mus musculus
  siRNA target sequence for AW319517 (NM_144551.3,512-530).
gtctacccctatcacaata

SEQ ID NO: 495583 - DNA, 19 bp, Mus musculus
  siRNA target sequence for AW319517 (NM_144551.3,540-558).
gggagatcgcggaacaaaa

SEQ ID NO: 495584 - DNA, 19 bp, Mus musculus
  siRNA target sequence for AW319517 (NM_144551.3,569-587).
cgaagagctgtcgtctata

SEQ ID NO: 495585 - DNA, 19 bp, Mus musculus
  siRNA target sequence for AW319517 (NM_144551.3,570-588).
gaagagctgtcgtctataa

SEQ ID NO: 495586 - DNA, 19 bp, Mus musculus
  siRNA target sequence for AW319517 (NM_144551.3,642-660).
cccgagactccgaacttgt

SEQ ID NO: 495587 - DNA, 19 bp, Mus musculus
  siRNA target sequence for AW319517 (NM_144551.3,673-691).
cttgcatcgggaaatactt

SEQ ID NO: 495588 - DNA, 19 bp, Mus musculus
  siRNA target sequence for AW319517 (NM_144551.3,676-694).
gcatcgggaaatacttact

SEQ ID NO: 495589 - DNA, 19 bp, Mus musculus
  siRNA target sequence for AW319517 (NM_144551.3,881-899).
gttctttgagcgaagctat

SEQ ID NO: 495590 - DNA, 19 bp, Mus musculus
  siRNA target sequence for AW319517 (NM_144551.3,913-931).
cctttgtccgcacttgtaa

SEQ ID NO: 495591 - DNA, 19 bp, Mus musculus
  siRNA target sequence for AW319517 (NM_144551.3,1023-1041).
ctcaagctgcggaaattta

SEQ ID NO: 495592 - DNA, 19 bp, Mus musculus
  siRNA target sequence for AW319517 (NM_144551.3,1029-1047).
ctgcggaaatttatcttca

SEQ ID NO: 495593 - DNA, 19 bp, Mus musculus
  siRNA target sequence for AW319517 (NM_144551.3,1081-1099).
gtttggaagacgcttacat

SEQ ID NO: 495594 - DNA, 19 bp, Mus musculus
  siRNA target sequence for AW319517 (NM_144551.3,1097-1115).
cattctccggggtgatgat

SEQ ID NO: 495595 - DNA, 19 bp, Mus musculus
  siRNA target sequence for AW319517 (NM_144551.3,1249-1267).
gttaccctttccatgacat

SEQ ID NO: 495596 - DNA, 19 bp, Mus musculus
  siRNA target sequence for AW319517 (NM_144551.3,1265-1283).
cattgagcctagttctctt

SEQ ID NO: 495597 - DNA, 19 bp, Mus musculus
  siRNA target sequence for AW319517 (NM_144551.3,1271-1289).
gcctagttctcttttcagt

SEQ ID NO: 495598 - DNA, 19 bp, Mus musculus
  siRNA target sequence for AW319517 (NM_144551.3,1384-1402).
ggctgacctcgcaggaaat

SEQ ID NO: 495599 - DNA, 19 bp, Mus musculus
  siRNA target sequence for AW413632 (NM_177588.1,347-365).
gtcaccatttgaaacagat

SEQ ID NO: 495600 - DNA, 19 bp, Mus musculus
  siRNA target sequence for AW413632 (NM_177588.1,367-385).
gcacaggagtgtctttcta

SEQ ID NO: 495601 - DNA, 19 bp, Mus musculus
  siRNA target sequence for AW413632 (NM_177588.1,569-587).
gttgtgtcatcgatgtaga

SEQ ID NO: 495602 - DNA, 19 bp, Mus musculus
  siRNA target sequence for AW413632 (NM_177588.1,612-630).
gaatatgagcgcatctgaa

SEQ ID NO: 495603 - DNA, 19 bp, Mus musculus
  siRNA target sequence for AW413632 (NM_177588.1,643-661).
gttggtaatgagcgatttt

SEQ ID NO: 495604 - DNA, 19 bp, Mus musculus
  siRNA target sequence for AW413632 (NM_177588.1,647-665).
gtaatgagcgatttttaga

SEQ ID NO: 495605 - DNA, 19 bp, Mus musculus
  siRNA target sequence for AW413632 (NM_177588.1,746-764).
ctagcatgtggcatctgaa

SEQ ID NO: 495606 - DNA, 19 bp, Mus musculus
  siRNA target sequence for AW413632 (NM_177588.1,786-804).
cctagatgtgcctctaaca

SEQ ID NO: 495607 - DNA, 19 bp, Mus musculus
  siRNA target sequence for AW413632 (NM_177588.1,790-808).
gatgtgcctctaacagata

SEQ ID NO: 495608 - DNA, 19 bp, Mus musculus
  siRNA target sequence for AW413632 (NM_177588.1,795-813).
gcctctaacagatataatt

SEQ ID NO: 495609 - DNA, 19 bp, Mus musculus
  siRNA target sequence for AW413632 (NM_177588.1,796-814).
cctctaacagatataatta

SEQ ID NO: 495610 - DNA, 19 bp, Mus musculus
  siRNA target sequence for AW413632 (NM_177588.1,818-836).
gtctgaaatcaatgagaat

SEQ ID NO: 495611 - DNA, 19 bp, Mus musculus
  siRNA target sequence for AW413632 (NM_177588.1,881-899).
cgctgaagcacgtaagact

SEQ ID NO: 495612 - DNA, 19 bp, Mus musculus
  siRNA target sequence for AW413632 (NM_177588.1,888-906).
gcacgtaagactgtactat

SEQ ID NO: 495613 - DNA, 19 bp, Mus musculus
  siRNA target sequence for AW413632 (NM_177588.1,889-907).
cacgtaagactgtactata

SEQ ID NO: 495614 - DNA, 19 bp, Mus musculus
  siRNA target sequence for AW413632 (NM_177588.1,892-910).
gtaagactgtactataaga

SEQ ID NO: 495615 - DNA, 19 bp, Mus musculus
  siRNA target sequence for AW413632 (NM_177588.1,1005-1023).
ggattcagagacattcatt

SEQ ID NO: 495616 - DNA, 19 bp, Mus musculus
  siRNA target sequence for AW413632 (NM_177588.1,1137-1155).
ggagtttccaaaactaagt

SEQ ID NO: 495617 - DNA, 19 bp, Mus musculus
  siRNA target sequence for AW413632 (NM_177588.1,1159-1177).
ggggagtggaataacctaa

SEQ ID NO: 495618 - DNA, 19 bp, Mus musculus
  siRNA target sequence for AW413632 (NM_177588.1,1164-1182).
gtggaataacctaatagga

SEQ ID NO: 495619 - DNA, 19 bp, Mus musculus
  siRNA target sequence for AW413632 (NM_177588.1,1180-1198).
ggagcaacctacatagaaa

SEQ ID NO: 495620 - DNA, 19 bp, Mus musculus
  siRNA target sequence for AW413632 (NM_177588.1,1249-1267).
gccaaattaggagaaatga

SEQ ID NO: 495621 - DNA, 19 bp, Mus musculus
  siRNA target sequence for AW413632 (NM_177588.1,1274-1292).
ctgcttatggggaaaactt

SEQ ID NO: 495622 - DNA, 19 bp, Mus musculus
  siRNA target sequence for AW413632 (NM_177588.1,1328-1346).
ctggcaatcagttcatctt

SEQ ID NO: 495623 - DNA, 19 bp, Mus musculus
  siRNA target sequence for AW413632 (NM_177588.1,1341-1359).
catcttggagttgttctat

SEQ ID NO: 495624 - DNA, 19 bp, Mus musculus
  siRNA target sequence for AW413632 (NM_177588.1,1360-1378).
ggcccaacggggtccttta

SEQ ID NO: 495625 - DNA, 19 bp, Mus musculus
  siRNA target sequence for AW413632 (NM_177588.1,1361-1379).
gcccaacggggtcctttaa

SEQ ID NO: 495626 - DNA, 19 bp, Mus musculus
  siRNA target sequence for AW413632 (NM_177588.1,1395-1413).
gcttatgcctcatattttt

SEQ ID NO: 495627 - DNA, 19 bp, Mus musculus
  siRNA target sequence for AW413632 (NM_177588.1,1429-1447).
ccaggttgcaattatgtga

SEQ ID NO: 495628 - DNA, 19 bp, Mus musculus
  siRNA target sequence for AW413632 (NM_177588.1,1430-1448).
caggttgcaattatgtgat

SEQ ID NO: 495629 - DNA, 19 bp, Mus musculus
  siRNA target sequence for AW413632 (NM_177588.1,1470-1488).
cactgggagtgcagtctta

SEQ ID NO: 495630 - DNA, 19 bp, Mus musculus
  siRNA target sequence for AW413632 (NM_177588.1,1550-1568).
cagagaacggagttagtga

SEQ ID NO: 495631 - DNA, 19 bp, Mus musculus
  siRNA target sequence for AW413632 (NM_177588.1,1552-1570).
gagaacggagttagtgatt

SEQ ID NO: 495632 - DNA, 19 bp, Mus musculus
  siRNA target sequence for AW413632 (NM_177588.1,1622-1640).
gtgtcaggtcagattttga

SEQ ID NO: 495633 - DNA, 19 bp, Mus musculus
  siRNA target sequence for AW413632 (NM_177588.1,1624-1642).
gtcaggtcagattttgatt

SEQ ID NO: 495634 - DNA, 19 bp, Mus musculus
  siRNA target sequence for AW413632 (NM_177588.1,1648-1666).
cagacagctattagaaaaa

SEQ ID NO: 495635 - DNA, 19 bp, Mus musculus
  siRNA target sequence for AW413632 (NM_177588.1,1652-1670).
cagctattagaaaaatatt

SEQ ID NO: 495636 - DNA, 19 bp, Mus musculus
  siRNA target sequence for AW413632 (NM_177588.1,1691-1709).
gctttctggctgtggaata

SEQ ID NO: 495637 - DNA, 19 bp, Mus musculus
  siRNA target sequence for AW413632 (NM_177588.1,1705-1723).
gaatatggaacaatcttaa

SEQ ID NO: 495638 - DNA, 19 bp, Mus musculus
  siRNA target sequence for AW413632 (NM_177588.1,1719-1737).
cttaagttcagctaattct

SEQ ID NO: 495639 - DNA, 19 bp, Mus musculus
  siRNA target sequence for AW413632 (NM_177588.1,1753-1771).
ctacttccgcagatagttt

SEQ ID NO: 495640 - DNA, 19 bp, Mus musculus
  siRNA target sequence for AW413632 (NM_177588.1,1783-1801).
gcataccttgagcttgtta

SEQ ID NO: 495641 - DNA, 19 bp, Mus musculus
  siRNA target sequence for AW413632 (NM_177588.1,1798-1816).
gttaaccaacggtttattt

SEQ ID NO: 495642 - DNA, 19 bp, Mus musculus
  siRNA target sequence for AW413632 (NM_177588.1,1876-1894).
gcagtgtatgccaagatga

SEQ ID NO: 495643 - DNA, 19 bp, Mus musculus
  siRNA target sequence for AW413632 (NM_177588.1,1893-1911).
gatgggaatccctattcga

SEQ ID NO: 495644 - DNA, 19 bp, Mus musculus
  siRNA target sequence for AW413632 (NM_177588.1,1896-1914).
gggaatccctattcgaaaa

SEQ ID NO: 495645 - DNA, 19 bp, Mus musculus
  siRNA target sequence for AW413632 (NM_177588.1,1897-1915).
ggaatccctattcgaaaat

SEQ ID NO: 495646 - DNA, 19 bp, Mus musculus
  siRNA target sequence for AW413632 (NM_177588.1,1903-1921).
cctattcgaaaatttatct

SEQ ID NO: 495647 - DNA, 19 bp, Mus musculus
  siRNA target sequence for AW413632 (NM_177588.1,1942-1960).
gttttgactgacttcataa

SEQ ID NO: 495648 - DNA, 19 bp, Mus musculus
  siRNA target sequence for AW413632 (NM_177588.1,1969-1987).
cattatgatctaaggaata

SEQ ID NO: 495649 - DNA, 19 bp, Mus musculus
  siRNA target sequence for AW413632 (NM_177588.1,2003-2021).
ccttttcaccatcaataga

SEQ ID NO: 495650 - DNA, 19 bp, Mus musculus
  siRNA target sequence for AW413632 (NM_177588.1,2004-2022).
cttttcaccatcaatagat

SEQ ID NO: 495651 - DNA, 19 bp, Mus musculus
  siRNA target sequence for AW413632 (NM_177588.1,2009-2027).
caccatcaatagatattct

SEQ ID NO: 495652 - DNA, 19 bp, Mus musculus
  siRNA target sequence for AW413632 (NM_177588.1,2011-2029).
ccatcaatagatattctca

SEQ ID NO: 495653 - DNA, 19 bp, Mus musculus
  siRNA target sequence for AW413632 (NM_177588.1,2012-2030).
catcaatagatattctcaa

SEQ ID NO: 495654 - DNA, 19 bp, Mus musculus
  siRNA target sequence for AW413632 (NM_177588.1,2041-2059).
ctggagcgacatttatact

SEQ ID NO: 495655 - DNA, 19 bp, Mus musculus
  siRNA target sequence for AW413632 (NM_177588.1,2080-2098).
cagttaatggcaaatttat

SEQ ID NO: 495656 - DNA, 19 bp, Mus musculus
  siRNA target sequence for AW413632 (NM_177588.1,2119-2137).
cttcacttccggattgaga

SEQ ID NO: 495657 - DNA, 19 bp, Mus musculus
  siRNA target sequence for AW413632 (NM_177588.1,2223-2241).
caatgcatcaggctatatt

SEQ ID NO: 495658 - DNA, 19 bp, Mus musculus
  siRNA target sequence for AW413632 (NM_177588.1,2249-2267).
cacataccgctgttgcaaa

SEQ ID NO: 495659 - DNA, 19 bp, Mus musculus
  siRNA target sequence for AW413632 (NM_177588.1,2278-2296).
gacaagatgcaagacaaaa

SEQ ID NO: 495660 - DNA, 19 bp, Mus musculus
  siRNA target sequence for AW413632 (NM_177588.1,2360-2378).
cactggggattaaagaact

SEQ ID NO: 495661 - DNA, 19 bp, Mus musculus
  siRNA target sequence for AW413632 (NM_177588.1,2387-2405).
cgtcgtccagccagcttta

SEQ ID NO: 495662 - DNA, 19 bp, Mus musculus
  siRNA target sequence for AW413632 (NM_177588.1,2406-2424).
cttactgagctcgtacaat

SEQ ID NO: 495663 - DNA, 19 bp, Mus musculus
  siRNA target sequence for AW413632 (NM_177588.1,2410-2428).
ctgagctcgtacaatgcat

SEQ ID NO: 495664 - DNA, 19 bp, Mus musculus
  siRNA target sequence for AW413632 (NM_177588.1,2446-2464).
gctctgctagagagaatga

SEQ ID NO: 495665 - DNA, 19 bp, Mus musculus
  siRNA target sequence for Axl (NM_009465.2,312-330).
cgaagactggcaagatgaa

SEQ ID NO: 495666 - DNA, 19 bp, Mus musculus
  siRNA target sequence for Axl (NM_009465.2,318-336).
ctggcaagatgaatggaaa

SEQ ID NO: 495667 - DNA, 19 bp, Mus musculus
  siRNA target sequence for Axl (NM_009465.2,340-358).
gtcagtcagctcagaatct

SEQ ID NO: 495668 - DNA, 19 bp, Mus musculus
  siRNA target sequence for Axl (NM_009465.2,380-398).
caggggagtaccagtgtat

SEQ ID NO: 495669 - DNA, 19 bp, Mus musculus
  siRNA target sequence for Axl (NM_009465.2,554-572).
ccctactctggcttcaaga

SEQ ID NO: 495670 - DNA, 19 bp, Mus musculus
  siRNA target sequence for Axl (NM_009465.2,631-649).
ggcctgaacaagacatctt

SEQ ID NO: 495671 - DNA, 19 bp, Mus musculus
  siRNA target sequence for Axl (NM_009465.2,946-964).
cctcacaccccgtatcaca

SEQ ID NO: 495672 - DNA, 19 bp, Mus musculus
  siRNA target sequence for Axl (NM_009465.2,947-965).
ctcacaccccgtatcacat

SEQ ID NO: 495673 - DNA, 19 bp, Mus musculus
  siRNA target sequence for Axl (NM_009465.2,1048-1066).
ggtccccctgagaacgtta

SEQ ID NO: 495674 - DNA, 19 bp, Mus musculus
  siRNA target sequence for Axl (NM_009465.2,1143-1161).
gtaccggctggcatatcga

SEQ ID NO: 495675 - DNA, 19 bp, Mus musculus
  siRNA target sequence for Axl (NM_009465.2,1172-1190).
cccccgaggtacttatgga

SEQ ID NO: 495676 - DNA, 19 bp, Mus musculus
  siRNA target sequence for Axl (NM_009465.2,1173-1191).
ccccgaggtacttatggat

SEQ ID NO: 495677 - DNA, 19 bp, Mus musculus
  siRNA target sequence for Axl (NM_009465.2,1174-1192).
cccgaggtacttatggata

SEQ ID NO: 495678 - DNA, 19 bp, Mus musculus
  siRNA target sequence for Axl (NM_009465.2,1175-1193).
ccgaggtacttatggatat

SEQ ID NO: 495679 - DNA, 19 bp, Mus musculus
  siRNA target sequence for Axl (NM_009465.2,1176-1194).
cgaggtacttatggatata

SEQ ID NO: 495680 - DNA, 19 bp, Mus musculus
  siRNA target sequence for Axl (NM_009465.2,1484-1502).
gatatggggaggtgtttga

SEQ ID NO: 495681 - DNA, 19 bp, Mus musculus
  siRNA target sequence for Axl (NM_009465.2,1841-1859).
ggctcattggcgtctgttt

SEQ ID NO: 495682 - DNA, 19 bp, Mus musculus
  siRNA target sequence for Axl (NM_009465.2,1979-1997).
ccactcagatgctagtgaa

SEQ ID NO: 495683 - DNA, 19 bp, Mus musculus
  siRNA target sequence for Axl (NM_009465.2,1982-2000).
ctcagatgctagtgaagtt

SEQ ID NO: 495684 - DNA, 19 bp, Mus musculus
  siRNA target sequence for Axl (NM_009465.2,2034-2052).
gagtaccaagagattcata

SEQ ID NO: 495685 - DNA, 19 bp, Mus musculus
  siRNA target sequence for Axl (NM_009465.2,2036-2054).
gtaccaagagattcataca

SEQ ID NO: 495686 - DNA, 19 bp, Mus musculus
  siRNA target sequence for Axl (NM_009465.2,2180-2198).
cagtcaagtggattgctat

SEQ ID NO: 495687 - DNA, 19 bp, Mus musculus
  siRNA target sequence for Axl (NM_009465.2,2325-2343).
ctacctgcgtcaaggaaat

SEQ ID NO: 495688 - DNA, 19 bp, Mus musculus
  siRNA target sequence for Axl (NM_009465.2,2414-2432).
ctcgagaccggccaagttt

SEQ ID NO: 495689 - DNA, 19 bp, Mus musculus
  siRNA target sequence for Axl (NM_009465.2,2492-2510).
cagatgaaatcctctatgt

SEQ ID NO: 495690 - DNA, 19 bp, Mus musculus
  siRNA target sequence for B130003F20Rik (NM_178775.2,87-105).
cacgggaccacaggtttta

SEQ ID NO: 495691 - DNA, 19 bp, Mus musculus
  siRNA target sequence for B130003F20Rik (NM_178775.2,89-107).
cgggaccacaggttttact

SEQ ID NO: 495692 - DNA, 19 bp, Mus musculus
  siRNA target sequence for B130003F20Rik (NM_178775.2,92-110).
gaccacaggttttacttgt

SEQ ID NO: 495693 - DNA, 19 bp, Mus musculus
  siRNA target sequence for B130003F20Rik (NM_178775.2,95-113).
cacaggttttacttgtaat

SEQ ID NO: 495694 - DNA, 19 bp, Mus musculus
  siRNA target sequence for B130003F20Rik (NM_178775.2,122-140).
ggacagagcagacattcat

SEQ ID NO: 495695 - DNA, 19 bp, Mus musculus
  siRNA target sequence for B130003F20Rik (NM_178775.2,123-141).
gacagagcagacattcatt

SEQ ID NO: 495696 - DNA, 19 bp, Mus musculus
  siRNA target sequence for B130003F20Rik (NM_178775.2,221-239).
gtctgcacacgtacatcat

SEQ ID NO: 495697 - DNA, 19 bp, Mus musculus
  siRNA target sequence for B130003F20Rik (NM_178775.2,242-260).
cggaggaatcggtgtttct

SEQ ID NO: 495698 - DNA, 19 bp, Mus musculus
  siRNA target sequence for B130003F20Rik (NM_178775.2,283-301).
ggaaaactctggtcgtata

SEQ ID NO: 495699 - DNA, 19 bp, Mus musculus
  siRNA target sequence for B130003F20Rik (NM_178775.2,284-302).
gaaaactctggtcgtatat

SEQ ID NO: 495700 - DNA, 19 bp, Mus musculus
  siRNA target sequence for B130003F20Rik (NM_178775.2,289-307).
ctctggtcgtatatcagta

SEQ ID NO: 495701 - DNA, 19 bp, Mus musculus
  siRNA target sequence for B130003F20Rik (NM_178775.2,291-309).
ctggtcgtatatcagtaaa

SEQ ID NO: 495702 - DNA, 19 bp, Mus musculus
  siRNA target sequence for B130003F20Rik (NM_178775.2,293-311).
ggtcgtatatcagtaaatt

SEQ ID NO: 495703 - DNA, 19 bp, Mus musculus
  siRNA target sequence for B130003F20Rik (NM_178775.2,294-312).
gtcgtatatcagtaaattt

SEQ ID NO: 495704 - DNA, 19 bp, Mus musculus
  siRNA target sequence for B130003F20Rik (NM_178775.2,328-346).
caggaaagcttggacatta

SEQ ID NO: 495705 - DNA, 19 bp, Mus musculus
  siRNA target sequence for B130003F20Rik (NM_178775.2,640-658).
ctgagcgaggagtctgtta

SEQ ID NO: 495706 - DNA, 19 bp, Mus musculus
  siRNA target sequence for B130003F20Rik (NM_178775.2,644-662).
gcgaggagtctgttatgca

SEQ ID NO: 495707 - DNA, 19 bp, Mus musculus
  siRNA target sequence for B130003F20Rik (NM_178775.2,682-700).
gacacccaggcggttagtt

SEQ ID NO: 495708 - DNA, 19 bp, Mus musculus
  siRNA target sequence for B130003F20Rik (NM_178775.2,769-787).
gatctagaggcggtttctt

SEQ ID NO: 495709 - DNA, 19 bp, Mus musculus
  siRNA target sequence for B130003F20Rik (NM_178775.2,806-824).
ccctcagtaggtcaaaaaa

SEQ ID NO: 495710 - DNA, 19 bp, Mus musculus
  siRNA target sequence for B130003F20Rik (NM_178775.2,829-847).
cctatggaattcttcagaa

SEQ ID NO: 495711 - DNA, 19 bp, Mus musculus
  siRNA target sequence for B130003F20Rik (NM_178775.2,932-950).
ccctctttacccttgaaga

SEQ ID NO: 495712 - DNA, 19 bp, Mus musculus
  siRNA target sequence for B130003F20Rik (NM_178775.2,1040-1058).
ccgtcccagttatctcatt

SEQ ID NO: 495713 - DNA, 19 bp, Mus musculus
  siRNA target sequence for B130003F20Rik (NM_178775.2,1042-1060).
gtcccagttatctcattta

SEQ ID NO: 495714 - DNA, 19 bp, Mus musculus
  siRNA target sequence for B130003F20Rik (NM_178775.2,1044-1062).
cccagttatctcatttaaa

SEQ ID NO: 495715 - DNA, 19 bp, Mus musculus
  siRNA target sequence for B130003F20Rik (NM_178775.2,1046-1064).
cagttatctcatttaaaga

SEQ ID NO: 495716 - DNA, 19 bp, Mus musculus
  siRNA target sequence for B130003F20Rik (NM_178775.2,1100-1118).
gaaggcctgaccttcttgt

SEQ ID NO: 495717 - DNA, 19 bp, Mus musculus
  siRNA target sequence for B130003F20Rik (NM_178775.2,1106-1124).
ctgaccttcttgtgaattt

SEQ ID NO: 495718 - DNA, 19 bp, Mus musculus
  siRNA target sequence for B130003F20Rik (NM_178775.2,1110-1128).
ccttcttgtgaatttacct

SEQ ID NO: 495719 - DNA, 19 bp, Mus musculus
  siRNA target sequence for B130003F20Rik (NM_178775.2,1190-1208).
caggcaggctggatagtaa

SEQ ID NO: 495720 - DNA, 19 bp, Mus musculus
  siRNA target sequence for B130003F20Rik (NM_178775.2,1193-1211).
gcaggctggatagtaaact

SEQ ID NO: 495721 - DNA, 19 bp, Mus musculus
  siRNA target sequence for B130003F20Rik (NM_178775.2,1468-1486).
gcacaggccttgcaagaaa

SEQ ID NO: 495722 - DNA, 19 bp, Mus musculus
  siRNA target sequence for B130003F20Rik (NM_178775.2,1507-1525).
ccctgctcaggtgctaata

SEQ ID NO: 495723 - DNA, 19 bp, Mus musculus
  siRNA target sequence for B130003F20Rik (NM_178775.2,1508-1526).
cctgctcaggtgctaataa

SEQ ID NO: 495724 - DNA, 19 bp, Mus musculus
  siRNA target sequence for B130003F20Rik (NM_178775.2,1511-1529).
gctcaggtgctaataaaga

SEQ ID NO: 495725 - DNA, 19 bp, Mus musculus
  siRNA target sequence for B130003F20Rik (NM_178775.2,1512-1530).
ctcaggtgctaataaagaa

SEQ ID NO: 495726 - DNA, 19 bp, Mus musculus
  siRNA target sequence for B130003F20Rik (NM_178775.2,1575-1593).
gttcacagaaccgactaaa

SEQ ID NO: 495727 - DNA, 19 bp, Mus musculus
  siRNA target sequence for B130003F20Rik (NM_178775.2,1578-1596).
cacagaaccgactaaagaa

SEQ ID NO: 495728 - DNA, 19 bp, Mus musculus
  siRNA target sequence for B130003F20Rik (NM_178775.2,1711-1729).
gctagctccaggttcttca

SEQ ID NO: 495729 - DNA, 19 bp, Mus musculus
  siRNA target sequence for B130003F20Rik (NM_178775.2,1751-1769).
gatgggcagcggaaatggt

SEQ ID NO: 495730 - DNA, 19 bp, Mus musculus
  siRNA target sequence for B130003F20Rik (NM_178775.2,1847-1865).
gaggtcaggaactttcaca

SEQ ID NO: 495731 - DNA, 19 bp, Mus musculus
  siRNA target sequence for B130003F20Rik (NM_178775.2,1850-1868).
gtcaggaactttcacaaat

SEQ ID NO: 495732 - DNA, 19 bp, Mus musculus
  siRNA target sequence for B230380D07Rik (NM_172772.1,690-708).
gggctgcacctctatgcaa

SEQ ID NO: 495733 - DNA, 19 bp, Mus musculus
  siRNA target sequence for B230380D07Rik (NM_172772.1,691-709).
ggctgcacctctatgcaaa

SEQ ID NO: 495734 - DNA, 19 bp, Mus musculus
  siRNA target sequence for B230380D07Rik (NM_172772.1,762-780).
ccggacagtcggtgtatca

SEQ ID NO: 495735 - DNA, 19 bp, Mus musculus
  siRNA target sequence for B230380D07Rik (NM_172772.1,769-787).
gtcggtgtatcacatcaaa

SEQ ID NO: 495736 - DNA, 19 bp, Mus musculus
  siRNA target sequence for B230380D07Rik (NM_172772.1,773-791).
gtgtatcacatcaaatgga

SEQ ID NO: 495737 - DNA, 19 bp, Mus musculus
  siRNA target sequence for B230380D07Rik (NM_172772.1,853-871).
gctggccatcctcaatgtt

SEQ ID NO: 495738 - DNA, 19 bp, Mus musculus
  siRNA target sequence for B230380D07Rik (NM_172772.1,880-898).
cgcctggaaggtgaaactt

SEQ ID NO: 495739 - DNA, 19 bp, Mus musculus
  siRNA target sequence for B230380D07Rik (NM_172772.1,928-946).
gcagctgatggaatattta

SEQ ID NO: 495740 - DNA, 19 bp, Mus musculus
  siRNA target sequence for B230380D07Rik (NM_172772.1,986-1004).
gaaattcaacgtgtaaatt

SEQ ID NO: 495741 - DNA, 19 bp, Mus musculus
  siRNA target sequence for B230380D07Rik (NM_172772.1,1104-1122).
cgccagagtgcatagtctt

SEQ ID NO: 495742 - DNA, 19 bp, Mus musculus
  siRNA target sequence for B230380D07Rik (NM_172772.1,1107-1125).
cagagtgcatagtctttga

SEQ ID NO: 495743 - DNA, 19 bp, Mus musculus
  siRNA target sequence for B230380D07Rik (NM_172772.1,1320-1338).
cgtaccatggattatgtga

SEQ ID NO: 495744 - DNA, 19 bp, Mus musculus
  siRNA target sequence for B230380D07Rik (NM_172772.1,1321-1339).
gtaccatggattatgtgaa

SEQ ID NO: 495745 - DNA, 19 bp, Mus musculus
  siRNA target sequence for B230380D07Rik (NM_172772.1,1371-1389).
gtgtgttctttcggaataa

SEQ ID NO: 495746 - DNA, 19 bp, Mus musculus
  siRNA target sequence for B230380D07Rik (NM_172772.1,1375-1393).
gttctttcggaataatcat

SEQ ID NO: 495747 - DNA, 19 bp, Mus musculus
  siRNA target sequence for B230380D07Rik (NM_172772.1,1421-1439).
caactgtatttgttggtaa

SEQ ID NO: 495748 - DNA, 19 bp, Mus musculus
  siRNA target sequence for B230380D07Rik (NM_172772.1,1476-1494).
gggaaagcctccacaatgt

SEQ ID NO: 495749 - DNA, 19 bp, Mus musculus
  siRNA target sequence for B230380D07Rik (NM_172772.1,1531-1549).
ccttcggcctccttcagat

SEQ ID NO: 495750 - DNA, 19 bp, Mus musculus
  siRNA target sequence for B230380D07Rik (NM_172772.1,1713-1731).
gacgggcctctcagtacta

SEQ ID NO: 495751 - DNA, 19 bp, Mus musculus
  siRNA target sequence for B230380D07Rik (NM_172772.1,1808-1826).
caagcctctccatcaagta

SEQ ID NO: 495752 - DNA, 19 bp, Mus musculus
  siRNA target sequence for B230380D07Rik (NM_172772.1,1862-1880).
gaacctcgggaaaaagaca

SEQ ID NO: 495753 - DNA, 19 bp, Mus musculus
  siRNA target sequence for BB049667 (NM_177898.3,95-113).
gataactttcacctgatta

SEQ ID NO: 495754 - DNA, 19 bp, Mus musculus
  siRNA target sequence for BB049667 (NM_177898.3,142-160).
ggtgtacttggctaaagat

SEQ ID NO: 495755 - DNA, 19 bp, Mus musculus
  siRNA target sequence for BB049667 (NM_177898.3,143-161).
gtgtacttggctaaagata

SEQ ID NO: 495756 - DNA, 19 bp, Mus musculus
  siRNA target sequence for BB049667 (NM_177898.3,172-190).
cagtcactgtgtcataaaa

SEQ ID NO: 495757 - DNA, 19 bp, Mus musculus
  siRNA target sequence for BB049667 (NM_177898.3,249-267).
ggatggagcatcccaatat

SEQ ID NO: 495758 - DNA, 19 bp, Mus musculus
  siRNA target sequence for BB049667 (NM_177898.3,253-271).
ggagcatcccaatatcgta

SEQ ID NO: 495759 - DNA, 19 bp, Mus musculus
  siRNA target sequence for BB049667 (NM_177898.3,254-272).
gagcatcccaatatcgtaa

SEQ ID NO: 495760 - DNA, 19 bp, Mus musculus
  siRNA target sequence for BB049667 (NM_177898.3,274-292).
cttcttcagctcgtttcaa

SEQ ID NO: 495761 - DNA, 19 bp, Mus musculus
  siRNA target sequence for BB049667 (NM_177898.3,293-311).
gagaacggcaggctgttta

SEQ ID NO: 495762 - DNA, 19 bp, Mus musculus
  siRNA target sequence for BB049667 (NM_177898.3,295-313).
gaacggcaggctgtttatt

SEQ ID NO: 495763 - DNA, 19 bp, Mus musculus
  siRNA target sequence for BB049667 (NM_177898.3,298-316).
cggcaggctgtttattgta

SEQ ID NO: 495764 - DNA, 19 bp, Mus musculus
  siRNA target sequence for BB049667 (NM_177898.3,299-317).
ggcaggctgtttattgtaa

SEQ ID NO: 495765 - DNA, 19 bp, Mus musculus
  siRNA target sequence for BB049667 (NM_177898.3,300-318).
gcaggctgtttattgtaat

SEQ ID NO: 495766 - DNA, 19 bp, Mus musculus
  siRNA target sequence for BB049667 (NM_177898.3,303-321).
ggctgtttattgtaatgga

SEQ ID NO: 495767 - DNA, 19 bp, Mus musculus
  siRNA target sequence for BB049667 (NM_177898.3,360-378).
ggcagcggggagtgatgtt

SEQ ID NO: 495768 - DNA, 19 bp, Mus musculus
  siRNA target sequence for BB049667 (NM_177898.3,362-380).
cagcggggagtgatgttca

SEQ ID NO: 495769 - DNA, 19 bp, Mus musculus
  siRNA target sequence for BB049667 (NM_177898.3,423-441).
gactgaagcatattcatga

SEQ ID NO: 495770 - DNA, 19 bp, Mus musculus
  siRNA target sequence for BB049667 (NM_177898.3,553-571).
ggaacttgctcaaacatgt

SEQ ID NO: 495771 - DNA, 19 bp, Mus musculus
  siRNA target sequence for BB049667 (NM_177898.3,610-628).
gaacaggccatacaacaat

SEQ ID NO: 495772 - DNA, 19 bp, Mus musculus
  siRNA target sequence for BB049667 (NM_177898.3,613-631).
caggccatacaacaataaa

SEQ ID NO: 495773 - DNA, 19 bp, Mus musculus
  siRNA target sequence for BB049667 (NM_177898.3,672-690).
gcacactcaagcatccttt

SEQ ID NO: 495774 - DNA, 19 bp, Mus musculus
  siRNA target sequence for BB049667 (NM_177898.3,675-693).
cactcaagcatccttttga

SEQ ID NO: 495775 - DNA, 19 bp, Mus musculus
  siRNA target sequence for BB049667 (NM_177898.3,677-695).
ctcaagcatccttttgaga

SEQ ID NO: 495776 - DNA, 19 bp, Mus musculus
  siRNA target sequence for BB049667 (NM_177898.3,686-704).
ccttttgagagcaacaact

SEQ ID NO: 495777 - DNA, 19 bp, Mus musculus
  siRNA target sequence for BB049667 (NM_177898.3,715-733).
ggttctgaagatttgtcaa

SEQ ID NO: 495778 - DNA, 19 bp, Mus musculus
  siRNA target sequence for BB049667 (NM_177898.3,825-843).
ccgttacgtcccttttgaa

SEQ ID NO: 495779 - DNA, 19 bp, Mus musculus
  siRNA target sequence for BB049667 (NM_177898.3,826-844).
cgttacgtcccttttgaaa

SEQ ID NO: 495780 - DNA, 19 bp, Mus musculus
  siRNA target sequence for BB049667 (NM_177898.3,827-845).
gttacgtcccttttgaaaa

SEQ ID NO: 495781 - DNA, 19 bp, Mus musculus
  siRNA target sequence for BB049667 (NM_177898.3,865-883).
cattgcccgatccttgtat

SEQ ID NO: 495782 - DNA, 19 bp, Mus musculus
  siRNA target sequence for BB049667 (NM_177898.3,980-998).
gcctaccttcagaggaaat

SEQ ID NO: 495783 - DNA, 19 bp, Mus musculus
  siRNA target sequence for BB049667 (NM_177898.3,982-1000).
ctaccttcagaggaaattt

SEQ ID NO: 495784 - DNA, 19 bp, Mus musculus
  siRNA target sequence for BB049667 (NM_177898.3,1004-1022).
gctcagcaatataagttaa

SEQ ID NO: 495785 - DNA, 19 bp, Mus musculus
  siRNA target sequence for BB049667 (NM_177898.3,1039-1057).
gggtcttcgtccatcttct

SEQ ID NO: 495786 - DNA, 19 bp, Mus musculus
  siRNA target sequence for BB049667 (NM_177898.3,1238-1256).
ctgaagagagtggtaaagt

SEQ ID NO: 495787 - DNA, 19 bp, Mus musculus
  siRNA target sequence for BB049667 (NM_177898.3,1243-1261).
gagagtggtaaagtttgaa

SEQ ID NO: 495788 - DNA, 19 bp, Mus musculus
  siRNA target sequence for BB049667 (NM_177898.3,1264-1282).
cagcctagacaagtgtatt

SEQ ID NO: 495789 - DNA, 19 bp, Mus musculus
  siRNA target sequence for BB049667 (NM_177898.3,1267-1285).
cctagacaagtgtatttca

SEQ ID NO: 495790 - DNA, 19 bp, Mus musculus
  siRNA target sequence for BB049667 (NM_177898.3,1306-1324).
gaatgaggcagtggataaa

SEQ ID NO: 495791 - DNA, 19 bp, Mus musculus
  siRNA target sequence for BB049667 (NM_177898.3,1374-1392).
gatgtaaggaggaacatga

SEQ ID NO: 495792 - DNA, 19 bp, Mus musculus
  siRNA target sequence for BB049667 (NM_177898.3,1382-1400).
gaggaacatgaagactata

SEQ ID NO: 495793 - DNA, 19 bp, Mus musculus
  siRNA target sequence for BB049667 (NM_177898.3,1384-1402).
ggaacatgaagactataca

SEQ ID NO: 495794 - DNA, 19 bp, Mus musculus
  siRNA target sequence for BB049667 (NM_177898.3,1561-1579).
ggatgatggccaagtgatt

SEQ ID NO: 495795 - DNA, 19 bp, Mus musculus
  siRNA target sequence for BB049667 (NM_177898.3,1565-1583).
gatggccaagtgattgtga

SEQ ID NO: 495796 - DNA, 19 bp, Mus musculus
  siRNA target sequence for BB049667 (NM_177898.3,1672-1690).
ctcattgtctgccagtaaa

SEQ ID NO: 495797 - DNA, 19 bp, Mus musculus
  siRNA target sequence for BB049667 (NM_177898.3,1692-1710).
gagaaaccgtaatgatcaa

SEQ ID NO: 495798 - DNA, 19 bp, Mus musculus
  siRNA target sequence for BB049667 (NM_177898.3,1788-1806).
caggatcggatgaagatga

SEQ ID NO: 495799 - DNA, 19 bp, Mus musculus
  siRNA target sequence for BB049667 (NM_177898.3,1791-1809).
gatcggatgaagatgacat

SEQ ID NO: 495800 - DNA, 19 bp, Mus musculus
  siRNA target sequence for BC011468 (NM_144847.1,337-355).
cccaacatgcgggaattca

SEQ ID NO: 495801 - DNA, 19 bp, Mus musculus
  siRNA target sequence for BC011468 (NM_144847.1,480-498).
gtacctcatgcctgagaat

SEQ ID NO: 495802 - DNA, 19 bp, Mus musculus
  siRNA target sequence for BC011468 (NM_144847.1,641-659).
ggatctatccactgatgaa

SEQ ID NO: 495803 - DNA, 19 bp, Mus musculus
  siRNA target sequence for BC011468 (NM_144847.1,645-663).
ctatccactgatgaacttt

SEQ ID NO: 495804 - DNA, 19 bp, Mus musculus
  siRNA target sequence for BC016235 (NM_145419.1,360-378).
ccaagtttcgggtcttgaa

SEQ ID NO: 495805 - DNA, 19 bp, Mus musculus
  siRNA target sequence for BC016235 (NM_145419.1,430-448).
ctacccaatgcccaatgaa

SEQ ID NO: 495806 - DNA, 19 bp, Mus musculus
  siRNA target sequence for BC016235 (NM_145419.1,434-452).
ccaatgcccaatgaaatca

SEQ ID NO: 495807 - DNA, 19 bp, Mus musculus
  siRNA target sequence for BC016235 (NM_145419.1,460-478).
gaatggcacggagcttttt

SEQ ID NO: 495808 - DNA, 19 bp, Mus musculus
  siRNA target sequence for BC016235 (NM_145419.1,464-482).
ggcacggagctttttgact

SEQ ID NO: 495809 - DNA, 19 bp, Mus musculus
  siRNA target sequence for BC016235 (NM_145419.1,465-483).
gcacggagctttttgacta

SEQ ID NO: 495810 - DNA, 19 bp, Mus musculus
  siRNA target sequence for BC016235 (NM_145419.1,602-620).
ctttcgtggaccaagaagt

SEQ ID NO: 495811 - DNA, 19 bp, Mus musculus
  siRNA target sequence for BC016235 (NM_145419.1,1027-1045).
gctgaagatggccaaagtt

SEQ ID NO: 495812 - DNA, 19 bp, Mus musculus
  siRNA target sequence for BC016235 (NM_145419.1,1052-1070).
ctgtttgggggtgcaaaat

SEQ ID NO: 495813 - DNA, 19 bp, Mus musculus
  siRNA target sequence for BC016235 (NM_145419.1,1155-1173).
gagagatcctggtggattt

SEQ ID NO: 495814 - DNA, 19 bp, Mus musculus
  siRNA target sequence for BC016235 (NM_145419.1,1281-1299).
ctcgactccgagagaacaa

SEQ ID NO: 495815 - DNA, 19 bp, Mus musculus
  siRNA target sequence for BC016235 (NM_145419.1,1283-1301).
cgactccgagagaacaaga

SEQ ID NO: 495816 - DNA, 19 bp, Mus musculus
  siRNA target sequence for BC016235 (NM_145419.1,1338-1356).
gaactctctacaaaacaca

SEQ ID NO: 495817 - DNA, 19 bp, Mus musculus
  siRNA target sequence for BC016235 (NM_145419.1,1564-1582).
caagatgcgggctgaacta

SEQ ID NO: 495818 - DNA, 19 bp, Mus musculus
  siRNA target sequence for BC016235 (NM_145419.1,1630-1648).
gcttcccacctatgtctat

SEQ ID NO: 495819 - DNA, 19 bp, Mus musculus
  siRNA target sequence for BC016235 (NM_145419.1,1654-1672).
gccggatggcacagagaaa

SEQ ID NO: 495820 - DNA, 19 bp, Mus musculus
  siRNA target sequence for BC016235 (NM_145419.1,1740-1758).
ggtctgtgcgcatgtacaa

SEQ ID NO: 495821 - DNA, 19 bp, Mus musculus
  siRNA target sequence for BC016235 (NM_145419.1,1743-1761).
ctgtgcgcatgtacaacaa

SEQ ID NO: 495822 - DNA, 19 bp, Mus musculus
  siRNA target sequence for BC016235 (NM_145419.1,1745-1763).
gtgcgcatgtacaacaaga

SEQ ID NO: 495823 - DNA, 19 bp, Mus musculus
  siRNA target sequence for BC016235 (NM_145419.1,1748-1766).
cgcatgtacaacaagatct

SEQ ID NO: 495824 - DNA, 19 bp, Mus musculus
  siRNA target sequence for BC016235 (NM_145419.1,1749-1767).
gcatgtacaacaagatctt

SEQ ID NO: 495825 - DNA, 19 bp, Mus musculus
  siRNA target sequence for BC016235 (NM_145419.1,1921-1939).
cgacaaggggactctagta

SEQ ID NO: 495826 - DNA, 19 bp, Mus musculus
  siRNA target sequence for BC016235 (NM_145419.1,2416-2434).
ccggaccaggggcatcttt

SEQ ID NO: 495827 - DNA, 19 bp, Mus musculus
  siRNA target sequence for BC016235 (NM_145419.1,2523-2541).
cgtgcgaagacagtattgt

SEQ ID NO: 495828 - DNA, 19 bp, Mus musculus
  siRNA target sequence for BC016495 (NM_145497.1,107-125).
gagatttgtcattggaatt

SEQ ID NO: 495829 - DNA, 19 bp, Mus musculus
  siRNA target sequence for BC016495 (NM_145497.1,121-139).
gaattggtggtgtgacaaa

SEQ ID NO: 495830 - DNA, 19 bp, Mus musculus
  siRNA target sequence for BC016495 (NM_145497.1,183-201).
cccaactgcagcgtcatat

SEQ ID NO: 495831 - DNA, 19 bp, Mus musculus
  siRNA target sequence for BC016495 (NM_145497.1,233-251).
gatagacatagatgaaaat

SEQ ID NO: 495832 - DNA, 19 bp, Mus musculus
  siRNA target sequence for BC016495 (NM_145497.1,253-271).
gttttttgcagtatgatgt

SEQ ID NO: 495833 - DNA, 19 bp, Mus musculus
  siRNA target sequence for BC016495 (NM_145497.1,280-298).
cgctaaatatggaaaaaat

SEQ ID NO: 495834 - DNA, 19 bp, Mus musculus
  siRNA target sequence for BC016495 (NM_145497.1,367-385).
ctcaaggggttcccatttt

SEQ ID NO: 495835 - DNA, 19 bp, Mus musculus
  siRNA target sequence for BC016495 (NM_145497.1,372-390).
ggggttcccattttaatta

SEQ ID NO: 495836 - DNA, 19 bp, Mus musculus
  siRNA target sequence for BC016495 (NM_145497.1,373-391).
gggttcccattttaattat

SEQ ID NO: 495837 - DNA, 19 bp, Mus musculus
  siRNA target sequence for BC016495 (NM_145497.1,393-411).
gaaggtttccttctcttta

SEQ ID NO: 495838 - DNA, 19 bp, Mus musculus
  siRNA target sequence for BC016495 (NM_145497.1,420-438).
cctctggacaccatatgga

SEQ ID NO: 495839 - DNA, 19 bp, Mus musculus
  siRNA target sequence for BC016495 (NM_145497.1,421-439).
ctctggacaccatatggaa

SEQ ID NO: 495840 - DNA, 19 bp, Mus musculus
  siRNA target sequence for BC016495 (NM_145497.1,452-470).
cctgaccgttccatatgaa

SEQ ID NO: 495841 - DNA, 19 bp, Mus musculus
  siRNA target sequence for BC016495 (NM_145497.1,458-476).
cgttccatatgaagaatgt

SEQ ID NO: 495842 - DNA, 19 bp, Mus musculus
  siRNA target sequence for BC016495 (NM_145497.1,462-480).
ccatatgaagaatgtaaga

SEQ ID NO: 495843 - DNA, 19 bp, Mus musculus
  siRNA target sequence for BC016495 (NM_145497.1,484-502).
gaaggagtaccagagtata

SEQ ID NO: 495844 - DNA, 19 bp, Mus musculus
  siRNA target sequence for BC016495 (NM_145497.1,487-505).
ggagtaccagagtatatga

SEQ ID NO: 495845 - DNA, 19 bp, Mus musculus
  siRNA target sequence for BC016495 (NM_145497.1,586-604).
cctgggacattgtttacct

SEQ ID NO: 495846 - DNA, 19 bp, Mus musculus
  siRNA target sequence for BC016495 (NM_145497.1,632-650).
cttctctcaggtgtatgaa

SEQ ID NO: 495847 - DNA, 19 bp, Mus musculus
  siRNA target sequence for BC017634 (NM_145621.1,167-185).
gtgacaagaagaactataa

SEQ ID NO: 495848 - DNA, 19 bp, Mus musculus
  siRNA target sequence for BC017634 (NM_145621.1,409-427).
gtgacccgcaaggaatact

SEQ ID NO: 495849 - DNA, 19 bp, Mus musculus
  siRNA target sequence for BC017634 (NM_145621.1,413-431).
cccgcaaggaatacttcat

SEQ ID NO: 495850 - DNA, 19 bp, Mus musculus
  siRNA target sequence for BC017634 (NM_145621.1,415-433).
cgcaaggaatacttcatct

SEQ ID NO: 495851 - DNA, 19 bp, Mus musculus
  siRNA target sequence for BC017634 (NM_145621.1,546-564).
cttgcactcgctcaagatt

SEQ ID NO: 495852 - DNA, 19 bp, Mus musculus
  siRNA target sequence for BC017634 (NM_145621.1,639-657).
ctttcacctggctaagcta

SEQ ID NO: 495853 - DNA, 19 bp, Mus musculus
  siRNA target sequence for BC017634 (NM_145621.1,645-663).
cctggctaagctagagaat

SEQ ID NO: 495854 - DNA, 19 bp, Mus musculus
  siRNA target sequence for BC017634 (NM_145621.1,752-770).
gggccattggcgtcatcat

SEQ ID NO: 495855 - DNA, 19 bp, Mus musculus
  siRNA target sequence for BC017634 (NM_145621.1,754-772).
gccattggcgtcatcatgt

SEQ ID NO: 495856 - DNA, 19 bp, Mus musculus
  siRNA target sequence for BC017634 (NM_145621.1,866-884).
ctggtgactatgagtttga

SEQ ID NO: 495857 - DNA, 19 bp, Mus musculus
  siRNA target sequence for BC017634 (NM_145621.1,887-905).
ctccgtactgggacgatat

SEQ ID NO: 495858 - DNA, 19 bp, Mus musculus
  siRNA target sequence for BC017634 (NM_145621.1,889-907).
ccgtactgggacgatattt

SEQ ID NO: 495859 - DNA, 19 bp, Mus musculus
  siRNA target sequence for BC017634 (NM_145621.1,891-909).
gtactgggacgatatttct

SEQ ID NO: 495860 - DNA, 19 bp, Mus musculus
  siRNA target sequence for BC017634 (NM_145621.1,894-912).
ctgggacgatatttctcaa

SEQ ID NO: 495861 - DNA, 19 bp, Mus musculus
  siRNA target sequence for BC017634 (NM_145621.1,980-998).
ccatctcccacgaatggat

SEQ ID NO: 495862 - DNA, 19 bp, Mus musculus
  siRNA target sequence for BC017634 (NM_145621.1,981-999).
catctcccacgaatggatt

SEQ ID NO: 495863 - DNA, 19 bp, Mus musculus
  siRNA target sequence for BC017634 (NM_145621.1,1009-1027).
gcggcttctgataagaaca

SEQ ID NO: 495864 - DNA, 19 bp, Mus musculus
  siRNA target sequence for BC017634 (NM_145621.1,1010-1028).
cggcttctgataagaacat

SEQ ID NO: 495865 - DNA, 19 bp, Mus musculus
  siRNA target sequence for BC017634 (NM_145621.1,1012-1030).
gcttctgataagaacatca

SEQ ID NO: 495866 - DNA, 19 bp, Mus musculus
  siRNA target sequence for BC017634 (NM_145621.1,1037-1055).
gcgtctgtgcccagattga

SEQ ID NO: 495867 - DNA, 19 bp, Mus musculus
  siRNA target sequence for BC017634 (NM_145621.1,1045-1063).
gcccagattgagaagaact

SEQ ID NO: 495868 - DNA, 19 bp, Mus musculus
  siRNA target sequence for BC017634 (NM_145621.1,1094-1112).
gagtgaccactctcatgaa

SEQ ID NO: 495869 - DNA, 19 bp, Mus musculus
  siRNA target sequence for BC017634 (NM_145621.1,1449-1467).
cgctacaccagctactgat

SEQ ID NO: 495870 - DNA, 19 bp, Mus musculus
  siRNA target sequence for BC020025 (NM_146030.1,580-598).
gttccctggacgttactct

SEQ ID NO: 495871 - DNA, 19 bp, Mus musculus
  siRNA target sequence for BC020025 (NM_146030.1,1311-1329).
gcactccaggacgaacttt

SEQ ID NO: 495872 - DNA, 19 bp, Mus musculus
  siRNA target sequence for BC020025 (NM_146030.1,1312-1330).
cactccaggacgaactttt

SEQ ID NO: 495873 - DNA, 19 bp, Mus musculus
  siRNA target sequence for BC020025 (NM_146030.1,1584-1602).
ccttcactagcagagattt

SEQ ID NO: 495874 - DNA, 19 bp, Mus musculus
  siRNA target sequence for BC020025 (NM_146030.1,1744-1762).
ggaacgcattcgctttgta

SEQ ID NO: 495875 - DNA, 19 bp, Mus musculus
  siRNA target sequence for BC020025 (NM_146030.1,1745-1763).
gaacgcattcgctttgtat

SEQ ID NO: 495876 - DNA, 19 bp, Mus musculus
  siRNA target sequence for BC020025 (NM_146030.1,1933-1951).
ctccagagggtcacgaatt

SEQ ID NO: 495877 - DNA, 19 bp, Mus musculus
  siRNA target sequence for BC021891 (NM_145608.1,525-543).
cgcctgtgcacgtagactt

SEQ ID NO: 495878 - DNA, 19 bp, Mus musculus
  siRNA target sequence for BC021891 (NM_145608.1,1281-1299).
gccctgaaccgtttgcaaa

SEQ ID NO: 495879 - DNA, 19 bp, Mus musculus
  siRNA target sequence for BC021891 (NM_145608.1,1282-1300).
ccctgaaccgtttgcaaaa

SEQ ID NO: 495880 - DNA, 19 bp, Mus musculus
  siRNA target sequence for BC021891 (NM_145608.1,1284-1302).
ctgaaccgtttgcaaaact

SEQ ID NO: 495881 - DNA, 19 bp, Mus musculus
  siRNA target sequence for BC021891 (NM_145608.1,1317-1335).
gggaacaagaccctcatat

SEQ ID NO: 495882 - DNA, 19 bp, Mus musculus
  siRNA target sequence for BC021891 (NM_145608.1,1339-1357).
cccctcgtttgccttaatt

SEQ ID NO: 495883 - DNA, 19 bp, Mus musculus
  siRNA target sequence for BC021891 (NM_145608.1,1341-1359).
cctcgtttgccttaattct

SEQ ID NO: 495884 - DNA, 19 bp, Mus musculus
  siRNA target sequence for BC021891 (NM_145608.1,1680-1698).
gacggctgaggctcaaaga

SEQ ID NO: 495885 - DNA, 19 bp, Mus musculus
  siRNA target sequence for BC021891 (NM_145608.1,1829-1847).
cgcctccgggctattcagt

SEQ ID NO: 495886 - DNA, 19 bp, Mus musculus
  siRNA target sequence for BC021891 (NM_145608.1,1830-1848).
gcctccgggctattcagtt

SEQ ID NO: 495887 - DNA, 19 bp, Mus musculus
  siRNA target sequence for BC021891 (NM_145608.1,1832-1850).
ctccgggctattcagttaa

SEQ ID NO: 495888 - DNA, 19 bp, Mus musculus
  siRNA target sequence for BC021891 (NM_145608.1,1834-1852).
ccgggctattcagttaact

SEQ ID NO: 495889 - DNA, 19 bp, Mus musculus
  siRNA target sequence for BC021891 (NM_145608.1,1835-1853).
cgggctattcagttaactt

SEQ ID NO: 495890 - DNA, 19 bp, Mus musculus
  siRNA target sequence for BC021891 (NM_145608.1,1837-1855).
ggctattcagttaacttca

SEQ ID NO: 495891 - DNA, 19 bp, Mus musculus
  siRNA target sequence for BC021891 (NM_145608.1,1851-1869).
cttcagatgagaacaataa

SEQ ID NO: 495892 - DNA, 19 bp, Mus musculus
  siRNA target sequence for BC021891 (NM_145608.1,1956-1974).
caagctccgttcaaacaaa

SEQ ID NO: 495893 - DNA, 19 bp, Mus musculus
  siRNA target sequence for BC021891 (NM_145608.1,1960-1978).
ctccgttcaaacaaaggaa

SEQ ID NO: 495894 - DNA, 19 bp, Mus musculus
  siRNA target sequence for BC021891 (NM_145608.1,2026-2044).
cccttggtcatctctttta

SEQ ID NO: 495895 - DNA, 19 bp, Mus musculus
  siRNA target sequence for BC021891 (NM_145608.1,2100-2118).
cttgtgaggagcagaaact

SEQ ID NO: 495896 - DNA, 19 bp, Mus musculus
  siRNA target sequence for BC021891 (NM_145608.1,2103-2121).
gtgaggagcagaaacttgt

SEQ ID NO: 495897 - DNA, 19 bp, Mus musculus
  siRNA target sequence for BC021891 (NM_145608.1,2399-2417).
ccatcacccaagatggaaa

SEQ ID NO: 495898 - DNA, 19 bp, Mus musculus
  siRNA target sequence for BC021891 (NM_145608.1,2444-2462).
gcctccaggtgccaatcaa

SEQ ID NO: 495899 - DNA, 19 bp, Mus musculus
  siRNA target sequence for BC021891 (NM_145608.1,2446-2464).
ctccaggtgccaatcaagt

SEQ ID NO: 495900 - DNA, 19 bp, Mus musculus
  siRNA target sequence for BC021891 (NM_145608.1,2540-2558).
ccaagccattcctcaaagt

SEQ ID NO: 495901 - DNA, 19 bp, Mus musculus
  siRNA target sequence for BC021891 (NM_145608.1,2698-2716).
cggactgagacctaagact

SEQ ID NO: 495902 - DNA, 19 bp, Mus musculus
  siRNA target sequence for BC021891 (NM_145608.1,2704-2722).
gagacctaagactgactat

SEQ ID NO: 495903 - DNA, 19 bp, Mus musculus
  siRNA target sequence for BC021891 (NM_145608.1,2999-3017).
gcttcggtgagaacaacat

SEQ ID NO: 495904 - DNA, 19 bp, Mus musculus
  siRNA target sequence for BC021891 (NM_145608.1,3115-3133).
gctggatgccagcatagaa

SEQ ID NO: 495905 - DNA, 19 bp, Mus musculus
  siRNA target sequence for BC027073 (NM_172272.1,53-71).
gaaggtctgctgacaagat

SEQ ID NO: 495906 - DNA, 19 bp, Mus musculus
  siRNA target sequence for BC027073 (NM_172272.1,107-125).
cgtcactgcagatacatca

SEQ ID NO: 495907 - DNA, 19 bp, Mus musculus
  siRNA target sequence for BC027073 (NM_172272.1,158-176).
gggcagcgcttggtattat

SEQ ID NO: 495908 - DNA, 19 bp, Mus musculus
  siRNA target sequence for BC027073 (NM_172272.1,552-570).
cccagaagaaactttccta

SEQ ID NO: 495909 - DNA, 19 bp, Mus musculus
  siRNA target sequence for BC027073 (NM_172272.1,806-824).
ggcacgatgtcccatgaat

SEQ ID NO: 495910 - DNA, 19 bp, Mus musculus
  siRNA target sequence for BC027073 (NM_172272.1,807-825).
gcacgatgtcccatgaatt

SEQ ID NO: 495911 - DNA, 19 bp, Mus musculus
  siRNA target sequence for BC027073 (NM_172272.1,885-903).
ccgccaacacagagatact

SEQ ID NO: 495912 - DNA, 19 bp, Mus musculus
  siRNA target sequence for BC027073 (NM_172272.1,886-904).
cgccaacacagagatacta

SEQ ID NO: 495913 - DNA, 19 bp, Mus musculus
  siRNA target sequence for BC027073 (NM_172272.1,905-923).
gacttgtcacaaaaaatct

SEQ ID NO: 495914 - DNA, 19 bp, Mus musculus
  siRNA target sequence for BC027073 (NM_172272.1,997-1015).
gtactcttccattttcaat

SEQ ID NO: 495915 - DNA, 19 bp, Mus musculus
  siRNA target sequence for BC027073 (NM_172272.1,1167-1185).
gtgtcatcccccctaagaa

SEQ ID NO: 495916 - DNA, 19 bp, Mus musculus
  siRNA target sequence for BC027073 (NM_172272.1,1294-1312).
cctgaccattggaaacaga

SEQ ID NO: 495917 - DNA, 19 bp, Mus musculus
  siRNA target sequence for BC027073 (NM_172272.1,1331-1349).
cttggctacccctttgtga

SEQ ID NO: 495918 - DNA, 19 bp, Mus musculus
  siRNA target sequence for BC027073 (NM_172272.1,1335-1353).
gctacccctttgtgatcat

SEQ ID NO: 495919 - DNA, 19 bp, Mus musculus
  siRNA target sequence for BC027088 (NM_146156.2,236-254).
cagccaaagtacgatctaa

SEQ ID NO: 495920 - DNA, 19 bp, Mus musculus
  siRNA target sequence for BC027088 (NM_146156.2,238-256).
gccaaagtacgatctaata

SEQ ID NO: 495921 - DNA, 19 bp, Mus musculus
  siRNA target sequence for BC027088 (NM_146156.2,276-294).
gttacggtgttgtgtatga

SEQ ID NO: 495922 - DNA, 19 bp, Mus musculus
  siRNA target sequence for BC027088 (NM_146156.2,318-336).
cgagagtagccgtgaagaa

SEQ ID NO: 495923 - DNA, 19 bp, Mus musculus
  siRNA target sequence for BC027088 (NM_146156.2,319-337).
gagagtagccgtgaagaaa

SEQ ID NO: 495924 - DNA, 19 bp, Mus musculus
  siRNA target sequence for BC027088 (NM_146156.2,326-344).
gccgtgaagaaaattcgat

SEQ ID NO: 495925 - DNA, 19 bp, Mus musculus
  siRNA target sequence for BC027088 (NM_146156.2,342-360).
gatgccacgcgcctgaaaa

SEQ ID NO: 495926 - DNA, 19 bp, Mus musculus
  siRNA target sequence for BC027088 (NM_146156.2,345-363).
gccacgcgcctgaaaatgt

SEQ ID NO: 495927 - DNA, 19 bp, Mus musculus
  siRNA target sequence for BC027088 (NM_146156.2,349-367).
cgcgcctgaaaatgttgaa

SEQ ID NO: 495928 - DNA, 19 bp, Mus musculus
  siRNA target sequence for BC027088 (NM_146156.2,351-369).
cgcctgaaaatgttgaact

SEQ ID NO: 495929 - DNA, 19 bp, Mus musculus
  siRNA target sequence for BC027088 (NM_146156.2,387-405).
gggcactaagcagtatcaa

SEQ ID NO: 495930 - DNA, 19 bp, Mus musculus
  siRNA target sequence for BC027088 (NM_146156.2,389-407).
gcactaagcagtatcaaga

SEQ ID NO: 495931 - DNA, 19 bp, Mus musculus
  siRNA target sequence for BC027088 (NM_146156.2,408-426).
gccaacacccaaatgtgat

SEQ ID NO: 495932 - DNA, 19 bp, Mus musculus
  siRNA target sequence for BC027088 (NM_146156.2,409-427).
ccaacacccaaatgtgatt

SEQ ID NO: 495933 - DNA, 19 bp, Mus musculus
  siRNA target sequence for BC027088 (NM_146156.2,472-490).
gatgtcccacggctctaat

SEQ ID NO: 495934 - DNA, 19 bp, Mus musculus
  siRNA target sequence for BC027088 (NM_146156.2,475-493).
gtcccacggctctaattct

SEQ ID NO: 495935 - DNA, 19 bp, Mus musculus
  siRNA target sequence for BC027088 (NM_146156.2,509-527).
cttgtagagacttcattaa

SEQ ID NO: 495936 - DNA, 19 bp, Mus musculus
  siRNA target sequence for BC027088 (NM_146156.2,549-567).
ccagaagcgcctattattt

SEQ ID NO: 495937 - DNA, 19 bp, Mus musculus
  siRNA target sequence for BC027088 (NM_146156.2,621-639).
ccaggaaacccaatcgaaa

SEQ ID NO: 495938 - DNA, 19 bp, Mus musculus
  siRNA target sequence for BC027088 (NM_146156.2,625-643).
gaaacccaatcgaaagact

SEQ ID NO: 495939 - DNA, 19 bp, Mus musculus
  siRNA target sequence for BC027088 (NM_146156.2,629-647).
cccaatcgaaagactaaca

SEQ ID NO: 495940 - DNA, 19 bp, Mus musculus
  siRNA target sequence for BC027088 (NM_146156.2,788-806).
gctgatttcggcctaagta

SEQ ID NO: 495941 - DNA, 19 bp, Mus musculus
  siRNA target sequence for BC027088 (NM_146156.2,876-894).
catgcgggacggacttcta

SEQ ID NO: 495942 - DNA, 19 bp, Mus musculus
  siRNA target sequence for BC027088 (NM_146156.2,879-897).
gcgggacggacttctacat

SEQ ID NO: 495943 - DNA, 19 bp, Mus musculus
  siRNA target sequence for BC027088 (NM_146156.2,925-943).
caccgccaaagctgacatt

SEQ ID NO: 495944 - DNA, 19 bp, Mus musculus
  siRNA target sequence for BC027088 (NM_146156.2,927-945).
ccgccaaagctgacatttt

SEQ ID NO: 495945 - DNA, 19 bp, Mus musculus
  siRNA target sequence for BC027088 (NM_146156.2,928-946).
cgccaaagctgacattttt

SEQ ID NO: 495946 - DNA, 19 bp, Mus musculus
  siRNA target sequence for BC027088 (NM_146156.2,976-994).
ggagaggatcaccttcata

SEQ ID NO: 495947 - DNA, 19 bp, Mus musculus
  siRNA target sequence for BC027088 (NM_146156.2,1015-1033).
gctcttggggagttacgta

SEQ ID NO: 495948 - DNA, 19 bp, Mus musculus
  siRNA target sequence for BC027088 (NM_146156.2,1016-1034).
ctcttggggagttacgtaa

SEQ ID NO: 495949 - DNA, 19 bp, Mus musculus
  siRNA target sequence for BC027088 (NM_146156.2,1123-1141).
gaatgggcgaatgaaacaa

SEQ ID NO: 495950 - DNA, 19 bp, Mus musculus
  siRNA target sequence for BC027088 (NM_146156.2,1128-1146).
ggcgaatgaaacaactgat

SEQ ID NO: 495951 - DNA, 19 bp, Mus musculus
  siRNA target sequence for BC027088 (NM_146156.2,1129-1147).
gcgaatgaaacaactgata

SEQ ID NO: 495952 - DNA, 19 bp, Mus musculus
  siRNA target sequence for BC027088 (NM_146156.2,1130-1148).
cgaatgaaacaactgataa

SEQ ID NO: 495953 - DNA, 19 bp, Mus musculus
  siRNA target sequence for BC027088 (NM_146156.2,1204-1222).
cagattagtccaaattgca

SEQ ID NO: 495954 - DNA, 19 bp, Mus musculus
  siRNA target sequence for BC027088 (NM_146156.2,1206-1224).
gattagtccaaattgcatt

SEQ ID NO: 495955 - DNA, 19 bp, Mus musculus
  siRNA target sequence for BC034126 (NM_153805.1,303-321).
ggctctcggaggctttaca

SEQ ID NO: 495956 - DNA, 19 bp, Mus musculus
  siRNA target sequence for BC034126 (NM_153805.1,304-322).
gctctcggaggctttacat

SEQ ID NO: 495957 - DNA, 19 bp, Mus musculus
  siRNA target sequence for BC034126 (NM_153805.1,305-323).
ctctcggaggctttacata

SEQ ID NO: 495958 - DNA, 19 bp, Mus musculus
  siRNA target sequence for BC034126 (NM_153805.1,332-350).
caggtagagctaaaggtaa

SEQ ID NO: 495959 - DNA, 19 bp, Mus musculus
  siRNA target sequence for BC034126 (NM_153805.1,417-435).
cggctgcccagcagatgtt

SEQ ID NO: 495960 - DNA, 19 bp, Mus musculus
  siRNA target sequence for BC034126 (NM_153805.1,461-479).
ctgctccggatgaagataa

SEQ ID NO: 495961 - DNA, 19 bp, Mus musculus
  siRNA target sequence for BC034126 (NM_153805.1,795-813).
ggacacttgtgaaacctat

SEQ ID NO: 495962 - DNA, 19 bp, Mus musculus
  siRNA target sequence for BC034126 (NM_153805.1,796-814).
gacacttgtgaaacctatt

SEQ ID NO: 495963 - DNA, 19 bp, Mus musculus
  siRNA target sequence for BC034126 (NM_153805.1,901-919).
ggcaggtagcccttctgaa

SEQ ID NO: 495964 - DNA, 19 bp, Mus musculus
  siRNA target sequence for BC034126 (NM_153805.1,1027-1045).
gggactggtggctgagaaa

SEQ ID NO: 495965 - DNA, 19 bp, Mus musculus
  siRNA target sequence for BC034126 (NM_153805.1,1028-1046).
ggactggtggctgagaaat

SEQ ID NO: 495966 - DNA, 19 bp, Mus musculus
  siRNA target sequence for BC034126 (NM_153805.1,1273-1291).
gcagagatgcattttctct

SEQ ID NO: 495967 - DNA, 19 bp, Mus musculus
  siRNA target sequence for BC034126 (NM_153805.1,1476-1494).
ccatgaagacgctctcaaa

SEQ ID NO: 495968 - DNA, 19 bp, Mus musculus
  siRNA target sequence for BC034126 (NM_153805.1,1477-1495).
catgaagacgctctcaaaa

SEQ ID NO: 495969 - DNA, 19 bp, Mus musculus
  siRNA target sequence for BC034126 (NM_153805.1,1630-1648).
gaaaccccccagacttcaa

SEQ ID NO: 495970 - DNA, 19 bp, Mus musculus
  siRNA target sequence for BC034126 (NM_153805.1,1635-1653).
cccccagacttcaagactt

SEQ ID NO: 495971 - DNA, 19 bp, Mus musculus
  siRNA target sequence for BC034126 (NM_153805.1,1669-1687).
gctgggtcggggacacttt

SEQ ID NO: 495972 - DNA, 19 bp, Mus musculus
  siRNA target sequence for BC034126 (NM_153805.1,1722-1740).
ggaaatactacgctatcaa

SEQ ID NO: 495973 - DNA, 19 bp, Mus musculus
  siRNA target sequence for BC034126 (NM_153805.1,1733-1751).
gctatcaaggcgttgaaga

SEQ ID NO: 495974 - DNA, 19 bp, Mus musculus
  siRNA target sequence for BC034126 (NM_153805.1,1734-1752).
ctatcaaggcgttgaagaa

SEQ ID NO: 495975 - DNA, 19 bp, Mus musculus
  siRNA target sequence for BC034126 (NM_153805.1,1775-1793).
gagattgacagcctatact

SEQ ID NO: 495976 - DNA, 19 bp, Mus musculus
  siRNA target sequence for BC034126 (NM_153805.1,1777-1795).
gattgacagcctatactgt

SEQ ID NO: 495977 - DNA, 19 bp, Mus musculus
  siRNA target sequence for BC034126 (NM_153805.1,2003-2021).
cacgagaagaggatcattt

SEQ ID NO: 495978 - DNA, 19 bp, Mus musculus
  siRNA target sequence for BC034126 (NM_153805.1,2333-2351).
gggctcgaactcattcaga

SEQ ID NO: 495979 - DNA, 19 bp, Mus musculus
  siRNA target sequence for BC034126 (NM_153805.1,2499-2517).
gccctgcagaccttcgtta

SEQ ID NO: 495980 - DNA, 19 bp, Mus musculus
  siRNA target sequence for BC034126 (NM_153805.1,2502-2520).
ctgcagaccttcgttactt

SEQ ID NO: 495981 - DNA, 19 bp, Mus musculus
  siRNA target sequence for BC048082 (NM_177922.2,103-121).
cgaggtggaccgtcatgta

SEQ ID NO: 495982 - DNA, 19 bp, Mus musculus
  siRNA target sequence for BC048082 (NM_177922.2,114-132).
gtcatgtagcccagagata

SEQ ID NO: 495983 - DNA, 19 bp, Mus musculus
  siRNA target sequence for BC048082 (NM_177922.2,234-252).
cctttagggaccagataga

SEQ ID NO: 495984 - DNA, 19 bp, Mus musculus
  siRNA target sequence for BC048082 (NM_177922.2,265-283).
cttccgtgagattatgctt

SEQ ID NO: 495985 - DNA, 19 bp, Mus musculus
  siRNA target sequence for BC048082 (NM_177922.2,270-288).
gtgagattatgcttctcaa

SEQ ID NO: 495986 - DNA, 19 bp, Mus musculus
  siRNA target sequence for BC048082 (NM_177922.2,313-331).
catccgcctgcttgatgta

SEQ ID NO: 495987 - DNA, 19 bp, Mus musculus
  siRNA target sequence for BC048082 (NM_177922.2,458-476).
ctgagagccaccaagttta

SEQ ID NO: 495988 - DNA, 19 bp, Mus musculus
  siRNA target sequence for BC048082 (NM_177922.2,462-480).
gagccaccaagtttatcca

SEQ ID NO: 495989 - DNA, 19 bp, Mus musculus
  siRNA target sequence for BC048082 (NM_177922.2,464-482).
gccaccaagtttatccatt

SEQ ID NO: 495990 - DNA, 19 bp, Mus musculus
  siRNA target sequence for BC048082 (NM_177922.2,536-554).
gcttgccgggtgaaactct

SEQ ID NO: 495991 - DNA, 19 bp, Mus musculus
  siRNA target sequence for BC048082 (NM_177922.2,662-680).
ctgtcttcccgatggtata

SEQ ID NO: 495992 - DNA, 19 bp, Mus musculus
  siRNA target sequence for BC048082 (NM_177922.2,1000-1018).
ctacgtgcagagattccat

SEQ ID NO: 495993 - DNA, 19 bp, Mus musculus
  siRNA target sequence for BC048082 (NM_177922.2,1081-1099).
gctctctgcaccagagtat

SEQ ID NO: 495994 - DNA, 19 bp, Mus musculus
  siRNA target sequence for Bckdk (NM_009739.2,314-332).
ctccgggctcgctcaacat

SEQ ID NO: 495995 - DNA, 19 bp, Mus musculus
  siRNA target sequence for Bckdk (NM_009739.2,316-334).
ccgggctcgctcaacatca

SEQ ID NO: 495996 - DNA, 19 bp, Mus musculus
  siRNA target sequence for Bckdk (NM_009739.2,339-357).
ccgatacacaccatgtaga

SEQ ID NO: 495997 - DNA, 19 bp, Mus musculus
  siRNA target sequence for Bckdk (NM_009739.2,487-505).
cagccaccttctgaaaagt

SEQ ID NO: 495998 - DNA, 19 bp, Mus musculus
  siRNA target sequence for Bckdk (NM_009739.2,511-529).
ctacttgcagcaagagtta

SEQ ID NO: 495999 - DNA, 19 bp, Mus musculus
  siRNA target sequence for Bckdk (NM_009739.2,558-576).
gcttccgtagccttccttt

SEQ ID NO: 496000 - DNA, 19 bp, Mus musculus
  siRNA target sequence for Bckdk (NM_009739.2,563-581).
cgtagccttcctttcatca

SEQ ID NO: 496001 - DNA, 19 bp, Mus musculus
  siRNA target sequence for Bckdk (NM_009739.2,564-582).
gtagccttcctttcatcat

SEQ ID NO: 496002 - DNA, 19 bp, Mus musculus
  siRNA target sequence for Bckdk (NM_009739.2,755-773).
cgtgagagccggaaacaca

SEQ ID NO: 496003 - DNA, 19 bp, Mus musculus
  siRNA target sequence for Bckdk (NM_009739.2,756-774).
gtgagagccggaaacacat

SEQ ID NO: 496004 - DNA, 19 bp, Mus musculus
  siRNA target sequence for Bckdk (NM_009739.2,791-809).
gtccggtacttcttggata

SEQ ID NO: 496005 - DNA, 19 bp, Mus musculus
  siRNA target sequence for Bckdk (NM_009739.2,793-811).
ccggtacttcttggataaa

SEQ ID NO: 496006 - DNA, 19 bp, Mus musculus
  siRNA target sequence for Bckdk (NM_009739.2,853-871).
ccacttggcgctacatgaa

SEQ ID NO: 496007 - DNA, 19 bp, Mus musculus
  siRNA target sequence for Bckdk (NM_009739.2,881-899).
gattttgttggcatcatct

SEQ ID NO: 496008 - DNA, 19 bp, Mus musculus
  siRNA target sequence for Bckdk (NM_009739.2,908-926).
ctgtcgcccaagaagatta

SEQ ID NO: 496009 - DNA, 19 bp, Mus musculus
  siRNA target sequence for Bckdk (NM_009739.2,912-930).
cgcccaagaagattatcga

SEQ ID NO: 496010 - DNA, 19 bp, Mus musculus
  siRNA target sequence for Bckdk (NM_009739.2,928-946).
cgagaagtgggtggatttt

SEQ ID NO: 496011 - DNA, 19 bp, Mus musculus
  siRNA target sequence for Bckdk (NM_009739.2,1031-1049).
cccatgccgctggactata

SEQ ID NO: 496012 - DNA, 19 bp, Mus musculus
  siRNA target sequence for Bckdk (NM_009739.2,1032-1050).
ccatgccgctggactatat

SEQ ID NO: 496013 - DNA, 19 bp, Mus musculus
  siRNA target sequence for Bckdk (NM_009739.2,1054-1072).
gcctgagctgctcaagaat

SEQ ID NO: 496014 - DNA, 19 bp, Mus musculus
  siRNA target sequence for Bckdk (NM_009739.2,1099-1117).
cctagacactccctacaat

SEQ ID NO: 496015 - DNA, 19 bp, Mus musculus
  siRNA target sequence for Bckdk (NM_009739.2,1135-1153).
caccatcgccaataatgat

SEQ ID NO: 496016 - DNA, 19 bp, Mus musculus
  siRNA target sequence for Bckdk (NM_009739.2,1141-1159).
cgccaataatgatattgat

SEQ ID NO: 496017 - DNA, 19 bp, Mus musculus
  siRNA target sequence for Bckdk (NM_009739.2,1185-1203).
gtggaggaatcgctcataa

SEQ ID NO: 496018 - DNA, 19 bp, Mus musculus
  siRNA target sequence for Bckdk (NM_009739.2,1188-1206).
gaggaatcgctcataagga

SEQ ID NO: 496019 - DNA, 19 bp, Mus musculus
  siRNA target sequence for Bckdk (NM_009739.2,1254-1272).
cccaggacccccgaatcaa

SEQ ID NO: 496020 - DNA, 19 bp, Mus musculus
  siRNA target sequence for Bckdk (NM_009739.2,1309-1327).
ccagtcaggacctatgcat

SEQ ID NO: 496021 - DNA, 19 bp, Mus musculus
  siRNA target sequence for Bckdk (NM_009739.2,1348-1366).
cacgtccagggcatatgca

SEQ ID NO: 496022 - DNA, 19 bp, Mus musculus
  siRNA target sequence for Bckdk (NM_009739.2,1354-1372).
cagggcatatgcagagtat

SEQ ID NO: 496023 - DNA, 19 bp, Mus musculus
  siRNA target sequence for Bckdk (NM_009739.2,1407-1425).
gcattggcacggatgtcta

SEQ ID NO: 496024 - DNA, 19 bp, Mus musculus
  siRNA target sequence for Blk (NM_007549.2,707-725).
caggaagagaaggttatgt

SEQ ID NO: 496025 - DNA, 19 bp, Mus musculus
  siRNA target sequence for Blk (NM_007549.2,1125-1143).
caagttggtccggaaactt

SEQ ID NO: 496026 - DNA, 19 bp, Mus musculus
  siRNA target sequence for Blk (NM_007549.2,1169-1187).
ggatgggttattacaaaaa

SEQ ID NO: 496027 - DNA, 19 bp, Mus musculus
  siRNA target sequence for Blk (NM_007549.2,1174-1192).
ggttattacaaaaataaca

SEQ ID NO: 496028 - DNA, 19 bp, Mus musculus
  siRNA target sequence for Blk (NM_007549.2,1226-1244).
ccatgtcaccggaagcttt

SEQ ID NO: 496029 - DNA, 19 bp, Mus musculus
  siRNA target sequence for Blk (NM_007549.2,1251-1269).
cgaggccaacgtgatgaaa

SEQ ID NO: 496030 - DNA, 19 bp, Mus musculus
  siRNA target sequence for Blk (NM_007549.2,1252-1270).
gaggccaacgtgatgaaaa

SEQ ID NO: 496031 - DNA, 19 bp, Mus musculus
  siRNA target sequence for Blk (NM_007549.2,1436-1454).
cagaggggatggcttacat

SEQ ID NO: 496032 - DNA, 19 bp, Mus musculus
  siRNA target sequence for Blk (NM_007549.2,1554-1572).
cattgacagtgaatacact

SEQ ID NO: 496033 - DNA, 19 bp, Mus musculus
  siRNA target sequence for Blk (NM_007549.2,1778-1796).
catgtccaccggagttgta

SEQ ID NO: 496034 - DNA, 19 bp, Mus musculus
  siRNA target sequence for Blk (NM_007549.2,1781-1799).
gtccaccggagttgtacaa

SEQ ID NO: 496035 - DNA, 19 bp, Mus musculus
  siRNA target sequence for Blk (NM_007549.2,1784-1802).
caccggagttgtacaatga

SEQ ID NO: 496036 - DNA, 19 bp, Mus musculus
  siRNA target sequence for Blk (NM_007549.2,1786-1804).
ccggagttgtacaatgata

SEQ ID NO: 496037 - DNA, 19 bp, Mus musculus
  siRNA target sequence for Bmp2k (NM_080708.1,460-478).
cactgaagcgaatgtatgt

SEQ ID NO: 496038 - DNA, 19 bp, Mus musculus
  siRNA target sequence for Bmp2k (NM_080708.1,464-482).
gaagcgaatgtatgtcaat

SEQ ID NO: 496039 - DNA, 19 bp, Mus musculus
  siRNA target sequence for Bmp2k (NM_080708.1,468-486).
cgaatgtatgtcaataaca

SEQ ID NO: 496040 - DNA, 19 bp, Mus musculus
  siRNA target sequence for Bmp2k (NM_080708.1,485-503).
cacacccgacctcaacatt

SEQ ID NO: 496041 - DNA, 19 bp, Mus musculus
  siRNA target sequence for Bmp2k (NM_080708.1,489-507).
cccgacctcaacatttgta

SEQ ID NO: 496042 - DNA, 19 bp, Mus musculus
  siRNA target sequence for Bmp2k (NM_080708.1,490-508).
ccgacctcaacatttgtaa

SEQ ID NO: 496043 - DNA, 19 bp, Mus musculus
  siRNA target sequence for Bmp2k (NM_080708.1,491-509).
cgacctcaacatttgtaaa

SEQ ID NO: 496044 - DNA, 19 bp, Mus musculus
  siRNA target sequence for Bmp2k (NM_080708.1,492-510).
gacctcaacatttgtaaaa

SEQ ID NO: 496045 - DNA, 19 bp, Mus musculus
  siRNA target sequence for Bmp2k (NM_080708.1,511-529).
gggaaatcacgattatgaa

SEQ ID NO: 496046 - DNA, 19 bp, Mus musculus
  siRNA target sequence for Bmp2k (NM_080708.1,518-536).
cacgattatgaaagagtta

SEQ ID NO: 496047 - DNA, 19 bp, Mus musculus
  siRNA target sequence for Bmp2k (NM_080708.1,569-587).
ctgtgctgtcaattcaatt

SEQ ID NO: 496048 - DNA, 19 bp, Mus musculus
  siRNA target sequence for Bmp2k (NM_080708.1,578-596).
caattcaattagtgacaat

SEQ ID NO: 496049 - DNA, 19 bp, Mus musculus
  siRNA target sequence for Bmp2k (NM_080708.1,599-617).
gtgggaagtgcttatctta

SEQ ID NO: 496050 - DNA, 19 bp, Mus musculus
  siRNA target sequence for Bmp2k (NM_080708.1,631-649).
gagctgggcaggttgtgaa

SEQ ID NO: 496051 - DNA, 19 bp, Mus musculus
  siRNA target sequence for Bmp2k (NM_080708.1,684-702).
gagtcagaagtcctacaaa

SEQ ID NO: 496052 - DNA, 19 bp, Mus musculus
  siRNA target sequence for Bmp2k (NM_080708.1,688-706).
cagaagtcctacaaatctt

SEQ ID NO: 496053 - DNA, 19 bp, Mus musculus
  siRNA target sequence for Bmp2k (NM_080708.1,726-744).
gtcgcacgattgcatcaat

SEQ ID NO: 496054 - DNA, 19 bp, Mus musculus
  siRNA target sequence for Bmp2k (NM_080708.1,728-746).
cgcacgattgcatcaatgt

SEQ ID NO: 496055 - DNA, 19 bp, Mus musculus
  siRNA target sequence for Bmp2k (NM_080708.1,729-747).
gcacgattgcatcaatgta

SEQ ID NO: 496056 - DNA, 19 bp, Mus musculus
  siRNA target sequence for Bmp2k (NM_080708.1,732-750).
cgattgcatcaatgtaaga

SEQ ID NO: 496057 - DNA, 19 bp, Mus musculus
  siRNA target sequence for Bmp2k (NM_080708.1,765-783).
cgggatctgaaggtagaaa

SEQ ID NO: 496058 - DNA, 19 bp, Mus musculus
  siRNA target sequence for Bmp2k (NM_080708.1,791-809).
gctaaatgatgctggaaat

SEQ ID NO: 496059 - DNA, 19 bp, Mus musculus
  siRNA target sequence for Bmp2k (NM_080708.1,792-810).
ctaaatgatgctggaaatt

SEQ ID NO: 496060 - DNA, 19 bp, Mus musculus
  siRNA target sequence for Bmp2k (NM_080708.1,828-846).
ggcagtgccactaataaat

SEQ ID NO: 496061 - DNA, 19 bp, Mus musculus
  siRNA target sequence for Bmp2k (NM_080708.1,832-850).
gtgccactaataaatttct

SEQ ID NO: 496062 - DNA, 19 bp, Mus musculus
  siRNA target sequence for Bmp2k (NM_080708.1,856-874).
ctcaaaaagatggagttaa

SEQ ID NO: 496063 - DNA, 19 bp, Mus musculus
  siRNA target sequence for Bmp2k (NM_080708.1,902-920).
cacgactctgtcgtataga

SEQ ID NO: 496064 - DNA, 19 bp, Mus musculus
  siRNA target sequence for Bmp2k (NM_080708.1,913-931).
cgtatagagcaccagaaat

SEQ ID NO: 496065 - DNA, 19 bp, Mus musculus
  siRNA target sequence for Bmp2k (NM_080708.1,924-942).
ccagaaatgatcaaccttt

SEQ ID NO: 496066 - DNA, 19 bp, Mus musculus
  siRNA target sequence for Bmp2k (NM_080708.1,981-999).
gccttgggatgtttactgt

SEQ ID NO: 496067 - DNA, 19 bp, Mus musculus
  siRNA target sequence for Bmp2k (NM_080708.1,1090-1108).
cccacaacgtgcattgctt

SEQ ID NO: 496068 - DNA, 19 bp, Mus musculus
  siRNA target sequence for Bmp2k (NM_080708.1,1094-1112).
caacgtgcattgcttgatt

SEQ ID NO: 496069 - DNA, 19 bp, Mus musculus
  siRNA target sequence for Bmp2k (NM_080708.1,1098-1116).
gtgcattgcttgattaggt

SEQ ID NO: 496070 - DNA, 19 bp, Mus musculus
  siRNA target sequence for Bmp2k (NM_080708.1,1136-1154).
cgagtgcagacctgacata

SEQ ID NO: 496071 - DNA, 19 bp, Mus musculus
  siRNA target sequence for Bmp2k (NM_080708.1,1137-1155).
gagtgcagacctgacatat

SEQ ID NO: 496072 - DNA, 19 bp, Mus musculus
  siRNA target sequence for Bmp2k (NM_080708.1,1139-1157).
gtgcagacctgacatattt

SEQ ID NO: 496073 - DNA, 19 bp, Mus musculus
  siRNA target sequence for Bmp2k (NM_080708.1,1141-1159).
gcagacctgacatatttca

SEQ ID NO: 496074 - DNA, 19 bp, Mus musculus
  siRNA target sequence for Bmp2k (NM_080708.1,1142-1160).
cagacctgacatatttcaa

SEQ ID NO: 496075 - DNA, 19 bp, Mus musculus
  siRNA target sequence for Bmp2k (NM_080708.1,1144-1162).
gacctgacatatttcaagt

SEQ ID NO: 496076 - DNA, 19 bp, Mus musculus
  siRNA target sequence for Bmp2k (NM_080708.1,1146-1164).
cctgacatatttcaagtat

SEQ ID NO: 496077 - DNA, 19 bp, Mus musculus
  siRNA target sequence for Bmp2k (NM_080708.1,1165-1183).
cctactttgcgtttaaatt

SEQ ID NO: 496078 - DNA, 19 bp, Mus musculus
  siRNA target sequence for Bmp2k (NM_080708.1,1198-1216).
gtccggtctccaacatcaa

SEQ ID NO: 496079 - DNA, 19 bp, Mus musculus
  siRNA target sequence for Bmp2k (NM_080708.1,1200-1218).
ccggtctccaacatcaata

SEQ ID NO: 496080 - DNA, 19 bp, Mus musculus
  siRNA target sequence for Bmp2k (NM_080708.1,1201-1219).
cggtctccaacatcaataa

SEQ ID NO: 496081 - DNA, 19 bp, Mus musculus
  siRNA target sequence for Bmp2k (NM_080708.1,2164-2182).
cgagcacaccctcagataa

SEQ ID NO: 496082 - DNA, 19 bp, Mus musculus
  siRNA target sequence for Bmp2k (NM_080708.1,2220-2238).
ccggaggagccttttgctt

SEQ ID NO: 496083 - DNA, 19 bp, Mus musculus
  siRNA target sequence for Bmp2k (NM_080708.1,2235-2253).
gcttccgtccctttcattt

SEQ ID NO: 496084 - DNA, 19 bp, Mus musculus
  siRNA target sequence for Bmp2k (NM_080708.1,2276-2294).
gaaaacgacggaacattct

SEQ ID NO: 496085 - DNA, 19 bp, Mus musculus
  siRNA target sequence for Bmp2k (NM_080708.1,2282-2300).
gacggaacattctccaaat

SEQ ID NO: 496086 - DNA, 19 bp, Mus musculus
  siRNA target sequence for Bmp2k (NM_080708.1,2289-2307).
cattctccaaatcaaaaat

SEQ ID NO: 496087 - DNA, 19 bp, Mus musculus
  siRNA target sequence for Bmp2k (NM_080708.1,2337-2355).
ggctcaagtccactatgta

SEQ ID NO: 496088 - DNA, 19 bp, Mus musculus
  siRNA target sequence for Bmp2k (NM_080708.1,2338-2356).
gctcaagtccactatgtaa

SEQ ID NO: 496089 - DNA, 19 bp, Mus musculus
  siRNA target sequence for Bmp2k (NM_080708.1,2339-2357).
ctcaagtccactatgtaaa

SEQ ID NO: 496090 - DNA, 19 bp, Mus musculus
  siRNA target sequence for Bmp2k (NM_080708.1,2341-2359).
caagtccactatgtaaaga

SEQ ID NO: 496091 - DNA, 19 bp, Mus musculus
  siRNA target sequence for Bmp2k (NM_080708.1,2381-2399).
ctccgagaatcccgtaatt

SEQ ID NO: 496092 - DNA, 19 bp, Mus musculus
  siRNA target sequence for Bmp2k (NM_080708.1,2393-2411).
cgtaattaggggtcaagta

SEQ ID NO: 496093 - DNA, 19 bp, Mus musculus
  siRNA target sequence for Bmp2k (NM_080708.1,2859-2877).
gacttcgacgtgttcacaa

SEQ ID NO: 496094 - DNA, 19 bp, Mus musculus
  siRNA target sequence for Bmp2k (NM_080708.1,2952-2970).
cggcccagaagtgtagata

SEQ ID NO: 496095 - DNA, 19 bp, Mus musculus
  siRNA target sequence for Bmp2k (NM_080708.1,2953-2971).
ggcccagaagtgtagatat

SEQ ID NO: 496096 - DNA, 19 bp, Mus musculus
  siRNA target sequence for Bmp2k (NM_080708.1,2954-2972).
gcccagaagtgtagatata

SEQ ID NO: 496097 - DNA, 19 bp, Mus musculus
  siRNA target sequence for Bmp2k (NM_080708.1,2955-2973).
cccagaagtgtagatatat

SEQ ID NO: 496098 - DNA, 19 bp, Mus musculus
  siRNA target sequence for Bmp2k (NM_080708.1,2999-3017).
ctccgtgtcagccagtaaa

SEQ ID NO: 496099 - DNA, 19 bp, Mus musculus
  siRNA target sequence for Bmp2k (NM_080708.1,3002-3020).
cgtgtcagccagtaaaagt

SEQ ID NO: 496100 - DNA, 19 bp, Mus musculus
  siRNA target sequence for Bmp2k (NM_080708.1,3005-3023).
gtcagccagtaaaagtgaa

SEQ ID NO: 496101 - DNA, 19 bp, Mus musculus
  siRNA target sequence for Bmp2k (NM_080708.1,3021-3039).
gaaagcaaggaggatgttt

SEQ ID NO: 496102 - DNA, 19 bp, Mus musculus
  siRNA target sequence for Bmp2k (NM_080708.1,3047-3065).
cgtgccctttgaggaaata

SEQ ID NO: 496103 - DNA, 19 bp, Mus musculus
  siRNA target sequence for Bmp2k (NM_080708.1,3048-3066).
gtgccctttgaggaaataa

SEQ ID NO: 496104 - DNA, 19 bp, Mus musculus
  siRNA target sequence for Bmp2k (NM_080708.1,3141-3159).
caggatgtgtccaaaagca

SEQ ID NO: 496105 - DNA, 19 bp, Mus musculus
  siRNA target sequence for Bmp2k (NM_080708.1,3143-3161).
ggatgtgtccaaaagcaat

SEQ ID NO: 496106 - DNA, 19 bp, Mus musculus
  siRNA target sequence for Bmp2k (NM_080708.1,3183-3201).
cctaccagcgcaaagaaga

SEQ ID NO: 496107 - DNA, 19 bp, Mus musculus
  siRNA target sequence for Bmp2k (NM_080708.1,3268-3286).
cccagagcagcaatgagtt

SEQ ID NO: 496108 - DNA, 19 bp, Mus musculus
  siRNA target sequence for Bmp2k (NM_080708.1,3277-3295).
gcaatgagtttttaaccat

SEQ ID NO: 496109 - DNA, 19 bp, Mus musculus
  siRNA target sequence for Bmp2k (NM_080708.1,3389-3407).
cggtgccaagccctttcat

SEQ ID NO: 496110 - DNA, 19 bp, Mus musculus
  siRNA target sequence for Bmp2k (NM_080708.1,3445-3463).
gcgacatctgcgttgatca

SEQ ID NO: 496111 - DNA, 19 bp, Mus musculus
  siRNA target sequence for Bmp2k (NM_080708.1,3456-3474).
gttgatcacaccaccattt

SEQ ID NO: 496112 - DNA, 19 bp, Mus musculus
  siRNA target sequence for Bmp2k (NM_080708.1,3516-3534).
cacagcgcagagacattga

SEQ ID NO: 496113 - DNA, 19 bp, Mus musculus
  siRNA target sequence for Bmp2k (NM_080708.1,3518-3536).
cagcgcagagacattgaga

SEQ ID NO: 496114 - DNA, 19 bp, Mus musculus
  siRNA target sequence for Bmp2k (NM_080708.1,3601-3619).
cccaaccggtcgaactaga

SEQ ID NO: 496115 - DNA, 19 bp, Mus musculus
  siRNA target sequence for Bmp2k (NM_080708.1,3623-3641).
ctttggtgctgctccattt

SEQ ID NO: 496116 - DNA, 19 bp, Mus musculus
  siRNA target sequence for Bmpr1a (NM_009758.1,295-313).
ctcagctatacacttacat

SEQ ID NO: 496117 - DNA, 19 bp, Mus musculus
  siRNA target sequence for Bmpr1a (NM_009758.1,297-315).
cagctatacacttacatca

SEQ ID NO: 496118 - DNA, 19 bp, Mus musculus
  siRNA target sequence for Bmpr1a (NM_009758.1,300-318).
ctatacacttacatcagat

SEQ ID NO: 496119 - DNA, 19 bp, Mus musculus
  siRNA target sequence for Bmpr1a (NM_009758.1,338-356).
catcatttctcatgttcaa

SEQ ID NO: 496120 - DNA, 19 bp, Mus musculus
  siRNA target sequence for Bmpr1a (NM_009758.1,357-375).
gggcagaatctagatagta

SEQ ID NO: 496121 - DNA, 19 bp, Mus musculus
  siRNA target sequence for Bmpr1a (NM_009758.1,449-467).
ggataccttgcctttctta

SEQ ID NO: 496122 - DNA, 19 bp, Mus musculus
  siRNA target sequence for Bmpr1a (NM_009758.1,490-508).
gcccagatgatgctattaa

SEQ ID NO: 496123 - DNA, 19 bp, Mus musculus
  siRNA target sequence for Bmpr1a (NM_009758.1,491-509).
cccagatgatgctattaat

SEQ ID NO: 496124 - DNA, 19 bp, Mus musculus
  siRNA target sequence for Bmpr1a (NM_009758.1,495-513).
gatgatgctattaataaca

SEQ ID NO: 496125 - DNA, 19 bp, Mus musculus
  siRNA target sequence for Bmpr1a (NM_009758.1,583-601).
ctgggtgtatgaagtatga

SEQ ID NO: 496126 - DNA, 19 bp, Mus musculus
  siRNA target sequence for Bmpr1a (NM_009758.1,604-622).
gctctgattttcaatgcaa

SEQ ID NO: 496127 - DNA, 19 bp, Mus musculus
  siRNA target sequence for Bmpr1a (NM_009758.1,609-627).
gattttcaatgcaaggatt

SEQ ID NO: 496128 - DNA, 19 bp, Mus musculus
  siRNA target sequence for Bmpr1a (NM_009758.1,638-656).
ccagctacgcaggacaata

SEQ ID NO: 496129 - DNA, 19 bp, Mus musculus
  siRNA target sequence for Bmpr1a (NM_009758.1,641-659).
gctacgcaggacaatagaa

SEQ ID NO: 496130 - DNA, 19 bp, Mus musculus
  siRNA target sequence for Bmpr1a (NM_009758.1,642-660).
ctacgcaggacaatagaat

SEQ ID NO: 496131 - DNA, 19 bp, Mus musculus
  siRNA target sequence for Bmpr1a (NM_009758.1,645-663).
cgcaggacaatagaatgtt

SEQ ID NO: 496132 - DNA, 19 bp, Mus musculus
  siRNA target sequence for Bmpr1a (NM_009758.1,647-665).
caggacaatagaatgttgt

SEQ ID NO: 496133 - DNA, 19 bp, Mus musculus
  siRNA target sequence for Bmpr1a (NM_009758.1,657-675).
gaatgttgtcggaccaatt

SEQ ID NO: 496134 - DNA, 19 bp, Mus musculus
  siRNA target sequence for Bmpr1a (NM_009758.1,700-718).
cactgccccctgttgttat

SEQ ID NO: 496135 - DNA, 19 bp, Mus musculus
  siRNA target sequence for Bmpr1a (NM_009758.1,778-796).
gtatagttgctatgatcat

SEQ ID NO: 496136 - DNA, 19 bp, Mus musculus
  siRNA target sequence for Bmpr1a (NM_009758.1,805-823).
gctgcttttgctataagca

SEQ ID NO: 496137 - DNA, 19 bp, Mus musculus
  siRNA target sequence for Bmpr1a (NM_009758.1,814-832).
gctataagcattattgtaa

SEQ ID NO: 496138 - DNA, 19 bp, Mus musculus
  siRNA target sequence for Bmpr1a (NM_009758.1,841-859).
caagcaggggtcgttacaa

SEQ ID NO: 496139 - DNA, 19 bp, Mus musculus
  siRNA target sequence for Bmpr1a (NM_009758.1,850-868).
gtcgttacaaccgtgattt

SEQ ID NO: 496140 - DNA, 19 bp, Mus musculus
  siRNA target sequence for Bmpr1a (NM_009758.1,853-871).
gttacaaccgtgatttgga

SEQ ID NO: 496141 - DNA, 19 bp, Mus musculus
  siRNA target sequence for Bmpr1a (NM_009758.1,892-910).
cagtaggagaatcattgaa

SEQ ID NO: 496142 - DNA, 19 bp, Mus musculus
  siRNA target sequence for Bmpr1a (NM_009758.1,949-967).
ctggattgcctttattggt

SEQ ID NO: 496143 - DNA, 19 bp, Mus musculus
  siRNA target sequence for Bmpr1a (NM_009758.1,972-990).
cgaactattgccaaacaga

SEQ ID NO: 496144 - DNA, 19 bp, Mus musculus
  siRNA target sequence for Bmpr1a (NM_009758.1,998-1016).
ggttcggcaggttggtaaa

SEQ ID NO: 496145 - DNA, 19 bp, Mus musculus
  siRNA target sequence for Bmpr1a (NM_009758.1,1042-1060).
gtaaatggcgtggtgaaaa

SEQ ID NO: 496146 - DNA, 19 bp, Mus musculus
  siRNA target sequence for Bmpr1a (NM_009758.1,1065-1083).
gctgtcaaagtgtttttta

SEQ ID NO: 496147 - DNA, 19 bp, Mus musculus
  siRNA target sequence for Bmpr1a (NM_009758.1,1095-1113).
gctagctggtttagagaaa

SEQ ID NO: 496148 - DNA, 19 bp, Mus musculus
  siRNA target sequence for Bmpr1a (NM_009758.1,1099-1117).
gctggtttagagaaacaga

SEQ ID NO: 496149 - DNA, 19 bp, Mus musculus
  siRNA target sequence for Bmpr1a (NM_009758.1,1130-1148).
ggtgttaatgcgtcatgaa

SEQ ID NO: 496150 - DNA, 19 bp, Mus musculus
  siRNA target sequence for Bmpr1a (NM_009758.1,1131-1149).
gtgttaatgcgtcatgaaa

SEQ ID NO: 496151 - DNA, 19 bp, Mus musculus
  siRNA target sequence for Bmpr1a (NM_009758.1,1133-1151).
gttaatgcgtcatgaaaat

SEQ ID NO: 496152 - DNA, 19 bp, Mus musculus
  siRNA target sequence for Bmpr1a (NM_009758.1,1139-1157).
gcgtcatgaaaatatactt

SEQ ID NO: 496153 - DNA, 19 bp, Mus musculus
  siRNA target sequence for Bmpr1a (NM_009758.1,1192-1210).
cctggactcagctgtattt

SEQ ID NO: 496154 - DNA, 19 bp, Mus musculus
  siRNA target sequence for Bmpr1a (NM_009758.1,1202-1220).
gctgtatttgattactgat

SEQ ID NO: 496155 - DNA, 19 bp, Mus musculus
  siRNA target sequence for Bmpr1a (NM_009758.1,1273-1291).
ccagagccctactcaagtt

SEQ ID NO: 496156 - DNA, 19 bp, Mus musculus
  siRNA target sequence for Bmpr1a (NM_009758.1,1274-1292).
cagagccctactcaagtta

SEQ ID NO: 496157 - DNA, 19 bp, Mus musculus
  siRNA target sequence for Bmpr1a (NM_009758.1,1279-1297).
ccctactcaagttagctta

SEQ ID NO: 496158 - DNA, 19 bp, Mus musculus
  siRNA target sequence for Bmpr1a (NM_009758.1,1280-1298).
cctactcaagttagcttat

SEQ ID NO: 496159 - DNA, 19 bp, Mus musculus
  siRNA target sequence for Bmpr1a (NM_009758.1,1281-1299).
ctactcaagttagcttatt

SEQ ID NO: 496160 - DNA, 19 bp, Mus musculus
  siRNA target sequence for Bmpr1a (NM_009758.1,1322-1340).
cctccacacagaaatttat

SEQ ID NO: 496161 - DNA, 19 bp, Mus musculus
  siRNA target sequence for Bmpr1a (NM_009758.1,1430-1448).
cctgggcctagctgttaaa

SEQ ID NO: 496162 - DNA, 19 bp, Mus musculus
  siRNA target sequence for Bmpr1a (NM_009758.1,1437-1455).
ctagctgttaaattcaaca

SEQ ID NO: 496163 - DNA, 19 bp, Mus musculus
  siRNA target sequence for Bmpr1a (NM_009758.1,1451-1469).
caacagtgatacaaatgaa

SEQ ID NO: 496164 - DNA, 19 bp, Mus musculus
  siRNA target sequence for Bmpr1a (NM_009758.1,1470-1488).
gttgacatacccttgaata

SEQ ID NO: 496165 - DNA, 19 bp, Mus musculus
  siRNA target sequence for Bmpr1a (NM_009758.1,1473-1491).
gacatacccttgaatacca

SEQ ID NO: 496166 - DNA, 19 bp, Mus musculus
  siRNA target sequence for Bmpr1a (NM_009758.1,1527-1545).
ctggatgaaagcctgaata

SEQ ID NO: 496167 - DNA, 19 bp, Mus musculus
  siRNA target sequence for Bmpr1a (NM_009758.1,1575-1593).
gacatctatagctttggtt

SEQ ID NO: 496168 - DNA, 19 bp, Mus musculus
  siRNA target sequence for Bmpr1a (NM_009758.1,1630-1648).
gaggaatcgtggaggaata

SEQ ID NO: 496169 - DNA, 19 bp, Mus musculus
  siRNA target sequence for Bmpr1a (NM_009758.1,1633-1651).
gaatcgtggaggaatatca

SEQ ID NO: 496170 - DNA, 19 bp, Mus musculus
  siRNA target sequence for Bmpr1a (NM_009758.1,1640-1658).
ggaggaatatcaattacca

SEQ ID NO: 496171 - DNA, 19 bp, Mus musculus
  siRNA target sequence for Bmpr1a (NM_009758.1,1641-1659).
gaggaatatcaattaccat

SEQ ID NO: 496172 - DNA, 19 bp, Mus musculus
  siRNA target sequence for Bmpr1a (NM_009758.1,1748-1766).
ctggaacagcgatgaagta

SEQ ID NO: 496173 - DNA, 19 bp, Mus musculus
  siRNA target sequence for Bmpr1a (NM_009758.1,1751-1769).
gaacagcgatgaagtaagt

SEQ ID NO: 496174 - DNA, 19 bp, Mus musculus
  siRNA target sequence for Bmpr1a (NM_009758.1,1771-1789).
ggagccaagtccctgtaaa

SEQ ID NO: 496175 - DNA, 19 bp, Mus musculus
  siRNA target sequence for Bmpr1b (NM_007560.2,148-166).
cttacgaagctctggaaaa

SEQ ID NO: 496176 - DNA, 19 bp, Mus musculus
  siRNA target sequence for Bmpr1b (NM_007560.2,152-170).
cgaagctctggaaaattaa

SEQ ID NO: 496177 - DNA, 19 bp, Mus musculus
  siRNA target sequence for Bmpr1b (NM_007560.2,222-240).
ccaagatcctacgttgtaa

SEQ ID NO: 496178 - DNA, 19 bp, Mus musculus
  siRNA target sequence for Bmpr1b (NM_007560.2,223-241).
caagatcctacgttgtaaa

SEQ ID NO: 496179 - DNA, 19 bp, Mus musculus
  siRNA target sequence for Bmpr1b (NM_007560.2,258-276).
cggaagactcagtcaacaa

SEQ ID NO: 496180 - DNA, 19 bp, Mus musculus
  siRNA target sequence for Bmpr1b (NM_007560.2,300-318).
gcttcacgatgatagaaga

SEQ ID NO: 496181 - DNA, 19 bp, Mus musculus
  siRNA target sequence for Bmpr1b (NM_007560.2,407-425).
caaagaagatcaattgaat

SEQ ID NO: 496182 - DNA, 19 bp, Mus musculus
  siRNA target sequence for Bmpr1b (NM_007560.2,438-456).
ggaatgagtgtaataaaga

SEQ ID NO: 496183 - DNA, 19 bp, Mus musculus
  siRNA target sequence for Bmpr1b (NM_007560.2,477-495).
ctctcaaggacagagattt

SEQ ID NO: 496184 - DNA, 19 bp, Mus musculus
  siRNA target sequence for Bmpr1b (NM_007560.2,512-530).
caccacaaggccttgctta

SEQ ID NO: 496185 - DNA, 19 bp, Mus musculus
  siRNA target sequence for Bmpr1b (NM_007560.2,554-572).
ctcttggtcctcattattt

SEQ ID NO: 496186 - DNA, 19 bp, Mus musculus
  siRNA target sequence for Bmpr1b (NM_007560.2,556-574).
cttggtcctcattatttta

SEQ ID NO: 496187 - DNA, 19 bp, Mus musculus
  siRNA target sequence for Bmpr1b (NM_007560.2,728-746).
gtccaaaggacaatagcta

SEQ ID NO: 496188 - DNA, 19 bp, Mus musculus
  siRNA target sequence for Bmpr1b (NM_007560.2,865-883).
gttccgagagactgagata

SEQ ID NO: 496189 - DNA, 19 bp, Mus musculus
  siRNA target sequence for Bmpr1b (NM_007560.2,868-886).
ccgagagactgagatatat

SEQ ID NO: 496190 - DNA, 19 bp, Mus musculus
  siRNA target sequence for Bmpr1b (NM_007560.2,895-913).
cctgatgcggcatgagaat

SEQ ID NO: 496191 - DNA, 19 bp, Mus musculus
  siRNA target sequence for Bmpr1b (NM_007560.2,896-914).
ctgatgcggcatgagaata

SEQ ID NO: 496192 - DNA, 19 bp, Mus musculus
  siRNA target sequence for Bmpr1b (NM_007560.2,898-916).
gatgcggcatgagaatatt

SEQ ID NO: 496193 - DNA, 19 bp, Mus musculus
  siRNA target sequence for Bmpr1b (NM_007560.2,967-985).
gtacctcatcacagactat

SEQ ID NO: 496194 - DNA, 19 bp, Mus musculus
  siRNA target sequence for Bmpr1b (NM_007560.2,1069-1087).
cagcggcctatgccattta

SEQ ID NO: 496195 - DNA, 19 bp, Mus musculus
  siRNA target sequence for Bmpr1b (NM_007560.2,1071-1089).
gcggcctatgccatttaca

SEQ ID NO: 496196 - DNA, 19 bp, Mus musculus
  siRNA target sequence for Bmpr1b (NM_007560.2,1073-1091).
ggcctatgccatttacaca

SEQ ID NO: 496197 - DNA, 19 bp, Mus musculus
  siRNA target sequence for Bmpr1b (NM_007560.2,1082-1100).
catttacacacggaaatct

SEQ ID NO: 496198 - DNA, 19 bp, Mus musculus
  siRNA target sequence for Bmpr1b (NM_007560.2,1088-1106).
cacacggaaatctttagca

SEQ ID NO: 496199 - DNA, 19 bp, Mus musculus
  siRNA target sequence for Bmpr1b (NM_007560.2,1126-1144).
cgcccatcgagacttgaaa

SEQ ID NO: 496200 - DNA, 19 bp, Mus musculus
  siRNA target sequence for Bmpr1b (NM_007560.2,1127-1145).
gcccatcgagacttgaaaa

SEQ ID NO: 496201 - DNA, 19 bp, Mus musculus
  siRNA target sequence for Bmpr1b (NM_007560.2,1129-1147).
ccatcgagacttgaaaagt

SEQ ID NO: 496202 - DNA, 19 bp, Mus musculus
  siRNA target sequence for Bmpr1b (NM_007560.2,1201-1219).
ggctgtcaagttcattagt

SEQ ID NO: 496203 - DNA, 19 bp, Mus musculus
  siRNA target sequence for Bmpr1b (NM_007560.2,1288-1306).
gctggacgagagcttgaat

SEQ ID NO: 496204 - DNA, 19 bp, Mus musculus
  siRNA target sequence for Bmpr1b (NM_007560.2,1289-1307).
ctggacgagagcttgaata

SEQ ID NO: 496205 - DNA, 19 bp, Mus musculus
  siRNA target sequence for Bmpr1b (NM_007560.2,1291-1309).
ggacgagagcttgaataga

SEQ ID NO: 496206 - DNA, 19 bp, Mus musculus
  siRNA target sequence for Bmpr1b (NM_007560.2,1292-1310).
gacgagagcttgaatagaa

SEQ ID NO: 496207 - DNA, 19 bp, Mus musculus
  siRNA target sequence for Bmpr1b (NM_007560.2,1297-1315).
gagcttgaatagaaaccat

SEQ ID NO: 496208 - DNA, 19 bp, Mus musculus
  siRNA target sequence for Bmpr1b (NM_007560.2,1383-1401).
gtgtttctggaggtatagt

SEQ ID NO: 496209 - DNA, 19 bp, Mus musculus
  siRNA target sequence for Bmpr1b (NM_007560.2,1391-1409).
ggaggtatagtggaagaat

SEQ ID NO: 496210 - DNA, 19 bp, Mus musculus
  siRNA target sequence for Bmpr1b (NM_007560.2,1457-1475).
gacatgagagaaattgtgt

SEQ ID NO: 496211 - DNA, 19 bp, Mus musculus
  siRNA target sequence for Bmpr1b (NM_007560.2,1493-1511).
ccttcattccccaatcgat

SEQ ID NO: 496212 - DNA, 19 bp, Mus musculus
  siRNA target sequence for Bmpr1b (NM_007560.2,1537-1555).
gatggggaagcttatgaca

SEQ ID NO: 496213 - DNA, 19 bp, Mus musculus
  siRNA target sequence for Bmpr1b (NM_007560.2,1586-1604).
ctgacggccctgagagtta

SEQ ID NO: 496214 - DNA, 19 bp, Mus musculus
  siRNA target sequence for Bmpr1b (NM_007560.2,1590-1608).
cggccctgagagttaagaa

SEQ ID NO: 496215 - DNA, 19 bp, Mus musculus
  siRNA target sequence for Bmpr1b (NM_007560.2,1591-1609).
ggccctgagagttaagaaa

SEQ ID NO: 496216 - DNA, 19 bp, Mus musculus
  siRNA target sequence for Bmpr2 (NM_007561.1,107-125).
gaacggctgtgtgcattta

SEQ ID NO: 496217 - DNA, 19 bp, Mus musculus
  siRNA target sequence for Bmpr2 (NM_007561.1,160-178).
gagtcgaatctctcatgaa

SEQ ID NO: 496218 - DNA, 19 bp, Mus musculus
  siRNA target sequence for Bmpr2 (NM_007561.1,162-180).
gtcgaatctctcatgaaaa

SEQ ID NO: 496219 - DNA, 19 bp, Mus musculus
  siRNA target sequence for Bmpr2 (NM_007561.1,173-191).
catgaaaatgggacaatat

SEQ ID NO: 496220 - DNA, 19 bp, Mus musculus
  siRNA target sequence for Bmpr2 (NM_007561.1,184-202).
gacaatattatgttccaaa

SEQ ID NO: 496221 - DNA, 19 bp, Mus musculus
  siRNA target sequence for Bmpr2 (NM_007561.1,199-217).
caaagggagcacgtgttat

SEQ ID NO: 496222 - DNA, 19 bp, Mus musculus
  siRNA target sequence for Bmpr2 (NM_007561.1,218-236).
ggtctgtgggagaaatcaa

SEQ ID NO: 496223 - DNA, 19 bp, Mus musculus
  siRNA target sequence for Bmpr2 (NM_007561.1,241-259).
ggacatcaatcttgtgaaa

SEQ ID NO: 496224 - DNA, 19 bp, Mus musculus
  siRNA target sequence for Bmpr2 (NM_007561.1,305-323).
gaagagtgtgtagtaacta

SEQ ID NO: 496225 - DNA, 19 bp, Mus musculus
  siRNA target sequence for Bmpr2 (NM_007561.1,347-365).
ggaacgtaccgcttttgct

SEQ ID NO: 496226 - DNA, 19 bp, Mus musculus
  siRNA target sequence for Bmpr2 (NM_007561.1,431-449).
ctcagtccacctcattcat

SEQ ID NO: 496227 - DNA, 19 bp, Mus musculus
  siRNA target sequence for Bmpr2 (NM_007561.1,435-453).
gtccacctcattcatttaa

SEQ ID NO: 496228 - DNA, 19 bp, Mus musculus
  siRNA target sequence for Bmpr2 (NM_007561.1,455-473).
cgagatgaaacgataatca

SEQ ID NO: 496229 - DNA, 19 bp, Mus musculus
  siRNA target sequence for Bmpr2 (NM_007561.1,456-474).
gagatgaaacgataatcat

SEQ ID NO: 496230 - DNA, 19 bp, Mus musculus
  siRNA target sequence for Bmpr2 (NM_007561.1,461-479).
gaaacgataatcattgctt

SEQ ID NO: 496231 - DNA, 19 bp, Mus musculus
  siRNA target sequence for Bmpr2 (NM_007561.1,508-526).
gatagtcgccttatgtttt

SEQ ID NO: 496232 - DNA, 19 bp, Mus musculus
  siRNA target sequence for Bmpr2 (NM_007561.1,651-669).
gtcgatacggagcagtata

SEQ ID NO: 496233 - DNA, 19 bp, Mus musculus
  siRNA target sequence for Bmpr2 (NM_007561.1,653-671).
cgatacggagcagtatata

SEQ ID NO: 496234 - DNA, 19 bp, Mus musculus
  siRNA target sequence for Bmpr2 (NM_007561.1,658-676).
cggagcagtatataaaggt

SEQ ID NO: 496235 - DNA, 19 bp, Mus musculus
  siRNA target sequence for Bmpr2 (NM_007561.1,688-706).
gcgtccagttgctgtaaaa

SEQ ID NO: 496236 - DNA, 19 bp, Mus musculus
  siRNA target sequence for Bmpr2 (NM_007561.1,692-710).
ccagttgctgtaaaagtat

SEQ ID NO: 496237 - DNA, 19 bp, Mus musculus
  siRNA target sequence for Bmpr2 (NM_007561.1,693-711).
cagttgctgtaaaagtatt

SEQ ID NO: 496238 - DNA, 19 bp, Mus musculus
  siRNA target sequence for Bmpr2 (NM_007561.1,719-737).
gcaaaccgtcagaatttta

SEQ ID NO: 496239 - DNA, 19 bp, Mus musculus
  siRNA target sequence for Bmpr2 (NM_007561.1,769-787).
gatggaacatgacaacatt

SEQ ID NO: 496240 - DNA, 19 bp, Mus musculus
  siRNA target sequence for Bmpr2 (NM_007561.1,781-799).
caacattgctcgcttcata

SEQ ID NO: 496241 - DNA, 19 bp, Mus musculus
  siRNA target sequence for Bmpr2 (NM_007561.1,829-847).
ccgcatggagtatttgctt

SEQ ID NO: 496242 - DNA, 19 bp, Mus musculus
  siRNA target sequence for Bmpr2 (NM_007561.1,844-862).
gcttgtgatggagtattat

SEQ ID NO: 496243 - DNA, 19 bp, Mus musculus
  siRNA target sequence for Bmpr2 (NM_007561.1,854-872).
gagtattatcccaatggat

SEQ ID NO: 496244 - DNA, 19 bp, Mus musculus
  siRNA target sequence for Bmpr2 (NM_007561.1,889-907).
gagtctccacacaagtgat

SEQ ID NO: 496245 - DNA, 19 bp, Mus musculus
  siRNA target sequence for Bmpr2 (NM_007561.1,974-992).
ccacgaggagatcattata

SEQ ID NO: 496246 - DNA, 19 bp, Mus musculus
  siRNA target sequence for Bmpr2 (NM_007561.1,999-1017).
caatctcccaccgagattt

SEQ ID NO: 496247 - DNA, 19 bp, Mus musculus
  siRNA target sequence for Bmpr2 (NM_007561.1,1054-1072).
gtgtgttatcagtgacttt

SEQ ID NO: 496248 - DNA, 19 bp, Mus musculus
  siRNA target sequence for Bmpr2 (NM_007561.1,1081-1099).
catgaggctaactggaaat

SEQ ID NO: 496249 - DNA, 19 bp, Mus musculus
  siRNA target sequence for Bmpr2 (NM_007561.1,1121-1139).
gaagataatgcggctataa

SEQ ID NO: 496250 - DNA, 19 bp, Mus musculus
  siRNA target sequence for Bmpr2 (NM_007561.1,1219-1237).
gaagcaagtggacatgtat

SEQ ID NO: 496251 - DNA, 19 bp, Mus musculus
  siRNA target sequence for Bmpr2 (NM_007561.1,1238-1256).
gcgcttggactcatctact

SEQ ID NO: 496252 - DNA, 19 bp, Mus musculus
  siRNA target sequence for Bmpr2 (NM_007561.1,1318-1336).
ggcttttcagacagaagtt

SEQ ID NO: 496253 - DNA, 19 bp, Mus musculus
  siRNA target sequence for Bmpr2 (NM_007561.1,1338-1356).
gaaaccatcccacatttga

SEQ ID NO: 496254 - DNA, 19 bp, Mus musculus
  siRNA target sequence for Bmpr2 (NM_007561.1,1519-1537).
ggctgaactcatgatgata

SEQ ID NO: 496255 - DNA, 19 bp, Mus musculus
  siRNA target sequence for Bmpr2 (NM_007561.1,1520-1538).
gctgaactcatgatgatat

SEQ ID NO: 496256 - DNA, 19 bp, Mus musculus
  siRNA target sequence for Bmpr2 (NM_007561.1,1598-1616).
gaacgcaacctgtcacata

SEQ ID NO: 496257 - DNA, 19 bp, Mus musculus
  siRNA target sequence for Bmpr2 (NM_007561.1,1601-1619).
cgcaacctgtcacataata

SEQ ID NO: 496258 - DNA, 19 bp, Mus musculus
  siRNA target sequence for Bmpr2 (NM_007561.1,1636-1654).
cgggccttacccagattat

SEQ ID NO: 496259 - DNA, 19 bp, Mus musculus
  siRNA target sequence for Bmpr2 (NM_007561.1,1637-1655).
gggccttacccagattatt

SEQ ID NO: 496260 - DNA, 19 bp, Mus musculus
  siRNA target sequence for Bmpr2 (NM_007561.1,1665-1683).
catatattgaagactctat

SEQ ID NO: 496261 - DNA, 19 bp, Mus musculus
  siRNA target sequence for Bmpr2 (NM_007561.1,1688-1706).
catactgacagcattgtga

SEQ ID NO: 496262 - DNA, 19 bp, Mus musculus
  siRNA target sequence for Bmpr2 (NM_007561.1,1732-1750).
gtccagcacaccattgaca

SEQ ID NO: 496263 - DNA, 19 bp, Mus musculus
  siRNA target sequence for Bmpr2 (NM_007561.1,1734-1752).
ccagcacaccattgacaat

SEQ ID NO: 496264 - DNA, 19 bp, Mus musculus
  siRNA target sequence for Bmpr2 (NM_007561.1,1870-1888).
cggcctcactccaagtact

SEQ ID NO: 496265 - DNA, 19 bp, Mus musculus
  siRNA target sequence for Bmpr2 (NM_007561.1,1890-1908).
gcatgaccactatatctga

SEQ ID NO: 496266 - DNA, 19 bp, Mus musculus
  siRNA target sequence for Bmpr2 (NM_007561.1,2002-2020).
cttggagactaataagcta

SEQ ID NO: 496267 - DNA, 19 bp, Mus musculus
  siRNA target sequence for Bmpr2 (NM_007561.1,2010-2028).
ctaataagctagatccaaa

SEQ ID NO: 496268 - DNA, 19 bp, Mus musculus
  siRNA target sequence for Bmpr2 (NM_007561.1,2036-2054).
gataagaacctcaaggaaa

SEQ ID NO: 496269 - DNA, 19 bp, Mus musculus
  siRNA target sequence for Bmpr2 (NM_007561.1,2055-2073).
gctctgatgagaatctcat

SEQ ID NO: 496270 - DNA, 19 bp, Mus musculus
  siRNA target sequence for Bmpr2 (NM_007561.1,2131-2149).
cttgctttatccactcata

SEQ ID NO: 496271 - DNA, 19 bp, Mus musculus
  siRNA target sequence for Bmpr2 (NM_007561.1,2203-2221).
gcaagcatgtttaattcct

SEQ ID NO: 496272 - DNA, 19 bp, Mus musculus
  siRNA target sequence for Bmpr2 (NM_007561.1,2247-2265).
ctctccctaagcaacagaa

SEQ ID NO: 496273 - DNA, 19 bp, Mus musculus
  siRNA target sequence for Bmpr2 (NM_007561.1,2270-2288).
cctaagagacctactagtt

SEQ ID NO: 496274 - DNA, 19 bp, Mus musculus
  siRNA target sequence for Bmpr2 (NM_007561.1,2290-2308).
gcctttgaacaccaaaaat

SEQ ID NO: 496275 - DNA, 19 bp, Mus musculus
  siRNA target sequence for Bmpr2 (NM_007561.1,2352-2370).
caaacttgaaacaagtaga

SEQ ID NO: 496276 - DNA, 19 bp, Mus musculus
  siRNA target sequence for Bmpr2 (NM_007561.1,2378-2396).
gttgccaagatgaatacaa

SEQ ID NO: 496277 - DNA, 19 bp, Mus musculus
  siRNA target sequence for Bmpr2 (NM_007561.1,2411-2429).
cctcatgtggtgacagtaa

SEQ ID NO: 496278 - DNA, 19 bp, Mus musculus
  siRNA target sequence for Bmpr2 (NM_007561.1,2419-2437).
ggtgacagtaactatgaat

SEQ ID NO: 496279 - DNA, 19 bp, Mus musculus
  siRNA target sequence for Bmpr2 (NM_007561.1,2447-2465).
ggtagaagccacaatgtta

SEQ ID NO: 496280 - DNA, 19 bp, Mus musculus
  siRNA target sequence for Bmpr2 (NM_007561.1,2448-2466).
gtagaagccacaatgttaa

SEQ ID NO: 496281 - DNA, 19 bp, Mus musculus
  siRNA target sequence for Bmpr2 (NM_007561.1,2534-2552).
gcacataggtcccaagaaa

SEQ ID NO: 496282 - DNA, 19 bp, Mus musculus
  siRNA target sequence for Bmpr2 (NM_007561.1,2557-2575).
gcagaatcaatttattggt

SEQ ID NO: 496283 - DNA, 19 bp, Mus musculus
  siRNA target sequence for Bmpr2 (NM_007561.1,2607-2625).
ctgatgagcatgaaccttt

SEQ ID NO: 496284 - DNA, 19 bp, Mus musculus
  siRNA target sequence for Bmpr2 (NM_007561.1,2612-2630).
gagcatgaacctttactga

SEQ ID NO: 496285 - DNA, 19 bp, Mus musculus
  siRNA target sequence for Bmpr2 (NM_007561.1,2666-2684).
ctggatcgtttggtagata

SEQ ID NO: 496286 - DNA, 19 bp, Mus musculus
  siRNA target sequence for Bmpr2 (NM_007561.1,2685-2703).
ggagggaacggccattaga

SEQ ID NO: 496287 - DNA, 19 bp, Mus musculus
  siRNA target sequence for Bmpr2 (NM_007561.1,2686-2704).
gagggaacggccattagaa

SEQ ID NO: 496288 - DNA, 19 bp, Mus musculus
  siRNA target sequence for Bmpr2 (NM_007561.1,2708-2726).
ggccgaacaaattccaata

SEQ ID NO: 496289 - DNA, 19 bp, Mus musculus
  siRNA target sequence for Bmpr2 (NM_007561.1,2737-2755).
caatccatgttcagaacaa

SEQ ID NO: 496290 - DNA, 19 bp, Mus musculus
  siRNA target sequence for Bmpr2 (NM_007561.1,2762-2780).
cttacacaaggtgttacaa

SEQ ID NO: 496291 - DNA, 19 bp, Mus musculus
  siRNA target sequence for Bmpr2 (NM_007561.1,2839-2857).
ggatctttcagccacaaat

SEQ ID NO: 496292 - DNA, 19 bp, Mus musculus
  siRNA target sequence for Bmpr2 (NM_007561.1,2864-2882).
gatggcagcagtatacaga

SEQ ID NO: 496293 - DNA, 19 bp, Mus musculus
  siRNA target sequence for Bmpr2 (NM_007561.1,2881-2899).
gataggtgagtcaacacaa

SEQ ID NO: 496294 - DNA, 19 bp, Mus musculus
  siRNA target sequence for Bmpr2 (NM_007561.1,2926-2944).
gatcaagagacgtgtgaaa

SEQ ID NO: 496295 - DNA, 19 bp, Mus musculus
  siRNA target sequence for Bmpr2 (NM_007561.1,2929-2947).
caagagacgtgtgaaaact

SEQ ID NO: 496296 - DNA, 19 bp, Mus musculus
  siRNA target sequence for Bmpr2 (NM_007561.1,3034-3052).
cagggcagtccattctaaa

SEQ ID NO: 496297 - DNA, 19 bp, Mus musculus
  siRNA target sequence for Bmpr2 (NM_007561.1,3037-3055).
ggcagtccattctaaatct

SEQ ID NO: 496298 - DNA, 19 bp, Mus musculus
  siRNA target sequence for Bmpr2 (NM_007561.1,3038-3056).
gcagtccattctaaatcta

SEQ ID NO: 496299 - DNA, 19 bp, Mus musculus
  siRNA target sequence for Bmpr2 (NM_007561.1,3091-3109).
cacgaccacagtgtctaaa

SEQ ID NO: 496300 - DNA, 19 bp, Mus musculus
  siRNA target sequence for Bmpr2 (NM_007561.1,3093-3111).
cgaccacagtgtctaaaga

SEQ ID NO: 496301 - DNA, 19 bp, Mus musculus
  siRNA target sequence for Bmpr2 (NM_007561.1,3101-3119).
gtgtctaaagatataggaa

SEQ ID NO: 496302 - DNA, 19 bp, Mus musculus
  siRNA target sequence for Bmx (NM_009759.2,237-255).
ggagcggctttttgttcta

SEQ ID NO: 496303 - DNA, 19 bp, Mus musculus
  siRNA target sequence for Bmx (NM_009759.2,238-256).
gagcggctttttgttctaa

SEQ ID NO: 496304 - DNA, 19 bp, Mus musculus
  siRNA target sequence for Bmx (NM_009759.2,305-323).
gcagaaaaggatcaataga

SEQ ID NO: 496305 - DNA, 19 bp, Mus musculus
  siRNA target sequence for Bmx (NM_009759.2,338-356).
gatgtgtggaaaaagtcaa

SEQ ID NO: 496306 - DNA, 19 bp, Mus musculus
  siRNA target sequence for Bmx (NM_009759.2,449-467).
gccgatgtcagtggttaaa

SEQ ID NO: 496307 - DNA, 19 bp, Mus musculus
  siRNA target sequence for Bmx (NM_009759.2,450-468).
ccgatgtcagtggttaaaa

SEQ ID NO: 496308 - DNA, 19 bp, Mus musculus
  siRNA target sequence for Bmx (NM_009759.2,461-479).
ggttaaaagcgctgcaaaa

SEQ ID NO: 496309 - DNA, 19 bp, Mus musculus
  siRNA target sequence for Bmx (NM_009759.2,462-480).
gttaaaagcgctgcaaaaa

SEQ ID NO: 496310 - DNA, 19 bp, Mus musculus
  siRNA target sequence for Bmx (NM_009759.2,491-509).
gcaaccctcacctgttgat

SEQ ID NO: 496311 - DNA, 19 bp, Mus musculus
  siRNA target sequence for Bmx (NM_009759.2,496-514).
cctcacctgttgatcaagt

SEQ ID NO: 496312 - DNA, 19 bp, Mus musculus
  siRNA target sequence for Bmx (NM_009759.2,497-515).
ctcacctgttgatcaagta

SEQ ID NO: 496313 - DNA, 19 bp, Mus musculus
  siRNA target sequence for Bmx (NM_009759.2,585-603).
cactctctgggaagcatat

SEQ ID NO: 496314 - DNA, 19 bp, Mus musculus
  siRNA target sequence for Bmx (NM_009759.2,618-636).
cgcaatcagtgatgagaaa

SEQ ID NO: 496315 - DNA, 19 bp, Mus musculus
  siRNA target sequence for Bmx (NM_009759.2,680-698).
gggcagttcccgttctcaa

SEQ ID NO: 496316 - DNA, 19 bp, Mus musculus
  siRNA target sequence for Bmx (NM_009759.2,681-699).
ggcagttcccgttctcaaa

SEQ ID NO: 496317 - DNA, 19 bp, Mus musculus
  siRNA target sequence for Bmx (NM_009759.2,733-751).
caatatgacagctattcaa

SEQ ID NO: 496318 - DNA, 19 bp, Mus musculus
  siRNA target sequence for Bmx (NM_009759.2,777-795).
cagcaacatacgctatatt

SEQ ID NO: 496319 - DNA, 19 bp, Mus musculus
  siRNA target sequence for Bmx (NM_009759.2,852-870).
cattgcatgcagtaaccaa

SEQ ID NO: 496320 - DNA, 19 bp, Mus musculus
  siRNA target sequence for Bmx (NM_009759.2,1126-1144).
cattaccacgtgcatacta

SEQ ID NO: 496321 - DNA, 19 bp, Mus musculus
  siRNA target sequence for Bmx (NM_009759.2,1181-1199).
gctttgattccattccaaa

SEQ ID NO: 496322 - DNA, 19 bp, Mus musculus
  siRNA target sequence for Bmx (NM_009759.2,1190-1208).
ccattccaaagctcattca

SEQ ID NO: 496323 - DNA, 19 bp, Mus musculus
  siRNA target sequence for Bmx (NM_009759.2,1209-1227).
ctatcaccaacataattca

SEQ ID NO: 496324 - DNA, 19 bp, Mus musculus
  siRNA target sequence for Bmx (NM_009759.2,1306-1324).
ggaatttgggaactgaaaa

SEQ ID NO: 496325 - DNA, 19 bp, Mus musculus
  siRNA target sequence for Bmx (NM_009759.2,1386-1404).
ccagtggaaggggcaatat

SEQ ID NO: 496326 - DNA, 19 bp, Mus musculus
  siRNA target sequence for Bmx (NM_009759.2,1433-1451).
gtgccatgtcagaagatga

SEQ ID NO: 496327 - DNA, 19 bp, Mus musculus
  siRNA target sequence for Bmx (NM_009759.2,1464-1482).
ggcccagaccatgatgaaa

SEQ ID NO: 496328 - DNA, 19 bp, Mus musculus
  siRNA target sequence for Bmx (NM_009759.2,1512-1530).
cggagtatgctcaaagaaa

SEQ ID NO: 496329 - DNA, 19 bp, Mus musculus
  siRNA target sequence for Bmx (NM_009759.2,1513-1531).
ggagtatgctcaaagaaat

SEQ ID NO: 496330 - DNA, 19 bp, Mus musculus
  siRNA target sequence for Bmx (NM_009759.2,1514-1532).
gagtatgctcaaagaaata

SEQ ID NO: 496331 - DNA, 19 bp, Mus musculus
  siRNA target sequence for Bmx (NM_009759.2,1527-1545).
gaaataccccatctatata

SEQ ID NO: 496332 - DNA, 19 bp, Mus musculus
  siRNA target sequence for Bmx (NM_009759.2,1533-1551).
ccccatctatatagtaact

SEQ ID NO: 496333 - DNA, 19 bp, Mus musculus
  siRNA target sequence for Bmx (NM_009759.2,1535-1553).
ccatctatatagtaactga

SEQ ID NO: 496334 - DNA, 19 bp, Mus musculus
  siRNA target sequence for Bmx (NM_009759.2,1546-1564).
gtaactgagtatataacaa

SEQ ID NO: 496335 - DNA, 19 bp, Mus musculus
  siRNA target sequence for Bmx (NM_009759.2,1597-1615).
gggaaaggactagaaagtt

SEQ ID NO: 496336 - DNA, 19 bp, Mus musculus
  siRNA target sequence for Bmx (NM_009759.2,1613-1631).
gttgccagctcttagaaat

SEQ ID NO: 496337 - DNA, 19 bp, Mus musculus
  siRNA target sequence for Bmx (NM_009759.2,1746-1764).
ctttggaatgacgagatat

SEQ ID NO: 496338 - DNA, 19 bp, Mus musculus
  siRNA target sequence for Bmx (NM_009759.2,1788-1806).
ctcagtaggaaccaagttt

SEQ ID NO: 496339 - DNA, 19 bp, Mus musculus
  siRNA target sequence for Bmx (NM_009759.2,1826-1844).
cagaggtgtttcactactt

SEQ ID NO: 496340 - DNA, 19 bp, Mus musculus
  siRNA target sequence for Bmx (NM_009759.2,1918-1936).
ccctatgacttatatgata

SEQ ID NO: 496341 - DNA, 19 bp, Mus musculus
  siRNA target sequence for Bmx (NM_009759.2,2086-2104).
ccacttcgggaacaagata

SEQ ID NO: 496342 - DNA, 19 bp, Mus musculus
  siRNA target sequence for Bmx (NM_009759.2,2087-2105).
cacttcgggaacaagataa

SEQ ID NO: 496343 - DNA, 19 bp, Mus musculus
  siRNA target sequence for Brip1 (NM_178309.1,142-160).
ccatcggtggggtgaagat

SEQ ID NO: 496344 - DNA, 19 bp, Mus musculus
  siRNA target sequence for Brip1 (NM_178309.1,187-205).
cacagcttgcgatgatgaa

SEQ ID NO: 496345 - DNA, 19 bp, Mus musculus
  siRNA target sequence for Brip1 (NM_178309.1,191-209).
gcttgcgatgatgaattct

SEQ ID NO: 496346 - DNA, 19 bp, Mus musculus
  siRNA target sequence for Brip1 (NM_178309.1,196-214).
cgatgatgaattctattgt

SEQ ID NO: 496347 - DNA, 19 bp, Mus musculus
  siRNA target sequence for Brip1 (NM_178309.1,208-226).
ctattgtcagaggactaaa

SEQ ID NO: 496348 - DNA, 19 bp, Mus musculus
  siRNA target sequence for Brip1 (NM_178309.1,285-303).
ctttgttctgcattagcat

SEQ ID NO: 496349 - DNA, 19 bp, Mus musculus
  siRNA target sequence for Brip1 (NM_178309.1,300-318).
gcatggcagcaatctctta

SEQ ID NO: 496350 - DNA, 19 bp, Mus musculus
  siRNA target sequence for Brip1 (NM_178309.1,304-322).
ggcagcaatctcttagtga

SEQ ID NO: 496351 - DNA, 19 bp, Mus musculus
  siRNA target sequence for Brip1 (NM_178309.1,330-348).
gtggatgagggcctgaata

SEQ ID NO: 496352 - DNA, 19 bp, Mus musculus
  siRNA target sequence for Brip1 (NM_178309.1,381-399).
gcatgccattcaaagaatt

SEQ ID NO: 496353 - DNA, 19 bp, Mus musculus
  siRNA target sequence for Brip1 (NM_178309.1,382-400).
catgccattcaaagaattt

SEQ ID NO: 496354 - DNA, 19 bp, Mus musculus
  siRNA target sequence for Brip1 (NM_178309.1,423-441).
gacacttcacctcatttca

SEQ ID NO: 496355 - DNA, 19 bp, Mus musculus
  siRNA target sequence for Brip1 (NM_178309.1,490-508).
gtcaagactctcctgaaaa

SEQ ID NO: 496356 - DNA, 19 bp, Mus musculus
  siRNA target sequence for Brip1 (NM_178309.1,497-515).
ctctcctgaaaaaaatact

SEQ ID NO: 496357 - DNA, 19 bp, Mus musculus
  siRNA target sequence for Brip1 (NM_178309.1,599-617).
ccgacccttagaaactaca

SEQ ID NO: 496358 - DNA, 19 bp, Mus musculus
  siRNA target sequence for Brip1 (NM_178309.1,672-690).
cgactagcttcggaaaaga

SEQ ID NO: 496359 - DNA, 19 bp, Mus musculus
  siRNA target sequence for Brip1 (NM_178309.1,699-717).
cctgagtctccgataggaa

SEQ ID NO: 496360 - DNA, 19 bp, Mus musculus
  siRNA target sequence for Brip1 (NM_178309.1,700-718).
ctgagtctccgataggaaa

SEQ ID NO: 496361 - DNA, 19 bp, Mus musculus
  siRNA target sequence for Brip1 (NM_178309.1,704-722).
gtctccgataggaaagtct

SEQ ID NO: 496362 - DNA, 19 bp, Mus musculus
  siRNA target sequence for Brip1 (NM_178309.1,706-724).
ctccgataggaaagtcttt

SEQ ID NO: 496363 - DNA, 19 bp, Mus musculus
  siRNA target sequence for Brip1 (NM_178309.1,708-726).
ccgataggaaagtctttct

SEQ ID NO: 496364 - DNA, 19 bp, Mus musculus
  siRNA target sequence for Brip1 (NM_178309.1,728-746).
cgacaggaaagactctttt

SEQ ID NO: 496365 - DNA, 19 bp, Mus musculus
  siRNA target sequence for Brip1 (NM_178309.1,773-791).
gtgctgctgttctgctaaa

SEQ ID NO: 496366 - DNA, 19 bp, Mus musculus
  siRNA target sequence for Brip1 (NM_178309.1,776-794).
ctgctgttctgctaaacaa

SEQ ID NO: 496367 - DNA, 19 bp, Mus musculus
  siRNA target sequence for Brip1 (NM_178309.1,807-825).
gagcctgcaaatactgtta

SEQ ID NO: 496368 - DNA, 19 bp, Mus musculus
  siRNA target sequence for Brip1 (NM_178309.1,810-828).
cctgcaaatactgttaaga

SEQ ID NO: 496369 - DNA, 19 bp, Mus musculus
  siRNA target sequence for Brip1 (NM_178309.1,884-902).
caagcagattgctcagatt

SEQ ID NO: 496370 - DNA, 19 bp, Mus musculus
  siRNA target sequence for Brip1 (NM_178309.1,931-949).
caggggtcccgatgactat

SEQ ID NO: 496371 - DNA, 19 bp, Mus musculus
  siRNA target sequence for Brip1 (NM_178309.1,934-952).
gggtcccgatgactattct

SEQ ID NO: 496372 - DNA, 19 bp, Mus musculus
  siRNA target sequence for Brip1 (NM_178309.1,936-954).
gtcccgatgactattcttt

SEQ ID NO: 496373 - DNA, 19 bp, Mus musculus
  siRNA target sequence for Brip1 (NM_178309.1,1044-1062).
gggaagtcctgctatttct

SEQ ID NO: 496374 - DNA, 19 bp, Mus musculus
  siRNA target sequence for Brip1 (NM_178309.1,1068-1086).
ggtgttcataaaattagta

SEQ ID NO: 496375 - DNA, 19 bp, Mus musculus
  siRNA target sequence for Brip1 (NM_178309.1,1126-1144).
cctgggacatagaagaact

SEQ ID NO: 496376 - DNA, 19 bp, Mus musculus
  siRNA target sequence for Brip1 (NM_178309.1,1150-1168).
gcctcgggaggaaactgaa

SEQ ID NO: 496377 - DNA, 19 bp, Mus musculus
  siRNA target sequence for Brip1 (NM_178309.1,1151-1169).
cctcgggaggaaactgaaa

SEQ ID NO: 496378 - DNA, 19 bp, Mus musculus
  siRNA target sequence for Brip1 (NM_178309.1,1166-1184).
gaaagcttgtccctactat

SEQ ID NO: 496379 - DNA, 19 bp, Mus musculus
  siRNA target sequence for Brip1 (NM_178309.1,1186-1204).
cagctcgagaactgataga

SEQ ID NO: 496380 - DNA, 19 bp, Mus musculus
  siRNA target sequence for Brip1 (NM_178309.1,1199-1217).
gatagaggatgctgacata

SEQ ID NO: 496381 - DNA, 19 bp, Mus musculus
  siRNA target sequence for Brip1 (NM_178309.1,1203-1221).
gaggatgctgacatagtgt

SEQ ID NO: 496382 - DNA, 19 bp, Mus musculus
  siRNA target sequence for Brip1 (NM_178309.1,1218-1236).
gtgttttgtccctacaact

SEQ ID NO: 496383 - DNA, 19 bp, Mus musculus
  siRNA target sequence for Brip1 (NM_178309.1,1225-1243).
gtccctacaactacctttt

SEQ ID NO: 496384 - DNA, 19 bp, Mus musculus
  siRNA target sequence for Brip1 (NM_178309.1,1249-1267).
cacaaataagggaaactat

SEQ ID NO: 496385 - DNA, 19 bp, Mus musculus
  siRNA target sequence for Brip1 (NM_178309.1,1386-1404).
gagctagatagtttgatca

SEQ ID NO: 496386 - DNA, 19 bp, Mus musculus
  siRNA target sequence for Brip1 (NM_178309.1,1396-1414).
gtttgatcaacggtaacat

SEQ ID NO: 496387 - DNA, 19 bp, Mus musculus
  siRNA target sequence for Brip1 (NM_178309.1,1437-1455).
ctacgagatgtgtgctata

SEQ ID NO: 496388 - DNA, 19 bp, Mus musculus
  siRNA target sequence for Brip1 (NM_178309.1,1441-1459).
gagatgtgtgctataacct

SEQ ID NO: 496389 - DNA, 19 bp, Mus musculus
  siRNA target sequence for Brip1 (NM_178309.1,1457-1475).
cctcatcaattggttagaa

SEQ ID NO: 496390 - DNA, 19 bp, Mus musculus
  siRNA target sequence for Brip1 (NM_178309.1,1458-1476).
ctcatcaattggttagaaa

SEQ ID NO: 496391 - DNA, 19 bp, Mus musculus
  siRNA target sequence for Brip1 (NM_178309.1,1463-1481).
caattggttagaaacaaat

SEQ ID NO: 496392 - DNA, 19 bp, Mus musculus
  siRNA target sequence for Brip1 (NM_178309.1,1494-1512).
gtagaaaggggttatgagt

SEQ ID NO: 496393 - DNA, 19 bp, Mus musculus
  siRNA target sequence for Brip1 (NM_178309.1,1504-1522).
gttatgagtcgtcttgtaa

SEQ ID NO: 496394 - DNA, 19 bp, Mus musculus
  siRNA target sequence for Brip1 (NM_178309.1,1567-1585).
gcatcaccacggctacttt

SEQ ID NO: 496395 - DNA, 19 bp, Mus musculus
  siRNA target sequence for Brip1 (NM_178309.1,1576-1594).
cggctacttttccagtttt

SEQ ID NO: 496396 - DNA, 19 bp, Mus musculus
  siRNA target sequence for Brip1 (NM_178309.1,1637-1655).
cacaccaatccatggtaaa

SEQ ID NO: 496397 - DNA, 19 bp, Mus musculus
  siRNA target sequence for Brip1 (NM_178309.1,1651-1669).
gtaaagaggaggcaataca

SEQ ID NO: 496398 - DNA, 19 bp, Mus musculus
  siRNA target sequence for Brip1 (NM_178309.1,1663-1681).
caatacaaatccctattat

SEQ ID NO: 496399 - DNA, 19 bp, Mus musculus
  siRNA target sequence for Brip1 (NM_178309.1,1715-1733).
ctttatggtgcttgactat

SEQ ID NO: 496400 - DNA, 19 bp, Mus musculus
  siRNA target sequence for Brip1 (NM_178309.1,1722-1740).
gtgcttgactatctcttta

SEQ ID NO: 496401 - DNA, 19 bp, Mus musculus
  siRNA target sequence for Brip1 (NM_178309.1,1750-1768).
gcagatttgcagatgatta

SEQ ID NO: 496402 - DNA, 19 bp, Mus musculus
  siRNA target sequence for Brip1 (NM_178309.1,1776-1794).
gctattcaacagacttact

SEQ ID NO: 496403 - DNA, 19 bp, Mus musculus
  siRNA target sequence for Brip1 (NM_178309.1,1787-1805).
gacttactcctggacaaat

SEQ ID NO: 496404 - DNA, 19 bp, Mus musculus
  siRNA target sequence for Brip1 (NM_178309.1,1789-1807).
cttactcctggacaaatca

SEQ ID NO: 496405 - DNA, 19 bp, Mus musculus
  siRNA target sequence for Brip1 (NM_178309.1,1808-1826).
gattgctatttttgataaa

SEQ ID NO: 496406 - DNA, 19 bp, Mus musculus
  siRNA target sequence for Brip1 (NM_178309.1,1878-1896).
ggagttaatgcgctaaact

SEQ ID NO: 496407 - DNA, 19 bp, Mus musculus
  siRNA target sequence for Brip1 (NM_178309.1,1879-1897).
gagttaatgcgctaaactt

SEQ ID NO: 496408 - DNA, 19 bp, Mus musculus
  siRNA target sequence for Brip1 (NM_178309.1,1881-1899).
gttaatgcgctaaactttt

SEQ ID NO: 496409 - DNA, 19 bp, Mus musculus
  siRNA target sequence for Brip1 (NM_178309.1,1895-1913).
cttttggtgtttaaatcca

SEQ ID NO: 496410 - DNA, 19 bp, Mus musculus
  siRNA target sequence for Brip1 (NM_178309.1,1940-1958).
caaagtacggaccattgtt

SEQ ID NO: 496411 - DNA, 19 bp, Mus musculus
  siRNA target sequence for Brip1 (NM_178309.1,1944-1962).
gtacggaccattgttctaa

SEQ ID NO: 496412 - DNA, 19 bp, Mus musculus
  siRNA target sequence for Brip1 (NM_178309.1,1947-1965).
cggaccattgttctaacat

SEQ ID NO: 496413 - DNA, 19 bp, Mus musculus
  siRNA target sequence for Brip1 (NM_178309.1,2034-2052).
gctaaccatgtcatcagta

SEQ ID NO: 496414 - DNA, 19 bp, Mus musculus
  siRNA target sequence for Brip1 (NM_178309.1,2035-2053).
ctaaccatgtcatcagtaa

SEQ ID NO: 496415 - DNA, 19 bp, Mus musculus
  siRNA target sequence for Brip1 (NM_178309.1,2088-2106).
cctaagggtcggaatctct

SEQ ID NO: 496416 - DNA, 19 bp, Mus musculus
  siRNA target sequence for Brip1 (NM_178309.1,2099-2117).
gaatctctgcgctaccttt

SEQ ID NO: 496417 - DNA, 19 bp, Mus musculus
  siRNA target sequence for Brip1 (NM_178309.1,2121-2139).
catactgaaacatttgagt

SEQ ID NO: 496418 - DNA, 19 bp, Mus musculus
  siRNA target sequence for Brip1 (NM_178309.1,2184-2202).
gtgagccaaggaattctgt

SEQ ID NO: 496419 - DNA, 19 bp, Mus musculus
  siRNA target sequence for Brip1 (NM_178309.1,2203-2221).
gctttttgccatcttacaa

SEQ ID NO: 496420 - DNA, 19 bp, Mus musculus
  siRNA target sequence for Brip1 (NM_178309.1,2210-2228).
gccatcttacaagctatta

SEQ ID NO: 496421 - DNA, 19 bp, Mus musculus
  siRNA target sequence for Brip1 (NM_178309.1,2257-2275).
ctggcctatggcatagttt

SEQ ID NO: 496422 - DNA, 19 bp, Mus musculus
  siRNA target sequence for Brip1 (NM_178309.1,2485-2503).
caaatgtgaaggatcttca

SEQ ID NO: 496423 - DNA, 19 bp, Mus musculus
  siRNA target sequence for Brip1 (NM_178309.1,2508-2526).
gagctaaaacgacaataca

SEQ ID NO: 496424 - DNA, 19 bp, Mus musculus
  siRNA target sequence for Brip1 (NM_178309.1,2525-2543).
caatgaccaccactcaaaa

SEQ ID NO: 496425 - DNA, 19 bp, Mus musculus
  siRNA target sequence for Brip1 (NM_178309.1,2562-2580).
ggccgtcagtggtatgaaa

SEQ ID NO: 496426 - DNA, 19 bp, Mus musculus
  siRNA target sequence for Brip1 (NM_178309.1,2563-2581).
gccgtcagtggtatgaaat

SEQ ID NO: 496427 - DNA, 19 bp, Mus musculus
  siRNA target sequence for Brip1 (NM_178309.1,2564-2582).
ccgtcagtggtatgaaatt

SEQ ID NO: 496428 - DNA, 19 bp, Mus musculus
  siRNA target sequence for Brip1 (NM_178309.1,2587-2605).
cataccgagccttgaatca

SEQ ID NO: 496429 - DNA, 19 bp, Mus musculus
  siRNA target sequence for Brip1 (NM_178309.1,2606-2624).
ggctctaggcagatgtatt

SEQ ID NO: 496430 - DNA, 19 bp, Mus musculus
  siRNA target sequence for Brip1 (NM_178309.1,2620-2638).
gtattcggcacaaaaatga

SEQ ID NO: 496431 - DNA, 19 bp, Mus musculus
  siRNA target sequence for Brip1 (NM_178309.1,2658-2676).
gtggacgatcgcttcaata

SEQ ID NO: 496432 - DNA, 19 bp, Mus musculus
  siRNA target sequence for Brip1 (NM_178309.1,2661-2679).
gacgatcgcttcaataaca

SEQ ID NO: 496433 - DNA, 19 bp, Mus musculus
  siRNA target sequence for Brip1 (NM_178309.1,2667-2685).
cgcttcaataacaatccaa

SEQ ID NO: 496434 - DNA, 19 bp, Mus musculus
  siRNA target sequence for Brip1 (NM_178309.1,2668-2686).
gcttcaataacaatccaaa

SEQ ID NO: 496435 - DNA, 19 bp, Mus musculus
  siRNA target sequence for Brip1 (NM_178309.1,2678-2696).
caatccaaaccgctatata

SEQ ID NO: 496436 - DNA, 19 bp, Mus musculus
  siRNA target sequence for Brip1 (NM_178309.1,2690-2708).
ctatatatcaggactttct

SEQ ID NO: 496437 - DNA, 19 bp, Mus musculus
  siRNA target sequence for Brip1 (NM_178309.1,2733-2751).
caccactcaagctttgcaa

SEQ ID NO: 496438 - DNA, 19 bp, Mus musculus
  siRNA target sequence for Brip1 (NM_178309.1,2779-2797).
ccagaagacaccagaaagt

SEQ ID NO: 496439 - DNA, 19 bp, Mus musculus
  siRNA target sequence for Brip1 (NM_178309.1,2789-2807).
ccagaaagttactaataga

SEQ ID NO: 496440 - DNA, 19 bp, Mus musculus
  siRNA target sequence for Brip1 (NM_178309.1,2790-2808).
cagaaagttactaatagat

SEQ ID NO: 496441 - DNA, 19 bp, Mus musculus
  siRNA target sequence for Brip1 (NM_178309.1,2796-2814).
gttactaatagatccaaaa

SEQ ID NO: 496442 - DNA, 19 bp, Mus musculus
  siRNA target sequence for Brip1 (NM_178309.1,2806-2824).
gatccaaaaaagacgaaaa

SEQ ID NO: 496443 - DNA, 19 bp, Mus musculus
  siRNA target sequence for Brip1 (NM_178309.1,2904-2922).
catcagtcaccagaaaact

SEQ ID NO: 496444 - DNA, 19 bp, Mus musculus
  siRNA target sequence for Brip1 (NM_178309.1,2962-2980).
gtccccaggtggctactaa

SEQ ID NO: 496445 - DNA, 19 bp, Mus musculus
  siRNA target sequence for Brip1 (NM_178309.1,3045-3063).
gagtctcttcagacaatga

SEQ ID NO: 496446 - DNA, 19 bp, Mus musculus
  siRNA target sequence for Brip1 (NM_178309.1,3078-3096).
gagatttcccgatcttcaa

SEQ ID NO: 496447 - DNA, 19 bp, Mus musculus
  siRNA target sequence for Brip1 (NM_178309.1,3124-3142).
cagtcaactggcctatctt

SEQ ID NO: 496448 - DNA, 19 bp, Mus musculus
  siRNA target sequence for Brip1 (NM_178309.1,3150-3168).
ctaagacggcatttcaata

SEQ ID NO: 496449 - DNA, 19 bp, Mus musculus
  siRNA target sequence for Brip1 (NM_178309.1,3154-3172).
gacggcatttcaatagtaa

SEQ ID NO: 496450 - DNA, 19 bp, Mus musculus
  siRNA target sequence for Brip1 (NM_178309.1,3157-3175).
ggcatttcaatagtaaagt

SEQ ID NO: 496451 - DNA, 19 bp, Mus musculus
  siRNA target sequence for Brip1 (NM_178309.1,3189-3207).
ccagtactcaagtcatcaa

SEQ ID NO: 496452 - DNA, 19 bp, Mus musculus
  siRNA target sequence for Brip1 (NM_178309.1,3190-3208).
cagtactcaagtcatcaaa

SEQ ID NO: 496453 - DNA, 19 bp, Mus musculus
  siRNA target sequence for Brip1 (NM_178309.1,3223-3241).
gttcttccactttcaataa

SEQ ID NO: 496454 - DNA, 19 bp, Mus musculus
  siRNA target sequence for Brip1 (NM_178309.1,3251-3269).
gccactcacaggtaactgt

SEQ ID NO: 496455 - DNA, 19 bp, Mus musculus
  siRNA target sequence for Brip1 (NM_178309.1,3351-3369).
gctactcctgctacgaatt

SEQ ID NO: 496456 - DNA, 19 bp, Mus musculus
  siRNA target sequence for Brip1 (NM_178309.1,3352-3370).
ctactcctgctacgaatta

SEQ ID NO: 496457 - DNA, 19 bp, Mus musculus
  siRNA target sequence for Brip1 (NM_178309.1,3357-3375).
cctgctacgaattattcca

SEQ ID NO: 496458 - DNA, 19 bp, Mus musculus
  siRNA target sequence for Brip1 (NM_178309.1,3401-3419).
cctactcccggatactgaa

SEQ ID NO: 496459 - DNA, 19 bp, Mus musculus
  siRNA target sequence for Brip1 (NM_178309.1,3402-3420).
ctactcccggatactgaat

SEQ ID NO: 496460 - DNA, 19 bp, Mus musculus
  siRNA target sequence for Brip1 (NM_178309.1,3422-3440).
gtcgccaggaactgaagaa

SEQ ID NO: 496461 - DNA, 19 bp, Mus musculus
  siRNA target sequence for Brip1 (NM_178309.1,3497-3515).
gtgttttacacctgaactt

SEQ ID NO: 496462 - DNA, 19 bp, Mus musculus
  siRNA target sequence for Brip1 (NM_178309.1,3525-3543).
gtcgataccaacgaagaaa

SEQ ID NO: 496463 - DNA, 19 bp, Mus musculus
  siRNA target sequence for Brip1 (NM_178309.1,3545-3563).
cggtgaactggttgaaact

SEQ ID NO: 496464 - DNA, 19 bp, Mus musculus
  siRNA target sequence for Brip1 (NM_178309.1,3549-3567).
gaactggttgaaactgata

SEQ ID NO: 496465 - DNA, 19 bp, Mus musculus
  siRNA target sequence for Brip1 (NM_178309.1,3554-3572).
ggttgaaactgatagatca

SEQ ID NO: 496466 - DNA, 19 bp, Mus musculus
  siRNA target sequence for Brip1 (NM_178309.1,3555-3573).
gttgaaactgatagatcaa

SEQ ID NO: 496467 - DNA, 19 bp, Mus musculus
  siRNA target sequence for Brip1 (NM_178309.1,3564-3582).
gatagatcaagtcatagtt

SEQ ID NO: 496468 - DNA, 19 bp, Mus musculus
  siRNA target sequence for Btk (NM_013482.1,229-247).
cttgactgtacacaaactt

SEQ ID NO: 496469 - DNA, 19 bp, Mus musculus
  siRNA target sequence for Btk (NM_013482.1,249-267).
catactatgaatatgactt

SEQ ID NO: 496470 - DNA, 19 bp, Mus musculus
  siRNA target sequence for Btk (NM_013482.1,276-294).
ggagaagaggcagtaagaa

SEQ ID NO: 496471 - DNA, 19 bp, Mus musculus
  siRNA target sequence for Btk (NM_013482.1,285-303).
gcagtaagaaaggttcaat

SEQ ID NO: 496472 - DNA, 19 bp, Mus musculus
  siRNA target sequence for Btk (NM_013482.1,286-304).
cagtaagaaaggttcaata

SEQ ID NO: 496473 - DNA, 19 bp, Mus musculus
  siRNA target sequence for Btk (NM_013482.1,288-306).
gtaagaaaggttcaataga

SEQ ID NO: 496474 - DNA, 19 bp, Mus musculus
  siRNA target sequence for Btk (NM_013482.1,297-315).
gttcaatagatgttgagaa

SEQ ID NO: 496475 - DNA, 19 bp, Mus musculus
  siRNA target sequence for Btk (NM_013482.1,321-339).
cctgtgttgaaacagtaat

SEQ ID NO: 496476 - DNA, 19 bp, Mus musculus
  siRNA target sequence for Btk (NM_013482.1,388-406).
ggagtctagtgaaatggaa

SEQ ID NO: 496477 - DNA, 19 bp, Mus musculus
  siRNA target sequence for Btk (NM_013482.1,393-411).
ctagtgaaatggaacagat

SEQ ID NO: 496478 - DNA, 19 bp, Mus musculus
  siRNA target sequence for Btk (NM_013482.1,407-425).
cagatttcaatcattgaaa

SEQ ID NO: 496479 - DNA, 19 bp, Mus musculus
  siRNA target sequence for Btk (NM_013482.1,436-454).
cccattccaggttgtatat

SEQ ID NO: 496480 - DNA, 19 bp, Mus musculus
  siRNA target sequence for Btk (NM_013482.1,458-476).
gaaggacctctctatgttt

SEQ ID NO: 496481 - DNA, 19 bp, Mus musculus
  siRNA target sequence for Btk (NM_013482.1,461-479).
ggacctctctatgttttct

SEQ ID NO: 496482 - DNA, 19 bp, Mus musculus
  siRNA target sequence for Btk (NM_013482.1,507-525).
ggattcaccagctcaaaaa

SEQ ID NO: 496483 - DNA, 19 bp, Mus musculus
  siRNA target sequence for Btk (NM_013482.1,508-526).
gattcaccagctcaaaaat

SEQ ID NO: 496484 - DNA, 19 bp, Mus musculus
  siRNA target sequence for Btk (NM_013482.1,512-530).
caccagctcaaaaatgtaa

SEQ ID NO: 496485 - DNA, 19 bp, Mus musculus
  siRNA target sequence for Btk (NM_013482.1,574-592).
ctggattgatggacagtat

SEQ ID NO: 496486 - DNA, 19 bp, Mus musculus
  siRNA target sequence for Btk (NM_013482.1,620-638).
gctatgggctgccaaattt

SEQ ID NO: 496487 - DNA, 19 bp, Mus musculus
  siRNA target sequence for Btk (NM_013482.1,621-639).
ctatgggctgccaaatttt

SEQ ID NO: 496488 - DNA, 19 bp, Mus musculus
  siRNA target sequence for Btk (NM_013482.1,666-684).
ctgggagttctcatcgaaa

SEQ ID NO: 496489 - DNA, 19 bp, Mus musculus
  siRNA target sequence for Btk (NM_013482.1,672-690).
gttctcatcgaaaaacgaa

SEQ ID NO: 496490 - DNA, 19 bp, Mus musculus
  siRNA target sequence for Btk (NM_013482.1,716-734).
gaagatcagatcttgaaaa

SEQ ID NO: 496491 - DNA, 19 bp, Mus musculus
  siRNA target sequence for Btk (NM_013482.1,771-789).
ccacaaccgagctgaaaaa

SEQ ID NO: 496492 - DNA, 19 bp, Mus musculus
  siRNA target sequence for Btk (NM_013482.1,790-808).
ggtcgtggccctttatgat

SEQ ID NO: 496493 - DNA, 19 bp, Mus musculus
  siRNA target sequence for Btk (NM_013482.1,791-809).
gtcgtggccctttatgatt

SEQ ID NO: 496494 - DNA, 19 bp, Mus musculus
  siRNA target sequence for Btk (NM_013482.1,815-833).
ccaatgaacgcaaatgact

SEQ ID NO: 496495 - DNA, 19 bp, Mus musculus
  siRNA target sequence for Btk (NM_013482.1,816-834).
caatgaacgcaaatgactt

SEQ ID NO: 496496 - DNA, 19 bp, Mus musculus
  siRNA target sequence for Btk (NM_013482.1,820-838).
gaacgcaaatgacttacaa

SEQ ID NO: 496497 - DNA, 19 bp, Mus musculus
  siRNA target sequence for Btk (NM_013482.1,842-860).
cgaaagggcgaggagtatt

SEQ ID NO: 496498 - DNA, 19 bp, Mus musculus
  siRNA target sequence for Btk (NM_013482.1,843-861).
gaaagggcgaggagtattt

SEQ ID NO: 496499 - DNA, 19 bp, Mus musculus
  siRNA target sequence for Btk (NM_013482.1,849-867).
gcgaggagtattttatcct

SEQ ID NO: 496500 - DNA, 19 bp, Mus musculus
  siRNA target sequence for Btk (NM_013482.1,888-906).
ggtggcgagcacgagataa

SEQ ID NO: 496501 - DNA, 19 bp, Mus musculus
  siRNA target sequence for Btk (NM_013482.1,889-907).
gtggcgagcacgagataaa

SEQ ID NO: 496502 - DNA, 19 bp, Mus musculus
  siRNA target sequence for Btk (NM_013482.1,891-909).
ggcgagcacgagataaaaa

SEQ ID NO: 496503 - DNA, 19 bp, Mus musculus
  siRNA target sequence for Btk (NM_013482.1,892-910).
gcgagcacgagataaaaat

SEQ ID NO: 496504 - DNA, 19 bp, Mus musculus
  siRNA target sequence for Btk (NM_013482.1,928-946).
cccaagtaactatatcact

SEQ ID NO: 496505 - DNA, 19 bp, Mus musculus
  siRNA target sequence for Btk (NM_013482.1,965-983).
gagatgtatgagtggtatt

SEQ ID NO: 496506 - DNA, 19 bp, Mus musculus
  siRNA target sequence for Btk (NM_013482.1,988-1006).
gcacatgactcgaagtcaa

SEQ ID NO: 496507 - DNA, 19 bp, Mus musculus
  siRNA target sequence for Btk (NM_013482.1,1062-1080).
ccagcaaagctggaaaata

SEQ ID NO: 496508 - DNA, 19 bp, Mus musculus
  siRNA target sequence for Btk (NM_013482.1,1085-1103).
gtgtctgtgtttgctaaat

SEQ ID NO: 496509 - DNA, 19 bp, Mus musculus
  siRNA target sequence for Btk (NM_013482.1,1123-1141).
ggtgatccgccattacgtt

SEQ ID NO: 496510 - DNA, 19 bp, Mus musculus
  siRNA target sequence for Btk (NM_013482.1,1152-1170).
cgccacagagccagtatta

SEQ ID NO: 496511 - DNA, 19 bp, Mus musculus
  siRNA target sequence for Btk (NM_013482.1,1243-1261).
catatccaggctgaaatat

SEQ ID NO: 496512 - DNA, 19 bp, Mus musculus
  siRNA target sequence for Btk (NM_013482.1,1279-1297).
caaaaacgcgccttctact

SEQ ID NO: 496513 - DNA, 19 bp, Mus musculus
  siRNA target sequence for Btk (NM_013482.1,1370-1388).
caattcggtgtcgtgaaat

SEQ ID NO: 496514 - DNA, 19 bp, Mus musculus
  siRNA target sequence for Btk (NM_013482.1,1535-1553).
caacgccccatcttcatca

SEQ ID NO: 496515 - DNA, 19 bp, Mus musculus
  siRNA target sequence for Btk (NM_013482.1,1569-1587).
ctaatggctgcctcttgaa

SEQ ID NO: 496516 - DNA, 19 bp, Mus musculus
  siRNA target sequence for Btk (NM_013482.1,1653-1671).
gtgaagcaatggaatactt

SEQ ID NO: 496517 - DNA, 19 bp, Mus musculus
  siRNA target sequence for Btk (NM_013482.1,1706-1724).
gctcgaaactgtttggtaa

SEQ ID NO: 496518 - DNA, 19 bp, Mus musculus
  siRNA target sequence for Btk (NM_013482.1,1707-1725).
ctcgaaactgtttggtaaa

SEQ ID NO: 496519 - DNA, 19 bp, Mus musculus
  siRNA target sequence for Btk (NM_013482.1,1710-1728).
gaaactgtttggtaaacga

SEQ ID NO: 496520 - DNA, 19 bp, Mus musculus
  siRNA target sequence for Btk (NM_013482.1,1726-1744).
cgatcaaggagttgtgaaa

SEQ ID NO: 496521 - DNA, 19 bp, Mus musculus
  siRNA target sequence for Btk (NM_013482.1,1841-1859).
cttatgtatagcaagttca

SEQ ID NO: 496522 - DNA, 19 bp, Mus musculus
  siRNA target sequence for Btk (NM_013482.1,1916-1934).
gggaagatgccgtatgaga

SEQ ID NO: 496523 - DNA, 19 bp, Mus musculus
  siRNA target sequence for Btk (NM_013482.1,1921-1939).
gatgccgtatgagagattt

SEQ ID NO: 496524 - DNA, 19 bp, Mus musculus
  siRNA target sequence for Btk (NM_013482.1,1924-1942).
gccgtatgagagatttact

SEQ ID NO: 496525 - DNA, 19 bp, Mus musculus
  siRNA target sequence for Btk (NM_013482.1,1926-1944).
cgtatgagagatttactaa

SEQ ID NO: 496526 - DNA, 19 bp, Mus musculus
  siRNA target sequence for Btk (NM_013482.1,1947-1965).
gtgagacagcagaacacat

SEQ ID NO: 496527 - DNA, 19 bp, Mus musculus
  siRNA target sequence for Btk (NM_013482.1,1999-2017).
ggcatcagagagggtatat

SEQ ID NO: 496528 - DNA, 19 bp, Mus musculus
  siRNA target sequence for Btk (NM_013482.1,2010-2028).
gggtatataccatcatgta

SEQ ID NO: 496529 - DNA, 19 bp, Mus musculus
  siRNA target sequence for Btk (NM_013482.1,2038-2056).
gcacgagaaagcagatgaa

SEQ ID NO: 496530 - DNA, 19 bp, Mus musculus
  siRNA target sequence for Btk (NM_013482.1,2049-2067).
cagatgaacgtcctagttt

SEQ ID NO: 496531 - DNA, 19 bp, Mus musculus
  siRNA target sequence for Btk (NM_013482.1,2051-2069).
gatgaacgtcctagtttca

SEQ ID NO: 496532 - DNA, 19 bp, Mus musculus
  siRNA target sequence for Btk (NM_013482.1,2054-2072).
gaacgtcctagtttcaaaa

SEQ ID NO: 496533 - DNA, 19 bp, Mus musculus
  siRNA target sequence for Btk (NM_013482.1,2082-2100).
gtaacattctagatgtgat

SEQ ID NO: 496534 - DNA, 19 bp, Mus musculus
  siRNA target sequence for Bub1 (NM_009772.1,240-258).
gaactaccacaatgattca

SEQ ID NO: 496535 - DNA, 19 bp, Mus musculus
  siRNA target sequence for Bub1 (NM_009772.1,253-271).
gattcaagattcatcaatt

SEQ ID NO: 496536 - DNA, 19 bp, Mus musculus
  siRNA target sequence for Bub1 (NM_009772.1,304-322).
cgtcatcagttttttgagt

SEQ ID NO: 496537 - DNA, 19 bp, Mus musculus
  siRNA target sequence for Bub1 (NM_009772.1,305-323).
gtcatcagttttttgagtt

SEQ ID NO: 496538 - DNA, 19 bp, Mus musculus
  siRNA target sequence for Bub1 (NM_009772.1,327-345).
gtacaaccagggaattgga

SEQ ID NO: 496539 - DNA, 19 bp, Mus musculus
  siRNA target sequence for Bub1 (NM_009772.1,343-361).
ggaaccaagtcatcatata

SEQ ID NO: 496540 - DNA, 19 bp, Mus musculus
  siRNA target sequence for Bub1 (NM_009772.1,347-365).
ccaagtcatcatatatata

SEQ ID NO: 496541 - DNA, 19 bp, Mus musculus
  siRNA target sequence for Bub1 (NM_009772.1,460-478).
gaactactacagcaacaat

SEQ ID NO: 496542 - DNA, 19 bp, Mus musculus
  siRNA target sequence for Bub1 (NM_009772.1,463-481).
ctactacagcaacaataca

SEQ ID NO: 496543 - DNA, 19 bp, Mus musculus
  siRNA target sequence for Bub1 (NM_009772.1,496-514).
cgccttactggaatccatt

SEQ ID NO: 496544 - DNA, 19 bp, Mus musculus
  siRNA target sequence for Bub1 (NM_009772.1,568-586).
caagttatgatgacaaact

SEQ ID NO: 496545 - DNA, 19 bp, Mus musculus
  siRNA target sequence for Bub1 (NM_009772.1,659-677).
cttgtgatgaaaagtctaa

SEQ ID NO: 496546 - DNA, 19 bp, Mus musculus
  siRNA target sequence for Bub1 (NM_009772.1,745-763).
cctgaggctcagcaagtta

SEQ ID NO: 496547 - DNA, 19 bp, Mus musculus
  siRNA target sequence for Bub1 (NM_009772.1,751-769).
gctcagcaagttatgtact

SEQ ID NO: 496548 - DNA, 19 bp, Mus musculus
  siRNA target sequence for Bub1 (NM_009772.1,760-778).
gttatgtactgcaaggaaa

SEQ ID NO: 496549 - DNA, 19 bp, Mus musculus
  siRNA target sequence for Bub1 (NM_009772.1,771-789).
caaggaaaagcttattcgt

SEQ ID NO: 496550 - DNA, 19 bp, Mus musculus
  siRNA target sequence for Bub1 (NM_009772.1,817-835).
ctgagagcccagaaatata

SEQ ID NO: 496551 - DNA, 19 bp, Mus musculus
  siRNA target sequence for Bub1 (NM_009772.1,823-841).
gcccagaaatataatcaaa

SEQ ID NO: 496552 - DNA, 19 bp, Mus musculus
  siRNA target sequence for Bub1 (NM_009772.1,1000-1018).
gagaacaggcctgatgtta

SEQ ID NO: 496553 - DNA, 19 bp, Mus musculus
  siRNA target sequence for Bub1 (NM_009772.1,1002-1020).
gaacaggcctgatgttagt

SEQ ID NO: 496554 - DNA, 19 bp, Mus musculus
  siRNA target sequence for Bub1 (NM_009772.1,1005-1023).
caggcctgatgttagtcta

SEQ ID NO: 496555 - DNA, 19 bp, Mus musculus
  siRNA target sequence for Bub1 (NM_009772.1,1008-1026).
gcctgatgttagtctagta

SEQ ID NO: 496556 - DNA, 19 bp, Mus musculus
  siRNA target sequence for Bub1 (NM_009772.1,1009-1027).
cctgatgttagtctagtat

SEQ ID NO: 496557 - DNA, 19 bp, Mus musculus
  siRNA target sequence for Bub1 (NM_009772.1,1062-1080).
gaggggtccaagtctttca

SEQ ID NO: 496558 - DNA, 19 bp, Mus musculus
  siRNA target sequence for Bub1 (NM_009772.1,1136-1154).
ctgttcctcttatggtaaa

SEQ ID NO: 496559 - DNA, 19 bp, Mus musculus
  siRNA target sequence for Bub1 (NM_009772.1,1236-1254).
ctccagatgtgtgaatcaa

SEQ ID NO: 496560 - DNA, 19 bp, Mus musculus
  siRNA target sequence for Bub1 (NM_009772.1,1239-1257).
cagatgtgtgaatcaaagt

SEQ ID NO: 496561 - DNA, 19 bp, Mus musculus
  siRNA target sequence for Bub1 (NM_009772.1,1252-1270).
caaagtgttcatgaattca

SEQ ID NO: 496562 - DNA, 19 bp, Mus musculus
  siRNA target sequence for Bub1 (NM_009772.1,1302-1320).
gtgtgaaacaaataaagtt

SEQ ID NO: 496563 - DNA, 19 bp, Mus musculus
  siRNA target sequence for Bub1 (NM_009772.1,1318-1336).
gttgccagcattaatgatt

SEQ ID NO: 496564 - DNA, 19 bp, Mus musculus
  siRNA target sequence for Bub1 (NM_009772.1,1353-1371).
cacatcattgggaatggtt

SEQ ID NO: 496565 - DNA, 19 bp, Mus musculus
  siRNA target sequence for Bub1 (NM_009772.1,1420-1438).
gaagcattaggtttcatca

SEQ ID NO: 496566 - DNA, 19 bp, Mus musculus
  siRNA target sequence for Bub1 (NM_009772.1,1470-1488).
catttctgatgataaagat

SEQ ID NO: 496567 - DNA, 19 bp, Mus musculus
  siRNA target sequence for Bub1 (NM_009772.1,1636-1654).
ggcttaccacagcctaaaa

SEQ ID NO: 496568 - DNA, 19 bp, Mus musculus
  siRNA target sequence for Bub1 (NM_009772.1,1682-1700).
gagaacgatctctcagtaa

SEQ ID NO: 496569 - DNA, 19 bp, Mus musculus
  siRNA target sequence for Bub1 (NM_009772.1,1684-1702).
gaacgatctctcagtaaat

SEQ ID NO: 496570 - DNA, 19 bp, Mus musculus
  siRNA target sequence for Bub1 (NM_009772.1,1735-1753).
gatgagtttatggatgatt

SEQ ID NO: 496571 - DNA, 19 bp, Mus musculus
  siRNA target sequence for Bub1 (NM_009772.1,1738-1756).
gagtttatggatgattcaa

SEQ ID NO: 496572 - DNA, 19 bp, Mus musculus
  siRNA target sequence for Bub1 (NM_009772.1,1746-1764).
ggatgattcaacagtatgt

SEQ ID NO: 496573 - DNA, 19 bp, Mus musculus
  siRNA target sequence for Bub1 (NM_009772.1,1765-1783).
ggtattcgctgcaacaaaa

SEQ ID NO: 496574 - DNA, 19 bp, Mus musculus
  siRNA target sequence for Bub1 (NM_009772.1,1786-1804).
ctagctcccagtcctaaaa

SEQ ID NO: 496575 - DNA, 19 bp, Mus musculus
  siRNA target sequence for Bub1 (NM_009772.1,1789-1807).
gctcccagtcctaaaagta

SEQ ID NO: 496576 - DNA, 19 bp, Mus musculus
  siRNA target sequence for Bub1 (NM_009772.1,1794-1812).
cagtcctaaaagtatagga

SEQ ID NO: 496577 - DNA, 19 bp, Mus musculus
  siRNA target sequence for Bub1 (NM_009772.1,1854-1872).
caaatttccagcagattta

SEQ ID NO: 496578 - DNA, 19 bp, Mus musculus
  siRNA target sequence for Bub1 (NM_009772.1,1900-1918).
gtggtagccacacagtata

SEQ ID NO: 496579 - DNA, 19 bp, Mus musculus
  siRNA target sequence for Bub1 (NM_009772.1,1962-1980).
ctcaaaaggcagaaagctt

SEQ ID NO: 496580 - DNA, 19 bp, Mus musculus
  siRNA target sequence for Bub1 (NM_009772.1,2030-2048).
ctgccacaggtggtttgtt

SEQ ID NO: 496581 - DNA, 19 bp, Mus musculus
  siRNA target sequence for Bub1 (NM_009772.1,2067-2085).
cggccttgaggcttttaaa

SEQ ID NO: 496582 - DNA, 19 bp, Mus musculus
  siRNA target sequence for Bub1 (NM_009772.1,2068-2086).
ggccttgaggcttttaaat

SEQ ID NO: 496583 - DNA, 19 bp, Mus musculus
  siRNA target sequence for Bub1 (NM_009772.1,2154-2172).
cgtgcagacacttggaaat

SEQ ID NO: 496584 - DNA, 19 bp, Mus musculus
  siRNA target sequence for Bub1 (NM_009772.1,2261-2279).
cctattcaaatacttttga

SEQ ID NO: 496585 - DNA, 19 bp, Mus musculus
  siRNA target sequence for Bub1 (NM_009772.1,2273-2291).
cttttgagtggcagagtaa

SEQ ID NO: 496586 - DNA, 19 bp, Mus musculus
  siRNA target sequence for Bub1 (NM_009772.1,2307-2325).
gaccaagacagaatatcaa

SEQ ID NO: 496587 - DNA, 19 bp, Mus musculus
  siRNA target sequence for Bub1 (NM_009772.1,2309-2327).
ccaagacagaatatcaatt

SEQ ID NO: 496588 - DNA, 19 bp, Mus musculus
  siRNA target sequence for Bub1 (NM_009772.1,2459-2477).
ccaactcctgggaattcta

SEQ ID NO: 496589 - DNA, 19 bp, Mus musculus
  siRNA target sequence for Bub1 (NM_009772.1,2510-2528).
cagaagtacatcacatgtt

SEQ ID NO: 496590 - DNA, 19 bp, Mus musculus
  siRNA target sequence for Bub1 (NM_009772.1,2512-2530).
gaagtacatcacatgttca

SEQ ID NO: 496591 - DNA, 19 bp, Mus musculus
  siRNA target sequence for Bub1 (NM_009772.1,2518-2536).
catcacatgttcatcaagt

SEQ ID NO: 496592 - DNA, 19 bp, Mus musculus
  siRNA target sequence for Bub1 (NM_009772.1,2526-2544).
gttcatcaagttttattct

SEQ ID NO: 496593 - DNA, 19 bp, Mus musculus
  siRNA target sequence for Bub1 (NM_009772.1,2535-2553).
gttttattctgctcattta

SEQ ID NO: 496594 - DNA, 19 bp, Mus musculus
  siRNA target sequence for Bub1 (NM_009772.1,2589-2607).
cagctatgggacgttacta

SEQ ID NO: 496595 - DNA, 19 bp, Mus musculus
  siRNA target sequence for Bub1 (NM_009772.1,2597-2615).
ggacgttactaaatgtcat

SEQ ID NO: 496596 - DNA, 19 bp, Mus musculus
  siRNA target sequence for Bub1 (NM_009772.1,2598-2616).
gacgttactaaatgtcatt

SEQ ID NO: 496597 - DNA, 19 bp, Mus musculus
  siRNA target sequence for Bub1 (NM_009772.1,2600-2618).
cgttactaaatgtcattaa

SEQ ID NO: 496598 - DNA, 19 bp, Mus musculus
  siRNA target sequence for Bub1 (NM_009772.1,2611-2629).
gtcattaacctctataaaa

SEQ ID NO: 496599 - DNA, 19 bp, Mus musculus
  siRNA target sequence for Bub1 (NM_009772.1,2665-2683).
ctcactttcgctatcagaa

SEQ ID NO: 496600 - DNA, 19 bp, Mus musculus
  siRNA target sequence for Bub1 (NM_009772.1,2685-2703).
gctttacatggttgaacaa

SEQ ID NO: 496601 - DNA, 19 bp, Mus musculus
  siRNA target sequence for Bub1 (NM_009772.1,2704-2722).
gtccacagctgcgaaatca

SEQ ID NO: 496602 - DNA, 19 bp, Mus musculus
  siRNA target sequence for Bub1 (NM_009772.1,2709-2727).
cagctgcgaaatcattcat

SEQ ID NO: 496603 - DNA, 19 bp, Mus musculus
  siRNA target sequence for Bub1 (NM_009772.1,2739-2757).
gccagataacttcatacta

SEQ ID NO: 496604 - DNA, 19 bp, Mus musculus
  siRNA target sequence for Bub1 (NM_009772.1,2779-2797).
gctgatgaagacttagcta

SEQ ID NO: 496605 - DNA, 19 bp, Mus musculus
  siRNA target sequence for Bub1 (NM_009772.1,2798-2816).
ccggcttggcattgattga

SEQ ID NO: 496606 - DNA, 19 bp, Mus musculus
  siRNA target sequence for Bub1 (NM_009772.1,2817-2835).
cctgggtcagagtatagat

SEQ ID NO: 496607 - DNA, 19 bp, Mus musculus
  siRNA target sequence for Bub1 (NM_009772.1,2818-2836).
ctgggtcagagtatagata

SEQ ID NO: 496608 - DNA, 19 bp, Mus musculus
  siRNA target sequence for Bub1 (NM_009772.1,2822-2840).
gtcagagtatagatatgaa

SEQ ID NO: 496609 - DNA, 19 bp, Mus musculus
  siRNA target sequence for Bub1 (NM_009772.1,2826-2844).
gagtatagatatgaaactt

SEQ ID NO: 496610 - DNA, 19 bp, Mus musculus
  siRNA target sequence for Bub1 (NM_009772.1,2828-2846).
gtatagatatgaaactttt

SEQ ID NO: 496611 - DNA, 19 bp, Mus musculus
  siRNA target sequence for Bub1 (NM_009772.1,2847-2865).
ccctaaaggaactgtattt

SEQ ID NO: 496612 - DNA, 19 bp, Mus musculus
  siRNA target sequence for Bub1 (NM_009772.1,2848-2866).
cctaaaggaactgtattta

SEQ ID NO: 496613 - DNA, 19 bp, Mus musculus
  siRNA target sequence for Bub1 (NM_009772.1,2876-2894).
gtgaaacatctggttttca

SEQ ID NO: 496614 - DNA, 19 bp, Mus musculus
  siRNA target sequence for Bub1 (NM_009772.1,2897-2915).
gtcctgagatgctcagtaa

SEQ ID NO: 496615 - DNA, 19 bp, Mus musculus
  siRNA target sequence for Bub1 (NM_009772.1,2921-2939).
catggaactaccagattga

SEQ ID NO: 496616 - DNA, 19 bp, Mus musculus
  siRNA target sequence for Bub1 (NM_009772.1,2928-2946).
ctaccagattgattacttt

SEQ ID NO: 496617 - DNA, 19 bp, Mus musculus
  siRNA target sequence for Bub1 (NM_009772.1,2947-2965).
ggagttgctgcaacaatat

SEQ ID NO: 496618 - DNA, 19 bp, Mus musculus
  siRNA target sequence for Bub1 (NM_009772.1,2953-2971).
gctgcaacaatatactgta

SEQ ID NO: 496619 - DNA, 19 bp, Mus musculus
  siRNA target sequence for Bub1 (NM_009772.1,2954-2972).
ctgcaacaatatactgtat

SEQ ID NO: 496620 - DNA, 19 bp, Mus musculus
  siRNA target sequence for Bub1 (NM_009772.1,2974-2992).
ctctttggctcttacatga

SEQ ID NO: 496621 - DNA, 19 bp, Mus musculus
  siRNA target sequence for Bub1 (NM_009772.1,2976-2994).
ctttggctcttacatgaaa

SEQ ID NO: 496622 - DNA, 19 bp, Mus musculus
  siRNA target sequence for Bub1 (NM_009772.1,3087-3105).
gaatataccggattgtcat

SEQ ID NO: 496623 - DNA, 19 bp, Mus musculus
  siRNA target sequence for Bub1 (NM_009772.1,3101-3119).
gtcataatcttccatcttt

SEQ ID NO: 496624 - DNA, 19 bp, Mus musculus
  siRNA target sequence for Bub1 (NM_009772.1,3160-3178).
cagtattccaacaagatta

SEQ ID NO: 496625 - DNA, 19 bp, Mus musculus
  siRNA target sequence for Bub1 (NM_009772.1,3183-3201).
cttgcgtaataggctaatt

SEQ ID NO: 496626 - DNA, 19 bp, Mus musculus
  siRNA target sequence for Bub1 (NM_009772.1,3187-3205).
cgtaataggctaattgtga

SEQ ID NO: 496627 - DNA, 19 bp, Mus musculus
  siRNA target sequence for Bub1 (NM_009772.1,3188-3206).
gtaataggctaattgtgat

SEQ ID NO: 496628 - DNA, 19 bp, Mus musculus
  siRNA target sequence for Bub1 (NM_009772.1,3214-3232).
gaatataagcgttcaagaa

SEQ ID NO: 496629 - DNA, 19 bp, Mus musculus
  siRNA target sequence for Bub1b (NM_009773.1,234-252).
gtgggagctgagtaaagaa

SEQ ID NO: 496630 - DNA, 19 bp, Mus musculus
  siRNA target sequence for Bub1b (NM_009773.1,236-254).
gggagctgagtaaagaaaa

SEQ ID NO: 496631 - DNA, 19 bp, Mus musculus
  siRNA target sequence for Bub1b (NM_009773.1,399-417).
ggatgtgtgggacagatat

SEQ ID NO: 496632 - DNA, 19 bp, Mus musculus
  siRNA target sequence for Bub1b (NM_009773.1,400-418).
gatgtgtgggacagatata

SEQ ID NO: 496633 - DNA, 19 bp, Mus musculus
  siRNA target sequence for Bub1b (NM_009773.1,505-523).
ggagagacgcgctattata

SEQ ID NO: 496634 - DNA, 19 bp, Mus musculus
  siRNA target sequence for Bub1b (NM_009773.1,506-524).
gagagacgcgctattataa

SEQ ID NO: 496635 - DNA, 19 bp, Mus musculus
  siRNA target sequence for Bub1b (NM_009773.1,548-566).
ggatcaaattgggacattt

SEQ ID NO: 496636 - DNA, 19 bp, Mus musculus
  siRNA target sequence for Bub1b (NM_009773.1,567-585).
gtgcaatgaacctttggat

SEQ ID NO: 496637 - DNA, 19 bp, Mus musculus
  siRNA target sequence for Bub1b (NM_009773.1,582-600).
ggatatgtacagctattta

SEQ ID NO: 496638 - DNA, 19 bp, Mus musculus
  siRNA target sequence for Bub1b (NM_009773.1,628-646).
gcccagttctatatttcat

SEQ ID NO: 496639 - DNA, 19 bp, Mus musculus
  siRNA target sequence for Bub1b (NM_009773.1,980-998).
gcaggatcaccgtttttga

SEQ ID NO: 496640 - DNA, 19 bp, Mus musculus
  siRNA target sequence for Bub1b (NM_009773.1,983-1001).
ggatcaccgtttttgatga

SEQ ID NO: 496641 - DNA, 19 bp, Mus musculus
  siRNA target sequence for Bub1b (NM_009773.1,987-1005).
caccgtttttgatgaaaat

SEQ ID NO: 496642 - DNA, 19 bp, Mus musculus
  siRNA target sequence for Bub1b (NM_009773.1,1365-1383).
ctgtaaggagaagatctat

SEQ ID NO: 496643 - DNA, 19 bp, Mus musculus
  siRNA target sequence for Bub1b (NM_009773.1,1603-1621).
gccagattgcagattgctt

SEQ ID NO: 496644 - DNA, 19 bp, Mus musculus
  siRNA target sequence for Bub1b (NM_009773.1,1669-1687).
ccactaagctcgaatccta

SEQ ID NO: 496645 - DNA, 19 bp, Mus musculus
  siRNA target sequence for Bub1b (NM_009773.1,1677-1695).
ctcgaatcctagggaaatt

SEQ ID NO: 496646 - DNA, 19 bp, Mus musculus
  siRNA target sequence for Bub1b (NM_009773.1,1895-1913).
ccgatatttgtgatgaact

SEQ ID NO: 496647 - DNA, 19 bp, Mus musculus
  siRNA target sequence for Bub1b (NM_009773.1,2027-2045).
ctactcctttccatgagat

SEQ ID NO: 496648 - DNA, 19 bp, Mus musculus
  siRNA target sequence for Bub1b (NM_009773.1,2030-2048).
ctcctttccatgagatact

SEQ ID NO: 496649 - DNA, 19 bp, Mus musculus
  siRNA target sequence for Bub1b (NM_009773.1,2145-2163).
ggccctcatcataaagaaa

SEQ ID NO: 496650 - DNA, 19 bp, Mus musculus
  siRNA target sequence for Bub1b (NM_009773.1,2160-2178).
gaaactgagcccaattatt

SEQ ID NO: 496651 - DNA, 19 bp, Mus musculus
  siRNA target sequence for Bub1b (NM_009773.1,2330-2348).
cacagtatcgcctacaact

SEQ ID NO: 496652 - DNA, 19 bp, Mus musculus
  siRNA target sequence for Bub1b (NM_009773.1,2334-2352).
gtatcgcctacaactgtta

SEQ ID NO: 496653 - DNA, 19 bp, Mus musculus
  siRNA target sequence for Bub1b (NM_009773.1,2338-2356).
cgcctacaactgttaaaat

SEQ ID NO: 496654 - DNA, 19 bp, Mus musculus
  siRNA target sequence for Bub1b (NM_009773.1,2349-2367).
gttaaaatccctactagaa

SEQ ID NO: 496655 - DNA, 19 bp, Mus musculus
  siRNA target sequence for Bub1b (NM_009773.1,2483-2501).
gtgacgattacaggttatt

SEQ ID NO: 496656 - DNA, 19 bp, Mus musculus
  siRNA target sequence for Bub1b (NM_009773.1,2485-2503).
gacgattacaggttattct

SEQ ID NO: 496657 - DNA, 19 bp, Mus musculus
  siRNA target sequence for Bub1b (NM_009773.1,2524-2542).
gcagagctaaccatgataa

SEQ ID NO: 496658 - DNA, 19 bp, Mus musculus
  siRNA target sequence for Bub1b (NM_009773.1,2556-2574).
gcctatcccgtgggatttt

SEQ ID NO: 496659 - DNA, 19 bp, Mus musculus
  siRNA target sequence for Bub1b (NM_009773.1,2563-2581).
ccgtgggatttttatatca

SEQ ID NO: 496660 - DNA, 19 bp, Mus musculus
  siRNA target sequence for Bub1b (NM_009773.1,2564-2582).
cgtgggatttttatatcaa

SEQ ID NO: 496661 - DNA, 19 bp, Mus musculus
  siRNA target sequence for Bub1b (NM_009773.1,2659-2677).
gtttggtaccagtatataa

SEQ ID NO: 496662 - DNA, 19 bp, Mus musculus
  siRNA target sequence for Bub1b (NM_009773.1,2679-2697).
ctgctccacccttcagaat

SEQ ID NO: 496663 - DNA, 19 bp, Mus musculus
  siRNA target sequence for Bub1b (NM_009773.1,2703-2721).
ccaacacagcgaatttgtt

SEQ ID NO: 496664 - DNA, 19 bp, Mus musculus
  siRNA target sequence for Bub1b (NM_009773.1,2704-2722).
caacacagcgaatttgtta

SEQ ID NO: 496665 - DNA, 19 bp, Mus musculus
  siRNA target sequence for Bub1b (NM_009773.1,2709-2727).
cagcgaatttgttactcat

SEQ ID NO: 496666 - DNA, 19 bp, Mus musculus
  siRNA target sequence for Bub1b (NM_009773.1,2816-2834).
ggagtctgatcctacgaaa

SEQ ID NO: 496667 - DNA, 19 bp, Mus musculus
  siRNA target sequence for Bub1b (NM_009773.1,2821-2839).
ctgatcctacgaaacagaa

SEQ ID NO: 496668 - DNA, 19 bp, Mus musculus
  siRNA target sequence for Bub1b (NM_009773.1,2999-3017).
cttctccctaccatgtaga

SEQ ID NO: 496669 - DNA, 19 bp, Mus musculus
  siRNA target sequence for Bub1b (NM_009773.1,3005-3023).
cctaccatgtagatctgtt

SEQ ID NO: 496670 - DNA, 19 bp, Mus musculus
  siRNA target sequence for Bub1b (NM_009773.1,3032-3050).
cagacctagcgcacttact

SEQ ID NO: 496671 - DNA, 19 bp, Mus musculus
  siRNA target sequence for Bub1b (NM_009773.1,3041-3059).
cgcacttactcctgttcaa

SEQ ID NO: 496672 - DNA, 19 bp, Mus musculus
  siRNA target sequence for Bub1b (NM_009773.1,3108-3126).
gagcacctctgagctaaaa

SEQ ID NO: 496673 - DNA, 19 bp, Mus musculus
  siRNA target sequence for Bub1b (NM_009773.1,3110-3128).
gcacctctgagctaaaaga

SEQ ID NO: 496674 - DNA, 19 bp, Mus musculus
  siRNA target sequence for Bub1b (NM_009773.1,3129-3147).
cagtgaattgtggaataaa

SEQ ID NO: 496675 - DNA, 19 bp, Mus musculus
  siRNA target sequence for Bub1b (NM_009773.1,3131-3149).
gtgaattgtggaataaatt

SEQ ID NO: 496676 - DNA, 19 bp, Mus musculus
  siRNA target sequence for Bub1b (NM_009773.1,3284-3302).
caatcagcccggaagcttt

SEQ ID NO: 496677 - DNA, 19 bp, Mus musculus
  siRNA target sequence for C2ta (NM_007575.1,195-213).
cctggaactccttaacagt

SEQ ID NO: 496678 - DNA, 19 bp, Mus musculus
  siRNA target sequence for C2ta (NM_007575.1,435-453).
gagcaaggacctcttcata

SEQ ID NO: 496679 - DNA, 19 bp, Mus musculus
  siRNA target sequence for C2ta (NM_007575.1,489-507).
catagagatccctgtagaa

SEQ ID NO: 496680 - DNA, 19 bp, Mus musculus
  siRNA target sequence for C2ta (NM_007575.1,851-869).
cgctgacctcccgtgtaaa

SEQ ID NO: 496681 - DNA, 19 bp, Mus musculus
  siRNA target sequence for C2ta (NM_007575.1,852-870).
gctgacctcccgtgtaaat

SEQ ID NO: 496682 - DNA, 19 bp, Mus musculus
  siRNA target sequence for C2ta (NM_007575.1,968-986).
ccctacaggacaaatacaa

SEQ ID NO: 496683 - DNA, 19 bp, Mus musculus
  siRNA target sequence for C2ta (NM_007575.1,1258-1276).
cagttgctacaatatgact

SEQ ID NO: 496684 - DNA, 19 bp, Mus musculus
  siRNA target sequence for C2ta (NM_007575.1,1375-1393).
gatgacgaggtccttgatt

SEQ ID NO: 496685 - DNA, 19 bp, Mus musculus
  siRNA target sequence for C2ta (NM_007575.1,1378-1396).
gacgaggtccttgattata

SEQ ID NO: 496686 - DNA, 19 bp, Mus musculus
  siRNA target sequence for C2ta (NM_007575.1,1664-1682).
cttacatgaggcactactt

SEQ ID NO: 496687 - DNA, 19 bp, Mus musculus
  siRNA target sequence for C2ta (NM_007575.1,1697-1715).
cagcggggaaccaagacaa

SEQ ID NO: 496688 - DNA, 19 bp, Mus musculus
  siRNA target sequence for C2ta (NM_007575.1,1827-1845).
ggcccagctaccttgtaca

SEQ ID NO: 496689 - DNA, 19 bp, Mus musculus
  siRNA target sequence for C2ta (NM_007575.1,1833-1851).
gctaccttgtacacttaca

SEQ ID NO: 496690 - DNA, 19 bp, Mus musculus
  siRNA target sequence for C2ta (NM_007575.1,1951-1969).
caaagcaccttgcaagaaa

SEQ ID NO: 496691 - DNA, 19 bp, Mus musculus
  siRNA target sequence for C2ta (NM_007575.1,1962-1980).
gcaagaaacccggttttca

SEQ ID NO: 496692 - DNA, 19 bp, Mus musculus
  siRNA target sequence for C2ta (NM_007575.1,2066-2084).
gttttctgctacagtgttt

SEQ ID NO: 496693 - DNA, 19 bp, Mus musculus
  siRNA target sequence for C2ta (NM_007575.1,2104-2122).
gcacagtgcaatgaaatca

SEQ ID NO: 496694 - DNA, 19 bp, Mus musculus
  siRNA target sequence for C2ta (NM_007575.1,2105-2123).
cacagtgcaatgaaatcaa

SEQ ID NO: 496695 - DNA, 19 bp, Mus musculus
  siRNA target sequence for C2ta (NM_007575.1,2904-2922).
ggacctggactcacttagt

SEQ ID NO: 496696 - DNA, 19 bp, Mus musculus
  siRNA target sequence for C2ta (NM_007575.1,2986-3004).
ctggagacgctcaacttgt

SEQ ID NO: 496697 - DNA, 19 bp, Mus musculus
  siRNA target sequence for C2ta (NM_007575.1,3123-3141).
gagcctggcacaagtactt

SEQ ID NO: 496698 - DNA, 19 bp, Mus musculus
  siRNA target sequence for C2ta (NM_007575.1,3169-3187).
gatgtccagttcaacaagt

SEQ ID NO: 496699 - DNA, 19 bp, Mus musculus
  siRNA target sequence for C2ta (NM_007575.1,3172-3190).
gtccagttcaacaagttca

SEQ ID NO: 496700 - DNA, 19 bp, Mus musculus
  siRNA target sequence for C630015F21Rik (NM_175650.2,330-348).
gggcagttcagctgatgtt

SEQ ID NO: 496701 - DNA, 19 bp, Mus musculus
  siRNA target sequence for C630015F21Rik (NM_175650.2,332-350).
gcagttcagctgatgttct

SEQ ID NO: 496702 - DNA, 19 bp, Mus musculus
  siRNA target sequence for C630015F21Rik (NM_175650.2,333-351).
cagttcagctgatgttcta

SEQ ID NO: 496703 - DNA, 19 bp, Mus musculus
  siRNA target sequence for C630015F21Rik (NM_175650.2,432-450).
ccgatgaatttcgaagata

SEQ ID NO: 496704 - DNA, 19 bp, Mus musculus
  siRNA target sequence for C630015F21Rik (NM_175650.2,433-451).
cgatgaatttcgaagatat

SEQ ID NO: 496705 - DNA, 19 bp, Mus musculus
  siRNA target sequence for C630015F21Rik (NM_175650.2,434-452).
gatgaatttcgaagatata

SEQ ID NO: 496706 - DNA, 19 bp, Mus musculus
  siRNA target sequence for C630015F21Rik (NM_175650.2,560-578).
gtgatgaagccagaactaa

SEQ ID NO: 496707 - DNA, 19 bp, Mus musculus
  siRNA target sequence for C630015F21Rik (NM_175650.2,565-583).
gaagccagaactaaaacta

SEQ ID NO: 496708 - DNA, 19 bp, Mus musculus
  siRNA target sequence for C630015F21Rik (NM_175650.2,609-627).
ggtacgtgtgggatttctt

SEQ ID NO: 496709 - DNA, 19 bp, Mus musculus
  siRNA target sequence for C630015F21Rik (NM_175650.2,628-646).
gaagaagcgatttcagaaa

SEQ ID NO: 496710 - DNA, 19 bp, Mus musculus
  siRNA target sequence for C630015F21Rik (NM_175650.2,767-785).
gagatccaacccatatgga

SEQ ID NO: 496711 - DNA, 19 bp, Mus musculus
  siRNA target sequence for C630015F21Rik (NM_175650.2,857-875).
cagggttacatagaatact

SEQ ID NO: 496712 - DNA, 19 bp, Mus musculus
  siRNA target sequence for C630015F21Rik (NM_175650.2,859-877).
gggttacatagaatactct

SEQ ID NO: 496713 - DNA, 19 bp, Mus musculus
  siRNA target sequence for C630015F21Rik (NM_175650.2,983-1001).
caggtcacgatcacagtaa

SEQ ID NO: 496714 - DNA, 19 bp, Mus musculus
  siRNA target sequence for C630015F21Rik (NM_175650.2,985-1003).
ggtcacgatcacagtaaga

SEQ ID NO: 496715 - DNA, 19 bp, Mus musculus
  siRNA target sequence for C630015F21Rik (NM_175650.2,1036-1054).
cctggttccaggagatatt

SEQ ID NO: 496716 - DNA, 19 bp, Mus musculus
  siRNA target sequence for C630015F21Rik (NM_175650.2,1082-1100).
ccctgtgatgctatcttga

SEQ ID NO: 496717 - DNA, 19 bp, Mus musculus
  siRNA target sequence for C630015F21Rik (NM_175650.2,1083-1101).
cctgtgatgctatcttgat

SEQ ID NO: 496718 - DNA, 19 bp, Mus musculus
  siRNA target sequence for C630015F21Rik (NM_175650.2,1108-1126).
gagttgtgtggtgaatgaa

SEQ ID NO: 496719 - DNA, 19 bp, Mus musculus
  siRNA target sequence for C630015F21Rik (NM_175650.2,1132-1150).
gctcacaggagaaagtata

SEQ ID NO: 496720 - DNA, 19 bp, Mus musculus
  siRNA target sequence for C630015F21Rik (NM_175650.2,1142-1160).
gaaagtatacctgttacaa

SEQ ID NO: 496721 - DNA, 19 bp, Mus musculus
  siRNA target sequence for C630015F21Rik (NM_175650.2,1194-1212).
cctggaaatcgcacagttt

SEQ ID NO: 496722 - DNA, 19 bp, Mus musculus
  siRNA target sequence for C630015F21Rik (NM_175650.2,1298-1316).
gttctgcagacaggttata

SEQ ID NO: 496723 - DNA, 19 bp, Mus musculus
  siRNA target sequence for C630015F21Rik (NM_175650.2,1303-1321).
gcagacaggttataataca

SEQ ID NO: 496724 - DNA, 19 bp, Mus musculus
  siRNA target sequence for C630015F21Rik (NM_175650.2,1369-1387).
cttcaaactgtataatgat

SEQ ID NO: 496725 - DNA, 19 bp, Mus musculus
  siRNA target sequence for C630015F21Rik (NM_175650.2,1438-1456).
ctatgccctaggtgtctat

SEQ ID NO: 496726 - DNA, 19 bp, Mus musculus
  siRNA target sequence for C630015F21Rik (NM_175650.2,1442-1460).
gccctaggtgtctatatgt

SEQ ID NO: 496727 - DNA, 19 bp, Mus musculus
  siRNA target sequence for C630015F21Rik (NM_175650.2,1443-1461).
ccctaggtgtctatatgta

SEQ ID NO: 496728 - DNA, 19 bp, Mus musculus
  siRNA target sequence for C630015F21Rik (NM_175650.2,1466-1484).
gaagtacctccgagagaaa

SEQ ID NO: 496729 - DNA, 19 bp, Mus musculus
  siRNA target sequence for C630015F21Rik (NM_175650.2,1599-1617).
gtatctccccgcagagaat

SEQ ID NO: 496730 - DNA, 19 bp, Mus musculus
  siRNA target sequence for C630015F21Rik (NM_175650.2,1605-1623).
ccccgcagagaatcaacat

SEQ ID NO: 496731 - DNA, 19 bp, Mus musculus
  siRNA target sequence for C630015F21Rik (NM_175650.2,1607-1625).
ccgcagagaatcaacatgt

SEQ ID NO: 496732 - DNA, 19 bp, Mus musculus
  siRNA target sequence for C630015F21Rik (NM_175650.2,1704-1722).
ccaccgctggcaactgttt

SEQ ID NO: 496733 - DNA, 19 bp, Mus musculus
  siRNA target sequence for C630015F21Rik (NM_175650.2,1835-1853).
cctttggacctcaaaatgt

SEQ ID NO: 496734 - DNA, 19 bp, Mus musculus
  siRNA target sequence for C630015F21Rik (NM_175650.2,1861-1879).
cactggttggaatatggaa

SEQ ID NO: 496735 - DNA, 19 bp, Mus musculus
  siRNA target sequence for C630015F21Rik (NM_175650.2,1886-1904).
caagtggcctcctgcaaat

SEQ ID NO: 496736 - DNA, 19 bp, Mus musculus
  siRNA target sequence for C630015F21Rik (NM_175650.2,1916-1934).
gattcaagcacagtaataa

SEQ ID NO: 496737 - DNA, 19 bp, Mus musculus
  siRNA target sequence for C630015F21Rik (NM_175650.2,2051-2069).
cacctccacgtctacatga

SEQ ID NO: 496738 - DNA, 19 bp, Mus musculus
  siRNA target sequence for C630015F21Rik (NM_175650.2,2108-2126).
gaaacggtgcctaagaact

SEQ ID NO: 496739 - DNA, 19 bp, Mus musculus
  siRNA target sequence for C630015F21Rik (NM_175650.2,2130-2148).
cgcaggagctgaggaatta

SEQ ID NO: 496740 - DNA, 19 bp, Mus musculus
  siRNA target sequence for C630015F21Rik (NM_175650.2,2132-2150).
caggagctgaggaattaca

SEQ ID NO: 496741 - DNA, 19 bp, Mus musculus
  siRNA target sequence for C630015F21Rik (NM_175650.2,2256-2274).
cctttctgggacttctcat

SEQ ID NO: 496742 - DNA, 19 bp, Mus musculus
  siRNA target sequence for C630015F21Rik (NM_175650.2,2257-2275).
ctttctgggacttctcata

SEQ ID NO: 496743 - DNA, 19 bp, Mus musculus
  siRNA target sequence for C630015F21Rik (NM_175650.2,2415-2433).
gcagccaggtcgtcattgt

SEQ ID NO: 496744 - DNA, 19 bp, Mus musculus
  siRNA target sequence for C630015F21Rik (NM_175650.2,2512-2530).
gaagaaggacacctacatt

SEQ ID NO: 496745 - DNA, 19 bp, Mus musculus
  siRNA target sequence for C630015F21Rik (NM_175650.2,2577-2595).
caatgagtgggaagtcata

SEQ ID NO: 496746 - DNA, 19 bp, Mus musculus
  siRNA target sequence for C630015F21Rik (NM_175650.2,2581-2599).
gagtgggaagtcataccaa

SEQ ID NO: 496747 - DNA, 19 bp, Mus musculus
  siRNA target sequence for C630015F21Rik (NM_175650.2,2590-2608).
gtcataccaagtgttattt

SEQ ID NO: 496748 - DNA, 19 bp, Mus musculus
  siRNA target sequence for C630015F21Rik (NM_175650.2,2596-2614).
ccaagtgttatttcatcat

SEQ ID NO: 496749 - DNA, 19 bp, Mus musculus
  siRNA target sequence for C630015F21Rik (NM_175650.2,2620-2638).
cagcatgctgccacaaatt

SEQ ID NO: 496750 - DNA, 19 bp, Mus musculus
  siRNA target sequence for C630015F21Rik (NM_175650.2,2629-2647).
gccacaaattctggttaat

SEQ ID NO: 496751 - DNA, 19 bp, Mus musculus
  siRNA target sequence for C630015F21Rik (NM_175650.2,2774-2792).
catgctggcatctcactat

SEQ ID NO: 496752 - DNA, 19 bp, Mus musculus
  siRNA target sequence for C630015F21Rik (NM_175650.2,2826-2844).
cctcgaaaacagccaatat

SEQ ID NO: 496753 - DNA, 19 bp, Mus musculus
  siRNA target sequence for C630015F21Rik (NM_175650.2,2829-2847).
cgaaaacagccaatatcga

SEQ ID NO: 496754 - DNA, 19 bp, Mus musculus
  siRNA target sequence for C630015F21Rik (NM_175650.2,2890-2908).
ctcatccttcggtgtattt

SEQ ID NO: 496755 - DNA, 19 bp, Mus musculus
  siRNA target sequence for C630015F21Rik (NM_175650.2,2895-2913).
ccttcggtgtatttaaata

SEQ ID NO: 496756 - DNA, 19 bp, Mus musculus
  siRNA target sequence for C630015F21Rik (NM_175650.2,3019-3037).
gctgatggtcagcttaaca

SEQ ID NO: 496757 - DNA, 19 bp, Mus musculus
  siRNA target sequence for C630015F21Rik (NM_175650.2,3020-3038).
ctgatggtcagcttaacaa

SEQ ID NO: 496758 - DNA, 19 bp, Mus musculus
  siRNA target sequence for C630015F21Rik (NM_175650.2,3162-3180).
catttctcaccgtgaaaca

SEQ ID NO: 496759 - DNA, 19 bp, Mus musculus
  siRNA target sequence for C630015F21Rik (NM_175650.2,3190-3208).
gtactgcgaggtctacaaa

SEQ ID NO: 496760 - DNA, 19 bp, Mus musculus
  siRNA target sequence for C630015F21Rik (NM_175650.2,3196-3214).
cgaggtctacaaatacagt

SEQ ID NO: 496761 - DNA, 19 bp, Mus musculus
  siRNA target sequence for C630015F21Rik (NM_175650.2,3265-3283).
ccgaaactggactggaaat

SEQ ID NO: 496762 - DNA, 19 bp, Mus musculus
  siRNA target sequence for C630015F21Rik (NM_175650.2,3296-3314).
cccgcttctgtgctaagtt

SEQ ID NO: 496763 - DNA, 19 bp, Mus musculus
  siRNA target sequence for C630015F21Rik (NM_175650.2,3297-3315).
ccgcttctgtgctaagttt

SEQ ID NO: 496764 - DNA, 19 bp, Mus musculus
  siRNA target sequence for C630015F21Rik (NM_175650.2,3401-3419).
cccatctacgcaaactatt

SEQ ID NO: 496765 - DNA, 19 bp, Mus musculus
  siRNA target sequence for C630015F21Rik (NM_175650.2,3402-3420).
ccatctacgcaaactattt

SEQ ID NO: 496766 - DNA, 19 bp, Mus musculus
  siRNA target sequence for C630015F21Rik (NM_175650.2,3403-3421).
catctacgcaaactattta

SEQ ID NO: 496767 - DNA, 19 bp, Mus musculus
  siRNA target sequence for C630015F21Rik (NM_175650.2,3452-3470).
ctcactattttcattctgt

SEQ ID NO: 496768 - DNA, 19 bp, Mus musculus
  siRNA target sequence for C630015F21Rik (NM_175650.2,3482-3500).
caagacctgtaccgtaaaa

SEQ ID NO: 496769 - DNA, 19 bp, Mus musculus
  siRNA target sequence for C630015F21Rik (NM_175650.2,3518-3536).
cccacatcatggagagttt

SEQ ID NO: 496770 - DNA, 19 bp, Mus musculus
  siRNA target sequence for C630015F21Rik (NM_175650.2,3520-3538).
cacatcatggagagtttca

SEQ ID NO: 496771 - DNA, 19 bp, Mus musculus
  siRNA target sequence for C630015F21Rik (NM_175650.2,3528-3546).
ggagagtttcaattctgat

SEQ ID NO: 496772 - DNA, 19 bp, Mus musculus
  siRNA target sequence for C630015F21Rik (NM_175650.2,3529-3547).
gagagtttcaattctgata

SEQ ID NO: 496773 - DNA, 19 bp, Mus musculus
  siRNA target sequence for C630015F21Rik (NM_175650.2,3611-3629).
ctctggctgtttatcaaga

SEQ ID NO: 496774 - DNA, 19 bp, Mus musculus
  siRNA target sequence for C630015F21Rik (NM_175650.2,3615-3633).
ggctgtttatcaagaaaga

SEQ ID NO: 496775 - DNA, 19 bp, Mus musculus
  siRNA target sequence for C630015F21Rik (NM_175650.2,3705-3723).
ccgtgaacaggacagatta

SEQ ID NO: 496776 - DNA, 19 bp, Mus musculus
  siRNA target sequence for C630015F21Rik (NM_175650.2,3735-3753).
gcaaaaatggattctatgt

SEQ ID NO: 496777 - DNA, 19 bp, Mus musculus
  siRNA target sequence for C730026E21Rik (NM_175439.2,249-267).
gcgtccacgcggttttcca

SEQ ID NO: 496778 - DNA, 19 bp, Mus musculus
  siRNA target sequence for C730026E21Rik (NM_175439.2,345-363).
cgagtgtctgcccagtttt

SEQ ID NO: 496779 - DNA, 19 bp, Mus musculus
  siRNA target sequence for C730026E21Rik (NM_175439.2,355-373).
cccagtttttgcagctttt

SEQ ID NO: 496780 - DNA, 19 bp, Mus musculus
  siRNA target sequence for C730026E21Rik (NM_175439.2,430-448).
gagtagcggtgcagcattt

SEQ ID NO: 496781 - DNA, 19 bp, Mus musculus
  siRNA target sequence for C730026E21Rik (NM_175439.2,432-450).
gtagcggtgcagcatttct

SEQ ID NO: 496782 - DNA, 19 bp, Mus musculus
  siRNA target sequence for C730026E21Rik (NM_175439.2,491-509).
ctatgaagggtggtattgt

SEQ ID NO: 496783 - DNA, 19 bp, Mus musculus
  siRNA target sequence for C730026E21Rik (NM_175439.2,613-631).
ggacgaaggaagaaaatta

SEQ ID NO: 496784 - DNA, 19 bp, Mus musculus
  siRNA target sequence for C730026E21Rik (NM_175439.2,683-701).
caatcctcaggcaatcaca

SEQ ID NO: 496785 - DNA, 19 bp, Mus musculus
  siRNA target sequence for C730026E21Rik (NM_175439.2,710-728).
gttccaccaggcagttctt

SEQ ID NO: 496786 - DNA, 19 bp, Mus musculus
  siRNA target sequence for C730026E21Rik (NM_175439.2,851-869).
caactacctcactgtagtt

SEQ ID NO: 496787 - DNA, 19 bp, Mus musculus
  siRNA target sequence for C730026E21Rik (NM_175439.2,903-921).
ccagccacctctcatatca

SEQ ID NO: 496788 - DNA, 19 bp, Mus musculus
  siRNA target sequence for C730026E21Rik (NM_175439.2,910-928).
cctctcatatcataggtaa

SEQ ID NO: 496789 - DNA, 19 bp, Mus musculus
  siRNA target sequence for C730026E21Rik (NM_175439.2,924-942).
ggtaaggacattctcaaat

SEQ ID NO: 496790 - DNA, 19 bp, Mus musculus
  siRNA target sequence for C730026E21Rik (NM_175439.2,929-947).
ggacattctcaaatttcat

SEQ ID NO: 496791 - DNA, 19 bp, Mus musculus
  siRNA target sequence for C730026E21Rik (NM_175439.2,989-1007).
gccaccacatcgcatctat

SEQ ID NO: 496792 - DNA, 19 bp, Mus musculus
  siRNA target sequence for C730026E21Rik (NM_175439.2,991-1009).
caccacatcgcatctatgt

SEQ ID NO: 496793 - DNA, 19 bp, Mus musculus
  siRNA target sequence for C730026E21Rik (NM_175439.2,1022-1040).
gacggtgagtggccaaaaa

SEQ ID NO: 496794 - DNA, 19 bp, Mus musculus
  siRNA target sequence for C730026E21Rik (NM_175439.2,1024-1042).
cggtgagtggccaaaaaat

SEQ ID NO: 496795 - DNA, 19 bp, Mus musculus
  siRNA target sequence for C730026E21Rik (NM_175439.2,1026-1044).
gtgagtggccaaaaaatgt

SEQ ID NO: 496796 - DNA, 19 bp, Mus musculus
  siRNA target sequence for C730026E21Rik (NM_175439.2,1032-1050).
ggccaaaaaatgtccaaaa

SEQ ID NO: 496797 - DNA, 19 bp, Mus musculus
  siRNA target sequence for C730026E21Rik (NM_175439.2,1144-1162).
gggactgcgattactatga

SEQ ID NO: 496798 - DNA, 19 bp, Mus musculus
  siRNA target sequence for C730026E21Rik (NM_175439.2,1145-1163).
ggactgcgattactatgat

SEQ ID NO: 496799 - DNA, 19 bp, Mus musculus
  siRNA target sequence for C730026E21Rik (NM_175439.2,1161-1179).
gatgaaaaggtggttaaat

SEQ ID NO: 496800 - DNA, 19 bp, Mus musculus
  siRNA target sequence for C730026E21Rik (NM_175439.2,1204-1222).
ccttaggagggcttttaaa

SEQ ID NO: 496801 - DNA, 19 bp, Mus musculus
  siRNA target sequence for C730026E21Rik (NM_175439.2,1332-1350).
gaagactatgcgcttgtaa

SEQ ID NO: 496802 - DNA, 19 bp, Mus musculus
  siRNA target sequence for C730026E21Rik (NM_175439.2,1374-1392).
ctggtagcgggctattata

SEQ ID NO: 496803 - DNA, 19 bp, Mus musculus
  siRNA target sequence for C730026E21Rik (NM_175439.2,1376-1394).
ggtagcgggctattataat

SEQ ID NO: 496804 - DNA, 19 bp, Mus musculus
  siRNA target sequence for C730026E21Rik (NM_175439.2,1380-1398).
gcgggctattataatgact

SEQ ID NO: 496805 - DNA, 19 bp, Mus musculus
  siRNA target sequence for C730026E21Rik (NM_175439.2,1381-1399).
cgggctattataatgactt

SEQ ID NO: 496806 - DNA, 19 bp, Mus musculus
  siRNA target sequence for C730026E21Rik (NM_175439.2,1382-1400).
gggctattataatgacttt

SEQ ID NO: 496807 - DNA, 19 bp, Mus musculus
  siRNA target sequence for C730026E21Rik (NM_175439.2,1384-1402).
gctattataatgactttca

SEQ ID NO: 496808 - DNA, 19 bp, Mus musculus
  siRNA target sequence for C730026E21Rik (NM_175439.2,1432-1450).
gctgtgttcggcaaactaa

SEQ ID NO: 496809 - DNA, 19 bp, Mus musculus
  siRNA target sequence for C730026E21Rik (NM_175439.2,1437-1455).
gttcggcaaactaatggtt

SEQ ID NO: 496810 - DNA, 19 bp, Mus musculus
  siRNA target sequence for C730026E21Rik (NM_175439.2,1541-1559).
ggagtgcttgcgagtgttt

SEQ ID NO: 496811 - DNA, 19 bp, Mus musculus
  siRNA target sequence for C730026E21Rik (NM_175439.2,1574-1592).
gcctgttactccaaactta

SEQ ID NO: 496812 - DNA, 19 bp, Mus musculus
  siRNA target sequence for C730026E21Rik (NM_175439.2,1582-1600).
ctccaaacttagcagataa

SEQ ID NO: 496813 - DNA, 19 bp, Mus musculus
  siRNA target sequence for C730026E21Rik (NM_175439.2,1585-1603).
caaacttagcagataaact

SEQ ID NO: 496814 - DNA, 19 bp, Mus musculus
  siRNA target sequence for C730026E21Rik (NM_175439.2,1639-1657).
gccttggagagctctactt

SEQ ID NO: 496815 - DNA, 19 bp, Mus musculus
  siRNA target sequence for C730026E21Rik (NM_175439.2,1655-1673).
cttcctacctcgattctat

SEQ ID NO: 496816 - DNA, 19 bp, Mus musculus
  siRNA target sequence for C730026E21Rik (NM_175439.2,1731-1749).
cctagactggaccaatcta

SEQ ID NO: 496817 - DNA, 19 bp, Mus musculus
  siRNA target sequence for C730026E21Rik (NM_175439.2,1747-1765).
ctaggactcggctagtgaa

SEQ ID NO: 496818 - DNA, 19 bp, Mus musculus
  siRNA target sequence for C730036H08 (NM_172928.1,670-688).
gcaaagagccgctgacatt

SEQ ID NO: 496819 - DNA, 19 bp, Mus musculus
  siRNA target sequence for C730036H08 (NM_172928.1,678-696).
ccgctgacattgaagagta

SEQ ID NO: 496820 - DNA, 19 bp, Mus musculus
  siRNA target sequence for C730036H08 (NM_172928.1,679-697).
cgctgacattgaagagtat

SEQ ID NO: 496821 - DNA, 19 bp, Mus musculus
  siRNA target sequence for C730036H08 (NM_172928.1,838-856).
gctatagcgcggaaatgga

SEQ ID NO: 496822 - DNA, 19 bp, Mus musculus
  siRNA target sequence for C730036H08 (NM_172928.1,844-862).
gcgcggaaatggagagtaa

SEQ ID NO: 496823 - DNA, 19 bp, Mus musculus
  siRNA target sequence for C730036H08 (NM_172928.1,1208-1226).
gccttctgaggcaaaatct

SEQ ID NO: 496824 - DNA, 19 bp, Mus musculus
  siRNA target sequence for C730036H08 (NM_172928.1,1680-1698).
gtggagaagcactatgaca

SEQ ID NO: 496825 - DNA, 19 bp, Mus musculus
  siRNA target sequence for C730036H08 (NM_172928.1,1682-1700).
ggagaagcactatgacata

SEQ ID NO: 496826 - DNA, 19 bp, Mus musculus
  siRNA target sequence for C730036H08 (NM_172928.1,1764-1782).
caggcttacgccatgaaga

SEQ ID NO: 496827 - DNA, 19 bp, Mus musculus
  siRNA target sequence for C730036H08 (NM_172928.1,1821-1839).
gtcgacagtgagattttaa

SEQ ID NO: 496828 - DNA, 19 bp, Mus musculus
  siRNA target sequence for C730036H08 (NM_172928.1,1900-1918).
cggagatctacctgatcat

SEQ ID NO: 496829 - DNA, 19 bp, Mus musculus
  siRNA target sequence for C730036H08 (NM_172928.1,2025-2043).
cacatgcacgacaagaata

SEQ ID NO: 496830 - DNA, 19 bp, Mus musculus
  siRNA target sequence for C730036H08 (NM_172928.1,2075-2093).
cctggttcagcgaaatgaa

SEQ ID NO: 496831 - DNA, 19 bp, Mus musculus
  siRNA target sequence for C730036H08 (NM_172928.1,2144-2162).
ggtgaggcctatatttact

SEQ ID NO: 496832 - DNA, 19 bp, Mus musculus
  siRNA target sequence for C730036H08 (NM_172928.1,2165-2183).
gtgtgggacgccaacatat

SEQ ID NO: 496833 - DNA, 19 bp, Mus musculus
  siRNA target sequence for C730036H08 (NM_172928.1,2188-2206).
ctcctgaaattctttctga

SEQ ID NO: 496834 - DNA, 19 bp, Mus musculus
  siRNA target sequence for C730036H08 (NM_172928.1,2239-2257).
cggcaggtgtgatcctata

SEQ ID NO: 496835 - DNA, 19 bp, Mus musculus
  siRNA target sequence for C730036H08 (NM_172928.1,2242-2260).
caggtgtgatcctatacat

SEQ ID NO: 496836 - DNA, 19 bp, Mus musculus
  siRNA target sequence for C730036H08 (NM_172928.1,2304-2322).
caagacgagctcttcaaca

SEQ ID NO: 496837 - DNA, 19 bp, Mus musculus
  siRNA target sequence for C730036H08 (NM_172928.1,2360-2378).
ctgggacaacatttctgat

SEQ ID NO: 496838 - DNA, 19 bp, Mus musculus
  siRNA target sequence for C730036H08 (NM_172928.1,2505-2523).
gaggagtcccccaacagtt

SEQ ID NO: 496839 - DNA, 19 bp, Mus musculus
  siRNA target sequence for Cab140 (NM_021395.2,302-320).
ctacgctccgttatttcca

SEQ ID NO: 496840 - DNA, 19 bp, Mus musculus
  siRNA target sequence for Cab140 (NM_021395.2,369-387).
gtcccgtttcccagaacat

SEQ ID NO: 496841 - DNA, 19 bp, Mus musculus
  siRNA target sequence for Cab140 (NM_021395.2,380-398).
cagaacatgagctaattgt

SEQ ID NO: 496842 - DNA, 19 bp, Mus musculus
  siRNA target sequence for Cab140 (NM_021395.2,469-487).
ggcatggttctgaactact

SEQ ID NO: 496843 - DNA, 19 bp, Mus musculus
  siRNA target sequence for Cab140 (NM_021395.2,512-530).
ctgaacaacccattaagga

SEQ ID NO: 496844 - DNA, 19 bp, Mus musculus
  siRNA target sequence for Cab140 (NM_021395.2,670-688).
cggaaagatatcaattcca

SEQ ID NO: 496845 - DNA, 19 bp, Mus musculus
  siRNA target sequence for Cab140 (NM_021395.2,689-707).
ctgcacaggacgtcatgtt

SEQ ID NO: 496846 - DNA, 19 bp, Mus musculus
  siRNA target sequence for Cab140 (NM_021395.2,691-709).
gcacaggacgtcatgttct

SEQ ID NO: 496847 - DNA, 19 bp, Mus musculus
  siRNA target sequence for Cab140 (NM_021395.2,692-710).
cacaggacgtcatgttcta

SEQ ID NO: 496848 - DNA, 19 bp, Mus musculus
  siRNA target sequence for Cab140 (NM_021395.2,951-969).
ggaagccaaccggcttaaa

SEQ ID NO: 496849 - DNA, 19 bp, Mus musculus
  siRNA target sequence for Cab140 (NM_021395.2,952-970).
gaagccaaccggcttaaaa

SEQ ID NO: 496850 - DNA, 19 bp, Mus musculus
  siRNA target sequence for Cab140 (NM_021395.2,1131-1149).
gatgagcttggatcaaatt

SEQ ID NO: 496851 - DNA, 19 bp, Mus musculus
  siRNA target sequence for Cab140 (NM_021395.2,1176-1194).
cactcgtgttcccaaagtt

SEQ ID NO: 496852 - DNA, 19 bp, Mus musculus
  siRNA target sequence for Cab140 (NM_021395.2,1178-1196).
ctcgtgttcccaaagttca

SEQ ID NO: 496853 - DNA, 19 bp, Mus musculus
  siRNA target sequence for Cab140 (NM_021395.2,1327-1345).
gtgcgggatgctgtcattt

SEQ ID NO: 496854 - DNA, 19 bp, Mus musculus
  siRNA target sequence for Cab140 (NM_021395.2,1391-1409).
ggctccgaagcctgaaaca

SEQ ID NO: 496855 - DNA, 19 bp, Mus musculus
  siRNA target sequence for Cab140 (NM_021395.2,1475-1493).
gctacagccatgatttcaa

SEQ ID NO: 496856 - DNA, 19 bp, Mus musculus
  siRNA target sequence for Cab140 (NM_021395.2,1566-1584).
gaccacagtaaaactaaaa

SEQ ID NO: 496857 - DNA, 19 bp, Mus musculus
  siRNA target sequence for Cab140 (NM_021395.2,1588-1606).
gtgggagagagcttcaaga

SEQ ID NO: 496858 - DNA, 19 bp, Mus musculus
  siRNA target sequence for Cab140 (NM_021395.2,1591-1609).
ggagagagcttcaagaaat

SEQ ID NO: 496859 - DNA, 19 bp, Mus musculus
  siRNA target sequence for Cab140 (NM_021395.2,1659-1677).
gagtggcgtgctcagttta

SEQ ID NO: 496860 - DNA, 19 bp, Mus musculus
  siRNA target sequence for Cab140 (NM_021395.2,1661-1679).
gtggcgtgctcagtttaga

SEQ ID NO: 496861 - DNA, 19 bp, Mus musculus
  siRNA target sequence for Cab140 (NM_021395.2,1663-1681).
ggcgtgctcagtttagaca

SEQ ID NO: 496862 - DNA, 19 bp, Mus musculus
  siRNA target sequence for Cab140 (NM_021395.2,1682-1700).
gggtggagtccgtatttga

SEQ ID NO: 496863 - DNA, 19 bp, Mus musculus
  siRNA target sequence for Cab140 (NM_021395.2,1747-1765).
cttggcaacaccatatcca

SEQ ID NO: 496864 - DNA, 19 bp, Mus musculus
  siRNA target sequence for Cab140 (NM_021395.2,1868-1886).
cagagcagggggaactcaa

SEQ ID NO: 496865 - DNA, 19 bp, Mus musculus
  siRNA target sequence for Cab140 (NM_021395.2,2169-2187).
ccgttctgtgcagaaactt

SEQ ID NO: 496866 - DNA, 19 bp, Mus musculus
  siRNA target sequence for Cab140 (NM_021395.2,2171-2189).
gttctgtgcagaaacttga

SEQ ID NO: 496867 - DNA, 19 bp, Mus musculus
  siRNA target sequence for Cab140 (NM_021395.2,2452-2470).
gtggaagaacgcaggaaat

SEQ ID NO: 496868 - DNA, 19 bp, Mus musculus
  siRNA target sequence for Cab140 (NM_021395.2,2481-2499).
gctttcagctctggataat

SEQ ID NO: 496869 - DNA, 19 bp, Mus musculus
  siRNA target sequence for Cab140 (NM_021395.2,2669-2687).
ctgtgctgctttcaaaaga

SEQ ID NO: 496870 - DNA, 19 bp, Mus musculus
  siRNA target sequence for Cab140 (NM_021395.2,2671-2689).
gtgctgctttcaaaagaca

SEQ ID NO: 496871 - DNA, 19 bp, Mus musculus
  siRNA target sequence for Cab140 (NM_021395.2,2686-2704).
gacattgaggccaaaatga

SEQ ID NO: 496872 - DNA, 19 bp, Mus musculus
  siRNA target sequence for Cab140 (NM_021395.2,2715-2733).
ccgggaggtacagtatcta

SEQ ID NO: 496873 - DNA, 19 bp, Mus musculus
  siRNA target sequence for Cab140 (NM_021395.2,2722-2740).
gtacagtatctactcaata

SEQ ID NO: 496874 - DNA, 19 bp, Mus musculus
  siRNA target sequence for Cab140 (NM_021395.2,2761-2779).
cggccacggcccaaagaca

SEQ ID NO: 496875 - DNA, 19 bp, Mus musculus
  siRNA target sequence for Cab140 (NM_021395.2,2762-2780).
ggccacggcccaaagacaa

SEQ ID NO: 496876 - DNA, 19 bp, Mus musculus
  siRNA target sequence for Cab140 (NM_021395.2,2868-2886).
ggcgaaacccattttagaa

SEQ ID NO: 496877 - DNA, 19 bp, Mus musculus
  siRNA target sequence for Cab140 (NM_021395.2,2996-3014).
cttcaaagaacgatgaact

SEQ ID NO: 496878 - DNA, 19 bp, Mus musculus
  siRNA target sequence for Cacna1b (NM_007579.1,852-870).
ctatatgggcaaattccat

SEQ ID NO: 496879 - DNA, 19 bp, Mus musculus
  siRNA target sequence for Cacna1b (NM_007579.1,882-900).
ccccaacagcacagataca

SEQ ID NO: 496880 - DNA, 19 bp, Mus musculus
  siRNA target sequence for Cacna1b (NM_007579.1,1077-1095).
cctctacaatacaaatgat

SEQ ID NO: 496881 - DNA, 19 bp, Mus musculus
  siRNA target sequence for Cacna1b (NM_007579.1,1352-1370).
cccctttggatgtgttgaa

SEQ ID NO: 496882 - DNA, 19 bp, Mus musculus
  siRNA target sequence for Cacna1b (NM_007579.1,1421-1439).
gggaggaccggtttgtaga

SEQ ID NO: 496883 - DNA, 19 bp, Mus musculus
  siRNA target sequence for Cacna1b (NM_007579.1,1617-1635).
ggccatggtgcactataat

SEQ ID NO: 496884 - DNA, 19 bp, Mus musculus
  siRNA target sequence for Cacna1b (NM_007579.1,1619-1637).
ccatggtgcactataatca

SEQ ID NO: 496885 - DNA, 19 bp, Mus musculus
  siRNA target sequence for Cacna1b (NM_007579.1,1724-1742).
gcctagggcccagaagtta

SEQ ID NO: 496886 - DNA, 19 bp, Mus musculus
  siRNA target sequence for Cacna1b (NM_007579.1,1777-1795).
gtgattgtggggagtatct

SEQ ID NO: 496887 - DNA, 19 bp, Mus musculus
  siRNA target sequence for Cacna1b (NM_007579.1,1779-1797).
gattgtggggagtatcttt

SEQ ID NO: 496888 - DNA, 19 bp, Mus musculus
  siRNA target sequence for Cacna1b (NM_007579.1,1785-1803).
ggggagtatctttgaagta

SEQ ID NO: 496889 - DNA, 19 bp, Mus musculus
  siRNA target sequence for Cacna1b (NM_007579.1,1787-1805).
ggagtatctttgaagtagt

SEQ ID NO: 496890 - DNA, 19 bp, Mus musculus
  siRNA target sequence for Cacna1b (NM_007579.1,1858-1876).
ctgcgactgctgaggatat

SEQ ID NO: 496891 - DNA, 19 bp, Mus musculus
  siRNA target sequence for Cacna1b (NM_007579.1,1861-1879).
cgactgctgaggatattca

SEQ ID NO: 496892 - DNA, 19 bp, Mus musculus
  siRNA target sequence for Cacna1b (NM_007579.1,1862-1880).
gactgctgaggatattcaa

SEQ ID NO: 496893 - DNA, 19 bp, Mus musculus
  siRNA target sequence for Cacna1b (NM_007579.1,1915-1933).
gtggtttccctcctcaatt

SEQ ID NO: 496894 - DNA, 19 bp, Mus musculus
  siRNA target sequence for Cacna1b (NM_007579.1,2110-2128).
gattggaatgccgtaatgt

SEQ ID NO: 496895 - DNA, 19 bp, Mus musculus
  siRNA target sequence for Cacna1b (NM_007579.1,2114-2132).
ggaatgccgtaatgtatca

SEQ ID NO: 496896 - DNA, 19 bp, Mus musculus
  siRNA target sequence for Cacna1b (NM_007579.1,2115-2133).
gaatgccgtaatgtatcat

SEQ ID NO: 496897 - DNA, 19 bp, Mus musculus
  siRNA target sequence for Cacna1b (NM_007579.1,2530-2548).
gtgaggccagacatgaaga

SEQ ID NO: 496898 - DNA, 19 bp, Mus musculus
  siRNA target sequence for Cacna1b (NM_007579.1,2602-2620).
cccgttgggagcaagtcaa

SEQ ID NO: 496899 - DNA, 19 bp, Mus musculus
  siRNA target sequence for Cacna1b (NM_007579.1,2603-2621).
ccgttgggagcaagtcaaa

SEQ ID NO: 496900 - DNA, 19 bp, Mus musculus
  siRNA target sequence for Cacna1b (NM_007579.1,3113-3131).
cggtggaaggggataagga

SEQ ID NO: 496901 - DNA, 19 bp, Mus musculus
  siRNA target sequence for Cacna1b (NM_007579.1,3257-3275).
cagacaaccagcgtaatgt

SEQ ID NO: 496902 - DNA, 19 bp, Mus musculus
  siRNA target sequence for Cacna1b (NM_007579.1,3259-3277).
gacaaccagcgtaatgtca

SEQ ID NO: 496903 - DNA, 19 bp, Mus musculus
  siRNA target sequence for Cacna1b (NM_007579.1,3502-3520).
cgtcgcttctgccattaca

SEQ ID NO: 496904 - DNA, 19 bp, Mus musculus
  siRNA target sequence for Cacna1b (NM_007579.1,3503-3521).
gtcgcttctgccattacat

SEQ ID NO: 496905 - DNA, 19 bp, Mus musculus
  siRNA target sequence for Cacna1b (NM_007579.1,3595-3613).
gatcctgtgcggacagatt

SEQ ID NO: 496906 - DNA, 19 bp, Mus musculus
  siRNA target sequence for Cacna1b (NM_007579.1,3598-3616).
cctgtgcggacagattcat

SEQ ID NO: 496907 - DNA, 19 bp, Mus musculus
  siRNA target sequence for Cacna1b (NM_007579.1,3599-3617).
ctgtgcggacagattcatt

SEQ ID NO: 496908 - DNA, 19 bp, Mus musculus
  siRNA target sequence for Cacna1b (NM_007579.1,3601-3619).
gtgcggacagattcattca

SEQ ID NO: 496909 - DNA, 19 bp, Mus musculus
  siRNA target sequence for Cacna1b (NM_007579.1,3636-3654).
gtacatggattacatcttt

SEQ ID NO: 496910 - DNA, 19 bp, Mus musculus
  siRNA target sequence for Cacna1b (NM_007579.1,3811-3829).
gacatcaataccatcaagt

SEQ ID NO: 496911 - DNA, 19 bp, Mus musculus
  siRNA target sequence for Cacna1b (NM_007579.1,4000-4018).
gggaagttcttttactgta

SEQ ID NO: 496912 - DNA, 19 bp, Mus musculus
  siRNA target sequence for Cacna1b (NM_007579.1,4052-4070).
ggggtcagtatttggatta

SEQ ID NO: 496913 - DNA, 19 bp, Mus musculus
  siRNA target sequence for Cacna1b (NM_007579.1,4053-4071).
gggtcagtatttggattat

SEQ ID NO: 496914 - DNA, 19 bp, Mus musculus
  siRNA target sequence for Cacna1b (NM_007579.1,4055-4073).
gtcagtatttggattatga

SEQ ID NO: 496915 - DNA, 19 bp, Mus musculus
  siRNA target sequence for Cacna1b (NM_007579.1,4057-4075).
cagtatttggattatgaga

SEQ ID NO: 496916 - DNA, 19 bp, Mus musculus
  siRNA target sequence for Cacna1b (NM_007579.1,4100-4118).
ggcagtggaagaaatatga

SEQ ID NO: 496917 - DNA, 19 bp, Mus musculus
  siRNA target sequence for Cacna1b (NM_007579.1,4184-4202).
ggcccatggtgctgaaaca

SEQ ID NO: 496918 - DNA, 19 bp, Mus musculus
  siRNA target sequence for Cacna1b (NM_007579.1,4365-4383).
gtctgaatgcagcttagaa

SEQ ID NO: 496919 - DNA, 19 bp, Mus musculus
  siRNA target sequence for Cacna1b (NM_007579.1,4369-4387).
gaatgcagcttagaaaaga

SEQ ID NO: 496920 - DNA, 19 bp, Mus musculus
  siRNA target sequence for Cacna1b (NM_007579.1,4390-4408).
gagagggcttgcattgatt

SEQ ID NO: 496921 - DNA, 19 bp, Mus musculus
  siRNA target sequence for Cacna1b (NM_007579.1,4436-4454).
ggtacatgcctcaaaacaa

SEQ ID NO: 496922 - DNA, 19 bp, Mus musculus
  siRNA target sequence for Cacna1b (NM_007579.1,4437-4455).
gtacatgcctcaaaacaaa

SEQ ID NO: 496923 - DNA, 19 bp, Mus musculus
  siRNA target sequence for Cacna1b (NM_007579.1,4456-4474).
cagtcgttccagtataaga

SEQ ID NO: 496924 - DNA, 19 bp, Mus musculus
  siRNA target sequence for Cacna1b (NM_007579.1,4458-4476).
gtcgttccagtataagaca

SEQ ID NO: 496925 - DNA, 19 bp, Mus musculus
  siRNA target sequence for Cacna1b (NM_007579.1,4628-4646).
cgatggagtgcatactgaa

SEQ ID NO: 496926 - DNA, 19 bp, Mus musculus
  siRNA target sequence for Cacna1b (NM_007579.1,4655-4673).
cctttggggtattgaacta

SEQ ID NO: 496927 - DNA, 19 bp, Mus musculus
  siRNA target sequence for Cacna1b (NM_007579.1,4660-4678).
ggggtattgaactacttca

SEQ ID NO: 496928 - DNA, 19 bp, Mus musculus
  siRNA target sequence for Cacna1b (NM_007579.1,4717-4735).
ggaagtattactgatattt

SEQ ID NO: 496929 - DNA, 19 bp, Mus musculus
  siRNA target sequence for Cacna1b (NM_007579.1,4976-4994).
gtatcaaccgacacaacaa

SEQ ID NO: 496930 - DNA, 19 bp, Mus musculus
  siRNA target sequence for Cacna1b (NM_007579.1,5124-5142).
gagcgactttgcctatttt

SEQ ID NO: 496931 - DNA, 19 bp, Mus musculus
  siRNA target sequence for Cacna1b (NM_007579.1,5126-5144).
gcgactttgcctattttta

SEQ ID NO: 496932 - DNA, 19 bp, Mus musculus
  siRNA target sequence for Cacna1b (NM_007579.1,5178-5196).
gatgttgaacctctttgtt

SEQ ID NO: 496933 - DNA, 19 bp, Mus musculus
  siRNA target sequence for Cacna1b (NM_007579.1,5256-5274).
ccacttagacgaattcatt

SEQ ID NO: 496934 - DNA, 19 bp, Mus musculus
  siRNA target sequence for Cacna1b (NM_007579.1,5302-5320).
gcgtgtgggcgcatcagtt

SEQ ID NO: 496935 - DNA, 19 bp, Mus musculus
  siRNA target sequence for Cacna1b (NM_007579.1,5303-5321).
cgtgtgggcgcatcagtta

SEQ ID NO: 496936 - DNA, 19 bp, Mus musculus
  siRNA target sequence for Cacna1b (NM_007579.1,5309-5327).
ggcgcatcagttacaatga

SEQ ID NO: 496937 - DNA, 19 bp, Mus musculus
  siRNA target sequence for Cacna1b (NM_007579.1,5311-5329).
cgcatcagttacaatgaca

SEQ ID NO: 496938 - DNA, 19 bp, Mus musculus
  siRNA target sequence for Cacna1b (NM_007579.1,5384-5402).
cggctcgagttgcatacaa

SEQ ID NO: 496939 - DNA, 19 bp, Mus musculus
  siRNA target sequence for Cacna1b (NM_007579.1,5404-5422).
cgcctggttcgcatgaaca

SEQ ID NO: 496940 - DNA, 19 bp, Mus musculus
  siRNA target sequence for Cacna1b (NM_007579.1,5405-5423).
gcctggttcgcatgaacat

SEQ ID NO: 496941 - DNA, 19 bp, Mus musculus
  siRNA target sequence for Cacna1b (NM_007579.1,5418-5436).
gaacatgcccatatccaat

SEQ ID NO: 496942 - DNA, 19 bp, Mus musculus
  siRNA target sequence for Cacna1b (NM_007579.1,5440-5458).
gacatgacggtgcacttta

SEQ ID NO: 496943 - DNA, 19 bp, Mus musculus
  siRNA target sequence for Cacna1b (NM_007579.1,5543-5561).
ctgctctcatgatatttga

SEQ ID NO: 496944 - DNA, 19 bp, Mus musculus
  siRNA target sequence for Cacna1b (NM_007579.1,5545-5563).
gctctcatgatatttgact

SEQ ID NO: 496945 - DNA, 19 bp, Mus musculus
  siRNA target sequence for Cacna1b (NM_007579.1,5693-5711).
gaggagctcgggttttcct

SEQ ID NO: 496946 - DNA, 19 bp, Mus musculus
  siRNA target sequence for Cacna1b (NM_007579.1,5704-5722).
gttttccttcggcaaaaga

SEQ ID NO: 496947 - DNA, 19 bp, Mus musculus
  siRNA target sequence for Cacna1b (NM_007579.1,5739-5757).
caatgggggtgccatacaa

SEQ ID NO: 496948 - DNA, 19 bp, Mus musculus
  siRNA target sequence for Cacna1b (NM_007579.1,5987-6005).
gcctagcggcagaaacaca

SEQ ID NO: 496949 - DNA, 19 bp, Mus musculus
  siRNA target sequence for Cacna1b (NM_007579.1,6895-6913).
gtacccaatggctatcact

SEQ ID NO: 496950 - DNA, 19 bp, Mus musculus
  siRNA target sequence for Camk1 (NM_133926.1,158-176).
ggaagacattagggatatt

SEQ ID NO: 496951 - DNA, 19 bp, Mus musculus
  siRNA target sequence for Camk1 (NM_133926.1,159-177).
gaagacattagggatattt

SEQ ID NO: 496952 - DNA, 19 bp, Mus musculus
  siRNA target sequence for Camk1 (NM_133926.1,315-333).
gagattgccgtcttacaca

SEQ ID NO: 496953 - DNA, 19 bp, Mus musculus
  siRNA target sequence for Camk1 (NM_133926.1,321-339).
gccgtcttacacaagatca

SEQ ID NO: 496954 - DNA, 19 bp, Mus musculus
  siRNA target sequence for Camk1 (NM_133926.1,322-340).
ccgtcttacacaagatcaa

SEQ ID NO: 496955 - DNA, 19 bp, Mus musculus
  siRNA target sequence for Camk1 (NM_133926.1,435-453).
cgaattgtggagaaaggat

SEQ ID NO: 496956 - DNA, 19 bp, Mus musculus
  siRNA target sequence for Camk1 (NM_133926.1,579-597).
gaagactccaaaatcatga

SEQ ID NO: 496957 - DNA, 19 bp, Mus musculus
  siRNA target sequence for Camk1 (NM_133926.1,722-740).
ctggtccataggagtcatt

SEQ ID NO: 496958 - DNA, 19 bp, Mus musculus
  siRNA target sequence for Camk1 (NM_133926.1,760-778).
gctacccacccttttatga

SEQ ID NO: 496959 - DNA, 19 bp, Mus musculus
  siRNA target sequence for Camk1 (NM_133926.1,790-808).
ccaaactctttgaacagat

SEQ ID NO: 496960 - DNA, 19 bp, Mus musculus
  siRNA target sequence for Camk1 (NM_133926.1,791-809).
caaactctttgaacagatt

SEQ ID NO: 496961 - DNA, 19 bp, Mus musculus
  siRNA target sequence for Camk1 (NM_133926.1,897-915).
gacccggagaagaggttta

SEQ ID NO: 496962 - DNA, 19 bp, Mus musculus
  siRNA target sequence for Camk1 (NM_133926.1,958-976).
cagctctggataagaatat

SEQ ID NO: 496963 - DNA, 19 bp, Mus musculus
  siRNA target sequence for Camk1 (NM_133926.1,961-979).
ctctggataagaatatcca

SEQ ID NO: 496964 - DNA, 19 bp, Mus musculus
  siRNA target sequence for Camk1 (NM_133926.1,985-1003).
cagtgagcgagcagatcaa

SEQ ID NO: 496965 - DNA, 19 bp, Mus musculus
  siRNA target sequence for Camk1g (NM_144817.1,194-212).
gtgttcctggtgaagcaaa

SEQ ID NO: 496966 - DNA, 19 bp, Mus musculus
  siRNA target sequence for Camk1g (NM_144817.1,287-305).
gagatcgctgtgttgaaaa

SEQ ID NO: 496967 - DNA, 19 bp, Mus musculus
  siRNA target sequence for Camk1g (NM_144817.1,469-487).
gtctgcggtgaaatacctt

SEQ ID NO: 496968 - DNA, 19 bp, Mus musculus
  siRNA target sequence for Camk1g (NM_144817.1,474-492).
cggtgaaataccttcatga

SEQ ID NO: 496969 - DNA, 19 bp, Mus musculus
  siRNA target sequence for Camk1g (NM_144817.1,696-714).
ccattggtgtcatcacata

SEQ ID NO: 496970 - DNA, 19 bp, Mus musculus
  siRNA target sequence for Camk1g (NM_144817.1,755-773).
gaatcaaagctttttgaga

SEQ ID NO: 496971 - DNA, 19 bp, Mus musculus
  siRNA target sequence for Camk1g (NM_144817.1,785-803).
ggttactacgagtttgagt

SEQ ID NO: 496972 - DNA, 19 bp, Mus musculus
  siRNA target sequence for Camk1g (NM_144817.1,930-948).
ccctgcaccgggacatcta

SEQ ID NO: 496973 - DNA, 19 bp, Mus musculus
  siRNA target sequence for Camk1g (NM_144817.1,935-953).
caccgggacatctatccat

SEQ ID NO: 496974 - DNA, 19 bp, Mus musculus
  siRNA target sequence for Camk1g (NM_144817.1,1341-1359).
gctgctccagctgtctaaa

SEQ ID NO: 496975 - DNA, 19 bp, Mus musculus
  siRNA target sequence for Camk1g (NM_144817.1,1342-1360).
ctgctccagctgtctaaat

SEQ ID NO: 496976 - DNA, 19 bp, Mus musculus
  siRNA target sequence for Camk1g (NM_144817.1,1344-1362).
gctccagctgtctaaatat

SEQ ID NO: 496977 - DNA, 19 bp, Mus musculus
  siRNA target sequence for Camk1g (NM_144817.1,1497-1515).
ctggggtgtgtctcgttat

SEQ ID NO: 496978 - DNA, 19 bp, Mus musculus
  siRNA target sequence for Camk1g (NM_144817.1,1499-1517).
ggggtgtgtctcgttatgt

SEQ ID NO: 496979 - DNA, 19 bp, Mus musculus
  siRNA target sequence for Camk2a (NM_009792.1,338-356).
gttgctaaccctctacttt

SEQ ID NO: 496980 - DNA, 19 bp, Mus musculus
  siRNA target sequence for Camk2a (NM_009792.1,421-439).
ccagttccagcgttcagtt

SEQ ID NO: 496981 - DNA, 19 bp, Mus musculus
  siRNA target sequence for Camk2a (NM_009792.1,424-442).
gttccagcgttcagttaat

SEQ ID NO: 496982 - DNA, 19 bp, Mus musculus
  siRNA target sequence for Camk2a (NM_009792.1,427-445).
ccagcgttcagttaatgga

SEQ ID NO: 496983 - DNA, 19 bp, Mus musculus
  siRNA target sequence for Camk2a (NM_009792.1,428-446).
cagcgttcagttaatggaa

SEQ ID NO: 496984 - DNA, 19 bp, Mus musculus
  siRNA target sequence for Camk2a (NM_009792.1,432-450).
gttcagttaatggaatctt

SEQ ID NO: 496985 - DNA, 19 bp, Mus musculus
  siRNA target sequence for Camk2a (NM_009792.1,492-510).
gtgcgcaaacaggaaatta

SEQ ID NO: 496986 - DNA, 19 bp, Mus musculus
  siRNA target sequence for Camk2a (NM_009792.1,575-593).
gtgcgaccctggaatgaca

SEQ ID NO: 496987 - DNA, 19 bp, Mus musculus
  siRNA target sequence for Camk2a (NM_009792.1,635-653).
ggactttcatcgattctat

SEQ ID NO: 496988 - DNA, 19 bp, Mus musculus
  siRNA target sequence for Camk2a (NM_009792.1,638-656).
ctttcatcgattctatttt

SEQ ID NO: 496989 - DNA, 19 bp, Mus musculus
  siRNA target sequence for Camk2a (NM_177407.2,168-186).
cccgattcacagaagagta

SEQ ID NO: 496990 - DNA, 19 bp, Mus musculus
  siRNA target sequence for Camk2a (NM_177407.2,332-350).
cgcatctgccgcttgttga

SEQ ID NO: 496991 - DNA, 19 bp, Mus musculus
  siRNA target sequence for Camk2a (NM_177407.2,392-410).
gaggggcaccactacctta

SEQ ID NO: 496992 - DNA, 19 bp, Mus musculus
  siRNA target sequence for Camk2a (NM_177407.2,395-413).
gggcaccactaccttatct

SEQ ID NO: 496993 - DNA, 19 bp, Mus musculus
  siRNA target sequence for Camk2a (NM_177407.2,396-414).
ggcaccactaccttatctt

SEQ ID NO: 496994 - DNA, 19 bp, Mus musculus
  siRNA target sequence for Camk2a (NM_177407.2,879-897).
ccaaggatctgatcaataa

SEQ ID NO: 496995 - DNA, 19 bp, Mus musculus
  siRNA target sequence for Camk2a (NM_177407.2,1121-1139).
gatggtgtgaaggaatctt

SEQ ID NO: 496996 - DNA, 19 bp, Mus musculus
  siRNA target sequence for Camk2b (NM_007595.2,336-354).
ccaagatcattaataccaa

SEQ ID NO: 496997 - DNA, 19 bp, Mus musculus
  siRNA target sequence for Camk2b (NM_007595.2,412-430).
gctgaagcattccaacatt

SEQ ID NO: 496998 - DNA, 19 bp, Mus musculus
  siRNA target sequence for Camk2b (NM_007595.2,889-907).
caaggctggggcgtatgat

SEQ ID NO: 496999 - DNA, 19 bp, Mus musculus
  siRNA target sequence for Camk2b (NM_007595.2,1229-1247).
caagccaagagtttactca

SEQ ID NO: 497000 - DNA, 19 bp, Mus musculus
  siRNA target sequence for Camk2b (NM_007595.2,1233-1251).
ccaagagtttactcaacaa

SEQ ID NO: 497001 - DNA, 19 bp, Mus musculus
  siRNA target sequence for Camk2b (NM_007595.2,1237-1255).
gagtttactcaacaagaaa

SEQ ID NO: 497002 - DNA, 19 bp, Mus musculus
  siRNA target sequence for Camk2b (NM_007595.2,1347-1365).
ctcaaaccaccgttatcca

SEQ ID NO: 497003 - DNA, 19 bp, Mus musculus
  siRNA target sequence for Camk2b (NM_007595.2,1371-1389).
cagtggacgggattaagga

SEQ ID NO: 497004 - DNA, 19 bp, Mus musculus
  siRNA target sequence for Camk2b (NM_007595.2,1474-1492).
cattgaggccgtcaacaat

SEQ ID NO: 497005 - DNA, 19 bp, Mus musculus
  siRNA target sequence for Camk2b (NM_007595.2,1502-1520).
gaggcctatgcgaaaatct

SEQ ID NO: 497006 - DNA, 19 bp, Mus musculus
  siRNA target sequence for Camk2b (NM_007595.2,1504-1522).
ggcctatgcgaaaatctgt

SEQ ID NO: 497007 - DNA, 19 bp, Mus musculus
  siRNA target sequence for Camk2b (NM_007595.2,1565-1583).
ctggtcgaagggatggatt

SEQ ID NO: 497008 - DNA, 19 bp, Mus musculus
  siRNA target sequence for Camk2b (NM_007595.2,1788-1806).
ggcagaatgtacatttcca

SEQ ID NO: 497009 - DNA, 19 bp, Mus musculus
  siRNA target sequence for Camk2d (NM_023813.2,298-316).
gaatctgccgtctcttgaa

SEQ ID NO: 497010 - DNA, 19 bp, Mus musculus
  siRNA target sequence for Camk2d (NM_023813.2,332-350).
gagacttcacgacagtata

SEQ ID NO: 497011 - DNA, 19 bp, Mus musculus
  siRNA target sequence for Camk2d (NM_023813.2,354-372).
gaggagggcttccattact

SEQ ID NO: 497012 - DNA, 19 bp, Mus musculus
  siRNA target sequence for Camk2d (NM_023813.2,413-431).
catagtggcaagagaatat

SEQ ID NO: 497013 - DNA, 19 bp, Mus musculus
  siRNA target sequence for Camk2d (NM_023813.2,457-475).
gtatacaacagattctaga

SEQ ID NO: 497014 - DNA, 19 bp, Mus musculus
  siRNA target sequence for Camk2d (NM_023813.2,584-602).
cggcttagccatagaagtt

SEQ ID NO: 497015 - DNA, 19 bp, Mus musculus
  siRNA target sequence for Camk2d (NM_023813.2,586-604).
gcttagccatagaagttca

SEQ ID NO: 497016 - DNA, 19 bp, Mus musculus
  siRNA target sequence for Camk2d (NM_023813.2,636-654).
ggcacacctgggtatcttt

SEQ ID NO: 497017 - DNA, 19 bp, Mus musculus
  siRNA target sequence for Camk2d (NM_023813.2,665-683).
cctgcgtaaagatccttat

SEQ ID NO: 497018 - DNA, 19 bp, Mus musculus
  siRNA target sequence for Camk2d (NM_023813.2,668-686).
gcgtaaagatccttatgga

SEQ ID NO: 497019 - DNA, 19 bp, Mus musculus
  siRNA target sequence for Camk2d (NM_023813.2,669-687).
cgtaaagatccttatggaa

SEQ ID NO: 497020 - DNA, 19 bp, Mus musculus
  siRNA target sequence for Camk2d (NM_023813.2,709-727).
gcggtgtcatcctctacat

SEQ ID NO: 497021 - DNA, 19 bp, Mus musculus
  siRNA target sequence for Camk2d (NM_023813.2,788-806).
caaggccggagcttacgat

SEQ ID NO: 497022 - DNA, 19 bp, Mus musculus
  siRNA target sequence for Camk2d (NM_023813.2,791-809).
ggccggagcttacgatttt

SEQ ID NO: 497023 - DNA, 19 bp, Mus musculus
  siRNA target sequence for Camk2d (NM_023813.2,972-990).
gtagactgcttgaagaaat

SEQ ID NO: 497024 - DNA, 19 bp, Mus musculus
  siRNA target sequence for Camk2d (NM_023813.2,980-998).
cttgaagaaatttaatgct

SEQ ID NO: 497025 - DNA, 19 bp, Mus musculus
  siRNA target sequence for Camk2d (NM_023813.2,1034-1052).
gctggctacgagaaatttt

SEQ ID NO: 497026 - DNA, 19 bp, Mus musculus
  siRNA target sequence for Camk2d (NM_023813.2,1035-1053).
ctggctacgagaaattttt

SEQ ID NO: 497027 - DNA, 19 bp, Mus musculus
  siRNA target sequence for Camk2d (NM_023813.2,1211-1229).
ggcttacacaaaaatctgt

SEQ ID NO: 497028 - DNA, 19 bp, Mus musculus
  siRNA target sequence for Camk2d (NM_023813.2,1321-1339).
ccaaaagcaataaaccaat

SEQ ID NO: 497029 - DNA, 19 bp, Mus musculus
  siRNA target sequence for Camk2d (NM_023813.2,1495-1513).
ggcagaatgttcactttca

SEQ ID NO: 497030 - DNA, 19 bp, Mus musculus
  siRNA target sequence for Camk2d (NM_023813.2,1527-1545).
cccacagtacccatcaact

SEQ ID NO: 497031 - DNA, 19 bp, Mus musculus
  siRNA target sequence for Camk2g (NM_178597.2,99-117).
ccgacgactaccagctttt

SEQ ID NO: 497032 - DNA, 19 bp, Mus musculus
  siRNA target sequence for Camk2g (NM_178597.2,151-169).
ccggaggtgtgtaaagaaa

SEQ ID NO: 497033 - DNA, 19 bp, Mus musculus
  siRNA target sequence for Camk2g (NM_178597.2,152-170).
cggaggtgtgtaaagaaaa

SEQ ID NO: 497034 - DNA, 19 bp, Mus musculus
  siRNA target sequence for Camk2g (NM_178597.2,191-209).
gcaaaaatcatcaatacca

SEQ ID NO: 497035 - DNA, 19 bp, Mus musculus
  siRNA target sequence for Camk2g (NM_178597.2,223-241).
ccgagatcatcagaaacta

SEQ ID NO: 497036 - DNA, 19 bp, Mus musculus
  siRNA target sequence for Camk2g (NM_178597.2,255-273).
ggatatgccgacttctgaa

SEQ ID NO: 497037 - DNA, 19 bp, Mus musculus
  siRNA target sequence for Camk2g (NM_178597.2,256-274).
gatatgccgacttctgaaa

SEQ ID NO: 497038 - DNA, 19 bp, Mus musculus
  siRNA target sequence for Camk2g (NM_178597.2,329-347).
ctcgtgtttgaccttgtta

SEQ ID NO: 497039 - DNA, 19 bp, Mus musculus
  siRNA target sequence for Camk2g (NM_178597.2,348-366).
ccggaggggagttgtttga

SEQ ID NO: 497040 - DNA, 19 bp, Mus musculus
  siRNA target sequence for Camk2g (NM_178597.2,349-367).
cggaggggagttgtttgaa

SEQ ID NO: 497041 - DNA, 19 bp, Mus musculus
  siRNA target sequence for Camk2g (NM_178597.2,351-369).
gaggggagttgtttgaaga

SEQ ID NO: 497042 - DNA, 19 bp, Mus musculus
  siRNA target sequence for Camk2g (NM_178597.2,422-440).
cagatcctggagagtgtta

SEQ ID NO: 497043 - DNA, 19 bp, Mus musculus
  siRNA target sequence for Camk2g (NM_178597.2,490-508).
cttgctgctggcgagtaaa

SEQ ID NO: 497044 - DNA, 19 bp, Mus musculus
  siRNA target sequence for Camk2g (NM_178597.2,522-540).
cggtcaagctagctgattt

SEQ ID NO: 497045 - DNA, 19 bp, Mus musculus
  siRNA target sequence for Camk2g (NM_178597.2,591-609).
ccggcaccccaggttactt

SEQ ID NO: 497046 - DNA, 19 bp, Mus musculus
  siRNA target sequence for Camk2g (NM_178597.2,593-611).
ggcaccccaggttacttgt

SEQ ID NO: 497047 - DNA, 19 bp, Mus musculus
  siRNA target sequence for Camk2g (NM_178597.2,797-815).
gaagctaagaacttgatca

SEQ ID NO: 497048 - DNA, 19 bp, Mus musculus
  siRNA target sequence for Camk2g (NM_178597.2,1013-1031).
gctgccaaaagcctattga

SEQ ID NO: 497049 - DNA, 19 bp, Mus musculus
  siRNA target sequence for Camk2g (NM_178597.2,1017-1035).
ccaaaagcctattgaacaa

SEQ ID NO: 497050 - DNA, 19 bp, Mus musculus
  siRNA target sequence for Camk4 (NM_009793.1,319-337).
ctctcacacccgaacatca

SEQ ID NO: 497051 - DNA, 19 bp, Mus musculus
  siRNA target sequence for Camk4 (NM_009793.1,487-505).
gttgcttacctgcatgaaa

SEQ ID NO: 497052 - DNA, 19 bp, Mus musculus
  siRNA target sequence for Camk4 (NM_009793.1,562-580).
cctgatgcacccctcaaaa

SEQ ID NO: 497053 - DNA, 19 bp, Mus musculus
  siRNA target sequence for Camk4 (NM_009793.1,599-617).
caaaaattgtggaacatca

SEQ ID NO: 497054 - DNA, 19 bp, Mus musculus
  siRNA target sequence for Camk4 (NM_009793.1,743-761).
gatttgaaccattctatga

SEQ ID NO: 497055 - DNA, 19 bp, Mus musculus
  siRNA target sequence for Camk4 (NM_009793.1,769-787).
ggtgatcagttcatgttca

SEQ ID NO: 497056 - DNA, 19 bp, Mus musculus
  siRNA target sequence for Camk4 (NM_009793.1,777-795).
gttcatgttcaggagaatt

SEQ ID NO: 497057 - DNA, 19 bp, Mus musculus
  siRNA target sequence for Camk4 (NM_009793.1,788-806).
ggagaattctgaattgtga

SEQ ID NO: 497058 - DNA, 19 bp, Mus musculus
  siRNA target sequence for Camk4 (NM_009793.1,821-839).
ccccctggtgggatgaagt

SEQ ID NO: 497059 - DNA, 19 bp, Mus musculus
  siRNA target sequence for Camk4 (NM_009793.1,827-845).
ggtgggatgaagtgtcttt

SEQ ID NO: 497060 - DNA, 19 bp, Mus musculus
  siRNA target sequence for Camk4 (NM_009793.1,830-848).
gggatgaagtgtctttaaa

SEQ ID NO: 497061 - DNA, 19 bp, Mus musculus
  siRNA target sequence for Camk4 (NM_009793.1,924-942).
cccatgggtcacaggtaaa

SEQ ID NO: 497062 - DNA, 19 bp, Mus musculus
  siRNA target sequence for Camk4 (NM_009793.1,966-984).
cactgctcagaagaaactt

SEQ ID NO: 497063 - DNA, 19 bp, Mus musculus
  siRNA target sequence for Camk4 (NM_009793.1,1245-1263).
gaaagatgcaggtgtaaaa

SEQ ID NO: 497064 - DNA, 19 bp, Mus musculus
  siRNA target sequence for Camkk1 (NM_018883.1,548-566).
ggcctacaacgaaagtgaa

SEQ ID NO: 497065 - DNA, 19 bp, Mus musculus
  siRNA target sequence for Camkk1 (NM_018883.1,575-593).
ctatgcaatgaaagttctt

SEQ ID NO: 497066 - DNA, 19 bp, Mus musculus
  siRNA target sequence for Camkk1 (NM_018883.1,731-749).
gctggaccacgtgaatgta

SEQ ID NO: 497067 - DNA, 19 bp, Mus musculus
  siRNA target sequence for Camkk1 (NM_018883.1,780-798).
gctgaagacaacctctatt

SEQ ID NO: 497068 - DNA, 19 bp, Mus musculus
  siRNA target sequence for Camkk1 (NM_018883.1,1010-1028).
ccagtttgaggggaatgat

SEQ ID NO: 497069 - DNA, 19 bp, Mus musculus
  siRNA target sequence for Camkk1 (NM_018883.1,1071-1089).
ccggaggccatttctgatt

SEQ ID NO: 497070 - DNA, 19 bp, Mus musculus
  siRNA target sequence for Camkk1 (NM_018883.1,1130-1148).
cactggggtcacgctatat

SEQ ID NO: 497071 - DNA, 19 bp, Mus musculus
  siRNA target sequence for Camkk1 (NM_018883.1,1134-1152).
ggggtcacgctatattgct

SEQ ID NO: 497072 - DNA, 19 bp, Mus musculus
  siRNA target sequence for Camkk1 (NM_018883.1,1135-1153).
gggtcacgctatattgctt

SEQ ID NO: 497073 - DNA, 19 bp, Mus musculus
  siRNA target sequence for Camkk1 (NM_018883.1,1136-1154).
ggtcacgctatattgcttt

SEQ ID NO: 497074 - DNA, 19 bp, Mus musculus
  siRNA target sequence for Camkk1 (NM_018883.1,1162-1180).
ggaagtgcccgttcattga

SEQ ID NO: 497075 - DNA, 19 bp, Mus musculus
  siRNA target sequence for Camkk1 (NM_018883.1,1163-1181).
gaagtgcccgttcattgat

SEQ ID NO: 497076 - DNA, 19 bp, Mus musculus
  siRNA target sequence for Camkk1 (NM_018883.1,1195-1213).
ccctgcaccgtaagatcaa

SEQ ID NO: 497077 - DNA, 19 bp, Mus musculus
  siRNA target sequence for Camkk1 (NM_018883.1,1455-1473).
gtgatcctggtcaagtcta

SEQ ID NO: 497078 - DNA, 19 bp, Mus musculus
  siRNA target sequence for Camkk1 (NM_018883.1,1475-1493).
gctgagaaagcgttccttt

SEQ ID NO: 497079 - DNA, 19 bp, Mus musculus
  siRNA target sequence for Camkk2 (NM_145358.1,159-177).
cggggactctcatccttaa

SEQ ID NO: 497080 - DNA, 19 bp, Mus musculus
  siRNA target sequence for Camkk2 (NM_145358.1,161-179).
gggactctcatccttaagt

SEQ ID NO: 497081 - DNA, 19 bp, Mus musculus
  siRNA target sequence for Camkk2 (NM_145358.1,526-544).
gcgtgcagctgaatcagta

SEQ ID NO: 497082 - DNA, 19 bp, Mus musculus
  siRNA target sequence for Camkk2 (NM_145358.1,571-589).
gctcctatggtgttgtcaa

SEQ ID NO: 497083 - DNA, 19 bp, Mus musculus
  siRNA target sequence for Camkk2 (NM_145358.1,616-634).
cttattacgcaatgaaagt

SEQ ID NO: 497084 - DNA, 19 bp, Mus musculus
  siRNA target sequence for Camkk2 (NM_145358.1,823-841).
ctaatgaggaccatctgta

SEQ ID NO: 497085 - DNA, 19 bp, Mus musculus
  siRNA target sequence for Camkk2 (NM_145358.1,946-964).
gcatagagtacttgcatta

SEQ ID NO: 497086 - DNA, 19 bp, Mus musculus
  siRNA target sequence for Camkk2 (NM_145358.1,1012-1030).
gggaagacgggcacatcaa

SEQ ID NO: 497087 - DNA, 19 bp, Mus musculus
  siRNA target sequence for Camkk2 (NM_145358.1,1036-1054).
ccgacttcggtgtaagcaa

SEQ ID NO: 497088 - DNA, 19 bp, Mus musculus
  siRNA target sequence for Camkk2 (NM_145358.1,1045-1063).
gtgtaagcaacgagttcaa

SEQ ID NO: 497089 - DNA, 19 bp, Mus musculus
  siRNA target sequence for Camkk2 (NM_145358.1,1071-1089).
gacgccttgctgtctaaca

SEQ ID NO: 497090 - DNA, 19 bp, Mus musculus
  siRNA target sequence for Camkk2 (NM_145358.1,1240-1258).
gtttgcacagtaagatcaa

SEQ ID NO: 497091 - DNA, 19 bp, Mus musculus
  siRNA target sequence for Camkk2 (NM_145358.1,1297-1315).
ccgaagacttgaaagatct

SEQ ID NO: 497092 - DNA, 19 bp, Mus musculus
  siRNA target sequence for Camkk2 (NM_145358.1,1321-1339).
ctcggatgttggacaaaaa

SEQ ID NO: 497093 - DNA, 19 bp, Mus musculus
  siRNA target sequence for Camkk2 (NM_145358.1,1351-1369).
ggattgtggtgcctgaaat

SEQ ID NO: 497094 - DNA, 19 bp, Mus musculus
  siRNA target sequence for Camkk2 (NM_145358.1,1460-1478).
ggtcgagaattcagtcaaa

SEQ ID NO: 497095 - DNA, 19 bp, Mus musculus
  siRNA target sequence for Camkk2 (NM_145358.1,1464-1482).
gagaattcagtcaaacaca

SEQ ID NO: 497096 - DNA, 19 bp, Mus musculus
  siRNA target sequence for Camkk2 (NM_145358.1,1505-1523).
cctggtaaagaccatgatt

SEQ ID NO: 497097 - DNA, 19 bp, Mus musculus
  siRNA target sequence for Camkk2 (NM_145358.1,1509-1527).
gtaaagaccatgattcgaa

SEQ ID NO: 497098 - DNA, 19 bp, Mus musculus
  siRNA target sequence for Card15 (NM_145857.1,368-386).
ggccaacagtcataccttt

SEQ ID NO: 497099 - DNA, 19 bp, Mus musculus
  siRNA target sequence for Card15 (NM_145857.1,371-389).
caacagtcatacctttgaa

SEQ ID NO: 497100 - DNA, 19 bp, Mus musculus
  siRNA target sequence for Card15 (NM_145857.1,376-394).
gtcatacctttgaactgta

SEQ ID NO: 497101 - DNA, 19 bp, Mus musculus
  siRNA target sequence for Card15 (NM_145857.1,687-705).
gagtgtcagaagttcatat

SEQ ID NO: 497102 - DNA, 19 bp, Mus musculus
  siRNA target sequence for Card15 (NM_145857.1,736-754).
ctcgcttcctcagtactta

SEQ ID NO: 497103 - DNA, 19 bp, Mus musculus
  siRNA target sequence for Card15 (NM_145857.1,740-758).
cttcctcagtacttacgat

SEQ ID NO: 497104 - DNA, 19 bp, Mus musculus
  siRNA target sequence for Card15 (NM_145857.1,771-789).
ctttgcctggaggatatat

SEQ ID NO: 497105 - DNA, 19 bp, Mus musculus
  siRNA target sequence for Card15 (NM_145857.1,867-885).
ctggaggacctctttgata

SEQ ID NO: 497106 - DNA, 19 bp, Mus musculus
  siRNA target sequence for Card15 (NM_145857.1,997-1015).
gcttccaggagtttctctt

SEQ ID NO: 497107 - DNA, 19 bp, Mus musculus
  siRNA target sequence for Card15 (NM_145857.1,1146-1164).
cctgaccgtgtcctgttaa

SEQ ID NO: 497108 - DNA, 19 bp, Mus musculus
  siRNA target sequence for Card15 (NM_145857.1,1149-1167).
gaccgtgtcctgttaacct

SEQ ID NO: 497109 - DNA, 19 bp, Mus musculus
  siRNA target sequence for Card15 (NM_145857.1,1173-1191).
ggcttggacgagttcaagt

SEQ ID NO: 497110 - DNA, 19 bp, Mus musculus
  siRNA target sequence for Card15 (NM_145857.1,1174-1192).
gcttggacgagttcaagtt

SEQ ID NO: 497111 - DNA, 19 bp, Mus musculus
  siRNA target sequence for Card15 (NM_145857.1,1211-1229).
gcgccactgctctccaatt

SEQ ID NO: 497112 - DNA, 19 bp, Mus musculus
  siRNA target sequence for Card15 (NM_145857.1,1351-1369).
gcacagagttgcaactgaa

SEQ ID NO: 497113 - DNA, 19 bp, Mus musculus
  siRNA target sequence for Card15 (NM_145857.1,1558-1576).
caaccagcacggacatgta

SEQ ID NO: 497114 - DNA, 19 bp, Mus musculus
  siRNA target sequence for Card15 (NM_145857.1,1790-1808).
ggtacgtgcccaaagtagt

SEQ ID NO: 497115 - DNA, 19 bp, Mus musculus
  siRNA target sequence for Card15 (NM_145857.1,1830-1848).
ctggagttcctgcacatta

SEQ ID NO: 497116 - DNA, 19 bp, Mus musculus
  siRNA target sequence for Card15 (NM_145857.1,1833-1851).
gagttcctgcacattacct

SEQ ID NO: 497117 - DNA, 19 bp, Mus musculus
  siRNA target sequence for Card15 (NM_145857.1,1858-1876).
gcttttttgccgctttcta

SEQ ID NO: 497118 - DNA, 19 bp, Mus musculus
  siRNA target sequence for Card15 (NM_145857.1,2037-2055).
ccacacaacctgcaaatca

SEQ ID NO: 497119 - DNA, 19 bp, Mus musculus
  siRNA target sequence for Card15 (NM_145857.1,2178-2196).
ctccgcgagcacttccatt

SEQ ID NO: 497120 - DNA, 19 bp, Mus musculus
  siRNA target sequence for Card15 (NM_145857.1,2182-2200).
gcgagcacttccattccat

SEQ ID NO: 497121 - DNA, 19 bp, Mus musculus
  siRNA target sequence for Card15 (NM_145857.1,2416-2434).
ccctacagctggattacaa

SEQ ID NO: 497122 - DNA, 19 bp, Mus musculus
  siRNA target sequence for Card15 (NM_145857.1,2432-2450).
caactctgtgggagatgtt

SEQ ID NO: 497123 - DNA, 19 bp, Mus musculus
  siRNA target sequence for Card15 (NM_145857.1,2493-2511).
ctgtatttgcgagataaca

SEQ ID NO: 497124 - DNA, 19 bp, Mus musculus
  siRNA target sequence for Card15 (NM_145857.1,2495-2513).
gtatttgcgagataacaat

SEQ ID NO: 497125 - DNA, 19 bp, Mus musculus
  siRNA target sequence for Card15 (NM_145857.1,2501-2519).
gcgagataacaatatctca

SEQ ID NO: 497126 - DNA, 19 bp, Mus musculus
  siRNA target sequence for Card15 (NM_145857.1,2577-2595).
ctagctctcttcaacaaca

SEQ ID NO: 497127 - DNA, 19 bp, Mus musculus
  siRNA target sequence for Card15 (NM_145857.1,2640-2658).
cacaagcagaacttcttgt

SEQ ID NO: 497128 - DNA, 19 bp, Mus musculus
  siRNA target sequence for Card15 (NM_145857.1,2806-2824).
ccgaccaccagaacctaaa

SEQ ID NO: 497129 - DNA, 19 bp, Mus musculus
  siRNA target sequence for Card15 (NM_145857.1,2834-2852).
cctggtaggaaacaacatt

SEQ ID NO: 497130 - DNA, 19 bp, Mus musculus
  siRNA target sequence for Card15 (NM_145857.1,2919-2937).
ctagaggaaaaccatatct

SEQ ID NO: 497131 - DNA, 19 bp, Mus musculus
  siRNA target sequence for Card15 (NM_145857.1,2936-2954).
ctgtgacgaaggggtatat

SEQ ID NO: 497132 - DNA, 19 bp, Mus musculus
  siRNA target sequence for Card15 (NM_145857.1,2970-2988).
ctcaagagaaattcaactt

SEQ ID NO: 497133 - DNA, 19 bp, Mus musculus
  siRNA target sequence for Card15 (NM_145857.1,3085-3103).
ggcttcgagggaacacatt

SEQ ID NO: 497134 - DNA, 19 bp, Mus musculus
  siRNA target sequence for Card15 (NM_145857.1,3087-3105).
cttcgagggaacacattct

SEQ ID NO: 497135 - DNA, 19 bp, Mus musculus
  siRNA target sequence for Card15 (NM_145857.1,3090-3108).
cgagggaacacattctctt

SEQ ID NO: 497136 - DNA, 19 bp, Mus musculus
  siRNA target sequence for Card15 (NM_145857.1,3136-3154).
gggacgccagactcttgtt

SEQ ID NO: 497137 - DNA, 19 bp, Mus musculus
  siRNA target sequence for Card15 (NM_145857.1,3138-3156).
gacgccagactcttgttgt

SEQ ID NO: 497138 - DNA, 19 bp, Mus musculus
  siRNA target sequence for Card4 (NM_172729.1,335-353).
ggttgtcactcccacatta

SEQ ID NO: 497139 - DNA, 19 bp, Mus musculus
  siRNA target sequence for Card4 (NM_172729.1,486-504).
ctgacaaggtccgaaagat

SEQ ID NO: 497140 - DNA, 19 bp, Mus musculus
  siRNA target sequence for Card4 (NM_172729.1,629-647).
cagctcattcggaccaaaa

SEQ ID NO: 497141 - DNA, 19 bp, Mus musculus
  siRNA target sequence for Card4 (NM_172729.1,631-649).
gctcattcggaccaaaact

SEQ ID NO: 497142 - DNA, 19 bp, Mus musculus
  siRNA target sequence for Card4 (NM_172729.1,643-661).
caaaactatcgtcaatact

SEQ ID NO: 497143 - DNA, 19 bp, Mus musculus
  siRNA target sequence for Card4 (NM_172729.1,662-680).
gacccagtaagcaggtata

SEQ ID NO: 497144 - DNA, 19 bp, Mus musculus
  siRNA target sequence for Card4 (NM_172729.1,787-805).
gctggtaggcttcaacaat

SEQ ID NO: 497145 - DNA, 19 bp, Mus musculus
  siRNA target sequence for Card4 (NM_172729.1,791-809).
gtaggcttcaacaatgaaa

SEQ ID NO: 497146 - DNA, 19 bp, Mus musculus
  siRNA target sequence for Card4 (NM_172729.1,1552-1570).
gaccctgaccgatgtcttt

SEQ ID NO: 497147 - DNA, 19 bp, Mus musculus
  siRNA target sequence for Card4 (NM_172729.1,1817-1835).
cagggccagtcttacgaat

SEQ ID NO: 497148 - DNA, 19 bp, Mus musculus
  siRNA target sequence for Card4 (NM_172729.1,1819-1837).
gggccagtcttacgaattt

SEQ ID NO: 497149 - DNA, 19 bp, Mus musculus
  siRNA target sequence for Card4 (NM_172729.1,1820-1838).
ggccagtcttacgaatttt

SEQ ID NO: 497150 - DNA, 19 bp, Mus musculus
  siRNA target sequence for Card4 (NM_172729.1,1821-1839).
gccagtcttacgaattttt

SEQ ID NO: 497151 - DNA, 19 bp, Mus musculus
  siRNA target sequence for Card4 (NM_172729.1,2172-2190).
gcctgcgctcctacttgaa

SEQ ID NO: 497152 - DNA, 19 bp, Mus musculus
  siRNA target sequence for Card4 (NM_172729.1,2254-2272).
gatgctgcgctgcatctat

SEQ ID NO: 497153 - DNA, 19 bp, Mus musculus
  siRNA target sequence for Card4 (NM_172729.1,2330-2348).
ctcaagctggccttttgca

SEQ ID NO: 497154 - DNA, 19 bp, Mus musculus
  siRNA target sequence for Card4 (NM_172729.1,2456-2474).
gagctgcagccttgcttta

SEQ ID NO: 497155 - DNA, 19 bp, Mus musculus
  siRNA target sequence for Card4 (NM_172729.1,2476-2494).
ccgtctcacggttatcaga

SEQ ID NO: 497156 - DNA, 19 bp, Mus musculus
  siRNA target sequence for Card4 (NM_172729.1,2523-2541).
gggtgaaggtgctatgtga

SEQ ID NO: 497157 - DNA, 19 bp, Mus musculus
  siRNA target sequence for Card4 (NM_172729.1,2613-2631).
ggtatgtggcccaaatcct

SEQ ID NO: 497158 - DNA, 19 bp, Mus musculus
  siRNA target sequence for Card4 (NM_172729.1,2724-2742).
gcacctccatcgttgatgt

SEQ ID NO: 497159 - DNA, 19 bp, Mus musculus
  siRNA target sequence for Card4 (NM_172729.1,2725-2743).
cacctccatcgttgatgtt

SEQ ID NO: 497160 - DNA, 19 bp, Mus musculus
  siRNA target sequence for Card4 (NM_172729.1,2744-2762).
gggatgtggggtaatcaga

SEQ ID NO: 497161 - DNA, 19 bp, Mus musculus
  siRNA target sequence for Card4 (NM_172729.1,2745-2763).
ggatgtggggtaatcagat

SEQ ID NO: 497162 - DNA, 19 bp, Mus musculus
  siRNA target sequence for Card4 (NM_172729.1,2784-2802).
ccttcgcagaggcattgaa

SEQ ID NO: 497163 - DNA, 19 bp, Mus musculus
  siRNA target sequence for Card4 (NM_172729.1,2820-2838).
ccactctcagtcttgcatt

SEQ ID NO: 497164 - DNA, 19 bp, Mus musculus
  siRNA target sequence for Card4 (NM_172729.1,2823-2841).
ctctcagtcttgcattcaa

SEQ ID NO: 497165 - DNA, 19 bp, Mus musculus
  siRNA target sequence for Card4 (NM_172729.1,2906-2924).
gtaatctggctgaccaaaa

SEQ ID NO: 497166 - DNA, 19 bp, Mus musculus
  siRNA target sequence for Card4 (NM_172729.1,2977-2995).
ccagacgctacggcattta

SEQ ID NO: 497167 - DNA, 19 bp, Mus musculus
  siRNA target sequence for Card4 (NM_172729.1,2978-2996).
cagacgctacggcatttat

SEQ ID NO: 497168 - DNA, 19 bp, Mus musculus
  siRNA target sequence for Card4 (NM_172729.1,3066-3084).
ccataacagagatttgtct

SEQ ID NO: 497169 - DNA, 19 bp, Mus musculus
  siRNA target sequence for Card4 (NM_172729.1,3081-3099).
gtctcaatggaaacttgat

SEQ ID NO: 497170 - DNA, 19 bp, Mus musculus
  siRNA target sequence for Card4 (NM_172729.1,3104-3122).
cccgaggaggccaaagtct

SEQ ID NO: 497171 - DNA, 19 bp, Mus musculus
  siRNA target sequence for Card4 (NM_172729.1,3105-3123).
ccgaggaggccaaagtctt

SEQ ID NO: 497172 - DNA, 19 bp, Mus musculus
  siRNA target sequence for Cars (NM_013742.2,144-162).
cctcagcacgcgtagctat

SEQ ID NO: 497173 - DNA, 19 bp, Mus musculus
  siRNA target sequence for Cars (NM_013742.2,145-163).
ctcagcacgcgtagctata

SEQ ID NO: 497174 - DNA, 19 bp, Mus musculus
  siRNA target sequence for Cars (NM_013742.2,149-167).
gcacgcgtagctatatcca

SEQ ID NO: 497175 - DNA, 19 bp, Mus musculus
  siRNA target sequence for Cars (NM_013742.2,311-329).
gcaggcttcaagcaagtaa

SEQ ID NO: 497176 - DNA, 19 bp, Mus musculus
  siRNA target sequence for Cars (NM_013742.2,380-398).
gcaggctccgcctctataa

SEQ ID NO: 497177 - DNA, 19 bp, Mus musculus
  siRNA target sequence for Cars (NM_013742.2,408-426).
ccggaacaaggatgtattt

SEQ ID NO: 497178 - DNA, 19 bp, Mus musculus
  siRNA target sequence for Cars (NM_013742.2,409-427).
cggaacaaggatgtattta

SEQ ID NO: 497179 - DNA, 19 bp, Mus musculus
  siRNA target sequence for Cars (NM_013742.2,411-429).
gaacaaggatgtatttata

SEQ ID NO: 497180 - DNA, 19 bp, Mus musculus
  siRNA target sequence for Cars (NM_013742.2,414-432).
caaggatgtatttatacct

SEQ ID NO: 497181 - DNA, 19 bp, Mus musculus
  siRNA target sequence for Cars (NM_013742.2,509-527).
cctacatctccttcgatat

SEQ ID NO: 497182 - DNA, 19 bp, Mus musculus
  siRNA target sequence for Cars (NM_013742.2,545-563).
gggattacttccagtatga

SEQ ID NO: 497183 - DNA, 19 bp, Mus musculus
  siRNA target sequence for Cars (NM_013742.2,546-564).
ggattacttccagtatgat

SEQ ID NO: 497184 - DNA, 19 bp, Mus musculus
  siRNA target sequence for Cars (NM_013742.2,1016-1034).
cccgtgtcagtgaatatgt

SEQ ID NO: 497185 - DNA, 19 bp, Mus musculus
  siRNA target sequence for Cars (NM_013742.2,1047-1065).
gaacttcgtccagaagatt

SEQ ID NO: 497186 - DNA, 19 bp, Mus musculus
  siRNA target sequence for Cars (NM_013742.2,1062-1080).
gattgtggacaatggttat

SEQ ID NO: 497187 - DNA, 19 bp, Mus musculus
  siRNA target sequence for Cars (NM_013742.2,1068-1086).
ggacaatggttatggttat

SEQ ID NO: 497188 - DNA, 19 bp, Mus musculus
  siRNA target sequence for Cars (NM_013742.2,1071-1089).
caatggttatggttatgct

SEQ ID NO: 497189 - DNA, 19 bp, Mus musculus
  siRNA target sequence for Cars (NM_013742.2,1107-1125).
cttcgacacagccaagttt

SEQ ID NO: 497190 - DNA, 19 bp, Mus musculus
  siRNA target sequence for Cars (NM_013742.2,1119-1137).
caagtttgctgctagtgaa

SEQ ID NO: 497191 - DNA, 19 bp, Mus musculus
  siRNA target sequence for Cars (NM_013742.2,1440-1458).
gtcggaggcctactttgaa

SEQ ID NO: 497192 - DNA, 19 bp, Mus musculus
  siRNA target sequence for Cars (NM_013742.2,1442-1460).
cggaggcctactttgaaaa

SEQ ID NO: 497193 - DNA, 19 bp, Mus musculus
  siRNA target sequence for Cars (NM_013742.2,1447-1465).
gcctactttgaaaatgact

SEQ ID NO: 497194 - DNA, 19 bp, Mus musculus
  siRNA target sequence for Cars (NM_013742.2,1618-1636).
gacacactggactattcca

SEQ ID NO: 497195 - DNA, 19 bp, Mus musculus
  siRNA target sequence for Cars (NM_013742.2,1655-1673).
ctcttcagtatgaaaaatt

SEQ ID NO: 497196 - DNA, 19 bp, Mus musculus
  siRNA target sequence for Cars (NM_013742.2,1677-1695).
gaacgagtttttcttaaat

SEQ ID NO: 497197 - DNA, 19 bp, Mus musculus
  siRNA target sequence for Cars (NM_013742.2,1759-1777).
gaagtggagctaaataaga

SEQ ID NO: 497198 - DNA, 19 bp, Mus musculus
  siRNA target sequence for Cars (NM_013742.2,1767-1785).
gctaaataagaacttctat

SEQ ID NO: 497199 - DNA, 19 bp, Mus musculus
  siRNA target sequence for Cars (NM_013742.2,1804-1822).
cacgaagccttgtgtgata

SEQ ID NO: 497200 - DNA, 19 bp, Mus musculus
  siRNA target sequence for Cars (NM_013742.2,1868-1886).
gtcagtgcaacctctacat

SEQ ID NO: 497201 - DNA, 19 bp, Mus musculus
  siRNA target sequence for Cars (NM_013742.2,2056-2074).
ccctaccttcaggtgttat

SEQ ID NO: 497202 - DNA, 19 bp, Mus musculus
  siRNA target sequence for Cars (NM_013742.2,2067-2085).
ggtgttatcagaattcaga

SEQ ID NO: 497203 - DNA, 19 bp, Mus musculus
  siRNA target sequence for Cars (NM_013742.2,2227-2245).
gacagagacaccttactga

SEQ ID NO: 497204 - DNA, 19 bp, Mus musculus
  siRNA target sequence for Cars (NM_013742.2,2388-2406).
caagtattctaaatttgat

SEQ ID NO: 497205 - DNA, 19 bp, Mus musculus
  siRNA target sequence for Cask (NM_009806.1,552-570).
gggtcccttcagtgttgta

SEQ ID NO: 497206 - DNA, 19 bp, Mus musculus
  siRNA target sequence for Cask (NM_009806.1,563-581).
gtgttgtacggcgatgtat

SEQ ID NO: 497207 - DNA, 19 bp, Mus musculus
  siRNA target sequence for Cask (NM_009806.1,565-583).
gttgtacggcgatgtatca

SEQ ID NO: 497208 - DNA, 19 bp, Mus musculus
  siRNA target sequence for Cask (NM_009806.1,568-586).
gtacggcgatgtatcaaca

SEQ ID NO: 497209 - DNA, 19 bp, Mus musculus
  siRNA target sequence for Cask (NM_009806.1,619-637).
gttgatgtagccaagttca

SEQ ID NO: 497210 - DNA, 19 bp, Mus musculus
  siRNA target sequence for Cask (NM_009806.1,625-643).
gtagccaagttcacatcaa

SEQ ID NO: 497211 - DNA, 19 bp, Mus musculus
  siRNA target sequence for Cask (NM_009806.1,650-668).
ggttaagtacagaagatct

SEQ ID NO: 497212 - DNA, 19 bp, Mus musculus
  siRNA target sequence for Cask (NM_009806.1,651-669).
gttaagtacagaagatcta

SEQ ID NO: 497213 - DNA, 19 bp, Mus musculus
  siRNA target sequence for Cask (NM_009806.1,680-698).
ccagtatctgtcatatgct

SEQ ID NO: 497214 - DNA, 19 bp, Mus musculus
  siRNA target sequence for Cask (NM_009806.1,737-755).
gctcagatgggatgcttta

SEQ ID NO: 497215 - DNA, 19 bp, Mus musculus
  siRNA target sequence for Cask (NM_009806.1,747-765).
gatgctttacatggttttt

SEQ ID NO: 497216 - DNA, 19 bp, Mus musculus
  siRNA target sequence for Cask (NM_009806.1,811-829).
gctgatgctggttttgtat

SEQ ID NO: 497217 - DNA, 19 bp, Mus musculus
  siRNA target sequence for Cask (NM_009806.1,812-830).
ctgatgctggttttgtata

SEQ ID NO: 497218 - DNA, 19 bp, Mus musculus
  siRNA target sequence for Cask (NM_009806.1,849-867).
ccactacatgagacagata

SEQ ID NO: 497219 - DNA, 19 bp, Mus musculus
  siRNA target sequence for Cask (NM_009806.1,877-895).
ctgcgctactgtcatgata

SEQ ID NO: 497220 - DNA, 19 bp, Mus musculus
  siRNA target sequence for Cask (NM_009806.1,879-897).
gcgctactgtcatgataat

SEQ ID NO: 497221 - DNA, 19 bp, Mus musculus
  siRNA target sequence for Cask (NM_009806.1,954-972).
ctcggcacctgttaaactt

SEQ ID NO: 497222 - DNA, 19 bp, Mus musculus
  siRNA target sequence for Cask (NM_009806.1,1030-1048).
gttggaacacctcacttta

SEQ ID NO: 497223 - DNA, 19 bp, Mus musculus
  siRNA target sequence for Cask (NM_009806.1,1166-1184).
gattgtttgaaggcattat

SEQ ID NO: 497224 - DNA, 19 bp, Mus musculus
  siRNA target sequence for Cask (NM_009806.1,1170-1188).
gtttgaaggcattattaaa

SEQ ID NO: 497225 - DNA, 19 bp, Mus musculus
  siRNA target sequence for Cask (NM_009806.1,1276-1294).
gctgaaaggatcactgttt

SEQ ID NO: 497226 - DNA, 19 bp, Mus musculus
  siRNA target sequence for Cask (NM_009806.1,1277-1295).
ctgaaaggatcactgttta

SEQ ID NO: 497227 - DNA, 19 bp, Mus musculus
  siRNA target sequence for Cask (NM_009806.1,1329-1347).
ggatcgttatgcctacaaa

SEQ ID NO: 497228 - DNA, 19 bp, Mus musculus
  siRNA target sequence for Cask (NM_009806.1,1366-1384).
gtagaacaactgaggaaat

SEQ ID NO: 497229 - DNA, 19 bp, Mus musculus
  siRNA target sequence for Cask (NM_009806.1,1423-1441).
gctgtgtcaagtcacaaat

SEQ ID NO: 497230 - DNA, 19 bp, Mus musculus
  siRNA target sequence for Cask (NM_009806.1,1424-1442).
ctgtgtcaagtcacaaatt

SEQ ID NO: 497231 - DNA, 19 bp, Mus musculus
  siRNA target sequence for Cask (NM_009806.1,1428-1446).
gtcaagtcacaaattcaat

SEQ ID NO: 497232 - DNA, 19 bp, Mus musculus
  siRNA target sequence for Cask (NM_009806.1,1433-1451).
gtcacaaattcaattcctt

SEQ ID NO: 497233 - DNA, 19 bp, Mus musculus
  siRNA target sequence for Cask (NM_009806.1,1635-1653).
cacactgctggatctgtat

SEQ ID NO: 497234 - DNA, 19 bp, Mus musculus
  siRNA target sequence for Cask (NM_009806.1,1650-1668).
gtatgacaaaattaacaca

SEQ ID NO: 497235 - DNA, 19 bp, Mus musculus
  siRNA target sequence for Cask (NM_009806.1,1667-1685).
caaagtcttcgccacaaat

SEQ ID NO: 497236 - DNA, 19 bp, Mus musculus
  siRNA target sequence for Cask (NM_009806.1,1745-1763).
gttaccctgagaataatga

SEQ ID NO: 497237 - DNA, 19 bp, Mus musculus
  siRNA target sequence for Cask (NM_009806.1,1831-1849).
gtggcacatgaagtttaca

SEQ ID NO: 497238 - DNA, 19 bp, Mus musculus
  siRNA target sequence for Cask (NM_009806.1,1878-1896).
cccgacttccccctattta

SEQ ID NO: 497239 - DNA, 19 bp, Mus musculus
  siRNA target sequence for Cask (NM_009806.1,1879-1897).
ccgacttccccctatttaa

SEQ ID NO: 497240 - DNA, 19 bp, Mus musculus
  siRNA target sequence for Cask (NM_009806.1,1880-1898).
cgacttccccctatttaaa

SEQ ID NO: 497241 - DNA, 19 bp, Mus musculus
  siRNA target sequence for Cask (NM_009806.1,1890-1908).
ctatttaaacggtgattct

SEQ ID NO: 497242 - DNA, 19 bp, Mus musculus
  siRNA target sequence for Cask (NM_009806.1,1899-1917).
cggtgattctccagaaagt

SEQ ID NO: 497243 - DNA, 19 bp, Mus musculus
  siRNA target sequence for Cask (NM_009806.1,1952-1970).
gagttcggctggtacagtt

SEQ ID NO: 497244 - DNA, 19 bp, Mus musculus
  siRNA target sequence for Cask (NM_009806.1,1957-1975).
cggctggtacagttccaaa

SEQ ID NO: 497245 - DNA, 19 bp, Mus musculus
  siRNA target sequence for Cask (NM_009806.1,1960-1978).
ctggtacagttccaaaaga

SEQ ID NO: 497246 - DNA, 19 bp, Mus musculus
  siRNA target sequence for Cask (NM_009806.1,2013-2031).
gaatgagctaaatcattgt

SEQ ID NO: 497247 - DNA, 19 bp, Mus musculus
  siRNA target sequence for Cask (NM_009806.1,2030-2048).
gtattgtcgcaagaatcat

SEQ ID NO: 497248 - DNA, 19 bp, Mus musculus
  siRNA target sequence for Cask (NM_009806.1,2046-2064).
catgcatgggggtatgatt

SEQ ID NO: 497249 - DNA, 19 bp, Mus musculus
  siRNA target sequence for Cask (NM_009806.1,2050-2068).
catgggggtatgattcaca

SEQ ID NO: 497250 - DNA, 19 bp, Mus musculus
  siRNA target sequence for Cask (NM_009806.1,2069-2087).
ggcaaggtacacttcatgt

SEQ ID NO: 497251 - DNA, 19 bp, Mus musculus
  siRNA target sequence for Cask (NM_009806.1,2070-2088).
gcaaggtacacttcatgtt

SEQ ID NO: 497252 - DNA, 19 bp, Mus musculus
  siRNA target sequence for Cask (NM_009806.1,2090-2108).
gtgatgaaatccgagaaat

SEQ ID NO: 497253 - DNA, 19 bp, Mus musculus
  siRNA target sequence for Cask (NM_009806.1,2115-2133).
catcagtgtcgctaaccaa

SEQ ID NO: 497254 - DNA, 19 bp, Mus musculus
  siRNA target sequence for Cask (NM_009806.1,2120-2138).
gtgtcgctaaccaaacagt

SEQ ID NO: 497255 - DNA, 19 bp, Mus musculus
  siRNA target sequence for Cask (NM_009806.1,2163-2181).
ggaaatgcgagggagtatt

SEQ ID NO: 497256 - DNA, 19 bp, Mus musculus
  siRNA target sequence for Cask (NM_009806.1,2164-2182).
gaaatgcgagggagtatta

SEQ ID NO: 497257 - DNA, 19 bp, Mus musculus
  siRNA target sequence for Cask (NM_009806.1,2173-2191).
gggagtattaccttcaaga

SEQ ID NO: 497258 - DNA, 19 bp, Mus musculus
  siRNA target sequence for Cask (NM_009806.1,2174-2192).
ggagtattaccttcaagat

SEQ ID NO: 497259 - DNA, 19 bp, Mus musculus
  siRNA target sequence for Cask (NM_009806.1,2175-2193).
gagtattaccttcaagatt

SEQ ID NO: 497260 - DNA, 19 bp, Mus musculus
  siRNA target sequence for Cask (NM_009806.1,2177-2195).
gtattaccttcaagattgt

SEQ ID NO: 497261 - DNA, 19 bp, Mus musculus
  siRNA target sequence for Cask (NM_009806.1,2250-2268).
cagacagtcccctgctaat

SEQ ID NO: 497262 - DNA, 19 bp, Mus musculus
  siRNA target sequence for Cask (NM_009806.1,2269-2287).
ggtcatagcagcactaaca

SEQ ID NO: 497263 - DNA, 19 bp, Mus musculus
  siRNA target sequence for Cask (NM_009806.1,2272-2290).
catagcagcactaacaatt

SEQ ID NO: 497264 - DNA, 19 bp, Mus musculus
  siRNA target sequence for Cask (NM_009806.1,2277-2295).
cagcactaacaattctgtt

SEQ ID NO: 497265 - DNA, 19 bp, Mus musculus
  siRNA target sequence for Cask (NM_009806.1,2326-2344).
ggacgacagatctatgtaa

SEQ ID NO: 497266 - DNA, 19 bp, Mus musculus
  siRNA target sequence for Cask (NM_009806.1,2337-2355).
ctatgtaagagcacaattt

SEQ ID NO: 497267 - DNA, 19 bp, Mus musculus
  siRNA target sequence for Cask (NM_009806.1,2341-2359).
gtaagagcacaatttgaat

SEQ ID NO: 497268 - DNA, 19 bp, Mus musculus
  siRNA target sequence for Cask (NM_009806.1,2424-2442).
catcatccagattattagt

SEQ ID NO: 497269 - DNA, 19 bp, Mus musculus
  siRNA target sequence for Cask (NM_009806.1,2464-2482).
cagggtaaactggaaaact

SEQ ID NO: 497270 - DNA, 19 bp, Mus musculus
  siRNA target sequence for Cask (NM_009806.1,2577-2595).
ggccagctgtacttggttt

SEQ ID NO: 497271 - DNA, 19 bp, Mus musculus
  siRNA target sequence for Cask (NM_009806.1,2669-2687).
catatgaagaagtagtcaa

SEQ ID NO: 497272 - DNA, 19 bp, Mus musculus
  siRNA target sequence for Cask (NM_009806.1,2689-2707).
ctgccagcattcaaaagga

SEQ ID NO: 497273 - DNA, 19 bp, Mus musculus
  siRNA target sequence for Cask (NM_009806.1,2843-2861).
gcaagaattattactttgt

SEQ ID NO: 497274 - DNA, 19 bp, Mus musculus
  siRNA target sequence for Cask (NM_009806.1,3124-3142).
gatgtcttgcagagaacat

SEQ ID NO: 497275 - DNA, 19 bp, Mus musculus
  siRNA target sequence for Cask (NM_009806.1,3150-3168).
ctacttcgatctcacaatt

SEQ ID NO: 497276 - DNA, 19 bp, Mus musculus
  siRNA target sequence for Cask (NM_009806.1,3157-3175).
gatctcacaattatcaaca

SEQ ID NO: 497277 - DNA, 19 bp, Mus musculus
  siRNA target sequence for Cask (NM_146233.1,2222-2240).
cctgtgaggtaataagtct

SEQ ID NO: 497278 - DNA, 19 bp, Mus musculus
  siRNA target sequence for Cask (NM_146233.1,2223-2241).
ctgtgaggtaataagtcta

SEQ ID NO: 497279 - DNA, 19 bp, Mus musculus
  siRNA target sequence for Cask (NM_146233.1,2227-2245).
gaggtaataagtctaacaa

SEQ ID NO: 497280 - DNA, 19 bp, Mus musculus
  siRNA target sequence for Cask (NM_146233.1,2318-2336).
gctttctgggaaattgttt

SEQ ID NO: 497281 - DNA, 19 bp, Mus musculus
  siRNA target sequence for Cask (NM_146233.1,2358-2376).
gcacaccaattttacaaca

SEQ ID NO: 497282 - DNA, 19 bp, Mus musculus
  siRNA target sequence for Cask (NM_146233.1,2363-2381).
ccaattttacaacaaagat

SEQ ID NO: 497283 - DNA, 19 bp, Mus musculus
  siRNA target sequence for Cask (NM_146233.1,2440-2458).
cagcctttttgcagcaaaa

SEQ ID NO: 497284 - DNA, 19 bp, Mus musculus
  siRNA target sequence for Cct2 (NM_007636.1,71-89).
ccctcgcacctgttaatat

SEQ ID NO: 497285 - DNA, 19 bp, Mus musculus
  siRNA target sequence for Cct2 (NM_007636.1,73-91).
ctcgcacctgttaatatct

SEQ ID NO: 497286 - DNA, 19 bp, Mus musculus
  siRNA target sequence for Cct2 (NM_007636.1,76-94).
gcacctgttaatatcttca

SEQ ID NO: 497287 - DNA, 19 bp, Mus musculus
  siRNA target sequence for Cct2 (NM_007636.1,127-145).
gctcgcctgtcgtcgttta

SEQ ID NO: 497288 - DNA, 19 bp, Mus musculus
  siRNA target sequence for Cct2 (NM_007636.1,128-146).
ctcgcctgtcgtcgtttat

SEQ ID NO: 497289 - DNA, 19 bp, Mus musculus
  siRNA target sequence for Cct2 (NM_007636.1,249-267).
caacgacggtgctaccatt

SEQ ID NO: 497290 - DNA, 19 bp, Mus musculus
  siRNA target sequence for Cct2 (NM_007636.1,259-277).
gctaccattctcaagaaca

SEQ ID NO: 497291 - DNA, 19 bp, Mus musculus
  siRNA target sequence for Cct2 (NM_007636.1,288-306).
caaccccgcagcaaaggtt

SEQ ID NO: 497292 - DNA, 19 bp, Mus musculus
  siRNA target sequence for Cct2 (NM_007636.1,293-311).
ccgcagcaaaggttctagt

SEQ ID NO: 497293 - DNA, 19 bp, Mus musculus
  siRNA target sequence for Cct2 (NM_007636.1,294-312).
cgcagcaaaggttctagtt

SEQ ID NO: 497294 - DNA, 19 bp, Mus musculus
  siRNA target sequence for Cct2 (NM_007636.1,298-316).
gcaaaggttctagttgata

SEQ ID NO: 497295 - DNA, 19 bp, Mus musculus
  siRNA target sequence for Cct2 (NM_007636.1,320-338).
caagggttcaagatgatga

SEQ ID NO: 497296 - DNA, 19 bp, Mus musculus
  siRNA target sequence for Cct2 (NM_007636.1,350-368).
gcactacctctgttactgt

SEQ ID NO: 497297 - DNA, 19 bp, Mus musculus
  siRNA target sequence for Cct2 (NM_007636.1,385-403).
ctccgggaagcagaatctt

SEQ ID NO: 497298 - DNA, 19 bp, Mus musculus
  siRNA target sequence for Cct2 (NM_007636.1,389-407).
gggaagcagaatctttaat

SEQ ID NO: 497299 - DNA, 19 bp, Mus musculus
  siRNA target sequence for Cct2 (NM_007636.1,390-408).
ggaagcagaatctttaatt

SEQ ID NO: 497300 - DNA, 19 bp, Mus musculus
  siRNA target sequence for Cct2 (NM_007636.1,394-412).
gcagaatctttaattgcaa

SEQ ID NO: 497301 - DNA, 19 bp, Mus musculus
  siRNA target sequence for Cct2 (NM_007636.1,395-413).
cagaatctttaattgcaaa

SEQ ID NO: 497302 - DNA, 19 bp, Mus musculus
  siRNA target sequence for Cct2 (NM_007636.1,397-415).
gaatctttaattgcaaaaa

SEQ ID NO: 497303 - DNA, 19 bp, Mus musculus
  siRNA target sequence for Cct2 (NM_007636.1,421-439).
catccacagaccatcatct

SEQ ID NO: 497304 - DNA, 19 bp, Mus musculus
  siRNA target sequence for Cct2 (NM_007636.1,495-513).
ggatcatggttctgatgaa

SEQ ID NO: 497305 - DNA, 19 bp, Mus musculus
  siRNA target sequence for Cct2 (NM_007636.1,518-536).
gattctggcaggacttaat

SEQ ID NO: 497306 - DNA, 19 bp, Mus musculus
  siRNA target sequence for Cct2 (NM_007636.1,524-542).
ggcaggacttaatgaacat

SEQ ID NO: 497307 - DNA, 19 bp, Mus musculus
  siRNA target sequence for Cct2 (NM_007636.1,525-543).
gcaggacttaatgaacatt

SEQ ID NO: 497308 - DNA, 19 bp, Mus musculus
  siRNA target sequence for Cct2 (NM_007636.1,560-578).
cctcaaagctccttactca

SEQ ID NO: 497309 - DNA, 19 bp, Mus musculus
  siRNA target sequence for Cct2 (NM_007636.1,577-595).
caccacaaggaccacttta

SEQ ID NO: 497310 - DNA, 19 bp, Mus musculus
  siRNA target sequence for Cct2 (NM_007636.1,580-598).
cacaaggaccactttacta

SEQ ID NO: 497311 - DNA, 19 bp, Mus musculus
  siRNA target sequence for Cct2 (NM_007636.1,639-657).
caacctggaggcgattcat

SEQ ID NO: 497312 - DNA, 19 bp, Mus musculus
  siRNA target sequence for Cct2 (NM_007636.1,684-702).
ggcagactcctatctagat

SEQ ID NO: 497313 - DNA, 19 bp, Mus musculus
  siRNA target sequence for Cct2 (NM_007636.1,686-704).
cagactcctatctagatga

SEQ ID NO: 497314 - DNA, 19 bp, Mus musculus
  siRNA target sequence for Cct2 (NM_007636.1,692-710).
cctatctagatgaaggttt

SEQ ID NO: 497315 - DNA, 19 bp, Mus musculus
  siRNA target sequence for Cct2 (NM_007636.1,693-711).
ctatctagatgaaggtttt

SEQ ID NO: 497316 - DNA, 19 bp, Mus musculus
  siRNA target sequence for Cct2 (NM_007636.1,697-715).
ctagatgaaggttttcttt

SEQ ID NO: 497317 - DNA, 19 bp, Mus musculus
  siRNA target sequence for Cct2 (NM_007636.1,775-793).
gcaaatactgggatggata

SEQ ID NO: 497318 - DNA, 19 bp, Mus musculus
  siRNA target sequence for Cct2 (NM_007636.1,816-834).
ctctcgggtaagagttgat

SEQ ID NO: 497319 - DNA, 19 bp, Mus musculus
  siRNA target sequence for Cct2 (NM_007636.1,888-906).
gaaagttgaacgtattctt

SEQ ID NO: 497320 - DNA, 19 bp, Mus musculus
  siRNA target sequence for Cct2 (NM_007636.1,899-917).
gtattcttaagcatggaat

SEQ ID NO: 497321 - DNA, 19 bp, Mus musculus
  siRNA target sequence for Cct2 (NM_007636.1,1047-1065).
gattgcctctacctttgat

SEQ ID NO: 497322 - DNA, 19 bp, Mus musculus
  siRNA target sequence for Cct2 (NM_007636.1,1083-1101).
gcttggaagttgcaaactt

SEQ ID NO: 497323 - DNA, 19 bp, Mus musculus
  siRNA target sequence for Cct2 (NM_007636.1,1084-1102).
cttggaagttgcaaactta

SEQ ID NO: 497324 - DNA, 19 bp, Mus musculus
  siRNA target sequence for Cct2 (NM_007636.1,1088-1106).
gaagttgcaaacttattga

SEQ ID NO: 497325 - DNA, 19 bp, Mus musculus
  siRNA target sequence for Cct2 (NM_007636.1,1111-1129).
gttatgatcggggaagata

SEQ ID NO: 497326 - DNA, 19 bp, Mus musculus
  siRNA target sequence for Cct2 (NM_007636.1,1126-1144).
gataaactcattcactttt

SEQ ID NO: 497327 - DNA, 19 bp, Mus musculus
  siRNA target sequence for Cct2 (NM_007636.1,1360-1378).
gcaatggagtcgtttgcaa

SEQ ID NO: 497328 - DNA, 19 bp, Mus musculus
  siRNA target sequence for Cct2 (NM_007636.1,1361-1379).
caatggagtcgtttgcaaa

SEQ ID NO: 497329 - DNA, 19 bp, Mus musculus
  siRNA target sequence for Cct2 (NM_007636.1,1462-1480).
cacagtgaaggccatataa

SEQ ID NO: 497330 - DNA, 19 bp, Mus musculus
  siRNA target sequence for Cct2 (NM_007636.1,1464-1482).
cagtgaaggccatataact

SEQ ID NO: 497331 - DNA, 19 bp, Mus musculus
  siRNA target sequence for Cct2 (NM_007636.1,1532-1550).
gtataacagagagttttca

SEQ ID NO: 497332 - DNA, 19 bp, Mus musculus
  siRNA target sequence for Cct2 (NM_007636.1,1620-1638).
caaagcagcaccaaggaaa

SEQ ID NO: 497333 - DNA, 19 bp, Mus musculus
  siRNA target sequence for Cct3 (NM_009836.1,378-396).
gatgggaccacatcagtaa

SEQ ID NO: 497334 - DNA, 19 bp, Mus musculus
  siRNA target sequence for Cct3 (NM_009836.1,739-757).
gtgtcttacgtggagttat

SEQ ID NO: 497335 - DNA, 19 bp, Mus musculus
  siRNA target sequence for Cct4 (NM_009837.1,255-273).
cagatccgcttcagcaata

SEQ ID NO: 497336 - DNA, 19 bp, Mus musculus
  siRNA target sequence for Cct4 (NM_009837.1,257-275).
gatccgcttcagcaatatt

SEQ ID NO: 497337 - DNA, 19 bp, Mus musculus
  siRNA target sequence for Cct4 (NM_009837.1,290-308).
ggttgctgatgctattaga

SEQ ID NO: 497338 - DNA, 19 bp, Mus musculus
  siRNA target sequence for Cct4 (NM_009837.1,359-377).
cgatgtgaccattacaaat

SEQ ID NO: 497339 - DNA, 19 bp, Mus musculus
  siRNA target sequence for Cct4 (NM_009837.1,382-400).
gtgccaccattctgaaaca

SEQ ID NO: 497340 - DNA, 19 bp, Mus musculus
  siRNA target sequence for Cct4 (NM_009837.1,384-402).
gccaccattctgaaacaaa

SEQ ID NO: 497341 - DNA, 19 bp, Mus musculus
  siRNA target sequence for Cct4 (NM_009837.1,385-403).
ccaccattctgaaacaaat

SEQ ID NO: 497342 - DNA, 19 bp, Mus musculus
  siRNA target sequence for Cct4 (NM_009837.1,443-461).
gtctaaagctcaagacata

SEQ ID NO: 497343 - DNA, 19 bp, Mus musculus
  siRNA target sequence for Cct4 (NM_009837.1,445-463).
ctaaagctcaagacataga

SEQ ID NO: 497344 - DNA, 19 bp, Mus musculus
  siRNA target sequence for Cct4 (NM_009837.1,475-493).
gcaccacgtcggttgtcat

SEQ ID NO: 497345 - DNA, 19 bp, Mus musculus
  siRNA target sequence for Cct4 (NM_009837.1,478-496).
ccacgtcggttgtcatcat

SEQ ID NO: 497346 - DNA, 19 bp, Mus musculus
  siRNA target sequence for Cct4 (NM_009837.1,498-516).
gctggctctcttttagact

SEQ ID NO: 497347 - DNA, 19 bp, Mus musculus
  siRNA target sequence for Cct4 (NM_009837.1,638-656).
cagagaaactttgttaaat

SEQ ID NO: 497348 - DNA, 19 bp, Mus musculus
  siRNA target sequence for Cct4 (NM_009837.1,650-668).
gttaaatagcgcaactact

SEQ ID NO: 497349 - DNA, 19 bp, Mus musculus
  siRNA target sequence for Cct4 (NM_009837.1,658-676).
gcgcaactacttcattgaa

SEQ ID NO: 497350 - DNA, 19 bp, Mus musculus
  siRNA target sequence for Cct4 (NM_009837.1,659-677).
cgcaactacttcattgaat

SEQ ID NO: 497351 - DNA, 19 bp, Mus musculus
  siRNA target sequence for Cct4 (NM_009837.1,689-707).
ctctcagtattcaagtcta

SEQ ID NO: 497352 - DNA, 19 bp, Mus musculus
  siRNA target sequence for Cct4 (NM_009837.1,721-739).
gtgtcaatgcggtgatgaa

SEQ ID NO: 497353 - DNA, 19 bp, Mus musculus
  siRNA target sequence for Cct4 (NM_009837.1,757-775).
cagctaccagtgtagatct

SEQ ID NO: 497354 - DNA, 19 bp, Mus musculus
  siRNA target sequence for Cct4 (NM_009837.1,768-786).
gtagatcttcgagatatta

SEQ ID NO: 497355 - DNA, 19 bp, Mus musculus
  siRNA target sequence for Cct4 (NM_009837.1,777-795).
cgagatattaaaatagtta

SEQ ID NO: 497356 - DNA, 19 bp, Mus musculus
  siRNA target sequence for Cct4 (NM_009837.1,800-818).
gcttggtgggacaatagat

SEQ ID NO: 497357 - DNA, 19 bp, Mus musculus
  siRNA target sequence for Cct4 (NM_009837.1,839-857).
cctcgttctcacacagaaa

SEQ ID NO: 497358 - DNA, 19 bp, Mus musculus
  siRNA target sequence for Cct4 (NM_009837.1,842-860).
cgttctcacacagaaagta

SEQ ID NO: 497359 - DNA, 19 bp, Mus musculus
  siRNA target sequence for Cct4 (NM_009837.1,861-879).
gcaaattctggcataacaa

SEQ ID NO: 497360 - DNA, 19 bp, Mus musculus
  siRNA target sequence for Cct4 (NM_009837.1,870-888).
ggcataacaagagttgaaa

SEQ ID NO: 497361 - DNA, 19 bp, Mus musculus
  siRNA target sequence for Cct4 (NM_009837.1,890-908).
ggctaagattgggcttatt

SEQ ID NO: 497362 - DNA, 19 bp, Mus musculus
  siRNA target sequence for Cct4 (NM_009837.1,892-910).
ctaagattgggcttattca

SEQ ID NO: 497363 - DNA, 19 bp, Mus musculus
  siRNA target sequence for Cct4 (NM_009837.1,896-914).
gattgggcttattcagttt

SEQ ID NO: 497364 - DNA, 19 bp, Mus musculus
  siRNA target sequence for Cct4 (NM_009837.1,900-918).
gggcttattcagttttgct

SEQ ID NO: 497365 - DNA, 19 bp, Mus musculus
  siRNA target sequence for Cct4 (NM_009837.1,917-935).
cttatctgctcctaaaaca

SEQ ID NO: 497366 - DNA, 19 bp, Mus musculus
  siRNA target sequence for Cct4 (NM_009837.1,925-943).
ctcctaaaacagatatgga

SEQ ID NO: 497367 - DNA, 19 bp, Mus musculus
  siRNA target sequence for Cct4 (NM_009837.1,941-959).
ggataatcaaatagtagta

SEQ ID NO: 497368 - DNA, 19 bp, Mus musculus
  siRNA target sequence for Cct4 (NM_009837.1,942-960).
gataatcaaatagtagtat

SEQ ID NO: 497369 - DNA, 19 bp, Mus musculus
  siRNA target sequence for Cct4 (NM_009837.1,991-1009).
gagaggagagagcctatat

SEQ ID NO: 497370 - DNA, 19 bp, Mus musculus
  siRNA target sequence for Cct4 (NM_009837.1,996-1014).
gagagagcctatattttaa

SEQ ID NO: 497371 - DNA, 19 bp, Mus musculus
  siRNA target sequence for Cct4 (NM_009837.1,1053-1071).
cttctcatacagaagtcta

SEQ ID NO: 497372 - DNA, 19 bp, Mus musculus
  siRNA target sequence for Cct4 (NM_009837.1,1085-1103).
ccttagtgatcttgcatta

SEQ ID NO: 497373 - DNA, 19 bp, Mus musculus
  siRNA target sequence for Cct4 (NM_009837.1,1090-1108).
gtgatcttgcattacattt

SEQ ID NO: 497374 - DNA, 19 bp, Mus musculus
  siRNA target sequence for Cct4 (NM_009837.1,1131-1149).
gtggttaaggacgttgaaa

SEQ ID NO: 497375 - DNA, 19 bp, Mus musculus
  siRNA target sequence for Cct4 (NM_009837.1,1155-1173).
gacattgaattcatctgta

SEQ ID NO: 497376 - DNA, 19 bp, Mus musculus
  siRNA target sequence for Cct4 (NM_009837.1,1304-1322).
cccagggaaaacagttaca

SEQ ID NO: 497377 - DNA, 19 bp, Mus musculus
  siRNA target sequence for Cct4 (NM_009837.1,1309-1327).
ggaaaacagttacaattgt

SEQ ID NO: 497378 - DNA, 19 bp, Mus musculus
  siRNA target sequence for Cct4 (NM_009837.1,1326-1344).
gtcgtacgtggttctaaca

SEQ ID NO: 497379 - DNA, 19 bp, Mus musculus
  siRNA target sequence for Cct4 (NM_009837.1,1328-1346).
cgtacgtggttctaacaaa

SEQ ID NO: 497380 - DNA, 19 bp, Mus musculus
  siRNA target sequence for Cct4 (NM_009837.1,1363-1381).
ctgagcgctccattcatga

SEQ ID NO: 497381 - DNA, 19 bp, Mus musculus
  siRNA target sequence for Cct4 (NM_009837.1,1388-1406).
ctgtgtcatccgatgctta

SEQ ID NO: 497382 - DNA, 19 bp, Mus musculus
  siRNA target sequence for Cct4 (NM_009837.1,1435-1453).
gtggtgctccagaaataga

SEQ ID NO: 497383 - DNA, 19 bp, Mus musculus
  siRNA target sequence for Cct4 (NM_009837.1,1516-1534).
gtgctttcgcggatgctat

SEQ ID NO: 497384 - DNA, 19 bp, Mus musculus
  siRNA target sequence for Cct4 (NM_009837.1,1525-1543).
cggatgctatggaagtcat

SEQ ID NO: 497385 - DNA, 19 bp, Mus musculus
  siRNA target sequence for Cct4 (NM_009837.1,1530-1548).
gctatggaagtcattccat

SEQ ID NO: 497386 - DNA, 19 bp, Mus musculus
  siRNA target sequence for Cct4 (NM_009837.1,1535-1553).
ggaagtcattccatctaca

SEQ ID NO: 497387 - DNA, 19 bp, Mus musculus
  siRNA target sequence for Cct4 (NM_009837.1,1569-1587).
ggcctgaatcccatttcta

SEQ ID NO: 497388 - DNA, 19 bp, Mus musculus
  siRNA target sequence for Cct5 (NM_007637.1,116-134).
ccctcgccttcgatgagta

SEQ ID NO: 497389 - DNA, 19 bp, Mus musculus
  siRNA target sequence for Cct5 (NM_007637.1,117-135).
cctcgccttcgatgagtat

SEQ ID NO: 497390 - DNA, 19 bp, Mus musculus
  siRNA target sequence for Cct5 (NM_007637.1,271-289).
gacaagatgatggttgata

SEQ ID NO: 497391 - DNA, 19 bp, Mus musculus
  siRNA target sequence for Cct5 (NM_007637.1,292-310).
gatggcgatgtgactataa

SEQ ID NO: 497392 - DNA, 19 bp, Mus musculus
  siRNA target sequence for Cct5 (NM_007637.1,513-531).
gcaggctgcccgaattgca

SEQ ID NO: 497393 - DNA, 19 bp, Mus musculus
  siRNA target sequence for Cct5 (NM_007637.1,516-534).
ggctgcccgaattgcaata

SEQ ID NO: 497394 - DNA, 19 bp, Mus musculus
  siRNA target sequence for Cct5 (NM_007637.1,579-597).
caaccctgaacctctgatt

SEQ ID NO: 497395 - DNA, 19 bp, Mus musculus
  siRNA target sequence for Cct5 (NM_007637.1,614-632).
cgctgggctccaaagtgat

SEQ ID NO: 497396 - DNA, 19 bp, Mus musculus
  siRNA target sequence for Cct5 (NM_007637.1,616-634).
ctgggctccaaagtgatta

SEQ ID NO: 497397 - DNA, 19 bp, Mus musculus
  siRNA target sequence for Cct5 (NM_007637.1,619-637).
ggctccaaagtgattaaca

SEQ ID NO: 497398 - DNA, 19 bp, Mus musculus
  siRNA target sequence for Cct5 (NM_007637.1,846-864).
gattctcacgtgtccattt

SEQ ID NO: 497399 - DNA, 19 bp, Mus musculus
  siRNA target sequence for Cct5 (NM_007637.1,867-885).
gccacctaaacctaagaca

SEQ ID NO: 497400 - DNA, 19 bp, Mus musculus
  siRNA target sequence for Cct5 (NM_007637.1,906-924).
gtctgtggaggactacaaa

SEQ ID NO: 497401 - DNA, 19 bp, Mus musculus
  siRNA target sequence for Cct5 (NM_007637.1,936-954).
gtacgaaaaggagaagttt

SEQ ID NO: 497402 - DNA, 19 bp, Mus musculus
  siRNA target sequence for Cct5 (NM_007637.1,985-1003).
ggtgctaacctagctattt

SEQ ID NO: 497403 - DNA, 19 bp, Mus musculus
  siRNA target sequence for Cct5 (NM_007637.1,1071-1089).
ggtagggggacctgagatt

SEQ ID NO: 497404 - DNA, 19 bp, Mus musculus
  siRNA target sequence for Cct5 (NM_007637.1,1090-1108).
gagctgatcgccattgcaa

SEQ ID NO: 497405 - DNA, 19 bp, Mus musculus
  siRNA target sequence for Cct5 (NM_007637.1,1213-1231).
ctggttatcgagaagtgta

SEQ ID NO: 497406 - DNA, 19 bp, Mus musculus
  siRNA target sequence for Cct5 (NM_007637.1,1216-1234).
gttatcgagaagtgtaaga

SEQ ID NO: 497407 - DNA, 19 bp, Mus musculus
  siRNA target sequence for Cct5 (NM_007637.1,1363-1381).
ggaggggcagccgaaatat

SEQ ID NO: 497408 - DNA, 19 bp, Mus musculus
  siRNA target sequence for Cct5 (NM_007637.1,1413-1431).
caagtgcccaactttggaa

SEQ ID NO: 497409 - DNA, 19 bp, Mus musculus
  siRNA target sequence for Cct5 (NM_007637.1,1419-1437).
cccaactttggaacagtat

SEQ ID NO: 497410 - DNA, 19 bp, Mus musculus
  siRNA target sequence for Cct5 (NM_007637.1,1479-1497).
ggccctttcagaaaatagt

SEQ ID NO: 497411 - DNA, 19 bp, Mus musculus
  siRNA target sequence for Cct5 (NM_007637.1,1538-1556).
gacaggtgaaggagtctaa

SEQ ID NO: 497412 - DNA, 19 bp, Mus musculus
  siRNA target sequence for Cct5 (NM_007637.1,1592-1610).
gtaacgatatgcagtatca

SEQ ID NO: 497413 - DNA, 19 bp, Mus musculus
  siRNA target sequence for Cct5 (NM_007637.1,1654-1672).
cttgccacccagatggtta

SEQ ID NO: 497414 - DNA, 19 bp, Mus musculus
  siRNA target sequence for Cct5 (NM_007637.1,1662-1680).
ccagatggttaggatgatt

SEQ ID NO: 497415 - DNA, 19 bp, Mus musculus
  siRNA target sequence for Cct6a (NM_009838.1,107-125).
cagcgctggcggtgaacat

SEQ ID NO: 497416 - DNA, 19 bp, Mus musculus
  siRNA target sequence for Cct6a (NM_009838.1,109-127).
gcgctggcggtgaacatca

SEQ ID NO: 497417 - DNA, 19 bp, Mus musculus
  siRNA target sequence for Cct6a (NM_009838.1,183-201).
catgaagatgcttgtatct

SEQ ID NO: 497418 - DNA, 19 bp, Mus musculus
  siRNA target sequence for Cct6a (NM_009838.1,208-226).
ggagacatcaaacttacta

SEQ ID NO: 497419 - DNA, 19 bp, Mus musculus
  siRNA target sequence for Cct6a (NM_009838.1,209-227).
gagacatcaaacttactaa

SEQ ID NO: 497420 - DNA, 19 bp, Mus musculus
  siRNA target sequence for Cct6a (NM_009838.1,267-285).
cccaacagcctctttgata

SEQ ID NO: 497421 - DNA, 19 bp, Mus musculus
  siRNA target sequence for Cct6a (NM_009838.1,321-339).
cgatggcactacatccaat

SEQ ID NO: 497422 - DNA, 19 bp, Mus musculus
  siRNA target sequence for Cct6a (NM_009838.1,369-387).
ggcggacctgtacatttct

SEQ ID NO: 497423 - DNA, 19 bp, Mus musculus
  siRNA target sequence for Cct6a (NM_009838.1,513-531).
gacatctctgcggactaaa

SEQ ID NO: 497424 - DNA, 19 bp, Mus musculus
  siRNA target sequence for Cct6a (NM_009838.1,646-664).
cataaatctgagacagata

SEQ ID NO: 497425 - DNA, 19 bp, Mus musculus
  siRNA target sequence for Cct6a (NM_009838.1,655-673).
gagacagatacaagcttaa

SEQ ID NO: 497426 - DNA, 19 bp, Mus musculus
  siRNA target sequence for Cct6a (NM_009838.1,757-775).
gtgtccttagagtatgaga

SEQ ID NO: 497427 - DNA, 19 bp, Mus musculus
  siRNA target sequence for Cct6a (NM_009838.1,762-780).
cttagagtatgagaaaaca

SEQ ID NO: 497428 - DNA, 19 bp, Mus musculus
  siRNA target sequence for Cct6a (NM_009838.1,829-847).
ctagtaaaggctgaaagaa

SEQ ID NO: 497429 - DNA, 19 bp, Mus musculus
  siRNA target sequence for Cct6a (NM_009838.1,940-958).
gggattgaccccttttcct

SEQ ID NO: 497430 - DNA, 19 bp, Mus musculus
  siRNA target sequence for Cct6a (NM_009838.1,941-959).
ggattgaccccttttcctt

SEQ ID NO: 497431 - DNA, 19 bp, Mus musculus
  siRNA target sequence for Cct6a (NM_009838.1,1042-1060).
gggatagctctgaattcct

SEQ ID NO: 497432 - DNA, 19 bp, Mus musculus
  siRNA target sequence for Cct6a (NM_009838.1,1044-1062).
gatagctctgaattccttt

SEQ ID NO: 497433 - DNA, 19 bp, Mus musculus
  siRNA target sequence for Cct6a (NM_009838.1,1088-1106).
gacatgcagggcttgtcta

SEQ ID NO: 497434 - DNA, 19 bp, Mus musculus
  siRNA target sequence for Cct6a (NM_009838.1,1096-1114).
gggcttgtctatgagtata

SEQ ID NO: 497435 - DNA, 19 bp, Mus musculus
  siRNA target sequence for Cct6a (NM_009838.1,1098-1116).
gcttgtctatgagtataca

SEQ ID NO: 497436 - DNA, 19 bp, Mus musculus
  siRNA target sequence for Cct6a (NM_009838.1,1125-1143).
ggagaagttcacctttatt

SEQ ID NO: 497437 - DNA, 19 bp, Mus musculus
  siRNA target sequence for Cct6a (NM_009838.1,1136-1154).
cctttattgagaagtgtaa

SEQ ID NO: 497438 - DNA, 19 bp, Mus musculus
  siRNA target sequence for Cct6a (NM_009838.1,1170-1188).
cactttactggttaaagga

SEQ ID NO: 497439 - DNA, 19 bp, Mus musculus
  siRNA target sequence for Cct6a (NM_009838.1,1177-1195).
ctggttaaaggaccaaata

SEQ ID NO: 497440 - DNA, 19 bp, Mus musculus
  siRNA target sequence for Cct6a (NM_009838.1,1208-1226).
ctcaaatcaaggatgcaat

SEQ ID NO: 497441 - DNA, 19 bp, Mus musculus
  siRNA target sequence for Cct6a (NM_009838.1,1234-1252).
ggcttgagggctgtcaaaa

SEQ ID NO: 497442 - DNA, 19 bp, Mus musculus
  siRNA target sequence for Cct6a (NM_009838.1,1283-1301).
gtgcgggtgcagtagaagt

SEQ ID NO: 497443 - DNA, 19 bp, Mus musculus
  siRNA target sequence for Cct6a (NM_009838.1,1306-1324).
ctggcagaagctctgatta

SEQ ID NO: 497444 - DNA, 19 bp, Mus musculus
  siRNA target sequence for Cct6a (NM_009838.1,1309-1327).
gcagaagctctgattaaat

SEQ ID NO: 497445 - DNA, 19 bp, Mus musculus
  siRNA target sequence for Cct6a (NM_009838.1,1401-1419).
ggttcttgcgcaaaactct

SEQ ID NO: 497446 - DNA, 19 bp, Mus musculus
  siRNA target sequence for Cct6a (NM_009838.1,1409-1427).
cgcaaaactctggttttga

SEQ ID NO: 497447 - DNA, 19 bp, Mus musculus
  siRNA target sequence for Cct6a (NM_009838.1,1428-1446).
ccttcaggaaacattagtt

SEQ ID NO: 497448 - DNA, 19 bp, Mus musculus
  siRNA target sequence for Cct6b (NM_009839.1,206-224).
gcgctaaaaatgcttgttt

SEQ ID NO: 497449 - DNA, 19 bp, Mus musculus
  siRNA target sequence for Cct6b (NM_009839.1,297-315).
cggcttccatcattgcaaa

SEQ ID NO: 497450 - DNA, 19 bp, Mus musculus
  siRNA target sequence for Cct6b (NM_009839.1,421-439).
gcaccctagaatcataact

SEQ ID NO: 497451 - DNA, 19 bp, Mus musculus
  siRNA target sequence for Cct6b (NM_009839.1,523-541).
cttggatgtggctagaaca

SEQ ID NO: 497452 - DNA, 19 bp, Mus musculus
  siRNA target sequence for Cct6b (NM_009839.1,543-561).
ccctgcagacgaaagttca

SEQ ID NO: 497453 - DNA, 19 bp, Mus musculus
  siRNA target sequence for Cct6b (NM_009839.1,544-562).
cctgcagacgaaagttcat

SEQ ID NO: 497454 - DNA, 19 bp, Mus musculus
  siRNA target sequence for Cct6b (NM_009839.1,566-584).
gaactggccgacatactaa

SEQ ID NO: 497455 - DNA, 19 bp, Mus musculus
  siRNA target sequence for Cct6b (NM_009839.1,694-712).
gttgatccgaggattggtt

SEQ ID NO: 497456 - DNA, 19 bp, Mus musculus
  siRNA target sequence for Cct6b (NM_009839.1,777-795).
gcaatgtctcactagagta

SEQ ID NO: 497457 - DNA, 19 bp, Mus musculus
  siRNA target sequence for Cct6b (NM_009839.1,778-796).
caatgtctcactagagtat

SEQ ID NO: 497458 - DNA, 19 bp, Mus musculus
  siRNA target sequence for Cct6b (NM_009839.1,926-944).
gctgagtccaataaaggat

SEQ ID NO: 497459 - DNA, 19 bp, Mus musculus
  siRNA target sequence for Cct6b (NM_009839.1,927-945).
ctgagtccaataaaggatt

SEQ ID NO: 497460 - DNA, 19 bp, Mus musculus
  siRNA target sequence for Cct6b (NM_009839.1,966-984).
gcatcgatccggtttcctt

SEQ ID NO: 497461 - DNA, 19 bp, Mus musculus
  siRNA target sequence for Cct6b (NM_009839.1,967-985).
catcgatccggtttcctta

SEQ ID NO: 497462 - DNA, 19 bp, Mus musculus
  siRNA target sequence for Cct6b (NM_009839.1,970-988).
cgatccggtttccttagaa

SEQ ID NO: 497463 - DNA, 19 bp, Mus musculus
  siRNA target sequence for Cct6b (NM_009839.1,1016-1034).
cttcgcagggcaaaaagaa

SEQ ID NO: 497464 - DNA, 19 bp, Mus musculus
  siRNA target sequence for Cct6b (NM_009839.1,1135-1153).
gtacgcattgggtgaagaa

SEQ ID NO: 497465 - DNA, 19 bp, Mus musculus
  siRNA target sequence for Cct6b (NM_009839.1,1212-1230).
ggccaaataagcatactct

SEQ ID NO: 497466 - DNA, 19 bp, Mus musculus
  siRNA target sequence for Cct6b (NM_009839.1,1237-1255).
gatcaaggacgccttaaga

SEQ ID NO: 497467 - DNA, 19 bp, Mus musculus
  siRNA target sequence for Cct6b (NM_009839.1,1264-1282).
ccgtgcggtcaaaaatgct

SEQ ID NO: 497468 - DNA, 19 bp, Mus musculus
  siRNA target sequence for Cct6b (NM_009839.1,1265-1283).
cgtgcggtcaaaaatgcta

SEQ ID NO: 497469 - DNA, 19 bp, Mus musculus
  siRNA target sequence for Cct6b (NM_009839.1,1337-1355).
gaagctcttgttaactaca

SEQ ID NO: 497470 - DNA, 19 bp, Mus musculus
  siRNA target sequence for Cct6b (NM_009839.1,1360-1378).
ccgtgtgcagggaagagtt

SEQ ID NO: 497471 - DNA, 19 bp, Mus musculus
  siRNA target sequence for Cct6b (NM_009839.1,1423-1441).
gaaggttcttgctcagaat

SEQ ID NO: 497472 - DNA, 19 bp, Mus musculus
  siRNA target sequence for Cct6b (NM_009839.1,1426-1444).
ggttcttgctcagaattct

SEQ ID NO: 497473 - DNA, 19 bp, Mus musculus
  siRNA target sequence for Cct6b (NM_009839.1,1482-1500).
ctaaacatgccgaatcaaa

SEQ ID NO: 497474 - DNA, 19 bp, Mus musculus
  siRNA target sequence for Cct6b (NM_009839.1,1554-1572).
caggaatctgggataatta

SEQ ID NO: 497475 - DNA, 19 bp, Mus musculus
  siRNA target sequence for Cct7 (NM_007638.2,267-285).
catcctgcagcaaagactt

SEQ ID NO: 497476 - DNA, 19 bp, Mus musculus
  siRNA target sequence for Cct7 (NM_007638.2,685-703).
ctggtgttgcgttcaagaa

SEQ ID NO: 497477 - DNA, 19 bp, Mus musculus
  siRNA target sequence for Cct7 (NM_007638.2,712-730).
cttatgctgggtttgaaat

SEQ ID NO: 497478 - DNA, 19 bp, Mus musculus
  siRNA target sequence for Cct7 (NM_007638.2,743-761).
gtataagaaccccaagatt

SEQ ID NO: 497479 - DNA, 19 bp, Mus musculus
  siRNA target sequence for Cct7 (NM_007638.2,849-867).
gttgatgccgagtggaata

SEQ ID NO: 497480 - DNA, 19 bp, Mus musculus
  siRNA target sequence for Cct7 (NM_007638.2,870-888).
ctctatgacaagttagaga

SEQ ID NO: 497481 - DNA, 19 bp, Mus musculus
  siRNA target sequence for Cct7 (NM_007638.2,907-925).
ccaaagtcatcttgtctaa

SEQ ID NO: 497482 - DNA, 19 bp, Mus musculus
  siRNA target sequence for Cct7 (NM_007638.2,908-926).
caaagtcatcttgtctaaa

SEQ ID NO: 497483 - DNA, 19 bp, Mus musculus
  siRNA target sequence for Cct7 (NM_007638.2,960-978).
gctgatagggacatgttct

SEQ ID NO: 497484 - DNA, 19 bp, Mus musculus
  siRNA target sequence for Cct7 (NM_007638.2,1091-1109).
gtttgaagagacccaaatt

SEQ ID NO: 497485 - DNA, 19 bp, Mus musculus
  siRNA target sequence for Cct7 (NM_007638.2,1177-1195).
gtggcgctgagcagtttat

SEQ ID NO: 497486 - DNA, 19 bp, Mus musculus
  siRNA target sequence for Cct7 (NM_007638.2,1180-1198).
gcgctgagcagtttatgga

SEQ ID NO: 497487 - DNA, 19 bp, Mus musculus
  siRNA target sequence for Cct7 (NM_007638.2,1215-1233).
ctacatgatgccatcatga

SEQ ID NO: 497488 - DNA, 19 bp, Mus musculus
  siRNA target sequence for Cct7 (NM_007638.2,1238-1256).
gaggagggccatcaagaat

SEQ ID NO: 497489 - DNA, 19 bp, Mus musculus
  siRNA target sequence for Cct7 (NM_007638.2,1240-1258).
ggagggccatcaagaatga

SEQ ID NO: 497490 - DNA, 19 bp, Mus musculus
  siRNA target sequence for Cct7 (NM_007638.2,1281-1299).
gccatcgagatggaacttt

SEQ ID NO: 497491 - DNA, 19 bp, Mus musculus
  siRNA target sequence for Cct7 (NM_007638.2,1286-1304).
cgagatggaactttccaaa

SEQ ID NO: 497492 - DNA, 19 bp, Mus musculus
  siRNA target sequence for Cct7 (NM_007638.2,1370-1388).
ggccctggagattattcca

SEQ ID NO: 497493 - DNA, 19 bp, Mus musculus
  siRNA target sequence for Cct7 (NM_007638.2,1477-1495).
gggtggacatcaacaatga

SEQ ID NO: 497494 - DNA, 19 bp, Mus musculus
  siRNA target sequence for Cct8 (NM_009840.2,115-133).
caaggatggagccaaacat

SEQ ID NO: 497495 - DNA, 19 bp, Mus musculus
  siRNA target sequence for Cct8 (NM_009840.2,202-220).
cacagcgtacggaccaaat

SEQ ID NO: 497496 - DNA, 19 bp, Mus musculus
  siRNA target sequence for Cct8 (NM_009840.2,206-224).
gcgtacggaccaaatggaa

SEQ ID NO: 497497 - DNA, 19 bp, Mus musculus
  siRNA target sequence for Cct8 (NM_009840.2,207-225).
cgtacggaccaaatggaat

SEQ ID NO: 497498 - DNA, 19 bp, Mus musculus
  siRNA target sequence for Cct8 (NM_009840.2,211-229).
cggaccaaatggaatgaat

SEQ ID NO: 497499 - DNA, 19 bp, Mus musculus
  siRNA target sequence for Cct8 (NM_009840.2,212-230).
ggaccaaatggaatgaata

SEQ ID NO: 497500 - DNA, 19 bp, Mus musculus
  siRNA target sequence for Cct8 (NM_009840.2,271-289).
cgatgcagcgactatttta

SEQ ID NO: 497501 - DNA, 19 bp, Mus musculus
  siRNA target sequence for Cct8 (NM_009840.2,272-290).
gatgcagcgactattttaa

SEQ ID NO: 497502 - DNA, 19 bp, Mus musculus
  siRNA target sequence for Cct8 (NM_009840.2,276-294).
cagcgactattttaagaga

SEQ ID NO: 497503 - DNA, 19 bp, Mus musculus
  siRNA target sequence for Cct8 (NM_009840.2,312-330).
ctgctgcaaagatgatagt

SEQ ID NO: 497504 - DNA, 19 bp, Mus musculus
  siRNA target sequence for Cct8 (NM_009840.2,315-333).
ctgcaaagatgatagtgat

SEQ ID NO: 497505 - DNA, 19 bp, Mus musculus
  siRNA target sequence for Cct8 (NM_009840.2,331-349).
gatggcctctcatatgcaa

SEQ ID NO: 497506 - DNA, 19 bp, Mus musculus
  siRNA target sequence for Cct8 (NM_009840.2,439-457).
gtcagtatcagaggtaata

SEQ ID NO: 497507 - DNA, 19 bp, Mus musculus
  siRNA target sequence for Cct8 (NM_009840.2,451-469).
ggtaatatcggggtatgaa

SEQ ID NO: 497508 - DNA, 19 bp, Mus musculus
  siRNA target sequence for Cct8 (NM_009840.2,452-470).
gtaatatcggggtatgaaa

SEQ ID NO: 497509 - DNA, 19 bp, Mus musculus
  siRNA target sequence for Cct8 (NM_009840.2,477-495).
gcaaaaaagctcatgagat

SEQ ID NO: 497510 - DNA, 19 bp, Mus musculus
  siRNA target sequence for Cct8 (NM_009840.2,523-541).
caaaaaccttcgagatgtt

SEQ ID NO: 497511 - DNA, 19 bp, Mus musculus
  siRNA target sequence for Cct8 (NM_009840.2,560-578).
cttcgaacctccatcatga

SEQ ID NO: 497512 - DNA, 19 bp, Mus musculus
  siRNA target sequence for Cct8 (NM_009840.2,620-638).
gctcaggcttgtgtttcta

SEQ ID NO: 497513 - DNA, 19 bp, Mus musculus
  siRNA target sequence for Cct8 (NM_009840.2,621-639).
ctcaggcttgtgtttctat

SEQ ID NO: 497514 - DNA, 19 bp, Mus musculus
  siRNA target sequence for Cct8 (NM_009840.2,653-671).
ggcaatttcaatgttgata

SEQ ID NO: 497515 - DNA, 19 bp, Mus musculus
  siRNA target sequence for Cct8 (NM_009840.2,665-683).
gttgataacatcagagtat

SEQ ID NO: 497516 - DNA, 19 bp, Mus musculus
  siRNA target sequence for Cct8 (NM_009840.2,673-691).
catcagagtatgtaagatt

SEQ ID NO: 497517 - DNA, 19 bp, Mus musculus
  siRNA target sequence for Cct8 (NM_009840.2,688-706).
gattctgggctctggtatt

SEQ ID NO: 497518 - DNA, 19 bp, Mus musculus
  siRNA target sequence for Cct8 (NM_009840.2,725-743).
catggcatggtttttaaga

SEQ ID NO: 497519 - DNA, 19 bp, Mus musculus
  siRNA target sequence for Cct8 (NM_009840.2,765-783).
catctgtcaaagatgcaaa

SEQ ID NO: 497520 - DNA, 19 bp, Mus musculus
  siRNA target sequence for Cct8 (NM_009840.2,793-811).
gtactcttgtccgtttgat

SEQ ID NO: 497521 - DNA, 19 bp, Mus musculus
  siRNA target sequence for Cct8 (NM_009840.2,803-821).
ccgtttgatggcatgataa

SEQ ID NO: 497522 - DNA, 19 bp, Mus musculus
  siRNA target sequence for Cct8 (NM_009840.2,805-823).
gtttgatggcatgataaca

SEQ ID NO: 497523 - DNA, 19 bp, Mus musculus
  siRNA target sequence for Cct8 (NM_009840.2,833-851).
gggaccgtgctgattaaga

SEQ ID NO: 497524 - DNA, 19 bp, Mus musculus
  siRNA target sequence for Cct8 (NM_009840.2,835-853).
gaccgtgctgattaagact

SEQ ID NO: 497525 - DNA, 19 bp, Mus musculus
  siRNA target sequence for Cct8 (NM_009840.2,852-870).
ctgccgaggagctaatgaa

SEQ ID NO: 497526 - DNA, 19 bp, Mus musculus
  siRNA target sequence for Cct8 (NM_009840.2,854-872).
gccgaggagctaatgaact

SEQ ID NO: 497527 - DNA, 19 bp, Mus musculus
  siRNA target sequence for Cct8 (NM_009840.2,855-873).
ccgaggagctaatgaactt

SEQ ID NO: 497528 - DNA, 19 bp, Mus musculus
  siRNA target sequence for Cct8 (NM_009840.2,929-947).
ggtgcaaatgtcatagtaa

SEQ ID NO: 497529 - DNA, 19 bp, Mus musculus
  siRNA target sequence for Cct8 (NM_009840.2,963-981).
cggacatagctcttcatta

SEQ ID NO: 497530 - DNA, 19 bp, Mus musculus
  siRNA target sequence for Cct8 (NM_009840.2,974-992).
cttcattatgctaacaagt

SEQ ID NO: 497531 - DNA, 19 bp, Mus musculus
  siRNA target sequence for Cct8 (NM_009840.2,977-995).
cattatgctaacaagtaca

SEQ ID NO: 497532 - DNA, 19 bp, Mus musculus
  siRNA target sequence for Cct8 (NM_009840.2,983-1001).
gctaacaagtacaatatca

SEQ ID NO: 497533 - DNA, 19 bp, Mus musculus
  siRNA target sequence for Cct8 (NM_009840.2,1031-1049).
ctcagacgactctgtaaaa

SEQ ID NO: 497534 - DNA, 19 bp, Mus musculus
  siRNA target sequence for Cct8 (NM_009840.2,1033-1051).
cagacgactctgtaaaaca

SEQ ID NO: 497535 - DNA, 19 bp, Mus musculus
  siRNA target sequence for Cct8 (NM_009840.2,1059-1077).
ccacagctcttccaaaatt

SEQ ID NO: 497536 - DNA, 19 bp, Mus musculus
  siRNA target sequence for Cct8 (NM_009840.2,1139-1157).
gatacacaagtggttgttt

SEQ ID NO: 497537 - DNA, 19 bp, Mus musculus
  siRNA target sequence for Cct8 (NM_009840.2,1179-1197).
gtgccatttctactatagt

SEQ ID NO: 497538 - DNA, 19 bp, Mus musculus
  siRNA target sequence for Cct8 (NM_009840.2,1205-1223).
ggttctacagacaatctga

SEQ ID NO: 497539 - DNA, 19 bp, Mus musculus
  siRNA target sequence for Cct8 (NM_009840.2,1206-1224).
gttctacagacaatctgat

SEQ ID NO: 497540 - DNA, 19 bp, Mus musculus
  siRNA target sequence for Cct8 (NM_009840.2,1247-1265).
gatgatggagttaatactt

SEQ ID NO: 497541 - DNA, 19 bp, Mus musculus
  siRNA target sequence for Cct8 (NM_009840.2,1307-1325).
ggagctaccgaaattgaat

SEQ ID NO: 497542 - DNA, 19 bp, Mus musculus
  siRNA target sequence for Cct8 (NM_009840.2,1356-1374).
cgtgtcctgggcttgaaca

SEQ ID NO: 497543 - DNA, 19 bp, Mus musculus
  siRNA target sequence for Cct8 (NM_009840.2,1359-1377).
gtcctgggcttgaacagta

SEQ ID NO: 497544 - DNA, 19 bp, Mus musculus
  siRNA target sequence for Cct8 (NM_009840.2,1416-1434).
cacgggcactggcagaaaa

SEQ ID NO: 497545 - DNA, 19 bp, Mus musculus
  siRNA target sequence for Cct8 (NM_009840.2,1418-1436).
cgggcactggcagaaaatt

SEQ ID NO: 497546 - DNA, 19 bp, Mus musculus
  siRNA target sequence for Cct8 (NM_009840.2,1440-1458).
gcgtgaaggccaatgaagt

SEQ ID NO: 497547 - DNA, 19 bp, Mus musculus
  siRNA target sequence for Cct8 (NM_009840.2,1441-1459).
cgtgaaggccaatgaagtt

SEQ ID NO: 497548 - DNA, 19 bp, Mus musculus
  siRNA target sequence for Cct8 (NM_009840.2,1449-1467).
ccaatgaagttatctctaa

SEQ ID NO: 497549 - DNA, 19 bp, Mus musculus
  siRNA target sequence for Cct8 (NM_009840.2,1450-1468).
caatgaagttatctctaaa

SEQ ID NO: 497550 - DNA, 19 bp, Mus musculus
  siRNA target sequence for Cct8 (NM_009840.2,1529-1547).
cctgctgtaaaggatatgt

SEQ ID NO: 497551 - DNA, 19 bp, Mus musculus
  siRNA target sequence for Cct8 (NM_009840.2,1550-1568).
gaagccagtattttagata

SEQ ID NO: 497552 - DNA, 19 bp, Mus musculus
  siRNA target sequence for Cct8 (NM_009840.2,1553-1571).
gccagtattttagatactt

SEQ ID NO: 497553 - DNA, 19 bp, Mus musculus
  siRNA target sequence for Cct8 (NM_009840.2,1695-1713).
gggatgacgaccagaatga

SEQ ID NO: 497554 - DNA, 19 bp, Mus musculus
  siRNA target sequence for Cd2 (NM_013486.1,174-192).
gaacatccccaactttcaa

SEQ ID NO: 497555 - DNA, 19 bp, Mus musculus
  siRNA target sequence for Cd2 (NM_013486.1,234-252).
caccctggtcgcagagttt

SEQ ID NO: 497556 - DNA, 19 bp, Mus musculus
  siRNA target sequence for Cd2 (NM_013486.1,241-259).
gtcgcagagtttaaaagga

SEQ ID NO: 497557 - DNA, 19 bp, Mus musculus
  siRNA target sequence for Cd2 (NM_013486.1,257-275).
ggaagaagccacctttttt

SEQ ID NO: 497558 - DNA, 19 bp, Mus musculus
  siRNA target sequence for Cd2 (NM_013486.1,266-284).
caccttttttgatatcaga

SEQ ID NO: 497559 - DNA, 19 bp, Mus musculus
  siRNA target sequence for Cd2 (NM_013486.1,302-320).
caaacggatccctgaagat

SEQ ID NO: 497560 - DNA, 19 bp, Mus musculus
  siRNA target sequence for Cd2 (NM_013486.1,307-325).
ggatccctgaagataaaga

SEQ ID NO: 497561 - DNA, 19 bp, Mus musculus
  siRNA target sequence for Cd2 (NM_013486.1,342-360).
cgacagtggcacctataat

SEQ ID NO: 497562 - DNA, 19 bp, Mus musculus
  siRNA target sequence for Cd2 (NM_013486.1,345-363).
cagtggcacctataatgta

SEQ ID NO: 497563 - DNA, 19 bp, Mus musculus
  siRNA target sequence for Cd2 (NM_013486.1,347-365).
gtggcacctataatgtaat

SEQ ID NO: 497564 - DNA, 19 bp, Mus musculus
  siRNA target sequence for Cd2 (NM_013486.1,373-391).
ggcacaaatgggatgacta

SEQ ID NO: 497565 - DNA, 19 bp, Mus musculus
  siRNA target sequence for Cd2 (NM_013486.1,484-502).
gtcttgcaagggacagatt

SEQ ID NO: 497566 - DNA, 19 bp, Mus musculus
  siRNA target sequence for Cd2 (NM_013486.1,523-541).
ggggaaacactactcaata

SEQ ID NO: 497567 - DNA, 19 bp, Mus musculus
  siRNA target sequence for Cd2 (NM_013486.1,525-543).
ggaaacactactcaatagt

SEQ ID NO: 497568 - DNA, 19 bp, Mus musculus
  siRNA target sequence for Cd2 (NM_013486.1,614-632).
cggtcagcaaggagtctaa

SEQ ID NO: 497569 - DNA, 19 bp, Mus musculus
  siRNA target sequence for Cd2 (NM_013486.1,616-634).
gtcagcaaggagtctaaga

SEQ ID NO: 497570 - DNA, 19 bp, Mus musculus
  siRNA target sequence for Cd2 (NM_013486.1,1061-1079).
gtggagatggtgtttcact

SEQ ID NO: 497571 - DNA, 19 bp, Mus musculus
  siRNA target sequence for Cdc2a (NM_007659.2,145-163).
cttacggtgtggtgtataa

SEQ ID NO: 497572 - DNA, 19 bp, Mus musculus
  siRNA target sequence for Cdc2a (NM_007659.2,253-271).
gggaaatctctctattaaa

SEQ ID NO: 497573 - DNA, 19 bp, Mus musculus
  siRNA target sequence for Cdc2a (NM_007659.2,273-291).
gaacttcgacatccaaata

SEQ ID NO: 497574 - DNA, 19 bp, Mus musculus
  siRNA target sequence for Cdc2a (NM_007659.2,328-346).
ggctgtatctcatctttga

SEQ ID NO: 497575 - DNA, 19 bp, Mus musculus
  siRNA target sequence for Cdc2a (NM_007659.2,330-348).
ctgtatctcatctttgagt

SEQ ID NO: 497576 - DNA, 19 bp, Mus musculus
  siRNA target sequence for Cdc2a (NM_007659.2,355-373).
ccatggacctcaagaagta

SEQ ID NO: 497577 - DNA, 19 bp, Mus musculus
  siRNA target sequence for Cdc2a (NM_007659.2,390-408).
cctgggcagttcatggatt

SEQ ID NO: 497578 - DNA, 19 bp, Mus musculus
  siRNA target sequence for Cdc2a (NM_007659.2,405-423).
gattcttcactcgttaaga

SEQ ID NO: 497579 - DNA, 19 bp, Mus musculus
  siRNA target sequence for Cdc2a (NM_007659.2,412-430).
cactcgttaagagttactt

SEQ ID NO: 497580 - DNA, 19 bp, Mus musculus
  siRNA target sequence for Cdc2a (NM_007659.2,424-442).
gttacttacaccaaatcct

SEQ ID NO: 497581 - DNA, 19 bp, Mus musculus
  siRNA target sequence for Cdc2a (NM_007659.2,440-458).
cctccagggaattgtgttt

SEQ ID NO: 497582 - DNA, 19 bp, Mus musculus
  siRNA target sequence for Cdc2a (NM_007659.2,484-502).
gagacttgaaacctcaaaa

SEQ ID NO: 497583 - DNA, 19 bp, Mus musculus
  siRNA target sequence for Cdc2a (NM_007659.2,513-531).
gatgacaaaggaacaatca

SEQ ID NO: 497584 - DNA, 19 bp, Mus musculus
  siRNA target sequence for Cdc2a (NM_007659.2,656-674).
ggttgacatctggagtata

SEQ ID NO: 497585 - DNA, 19 bp, Mus musculus
  siRNA target sequence for Cdc2a (NM_007659.2,667-685).
ggagtatagggaccatatt

SEQ ID NO: 497586 - DNA, 19 bp, Mus musculus
  siRNA target sequence for Cdc2a (NM_007659.2,716-734).
ccacggcgactcagagatt

SEQ ID NO: 497587 - DNA, 19 bp, Mus musculus
  siRNA target sequence for Cdc2a (NM_007659.2,873-891).
gacgagaacggcttggatt

SEQ ID NO: 497588 - DNA, 19 bp, Mus musculus
  siRNA target sequence for Cdc2a (NM_007659.2,883-901).
gcttggatttgctctcaaa

SEQ ID NO: 497589 - DNA, 19 bp, Mus musculus
  siRNA target sequence for Cdc2a (NM_007659.2,884-902).
cttggatttgctctcaaaa

SEQ ID NO: 497590 - DNA, 19 bp, Mus musculus
  siRNA target sequence for Cdc2a (NM_007659.2,896-914).
ctcaaaaatgctagtctat

SEQ ID NO: 497591 - DNA, 19 bp, Mus musculus
  siRNA target sequence for Cdc2a (NM_007659.2,898-916).
caaaaatgctagtctatga

SEQ ID NO: 497592 - DNA, 19 bp, Mus musculus
  siRNA target sequence for Cdc2a (NM_007659.2,950-968).
gaagcacccgtactttgat

SEQ ID NO: 497593 - DNA, 19 bp, Mus musculus
  siRNA target sequence for Cdc2l2 (NM_007661.2,107-125).
cttggaaagtgaaaacgtt

SEQ ID NO: 497594 - DNA, 19 bp, Mus musculus
  siRNA target sequence for Cdc2l2 (NM_007661.2,111-129).
gaaagtgaaaacgttagat

SEQ ID NO: 497595 - DNA, 19 bp, Mus musculus
  siRNA target sequence for Cdc2l2 (NM_007661.2,200-218).
ctgatgaccgcgattccaa

SEQ ID NO: 497596 - DNA, 19 bp, Mus musculus
  siRNA target sequence for Cdc2l2 (NM_007661.2,253-271).
caccgaatggagatcacaa

SEQ ID NO: 497597 - DNA, 19 bp, Mus musculus
  siRNA target sequence for Cdc2l2 (NM_007661.2,256-274).
cgaatggagatcacaatca

SEQ ID NO: 497598 - DNA, 19 bp, Mus musculus
  siRNA target sequence for Cdc2l2 (NM_007661.2,354-372).
gcaaatgtctcggaaagaa

SEQ ID NO: 497599 - DNA, 19 bp, Mus musculus
  siRNA target sequence for Cdc2l2 (NM_007661.2,444-462).
gaaacatgccagagtgaaa

SEQ ID NO: 497600 - DNA, 19 bp, Mus musculus
  siRNA target sequence for Cdc2l2 (NM_007661.2,927-945).
gtcttcatcagcagaatca

SEQ ID NO: 497601 - DNA, 19 bp, Mus musculus
  siRNA target sequence for Cdc2l2 (NM_007661.2,1000-1018).
gggagcaccagtgaagaat

SEQ ID NO: 497602 - DNA, 19 bp, Mus musculus
  siRNA target sequence for Cdc2l2 (NM_007661.2,1002-1020).
gagcaccagtgaagaatca

SEQ ID NO: 497603 - DNA, 19 bp, Mus musculus
  siRNA target sequence for Cdc2l2 (NM_007661.2,1254-1272).
ccccaccgaaggagactat

SEQ ID NO: 497604 - DNA, 19 bp, Mus musculus
  siRNA target sequence for Cdc2l2 (NM_007661.2,1256-1274).
ccaccgaaggagactatgt

SEQ ID NO: 497605 - DNA, 19 bp, Mus musculus
  siRNA target sequence for Cdc2l2 (NM_007661.2,1352-1370).
ggagtgtagaggagtttca

SEQ ID NO: 497606 - DNA, 19 bp, Mus musculus
  siRNA target sequence for Cdc2l2 (NM_007661.2,1447-1465).
gctctgaagcggttaaaga

SEQ ID NO: 497607 - DNA, 19 bp, Mus musculus
  siRNA target sequence for Cdc2l2 (NM_007661.2,1448-1466).
ctctgaagcggttaaagat

SEQ ID NO: 497608 - DNA, 19 bp, Mus musculus
  siRNA target sequence for Cdc2l2 (NM_007661.2,1496-1514).
cgtcgctgagggaaatcaa

SEQ ID NO: 497609 - DNA, 19 bp, Mus musculus
  siRNA target sequence for Cdc2l2 (NM_007661.2,1545-1563).
cgtcaccgtcagggaaatt

SEQ ID NO: 497610 - DNA, 19 bp, Mus musculus
  siRNA target sequence for Cdc2l2 (NM_007661.2,1574-1592).
gtaacatggacaagatcta

SEQ ID NO: 497611 - DNA, 19 bp, Mus musculus
  siRNA target sequence for Cdc2l2 (NM_007661.2,1708-1726).
cacctccatgacaattgga

SEQ ID NO: 497612 - DNA, 19 bp, Mus musculus
  siRNA target sequence for Cdc2l2 (NM_007661.2,1766-1784).
gccatgctggcattctcaa

SEQ ID NO: 497613 - DNA, 19 bp, Mus musculus
  siRNA target sequence for Cdc2l2 (NM_007661.2,1830-1848).
ggcctacactccagttgtt

SEQ ID NO: 497614 - DNA, 19 bp, Mus musculus
  siRNA target sequence for Cdc2l2 (NM_007661.2,1832-1850).
cctacactccagttgttgt

SEQ ID NO: 497615 - DNA, 19 bp, Mus musculus
  siRNA target sequence for Cdc2l2 (NM_007661.2,1833-1851).
ctacactccagttgttgta

SEQ ID NO: 497616 - DNA, 19 bp, Mus musculus
  siRNA target sequence for Cdc2l2 (NM_007661.2,1860-1878).
gtatcgtgccccagaacta

SEQ ID NO: 497617 - DNA, 19 bp, Mus musculus
  siRNA target sequence for Cdc2l2 (NM_007661.2,1919-1937).
ggtcggtaggctgcatatt

SEQ ID NO: 497618 - DNA, 19 bp, Mus musculus
  siRNA target sequence for Cdc2l2 (NM_007661.2,1920-1938).
gtcggtaggctgcatattt

SEQ ID NO: 497619 - DNA, 19 bp, Mus musculus
  siRNA target sequence for Cdc2l2 (NM_007661.2,1923-1941).
ggtaggctgcatatttgga

SEQ ID NO: 497620 - DNA, 19 bp, Mus musculus
  siRNA target sequence for Cdc2l2 (NM_007661.2,1968-1986).
ccctgggaagtcagatatt

SEQ ID NO: 497621 - DNA, 19 bp, Mus musculus
  siRNA target sequence for Cdc2l2 (NM_007661.2,1970-1988).
ctgggaagtcagatattga

SEQ ID NO: 497622 - DNA, 19 bp, Mus musculus
  siRNA target sequence for Cdc2l2 (NM_007661.2,2016-2034).
gggtactcctagtgagaaa

SEQ ID NO: 497623 - DNA, 19 bp, Mus musculus
  siRNA target sequence for Cdc2l2 (NM_007661.2,2056-2074).
ctcccagccgtcaagaaga

SEQ ID NO: 497624 - DNA, 19 bp, Mus musculus
  siRNA target sequence for Cdc2l2 (NM_007661.2,2084-2102).
gcgagtatccctataacaa

SEQ ID NO: 497625 - DNA, 19 bp, Mus musculus
  siRNA target sequence for Cdc2l2 (NM_007661.2,2121-2139).
ggctttgttatcagatcaa

SEQ ID NO: 497626 - DNA, 19 bp, Mus musculus
  siRNA target sequence for Cdc2l2 (NM_007661.2,2140-2158).
ggctttgatctcatgaaca

SEQ ID NO: 497627 - DNA, 19 bp, Mus musculus
  siRNA target sequence for Cdc2l2 (NM_007661.2,2184-2202).
gaggatcaacgcagaagat

SEQ ID NO: 497628 - DNA, 19 bp, Mus musculus
  siRNA target sequence for Cdc2l2 (NM_007661.2,2203-2221).
ggcctcaagcacgaatatt

SEQ ID NO: 497629 - DNA, 19 bp, Mus musculus
  siRNA target sequence for Cdc2l2 (NM_007661.2,2204-2222).
gcctcaagcacgaatattt

SEQ ID NO: 497630 - DNA, 19 bp, Mus musculus
  siRNA target sequence for Cdc6 (NM_011799.1,126-144).
cagggaaggagctaaagta

SEQ ID NO: 497631 - DNA, 19 bp, Mus musculus
  siRNA target sequence for Cdc6 (NM_011799.1,129-147).
ggaaggagctaaagtatta

SEQ ID NO: 497632 - DNA, 19 bp, Mus musculus
  siRNA target sequence for Cdc6 (NM_011799.1,130-148).
gaaggagctaaagtattat

SEQ ID NO: 497633 - DNA, 19 bp, Mus musculus
  siRNA target sequence for Cdc6 (NM_011799.1,133-151).
ggagctaaagtattataga

SEQ ID NO: 497634 - DNA, 19 bp, Mus musculus
  siRNA target sequence for Cdc6 (NM_011799.1,166-184).
gacttctggcatcatacaa

SEQ ID NO: 497635 - DNA, 19 bp, Mus musculus
  siRNA target sequence for Cdc6 (NM_011799.1,243-261).
cgaaaaagaagctatctaa

SEQ ID NO: 497636 - DNA, 19 bp, Mus musculus
  siRNA target sequence for Cdc6 (NM_011799.1,276-294).
ccaattcccgggattgtga

SEQ ID NO: 497637 - DNA, 19 bp, Mus musculus
  siRNA target sequence for Cdc6 (NM_011799.1,277-295).
caattcccgggattgtgaa

SEQ ID NO: 497638 - DNA, 19 bp, Mus musculus
  siRNA target sequence for Cdc6 (NM_011799.1,282-300).
cccgggattgtgaagtaaa

SEQ ID NO: 497639 - DNA, 19 bp, Mus musculus
  siRNA target sequence for Cdc6 (NM_011799.1,283-301).
ccgggattgtgaagtaaaa

SEQ ID NO: 497640 - DNA, 19 bp, Mus musculus
  siRNA target sequence for Cdc6 (NM_011799.1,330-348).
ctccgtgtgtggacgtaaa

SEQ ID NO: 497641 - DNA, 19 bp, Mus musculus
  siRNA target sequence for Cdc6 (NM_011799.1,397-415).
caacactccccggttatct

SEQ ID NO: 497642 - DNA, 19 bp, Mus musculus
  siRNA target sequence for Cdc6 (NM_011799.1,452-470).
ggaccccctcgctcacata

SEQ ID NO: 497643 - DNA, 19 bp, Mus musculus
  siRNA target sequence for Cdc6 (NM_011799.1,472-490).
gtggaaggggtgcagatta

SEQ ID NO: 497644 - DNA, 19 bp, Mus musculus
  siRNA target sequence for Cdc6 (NM_011799.1,480-498).
ggtgcagattagtattcga

SEQ ID NO: 497645 - DNA, 19 bp, Mus musculus
  siRNA target sequence for Cdc6 (NM_011799.1,481-499).
gtgcagattagtattcgat

SEQ ID NO: 497646 - DNA, 19 bp, Mus musculus
  siRNA target sequence for Cdc6 (NM_011799.1,486-504).
gattagtattcgatgatga

SEQ ID NO: 497647 - DNA, 19 bp, Mus musculus
  siRNA target sequence for Cdc6 (NM_011799.1,496-514).
cgatgatgagccgacattt

SEQ ID NO: 497648 - DNA, 19 bp, Mus musculus
  siRNA target sequence for Cdc6 (NM_011799.1,548-566).
cgccaacaccagatacgtt

SEQ ID NO: 497649 - DNA, 19 bp, Mus musculus
  siRNA target sequence for Cdc6 (NM_011799.1,568-586).
ctcctccgctcaaagaagt

SEQ ID NO: 497650 - DNA, 19 bp, Mus musculus
  siRNA target sequence for Cdc6 (NM_011799.1,658-676).
gcaagaaggcacttgctat

SEQ ID NO: 497651 - DNA, 19 bp, Mus musculus
  siRNA target sequence for Cdc6 (NM_011799.1,742-760).
gggtgtcatcaggaatttt

SEQ ID NO: 497652 - DNA, 19 bp, Mus musculus
  siRNA target sequence for Cdc6 (NM_011799.1,744-762).
gtgtcatcaggaattttct

SEQ ID NO: 497653 - DNA, 19 bp, Mus musculus
  siRNA target sequence for Cdc6 (NM_011799.1,843-861).
gccggattctgcaagactt

SEQ ID NO: 497654 - DNA, 19 bp, Mus musculus
  siRNA target sequence for Cdc6 (NM_011799.1,846-864).
ggattctgcaagacttcaa

SEQ ID NO: 497655 - DNA, 19 bp, Mus musculus
  siRNA target sequence for Cdc6 (NM_011799.1,869-887).
gaagtaaaaggctttaaat

SEQ ID NO: 497656 - DNA, 19 bp, Mus musculus
  siRNA target sequence for Cdc6 (NM_011799.1,1082-1100).
gggcaggatgtattataca

SEQ ID NO: 497657 - DNA, 19 bp, Mus musculus
  siRNA target sequence for Cdc6 (NM_011799.1,1133-1151).
cgattggtgctcattggta

SEQ ID NO: 497658 - DNA, 19 bp, Mus musculus
  siRNA target sequence for Cdc6 (NM_011799.1,1134-1152).
gattggtgctcattggtat

SEQ ID NO: 497659 - DNA, 19 bp, Mus musculus
  siRNA target sequence for Cdc6 (NM_011799.1,1141-1159).
gctcattggtattgctaat

SEQ ID NO: 497660 - DNA, 19 bp, Mus musculus
  siRNA target sequence for Cdc6 (NM_011799.1,1212-1230).
gtaagccgcagttattgaa

SEQ ID NO: 497661 - DNA, 19 bp, Mus musculus
  siRNA target sequence for Cdc6 (NM_011799.1,1278-1296).
gacttagtcaggtgtcaaa

SEQ ID NO: 497662 - DNA, 19 bp, Mus musculus
  siRNA target sequence for Cdc6 (NM_011799.1,1367-1385).
cgtaaagcgctggatgttt

SEQ ID NO: 497663 - DNA, 19 bp, Mus musculus
  siRNA target sequence for Cdc6 (NM_011799.1,1386-1404).
gcaggcgagctatagaaat

SEQ ID NO: 497664 - DNA, 19 bp, Mus musculus
  siRNA target sequence for Cdc6 (NM_011799.1,1387-1405).
caggcgagctatagaaatt

SEQ ID NO: 497665 - DNA, 19 bp, Mus musculus
  siRNA target sequence for Cdc6 (NM_011799.1,1389-1407).
ggcgagctatagaaattgt

SEQ ID NO: 497666 - DNA, 19 bp, Mus musculus
  siRNA target sequence for Cdc6 (NM_011799.1,1442-1460).
ccactctccgaatgtaaat

SEQ ID NO: 497667 - DNA, 19 bp, Mus musculus
  siRNA target sequence for Cdc6 (NM_011799.1,1489-1507).
cgttggtcttgctcacata

SEQ ID NO: 497668 - DNA, 19 bp, Mus musculus
  siRNA target sequence for Cdc6 (NM_011799.1,1490-1508).
gttggtcttgctcacatat

SEQ ID NO: 497669 - DNA, 19 bp, Mus musculus
  siRNA target sequence for Cdc6 (NM_011799.1,1643-1661).
gtcaccctggggaagttat

SEQ ID NO: 497670 - DNA, 19 bp, Mus musculus
  siRNA target sequence for Cdc6 (NM_011799.1,1645-1663).
caccctggggaagttatat

SEQ ID NO: 497671 - DNA, 19 bp, Mus musculus
  siRNA target sequence for Cdc6 (NM_011799.1,1647-1665).
ccctggggaagttatatga

SEQ ID NO: 497672 - DNA, 19 bp, Mus musculus
  siRNA target sequence for Cdc6 (NM_011799.1,1798-1816).
ggtgtctctgaagattgaa

SEQ ID NO: 497673 - DNA, 19 bp, Mus musculus
  siRNA target sequence for Cdc7 (NM_009863.1,196-214).
ggagccaatggcgttttct

SEQ ID NO: 497674 - DNA, 19 bp, Mus musculus
  siRNA target sequence for Cdc7 (NM_009863.1,197-215).
gagccaatggcgttttctt

SEQ ID NO: 497675 - DNA, 19 bp, Mus musculus
  siRNA target sequence for Cdc7 (NM_009863.1,237-255).
gtccggctgatgactcttt

SEQ ID NO: 497676 - DNA, 19 bp, Mus musculus
  siRNA target sequence for Cdc7 (NM_009863.1,239-257).
ccggctgatgactctttaa

SEQ ID NO: 497677 - DNA, 19 bp, Mus musculus
  siRNA target sequence for Cdc7 (NM_009863.1,268-286).
gcagagtgttaaactttca

SEQ ID NO: 497678 - DNA, 19 bp, Mus musculus
  siRNA target sequence for Cdc7 (NM_009863.1,321-339).
ctgtaccacaactagtcaa

SEQ ID NO: 497679 - DNA, 19 bp, Mus musculus
  siRNA target sequence for Cdc7 (NM_009863.1,373-391).
caccttcagctctgtttat

SEQ ID NO: 497680 - DNA, 19 bp, Mus musculus
  siRNA target sequence for Cdc7 (NM_009863.1,445-463).
cttaattcccacaagtcat

SEQ ID NO: 497681 - DNA, 19 bp, Mus musculus
  siRNA target sequence for Cdc7 (NM_009863.1,521-539).
gtcatgggacttaagtact

SEQ ID NO: 497682 - DNA, 19 bp, Mus musculus
  siRNA target sequence for Cdc7 (NM_009863.1,541-559).
cttcagaaaaaatgatcat

SEQ ID NO: 497683 - DNA, 19 bp, Mus musculus
  siRNA target sequence for Cdc7 (NM_009863.1,554-572).
gatcatgtggttattgcta

SEQ ID NO: 497684 - DNA, 19 bp, Mus musculus
  siRNA target sequence for Cdc7 (NM_009863.1,590-608).
gagtcctttttggacattt

SEQ ID NO: 497685 - DNA, 19 bp, Mus musculus
  siRNA target sequence for Cdc7 (NM_009863.1,632-650).
gttcgggaatatatgtata

SEQ ID NO: 497686 - DNA, 19 bp, Mus musculus
  siRNA target sequence for Cdc7 (NM_009863.1,663-681).
ctttgaaacggattcatca

SEQ ID NO: 497687 - DNA, 19 bp, Mus musculus
  siRNA target sequence for Cdc7 (NM_009863.1,672-690).
ggattcatcagtttggtat

SEQ ID NO: 497688 - DNA, 19 bp, Mus musculus
  siRNA target sequence for Cdc7 (NM_009863.1,701-719).
gatgtgaagcccagcaatt

SEQ ID NO: 497689 - DNA, 19 bp, Mus musculus
  siRNA target sequence for Cdc7 (NM_009863.1,710-728).
cccagcaattttttataca

SEQ ID NO: 497690 - DNA, 19 bp, Mus musculus
  siRNA target sequence for Cdc7 (NM_009863.1,711-729).
ccagcaattttttatacaa

SEQ ID NO: 497691 - DNA, 19 bp, Mus musculus
  siRNA target sequence for Cdc7 (NM_009863.1,775-793).
gggaacccgtgacacaaaa

SEQ ID NO: 497692 - DNA, 19 bp, Mus musculus
  siRNA target sequence for Cdc7 (NM_009863.1,776-794).
ggaacccgtgacacaaaaa

SEQ ID NO: 497693 - DNA, 19 bp, Mus musculus
  siRNA target sequence for Cdc7 (NM_009863.1,777-795).
gaacccgtgacacaaaaat

SEQ ID NO: 497694 - DNA, 19 bp, Mus musculus
  siRNA target sequence for Cdc7 (NM_009863.1,780-798).
cccgtgacacaaaaataga

SEQ ID NO: 497695 - DNA, 19 bp, Mus musculus
  siRNA target sequence for Cdc7 (NM_009863.1,836-854).
gattgttcacgaaacaagt

SEQ ID NO: 497696 - DNA, 19 bp, Mus musculus
  siRNA target sequence for Cdc7 (NM_009863.1,840-858).
gttcacgaaacaagtatca

SEQ ID NO: 497697 - DNA, 19 bp, Mus musculus
  siRNA target sequence for Cdc7 (NM_009863.1,916-934).
gcagtgtaccccaaaaact

SEQ ID NO: 497698 - DNA, 19 bp, Mus musculus
  siRNA target sequence for Cdc7 (NM_009863.1,925-943).
cccaaaaacttctgtcaaa

SEQ ID NO: 497699 - DNA, 19 bp, Mus musculus
  siRNA target sequence for Cdc7 (NM_009863.1,926-944).
ccaaaaacttctgtcaaaa

SEQ ID NO: 497700 - DNA, 19 bp, Mus musculus
  siRNA target sequence for Cdc7 (NM_009863.1,945-963).
gatcctacacacaagttca

SEQ ID NO: 497701 - DNA, 19 bp, Mus musculus
  siRNA target sequence for Cdc7 (NM_009863.1,948-966).
cctacacacaagttcacat

SEQ ID NO: 497702 - DNA, 19 bp, Mus musculus
  siRNA target sequence for Cdc7 (NM_009863.1,949-967).
ctacacacaagttcacatt

SEQ ID NO: 497703 - DNA, 19 bp, Mus musculus
  siRNA target sequence for Cdc7 (NM_009863.1,982-1000).
cggaaaggagagatctgta

SEQ ID NO: 497704 - DNA, 19 bp, Mus musculus
  siRNA target sequence for Cdc7 (NM_009863.1,1012-1030).
ccagcgctctgtttttgga

SEQ ID NO: 497705 - DNA, 19 bp, Mus musculus
  siRNA target sequence for Cdc7 (NM_009863.1,1121-1139).
cgaaagctagcgacaaaaa

SEQ ID NO: 497706 - DNA, 19 bp, Mus musculus
  siRNA target sequence for Cdc7 (NM_009863.1,1122-1140).
gaaagctagcgacaaaaaa

SEQ ID NO: 497707 - DNA, 19 bp, Mus musculus
  siRNA target sequence for Cdc7 (NM_009863.1,1141-1159).
gacggccatttctacaaaa

SEQ ID NO: 497708 - DNA, 19 bp, Mus musculus
  siRNA target sequence for Cdc7 (NM_009863.1,1144-1162).
ggccatttctacaaaagct

SEQ ID NO: 497709 - DNA, 19 bp, Mus musculus
  siRNA target sequence for Cdc7 (NM_009863.1,1356-1374).
ggtctgcaggtgtcatatt

SEQ ID NO: 497710 - DNA, 19 bp, Mus musculus
  siRNA target sequence for Cdc7 (NM_009863.1,1389-1407).
gtgggcggtacccatttta

SEQ ID NO: 497711 - DNA, 19 bp, Mus musculus
  siRNA target sequence for Cdc7 (NM_009863.1,1392-1410).
ggcggtacccattttacaa

SEQ ID NO: 497712 - DNA, 19 bp, Mus musculus
  siRNA target sequence for Cdc7 (NM_009863.1,1408-1426).
caaggccagtgatgactta

SEQ ID NO: 497713 - DNA, 19 bp, Mus musculus
  siRNA target sequence for Cdc7 (NM_009863.1,1411-1429).
ggccagtgatgacttaact

SEQ ID NO: 497714 - DNA, 19 bp, Mus musculus
  siRNA target sequence for Cdc7 (NM_009863.1,1454-1472).
cgaggatccagggaaacta

SEQ ID NO: 497715 - DNA, 19 bp, Mus musculus
  siRNA target sequence for Cdc7 (NM_009863.1,1455-1473).
gaggatccagggaaactat

SEQ ID NO: 497716 - DNA, 19 bp, Mus musculus
  siRNA target sequence for Cdc7 (NM_009863.1,1474-1492).
ccaggctgctaaagctttt

SEQ ID NO: 497717 - DNA, 19 bp, Mus musculus
  siRNA target sequence for Cdc7 (NM_009863.1,1686-1704).
cagaggactccttgtataa

SEQ ID NO: 497718 - DNA, 19 bp, Mus musculus
  siRNA target sequence for Cdc7 (NM_009863.1,1688-1706).
gaggactccttgtataaaa

SEQ ID NO: 497719 - DNA, 19 bp, Mus musculus
  siRNA target sequence for Cdc7 (NM_009863.1,1709-1727).
gacaacgatggctattgga

SEQ ID NO: 497720 - DNA, 19 bp, Mus musculus
  siRNA target sequence for Cdh16 (NM_007663.1,316-334).
ctcaaacacggcagatcaa

SEQ ID NO: 497721 - DNA, 19 bp, Mus musculus
  siRNA target sequence for Cdh16 (NM_007663.1,318-336).
caaacacggcagatcaaaa

SEQ ID NO: 497722 - DNA, 19 bp, Mus musculus
  siRNA target sequence for Cdh16 (NM_007663.1,437-455).
gaggatggacgtatcttgt

SEQ ID NO: 497723 - DNA, 19 bp, Mus musculus
  siRNA target sequence for Cdh16 (NM_007663.1,497-515).
gaccaggtaccccaattct

SEQ ID NO: 497724 - DNA, 19 bp, Mus musculus
  siRNA target sequence for Cdh16 (NM_007663.1,623-641).
cttcgcttccacattctga

SEQ ID NO: 497725 - DNA, 19 bp, Mus musculus
  siRNA target sequence for Cdh16 (NM_007663.1,972-990).
ccttcgatgtggatacaga

SEQ ID NO: 497726 - DNA, 19 bp, Mus musculus
  siRNA target sequence for Cdh16 (NM_007663.1,1048-1066).
ccaagtccgagctcagaat

SEQ ID NO: 497727 - DNA, 19 bp, Mus musculus
  siRNA target sequence for Cdh16 (NM_007663.1,1049-1067).
caagtccgagctcagaatt

SEQ ID NO: 497728 - DNA, 19 bp, Mus musculus
  siRNA target sequence for Cdh16 (NM_007663.1,1239-1257).
cacccaattcccacattgt

SEQ ID NO: 497729 - DNA, 19 bp, Mus musculus
  siRNA target sequence for Cdh16 (NM_007663.1,1242-1260).
ccaattcccacattgtata

SEQ ID NO: 497730 - DNA, 19 bp, Mus musculus
  siRNA target sequence for Cdh16 (NM_007663.1,1243-1261).
caattcccacattgtatat

SEQ ID NO: 497731 - DNA, 19 bp, Mus musculus
  siRNA target sequence for Cdh16 (NM_007663.1,1248-1266).
cccacattgtatatcagtt

SEQ ID NO: 497732 - DNA, 19 bp, Mus musculus
  siRNA target sequence for Cdh16 (NM_007663.1,1495-1513).
gattgggcctgtaactctt

SEQ ID NO: 497733 - DNA, 19 bp, Mus musculus
  siRNA target sequence for Cdh16 (NM_007663.1,1721-1739).
gtggtggtcgtgagtaaca

SEQ ID NO: 497734 - DNA, 19 bp, Mus musculus
  siRNA target sequence for Cdh16 (NM_007663.1,1723-1741).
ggtggtcgtgagtaacata

SEQ ID NO: 497735 - DNA, 19 bp, Mus musculus
  siRNA target sequence for Cdh16 (NM_007663.1,1726-1744).
ggtcgtgagtaacatagaa

SEQ ID NO: 497736 - DNA, 19 bp, Mus musculus
  siRNA target sequence for Cdh16 (NM_007663.1,1729-1747).
cgtgagtaacatagaagaa

SEQ ID NO: 497737 - DNA, 19 bp, Mus musculus
  siRNA target sequence for Cdh16 (NM_007663.1,1779-1797).
cagccacagtgactatact

SEQ ID NO: 497738 - DNA, 19 bp, Mus musculus
  siRNA target sequence for Cdh16 (NM_007663.1,1782-1800).
ccacagtgactatactagt

SEQ ID NO: 497739 - DNA, 19 bp, Mus musculus
  siRNA target sequence for Cdh16 (NM_007663.1,2173-2191).
ccaagactacggtgtagtt

SEQ ID NO: 497740 - DNA, 19 bp, Mus musculus
  siRNA target sequence for Cdh16 (NM_007663.1,2317-2335).
cctcaccttggcattgcat

SEQ ID NO: 497741 - DNA, 19 bp, Mus musculus
  siRNA target sequence for Cdh16 (NM_007663.1,2318-2336).
ctcaccttggcattgcatt

SEQ ID NO: 497742 - DNA, 19 bp, Mus musculus
  siRNA target sequence for Cdh16 (NM_007663.1,2339-2357).
gtagagcctggtgaataca

SEQ ID NO: 497743 - DNA, 19 bp, Mus musculus
  siRNA target sequence for Cdh16 (NM_007663.1,2375-2393).
caccatgatacccatatgt

SEQ ID NO: 497744 - DNA, 19 bp, Mus musculus
  siRNA target sequence for Cdh16 (NM_007663.1,2402-2420).
caggtcaaagtgattgtgt

SEQ ID NO: 497745 - DNA, 19 bp, Mus musculus
  siRNA target sequence for Cdh16 (NM_007663.1,2471-2489).
ggaatgcccacgaaactgt

SEQ ID NO: 497746 - DNA, 19 bp, Mus musculus
  siRNA target sequence for Cdh16 (NM_007663.1,2518-2536).
ggcagcgataggcttcatt

SEQ ID NO: 497747 - DNA, 19 bp, Mus musculus
  siRNA target sequence for Cdh16 (NM_007663.1,2520-2538).
cagcgataggcttcattct

SEQ ID NO: 497748 - DNA, 19 bp, Mus musculus
  siRNA target sequence for Cdk2 (NM_016756.1,193-211).
cgtacggagtggtgtacaa

SEQ ID NO: 497749 - DNA, 19 bp, Mus musculus
  siRNA target sequence for Cdk2 (NM_016756.1,194-212).
gtacggagtggtgtacaaa

SEQ ID NO: 497750 - DNA, 19 bp, Mus musculus
  siRNA target sequence for Cdk2 (NM_016756.1,221-239).
caagttgacgggagaagtt

SEQ ID NO: 497751 - DNA, 19 bp, Mus musculus
  siRNA target sequence for Cdk2 (NM_016756.1,234-252).
gaagttgtggcgcttaaga

SEQ ID NO: 497752 - DNA, 19 bp, Mus musculus
  siRNA target sequence for Cdk2 (NM_016756.1,305-323).
gatctctctccttaaggaa

SEQ ID NO: 497753 - DNA, 19 bp, Mus musculus
  siRNA target sequence for Cdk2 (NM_016756.1,321-339).
gaacttaatcaccctaata

SEQ ID NO: 497754 - DNA, 19 bp, Mus musculus
  siRNA target sequence for Cdk2 (NM_016756.1,612-630).
gtccctgtccgaacttaca

SEQ ID NO: 497755 - DNA, 19 bp, Mus musculus
  siRNA target sequence for Cdk2 (NM_016756.1,614-632).
ccctgtccgaacttacact

SEQ ID NO: 497756 - DNA, 19 bp, Mus musculus
  siRNA target sequence for Cdk2 (NM_016756.1,827-845).
ggtttggccaggagttact

SEQ ID NO: 497757 - DNA, 19 bp, Mus musculus
  siRNA target sequence for Cdk2 (NM_016756.1,853-871).
ctgattataagccaagttt

SEQ ID NO: 497758 - DNA, 19 bp, Mus musculus
  siRNA target sequence for Cdk2 (NM_016756.1,878-896).
gtgggctcggcaagatttt

SEQ ID NO: 497759 - DNA, 19 bp, Mus musculus
  siRNA target sequence for Cdk2 (NM_016756.1,882-900).
gctcggcaagattttagca

SEQ ID NO: 497760 - DNA, 19 bp, Mus musculus
  siRNA target sequence for Cdk2 (NM_016756.1,883-901).
ctcggcaagattttagcaa

SEQ ID NO: 497761 - DNA, 19 bp, Mus musculus
  siRNA target sequence for Cdk2 (NM_016756.1,924-942).
gatggacggagcttgttat

SEQ ID NO: 497762 - DNA, 19 bp, Mus musculus
  siRNA target sequence for Cdk2 (NM_016756.1,934-952).
gcttgttatcgcaaatgct

SEQ ID NO: 497763 - DNA, 19 bp, Mus musculus
  siRNA target sequence for Cdk2 (NM_016756.1,1002-1020).
cctttcttccaggatgtaa

SEQ ID NO: 497764 - DNA, 19 bp, Mus musculus
  siRNA target sequence for Cdk2 (NM_016756.1,1010-1028).
ccaggatgtaactaaacca

SEQ ID NO: 497765 - DNA, 19 bp, Mus musculus
  siRNA target sequence for Cdk2 (NM_183417.1,725-743).
gtacccagcaccatgctaa

SEQ ID NO: 497766 - DNA, 19 bp, Mus musculus
  siRNA target sequence for Cdk2 (NM_183417.1,786-804).
cccgctgtgctcctatcta

SEQ ID NO: 497767 - DNA, 19 bp, Mus musculus
  siRNA target sequence for Cdk2 (NM_183417.1,789-807).
gctgtgctcctatctagaa

SEQ ID NO: 497768 - DNA, 19 bp, Mus musculus
  siRNA target sequence for Cdk3 (NM_027165.1,418-436).
gactggcaaagctctgttt

SEQ ID NO: 497769 - DNA, 19 bp, Mus musculus
  siRNA target sequence for Cdk3 (NM_027165.1,438-456).
cgggtgactcagagattga

SEQ ID NO: 497770 - DNA, 19 bp, Mus musculus
  siRNA target sequence for Cdk4 (NM_009870.2,266-284).
gagtgtgagagttcctaat

SEQ ID NO: 497771 - DNA, 19 bp, Mus musculus
  siRNA target sequence for Cdk4 (NM_009870.2,324-342).
cgtgaggtggccttgttaa

SEQ ID NO: 497772 - DNA, 19 bp, Mus musculus
  siRNA target sequence for Cdk4 (NM_009870.2,327-345).
gaggtggccttgttaagga

SEQ ID NO: 497773 - DNA, 19 bp, Mus musculus
  siRNA target sequence for Cdk4 (NM_009870.2,346-364).
ggctggaggcctttgaaca

SEQ ID NO: 497774 - DNA, 19 bp, Mus musculus
  siRNA target sequence for Cdk4 (NM_009870.2,406-424).
gaactgatcgggacatcaa

SEQ ID NO: 497775 - DNA, 19 bp, Mus musculus
  siRNA target sequence for Cdk4 (NM_009870.2,495-513).
ctgccggttgagaccatta

SEQ ID NO: 497776 - DNA, 19 bp, Mus musculus
  siRNA target sequence for Cdk4 (NM_009870.2,538-556).
gcggcctggattttcttca

SEQ ID NO: 497777 - DNA, 19 bp, Mus musculus
  siRNA target sequence for Cdk4 (NM_009870.2,539-557).
cggcctggattttcttcat

SEQ ID NO: 497778 - DNA, 19 bp, Mus musculus
  siRNA target sequence for Cdk4 (NM_009870.2,820-838).
ccgaccagttggggaaaat

SEQ ID NO: 497779 - DNA, 19 bp, Mus musculus
  siRNA target sequence for Cdk4 (NM_009870.2,874-892).
ggcctcgagaggtatctct

SEQ ID NO: 497780 - DNA, 19 bp, Mus musculus
  siRNA target sequence for Cdk4 (NM_009870.2,875-893).
gcctcgagaggtatctcta

SEQ ID NO: 497781 - DNA, 19 bp, Mus musculus
  siRNA target sequence for Cdk4 (NM_009870.2,998-1016).
cccacataagcgaatctct

SEQ ID NO: 497782 - DNA, 19 bp, Mus musculus
  siRNA target sequence for Cdk5 (NM_007668.2,107-125).
ctaaaaaccgggaaactca

SEQ ID NO: 497783 - DNA, 19 bp, Mus musculus
  siRNA target sequence for Cdk5 (NM_007668.2,116-134).
gggaaactcatgagattgt

SEQ ID NO: 497784 - DNA, 19 bp, Mus musculus
  siRNA target sequence for Cdk5 (NM_007668.2,194-212).
gggagatctgtctactcaa

SEQ ID NO: 497785 - DNA, 19 bp, Mus musculus
  siRNA target sequence for Cdk5 (NM_007668.2,195-213).
ggagatctgtctactcaaa

SEQ ID NO: 497786 - DNA, 19 bp, Mus musculus
  siRNA target sequence for Cdk5 (NM_007668.2,198-216).
gatctgtctactcaaagaa

SEQ ID NO: 497787 - DNA, 19 bp, Mus musculus
  siRNA target sequence for Cdk5 (NM_007668.2,433-451).
cagaacctgctcataaaca

SEQ ID NO: 497788 - DNA, 19 bp, Mus musculus
  siRNA target sequence for Cdk5 (NM_007668.2,452-470).
ggaatggggagttgaaatt

SEQ ID NO: 497789 - DNA, 19 bp, Mus musculus
  siRNA target sequence for Cdk5 (NM_007668.2,484-502).
ctggcccgagcctttggta

SEQ ID NO: 497790 - DNA, 19 bp, Mus musculus
  siRNA target sequence for Cdk5 (NM_007668.2,737-755).
ccaagctgccagactataa

SEQ ID NO: 497791 - DNA, 19 bp, Mus musculus
  siRNA target sequence for Cdk6 (NM_009873.1,324-342).
gagaaaccaagcttacact

SEQ ID NO: 497792 - DNA, 19 bp, Mus musculus
  siRNA target sequence for Cdk6 (NM_009873.1,330-348).
ccaagcttacactagtgtt

SEQ ID NO: 497793 - DNA, 19 bp, Mus musculus
  siRNA target sequence for Cdk6 (NM_009873.1,331-349).
caagcttacactagtgttt

SEQ ID NO: 497794 - DNA, 19 bp, Mus musculus
  siRNA target sequence for Cdk6 (NM_009873.1,362-380).
caagacttgaccacttact

SEQ ID NO: 497795 - DNA, 19 bp, Mus musculus
  siRNA target sequence for Cdk6 (NM_009873.1,402-420).
gcgtacccacagaaaccat

SEQ ID NO: 497796 - DNA, 19 bp, Mus musculus
  siRNA target sequence for Cdk6 (NM_009873.1,403-421).
cgtacccacagaaaccata

SEQ ID NO: 497797 - DNA, 19 bp, Mus musculus
  siRNA target sequence for Cdk6 (NM_009873.1,417-435).
ccataaaggatatgatgtt

SEQ ID NO: 497798 - DNA, 19 bp, Mus musculus
  siRNA target sequence for Cdk6 (NM_009873.1,550-568).
ccttgcccgcatctatagt

SEQ ID NO: 497799 - DNA, 19 bp, Mus musculus
  siRNA target sequence for Cdk6 (NM_009873.1,551-569).
cttgcccgcatctatagtt

SEQ ID NO: 497800 - DNA, 19 bp, Mus musculus
  siRNA target sequence for Cdk6 (NM_009873.1,555-573).
cccgcatctatagttttca

SEQ ID NO: 497801 - DNA, 19 bp, Mus musculus
  siRNA target sequence for Cdk6 (NM_009873.1,557-575).
cgcatctatagttttcaga

SEQ ID NO: 497802 - DNA, 19 bp, Mus musculus
  siRNA target sequence for Cdk6 (NM_009873.1,664-682).
gagtgtcggttgcatcttt

SEQ ID NO: 497803 - DNA, 19 bp, Mus musculus
  siRNA target sequence for Cdk6 (NM_009873.1,697-715).
cagaaagcctctttttcgt

SEQ ID NO: 497804 - DNA, 19 bp, Mus musculus
  siRNA target sequence for Cdk6 (NM_009873.1,720-738).
gttcagacgtggatcaact

SEQ ID NO: 497805 - DNA, 19 bp, Mus musculus
  siRNA target sequence for Cdk6 (NM_009873.1,731-749).
gatcaactaggaaaaatct

SEQ ID NO: 497806 - DNA, 19 bp, Mus musculus
  siRNA target sequence for Cdk6 (NM_009873.1,831-849).
ctcaacccatcgagaagtt

SEQ ID NO: 497807 - DNA, 19 bp, Mus musculus
  siRNA target sequence for Cdk6 (NM_009873.1,887-905).
ctgaaatgcctgacgttta

SEQ ID NO: 497808 - DNA, 19 bp, Mus musculus
  siRNA target sequence for Cdk6 (NM_009873.1,889-907).
gaaatgcctgacgtttaat

SEQ ID NO: 497809 - DNA, 19 bp, Mus musculus
  siRNA target sequence for Cdk6 (NM_009873.1,898-916).
gacgtttaatccagctaaa

SEQ ID NO: 497810 - DNA, 19 bp, Mus musculus
  siRNA target sequence for Cdk7 (NM_009874.1,149-167).
cagtttgcgacggtctata

SEQ ID NO: 497811 - DNA, 19 bp, Mus musculus
  siRNA target sequence for Cdk7 (NM_009874.1,197-215).
gtcgccattaagaaaatca

SEQ ID NO: 497812 - DNA, 19 bp, Mus musculus
  siRNA target sequence for Cdk7 (NM_009874.1,233-251).
gaagctaaggatggaataa

SEQ ID NO: 497813 - DNA, 19 bp, Mus musculus
  siRNA target sequence for Cdk7 (NM_009874.1,236-254).
gctaaggatggaataaata

SEQ ID NO: 497814 - DNA, 19 bp, Mus musculus
  siRNA target sequence for Cdk7 (NM_009874.1,277-295).
gctcttacaggaactaagt

SEQ ID NO: 497815 - DNA, 19 bp, Mus musculus
  siRNA target sequence for Cdk7 (NM_009874.1,290-308).
ctaagtcatccaaatataa

SEQ ID NO: 497816 - DNA, 19 bp, Mus musculus
  siRNA target sequence for Cdk7 (NM_009874.1,323-341).
gcatttggacataagtcta

SEQ ID NO: 497817 - DNA, 19 bp, Mus musculus
  siRNA target sequence for Cdk7 (NM_009874.1,324-342).
catttggacataagtctaa

SEQ ID NO: 497818 - DNA, 19 bp, Mus musculus
  siRNA target sequence for Cdk7 (NM_009874.1,410-428).
ctgacaccatcccacatta

SEQ ID NO: 497819 - DNA, 19 bp, Mus musculus
  siRNA target sequence for Cdk7 (NM_009874.1,412-430).
gacaccatcccacattaaa

SEQ ID NO: 497820 - DNA, 19 bp, Mus musculus
  siRNA target sequence for Cdk7 (NM_009874.1,511-529).
cttgttgttagatgagaat

SEQ ID NO: 497821 - DNA, 19 bp, Mus musculus
  siRNA target sequence for Cdk7 (NM_009874.1,577-595).
ccccaatagggcttacaca

SEQ ID NO: 497822 - DNA, 19 bp, Mus musculus
  siRNA target sequence for Cdk7 (NM_009874.1,586-604).
ggcttacacacatcaagtt

SEQ ID NO: 497823 - DNA, 19 bp, Mus musculus
  siRNA target sequence for Cdk7 (NM_009874.1,616-634).
gtaccgggctcctgagtta

SEQ ID NO: 497824 - DNA, 19 bp, Mus musculus
  siRNA target sequence for Cdk7 (NM_009874.1,620-638).
cgggctcctgagttattgt

SEQ ID NO: 497825 - DNA, 19 bp, Mus musculus
  siRNA target sequence for Cdk7 (NM_009874.1,675-693).
gggctgttggttgtatatt

SEQ ID NO: 497826 - DNA, 19 bp, Mus musculus
  siRNA target sequence for Cdk7 (NM_009874.1,687-705).
gtatattagcagaattgct

SEQ ID NO: 497827 - DNA, 19 bp, Mus musculus
  siRNA target sequence for Cdk7 (NM_009874.1,703-721).
gcttctaagggttccattt

SEQ ID NO: 497828 - DNA, 19 bp, Mus musculus
  siRNA target sequence for Cdk7 (NM_009874.1,729-747).
gagattcagatcttgatca

SEQ ID NO: 497829 - DNA, 19 bp, Mus musculus
  siRNA target sequence for Cdk7 (NM_009874.1,737-755).
gatcttgatcagctaacaa

SEQ ID NO: 497830 - DNA, 19 bp, Mus musculus
  siRNA target sequence for Cdk7 (NM_009874.1,805-823).
gtgtagtcttcccgattat

SEQ ID NO: 497831 - DNA, 19 bp, Mus musculus
  siRNA target sequence for Cdk7 (NM_009874.1,807-825).
gtagtcttcccgattatgt

SEQ ID NO: 497832 - DNA, 19 bp, Mus musculus
  siRNA target sequence for Cdk7 (NM_009874.1,816-834).
ccgattatgtgacatttaa

SEQ ID NO: 497833 - DNA, 19 bp, Mus musculus
  siRNA target sequence for Cdk7 (NM_009874.1,939-957).
cagcctcacaggcattgaa

SEQ ID NO: 497834 - DNA, 19 bp, Mus musculus
  siRNA target sequence for Cdk7 (NM_009874.1,950-968).
gcattgaagaccaagtact

SEQ ID NO: 497835 - DNA, 19 bp, Mus musculus
  siRNA target sequence for Cdk7 (NM_009874.1,1003-1021).
gctcccgcgaccaaactgt

SEQ ID NO: 497836 - DNA, 19 bp, Mus musculus
  siRNA target sequence for Cdk7 (NM_009874.1,1085-1103).
gccttagaacaaggaatat

SEQ ID NO: 497837 - DNA, 19 bp, Mus musculus
  siRNA target sequence for Cdk8 (NM_153599.2,667-685).
gggctatagggtgtatatt

SEQ ID NO: 497838 - DNA, 19 bp, Mus musculus
  siRNA target sequence for Cdk8 (NM_153599.2,668-686).
ggctatagggtgtatattt

SEQ ID NO: 497839 - DNA, 19 bp, Mus musculus
  siRNA target sequence for Cdkl1 (NM_183294.1,214-232).
gctcctatggggtagtgtt

SEQ ID NO: 497840 - DNA, 19 bp, Mus musculus
  siRNA target sequence for Cdkl1 (NM_183294.1,217-235).
cctatggggtagtgttcaa

SEQ ID NO: 497841 - DNA, 19 bp, Mus musculus
  siRNA target sequence for Cdkl1 (NM_183294.1,472-490).
cagagcctctcgtgaagaa

SEQ ID NO: 497842 - DNA, 19 bp, Mus musculus
  siRNA target sequence for Cdkl1 (NM_183294.1,474-492).
gagcctctcgtgaagaaca

SEQ ID NO: 497843 - DNA, 19 bp, Mus musculus
  siRNA target sequence for Cdkl1 (NM_183294.1,476-494).
gcctctcgtgaagaacata

SEQ ID NO: 497844 - DNA, 19 bp, Mus musculus
  siRNA target sequence for Cdkl1 (NM_183294.1,480-498).
ctcgtgaagaacataactt

SEQ ID NO: 497845 - DNA, 19 bp, Mus musculus
  siRNA target sequence for Cdkl1 (NM_183294.1,503-521).
gacactgcaggctgtaaat

SEQ ID NO: 497846 - DNA, 19 bp, Mus musculus
  siRNA target sequence for Cdkl1 (NM_183294.1,745-763).
gtgtgtttgctgagttact

SEQ ID NO: 497847 - DNA, 19 bp, Mus musculus
  siRNA target sequence for Cdkl1 (NM_183294.1,773-791).
gcctctatggccaggaaaa

SEQ ID NO: 497848 - DNA, 19 bp, Mus musculus
  siRNA target sequence for Cdkl1 (NM_183294.1,843-861).
cccaggcaccagcaagtat

SEQ ID NO: 497849 - DNA, 19 bp, Mus musculus
  siRNA target sequence for Cdkl1 (NM_183294.1,844-862).
ccaggcaccagcaagtatt

SEQ ID NO: 497850 - DNA, 19 bp, Mus musculus
  siRNA target sequence for Cdkl1 (NM_183294.1,854-872).
gcaagtatttagcatgaat

SEQ ID NO: 497851 - DNA, 19 bp, Mus musculus
  siRNA target sequence for Cdkl1 (NM_183294.1,878-896).
cttcagtggggtgaaaatt

SEQ ID NO: 497852 - DNA, 19 bp, Mus musculus
  siRNA target sequence for Cdkl1 (NM_183294.1,950-968).
ctctgcactgggcttctta

SEQ ID NO: 497853 - DNA, 19 bp, Mus musculus
  siRNA target sequence for Cdkl1 (NM_183294.1,952-970).
ctgcactgggcttcttaaa

SEQ ID NO: 497854 - DNA, 19 bp, Mus musculus
  siRNA target sequence for Cdkl1 (NM_183294.1,1170-1188).
gctttggacaataagaagt

SEQ ID NO: 497855 - DNA, 19 bp, Mus musculus
  siRNA target sequence for Cdkl1 (NM_183294.1,1193-1211).
ctgtagtaccaagagattt

SEQ ID NO: 497856 - DNA, 19 bp, Mus musculus
  siRNA target sequence for Cdkl1 (NM_183294.1,1195-1213).
gtagtaccaagagatttaa

SEQ ID NO: 497857 - DNA, 19 bp, Mus musculus
  siRNA target sequence for Cdkl1 (NM_183294.1,1198-1216).
gtaccaagagatttaacta

SEQ ID NO: 497858 - DNA, 19 bp, Mus musculus
  siRNA target sequence for Cdkl2 (NM_016912.1,292-310).
gttacggaatggtgatgaa

SEQ ID NO: 497859 - DNA, 19 bp, Mus musculus
  siRNA target sequence for Cdkl2 (NM_016912.1,357-375).
ctagaaagtgacgatgata

SEQ ID NO: 497860 - DNA, 19 bp, Mus musculus
  siRNA target sequence for Cdkl2 (NM_016912.1,360-378).
gaaagtgacgatgataaaa

SEQ ID NO: 497861 - DNA, 19 bp, Mus musculus
  siRNA target sequence for Cdkl2 (NM_016912.1,393-411).
gcaatgcgagagatcaagt

SEQ ID NO: 497862 - DNA, 19 bp, Mus musculus
  siRNA target sequence for Cdkl2 (NM_016912.1,394-412).
caatgcgagagatcaagtt

SEQ ID NO: 497863 - DNA, 19 bp, Mus musculus
  siRNA target sequence for Cdkl2 (NM_016912.1,398-416).
gcgagagatcaagttacta

SEQ ID NO: 497864 - DNA, 19 bp, Mus musculus
  siRNA target sequence for Cdkl2 (NM_016912.1,399-417).
cgagagatcaagttactaa

SEQ ID NO: 497865 - DNA, 19 bp, Mus musculus
  siRNA target sequence for Cdkl2 (NM_016912.1,420-438).
caactgcggcatgaaaatt

SEQ ID NO: 497866 - DNA, 19 bp, Mus musculus
  siRNA target sequence for Cdkl2 (NM_016912.1,449-467).
gttggaagtatgtaagaaa

SEQ ID NO: 497867 - DNA, 19 bp, Mus musculus
  siRNA target sequence for Cdkl2 (NM_016912.1,475-493).
gttggtacctagtctttga

SEQ ID NO: 497868 - DNA, 19 bp, Mus musculus
  siRNA target sequence for Cdkl2 (NM_016912.1,508-526).
cgattcttgatgacttgaa

SEQ ID NO: 497869 - DNA, 19 bp, Mus musculus
  siRNA target sequence for Cdkl2 (NM_016912.1,535-553).
caaatggactagactatca

SEQ ID NO: 497870 - DNA, 19 bp, Mus musculus
  siRNA target sequence for Cdkl2 (NM_016912.1,541-559).
gactagactatcaagtagt

SEQ ID NO: 497871 - DNA, 19 bp, Mus musculus
  siRNA target sequence for Cdkl2 (NM_016912.1,572-590).
gtttcagattattaatgga

SEQ ID NO: 497872 - DNA, 19 bp, Mus musculus
  siRNA target sequence for Cdkl2 (NM_016912.1,655-673).
cccagtctggcgttgtaaa

SEQ ID NO: 497873 - DNA, 19 bp, Mus musculus
  siRNA target sequence for Cdkl2 (NM_016912.1,656-674).
ccagtctggcgttgtaaaa

SEQ ID NO: 497874 - DNA, 19 bp, Mus musculus
  siRNA target sequence for Cdkl2 (NM_016912.1,657-675).
cagtctggcgttgtaaaat

SEQ ID NO: 497875 - DNA, 19 bp, Mus musculus
  siRNA target sequence for Cdkl2 (NM_016912.1,659-677).
gtctggcgttgtaaaatta

SEQ ID NO: 497876 - DNA, 19 bp, Mus musculus
  siRNA target sequence for Cdkl2 (NM_016912.1,708-726).
gctccaggggaggtttaca

SEQ ID NO: 497877 - DNA, 19 bp, Mus musculus
  siRNA target sequence for Cdkl2 (NM_016912.1,716-734).
ggaggtttacactgactat

SEQ ID NO: 497878 - DNA, 19 bp, Mus musculus
  siRNA target sequence for Cdkl2 (NM_016912.1,770-788).
ggtcggtgacgtcaagtat

SEQ ID NO: 497879 - DNA, 19 bp, Mus musculus
  siRNA target sequence for Cdkl2 (NM_016912.1,801-819).
gatatctgggccattggtt

SEQ ID NO: 497880 - DNA, 19 bp, Mus musculus
  siRNA target sequence for Cdkl2 (NM_016912.1,816-834).
ggttgtctggtcattgaaa

SEQ ID NO: 497881 - DNA, 19 bp, Mus musculus
  siRNA target sequence for Cdkl2 (NM_016912.1,817-835).
gttgtctggtcattgaaat

SEQ ID NO: 497882 - DNA, 19 bp, Mus musculus
  siRNA target sequence for Cdkl2 (NM_016912.1,876-894).
gatcagctacatcatatta

SEQ ID NO: 497883 - DNA, 19 bp, Mus musculus
  siRNA target sequence for Cdkl2 (NM_016912.1,879-897).
cagctacatcatattatga

SEQ ID NO: 497884 - DNA, 19 bp, Mus musculus
  siRNA target sequence for Cdkl2 (NM_016912.1,881-899).
gctacatcatattatgaca

SEQ ID NO: 497885 - DNA, 19 bp, Mus musculus
  siRNA target sequence for Cdkl2 (NM_016912.1,882-900).
ctacatcatattatgacat

SEQ ID NO: 497886 - DNA, 19 bp, Mus musculus
  siRNA target sequence for Cdkl2 (NM_016912.1,919-937).
caagacaccaggagctatt

SEQ ID NO: 497887 - DNA, 19 bp, Mus musculus
  siRNA target sequence for Cdkl2 (NM_016912.1,926-944).
ccaggagctattttataaa

SEQ ID NO: 497888 - DNA, 19 bp, Mus musculus
  siRNA target sequence for Cdkl2 (NM_016912.1,1103-1121).
gcgccatgacttctttcaa

SEQ ID NO: 497889 - DNA, 19 bp, Mus musculus
  siRNA target sequence for Cdkl2 (NM_016912.1,1137-1155).
gagaggttttctcaagaat

SEQ ID NO: 497890 - DNA, 19 bp, Mus musculus
  siRNA target sequence for Cdkl2 (NM_016912.1,1141-1159).
ggttttctcaagaattgca

SEQ ID NO: 497891 - DNA, 19 bp, Mus musculus
  siRNA target sequence for Cdkl2 (NM_016912.1,1157-1175).
gcagttaaaaatagagaaa

SEQ ID NO: 497892 - DNA, 19 bp, Mus musculus
  siRNA target sequence for Cdkl2 (NM_016912.1,1277-1295).
caatgctgaccccaaaatt

SEQ ID NO: 497893 - DNA, 19 bp, Mus musculus
  siRNA target sequence for Cdkl2 (NM_016912.1,1322-1340).
ggggtcaaaaattgatgtt

SEQ ID NO: 497894 - DNA, 19 bp, Mus musculus
  siRNA target sequence for Cdkl2 (NM_016912.1,1324-1342).
ggtcaaaaattgatgttga

SEQ ID NO: 497895 - DNA, 19 bp, Mus musculus
  siRNA target sequence for Cdkl2 (NM_016912.1,1327-1345).
caaaaattgatgttgagaa

SEQ ID NO: 497896 - DNA, 19 bp, Mus musculus
  siRNA target sequence for Cdkl2 (NM_016912.1,1432-1450).
gagattgcagcaatgtcaa

SEQ ID NO: 497897 - DNA, 19 bp, Mus musculus
  siRNA target sequence for Cdkl2 (NM_016912.1,1623-1641).
cctccagcagggatttata

SEQ ID NO: 497898 - DNA, 19 bp, Mus musculus
  siRNA target sequence for Cdkl2 (NM_016912.1,1657-1675).
catccgtctcaggtgaaaa

SEQ ID NO: 497899 - DNA, 19 bp, Mus musculus
  siRNA target sequence for Cdkl2 (NM_016912.1,1660-1678).
ccgtctcaggtgaaaagta

SEQ ID NO: 497900 - DNA, 19 bp, Mus musculus
  siRNA target sequence for Cdkl2 (NM_016912.1,1724-1742).
cgtgcggttgcctgaacta

SEQ ID NO: 497901 - DNA, 19 bp, Mus musculus
  siRNA target sequence for Cdkl2 (NM_016912.1,1725-1743).
gtgcggttgcctgaactaa

SEQ ID NO: 497902 - DNA, 19 bp, Mus musculus
  siRNA target sequence for Cdkl2 (NM_016912.1,1728-1746).
cggttgcctgaactaaact

SEQ ID NO: 497903 - DNA, 19 bp, Mus musculus
  siRNA target sequence for Cdkl2 (NM_016912.1,1729-1747).
ggttgcctgaactaaacta

SEQ ID NO: 497904 - DNA, 19 bp, Mus musculus
  siRNA target sequence for Cdkl2 (NM_016912.1,1779-1797).
ggcatagctcgaaattcta

SEQ ID NO: 497905 - DNA, 19 bp, Mus musculus
  siRNA target sequence for Cdkl2 (NM_016912.1,1789-1807).
gaaattctaggctaataaa

SEQ ID NO: 497906 - DNA, 19 bp, Mus musculus
  siRNA target sequence for Cdkl2 (NM_016912.1,1823-1841).
cctttcagaatctcgaatt

SEQ ID NO: 497907 - DNA, 19 bp, Mus musculus
  siRNA target sequence for Cdkl3 (NM_153785.1,186-204).
gtatgaaacccttggaaaa

SEQ ID NO: 497908 - DNA, 19 bp, Mus musculus
  siRNA target sequence for Cdkl3 (NM_153785.1,218-236).
gttatggaacggtcatgaa

SEQ ID NO: 497909 - DNA, 19 bp, Mus musculus
  siRNA target sequence for Cdkl3 (NM_153785.1,223-241).
ggaacggtcatgaaatgca

SEQ ID NO: 497910 - DNA, 19 bp, Mus musculus
  siRNA target sequence for Cdkl3 (NM_153785.1,224-242).
gaacggtcatgaaatgcaa

SEQ ID NO: 497911 - DNA, 19 bp, Mus musculus
  siRNA target sequence for Cdkl3 (NM_153785.1,257-275).
ggcgaatagtggccattaa

SEQ ID NO: 497912 - DNA, 19 bp, Mus musculus
  siRNA target sequence for Cdkl3 (NM_153785.1,317-335).
caacgagagaaataaagtt

SEQ ID NO: 497913 - DNA, 19 bp, Mus musculus
  siRNA target sequence for Cdkl3 (NM_153785.1,352-370).
catgaaaacctggtcaatt

SEQ ID NO: 497914 - DNA, 19 bp, Mus musculus
  siRNA target sequence for Cdkl3 (NM_153785.1,372-390).
gattgaagtttttagacaa

SEQ ID NO: 497915 - DNA, 19 bp, Mus musculus
  siRNA target sequence for Cdkl3 (NM_153785.1,458-476).
gtcacggactagagagtaa

SEQ ID NO: 497916 - DNA, 19 bp, Mus musculus
  siRNA target sequence for Cdkl3 (NM_153785.1,473-491).
gtaagcggctgagaaagta

SEQ ID NO: 497917 - DNA, 19 bp, Mus musculus
  siRNA target sequence for Cdkl3 (NM_153785.1,523-541).
ctgcataataataatatta

SEQ ID NO: 497918 - DNA, 19 bp, Mus musculus
  siRNA target sequence for Cdkl3 (NM_153785.1,578-596).
cccagtcaggaattacgaa

SEQ ID NO: 497919 - DNA, 19 bp, Mus musculus
  siRNA target sequence for Cdkl3 (NM_153785.1,631-649).
gctcctggagacgtttaca

SEQ ID NO: 497920 - DNA, 19 bp, Mus musculus
  siRNA target sequence for Cdkl3 (NM_153785.1,738-756).
gggctgtatgatcattgaa

SEQ ID NO: 497921 - DNA, 19 bp, Mus musculus
  siRNA target sequence for Cdkl3 (NM_153785.1,739-757).
ggctgtatgatcattgaaa

SEQ ID NO: 497922 - DNA, 19 bp, Mus musculus
  siRNA target sequence for Cdkl3 (NM_153785.1,740-758).
gctgtatgatcattgaaat

SEQ ID NO: 497923 - DNA, 19 bp, Mus musculus
  siRNA target sequence for Cdkl3 (NM_153785.1,782-800).
ctagcagttccgatttgga

SEQ ID NO: 497924 - DNA, 19 bp, Mus musculus
  siRNA target sequence for Cdkl3 (NM_153785.1,785-803).
gcagttccgatttggattt

SEQ ID NO: 497925 - DNA, 19 bp, Mus musculus
  siRNA target sequence for Cdkl3 (NM_153785.1,788-806).
gttccgatttggatttgct

SEQ ID NO: 497926 - DNA, 19 bp, Mus musculus
  siRNA target sequence for Cdkl3 (NM_153785.1,839-857).
ccccgcacctgcacaatat

SEQ ID NO: 497927 - DNA, 19 bp, Mus musculus
  siRNA target sequence for Cdkl3 (NM_153785.1,841-859).
ccgcacctgcacaatatct

SEQ ID NO: 497928 - DNA, 19 bp, Mus musculus
  siRNA target sequence for Cdkl3 (NM_153785.1,842-860).
cgcacctgcacaatatctt

SEQ ID NO: 497929 - DNA, 19 bp, Mus musculus
  siRNA target sequence for Cdkl3 (NM_153785.1,843-861).
gcacctgcacaatatcttt

SEQ ID NO: 497930 - DNA, 19 bp, Mus musculus
  siRNA target sequence for Cdkl3 (NM_153785.1,885-903).
ggtggttcttcctcaagtt

SEQ ID NO: 497931 - DNA, 19 bp, Mus musculus
  siRNA target sequence for Cdkl3 (NM_153785.1,910-928).
ccaaaaaccgcaagaaaga

SEQ ID NO: 497932 - DNA, 19 bp, Mus musculus
  siRNA target sequence for Cdkl3 (NM_153785.1,947-965).
gattgctggcagatatagt

SEQ ID NO: 497933 - DNA, 19 bp, Mus musculus
  siRNA target sequence for Cdkl3 (NM_153785.1,951-969).
gctggcagatatagttcat

SEQ ID NO: 497934 - DNA, 19 bp, Mus musculus
  siRNA target sequence for Cdkl3 (NM_153785.1,999-1017).
gacatcatctactgatctt

SEQ ID NO: 497935 - DNA, 19 bp, Mus musculus
  siRNA target sequence for Cdkl3 (NM_153785.1,1015-1033).
cttttgcgtcacgattact

SEQ ID NO: 497936 - DNA, 19 bp, Mus musculus
  siRNA target sequence for Cdkl3 (NM_153785.1,1020-1038).
gcgtcacgattactttact

SEQ ID NO: 497937 - DNA, 19 bp, Mus musculus
  siRNA target sequence for Cdkl3 (NM_153785.1,1021-1039).
cgtcacgattactttacta

SEQ ID NO: 497938 - DNA, 19 bp, Mus musculus
  siRNA target sequence for Cdkl3 (NM_153785.1,1026-1044).
cgattactttactagagat

SEQ ID NO: 497939 - DNA, 19 bp, Mus musculus
  siRNA target sequence for Cdkl3 (NM_153785.1,1045-1063).
ggatttattgagaagaagt

SEQ ID NO: 497940 - DNA, 19 bp, Mus musculus
  siRNA target sequence for Cftr (NM_021050.1,189-207).
cagctggaccacaccaatt

SEQ ID NO: 497941 - DNA, 19 bp, Mus musculus
  siRNA target sequence for Cftr (NM_021050.1,231-249).
cttggagttgtcagacata

SEQ ID NO: 497942 - DNA, 19 bp, Mus musculus
  siRNA target sequence for Cftr (NM_021050.1,237-255).
gttgtcagacatataccaa

SEQ ID NO: 497943 - DNA, 19 bp, Mus musculus
  siRNA target sequence for Cftr (NM_021050.1,279-297).
ccacttgtctgaaaaacta

SEQ ID NO: 497944 - DNA, 19 bp, Mus musculus
  siRNA target sequence for Cftr (NM_021050.1,351-369).
cgcccttcggcgatgcttt

SEQ ID NO: 497945 - DNA, 19 bp, Mus musculus
  siRNA target sequence for Cftr (NM_021050.1,352-370).
gcccttcggcgatgctttt

SEQ ID NO: 497946 - DNA, 19 bp, Mus musculus
  siRNA target sequence for Cftr (NM_021050.1,355-373).
cttcggcgatgctttttct

SEQ ID NO: 497947 - DNA, 19 bp, Mus musculus
  siRNA target sequence for Cftr (NM_021050.1,436-454).
gtcttgctaggaagaatca

SEQ ID NO: 497948 - DNA, 19 bp, Mus musculus
  siRNA target sequence for Cftr (NM_021050.1,477-495).
caaggtggaacgttccatt

SEQ ID NO: 497949 - DNA, 19 bp, Mus musculus
  siRNA target sequence for Cftr (NM_021050.1,547-565).
cttcttcacccagctattt

SEQ ID NO: 497950 - DNA, 19 bp, Mus musculus
  siRNA target sequence for Cftr (NM_021050.1,568-586).
ggccttcatcgcattggaa

SEQ ID NO: 497951 - DNA, 19 bp, Mus musculus
  siRNA target sequence for Cftr (NM_021050.1,569-587).
gccttcatcgcattggaat

SEQ ID NO: 497952 - DNA, 19 bp, Mus musculus
  siRNA target sequence for Cftr (NM_021050.1,601-619).
gctatgtttagcttgattt

SEQ ID NO: 497953 - DNA, 19 bp, Mus musculus
  siRNA target sequence for Cftr (NM_021050.1,602-620).
ctatgtttagcttgattta

SEQ ID NO: 497954 - DNA, 19 bp, Mus musculus
  siRNA target sequence for Cftr (NM_021050.1,641-659).
caagccgcgttcttgataa

SEQ ID NO: 497955 - DNA, 19 bp, Mus musculus
  siRNA target sequence for Cftr (NM_021050.1,644-662).
gccgcgttcttgataaaat

SEQ ID NO: 497956 - DNA, 19 bp, Mus musculus
  siRNA target sequence for Cftr (NM_021050.1,645-663).
ccgcgttcttgataaaata

SEQ ID NO: 497957 - DNA, 19 bp, Mus musculus
  siRNA target sequence for Cftr (NM_021050.1,646-664).
cgcgttcttgataaaataa

SEQ ID NO: 497958 - DNA, 19 bp, Mus musculus
  siRNA target sequence for Cftr (NM_021050.1,648-666).
cgttcttgataaaataagt

SEQ ID NO: 497959 - DNA, 19 bp, Mus musculus
  siRNA target sequence for Cftr (NM_021050.1,743-761).
ggattgctcctttacaagt

SEQ ID NO: 497960 - DNA, 19 bp, Mus musculus
  siRNA target sequence for Cftr (NM_021050.1,807-825).
cttctgtggccttggttta

SEQ ID NO: 497961 - DNA, 19 bp, Mus musculus
  siRNA target sequence for Cftr (NM_021050.1,812-830).
gtggccttggtttactgat

SEQ ID NO: 497962 - DNA, 19 bp, Mus musculus
  siRNA target sequence for Cftr (NM_021050.1,851-869).
ctatcctagggaagatgat

SEQ ID NO: 497963 - DNA, 19 bp, Mus musculus
  siRNA target sequence for Cftr (NM_021050.1,907-925).
gaaagactcgtgatcacat

SEQ ID NO: 497964 - DNA, 19 bp, Mus musculus
  siRNA target sequence for Cftr (NM_021050.1,913-931).
ctcgtgatcacatcagaaa

SEQ ID NO: 497965 - DNA, 19 bp, Mus musculus
  siRNA target sequence for Cftr (NM_021050.1,915-933).
cgtgatcacatcagaaatt

SEQ ID NO: 497966 - DNA, 19 bp, Mus musculus
  siRNA target sequence for Cftr (NM_021050.1,916-934).
gtgatcacatcagaaatta

SEQ ID NO: 497967 - DNA, 19 bp, Mus musculus
  siRNA target sequence for Cftr (NM_021050.1,921-939).
cacatcagaaattattgat

SEQ ID NO: 497968 - DNA, 19 bp, Mus musculus
  siRNA target sequence for Cftr (NM_021050.1,970-988).
gaatcagcgatggagaaaa

SEQ ID NO: 497969 - DNA, 19 bp, Mus musculus
  siRNA target sequence for Cftr (NM_021050.1,1125-1143).
cggaatcgtcctacgaaaa

SEQ ID NO: 497970 - DNA, 19 bp, Mus musculus
  siRNA target sequence for Cftr (NM_021050.1,1126-1144).
ggaatcgtcctacgaaaaa

SEQ ID NO: 497971 - DNA, 19 bp, Mus musculus
  siRNA target sequence for Cftr (NM_021050.1,1127-1145).
gaatcgtcctacgaaaaat

SEQ ID NO: 497972 - DNA, 19 bp, Mus musculus
  siRNA target sequence for Cftr (NM_021050.1,1200-1218).
ccccactgccgtacagata

SEQ ID NO: 497973 - DNA, 19 bp, Mus musculus
  siRNA target sequence for Cftr (NM_021050.1,1201-1219).
cccactgccgtacagatat

SEQ ID NO: 497974 - DNA, 19 bp, Mus musculus
  siRNA target sequence for Cftr (NM_021050.1,1209-1227).
cgtacagatatggtatgat

SEQ ID NO: 497975 - DNA, 19 bp, Mus musculus
  siRNA target sequence for Cftr (NM_021050.1,1210-1228).
gtacagatatggtatgatt

SEQ ID NO: 497976 - DNA, 19 bp, Mus musculus
  siRNA target sequence for Cftr (NM_021050.1,1213-1231).
cagatatggtatgattctt

SEQ ID NO: 497977 - DNA, 19 bp, Mus musculus
  siRNA target sequence for Cftr (NM_021050.1,1363-1381).
ctggagaaagtacaacaaa

SEQ ID NO: 497978 - DNA, 19 bp, Mus musculus
  siRNA target sequence for Cftr (NM_021050.1,1500-1518).
ggctattactggatctact

SEQ ID NO: 497979 - DNA, 19 bp, Mus musculus
  siRNA target sequence for Cftr (NM_021050.1,1532-1550).
catcactcctgatgttgat

SEQ ID NO: 497980 - DNA, 19 bp, Mus musculus
  siRNA target sequence for Cftr (NM_021050.1,1535-1553).
cactcctgatgttgatttt

SEQ ID NO: 497981 - DNA, 19 bp, Mus musculus
  siRNA target sequence for Cftr (NM_021050.1,1567-1585).
gcttcagagggaattatta

SEQ ID NO: 497982 - DNA, 19 bp, Mus musculus
  siRNA target sequence for Cftr (NM_021050.1,1571-1589).
cagagggaattattaagca

SEQ ID NO: 497983 - DNA, 19 bp, Mus musculus
  siRNA target sequence for Cftr (NM_021050.1,1611-1629).
ctctcaattttcttggatt

SEQ ID NO: 497984 - DNA, 19 bp, Mus musculus
  siRNA target sequence for Cftr (NM_021050.1,1625-1643).
ggattatgccgggtactat

SEQ ID NO: 497985 - DNA, 19 bp, Mus musculus
  siRNA target sequence for Cftr (NM_021050.1,1632-1650).
gccgggtactatcaaagaa

SEQ ID NO: 497986 - DNA, 19 bp, Mus musculus
  siRNA target sequence for Cftr (NM_021050.1,1633-1651).
ccgggtactatcaaagaaa

SEQ ID NO: 497987 - DNA, 19 bp, Mus musculus
  siRNA target sequence for Cftr (NM_021050.1,1634-1652).
cgggtactatcaaagaaaa

SEQ ID NO: 497988 - DNA, 19 bp, Mus musculus
  siRNA target sequence for Cftr (NM_021050.1,1635-1653).
gggtactatcaaagaaaat

SEQ ID NO: 497989 - DNA, 19 bp, Mus musculus
  siRNA target sequence for Cftr (NM_021050.1,1636-1654).
ggtactatcaaagaaaata

SEQ ID NO: 497990 - DNA, 19 bp, Mus musculus
  siRNA target sequence for Cftr (NM_021050.1,1637-1655).
gtactatcaaagaaaatat

SEQ ID NO: 497991 - DNA, 19 bp, Mus musculus
  siRNA target sequence for Cftr (NM_021050.1,1659-1677).
ctttggtgtttcctatgat

SEQ ID NO: 497992 - DNA, 19 bp, Mus musculus
  siRNA target sequence for Cftr (NM_021050.1,1664-1682).
gtgtttcctatgatgagta

SEQ ID NO: 497993 - DNA, 19 bp, Mus musculus
  siRNA target sequence for Cftr (NM_021050.1,1670-1688).
cctatgatgagtacagata

SEQ ID NO: 497994 - DNA, 19 bp, Mus musculus
  siRNA target sequence for Cftr (NM_021050.1,1675-1693).
gatgagtacagatataaga

SEQ ID NO: 497995 - DNA, 19 bp, Mus musculus
  siRNA target sequence for Cftr (NM_021050.1,1685-1703).
gatataagagtgttgtcaa

SEQ ID NO: 497996 - DNA, 19 bp, Mus musculus
  siRNA target sequence for Cftr (NM_021050.1,1728-1746).
caccaagtttgcagaacaa

SEQ ID NO: 497997 - DNA, 19 bp, Mus musculus
  siRNA target sequence for Cftr (NM_021050.1,1730-1748).
ccaagtttgcagaacaaga

SEQ ID NO: 497998 - DNA, 19 bp, Mus musculus
  siRNA target sequence for Cftr (NM_021050.1,1792-1810).
cagcgtgcaaggatttctt

SEQ ID NO: 497999 - DNA, 19 bp, Mus musculus
  siRNA target sequence for Cftr (NM_021050.1,1814-1832).
caagagcagtatataaaga

SEQ ID NO: 498000 - DNA, 19 bp, Mus musculus
  siRNA target sequence for Cftr (NM_021050.1,1835-1853).
ctgatttgtacctattaga

SEQ ID NO: 498001 - DNA, 19 bp, Mus musculus
  siRNA target sequence for Cftr (NM_021050.1,1923-1941).
ggccaacaaaactaggatt

SEQ ID NO: 498002 - DNA, 19 bp, Mus musculus
  siRNA target sequence for Cftr (NM_021050.1,1937-1955).
ggattttggttacatctaa

SEQ ID NO: 498003 - DNA, 19 bp, Mus musculus
  siRNA target sequence for Cftr (NM_021050.1,1949-1967).
catctaaaatggaacactt

SEQ ID NO: 498004 - DNA, 19 bp, Mus musculus
  siRNA target sequence for Cftr (NM_021050.1,1970-1988).
ggaaagctgacaaaatact

SEQ ID NO: 498005 - DNA, 19 bp, Mus musculus
  siRNA target sequence for Cftr (NM_021050.1,1971-1989).
gaaagctgacaaaatacta

SEQ ID NO: 498006 - DNA, 19 bp, Mus musculus
  siRNA target sequence for Cftr (NM_021050.1,1976-1994).
ctgacaaaatactaatttt

SEQ ID NO: 498007 - DNA, 19 bp, Mus musculus
  siRNA target sequence for Cftr (NM_021050.1,1980-1998).
caaaatactaattttgcat

SEQ ID NO: 498008 - DNA, 19 bp, Mus musculus
  siRNA target sequence for Cftr (NM_021050.1,1995-2013).
gcatcagggcagtagctat

SEQ ID NO: 498009 - DNA, 19 bp, Mus musculus
  siRNA target sequence for Cftr (NM_021050.1,2064-2082).
gaaactcatggggtatgat

SEQ ID NO: 498010 - DNA, 19 bp, Mus musculus
  siRNA target sequence for Cftr (NM_021050.1,2068-2086).
ctcatggggtatgatactt

SEQ ID NO: 498011 - DNA, 19 bp, Mus musculus
  siRNA target sequence for Cftr (NM_021050.1,2070-2088).
catggggtatgatactttt

SEQ ID NO: 498012 - DNA, 19 bp, Mus musculus
  siRNA target sequence for Cftr (NM_021050.1,2080-2098).
gatacttttgaccagttta

SEQ ID NO: 498013 - DNA, 19 bp, Mus musculus
  siRNA target sequence for Cftr (NM_021050.1,2084-2102).
cttttgaccagtttactga

SEQ ID NO: 498014 - DNA, 19 bp, Mus musculus
  siRNA target sequence for Cftr (NM_021050.1,2111-2129).
gaagttcaattctaactga

SEQ ID NO: 498015 - DNA, 19 bp, Mus musculus
  siRNA target sequence for Cftr (NM_021050.1,2226-2244).
gaactctattctaaattca

SEQ ID NO: 498016 - DNA, 19 bp, Mus musculus
  siRNA target sequence for Cftr (NM_021050.1,2247-2265).
cagctctgtaaggaaaatt

SEQ ID NO: 498017 - DNA, 19 bp, Mus musculus
  siRNA target sequence for Cftr (NM_021050.1,2274-2292).
gcaaaagactccattatgt

SEQ ID NO: 498018 - DNA, 19 bp, Mus musculus
  siRNA target sequence for Cftr (NM_021050.1,2275-2293).
caaaagactccattatgta

SEQ ID NO: 498019 - DNA, 19 bp, Mus musculus
  siRNA target sequence for Cftr (NM_021050.1,2280-2298).
gactccattatgtatcgat

SEQ ID NO: 498020 - DNA, 19 bp, Mus musculus
  siRNA target sequence for Cftr (NM_021050.1,2417-2435).
gaagacagtctgttttgga

SEQ ID NO: 498021 - DNA, 19 bp, Mus musculus
  siRNA target sequence for Cftr (NM_021050.1,2481-2499).
gaccagaacttctattcga

SEQ ID NO: 498022 - DNA, 19 bp, Mus musculus
  siRNA target sequence for Cftr (NM_021050.1,2483-2501).
ccagaacttctattcgaaa

SEQ ID NO: 498023 - DNA, 19 bp, Mus musculus
  siRNA target sequence for Cftr (NM_021050.1,2484-2502).
cagaacttctattcgaaaa

SEQ ID NO: 498024 - DNA, 19 bp, Mus musculus
  siRNA target sequence for Cftr (NM_021050.1,2486-2504).
gaacttctattcgaaaaat

SEQ ID NO: 498025 - DNA, 19 bp, Mus musculus
  siRNA target sequence for Cftr (NM_021050.1,2505-2523).
ctccttagtccctcagata

SEQ ID NO: 498026 - DNA, 19 bp, Mus musculus
  siRNA target sequence for Cftr (NM_021050.1,2583-2601).
cactgaagaaattaacgaa

SEQ ID NO: 498027 - DNA, 19 bp, Mus musculus
  siRNA target sequence for Cftr (NM_021050.1,2660-2678).
ggaacacatacctacgata

SEQ ID NO: 498028 - DNA, 19 bp, Mus musculus
  siRNA target sequence for Cftr (NM_021050.1,2661-2679).
gaacacatacctacgatat

SEQ ID NO: 498029 - DNA, 19 bp, Mus musculus
  siRNA target sequence for Cftr (NM_021050.1,2664-2682).
cacatacctacgatatttt

SEQ ID NO: 498030 - DNA, 19 bp, Mus musculus
  siRNA target sequence for Cftr (NM_021050.1,2675-2693).
gatattttactctccataa

SEQ ID NO: 498031 - DNA, 19 bp, Mus musculus
  siRNA target sequence for Cftr (NM_021050.1,2717-2735).
ggtgcgtactggtttttct

SEQ ID NO: 498032 - DNA, 19 bp, Mus musculus
  siRNA target sequence for Cftr (NM_021050.1,2740-2758).
gaggtggctgcttctttat

SEQ ID NO: 498033 - DNA, 19 bp, Mus musculus
  siRNA target sequence for Cftr (NM_021050.1,2795-2813).
gtggaaacaatggtactaa

SEQ ID NO: 498034 - DNA, 19 bp, Mus musculus
  siRNA target sequence for Cftr (NM_021050.1,2806-2824).
ggtactaaaatttccaata

SEQ ID NO: 498035 - DNA, 19 bp, Mus musculus
  siRNA target sequence for Cftr (NM_021050.1,2846-2864).
ccagtaccagtttctatta

SEQ ID NO: 498036 - DNA, 19 bp, Mus musculus
  siRNA target sequence for Cftr (NM_021050.1,2847-2865).
cagtaccagtttctattat

SEQ ID NO: 498037 - DNA, 19 bp, Mus musculus
  siRNA target sequence for Cftr (NM_021050.1,2849-2867).
gtaccagtttctattatat

SEQ ID NO: 498038 - DNA, 19 bp, Mus musculus
  siRNA target sequence for Cftr (NM_021050.1,2928-2946).
gccgctggtgcatacgtta

SEQ ID NO: 498039 - DNA, 19 bp, Mus musculus
  siRNA target sequence for Cftr (NM_021050.1,2929-2947).
ccgctggtgcatacgttaa

SEQ ID NO: 498040 - DNA, 19 bp, Mus musculus
  siRNA target sequence for Cftr (NM_021050.1,2942-2960).
cgttaatcacagcatcaaa

SEQ ID NO: 498041 - DNA, 19 bp, Mus musculus
  siRNA target sequence for Cftr (NM_021050.1,3028-3046).
gcaggtgggattcttaaca

SEQ ID NO: 498042 - DNA, 19 bp, Mus musculus
  siRNA target sequence for Cftr (NM_021050.1,3031-3049).
ggtgggattcttaacagat

SEQ ID NO: 498043 - DNA, 19 bp, Mus musculus
  siRNA target sequence for Cftr (NM_021050.1,3034-3052).
gggattcttaacagattct

SEQ ID NO: 498044 - DNA, 19 bp, Mus musculus
  siRNA target sequence for Cftr (NM_021050.1,3051-3069).
ctccaaagatatagcaatt

SEQ ID NO: 498045 - DNA, 19 bp, Mus musculus
  siRNA target sequence for Cftr (NM_021050.1,3151-3169).
gcattacaaccctacatct

SEQ ID NO: 498046 - DNA, 19 bp, Mus musculus
  siRNA target sequence for Cftr (NM_021050.1,3179-3197).
cggtgccagggctagtagt

SEQ ID NO: 498047 - DNA, 19 bp, Mus musculus
  siRNA target sequence for Cftr (NM_021050.1,3183-3201).
gccagggctagtagtcttt

SEQ ID NO: 498048 - DNA, 19 bp, Mus musculus
  siRNA target sequence for Cftr (NM_021050.1,3184-3202).
ccagggctagtagtcttta

SEQ ID NO: 498049 - DNA, 19 bp, Mus musculus
  siRNA target sequence for Cftr (NM_021050.1,3262-3280).
ggcaggagtccaattttca

SEQ ID NO: 498050 - DNA, 19 bp, Mus musculus
  siRNA target sequence for Cftr (NM_021050.1,3282-3300).
ccaccttgtgacaagctta

SEQ ID NO: 498051 - DNA, 19 bp, Mus musculus
  siRNA target sequence for Cftr (NM_021050.1,3283-3301).
caccttgtgacaagcttaa

SEQ ID NO: 498052 - DNA, 19 bp, Mus musculus
  siRNA target sequence for Cftr (NM_021050.1,3323-3341).
ccttccgacgccagactta

SEQ ID NO: 498053 - DNA, 19 bp, Mus musculus
  siRNA target sequence for Cftr (NM_021050.1,3327-3345).
ccgacgccagacttacttt

SEQ ID NO: 498054 - DNA, 19 bp, Mus musculus
  siRNA target sequence for Cftr (NM_021050.1,3329-3347).
gacgccagacttactttga

SEQ ID NO: 498055 - DNA, 19 bp, Mus musculus
  siRNA target sequence for Cftr (NM_021050.1,3333-3351).
ccagacttactttgaaact

SEQ ID NO: 498056 - DNA, 19 bp, Mus musculus
  siRNA target sequence for Cftr (NM_021050.1,3376-3394).
cacactgccaactggttta

SEQ ID NO: 498057 - DNA, 19 bp, Mus musculus
  siRNA target sequence for Cftr (NM_021050.1,3407-3425).
ccttgcgctggttccaaat

SEQ ID NO: 498058 - DNA, 19 bp, Mus musculus
  siRNA target sequence for Cftr (NM_021050.1,3411-3429).
gcgctggttccaaatgaga

SEQ ID NO: 498059 - DNA, 19 bp, Mus musculus
  siRNA target sequence for Cftr (NM_021050.1,3412-3430).
cgctggttccaaatgagaa

SEQ ID NO: 498060 - DNA, 19 bp, Mus musculus
  siRNA target sequence for Cftr (NM_021050.1,3416-3434).
ggttccaaatgagaataga

SEQ ID NO: 498061 - DNA, 19 bp, Mus musculus
  siRNA target sequence for Cftr (NM_021050.1,3509-3527).
ctggtattattctaacttt

SEQ ID NO: 498062 - DNA, 19 bp, Mus musculus
  siRNA target sequence for Cftr (NM_021050.1,3520-3538).
ctaactttagctatgaata

SEQ ID NO: 498063 - DNA, 19 bp, Mus musculus
  siRNA target sequence for Cftr (NM_021050.1,3524-3542).
ctttagctatgaatatcat

SEQ ID NO: 498064 - DNA, 19 bp, Mus musculus
  siRNA target sequence for Cftr (NM_021050.1,3562-3580).
gtgaactcaagcattgata

SEQ ID NO: 498065 - DNA, 19 bp, Mus musculus
  siRNA target sequence for Cftr (NM_021050.1,3564-3582).
gaactcaagcattgataca

SEQ ID NO: 498066 - DNA, 19 bp, Mus musculus
  siRNA target sequence for Cftr (NM_021050.1,3567-3585).
ctcaagcattgatacagat

SEQ ID NO: 498067 - DNA, 19 bp, Mus musculus
  siRNA target sequence for Cftr (NM_021050.1,3572-3590).
gcattgatacagatagctt

SEQ ID NO: 498068 - DNA, 19 bp, Mus musculus
  siRNA target sequence for Cftr (NM_021050.1,3606-3624).
cagagtgtttaagtttatt

SEQ ID NO: 498069 - DNA, 19 bp, Mus musculus
  siRNA target sequence for Cftr (NM_021050.1,3608-3626).
gagtgtttaagtttattga

SEQ ID NO: 498070 - DNA, 19 bp, Mus musculus
  siRNA target sequence for Cftr (NM_021050.1,3612-3630).
gtttaagtttattgatata

SEQ ID NO: 498071 - DNA, 19 bp, Mus musculus
  siRNA target sequence for Cftr (NM_021050.1,3683-3701).
gatcatctgacgttttagt

SEQ ID NO: 498072 - DNA, 19 bp, Mus musculus
  siRNA target sequence for Cftr (NM_021050.1,3686-3704).
catctgacgttttagtcat

SEQ ID NO: 498073 - DNA, 19 bp, Mus musculus
  siRNA target sequence for Cftr (NM_021050.1,3691-3709).
gacgttttagtcattaaga

SEQ ID NO: 498074 - DNA, 19 bp, Mus musculus
  siRNA target sequence for Cftr (NM_021050.1,3693-3711).
cgttttagtcattaagaat

SEQ ID NO: 498075 - DNA, 19 bp, Mus musculus
  siRNA target sequence for Cftr (NM_021050.1,3740-3758).
cctctggaggcgaaatggt

SEQ ID NO: 498076 - DNA, 19 bp, Mus musculus
  siRNA target sequence for Cftr (NM_021050.1,3746-3764).
gaggcgaaatggttgtcaa

SEQ ID NO: 498077 - DNA, 19 bp, Mus musculus
  siRNA target sequence for Cftr (NM_021050.1,3749-3767).
gcgaaatggttgtcaaaga

SEQ ID NO: 498078 - DNA, 19 bp, Mus musculus
  siRNA target sequence for Cftr (NM_021050.1,3801-3819).
cgtattagagaacatttct

SEQ ID NO: 498079 - DNA, 19 bp, Mus musculus
  siRNA target sequence for Cftr (NM_021050.1,3885-3903).
gctttcagcatttttacga

SEQ ID NO: 498080 - DNA, 19 bp, Mus musculus
  siRNA target sequence for Cftr (NM_021050.1,3890-3908).
cagcatttttacgaatgtt

SEQ ID NO: 498081 - DNA, 19 bp, Mus musculus
  siRNA target sequence for Cftr (NM_021050.1,3892-3910).
gcatttttacgaatgttga

SEQ ID NO: 498082 - DNA, 19 bp, Mus musculus
  siRNA target sequence for Cftr (NM_021050.1,3893-3911).
catttttacgaatgttgaa

SEQ ID NO: 498083 - DNA, 19 bp, Mus musculus
  siRNA target sequence for Cftr (NM_021050.1,3909-3927).
gaacattaaaggtgatata

SEQ ID NO: 498084 - DNA, 19 bp, Mus musculus
  siRNA target sequence for Cftr (NM_021050.1,3980-3998).
ctttcggagtgataacaca

SEQ ID NO: 498085 - DNA, 19 bp, Mus musculus
  siRNA target sequence for Cftr (NM_021050.1,3984-4002).
cggagtgataacacagaaa

SEQ ID NO: 498086 - DNA, 19 bp, Mus musculus
  siRNA target sequence for Cftr (NM_021050.1,3986-4004).
gagtgataacacagaaagt

SEQ ID NO: 498087 - DNA, 19 bp, Mus musculus
  siRNA target sequence for Cftr (NM_021050.1,4019-4037).
gaacattcagacaaaacct

SEQ ID NO: 498088 - DNA, 19 bp, Mus musculus
  siRNA target sequence for Cftr (NM_021050.1,4094-4112).
gactcaagtctgtaataga

SEQ ID NO: 498089 - DNA, 19 bp, Mus musculus
  siRNA target sequence for Cftr (NM_021050.1,4171-4189).
ggccataagcaattaatgt

SEQ ID NO: 498090 - DNA, 19 bp, Mus musculus
  siRNA target sequence for Cftr (NM_021050.1,4188-4206).
gtgcttggcccgatcagtt

SEQ ID NO: 498091 - DNA, 19 bp, Mus musculus
  siRNA target sequence for Cftr (NM_021050.1,4196-4214).
cccgatcagttctcagtaa

SEQ ID NO: 498092 - DNA, 19 bp, Mus musculus
  siRNA target sequence for Cftr (NM_021050.1,4211-4229).
gtaaggccaagatcatact

SEQ ID NO: 498093 - DNA, 19 bp, Mus musculus
  siRNA target sequence for Cftr (NM_021050.1,4248-4266).
ccatctagaccccataaca

SEQ ID NO: 498094 - DNA, 19 bp, Mus musculus
  siRNA target sequence for Cftr (NM_021050.1,4249-4267).
catctagaccccataacat

SEQ ID NO: 498095 - DNA, 19 bp, Mus musculus
  siRNA target sequence for Cftr (NM_021050.1,4259-4277).
ccataacataccaagtcat

SEQ ID NO: 498096 - DNA, 19 bp, Mus musculus
  siRNA target sequence for Cftr (NM_021050.1,4275-4293).
cattcgacgagttctaaaa

SEQ ID NO: 498097 - DNA, 19 bp, Mus musculus
  siRNA target sequence for Cftr (NM_021050.1,4359-4377).
gcgatttttggtcatagaa

SEQ ID NO: 498098 - DNA, 19 bp, Mus musculus
  siRNA target sequence for Cftr (NM_021050.1,4361-4379).
gatttttggtcatagaaga

SEQ ID NO: 498099 - DNA, 19 bp, Mus musculus
  siRNA target sequence for Cftr (NM_021050.1,4500-4518).
caagcctcggacgcaaatt

SEQ ID NO: 498100 - DNA, 19 bp, Mus musculus
  siRNA target sequence for Cftr (NM_021050.1,4512-4530).
gcaaattactgctctgaaa

SEQ ID NO: 498101 - DNA, 19 bp, Mus musculus
  siRNA target sequence for Cgi152 (NM_133224.1,398-416).
cctgcaccccggagtatga

SEQ ID NO: 498102 - DNA, 19 bp, Mus musculus
  siRNA target sequence for Cgi152 (NM_133224.1,399-417).
ctgcaccccggagtatgat

SEQ ID NO: 498103 - DNA, 19 bp, Mus musculus
  siRNA target sequence for Cgi152 (NM_133224.1,658-676).
cgagctgcagagaagaagt

SEQ ID NO: 498104 - DNA, 19 bp, Mus musculus
  siRNA target sequence for Cgi152 (NM_133224.1,785-803).
gcctggacgagtattggta

SEQ ID NO: 498105 - DNA, 19 bp, Mus musculus
  siRNA target sequence for Cgi152 (NM_133224.1,790-808).
gacgagtattggtactaca

SEQ ID NO: 498106 - DNA, 19 bp, Mus musculus
  siRNA target sequence for Cgi152 (NM_133224.1,948-966).
cgccagtgatgacattgtt

SEQ ID NO: 498107 - DNA, 19 bp, Mus musculus
  siRNA target sequence for Cgi152 (NM_133224.1,968-986).
ctggggacatcgtgtctat

SEQ ID NO: 498108 - DNA, 19 bp, Mus musculus
  siRNA target sequence for Cgi152 (NM_133224.1,1148-1166).
ctcggctgcatgtcatctt

SEQ ID NO: 498109 - DNA, 19 bp, Mus musculus
  siRNA target sequence for Cgi152 (NM_133224.1,1283-1301).
gcagactactgcgtacaat

SEQ ID NO: 498110 - DNA, 19 bp, Mus musculus
  siRNA target sequence for Cgi152 (NM_133224.1,1284-1302).
cagactactgcgtacaatt

SEQ ID NO: 498111 - DNA, 19 bp, Mus musculus
  siRNA target sequence for Cgi152 (NM_133224.1,1286-1304).
gactactgcgtacaattct

SEQ ID NO: 498112 - DNA, 19 bp, Mus musculus
  siRNA target sequence for Cgi152 (NM_133224.1,1288-1306).
ctactgcgtacaattctct

SEQ ID NO: 498113 - DNA, 19 bp, Mus musculus
  siRNA target sequence for Cgi152 (NM_133224.1,1319-1337).
gggtcactgcaaacaactt

SEQ ID NO: 498114 - DNA, 19 bp, Mus musculus
  siRNA target sequence for Cgi152 (NM_133224.1,1482-1500).
ccctgaactgcccattgaa

SEQ ID NO: 498115 - DNA, 19 bp, Mus musculus
  siRNA target sequence for Cgi152 (NM_133224.1,1594-1612).
gaagtgtgttgctttgaca

SEQ ID NO: 498116 - DNA, 19 bp, Mus musculus
  siRNA target sequence for Cgi152 (NM_133224.1,1692-1710).
gtccagcattcccatagaa

SEQ ID NO: 498117 - DNA, 19 bp, Mus musculus
  siRNA target sequence for Cgi152 (NM_133224.1,1695-1713).
cagcattcccatagaaaca

SEQ ID NO: 498118 - DNA, 19 bp, Mus musculus
  siRNA target sequence for Cgi152 (NM_133224.1,1809-1827).
ctggacactgaccaaagat

SEQ ID NO: 498119 - DNA, 19 bp, Mus musculus
  siRNA target sequence for Cgi152 (NM_133224.1,1818-1836).
gaccaaagatgagaaagta

SEQ ID NO: 498120 - DNA, 19 bp, Mus musculus
  siRNA target sequence for Cgi152 (NM_133224.1,1834-1852).
gtattcccccgaagtatta

SEQ ID NO: 498121 - DNA, 19 bp, Mus musculus
  siRNA target sequence for Cgi152 (NM_133224.1,1839-1857).
cccccgaagtattaaaact

SEQ ID NO: 498122 - DNA, 19 bp, Mus musculus
  siRNA target sequence for Cgi152 (NM_133224.1,1984-2002).
gaaaccctgcactctatgt

SEQ ID NO: 498123 - DNA, 19 bp, Mus musculus
  siRNA target sequence for Cgi152 (NM_133224.1,1989-2007).
cctgcactctatgttttct

SEQ ID NO: 498124 - DNA, 19 bp, Mus musculus
  siRNA target sequence for Cgi152 (NM_133224.1,2139-2157).
ggagtgcagcctcaagttt

SEQ ID NO: 498125 - DNA, 19 bp, Mus musculus
  siRNA target sequence for Cgi152 (NM_133224.1,2212-2230).
cgagagatccagaatgcat

SEQ ID NO: 498126 - DNA, 19 bp, Mus musculus
  siRNA target sequence for Cgi152 (NM_133224.1,2290-2308).
gagctgcacttcattgaca

SEQ ID NO: 498127 - DNA, 19 bp, Mus musculus
  siRNA target sequence for Cgi152 (NM_133224.1,2359-2377).
gagtggcgctccattgata

SEQ ID NO: 498128 - DNA, 19 bp, Mus musculus
  siRNA target sequence for Cgi152 (NM_133224.1,2533-2551).
gcccctaagcagaaggaat

SEQ ID NO: 498129 - DNA, 19 bp, Mus musculus
  siRNA target sequence for Cgi152 (NM_133224.1,2534-2552).
cccctaagcagaaggaatt

SEQ ID NO: 498130 - DNA, 19 bp, Mus musculus
  siRNA target sequence for Cgi152 (NM_133224.1,2578-2596).
ggttatgtgacccttatgt

SEQ ID NO: 498131 - DNA, 19 bp, Mus musculus
  siRNA target sequence for Cgi152 (NM_133224.1,2666-2684).
cccctgagagggttgtaga

SEQ ID NO: 498132 - DNA, 19 bp, Mus musculus
  siRNA target sequence for Cgi152 (NM_133224.1,2741-2759).
ccaggtccaccaaacagaa

SEQ ID NO: 498133 - DNA, 19 bp, Mus musculus
  siRNA target sequence for Cgi152 (NM_133224.1,3143-3161).
ccctacccaacatcttcaa

SEQ ID NO: 498134 - DNA, 19 bp, Mus musculus
  siRNA target sequence for Cgi152 (NM_133224.1,3180-3198).
ggtgatgctgcaattctct

SEQ ID NO: 498135 - DNA, 19 bp, Mus musculus
  siRNA target sequence for Cgi152 (NM_133224.1,3461-3479).
gttcctcacctgacttcaa

SEQ ID NO: 498136 - DNA, 19 bp, Mus musculus
  siRNA target sequence for Chek1 (NM_007691.2,109-127).
gggatttggtgcaaacttt

SEQ ID NO: 498137 - DNA, 19 bp, Mus musculus
  siRNA target sequence for Chek1 (NM_007691.2,139-157).
cctatggagaagttcaact

SEQ ID NO: 498138 - DNA, 19 bp, Mus musculus
  siRNA target sequence for Chek1 (NM_007691.2,140-158).
ctatggagaagttcaactt

SEQ ID NO: 498139 - DNA, 19 bp, Mus musculus
  siRNA target sequence for Chek1 (NM_007691.2,150-168).
gttcaacttgctgtgaata

SEQ ID NO: 498140 - DNA, 19 bp, Mus musculus
  siRNA target sequence for Chek1 (NM_007691.2,160-178).
ctgtgaatagaataactga

SEQ ID NO: 498141 - DNA, 19 bp, Mus musculus
  siRNA target sequence for Chek1 (NM_007691.2,246-264).
gagatctgcatcaataaaa

SEQ ID NO: 498142 - DNA, 19 bp, Mus musculus
  siRNA target sequence for Chek1 (NM_007691.2,266-284).
gttaagccacgagaatgta

SEQ ID NO: 498143 - DNA, 19 bp, Mus musculus
  siRNA target sequence for Chek1 (NM_007691.2,271-289).
gccacgagaatgtagtgaa

SEQ ID NO: 498144 - DNA, 19 bp, Mus musculus
  siRNA target sequence for Chek1 (NM_007691.2,312-330).
ggccatatccagtatctgt

SEQ ID NO: 498145 - DNA, 19 bp, Mus musculus
  siRNA target sequence for Chek1 (NM_007691.2,313-331).
gccatatccagtatctgtt

SEQ ID NO: 498146 - DNA, 19 bp, Mus musculus
  siRNA target sequence for Chek1 (NM_007691.2,314-332).
ccatatccagtatctgttt

SEQ ID NO: 498147 - DNA, 19 bp, Mus musculus
  siRNA target sequence for Chek1 (NM_007691.2,351-369).
ggagaactttttgatagaa

SEQ ID NO: 498148 - DNA, 19 bp, Mus musculus
  siRNA target sequence for Chek1 (NM_007691.2,352-370).
gagaactttttgatagaat

SEQ ID NO: 498149 - DNA, 19 bp, Mus musculus
  siRNA target sequence for Chek1 (NM_007691.2,380-398).
catagggatgcctgaacaa

SEQ ID NO: 498150 - DNA, 19 bp, Mus musculus
  siRNA target sequence for Chek1 (NM_007691.2,409-427).
ggttcttccaccaactcat

SEQ ID NO: 498151 - DNA, 19 bp, Mus musculus
  siRNA target sequence for Chek1 (NM_007691.2,430-448).
caggggtggtttatcttca

SEQ ID NO: 498152 - DNA, 19 bp, Mus musculus
  siRNA target sequence for Chek1 (NM_007691.2,506-524).
ggataacctcaaaatctct

SEQ ID NO: 498153 - DNA, 19 bp, Mus musculus
  siRNA target sequence for Chek1 (NM_007691.2,541-559).
cggtatttcggcataataa

SEQ ID NO: 498154 - DNA, 19 bp, Mus musculus
  siRNA target sequence for Chek1 (NM_007691.2,542-560).
ggtatttcggcataataat

SEQ ID NO: 498155 - DNA, 19 bp, Mus musculus
  siRNA target sequence for Chek1 (NM_007691.2,562-580).
gtgaacgcttactgaacaa

SEQ ID NO: 498156 - DNA, 19 bp, Mus musculus
  siRNA target sequence for Chek1 (NM_007691.2,567-585).
cgcttactgaacaagatgt

SEQ ID NO: 498157 - DNA, 19 bp, Mus musculus
  siRNA target sequence for Chek1 (NM_007691.2,578-596).
caagatgtgtgggacttta

SEQ ID NO: 498158 - DNA, 19 bp, Mus musculus
  siRNA target sequence for Chek1 (NM_007691.2,581-599).
gatgtgtgggactttacct

SEQ ID NO: 498159 - DNA, 19 bp, Mus musculus
  siRNA target sequence for Chek1 (NM_007691.2,586-604).
gtgggactttaccttatgt

SEQ ID NO: 498160 - DNA, 19 bp, Mus musculus
  siRNA target sequence for Chek1 (NM_007691.2,603-621).
gttgctccggagcttctaa

SEQ ID NO: 498161 - DNA, 19 bp, Mus musculus
  siRNA target sequence for Chek1 (NM_007691.2,606-624).
gctccggagcttctaaaga

SEQ ID NO: 498162 - DNA, 19 bp, Mus musculus
  siRNA target sequence for Chek1 (NM_007691.2,639-657).
gcagaaccagttgatgttt

SEQ ID NO: 498163 - DNA, 19 bp, Mus musculus
  siRNA target sequence for Chek1 (NM_007691.2,659-677).
gtcctgtggaatagtactt

SEQ ID NO: 498164 - DNA, 19 bp, Mus musculus
  siRNA target sequence for Chek1 (NM_007691.2,662-680).
ctgtggaatagtacttact

SEQ ID NO: 498165 - DNA, 19 bp, Mus musculus
  siRNA target sequence for Chek1 (NM_007691.2,725-743).
ctgtcaggaatattctgat

SEQ ID NO: 498166 - DNA, 19 bp, Mus musculus
  siRNA target sequence for Chek1 (NM_007691.2,731-749).
ggaatattctgattggaaa

SEQ ID NO: 498167 - DNA, 19 bp, Mus musculus
  siRNA target sequence for Chek1 (NM_007691.2,802-820).
ctttgcttcataaaattct

SEQ ID NO: 498168 - DNA, 19 bp, Mus musculus
  siRNA target sequence for Chek1 (NM_007691.2,806-824).
gcttcataaaattctagtt

SEQ ID NO: 498169 - DNA, 19 bp, Mus musculus
  siRNA target sequence for Chek1 (NM_007691.2,842-860).
gatcaccatcccagacatt

SEQ ID NO: 498170 - DNA, 19 bp, Mus musculus
  siRNA target sequence for Chek1 (NM_007691.2,874-892).
ggtacaacaaaccacttaa

SEQ ID NO: 498171 - DNA, 19 bp, Mus musculus
  siRNA target sequence for Chek1 (NM_007691.2,917-935).
cacatcaggtggtatgtca

SEQ ID NO: 498172 - DNA, 19 bp, Mus musculus
  siRNA target sequence for Chek1 (NM_007691.2,927-945).
ggtatgtcagagtcttcta

SEQ ID NO: 498173 - DNA, 19 bp, Mus musculus
  siRNA target sequence for Chek1 (NM_007691.2,949-967).
gattctctaagcacattca

SEQ ID NO: 498174 - DNA, 19 bp, Mus musculus
  siRNA target sequence for Chek1 (NM_007691.2,977-995).
ggacttttctccagtaaat

SEQ ID NO: 498175 - DNA, 19 bp, Mus musculus
  siRNA target sequence for Chek1 (NM_007691.2,978-996).
gacttttctccagtaaata

SEQ ID NO: 498176 - DNA, 19 bp, Mus musculus
  siRNA target sequence for Chek1 (NM_007691.2,1011-1029).
gaaaccgtgaagttctcta

SEQ ID NO: 498177 - DNA, 19 bp, Mus musculus
  siRNA target sequence for Chek1 (NM_007691.2,1078-1096).
cctcgaacgtggacaaact

SEQ ID NO: 498178 - DNA, 19 bp, Mus musculus
  siRNA target sequence for Chek1 (NM_007691.2,1095-1113).
ctggttcagggcatcagtt

SEQ ID NO: 498179 - DNA, 19 bp, Mus musculus
  siRNA target sequence for Chek1 (NM_007691.2,1098-1116).
gttcagggcatcagttttt

SEQ ID NO: 498180 - DNA, 19 bp, Mus musculus
  siRNA target sequence for Chek1 (NM_007691.2,1123-1141).
ctacgtgtcctgagcatat

SEQ ID NO: 498181 - DNA, 19 bp, Mus musculus
  siRNA target sequence for Chek1 (NM_007691.2,1126-1144).
cgtgtcctgagcatatgct

SEQ ID NO: 498182 - DNA, 19 bp, Mus musculus
  siRNA target sequence for Chek1 (NM_007691.2,1127-1145).
gtgtcctgagcatatgctt

SEQ ID NO: 498183 - DNA, 19 bp, Mus musculus
  siRNA target sequence for Chek1 (NM_007691.2,1132-1150).
ctgagcatatgcttgtaaa

SEQ ID NO: 498184 - DNA, 19 bp, Mus musculus
  siRNA target sequence for Chek1 (NM_007691.2,1134-1152).
gagcatatgcttgtaaaca

SEQ ID NO: 498185 - DNA, 19 bp, Mus musculus
  siRNA target sequence for Chek1 (NM_007691.2,1163-1181).
cggtacccctggatcttca

SEQ ID NO: 498186 - DNA, 19 bp, Mus musculus
  siRNA target sequence for Chek1 (NM_007691.2,1194-1212).
cagcgcttggtcaaaagga

SEQ ID NO: 498187 - DNA, 19 bp, Mus musculus
  siRNA target sequence for Chek1 (NM_007691.2,1216-1234).
cacgattctttactaaatt

SEQ ID NO: 498188 - DNA, 19 bp, Mus musculus
  siRNA target sequence for Chek1 (NM_007691.2,1219-1237).
gattctttactaaattgga

SEQ ID NO: 498189 - DNA, 19 bp, Mus musculus
  siRNA target sequence for Chek1 (NM_007691.2,1290-1308).
cagtggaagaagagttgta

SEQ ID NO: 498190 - DNA, 19 bp, Mus musculus
  siRNA target sequence for Chek1 (NM_007691.2,1310-1328).
gaatcaggttactgtatca

SEQ ID NO: 498191 - DNA, 19 bp, Mus musculus
  siRNA target sequence for Chek1 (NM_007691.2,1339-1357).
gaagaaacaataagttgat

SEQ ID NO: 498192 - DNA, 19 bp, Mus musculus
  siRNA target sequence for Chek1 (NM_007691.2,1397-1415).
ggttgacttccgactttct

SEQ ID NO: 498193 - DNA, 19 bp, Mus musculus
  siRNA target sequence for Chek1 (NM_007691.2,1398-1416).
gttgacttccgactttcta

SEQ ID NO: 498194 - DNA, 19 bp, Mus musculus
  siRNA target sequence for Chek1 (NM_007691.2,1420-1438).
gtgatggattagagttcaa

SEQ ID NO: 498195 - DNA, 19 bp, Mus musculus
  siRNA target sequence for Chek1 (NM_007691.2,1441-1459).
gacacttcctgaagattaa

SEQ ID NO: 498196 - DNA, 19 bp, Mus musculus
  siRNA target sequence for Chek1 (NM_007691.2,1462-1480).
ggaagctcagcgatgttgt

SEQ ID NO: 498197 - DNA, 19 bp, Mus musculus
  siRNA target sequence for Chek2 (NM_016681.2,363-381).
ccaatctagactgtgttaa

SEQ ID NO: 498198 - DNA, 19 bp, Mus musculus
  siRNA target sequence for Chek2 (NM_016681.2,404-422).
gataaaagctgtgaatatt

SEQ ID NO: 498199 - DNA, 19 bp, Mus musculus
  siRNA target sequence for Chek2 (NM_016681.2,469-487).
cagcaagaagcattttcgt

SEQ ID NO: 498200 - DNA, 19 bp, Mus musculus
  siRNA target sequence for Chek2 (NM_016681.2,504-522).
gccctaaaaattgttacat

SEQ ID NO: 498201 - DNA, 19 bp, Mus musculus
  siRNA target sequence for Chek2 (NM_016681.2,546-564).
gaaatggaaccttcgtaaa

SEQ ID NO: 498202 - DNA, 19 bp, Mus musculus
  siRNA target sequence for Chek2 (NM_016681.2,559-577).
cgtaaataccgagcttatt

SEQ ID NO: 498203 - DNA, 19 bp, Mus musculus
  siRNA target sequence for Chek2 (NM_016681.2,590-608).
cgctgtcctctgagtaaca

SEQ ID NO: 498204 - DNA, 19 bp, Mus musculus
  siRNA target sequence for Chek2 (NM_016681.2,610-628).
ctctgaaatcgcactttca

SEQ ID NO: 498205 - DNA, 19 bp, Mus musculus
  siRNA target sequence for Chek2 (NM_016681.2,614-632).
gaaatcgcactttcactat

SEQ ID NO: 498206 - DNA, 19 bp, Mus musculus
  siRNA target sequence for Chek2 (NM_016681.2,619-637).
cgcactttcactatgtaga

SEQ ID NO: 498207 - DNA, 19 bp, Mus musculus
  siRNA target sequence for Chek2 (NM_016681.2,668-686).
gtagatgatcagtcagttt

SEQ ID NO: 498208 - DNA, 19 bp, Mus musculus
  siRNA target sequence for Chek2 (NM_016681.2,674-692).
gatcagtcagtttatccta

SEQ ID NO: 498209 - DNA, 19 bp, Mus musculus
  siRNA target sequence for Chek2 (NM_016681.2,695-713).
gaattaagagacgaataca

SEQ ID NO: 498210 - DNA, 19 bp, Mus musculus
  siRNA target sequence for Chek2 (NM_016681.2,704-722).
gacgaatacatcatgtcaa

SEQ ID NO: 498211 - DNA, 19 bp, Mus musculus
  siRNA target sequence for Chek2 (NM_016681.2,706-724).
cgaatacatcatgtcaaaa

SEQ ID NO: 498212 - DNA, 19 bp, Mus musculus
  siRNA target sequence for Chek2 (NM_016681.2,712-730).
catcatgtcaaaaactctt

SEQ ID NO: 498213 - DNA, 19 bp, Mus musculus
  siRNA target sequence for Chek2 (NM_016681.2,740-758).
gcgtgtggggaggtaaaga

SEQ ID NO: 498214 - DNA, 19 bp, Mus musculus
  siRNA target sequence for Chek2 (NM_016681.2,741-759).
cgtgtggggaggtaaagat

SEQ ID NO: 498215 - DNA, 19 bp, Mus musculus
  siRNA target sequence for Chek2 (NM_016681.2,791-809).
gccataaagatcattagca

SEQ ID NO: 498216 - DNA, 19 bp, Mus musculus
  siRNA target sequence for Chek2 (NM_016681.2,896-914).
catccatgcatcatcaaga

SEQ ID NO: 498217 - DNA, 19 bp, Mus musculus
  siRNA target sequence for Chek2 (NM_016681.2,923-941).
gtttttgatgcggaagatt

SEQ ID NO: 498218 - DNA, 19 bp, Mus musculus
  siRNA target sequence for Chek2 (NM_016681.2,929-947).
gatgcggaagattattaca

SEQ ID NO: 498219 - DNA, 19 bp, Mus musculus
  siRNA target sequence for Chek2 (NM_016681.2,1017-1035).
ccacctgtaagctctactt

SEQ ID NO: 498220 - DNA, 19 bp, Mus musculus
  siRNA target sequence for Chek2 (NM_016681.2,1069-1087).
cgaaaatgggatcatacat

SEQ ID NO: 498221 - DNA, 19 bp, Mus musculus
  siRNA target sequence for Chek2 (NM_016681.2,1093-1111).
cttaaagccggagaatgtt

SEQ ID NO: 498222 - DNA, 19 bp, Mus musculus
  siRNA target sequence for Chek2 (NM_016681.2,1099-1117).
gccggagaatgttctttta

SEQ ID NO: 498223 - DNA, 19 bp, Mus musculus
  siRNA target sequence for Chek2 (NM_016681.2,1124-1142).
caggaagaggattgtctaa

SEQ ID NO: 498224 - DNA, 19 bp, Mus musculus
  siRNA target sequence for Chek2 (NM_016681.2,1127-1145).
gaagaggattgtctaatca

SEQ ID NO: 498225 - DNA, 19 bp, Mus musculus
  siRNA target sequence for Chek2 (NM_016681.2,1133-1151).
gattgtctaatcaagatca

SEQ ID NO: 498226 - DNA, 19 bp, Mus musculus
  siRNA target sequence for Chek2 (NM_016681.2,1181-1199).
gagacctccttgatgagaa

SEQ ID NO: 498227 - DNA, 19 bp, Mus musculus
  siRNA target sequence for Chek2 (NM_016681.2,1206-1224).
gtggtacgcccacttatct

SEQ ID NO: 498228 - DNA, 19 bp, Mus musculus
  siRNA target sequence for Chek2 (NM_016681.2,1328-1346).
cctttctctgagcataaga

SEQ ID NO: 498229 - DNA, 19 bp, Mus musculus
  siRNA target sequence for Chek2 (NM_016681.2,1433-1451).
gaccttgtcaagaaactgt

SEQ ID NO: 498230 - DNA, 19 bp, Mus musculus
  siRNA target sequence for Chek2 (NM_016681.2,1435-1453).
ccttgtcaagaaactgtta

SEQ ID NO: 498231 - DNA, 19 bp, Mus musculus
  siRNA target sequence for Chek2 (NM_016681.2,1633-1651).
gggtatgccgagcacaaaa

SEQ ID NO: 498232 - DNA, 19 bp, Mus musculus
  siRNA target sequence for Chuk (NM_007700.1,149-167).
ccagcaccgggaacttgat

SEQ ID NO: 498233 - DNA, 19 bp, Mus musculus
  siRNA target sequence for Chuk (NM_007700.1,170-188).
caaaatagcaattaagtct

SEQ ID NO: 498234 - DNA, 19 bp, Mus musculus
  siRNA target sequence for Chuk (NM_007700.1,219-237).
gagcgatggtgccatgaaa

SEQ ID NO: 498235 - DNA, 19 bp, Mus musculus
  siRNA target sequence for Chuk (NM_007700.1,254-272).
gttggaccatgcgaatgtt

SEQ ID NO: 498236 - DNA, 19 bp, Mus musculus
  siRNA target sequence for Chuk (NM_007700.1,257-275).
ggaccatgcgaatgttgta

SEQ ID NO: 498237 - DNA, 19 bp, Mus musculus
  siRNA target sequence for Chuk (NM_007700.1,258-276).
gaccatgcgaatgttgtaa

SEQ ID NO: 498238 - DNA, 19 bp, Mus musculus
  siRNA target sequence for Chuk (NM_007700.1,288-306).
gtccctgaggaattgaact

SEQ ID NO: 498239 - DNA, 19 bp, Mus musculus
  siRNA target sequence for Chuk (NM_007700.1,302-320).
gaactttttaattaacgat

SEQ ID NO: 498240 - DNA, 19 bp, Mus musculus
  siRNA target sequence for Chuk (NM_007700.1,330-348).
ctggcaatggagtactgtt

SEQ ID NO: 498241 - DNA, 19 bp, Mus musculus
  siRNA target sequence for Chuk (NM_007700.1,374-392).
caacaaaccagaaaattgt

SEQ ID NO: 498242 - DNA, 19 bp, Mus musculus
  siRNA target sequence for Chuk (NM_007700.1,451-469).
gatatctgcatgaaaacaa

SEQ ID NO: 498243 - DNA, 19 bp, Mus musculus
  siRNA target sequence for Chuk (NM_007700.1,456-474).
ctgcatgaaaacaaaatta

SEQ ID NO: 498244 - DNA, 19 bp, Mus musculus
  siRNA target sequence for Chuk (NM_007700.1,520-538).
gtgggaagacaatacataa

SEQ ID NO: 498245 - DNA, 19 bp, Mus musculus
  siRNA target sequence for Chuk (NM_007700.1,551-569).
gggttatgccaaagatgtt

SEQ ID NO: 498246 - DNA, 19 bp, Mus musculus
  siRNA target sequence for Chuk (NM_007700.1,553-571).
gttatgccaaagatgttga

SEQ ID NO: 498247 - DNA, 19 bp, Mus musculus
  siRNA target sequence for Chuk (NM_007700.1,709-727).
ggccttttttgcatcatct

SEQ ID NO: 498248 - DNA, 19 bp, Mus musculus
  siRNA target sequence for Chuk (NM_007700.1,739-757).
cctggcatgagaagattaa

SEQ ID NO: 498249 - DNA, 19 bp, Mus musculus
  siRNA target sequence for Chuk (NM_007700.1,801-819).
ggagaagttcggtttagta

SEQ ID NO: 498250 - DNA, 19 bp, Mus musculus
  siRNA target sequence for Chuk (NM_007700.1,812-830).
gtttagtagccatttacct

SEQ ID NO: 498251 - DNA, 19 bp, Mus musculus
  siRNA target sequence for Chuk (NM_007700.1,870-888).
gaaagctggctccaattga

SEQ ID NO: 498252 - DNA, 19 bp, Mus musculus
  siRNA target sequence for Chuk (NM_007700.1,879-897).
ctccaattgatgctgaatt

SEQ ID NO: 498253 - DNA, 19 bp, Mus musculus
  siRNA target sequence for Chuk (NM_007700.1,908-926).
gcagagagggggacctatt

SEQ ID NO: 498254 - DNA, 19 bp, Mus musculus
  siRNA target sequence for Chuk (NM_007700.1,911-929).
gagagggggacctattgat

SEQ ID NO: 498255 - DNA, 19 bp, Mus musculus
  siRNA target sequence for Chuk (NM_007700.1,913-931).
gagggggacctattgatct

SEQ ID NO: 498256 - DNA, 19 bp, Mus musculus
  siRNA target sequence for Chuk (NM_007700.1,915-933).
gggggacctattgatctta

SEQ ID NO: 498257 - DNA, 19 bp, Mus musculus
  siRNA target sequence for Chuk (NM_007700.1,918-936).
ggacctattgatcttactt

SEQ ID NO: 498258 - DNA, 19 bp, Mus musculus
  siRNA target sequence for Chuk (NM_007700.1,919-937).
gacctattgatcttacttt

SEQ ID NO: 498259 - DNA, 19 bp, Mus musculus
  siRNA target sequence for Chuk (NM_007700.1,921-939).
cctattgatcttactttga

SEQ ID NO: 498260 - DNA, 19 bp, Mus musculus
  siRNA target sequence for Chuk (NM_007700.1,942-960).
cagccaagatgttttgcat

SEQ ID NO: 498261 - DNA, 19 bp, Mus musculus
  siRNA target sequence for Chuk (NM_007700.1,944-962).
gccaagatgttttgcatta

SEQ ID NO: 498262 - DNA, 19 bp, Mus musculus
  siRNA target sequence for Chuk (NM_007700.1,946-964).
caagatgttttgcattaat

SEQ ID NO: 498263 - DNA, 19 bp, Mus musculus
  siRNA target sequence for Chuk (NM_007700.1,969-987).
cacattctcaatttaaaga

SEQ ID NO: 498264 - DNA, 19 bp, Mus musculus
  siRNA target sequence for Chuk (NM_007700.1,990-1008).
gtgcacatcctaaatatga

SEQ ID NO: 498265 - DNA, 19 bp, Mus musculus
  siRNA target sequence for Chuk (NM_007700.1,992-1010).
gcacatcctaaatatgact

SEQ ID NO: 498266 - DNA, 19 bp, Mus musculus
  siRNA target sequence for Chuk (NM_007700.1,993-1011).
cacatcctaaatatgactt

SEQ ID NO: 498267 - DNA, 19 bp, Mus musculus
  siRNA target sequence for Chuk (NM_007700.1,1032-1050).
ctgttaccatgtgatgaaa

SEQ ID NO: 498268 - DNA, 19 bp, Mus musculus
  siRNA target sequence for Chuk (NM_007700.1,1034-1052).
gttaccatgtgatgaaagt

SEQ ID NO: 498269 - DNA, 19 bp, Mus musculus
  siRNA target sequence for Chuk (NM_007700.1,1060-1078).
cactacagtctcgaattga

SEQ ID NO: 498270 - DNA, 19 bp, Mus musculus
  siRNA target sequence for Chuk (NM_007700.1,1077-1095).
gagcgtgaaacaggaataa

SEQ ID NO: 498271 - DNA, 19 bp, Mus musculus
  siRNA target sequence for Chuk (NM_007700.1,1079-1097).
gcgtgaaacaggaataaat

SEQ ID NO: 498272 - DNA, 19 bp, Mus musculus
  siRNA target sequence for Chuk (NM_007700.1,1189-1207).
gtgatagctacatggttta

SEQ ID NO: 498273 - DNA, 19 bp, Mus musculus
  siRNA target sequence for Chuk (NM_007700.1,1255-1273).
gaagtttatctgattgtgt

SEQ ID NO: 498274 - DNA, 19 bp, Mus musculus
  siRNA target sequence for Chuk (NM_007700.1,1338-1356).
gaagcagtgcactacgtat

SEQ ID NO: 498275 - DNA, 19 bp, Mus musculus
  siRNA target sequence for Chuk (NM_007700.1,1352-1370).
cgtatctgggctaaaggaa

SEQ ID NO: 498276 - DNA, 19 bp, Mus musculus
  siRNA target sequence for Chuk (NM_007700.1,1357-1375).
ctgggctaaaggaagacta

SEQ ID NO: 498277 - DNA, 19 bp, Mus musculus
  siRNA target sequence for Chuk (NM_007700.1,1399-1417).
gagcagcaatgttaagtct

SEQ ID NO: 498278 - DNA, 19 bp, Mus musculus
  siRNA target sequence for Chuk (NM_007700.1,1409-1427).
gttaagtcttcttagatat

SEQ ID NO: 498279 - DNA, 19 bp, Mus musculus
  siRNA target sequence for Chuk (NM_007700.1,1471-1489).
cacagcaactcaaagctaa

SEQ ID NO: 498280 - DNA, 19 bp, Mus musculus
  siRNA target sequence for Chuk (NM_007700.1,1494-1512).
gagttttttcgaaaaagca

SEQ ID NO: 498281 - DNA, 19 bp, Mus musculus
  siRNA target sequence for Chuk (NM_007700.1,1496-1514).
gttttttcgaaaaagcatt

SEQ ID NO: 498282 - DNA, 19 bp, Mus musculus
  siRNA target sequence for Chuk (NM_007700.1,1517-1535).
gcttgacttggagagatat

SEQ ID NO: 498283 - DNA, 19 bp, Mus musculus
  siRNA target sequence for Chuk (NM_007700.1,1547-1565).
gacttatgggatatcttca

SEQ ID NO: 498284 - DNA, 19 bp, Mus musculus
  siRNA target sequence for Chuk (NM_007700.1,1622-1640).
ggttggtgtcattggttat

SEQ ID NO: 498285 - DNA, 19 bp, Mus musculus
  siRNA target sequence for Chuk (NM_007700.1,1627-1645).
gtgtcattggttatcttga

SEQ ID NO: 498286 - DNA, 19 bp, Mus musculus
  siRNA target sequence for Chuk (NM_007700.1,1636-1654).
gttatcttgaggatcaaat

SEQ ID NO: 498287 - DNA, 19 bp, Mus musculus
  siRNA target sequence for Chuk (NM_007700.1,1705-1723).
gacgccagggagacttgat

SEQ ID NO: 498288 - DNA, 19 bp, Mus musculus
  siRNA target sequence for Chuk (NM_007700.1,1733-1751).
ggagcagcgtgccattgat

SEQ ID NO: 498289 - DNA, 19 bp, Mus musculus
  siRNA target sequence for Chuk (NM_007700.1,1739-1757).
gcgtgccattgatctctat

SEQ ID NO: 498290 - DNA, 19 bp, Mus musculus
  siRNA target sequence for Chuk (NM_007700.1,1740-1758).
cgtgccattgatctctata

SEQ ID NO: 498291 - DNA, 19 bp, Mus musculus
  siRNA target sequence for Chuk (NM_007700.1,1741-1759).
gtgccattgatctctataa

SEQ ID NO: 498292 - DNA, 19 bp, Mus musculus
  siRNA target sequence for Chuk (NM_007700.1,1776-1794).
cctcctgatcacttgtaca

SEQ ID NO: 498293 - DNA, 19 bp, Mus musculus
  siRNA target sequence for Chuk (NM_007700.1,1898-1916).
gcagaagattattgatcta

SEQ ID NO: 498294 - DNA, 19 bp, Mus musculus
  siRNA target sequence for Chuk (NM_007700.1,2095-2113).
catggctgccccctacatt

SEQ ID NO: 498295 - DNA, 19 bp, Mus musculus
  siRNA target sequence for Chuk (NM_007700.1,2167-2185).
cgttagcacaaatgataga

SEQ ID NO: 498296 - DNA, 19 bp, Mus musculus
  siRNA target sequence for Chuk (NM_007700.1,2168-2186).
gttagcacaaatgatagaa

SEQ ID NO: 498297 - DNA, 19 bp, Mus musculus
  siRNA target sequence for Chuk (NM_007700.1,2202-2220).
cttggccatttaagtacta

SEQ ID NO: 498298 - DNA, 19 bp, Mus musculus
  siRNA target sequence for Chuk (NM_007700.1,2205-2223).
ggccatttaagtactatta

SEQ ID NO: 498299 - DNA, 19 bp, Mus musculus
  siRNA target sequence for Chuk (NM_007700.1,2218-2236).
ctattattcgtgaagcaaa

SEQ ID NO: 498300 - DNA, 19 bp, Mus musculus
  siRNA target sequence for Chuk (NM_007700.1,2238-2256).
gaggaccagagcagtagtt

SEQ ID NO: 498301 - DNA, 19 bp, Mus musculus
  siRNA target sequence for Cit (NM_007708.1,800-818).
gggcctccaggctaaatct

SEQ ID NO: 498302 - DNA, 19 bp, Mus musculus
  siRNA target sequence for Cit (NM_007708.1,802-820).
gcctccaggctaaatctct

SEQ ID NO: 498303 - DNA, 19 bp, Mus musculus
  siRNA target sequence for Cit (NM_007708.1,806-824).
ccaggctaaatctcttctt

SEQ ID NO: 498304 - DNA, 19 bp, Mus musculus
  siRNA target sequence for Cit (NM_007708.1,891-909).
cgccctcttcgctctcttt

SEQ ID NO: 498305 - DNA, 19 bp, Mus musculus
  siRNA target sequence for Cit (NM_007708.1,1279-1297).
ctgtcgcttctgaacagat

SEQ ID NO: 498306 - DNA, 19 bp, Mus musculus
  siRNA target sequence for Cit (NM_007708.1,1293-1311).
cagatacgaggaccaatta

SEQ ID NO: 498307 - DNA, 19 bp, Mus musculus
  siRNA target sequence for Cit (NM_007708.1,1453-1471).
ggatcagccgctaagatga

SEQ ID NO: 498308 - DNA, 19 bp, Mus musculus
  siRNA target sequence for Cit (NM_007708.1,1454-1472).
gatcagccgctaagatgaa

SEQ ID NO: 498309 - DNA, 19 bp, Mus musculus
  siRNA target sequence for Cit (NM_007708.1,1459-1477).
gccgctaagatgaattcaa

SEQ ID NO: 498310 - DNA, 19 bp, Mus musculus
  siRNA target sequence for Cit (NM_007708.1,1460-1478).
ccgctaagatgaattcaaa

SEQ ID NO: 498311 - DNA, 19 bp, Mus musculus
  siRNA target sequence for Cit (NM_007708.1,1461-1479).
cgctaagatgaattcaaat

SEQ ID NO: 498312 - DNA, 19 bp, Mus musculus
  siRNA target sequence for Cit (NM_007708.1,1592-1610).
ctgtcggagttgttgctta

SEQ ID NO: 498313 - DNA, 19 bp, Mus musculus
  siRNA target sequence for Cit (NM_007708.1,1597-1615).
ggagttgttgcttatgaga

SEQ ID NO: 498314 - DNA, 19 bp, Mus musculus
  siRNA target sequence for Cit (NM_007708.1,1702-1720).
ccagatgaccccaaagtta

SEQ ID NO: 498315 - DNA, 19 bp, Mus musculus
  siRNA target sequence for Cit (NM_007708.1,1753-1771).
ctgtgtgtccagaaagaga

SEQ ID NO: 498316 - DNA, 19 bp, Mus musculus
  siRNA target sequence for Cit (NM_007708.1,1814-1832).
gaacggactggaacaacat

SEQ ID NO: 498317 - DNA, 19 bp, Mus musculus
  siRNA target sequence for Cit (NM_007708.1,1824-1842).
gaacaacatccgtaactct

SEQ ID NO: 498318 - DNA, 19 bp, Mus musculus
  siRNA target sequence for Cit (NM_007708.1,1873-1891).
gacgatgacacctccaatt

SEQ ID NO: 498319 - DNA, 19 bp, Mus musculus
  siRNA target sequence for Cit (NM_007708.1,1875-1893).
cgatgacacctccaatttt

SEQ ID NO: 498320 - DNA, 19 bp, Mus musculus
  siRNA target sequence for Cit (NM_007708.1,1897-1915).
gaaccagagaagaattcgt

SEQ ID NO: 498321 - DNA, 19 bp, Mus musculus
  siRNA target sequence for Cit (NM_007708.1,1972-1990).
ccgtttgtgggattttcgt

SEQ ID NO: 498322 - DNA, 19 bp, Mus musculus
  siRNA target sequence for Cit (NM_007708.1,1973-1991).
cgtttgtgggattttcgta

SEQ ID NO: 498323 - DNA, 19 bp, Mus musculus
  siRNA target sequence for Cit (NM_007708.1,2004-2022).
ggggtatcttggtagatct

SEQ ID NO: 498324 - DNA, 19 bp, Mus musculus
  siRNA target sequence for Cit (NM_007708.1,2059-2077).
gttagctccatggaaaaga

SEQ ID NO: 498325 - DNA, 19 bp, Mus musculus
  siRNA target sequence for Cit (NM_007708.1,2139-2157).
ggaaatgacccggttacat

SEQ ID NO: 498326 - DNA, 19 bp, Mus musculus
  siRNA target sequence for Cit (NM_007708.1,2245-2263).
gaccttgctacctacatca

SEQ ID NO: 498327 - DNA, 19 bp, Mus musculus
  siRNA target sequence for Cit (NM_007708.1,2251-2269).
gctacctacatcacagaat

SEQ ID NO: 498328 - DNA, 19 bp, Mus musculus
  siRNA target sequence for Cit (NM_007708.1,2273-2291).
gtagcttaaagcgaagttt

SEQ ID NO: 498329 - DNA, 19 bp, Mus musculus
  siRNA target sequence for Cit (NM_007708.1,2465-2483).
gcagacgcagcgatctcta

SEQ ID NO: 498330 - DNA, 19 bp, Mus musculus
  siRNA target sequence for Cit (NM_007708.1,2526-2544).
caagcggaaggcaaacgaa

SEQ ID NO: 498331 - DNA, 19 bp, Mus musculus
  siRNA target sequence for Cit (NM_007708.1,2542-2560).
gaatgtcagcacaaactga

SEQ ID NO: 498332 - DNA, 19 bp, Mus musculus
  siRNA target sequence for Cit (NM_007708.1,2546-2564).
gtcagcacaaactgatgaa

SEQ ID NO: 498333 - DNA, 19 bp, Mus musculus
  siRNA target sequence for Cit (NM_007708.1,2777-2795).
ccgagggcatcaaaaagaa

SEQ ID NO: 498334 - DNA, 19 bp, Mus musculus
  siRNA target sequence for Cit (NM_007708.1,2967-2985).
ggtctcagctcaacatcta

SEQ ID NO: 498335 - DNA, 19 bp, Mus musculus
  siRNA target sequence for Cit (NM_007708.1,3013-3031).
cactacgaggaaaagatca

SEQ ID NO: 498336 - DNA, 19 bp, Mus musculus
  siRNA target sequence for Cit (NM_007708.1,3033-3051).
ggtattggacaatcagata

SEQ ID NO: 498337 - DNA, 19 bp, Mus musculus
  siRNA target sequence for Cit (NM_007708.1,3034-3052).
gtattggacaatcagataa

SEQ ID NO: 498338 - DNA, 19 bp, Mus musculus
  siRNA target sequence for Cit (NM_007708.1,3139-3157).
gagcagaaggcgatgatca

SEQ ID NO: 498339 - DNA, 19 bp, Mus musculus
  siRNA target sequence for Cit (NM_007708.1,3632-3650).
cggcacatcgcgatgagat

SEQ ID NO: 498340 - DNA, 19 bp, Mus musculus
  siRNA target sequence for Cit (NM_007708.1,3648-3666).
gatccagcgcaaattcgat

SEQ ID NO: 498341 - DNA, 19 bp, Mus musculus
  siRNA target sequence for Cit (NM_007708.1,3736-3754).
gccgagctcaacaaccaaa

SEQ ID NO: 498342 - DNA, 19 bp, Mus musculus
  siRNA target sequence for Cit (NM_007708.1,3737-3755).
ccgagctcaacaaccaaaa

SEQ ID NO: 498343 - DNA, 19 bp, Mus musculus
  siRNA target sequence for Cit (NM_007708.1,3742-3760).
ctcaacaaccaaaacttct

SEQ ID NO: 498344 - DNA, 19 bp, Mus musculus
  siRNA target sequence for Cit (NM_007708.1,4499-4517).
caatctctcagcaaaccaa

SEQ ID NO: 498345 - DNA, 19 bp, Mus musculus
  siRNA target sequence for Cit (NM_007708.1,4505-4523).
ctcagcaaaccaaactcat

SEQ ID NO: 498346 - DNA, 19 bp, Mus musculus
  siRNA target sequence for Cit (NM_007708.1,4509-4527).
gcaaaccaaactcattgat

SEQ ID NO: 498347 - DNA, 19 bp, Mus musculus
  siRNA target sequence for Cit (NM_007708.1,4510-4528).
caaaccaaactcattgatt

SEQ ID NO: 498348 - DNA, 19 bp, Mus musculus
  siRNA target sequence for Cit (NM_007708.1,4546-4564).
gaccagcctgctaaaaaga

SEQ ID NO: 498349 - DNA, 19 bp, Mus musculus
  siRNA target sequence for Cit (NM_007708.1,4569-4587).
ggttcctctgcagtacaat

SEQ ID NO: 498350 - DNA, 19 bp, Mus musculus
  siRNA target sequence for Cit (NM_007708.1,4838-4856).
cgtcaactccagaggaatt

SEQ ID NO: 498351 - DNA, 19 bp, Mus musculus
  siRNA target sequence for Cit (NM_007708.1,4890-4908).
catccctcaccggtttaat

SEQ ID NO: 498352 - DNA, 19 bp, Mus musculus
  siRNA target sequence for Cit (NM_007708.1,4940-4958).
ccgtgtgtctggatactgt

SEQ ID NO: 498353 - DNA, 19 bp, Mus musculus
  siRNA target sequence for Cit (NM_007708.1,4966-4984).
ggacgccaggcatccaaat

SEQ ID NO: 498354 - DNA, 19 bp, Mus musculus
  siRNA target sequence for Cit (NM_007708.1,4979-4997).
ccaaatgcctcgaatgtca

SEQ ID NO: 498355 - DNA, 19 bp, Mus musculus
  siRNA target sequence for Cit (NM_007708.1,4980-4998).
caaatgcctcgaatgtcaa

SEQ ID NO: 498356 - DNA, 19 bp, Mus musculus
  siRNA target sequence for Cit (NM_007708.1,5080-5098).
gccttctgccgggacaaaa

SEQ ID NO: 498357 - DNA, 19 bp, Mus musculus
  siRNA target sequence for Cit (NM_007708.1,5081-5099).
ccttctgccgggacaaaat

SEQ ID NO: 498358 - DNA, 19 bp, Mus musculus
  siRNA target sequence for Cit (NM_007708.1,5226-5244).
gtcaaaagtcctcatctat

SEQ ID NO: 498359 - DNA, 19 bp, Mus musculus
  siRNA target sequence for Cit (NM_007708.1,5271-5289).
gaggccggtggaagaattt

SEQ ID NO: 498360 - DNA, 19 bp, Mus musculus
  siRNA target sequence for Cit (NM_007708.1,5273-5291).
ggccggtggaagaatttga

SEQ ID NO: 498361 - DNA, 19 bp, Mus musculus
  siRNA target sequence for Cit (NM_007708.1,5302-5320).
cctgacggggacgtatcta

SEQ ID NO: 498362 - DNA, 19 bp, Mus musculus
  siRNA target sequence for Cit (NM_007708.1,5303-5321).
ctgacggggacgtatctat

SEQ ID NO: 498363 - DNA, 19 bp, Mus musculus
  siRNA target sequence for Cit (NM_007708.1,5307-5325).
cggggacgtatctattcat

SEQ ID NO: 498364 - DNA, 19 bp, Mus musculus
  siRNA target sequence for Cit (NM_007708.1,5496-5514).
cgcaggtgggagagtttct

SEQ ID NO: 498365 - DNA, 19 bp, Mus musculus
  siRNA target sequence for Cit (NM_007708.1,5497-5515).
gcaggtgggagagtttcta

SEQ ID NO: 498366 - DNA, 19 bp, Mus musculus
  siRNA target sequence for Cit (NM_007708.1,5524-5542).
gccgaagccgatgctaaat

SEQ ID NO: 498367 - DNA, 19 bp, Mus musculus
  siRNA target sequence for Cit (NM_007708.1,5525-5543).
ccgaagccgatgctaaatt

SEQ ID NO: 498368 - DNA, 19 bp, Mus musculus
  siRNA target sequence for Cit (NM_007708.1,5526-5544).
cgaagccgatgctaaatta

SEQ ID NO: 498369 - DNA, 19 bp, Mus musculus
  siRNA target sequence for Cit (NM_007708.1,5573-5591).
gcgatgaccggcttgacat

SEQ ID NO: 498370 - DNA, 19 bp, Mus musculus
  siRNA target sequence for Cit (NM_007708.1,5647-5665).
ctctacgccctgaatgtct

SEQ ID NO: 498371 - DNA, 19 bp, Mus musculus
  siRNA target sequence for Cit (NM_007708.1,5652-5670).
cgccctgaatgtcttgaaa

SEQ ID NO: 498372 - DNA, 19 bp, Mus musculus
  siRNA target sequence for Cit (NM_007708.1,5653-5671).
gccctgaatgtcttgaaaa

SEQ ID NO: 498373 - DNA, 19 bp, Mus musculus
  siRNA target sequence for Cit (NM_007708.1,5656-5674).
ctgaatgtcttgaaaaact

SEQ ID NO: 498374 - DNA, 19 bp, Mus musculus
  siRNA target sequence for Cit (NM_007708.1,5701-5719).
gcagtcttccaaatttaca

SEQ ID NO: 498375 - DNA, 19 bp, Mus musculus
  siRNA target sequence for Cit (NM_007708.1,5835-5853).
cgacgtctcccccaacata

SEQ ID NO: 498376 - DNA, 19 bp, Mus musculus
  siRNA target sequence for Cit (NM_007708.1,5841-5859).
ctcccccaacatattcgaa

SEQ ID NO: 498377 - DNA, 19 bp, Mus musculus
  siRNA target sequence for Cit (NM_007708.1,6042-6060).
cctcattgggaccaacaaa

SEQ ID NO: 498378 - DNA, 19 bp, Mus musculus
  siRNA target sequence for Cit (NM_007708.1,6043-6061).
ctcattgggaccaacaaat

SEQ ID NO: 498379 - DNA, 19 bp, Mus musculus
  siRNA target sequence for Cit (NM_007708.1,6194-6212).
ggcagcgagaagaatacct

SEQ ID NO: 498380 - DNA, 19 bp, Mus musculus
  siRNA target sequence for Cit (NM_007708.1,6233-6251).
gggtgttcgtggattctta

SEQ ID NO: 498381 - DNA, 19 bp, Mus musculus
  siRNA target sequence for Cit (NM_007708.1,6260-6278).
gtagccgcacagatgatct

SEQ ID NO: 498382 - DNA, 19 bp, Mus musculus
  siRNA target sequence for Cit (NM_007708.1,6263-6281).
gccgcacagatgatctcaa

SEQ ID NO: 498383 - DNA, 19 bp, Mus musculus
  siRNA target sequence for Cit (NM_007708.1,6306-6324).
cgcctacagagaaccttat

SEQ ID NO: 498384 - DNA, 19 bp, Mus musculus
  siRNA target sequence for Cit (NM_007708.1,6387-6405).
gagccctgcccgagcatat

SEQ ID NO: 498385 - DNA, 19 bp, Mus musculus
  siRNA target sequence for Cit (NM_007708.1,6389-6407).
gccctgcccgagcatatct

SEQ ID NO: 498386 - DNA, 19 bp, Mus musculus
  siRNA target sequence for Cit (NM_007708.1,6395-6413).
cccgagcatatctggaaat

SEQ ID NO: 498387 - DNA, 19 bp, Mus musculus
  siRNA target sequence for Cit (NM_007708.1,6396-6414).
ccgagcatatctggaaatt

SEQ ID NO: 498388 - DNA, 19 bp, Mus musculus
  siRNA target sequence for Cit (NM_007708.1,6401-6419).
catatctggaaattccaaa

SEQ ID NO: 498389 - DNA, 19 bp, Mus musculus
  siRNA target sequence for Cit (NM_007708.1,6446-6464).
cctccggagcgatttacct

SEQ ID NO: 498390 - DNA, 19 bp, Mus musculus
  siRNA target sequence for Clk (NM_009905.1,237-255).
cgacagacagctattatct

SEQ ID NO: 498391 - DNA, 19 bp, Mus musculus
  siRNA target sequence for Clk (NM_009905.1,291-309).
gtcgacgctatgttgatga

SEQ ID NO: 498392 - DNA, 19 bp, Mus musculus
  siRNA target sequence for Clk (NM_009905.1,293-311).
cgacgctatgttgatgaat

SEQ ID NO: 498393 - DNA, 19 bp, Mus musculus
  siRNA target sequence for Clk (NM_009905.1,294-312).
gacgctatgttgatgaata

SEQ ID NO: 498394 - DNA, 19 bp, Mus musculus
  siRNA target sequence for Clk (NM_009905.1,414-432).
gcagttacaaaagtaaaca

SEQ ID NO: 498395 - DNA, 19 bp, Mus musculus
  siRNA target sequence for Clk (NM_009905.1,460-478).
ccattcacacgggatgaaa

SEQ ID NO: 498396 - DNA, 19 bp, Mus musculus
  siRNA target sequence for Clk (NM_009905.1,461-479).
cattcacacgggatgaaat

SEQ ID NO: 498397 - DNA, 19 bp, Mus musculus
  siRNA target sequence for Clk (NM_009905.1,465-483).
cacacgggatgaaattgtt

SEQ ID NO: 498398 - DNA, 19 bp, Mus musculus
  siRNA target sequence for Clk2 (NM_007712.1,31-49).
catccccgaaggtaccatt

SEQ ID NO: 498399 - DNA, 19 bp, Mus musculus
  siRNA target sequence for Clk2 (NM_007712.1,71-89).
ggagttaccacgaacacta

SEQ ID NO: 498400 - DNA, 19 bp, Mus musculus
  siRNA target sequence for Clk2 (NM_007712.1,74-92).
gttaccacgaacactatca

SEQ ID NO: 498401 - DNA, 19 bp, Mus musculus
  siRNA target sequence for Clk2 (NM_007712.1,186-204).
gtcccgaagcagctatgat

SEQ ID NO: 498402 - DNA, 19 bp, Mus musculus
  siRNA target sequence for Clk2 (NM_007712.1,188-206).
cccgaagcagctatgatga

SEQ ID NO: 498403 - DNA, 19 bp, Mus musculus
  siRNA target sequence for Clk2 (NM_007712.1,251-269).
gctacaggcgcaatgacta

SEQ ID NO: 498404 - DNA, 19 bp, Mus musculus
  siRNA target sequence for Clk2 (NM_007712.1,311-329).
ggcagtcctatgaatacca

SEQ ID NO: 498405 - DNA, 19 bp, Mus musculus
  siRNA target sequence for Clk2 (NM_007712.1,312-330).
gcagtcctatgaataccat

SEQ ID NO: 498406 - DNA, 19 bp, Mus musculus
  siRNA target sequence for Clk2 (NM_007712.1,461-479).
ctgagggccacctcatcta

SEQ ID NO: 498407 - DNA, 19 bp, Mus musculus
  siRNA target sequence for Clk2 (NM_007712.1,627-645).
ggaagcagcccgactagaa

SEQ ID NO: 498408 - DNA, 19 bp, Mus musculus
  siRNA target sequence for Clk2 (NM_007712.1,761-779).
gccttagcaccttcgattt

SEQ ID NO: 498409 - DNA, 19 bp, Mus musculus
  siRNA target sequence for Clk2 (NM_007712.1,862-880).
ctccatgataacaagttga

SEQ ID NO: 498410 - DNA, 19 bp, Mus musculus
  siRNA target sequence for Clk2 (NM_007712.1,868-886).
gataacaagttgacacata

SEQ ID NO: 498411 - DNA, 19 bp, Mus musculus
  siRNA target sequence for Clk2 (NM_007712.1,958-976).
cgagatgagcgcagtgtaa

SEQ ID NO: 498412 - DNA, 19 bp, Mus musculus
  siRNA target sequence for Clk2 (NM_007712.1,961-979).
gatgagcgcagtgtaaaga

SEQ ID NO: 498413 - DNA, 19 bp, Mus musculus
  siRNA target sequence for Clk2 (NM_007712.1,1222-1240).
ccttctcggatgatcagaa

SEQ ID NO: 498414 - DNA, 19 bp, Mus musculus
  siRNA target sequence for Clk2 (NM_007712.1,1228-1246).
cggatgatcagaaagacaa

SEQ ID NO: 498415 - DNA, 19 bp, Mus musculus
  siRNA target sequence for Clk2 (NM_007712.1,1374-1392).
gctcttcgatctgattgaa

SEQ ID NO: 498416 - DNA, 19 bp, Mus musculus
  siRNA target sequence for Clk2 (NM_007712.1,1375-1393).
ctcttcgatctgattgaaa

SEQ ID NO: 498417 - DNA, 19 bp, Mus musculus
  siRNA target sequence for Clk2 (NM_007712.1,1377-1395).
cttcgatctgattgaaaat

SEQ ID NO: 498418 - DNA, 19 bp, Mus musculus
  siRNA target sequence for Clk2 (NM_007712.1,1500-1518).
ctccagtcgggatatcagt

SEQ ID NO: 498419 - DNA, 19 bp, Mus musculus
  siRNA target sequence for Clk3 (NM_007713.2,126-144).
gaggaggcggtcttacagt

SEQ ID NO: 498420 - DNA, 19 bp, Mus musculus
  siRNA target sequence for Clk3 (NM_007713.2,209-227).
ccagaagccatgatcgtat

SEQ ID NO: 498421 - DNA, 19 bp, Mus musculus
  siRNA target sequence for Clk3 (NM_007713.2,255-273).
ccgtgacagtgatacgtat

SEQ ID NO: 498422 - DNA, 19 bp, Mus musculus
  siRNA target sequence for Clk3 (NM_007713.2,285-303).
gcggagcccatcttttgga

SEQ ID NO: 498423 - DNA, 19 bp, Mus musculus
  siRNA target sequence for Clk3 (NM_007713.2,400-418).
cgccgtaccaggtcttgta

SEQ ID NO: 498424 - DNA, 19 bp, Mus musculus
  siRNA target sequence for Clk3 (NM_007713.2,627-645).
ccgtaatgtgggcaagtat

SEQ ID NO: 498425 - DNA, 19 bp, Mus musculus
  siRNA target sequence for Clk3 (NM_007713.2,648-666).
ggaagctgctcgtctagaa

SEQ ID NO: 498426 - DNA, 19 bp, Mus musculus
  siRNA target sequence for Clk3 (NM_007713.2,649-667).
gaagctgctcgtctagaaa

SEQ ID NO: 498427 - DNA, 19 bp, Mus musculus
  siRNA target sequence for Clk3 (NM_007713.2,652-670).
gctgctcgtctagaaatta

SEQ ID NO: 498428 - DNA, 19 bp, Mus musculus
  siRNA target sequence for Clk3 (NM_007713.2,653-671).
ctgctcgtctagaaattaa

SEQ ID NO: 498429 - DNA, 19 bp, Mus musculus
  siRNA target sequence for Clk3 (NM_007713.2,656-674).
ctcgtctagaaattaatgt

SEQ ID NO: 498430 - DNA, 19 bp, Mus musculus
  siRNA target sequence for Clk3 (NM_007713.2,1035-1053).
cacgtttgaccatgaacat

SEQ ID NO: 498431 - DNA, 19 bp, Mus musculus
  siRNA target sequence for Clk3 (NM_007713.2,1037-1055).
cgtttgaccatgaacatca

SEQ ID NO: 498432 - DNA, 19 bp, Mus musculus
  siRNA target sequence for Clk3 (NM_007713.2,1319-1337).
ctgatgggcggtatgtgaa

SEQ ID NO: 498433 - DNA, 19 bp, Mus musculus
  siRNA target sequence for Clk3 (NM_007713.2,1432-1450).
cctgctcagcgcatcacat

SEQ ID NO: 498434 - DNA, 19 bp, Mus musculus
  siRNA target sequence for Clk4 (NM_007714.2,223-241).
gcactgtaaaccacatcat

SEQ ID NO: 498435 - DNA, 19 bp, Mus musculus
  siRNA target sequence for Clk4 (NM_007714.2,228-246).
gtaaaccacatcatcagtt

SEQ ID NO: 498436 - DNA, 19 bp, Mus musculus
  siRNA target sequence for Clk4 (NM_007714.2,253-271).
ctcggattgtcactattta

SEQ ID NO: 498437 - DNA, 19 bp, Mus musculus
  siRNA target sequence for Clk4 (NM_007714.2,255-273).
cggattgtcactatttaga

SEQ ID NO: 498438 - DNA, 19 bp, Mus musculus
  siRNA target sequence for Clk4 (NM_007714.2,275-293).
gcaagatgcttgaatgaga

SEQ ID NO: 498439 - DNA, 19 bp, Mus musculus
  siRNA target sequence for Clk4 (NM_007714.2,304-322).
ggaccggagatacattgat

SEQ ID NO: 498440 - DNA, 19 bp, Mus musculus
  siRNA target sequence for Clk4 (NM_007714.2,309-327).
ggagatacattgatgaata

SEQ ID NO: 498441 - DNA, 19 bp, Mus musculus
  siRNA target sequence for Clk4 (NM_007714.2,337-355).
ctactgcgaaggatatgtt

SEQ ID NO: 498442 - DNA, 19 bp, Mus musculus
  siRNA target sequence for Clk4 (NM_007714.2,353-371).
gttccaagacattaccata

SEQ ID NO: 498443 - DNA, 19 bp, Mus musculus
  siRNA target sequence for Clk4 (NM_007714.2,357-375).
caagacattaccatagaga

SEQ ID NO: 498444 - DNA, 19 bp, Mus musculus
  siRNA target sequence for Clk4 (NM_007714.2,391-409).
ccggatccattgcagtaaa

SEQ ID NO: 498445 - DNA, 19 bp, Mus musculus
  siRNA target sequence for Clk4 (NM_007714.2,437-455).
cctaagagaaagcgtaata

SEQ ID NO: 498446 - DNA, 19 bp, Mus musculus
  siRNA target sequence for Clk4 (NM_007714.2,468-486).
gtcatcagtcgcattcgaa

SEQ ID NO: 498447 - DNA, 19 bp, Mus musculus
  siRNA target sequence for Clk4 (NM_007714.2,548-566).
caaagtggagacgttctaa

SEQ ID NO: 498448 - DNA, 19 bp, Mus musculus
  siRNA target sequence for Clk4 (NM_007714.2,559-577).
cgttctaagagcaagatat

SEQ ID NO: 498449 - DNA, 19 bp, Mus musculus
  siRNA target sequence for Clk4 (NM_007714.2,567-585).
gagcaagatatgaaatcgt

SEQ ID NO: 498450 - DNA, 19 bp, Mus musculus
  siRNA target sequence for Clk4 (NM_007714.2,606-624).
cctttggcaaagttgtaga

SEQ ID NO: 498451 - DNA, 19 bp, Mus musculus
  siRNA target sequence for Clk4 (NM_007714.2,639-657).
gcatggatggcttacatgt

SEQ ID NO: 498452 - DNA, 19 bp, Mus musculus
  siRNA target sequence for Clk4 (NM_007714.2,640-658).
catggatggcttacatgta

SEQ ID NO: 498453 - DNA, 19 bp, Mus musculus
  siRNA target sequence for Clk4 (NM_007714.2,699-717).
cagctcgttctgaaatcca

SEQ ID NO: 498454 - DNA, 19 bp, Mus musculus
  siRNA target sequence for Clk4 (NM_007714.2,708-726).
ctgaaatccaagtattgga

SEQ ID NO: 498455 - DNA, 19 bp, Mus musculus
  siRNA target sequence for Clk4 (NM_007714.2,775-793).
gctagagtggtttgatcat

SEQ ID NO: 498456 - DNA, 19 bp, Mus musculus
  siRNA target sequence for Clk4 (NM_007714.2,788-806).
gatcatcatggtcatgttt

SEQ ID NO: 498457 - DNA, 19 bp, Mus musculus
  siRNA target sequence for Clk4 (NM_007714.2,823-841).
gctgggacttagtacctat

SEQ ID NO: 498458 - DNA, 19 bp, Mus musculus
  siRNA target sequence for Clk4 (NM_007714.2,891-909).
ggcaaatggcttatcagat

SEQ ID NO: 498459 - DNA, 19 bp, Mus musculus
  siRNA target sequence for Clk4 (NM_007714.2,905-923).
cagatctgccagtctataa

SEQ ID NO: 498460 - DNA, 19 bp, Mus musculus
  siRNA target sequence for Clk4 (NM_007714.2,912-930).
gccagtctataaatttttt

SEQ ID NO: 498461 - DNA, 19 bp, Mus musculus
  siRNA target sequence for Clk4 (NM_007714.2,988-1006).
gtctgactatgtagtcaaa

SEQ ID NO: 498462 - DNA, 19 bp, Mus musculus
  siRNA target sequence for Clk4 (NM_007714.2,1026-1044).
gagatgagcgcacattgaa

SEQ ID NO: 498463 - DNA, 19 bp, Mus musculus
  siRNA target sequence for Clk4 (NM_007714.2,1028-1046).
gatgagcgcacattgaaaa

SEQ ID NO: 498464 - DNA, 19 bp, Mus musculus
  siRNA target sequence for Clk4 (NM_007714.2,1031-1049).
gagcgcacattgaaaaaca

SEQ ID NO: 498465 - DNA, 19 bp, Mus musculus
  siRNA target sequence for Clk4 (NM_007714.2,1033-1051).
gcgcacattgaaaaacaca

SEQ ID NO: 498466 - DNA, 19 bp, Mus musculus
  siRNA target sequence for Clk4 (NM_007714.2,1042-1060).
gaaaaacacagatatcaaa

SEQ ID NO: 498467 - DNA, 19 bp, Mus musculus
  siRNA target sequence for Clk4 (NM_007714.2,1083-1101).
catatgacgacgaacatca

SEQ ID NO: 498468 - DNA, 19 bp, Mus musculus
  siRNA target sequence for Clk4 (NM_007714.2,1088-1106).
gacgacgaacatcatagta

SEQ ID NO: 498469 - DNA, 19 bp, Mus musculus
  siRNA target sequence for Clk4 (NM_007714.2,1090-1108).
cgacgaacatcatagtact

SEQ ID NO: 498470 - DNA, 19 bp, Mus musculus
  siRNA target sequence for Clk4 (NM_007714.2,1091-1109).
gacgaacatcatagtactt

SEQ ID NO: 498471 - DNA, 19 bp, Mus musculus
  siRNA target sequence for Clk4 (NM_007714.2,1309-1327).
gacaaggaaacgcaagtat

SEQ ID NO: 498472 - DNA, 19 bp, Mus musculus
  siRNA target sequence for Clk4 (NM_007714.2,1311-1329).
caaggaaacgcaagtattt

SEQ ID NO: 498473 - DNA, 19 bp, Mus musculus
  siRNA target sequence for Clk4 (NM_007714.2,1346-1364).
gattgggacgagcatagtt

SEQ ID NO: 498474 - DNA, 19 bp, Mus musculus
  siRNA target sequence for Clk4 (NM_007714.2,1386-1404).
gacgctgcaagccgttaaa

SEQ ID NO: 498475 - DNA, 19 bp, Mus musculus
  siRNA target sequence for Clk4 (NM_007714.2,1389-1407).
gctgcaagccgttaaagga

SEQ ID NO: 498476 - DNA, 19 bp, Mus musculus
  siRNA target sequence for Clk4 (NM_007714.2,1392-1410).
gcaagccgttaaaggaatt

SEQ ID NO: 498477 - DNA, 19 bp, Mus musculus
  siRNA target sequence for Clk4 (NM_007714.2,1393-1411).
caagccgttaaaggaattt

SEQ ID NO: 498478 - DNA, 19 bp, Mus musculus
  siRNA target sequence for Clk4 (NM_007714.2,1398-1416).
cgttaaaggaatttatgct

SEQ ID NO: 498479 - DNA, 19 bp, Mus musculus
  siRNA target sequence for Clk4 (NM_007714.2,1506-1524).
cattgcagcaccctttctt

SEQ ID NO: 498480 - DNA, 19 bp, Mus musculus
  siRNA target sequence for Clk4 (NM_007714.2,1513-1531).
gcaccctttctttgactta

SEQ ID NO: 498481 - DNA, 19 bp, Mus musculus
  siRNA target sequence for Clk4 (NM_007714.2,1514-1532).
caccctttctttgacttat

SEQ ID NO: 498482 - DNA, 19 bp, Mus musculus
  siRNA target sequence for Clpx (NM_011802.1,432-450).
ctgaaggaagcagtaagaa

SEQ ID NO: 498483 - DNA, 19 bp, Mus musculus
  siRNA target sequence for Clpx (NM_011802.1,521-539).
cacgtggagacctttgtgt

SEQ ID NO: 498484 - DNA, 19 bp, Mus musculus
  siRNA target sequence for Clpx (NM_011802.1,538-556).
gtcttccacgcgttttgtt

SEQ ID NO: 498485 - DNA, 19 bp, Mus musculus
  siRNA target sequence for Clpx (NM_011802.1,540-558).
cttccacgcgttttgttaa

SEQ ID NO: 498486 - DNA, 19 bp, Mus musculus
  siRNA target sequence for Clpx (NM_011802.1,544-562).
cacgcgttttgttaagtgt

SEQ ID NO: 498487 - DNA, 19 bp, Mus musculus
  siRNA target sequence for Clpx (NM_011802.1,548-566).
cgttttgttaagtgtgaaa

SEQ ID NO: 498488 - DNA, 19 bp, Mus musculus
  siRNA target sequence for Clpx (NM_011802.1,703-721).
ctacctcgacaagtatgtt

SEQ ID NO: 498489 - DNA, 19 bp, Mus musculus
  siRNA target sequence for Clpx (NM_011802.1,706-724).
cctcgacaagtatgttgtt

SEQ ID NO: 498490 - DNA, 19 bp, Mus musculus
  siRNA target sequence for Clpx (NM_011802.1,727-745).
ccagtcgtttgctaagaaa

SEQ ID NO: 498491 - DNA, 19 bp, Mus musculus
  siRNA target sequence for Clpx (NM_011802.1,738-756).
ctaagaaagtgctttcagt

SEQ ID NO: 498492 - DNA, 19 bp, Mus musculus
  siRNA target sequence for Clpx (NM_011802.1,753-771).
cagttgccgtgtataatca

SEQ ID NO: 498493 - DNA, 19 bp, Mus musculus
  siRNA target sequence for Clpx (NM_011802.1,755-773).
gttgccgtgtataatcatt

SEQ ID NO: 498494 - DNA, 19 bp, Mus musculus
  siRNA target sequence for Clpx (NM_011802.1,758-776).
gccgtgtataatcattata

SEQ ID NO: 498495 - DNA, 19 bp, Mus musculus
  siRNA target sequence for Clpx (NM_011802.1,759-777).
ccgtgtataatcattataa

SEQ ID NO: 498496 - DNA, 19 bp, Mus musculus
  siRNA target sequence for Clpx (NM_011802.1,846-864).
cacctagagagttagaaat

SEQ ID NO: 498497 - DNA, 19 bp, Mus musculus
  siRNA target sequence for Clpx (NM_011802.1,848-866).
cctagagagttagaaataa

SEQ ID NO: 498498 - DNA, 19 bp, Mus musculus
  siRNA target sequence for Clpx (NM_011802.1,873-891).
gggaggatgagtacagatt

SEQ ID NO: 498499 - DNA, 19 bp, Mus musculus
  siRNA target sequence for Clpx (NM_011802.1,877-895).
ggatgagtacagatttaca

SEQ ID NO: 498500 - DNA, 19 bp, Mus musculus
  siRNA target sequence for Clpx (NM_011802.1,881-899).
gagtacagatttacaaagt

SEQ ID NO: 498501 - DNA, 19 bp, Mus musculus
  siRNA target sequence for Clpx (NM_011802.1,1003-1021).
gttggactcttctcaagat

SEQ ID NO: 498502 - DNA, 19 bp, Mus musculus
  siRNA target sequence for Clpx (NM_011802.1,1061-1079).
ccaactgggtcaggtaaaa

SEQ ID NO: 498503 - DNA, 19 bp, Mus musculus
  siRNA target sequence for Clpx (NM_011802.1,1080-1098).
cccttctggcacaaacttt

SEQ ID NO: 498504 - DNA, 19 bp, Mus musculus
  siRNA target sequence for Clpx (NM_011802.1,1081-1099).
ccttctggcacaaacttta

SEQ ID NO: 498505 - DNA, 19 bp, Mus musculus
  siRNA target sequence for Clpx (NM_011802.1,1085-1103).
ctggcacaaactttagcta

SEQ ID NO: 498506 - DNA, 19 bp, Mus musculus
  siRNA target sequence for Clpx (NM_011802.1,1087-1105).
ggcacaaactttagctaaa

SEQ ID NO: 498507 - DNA, 19 bp, Mus musculus
  siRNA target sequence for Clpx (NM_011802.1,1147-1165).
gacccaggctggatatgta

SEQ ID NO: 498508 - DNA, 19 bp, Mus musculus
  siRNA target sequence for Clpx (NM_011802.1,1279-1297).
gccaggcattcatcaatta

SEQ ID NO: 498509 - DNA, 19 bp, Mus musculus
  siRNA target sequence for Clpx (NM_011802.1,1318-1336).
cgttcagcaaggtttatta

SEQ ID NO: 498510 - DNA, 19 bp, Mus musculus
  siRNA target sequence for Clpx (NM_011802.1,1319-1337).
gttcagcaaggtttattaa

SEQ ID NO: 498511 - DNA, 19 bp, Mus musculus
  siRNA target sequence for Clpx (NM_011802.1,1343-1361).
ctagaaggcacaatagtca

SEQ ID NO: 498512 - DNA, 19 bp, Mus musculus
  siRNA target sequence for Clpx (NM_011802.1,1395-1413).
gagagacagttcaagttga

SEQ ID NO: 498513 - DNA, 19 bp, Mus musculus
  siRNA target sequence for Clpx (NM_011802.1,1397-1415).
gagacagttcaagttgata

SEQ ID NO: 498514 - DNA, 19 bp, Mus musculus
  siRNA target sequence for Clpx (NM_011802.1,1399-1417).
gacagttcaagttgataca

SEQ ID NO: 498515 - DNA, 19 bp, Mus musculus
  siRNA target sequence for Clpx (NM_011802.1,1500-1518).
gctttggaacaccatctaa

SEQ ID NO: 498516 - DNA, 19 bp, Mus musculus
  siRNA target sequence for Clpx (NM_011802.1,1539-1557).
ctgcagcggatcttgctaa

SEQ ID NO: 498517 - DNA, 19 bp, Mus musculus
  siRNA target sequence for Clpx (NM_011802.1,1559-1577).
cgaagtggggaatctaaca

SEQ ID NO: 498518 - DNA, 19 bp, Mus musculus
  siRNA target sequence for Cntn4 (NM_173004.1,486-504).
ctgctagtgctgcaatcat

SEQ ID NO: 498519 - DNA, 19 bp, Mus musculus
  siRNA target sequence for Cntn4 (NM_173004.1,492-510).
gtgctgcaatcattcatgt

SEQ ID NO: 498520 - DNA, 19 bp, Mus musculus
  siRNA target sequence for Cntn4 (NM_173004.1,532-550).
cactgcatggcccagtttt

SEQ ID NO: 498521 - DNA, 19 bp, Mus musculus
  siRNA target sequence for Cntn4 (NM_173004.1,536-554).
gcatggcccagtttttgtt

SEQ ID NO: 498522 - DNA, 19 bp, Mus musculus
  siRNA target sequence for Cntn4 (NM_173004.1,541-559).
gcccagtttttgttcaaga

SEQ ID NO: 498523 - DNA, 19 bp, Mus musculus
  siRNA target sequence for Cntn4 (NM_173004.1,542-560).
cccagtttttgttcaagaa

SEQ ID NO: 498524 - DNA, 19 bp, Mus musculus
  siRNA target sequence for Cntn4 (NM_173004.1,705-723).
gttgacggcagcttgttga

SEQ ID NO: 498525 - DNA, 19 bp, Mus musculus
  siRNA target sequence for Cntn4 (NM_173004.1,708-726).
gacggcagcttgttgatca

SEQ ID NO: 498526 - DNA, 19 bp, Mus musculus
  siRNA target sequence for Cntn4 (NM_173004.1,710-728).
cggcagcttgttgatcaat

SEQ ID NO: 498527 - DNA, 19 bp, Mus musculus
  siRNA target sequence for Cntn4 (NM_173004.1,711-729).
ggcagcttgttgatcaata

SEQ ID NO: 498528 - DNA, 19 bp, Mus musculus
  siRNA target sequence for Cntn4 (NM_173004.1,712-730).
gcagcttgttgatcaataa

SEQ ID NO: 498529 - DNA, 19 bp, Mus musculus
  siRNA target sequence for Cntn4 (NM_173004.1,722-740).
gatcaataaccccaataaa

SEQ ID NO: 498530 - DNA, 19 bp, Mus musculus
  siRNA target sequence for Cntn4 (NM_173004.1,779-797).
ctcatttggaacaattgta

SEQ ID NO: 498531 - DNA, 19 bp, Mus musculus
  siRNA target sequence for Cntn4 (NM_173004.1,934-952).
cctggatcttcaatgaata

SEQ ID NO: 498532 - DNA, 19 bp, Mus musculus
  siRNA target sequence for Cntn4 (NM_173004.1,1087-1105).
gaccgcccacaccactaat

SEQ ID NO: 498533 - DNA, 19 bp, Mus musculus
  siRNA target sequence for Cntn4 (NM_173004.1,1096-1114).
caccactaatcctgagaaa

SEQ ID NO: 498534 - DNA, 19 bp, Mus musculus
  siRNA target sequence for Cntn4 (NM_173004.1,1170-1188).
gtcccggctgagaaaggaa

SEQ ID NO: 498535 - DNA, 19 bp, Mus musculus
  siRNA target sequence for Cntn4 (NM_173004.1,1219-1237).
gaaatccagtcccaactat

SEQ ID NO: 498536 - DNA, 19 bp, Mus musculus
  siRNA target sequence for Cntn4 (NM_173004.1,1224-1242).
ccagtcccaactattctat

SEQ ID NO: 498537 - DNA, 19 bp, Mus musculus
  siRNA target sequence for Cntn4 (NM_173004.1,1285-1303).
gacataagtcgaatggaat

SEQ ID NO: 498538 - DNA, 19 bp, Mus musculus
  siRNA target sequence for Cntn4 (NM_173004.1,1295-1313).
gaatggaattctggaaatt

SEQ ID NO: 498539 - DNA, 19 bp, Mus musculus
  siRNA target sequence for Cntn4 (NM_173004.1,1332-1350).
gatgccggttcatatgaat

SEQ ID NO: 498540 - DNA, 19 bp, Mus musculus
  siRNA target sequence for Cntn4 (NM_173004.1,1336-1354).
ccggttcatatgaatgtgt

SEQ ID NO: 498541 - DNA, 19 bp, Mus musculus
  siRNA target sequence for Cntn4 (NM_173004.1,1364-1382).
ctccagaggcaaaaacgta

SEQ ID NO: 498542 - DNA, 19 bp, Mus musculus
  siRNA target sequence for Cntn4 (NM_173004.1,1399-1417).
ctttttatgctcaacctaa

SEQ ID NO: 498543 - DNA, 19 bp, Mus musculus
  siRNA target sequence for Cntn4 (NM_173004.1,1410-1428).
caacctaactgggttcaaa

SEQ ID NO: 498544 - DNA, 19 bp, Mus musculus
  siRNA target sequence for Cntn4 (NM_173004.1,1494-1512).
cctaaacctacctacagat

SEQ ID NO: 498545 - DNA, 19 bp, Mus musculus
  siRNA target sequence for Cntn4 (NM_173004.1,1504-1522).
cctacagatggctaaaaaa

SEQ ID NO: 498546 - DNA, 19 bp, Mus musculus
  siRNA target sequence for Cntn4 (NM_173004.1,1508-1526).
cagatggctaaaaaatggt

SEQ ID NO: 498547 - DNA, 19 bp, Mus musculus
  siRNA target sequence for Cntn4 (NM_173004.1,1562-1580).
gcaaggaacactcaacata

SEQ ID NO: 498548 - DNA, 19 bp, Mus musculus
  siRNA target sequence for Cntn4 (NM_173004.1,1563-1581).
caaggaacactcaacataa

SEQ ID NO: 498549 - DNA, 19 bp, Mus musculus
  siRNA target sequence for Cntn4 (NM_173004.1,1566-1584).
ggaacactcaacataacaa

SEQ ID NO: 498550 - DNA, 19 bp, Mus musculus
  siRNA target sequence for Cntn4 (NM_173004.1,1567-1585).
gaacactcaacataacaat

SEQ ID NO: 498551 - DNA, 19 bp, Mus musculus
  siRNA target sequence for Cntn4 (NM_173004.1,1572-1590).
ctcaacataacaatagtga

SEQ ID NO: 498552 - DNA, 19 bp, Mus musculus
  siRNA target sequence for Cntn4 (NM_173004.1,1635-1653).
catggagttatcttttcca

SEQ ID NO: 498553 - DNA, 19 bp, Mus musculus
  siRNA target sequence for Cntn4 (NM_173004.1,1654-1672).
gcgctgagcttagtgtaat

SEQ ID NO: 498554 - DNA, 19 bp, Mus musculus
  siRNA target sequence for Cntn4 (NM_173004.1,1655-1673).
cgctgagcttagtgtaata

SEQ ID NO: 498555 - DNA, 19 bp, Mus musculus
  siRNA target sequence for Cntn4 (NM_173004.1,1696-1714).
gaacactcttaaaaagagt

SEQ ID NO: 498556 - DNA, 19 bp, Mus musculus
  siRNA target sequence for Cntn4 (NM_173004.1,1711-1729).
gagtaacacttgtcaaagt

SEQ ID NO: 498557 - DNA, 19 bp, Mus musculus
  siRNA target sequence for Cntn4 (NM_173004.1,1724-1742).
caaagtgggaggtgaagtt

SEQ ID NO: 498558 - DNA, 19 bp, Mus musculus
  siRNA target sequence for Cntn4 (NM_173004.1,1730-1748).
gggaggtgaagttgtcatt

SEQ ID NO: 498559 - DNA, 19 bp, Mus musculus
  siRNA target sequence for Cntn4 (NM_173004.1,1732-1750).
gaggtgaagttgtcattga

SEQ ID NO: 498560 - DNA, 19 bp, Mus musculus
  siRNA target sequence for Cntn4 (NM_173004.1,1846-1864).
ggaacctcagaatcatcaa

SEQ ID NO: 498561 - DNA, 19 bp, Mus musculus
  siRNA target sequence for Cntn4 (NM_173004.1,1897-1915).
gcatagccacgaaccattt

SEQ ID NO: 498562 - DNA, 19 bp, Mus musculus
  siRNA target sequence for Cntn4 (NM_173004.1,1898-1916).
catagccacgaaccatttt

SEQ ID NO: 498563 - DNA, 19 bp, Mus musculus
  siRNA target sequence for Cntn4 (NM_173004.1,1902-1920).
gccacgaaccattttggaa

SEQ ID NO: 498564 - DNA, 19 bp, Mus musculus
  siRNA target sequence for Cntn4 (NM_173004.1,1927-1945).
gcagtactgggaatgtgat

SEQ ID NO: 498565 - DNA, 19 bp, Mus musculus
  siRNA target sequence for Cntn4 (NM_173004.1,1928-1946).
cagtactgggaatgtgatt

SEQ ID NO: 498566 - DNA, 19 bp, Mus musculus
  siRNA target sequence for Cntn4 (NM_173004.1,1994-2012).
cactgtaggagaaagcatt

SEQ ID NO: 498567 - DNA, 19 bp, Mus musculus
  siRNA target sequence for Cntn4 (NM_173004.1,2023-2041).
gccaggtaacacatgatca

SEQ ID NO: 498568 - DNA, 19 bp, Mus musculus
  siRNA target sequence for Cntn4 (NM_173004.1,2046-2064).
ctggacattgtgtttacgt

SEQ ID NO: 498569 - DNA, 19 bp, Mus musculus
  siRNA target sequence for Cntn4 (NM_173004.1,2068-2086).
catttaatggacacttgat

SEQ ID NO: 498570 - DNA, 19 bp, Mus musculus
  siRNA target sequence for Cntn4 (NM_173004.1,2133-2151).
gattcagctggtgatttga

SEQ ID NO: 498571 - DNA, 19 bp, Mus musculus
  siRNA target sequence for Cntn4 (NM_173004.1,2190-2208).
gtctgcatggtccaaacaa

SEQ ID NO: 498572 - DNA, 19 bp, Mus musculus
  siRNA target sequence for Cntn4 (NM_173004.1,2192-2210).
ctgcatggtccaaacaagt

SEQ ID NO: 498573 - DNA, 19 bp, Mus musculus
  siRNA target sequence for Cntn4 (NM_173004.1,2276-2294).
gaccatagatgaaatcaca

SEQ ID NO: 498574 - DNA, 19 bp, Mus musculus
  siRNA target sequence for Cntn4 (NM_173004.1,2341-2359).
gccccatcaccatgtatgt

SEQ ID NO: 498575 - DNA, 19 bp, Mus musculus
  siRNA target sequence for Cntn4 (NM_173004.1,2342-2360).
ccccatcaccatgtatgtt

SEQ ID NO: 498576 - DNA, 19 bp, Mus musculus
  siRNA target sequence for Cntn4 (NM_173004.1,2344-2362).
ccatcaccatgtatgttat

SEQ ID NO: 498577 - DNA, 19 bp, Mus musculus
  siRNA target sequence for Cntn4 (NM_173004.1,2392-2410).
ggcaagcagtcaatacagt

SEQ ID NO: 498578 - DNA, 19 bp, Mus musculus
  siRNA target sequence for Cntn4 (NM_173004.1,2393-2411).
gcaagcagtcaatacagtt

SEQ ID NO: 498579 - DNA, 19 bp, Mus musculus
  siRNA target sequence for Cntn4 (NM_173004.1,2418-2436).
ctcgtcgacgggaagacat

SEQ ID NO: 498580 - DNA, 19 bp, Mus musculus
  siRNA target sequence for Cntn4 (NM_173004.1,2421-2439).
gtcgacgggaagacattca

SEQ ID NO: 498581 - DNA, 19 bp, Mus musculus
  siRNA target sequence for Cntn4 (NM_173004.1,2423-2441).
cgacgggaagacattcaca

SEQ ID NO: 498582 - DNA, 19 bp, Mus musculus
  siRNA target sequence for Cntn4 (NM_173004.1,2443-2461).
caactgtggtgggtttgaa

SEQ ID NO: 498583 - DNA, 19 bp, Mus musculus
  siRNA target sequence for Cntn4 (NM_173004.1,2488-2506).
ctgttgcagctaatgtgat

SEQ ID NO: 498584 - DNA, 19 bp, Mus musculus
  siRNA target sequence for Cntn6 (NM_017383.2,271-289).
cgtttcagccgtcctattt

SEQ ID NO: 498585 - DNA, 19 bp, Mus musculus
  siRNA target sequence for Cntn6 (NM_017383.2,278-296).
gccgtcctatttttatcca

SEQ ID NO: 498586 - DNA, 19 bp, Mus musculus
  siRNA target sequence for Cntn6 (NM_017383.2,332-350).
ctagatctgaaattattct

SEQ ID NO: 498587 - DNA, 19 bp, Mus musculus
  siRNA target sequence for Cntn6 (NM_017383.2,340-358).
gaaattattctgacttgta

SEQ ID NO: 498588 - DNA, 19 bp, Mus musculus
  siRNA target sequence for Cntn6 (NM_017383.2,420-438).
cggcatgacttatcactat

SEQ ID NO: 498589 - DNA, 19 bp, Mus musculus
  siRNA target sequence for Cntn6 (NM_017383.2,421-439).
ggcatgacttatcactata

SEQ ID NO: 498590 - DNA, 19 bp, Mus musculus
  siRNA target sequence for Cntn6 (NM_017383.2,474-492).
cagaacagatcaagatatt

SEQ ID NO: 498591 - DNA, 19 bp, Mus musculus
  siRNA target sequence for Cntn6 (NM_017383.2,574-592).
gactttgaaaccaaaacca

SEQ ID NO: 498592 - DNA, 19 bp, Mus musculus
  siRNA target sequence for Cntn6 (NM_017383.2,642-660).
cccaccaccacattttgga

SEQ ID NO: 498593 - DNA, 19 bp, Mus musculus
  siRNA target sequence for Cntn6 (NM_017383.2,673-691).
gcctggaccttcaatgata

SEQ ID NO: 498594 - DNA, 19 bp, Mus musculus
  siRNA target sequence for Cntn6 (NM_017383.2,736-754).
gacacagggaacttgtact

SEQ ID NO: 498595 - DNA, 19 bp, Mus musculus
  siRNA target sequence for Cntn6 (NM_017383.2,775-793).
gatgtgggcaattatactt

SEQ ID NO: 498596 - DNA, 19 bp, Mus musculus
  siRNA target sequence for Cntn6 (NM_017383.2,833-851).
gtccacctacgcctttagt

SEQ ID NO: 498597 - DNA, 19 bp, Mus musculus
  siRNA target sequence for Cntn6 (NM_017383.2,891-909).
gattgaagtgcgttttcct

SEQ ID NO: 498598 - DNA, 19 bp, Mus musculus
  siRNA target sequence for Cntn6 (NM_017383.2,898-916).
gtgcgttttcctgaaacaa

SEQ ID NO: 498599 - DNA, 19 bp, Mus musculus
  siRNA target sequence for Cntn6 (NM_017383.2,900-918).
gcgttttcctgaaacaata

SEQ ID NO: 498600 - DNA, 19 bp, Mus musculus
  siRNA target sequence for Cntn6 (NM_017383.2,919-937).
caagctgcaaaggattcat

SEQ ID NO: 498601 - DNA, 19 bp, Mus musculus
  siRNA target sequence for Cntn6 (NM_017383.2,925-943).
gcaaaggattcatctataa

SEQ ID NO: 498602 - DNA, 19 bp, Mus musculus
  siRNA target sequence for Cntn6 (NM_017383.2,926-944).
caaaggattcatctataaa

SEQ ID NO: 498603 - DNA, 19 bp, Mus musculus
  siRNA target sequence for Cntn6 (NM_017383.2,1007-1025).
gcccgatgccagggaaaat

SEQ ID NO: 498604 - DNA, 19 bp, Mus musculus
  siRNA target sequence for Cntn6 (NM_017383.2,1035-1053).
caaatcccaagctatcctt

SEQ ID NO: 498605 - DNA, 19 bp, Mus musculus
  siRNA target sequence for Cntn6 (NM_017383.2,1106-1124).
gtaaccttcgaggaagaaa

SEQ ID NO: 498606 - DNA, 19 bp, Mus musculus
  siRNA target sequence for Cntn6 (NM_017383.2,1110-1128).
ccttcgaggaagaaacctt

SEQ ID NO: 498607 - DNA, 19 bp, Mus musculus
  siRNA target sequence for Cntn6 (NM_017383.2,1126-1144).
cttgcaaagggtcaactaa

SEQ ID NO: 498608 - DNA, 19 bp, Mus musculus
  siRNA target sequence for Cntn6 (NM_017383.2,1129-1147).
gcaaagggtcaactaattt

SEQ ID NO: 498609 - DNA, 19 bp, Mus musculus
  siRNA target sequence for Cntn6 (NM_017383.2,1130-1148).
caaagggtcaactaatttt

SEQ ID NO: 498610 - DNA, 19 bp, Mus musculus
  siRNA target sequence for Cntn6 (NM_017383.2,1134-1152).
gggtcaactaattttctat

SEQ ID NO: 498611 - DNA, 19 bp, Mus musculus
  siRNA target sequence for Cntn6 (NM_017383.2,1187-1205).
catacctttctatctatga

SEQ ID NO: 498612 - DNA, 19 bp, Mus musculus
  siRNA target sequence for Cntn6 (NM_017383.2,1208-1226).
gcttgttttgggaatgcaa

SEQ ID NO: 498613 - DNA, 19 bp, Mus musculus
  siRNA target sequence for Cntn6 (NM_017383.2,1224-1242).
caaagctagtggaaatcca

SEQ ID NO: 498614 - DNA, 19 bp, Mus musculus
  siRNA target sequence for Cntn6 (NM_017383.2,1250-1268).
cgtacacgtggctaaagaa

SEQ ID NO: 498615 - DNA, 19 bp, Mus musculus
  siRNA target sequence for Cntn6 (NM_017383.2,1251-1269).
gtacacgtggctaaagaat

SEQ ID NO: 498616 - DNA, 19 bp, Mus musculus
  siRNA target sequence for Cntn6 (NM_017383.2,1426-1444).
gctccagatttctccaaaa

SEQ ID NO: 498617 - DNA, 19 bp, Mus musculus
  siRNA target sequence for Cntn6 (NM_017383.2,1427-1445).
ctccagatttctccaaaaa

SEQ ID NO: 498618 - DNA, 19 bp, Mus musculus
  siRNA target sequence for Cntn6 (NM_017383.2,1448-1466).
ccattaaaaaaatttcagt

SEQ ID NO: 498619 - DNA, 19 bp, Mus musculus
  siRNA target sequence for Cntn6 (NM_017383.2,1495-1513).
gaatgcaaaccaaatgctt

SEQ ID NO: 498620 - DNA, 19 bp, Mus musculus
  siRNA target sequence for Cntn6 (NM_017383.2,1516-1534).
cccaaagcatcgatttcct

SEQ ID NO: 498621 - DNA, 19 bp, Mus musculus
  siRNA target sequence for Cntn6 (NM_017383.2,1522-1540).
gcatcgatttcctggaaaa

SEQ ID NO: 498622 - DNA, 19 bp, Mus musculus
  siRNA target sequence for Cntn6 (NM_017383.2,1592-1610).
gcagccttaagatatgcaa

SEQ ID NO: 498623 - DNA, 19 bp, Mus musculus
  siRNA target sequence for Cntn6 (NM_017383.2,1593-1611).
cagccttaagatatgcaat

SEQ ID NO: 498624 - DNA, 19 bp, Mus musculus
  siRNA target sequence for Cntn6 (NM_017383.2,1596-1614).
ccttaagatatgcaatgtt

SEQ ID NO: 498625 - DNA, 19 bp, Mus musculus
  siRNA target sequence for Cntn6 (NM_017383.2,1597-1615).
cttaagatatgcaatgtta

SEQ ID NO: 498626 - DNA, 19 bp, Mus musculus
  siRNA target sequence for Cntn6 (NM_017383.2,1621-1639).
gcagatgctgggtcttaca

SEQ ID NO: 498627 - DNA, 19 bp, Mus musculus
  siRNA target sequence for Cntn6 (NM_017383.2,1641-1659).
ctgtgtagctacaaatcaa

SEQ ID NO: 498628 - DNA, 19 bp, Mus musculus
  siRNA target sequence for Cntn6 (NM_017383.2,1643-1661).
gtgtagctacaaatcaatt

SEQ ID NO: 498629 - DNA, 19 bp, Mus musculus
  siRNA target sequence for Cntn6 (NM_017383.2,1682-1700).
gaggtctcgtcgtgaaaga

SEQ ID NO: 498630 - DNA, 19 bp, Mus musculus
  siRNA target sequence for Cntn6 (NM_017383.2,1701-1719).
gagaacgatcattacagta

SEQ ID NO: 498631 - DNA, 19 bp, Mus musculus
  siRNA target sequence for Cntn6 (NM_017383.2,1727-1745).
ctaaaatggatgttacagt

SEQ ID NO: 498632 - DNA, 19 bp, Mus musculus
  siRNA target sequence for Cntn6 (NM_017383.2,1786-1804).
cccaccatggaagttctat

SEQ ID NO: 498633 - DNA, 19 bp, Mus musculus
  siRNA target sequence for Cntn6 (NM_017383.2,1791-1809).
catggaagttctatttgtt

SEQ ID NO: 498634 - DNA, 19 bp, Mus musculus
  siRNA target sequence for Cntn6 (NM_017383.2,1811-1829).
ggtactttaatggagatat

SEQ ID NO: 498635 - DNA, 19 bp, Mus musculus
  siRNA target sequence for Cntn6 (NM_017383.2,1876-1894).
gaatctgttggggatttga

SEQ ID NO: 498636 - DNA, 19 bp, Mus musculus
  siRNA target sequence for Cntn6 (NM_017383.2,1880-1898).
ctgttggggatttgatgat

SEQ ID NO: 498637 - DNA, 19 bp, Mus musculus
  siRNA target sequence for Cntn6 (NM_017383.2,1885-1903).
ggggatttgatgataagga

SEQ ID NO: 498638 - DNA, 19 bp, Mus musculus
  siRNA target sequence for Cntn6 (NM_017383.2,1916-1934).
gccattcgggaaaatatct

SEQ ID NO: 498639 - DNA, 19 bp, Mus musculus
  siRNA target sequence for Cntn6 (NM_017383.2,2023-2041).
gtggagcacatctctagta

SEQ ID NO: 498640 - DNA, 19 bp, Mus musculus
  siRNA target sequence for Cntn6 (NM_017383.2,2061-2079).
gagaccaggtcctgataat

SEQ ID NO: 498641 - DNA, 19 bp, Mus musculus
  siRNA target sequence for Cntn6 (NM_017383.2,2063-2081).
gaccaggtcctgataataa

SEQ ID NO: 498642 - DNA, 19 bp, Mus musculus
  siRNA target sequence for Cntn6 (NM_017383.2,2085-2103).
ccccattcaaatttttact

SEQ ID NO: 498643 - DNA, 19 bp, Mus musculus
  siRNA target sequence for Cntn6 (NM_017383.2,2086-2104).
cccattcaaatttttacta

SEQ ID NO: 498644 - DNA, 19 bp, Mus musculus
  siRNA target sequence for Cntn6 (NM_017383.2,2087-2105).
ccattcaaatttttactat

SEQ ID NO: 498645 - DNA, 19 bp, Mus musculus
  siRNA target sequence for Cntn6 (NM_017383.2,2170-2188).
ggacagacatacaatgcaa

SEQ ID NO: 498646 - DNA, 19 bp, Mus musculus
  siRNA target sequence for Cntn6 (NM_017383.2,2204-2222).
gtccttgggtggaatacga

SEQ ID NO: 498647 - DNA, 19 bp, Mus musculus
  siRNA target sequence for Cntn6 (NM_017383.2,2237-2255).
ctgggaacaacattggaat

SEQ ID NO: 498648 - DNA, 19 bp, Mus musculus
  siRNA target sequence for Cntn6 (NM_017383.2,2342-2360).
gaagcagatcggaacttgt

SEQ ID NO: 498649 - DNA, 19 bp, Mus musculus
  siRNA target sequence for Cntn6 (NM_017383.2,2345-2363).
gcagatcggaacttgtcat

SEQ ID NO: 498650 - DNA, 19 bp, Mus musculus
  siRNA target sequence for Cntn6 (NM_017383.2,2346-2364).
cagatcggaacttgtcatt

SEQ ID NO: 498651 - DNA, 19 bp, Mus musculus
  siRNA target sequence for Cntn6 (NM_017383.2,2398-2416).
ggagaggggtttggatata

SEQ ID NO: 498652 - DNA, 19 bp, Mus musculus
  siRNA target sequence for Cntn6 (NM_017383.2,2464-2482).
gtggctcttgtagaatcat

SEQ ID NO: 498653 - DNA, 19 bp, Mus musculus
  siRNA target sequence for Cntn6 (NM_017383.2,2473-2491).
gtagaatcatccaagttca

SEQ ID NO: 498654 - DNA, 19 bp, Mus musculus
  siRNA target sequence for Cntn6 (NM_017383.2,2476-2494).
gaatcatccaagttcatct

SEQ ID NO: 498655 - DNA, 19 bp, Mus musculus
  siRNA target sequence for Cntn6 (NM_017383.2,2520-2538).
gtctccctttgaagtcaaa

SEQ ID NO: 498656 - DNA, 19 bp, Mus musculus
  siRNA target sequence for Cntn6 (NM_017383.2,2541-2559).
gggagtgtacaataatgaa

SEQ ID NO: 498657 - DNA, 19 bp, Mus musculus
  siRNA target sequence for Cntn6 (NM_017383.2,2665-2683).
gaggtttcctggaatgcta

SEQ ID NO: 498658 - DNA, 19 bp, Mus musculus
  siRNA target sequence for Cntn6 (NM_017383.2,2676-2694).
gaatgctattgcttggaat

SEQ ID NO: 498659 - DNA, 19 bp, Mus musculus
  siRNA target sequence for Cntn6 (NM_017383.2,2681-2699).
ctattgcttggaatagaaa

SEQ ID NO: 498660 - DNA, 19 bp, Mus musculus
  siRNA target sequence for Cntn6 (NM_017383.2,2713-2731).
ctaggctatgaggtcttat

SEQ ID NO: 498661 - DNA, 19 bp, Mus musculus
  siRNA target sequence for Cntn6 (NM_017383.2,2752-2770).
gaatctatgattggtaaaa

SEQ ID NO: 498662 - DNA, 19 bp, Mus musculus
  siRNA target sequence for Cntn6 (NM_017383.2,2799-2817).
gaacatcacaggactaaga

SEQ ID NO: 498663 - DNA, 19 bp, Mus musculus
  siRNA target sequence for Cntn6 (NM_017383.2,2809-2827).
ggactaagagctaatacga

SEQ ID NO: 498664 - DNA, 19 bp, Mus musculus
  siRNA target sequence for Cntn6 (NM_017383.2,2810-2828).
gactaagagctaatacgat

SEQ ID NO: 498665 - DNA, 19 bp, Mus musculus
  siRNA target sequence for Cntn6 (NM_017383.2,2812-2830).
ctaagagctaatacgattt

SEQ ID NO: 498666 - DNA, 19 bp, Mus musculus
  siRNA target sequence for Cntn6 (NM_017383.2,2816-2834).
gagctaatacgatttactt

SEQ ID NO: 498667 - DNA, 19 bp, Mus musculus
  siRNA target sequence for Cntn6 (NM_017383.2,2837-2855).
cctctgtgagagcctataa

SEQ ID NO: 498668 - DNA, 19 bp, Mus musculus
  siRNA target sequence for Cntn6 (NM_017383.2,2918-2936).
gccaaccaccagcaaacat

SEQ ID NO: 498669 - DNA, 19 bp, Mus musculus
  siRNA target sequence for Cntn6 (NM_017383.2,2919-2937).
ccaaccaccagcaaacatt

SEQ ID NO: 498670 - DNA, 19 bp, Mus musculus
  siRNA target sequence for Cntn6 (NM_017383.2,2970-2988).
gaactgggagcatgtaaaa

SEQ ID NO: 498671 - DNA, 19 bp, Mus musculus
  siRNA target sequence for Cntn6 (NM_017383.2,3039-3057).
gaaccgacagagtaaaact

SEQ ID NO: 498672 - DNA, 19 bp, Mus musculus
  siRNA target sequence for Cntn6 (NM_017383.2,3042-3060).
ccgacagagtaaaactcat

SEQ ID NO: 498673 - DNA, 19 bp, Mus musculus
  siRNA target sequence for Cntn6 (NM_017383.2,3043-3061).
cgacagagtaaaactcata

SEQ ID NO: 498674 - DNA, 19 bp, Mus musculus
  siRNA target sequence for Cntn6 (NM_017383.2,3044-3062).
gacagagtaaaactcatat

SEQ ID NO: 498675 - DNA, 19 bp, Mus musculus
  siRNA target sequence for Cntn6 (NM_017383.2,3050-3068).
gtaaaactcatattttgga

SEQ ID NO: 498676 - DNA, 19 bp, Mus musculus
  siRNA target sequence for Cntn6 (NM_017383.2,3100-3118).
ccatttgaagaagactatt

SEQ ID NO: 498677 - DNA, 19 bp, Mus musculus
  siRNA target sequence for Cntn6 (NM_017383.2,3161-3179).
gcagtgaggaaatcagaat

SEQ ID NO: 498678 - DNA, 19 bp, Mus musculus
  siRNA target sequence for Cntn6 (NM_017383.2,3200-3218).
gttccacaggagttcagat

SEQ ID NO: 498679 - DNA, 19 bp, Mus musculus
  siRNA target sequence for Cntn6 (NM_017383.2,3234-3252).
ccagtccctgtcaatggtt

SEQ ID NO: 498680 - DNA, 19 bp, Mus musculus
  siRNA target sequence for Col6a3 (NM_009935.1,203-221).
ctggggccatccaacttca

SEQ ID NO: 498681 - DNA, 19 bp, Mus musculus
  siRNA target sequence for Col6a3 (NM_009935.1,205-223).
ggggccatccaacttcaat

SEQ ID NO: 498682 - DNA, 19 bp, Mus musculus
  siRNA target sequence for Col6a3 (NM_009935.1,224-242).
gccatccgagacttcgtta

SEQ ID NO: 498683 - DNA, 19 bp, Mus musculus
  siRNA target sequence for Col6a3 (NM_009935.1,286-304).
ggtatcagtggctcagtat

SEQ ID NO: 498684 - DNA, 19 bp, Mus musculus
  siRNA target sequence for Col6a3 (NM_009935.1,403-421).
cctgtacacgggatcttct

SEQ ID NO: 498685 - DNA, 19 bp, Mus musculus
  siRNA target sequence for Col6a3 (NM_009935.1,420-438).
ctctggacttcgttcgaaa

SEQ ID NO: 498686 - DNA, 19 bp, Mus musculus
  siRNA target sequence for Col6a3 (NM_009935.1,434-452).
cgaaacaacctcttcacta

SEQ ID NO: 498687 - DNA, 19 bp, Mus musculus
  siRNA target sequence for Col6a3 (NM_009935.1,471-489).
ccgctgagggggttcctaa

SEQ ID NO: 498688 - DNA, 19 bp, Mus musculus
  siRNA target sequence for Col6a3 (NM_009935.1,513-531).
gtaagtccctcgatgaagt

SEQ ID NO: 498689 - DNA, 19 bp, Mus musculus
  siRNA target sequence for Col6a3 (NM_009935.1,663-681).
gccctgctcccttgcaaaa

SEQ ID NO: 498690 - DNA, 19 bp, Mus musculus
  siRNA target sequence for Col6a3 (NM_009935.1,738-756).
gcaagcgggacattctttt

SEQ ID NO: 498691 - DNA, 19 bp, Mus musculus
  siRNA target sequence for Col6a3 (NM_009935.1,760-778).
ctttgacggctcagtcaat

SEQ ID NO: 498692 - DNA, 19 bp, Mus musculus
  siRNA target sequence for Col6a3 (NM_009935.1,764-782).
gacggctcagtcaatgtct

SEQ ID NO: 498693 - DNA, 19 bp, Mus musculus
  siRNA target sequence for Col6a3 (NM_009935.1,806-824).
gactttctctacagattca

SEQ ID NO: 498694 - DNA, 19 bp, Mus musculus
  siRNA target sequence for Col6a3 (NM_009935.1,853-871).
gacccgggtagcaatagct

SEQ ID NO: 498695 - DNA, 19 bp, Mus musculus
  siRNA target sequence for Col6a3 (NM_009935.1,919-937).
gacgaaagctgaaatcctt

SEQ ID NO: 498696 - DNA, 19 bp, Mus musculus
  siRNA target sequence for Col6a3 (NM_009935.1,921-939).
cgaaagctgaaatccttaa

SEQ ID NO: 498697 - DNA, 19 bp, Mus musculus
  siRNA target sequence for Col6a3 (NM_009935.1,935-953).
cttaatctcgtgaagaaga

SEQ ID NO: 498698 - DNA, 19 bp, Mus musculus
  siRNA target sequence for Col6a3 (NM_009935.1,1003-1021).
cgcgcttaggaacatcttt

SEQ ID NO: 498699 - DNA, 19 bp, Mus musculus
  siRNA target sequence for Col6a3 (NM_009935.1,1005-1023).
cgcttaggaacatctttgt

SEQ ID NO: 498700 - DNA, 19 bp, Mus musculus
  siRNA target sequence for Col6a3 (NM_009935.1,1007-1025).
cttaggaacatctttgtga

SEQ ID NO: 498701 - DNA, 19 bp, Mus musculus
  siRNA target sequence for Col6a3 (NM_009935.1,1035-1053).
gcagccgcatcgaggataa

SEQ ID NO: 498702 - DNA, 19 bp, Mus musculus
  siRNA target sequence for Col6a3 (NM_009935.1,1224-1242).
cagagtcactccctaagat

SEQ ID NO: 498703 - DNA, 19 bp, Mus musculus
  siRNA target sequence for Col6a3 (NM_009935.1,1288-1306).
gggttcaggtcctgtatca

SEQ ID NO: 498704 - DNA, 19 bp, Mus musculus
  siRNA target sequence for Col6a3 (NM_009935.1,1296-1314).
gtcctgtatcaggtgaaaa

SEQ ID NO: 498705 - DNA, 19 bp, Mus musculus
  siRNA target sequence for Col6a3 (NM_009935.1,1299-1317).
ctgtatcaggtgaaaagga

SEQ ID NO: 498706 - DNA, 19 bp, Mus musculus
  siRNA target sequence for Col6a3 (NM_009935.1,1365-1383).
ccctgctaaaggactttgt

SEQ ID NO: 498707 - DNA, 19 bp, Mus musculus
  siRNA target sequence for Col6a3 (NM_009935.1,1463-1481).
ccggagttctacctgaatt

SEQ ID NO: 498708 - DNA, 19 bp, Mus musculus
  siRNA target sequence for Col6a3 (NM_009935.1,1562-1580).
gcactggagttcgtgttaa

SEQ ID NO: 498709 - DNA, 19 bp, Mus musculus
  siRNA target sequence for Col6a3 (NM_009935.1,1570-1588).
gttcgtgttaaggaacatt

SEQ ID NO: 498710 - DNA, 19 bp, Mus musculus
  siRNA target sequence for Col6a3 (NM_009935.1,1585-1603).
cattctgaccagttctact

SEQ ID NO: 498711 - DNA, 19 bp, Mus musculus
  siRNA target sequence for Col6a3 (NM_009935.1,1672-1690).
cgtgcgaggcccttcagta

SEQ ID NO: 498712 - DNA, 19 bp, Mus musculus
  siRNA target sequence for Col6a3 (NM_009935.1,1840-1858).
gagggtgatccagcttaat

SEQ ID NO: 498713 - DNA, 19 bp, Mus musculus
  siRNA target sequence for Col6a3 (NM_009935.1,1843-1861).
ggtgatccagcttaatcgt

SEQ ID NO: 498714 - DNA, 19 bp, Mus musculus
  siRNA target sequence for Col6a3 (NM_009935.1,1872-1890).
gctcgttgaaacccatttt

SEQ ID NO: 498715 - DNA, 19 bp, Mus musculus
  siRNA target sequence for Col6a3 (NM_009935.1,1945-1963).
cgatggatcccgaaatgct

SEQ ID NO: 498716 - DNA, 19 bp, Mus musculus
  siRNA target sequence for Col6a3 (NM_009935.1,2015-2033).
ctggacataggctttgaca

SEQ ID NO: 498717 - DNA, 19 bp, Mus musculus
  siRNA target sequence for Col6a3 (NM_009935.1,2257-2275).
catttcgtctggaaagtat

SEQ ID NO: 498718 - DNA, 19 bp, Mus musculus
  siRNA target sequence for Col6a3 (NM_009935.1,2263-2281).
gtctggaaagtatgatgat

SEQ ID NO: 498719 - DNA, 19 bp, Mus musculus
  siRNA target sequence for Col6a3 (NM_009935.1,2469-2487).
cacagcagatccatcagat

SEQ ID NO: 498720 - DNA, 19 bp, Mus musculus
  siRNA target sequence for Col6a3 (NM_009935.1,2507-2525).
cccccttcagtggttgaaa

SEQ ID NO: 498721 - DNA, 19 bp, Mus musculus
  siRNA target sequence for Col6a3 (NM_009935.1,2532-2550).
cggctgacatcgtctttct

SEQ ID NO: 498722 - DNA, 19 bp, Mus musculus
  siRNA target sequence for Col6a3 (NM_009935.1,2577-2595).
ccgatggcatcgctcatat

SEQ ID NO: 498723 - DNA, 19 bp, Mus musculus
  siRNA target sequence for Col6a3 (NM_009935.1,2587-2605).
cgctcatatccgagacttt

SEQ ID NO: 498724 - DNA, 19 bp, Mus musculus
  siRNA target sequence for Col6a3 (NM_009935.1,2589-2607).
ctcatatccgagactttgt

SEQ ID NO: 498725 - DNA, 19 bp, Mus musculus
  siRNA target sequence for Col6a3 (NM_009935.1,2591-2609).
catatccgagactttgtca

SEQ ID NO: 498726 - DNA, 19 bp, Mus musculus
  siRNA target sequence for Col6a3 (NM_009935.1,2617-2635).
cgttcgcagactcaacatt

SEQ ID NO: 498727 - DNA, 19 bp, Mus musculus
  siRNA target sequence for Col6a3 (NM_009935.1,2657-2675).
ggggtcgtgcagtttagca

SEQ ID NO: 498728 - DNA, 19 bp, Mus musculus
  siRNA target sequence for Col6a3 (NM_009935.1,2658-2676).
gggtcgtgcagtttagcaa

SEQ ID NO: 498729 - DNA, 19 bp, Mus musculus
  siRNA target sequence for Col6a3 (NM_009935.1,2662-2680).
cgtgcagtttagcaatgat

SEQ ID NO: 498730 - DNA, 19 bp, Mus musculus
  siRNA target sequence for Col6a3 (NM_009935.1,2759-2777).
ggagggtctcccctaaaca

SEQ ID NO: 498731 - DNA, 19 bp, Mus musculus
  siRNA target sequence for Col6a3 (NM_009935.1,2906-2924).
catgcccaagtcataagct

SEQ ID NO: 498732 - DNA, 19 bp, Mus musculus
  siRNA target sequence for Col6a3 (NM_009935.1,2951-2969).
ggagatcggaacattgata

SEQ ID NO: 498733 - DNA, 19 bp, Mus musculus
  siRNA target sequence for Col6a3 (NM_009935.1,3013-3031).
cacagttcgggaattcaga

SEQ ID NO: 498734 - DNA, 19 bp, Mus musculus
  siRNA target sequence for Col6a3 (NM_009935.1,3092-3110).
cagcctcctggggtagatt

SEQ ID NO: 498735 - DNA, 19 bp, Mus musculus
  siRNA target sequence for Col6a3 (NM_009935.1,3094-3112).
gcctcctggggtagattta

SEQ ID NO: 498736 - DNA, 19 bp, Mus musculus
  siRNA target sequence for Col6a3 (NM_009935.1,3160-3178).
gctggatggttccatcaat

SEQ ID NO: 498737 - DNA, 19 bp, Mus musculus
  siRNA target sequence for Col6a3 (NM_009935.1,3163-3181).
ggatggttccatcaatttt

SEQ ID NO: 498738 - DNA, 19 bp, Mus musculus
  siRNA target sequence for Col6a3 (NM_009935.1,3164-3182).
gatggttccatcaatttta

SEQ ID NO: 498739 - DNA, 19 bp, Mus musculus
  siRNA target sequence for Col6a3 (NM_009935.1,3205-3223).
gctccgttttgcatctgta

SEQ ID NO: 498740 - DNA, 19 bp, Mus musculus
  siRNA target sequence for Col6a3 (NM_009935.1,3226-3244).
cgtggacacggtctatgaa

SEQ ID NO: 498741 - DNA, 19 bp, Mus musculus
  siRNA target sequence for Col6a3 (NM_009935.1,3266-3284).
ggactggtccagtacaact

SEQ ID NO: 498742 - DNA, 19 bp, Mus musculus
  siRNA target sequence for Col6a3 (NM_009935.1,3285-3303).
cagaccccacggatgaatt

SEQ ID NO: 498743 - DNA, 19 bp, Mus musculus
  siRNA target sequence for Col6a3 (NM_009935.1,3310-3328).
gagggacttttctaccaaa

SEQ ID NO: 498744 - DNA, 19 bp, Mus musculus
  siRNA target sequence for Col6a3 (NM_009935.1,3324-3342).
ccaaaaggcagattatcga

SEQ ID NO: 498745 - DNA, 19 bp, Mus musculus
  siRNA target sequence for Col6a3 (NM_009935.1,3325-3343).
caaaaggcagattatcgat

SEQ ID NO: 498746 - DNA, 19 bp, Mus musculus
  siRNA target sequence for Col6a3 (NM_009935.1,3349-3367).
caacaaagtcgtctataaa

SEQ ID NO: 498747 - DNA, 19 bp, Mus musculus
  siRNA target sequence for Col6a3 (NM_009935.1,3352-3370).
caaagtcgtctataaagga

SEQ ID NO: 498748 - DNA, 19 bp, Mus musculus
  siRNA target sequence for Col6a3 (NM_009935.1,3406-3424).
cctgctgcggaatcacttt

SEQ ID NO: 498749 - DNA, 19 bp, Mus musculus
  siRNA target sequence for Col6a3 (NM_009935.1,3733-3751).
ctgcaatctggaagtcatt

SEQ ID NO: 498750 - DNA, 19 bp, Mus musculus
  siRNA target sequence for Col6a3 (NM_009935.1,3765-3783).
gatctcgagatcagaatgt

SEQ ID NO: 498751 - DNA, 19 bp, Mus musculus
  siRNA target sequence for Col6a3 (NM_009935.1,3768-3786).
ctcgagatcagaatgtgtt

SEQ ID NO: 498752 - DNA, 19 bp, Mus musculus
  siRNA target sequence for Col6a3 (NM_009935.1,3773-3791).
gatcagaatgtgtttgtga

SEQ ID NO: 498753 - DNA, 19 bp, Mus musculus
  siRNA target sequence for Col6a3 (NM_009935.1,3818-3836).
gacatcatcttgaacagaa

SEQ ID NO: 498754 - DNA, 19 bp, Mus musculus
  siRNA target sequence for Col6a3 (NM_009935.1,3832-3850).
cagaaccagccagatacaa

SEQ ID NO: 498755 - DNA, 19 bp, Mus musculus
  siRNA target sequence for Col6a3 (NM_009935.1,3954-3972).
cggagctgtttgagaagtt

SEQ ID NO: 498756 - DNA, 19 bp, Mus musculus
  siRNA target sequence for Col6a3 (NM_009935.1,4008-4026).
cagctgacacgctgaagtt

SEQ ID NO: 498757 - DNA, 19 bp, Mus musculus
  siRNA target sequence for Col6a3 (NM_009935.1,4045-4063).
gcagtcgtcgcctgatact

SEQ ID NO: 498758 - DNA, 19 bp, Mus musculus
  siRNA target sequence for Col6a3 (NM_009935.1,4252-4270).
gctcaacctgcttgactta

SEQ ID NO: 498759 - DNA, 19 bp, Mus musculus
  siRNA target sequence for Col6a3 (NM_009935.1,4261-4279).
gcttgacttagactatgaa

SEQ ID NO: 498760 - DNA, 19 bp, Mus musculus
  siRNA target sequence for Col6a3 (NM_009935.1,4954-4972).
gattggggaacaaggattt

SEQ ID NO: 498761 - DNA, 19 bp, Mus musculus
  siRNA target sequence for Col6a3 (NM_009935.1,5277-5295).
caggggcaactggacaaaa

SEQ ID NO: 498762 - DNA, 19 bp, Mus musculus
  siRNA target sequence for Col6a3 (NM_009935.1,5340-5358).
gaggcgactccgttgatca

SEQ ID NO: 498763 - DNA, 19 bp, Mus musculus
  siRNA target sequence for Col6a3 (NM_009935.1,5564-5582).
gtggctgtggtcacctata

SEQ ID NO: 498764 - DNA, 19 bp, Mus musculus
  siRNA target sequence for Col6a3 (NM_009935.1,5567-5585).
gctgtggtcacctataaca

SEQ ID NO: 498765 - DNA, 19 bp, Mus musculus
  siRNA target sequence for Col6a3 (NM_009935.1,5568-5586).
ctgtggtcacctataacaa

SEQ ID NO: 498766 - DNA, 19 bp, Mus musculus
  siRNA target sequence for Col6a3 (NM_009935.1,5634-5652).
ccctcttagacagtattca

SEQ ID NO: 498767 - DNA, 19 bp, Mus musculus
  siRNA target sequence for Col6a3 (NM_009935.1,5690-5708).
ctggagaccgcaatgtcat

SEQ ID NO: 498768 - DNA, 19 bp, Mus musculus
  siRNA target sequence for Col6a3 (NM_009935.1,5887-5905).
caacgccttgcagatcaat

SEQ ID NO: 498769 - DNA, 19 bp, Mus musculus
  siRNA target sequence for Col6a3 (NM_009935.1,5972-5990).
gtccttacctgccatgttt

SEQ ID NO: 498770 - DNA, 19 bp, Mus musculus
  siRNA target sequence for Col6a3 (NM_009935.1,6120-6138).
ccacactgttccagttcaa

SEQ ID NO: 498771 - DNA, 19 bp, Mus musculus
  siRNA target sequence for Col6a3 (NM_009935.1,6121-6139).
cacactgttccagttcaat

SEQ ID NO: 498772 - DNA, 19 bp, Mus musculus
  siRNA target sequence for Col6a3 (NM_009935.1,6195-6213).
cgaaggcttcccaacactt

SEQ ID NO: 498773 - DNA, 19 bp, Mus musculus
  siRNA target sequence for Col6a3 (NM_009935.1,6196-6214).
gaaggcttcccaacacttt

SEQ ID NO: 498774 - DNA, 19 bp, Mus musculus
  siRNA target sequence for Col6a3 (NM_009935.1,6273-6291).
cgcctgtgaaggtggaatt

SEQ ID NO: 498775 - DNA, 19 bp, Mus musculus
  siRNA target sequence for Col6a3 (NM_009935.1,6373-6391).
cctgggcaatgccattgaa

SEQ ID NO: 498776 - DNA, 19 bp, Mus musculus
  siRNA target sequence for Col6a3 (NM_009935.1,6374-6392).
ctgggcaatgccattgaat

SEQ ID NO: 498777 - DNA, 19 bp, Mus musculus
  siRNA target sequence for Col6a3 (NM_009935.1,6377-6395).
ggcaatgccattgaataca

SEQ ID NO: 498778 - DNA, 19 bp, Mus musculus
  siRNA target sequence for Col6a3 (NM_009935.1,6427-6445).
cccacgggacctcaaaatt

SEQ ID NO: 498779 - DNA, 19 bp, Mus musculus
  siRNA target sequence for Col6a3 (NM_009935.1,6428-6446).
ccacgggacctcaaaatta

SEQ ID NO: 498780 - DNA, 19 bp, Mus musculus
  siRNA target sequence for Col6a3 (NM_009935.1,6429-6447).
cacgggacctcaaaattat

SEQ ID NO: 498781 - DNA, 19 bp, Mus musculus
  siRNA target sequence for Col6a3 (NM_009935.1,6432-6450).
gggacctcaaaattatggt

SEQ ID NO: 498782 - DNA, 19 bp, Mus musculus
  siRNA target sequence for Col6a3 (NM_009935.1,6516-6534).
ccaagtgcaagggttactt

SEQ ID NO: 498783 - DNA, 19 bp, Mus musculus
  siRNA target sequence for Col6a3 (NM_009935.1,6670-6688).
gaggctgctcccatccttt

SEQ ID NO: 498784 - DNA, 19 bp, Mus musculus
  siRNA target sequence for Col6a3 (NM_009935.1,6775-6793).
cgtgaagtttggtcacaaa

SEQ ID NO: 498785 - DNA, 19 bp, Mus musculus
  siRNA target sequence for Col6a3 (NM_009935.1,6796-6814).
gataaaccctccacatact

SEQ ID NO: 498786 - DNA, 19 bp, Mus musculus
  siRNA target sequence for Col6a3 (NM_009935.1,6825-6843).
gtcttacatccaaagttgt

SEQ ID NO: 498787 - DNA, 19 bp, Mus musculus
  siRNA target sequence for Col6a3 (NM_009935.1,6847-6865).
cacaataaagccatcgaat

SEQ ID NO: 498788 - DNA, 19 bp, Mus musculus
  siRNA target sequence for Col6a3 (NM_009935.1,6876-6894).
caacagcaattgtaaacct

SEQ ID NO: 498789 - DNA, 19 bp, Mus musculus
  siRNA target sequence for Col6a3 (NM_009935.1,6952-6970).
gccagaccccgcaaaacca

SEQ ID NO: 498790 - DNA, 19 bp, Mus musculus
  siRNA target sequence for Col6a3 (NM_009935.1,7052-7070).
gcccagacagcttctgtaa

SEQ ID NO: 498791 - DNA, 19 bp, Mus musculus
  siRNA target sequence for Col6a3 (NM_009935.1,7241-7259).
cagccagtccttactaaat

SEQ ID NO: 498792 - DNA, 19 bp, Mus musculus
  siRNA target sequence for Col6a3 (NM_009935.1,7243-7261).
gccagtccttactaaatca

SEQ ID NO: 498793 - DNA, 19 bp, Mus musculus
  siRNA target sequence for Col6a3 (NM_009935.1,7739-7757).
caaggaagtttcaatacga

SEQ ID NO: 498794 - DNA, 19 bp, Mus musculus
  siRNA target sequence for Col6a3 (NM_009935.1,7790-7808).
caccgagcatccagttcaa

SEQ ID NO: 498795 - DNA, 19 bp, Mus musculus
  siRNA target sequence for Col6a3 (NM_009935.1,7846-7864).
cactaaaacagatatatgt

SEQ ID NO: 498796 - DNA, 19 bp, Mus musculus
  siRNA target sequence for Col6a3 (NM_009935.1,7890-7908).
gtgtggacttcaagttact

SEQ ID NO: 498797 - DNA, 19 bp, Mus musculus
  siRNA target sequence for Col6a3 (NM_009935.1,7892-7910).
gtggacttcaagttactat

SEQ ID NO: 498798 - DNA, 19 bp, Mus musculus
  siRNA target sequence for Col6a3 (NM_009935.1,7929-7947).
gcaaaagttgcaagagatt

SEQ ID NO: 498799 - DNA, 19 bp, Mus musculus
  siRNA target sequence for Col6a3 (NM_009935.1,7964-7982).
ggaggcaacgagaacagat

SEQ ID NO: 498800 - DNA, 19 bp, Mus musculus
  siRNA target sequence for Col6a3 (NM_009935.1,7965-7983).
gaggcaacgagaacagatt

SEQ ID NO: 498801 - DNA, 19 bp, Mus musculus
  siRNA target sequence for Col6a3 (NM_009935.1,8011-8029).
gtgtagtcctgagttaaca

SEQ ID NO: 498802 - DNA, 19 bp, Mus musculus
  siRNA target sequence for Col6a3 (NM_009935.1,8013-8031).
gtagtcctgagttaacagt

SEQ ID NO: 498803 - DNA, 19 bp, Mus musculus
  siRNA target sequence for Creg2 (NM_170597.2,50-68).
cgcctgtcctggttgctat

SEQ ID NO: 498804 - DNA, 19 bp, Mus musculus
  siRNA target sequence for Creg2 (NM_170597.2,423-441).
ctgtgtccacccacgaaaa

SEQ ID NO: 498805 - DNA, 19 bp, Mus musculus
  siRNA target sequence for Creg2 (NM_170597.2,425-443).
gtgtccacccacgaaaaga

SEQ ID NO: 498806 - DNA, 19 bp, Mus musculus
  siRNA target sequence for Creg2 (NM_170597.2,504-522).
cagggatccctttcttcta

SEQ ID NO: 498807 - DNA, 19 bp, Mus musculus
  siRNA target sequence for Creg2 (NM_170597.2,750-768).
cccgacagtatgaatggtt

SEQ ID NO: 498808 - DNA, 19 bp, Mus musculus
  siRNA target sequence for Creg2 (NM_170597.2,810-828).
ggtatggaggtgtatctga

SEQ ID NO: 498809 - DNA, 19 bp, Mus musculus
  siRNA target sequence for Creg2 (NM_170597.2,833-851).
ccgagggaggaatacttca

SEQ ID NO: 498810 - DNA, 19 bp, Mus musculus
  siRNA target sequence for Creg2 (NM_170597.2,834-852).
cgagggaggaatacttcaa

SEQ ID NO: 498811 - DNA, 19 bp, Mus musculus
  siRNA target sequence for Csf1r (NM_007779.1,155-173).
gcccagaactggttgtaga

SEQ ID NO: 498812 - DNA, 19 bp, Mus musculus
  siRNA target sequence for Csf1r (NM_007779.1,323-341).
gttgtaccgagcttgaaga

SEQ ID NO: 498813 - DNA, 19 bp, Mus musculus
  siRNA target sequence for Csf1r (NM_007779.1,356-374).
gtaccaccatccacttgta

SEQ ID NO: 498814 - DNA, 19 bp, Mus musculus
  siRNA target sequence for Csf1r (NM_007779.1,362-380).
ccatccacttgtatgtcaa

SEQ ID NO: 498815 - DNA, 19 bp, Mus musculus
  siRNA target sequence for Csf1r (NM_007779.1,363-381).
catccacttgtatgtcaaa

SEQ ID NO: 498816 - DNA, 19 bp, Mus musculus
  siRNA target sequence for Csf1r (NM_007779.1,366-384).
ccacttgtatgtcaaagat

SEQ ID NO: 498817 - DNA, 19 bp, Mus musculus
  siRNA target sequence for Csf1r (NM_007779.1,523-541).
cgcaaaacggtctacttct

SEQ ID NO: 498818 - DNA, 19 bp, Mus musculus
  siRNA target sequence for Csf1r (NM_007779.1,580-598).
gtccttgacagcaatacct

SEQ ID NO: 498819 - DNA, 19 bp, Mus musculus
  siRNA target sequence for Csf1r (NM_007779.1,676-694).
gagcccccacagataaaat

SEQ ID NO: 498820 - DNA, 19 bp, Mus musculus
  siRNA target sequence for Csf1r (NM_007779.1,805-823).
ctggaaatccccctaaaca

SEQ ID NO: 498821 - DNA, 19 bp, Mus musculus
  siRNA target sequence for Csf1r (NM_007779.1,885-903).
ccaagacgctggcatatat

SEQ ID NO: 498822 - DNA, 19 bp, Mus musculus
  siRNA target sequence for Csf1r (NM_007779.1,886-904).
caagacgctggcatatatt

SEQ ID NO: 498823 - DNA, 19 bp, Mus musculus
  siRNA target sequence for Csf1r (NM_007779.1,889-907).
gacgctggcatatattctt

SEQ ID NO: 498824 - DNA, 19 bp, Mus musculus
  siRNA target sequence for Csf1r (NM_007779.1,934-952).
cgcacggccaccatgaact

SEQ ID NO: 498825 - DNA, 19 bp, Mus musculus
  siRNA target sequence for Csf1r (NM_007779.1,935-953).
gcacggccaccatgaactt

SEQ ID NO: 498826 - DNA, 19 bp, Mus musculus
  siRNA target sequence for Csf1r (NM_007779.1,960-978).
ggtggagagtgcctactta

SEQ ID NO: 498827 - DNA, 19 bp, Mus musculus
  siRNA target sequence for Csf1r (NM_007779.1,961-979).
gtggagagtgcctacttaa

SEQ ID NO: 498828 - DNA, 19 bp, Mus musculus
  siRNA target sequence for Csf1r (NM_007779.1,1061-1079).
ctagcatacagcattacaa

SEQ ID NO: 498829 - DNA, 19 bp, Mus musculus
  siRNA target sequence for Csf1r (NM_007779.1,1085-1103).
cctacctaggtccattctt

SEQ ID NO: 498830 - DNA, 19 bp, Mus musculus
  siRNA target sequence for Csf1r (NM_007779.1,1110-1128).
ccagcgcaagcttgagttt

SEQ ID NO: 498831 - DNA, 19 bp, Mus musculus
  siRNA target sequence for Csf1r (NM_007779.1,1111-1129).
cagcgcaagcttgagttta

SEQ ID NO: 498832 - DNA, 19 bp, Mus musculus
  siRNA target sequence for Csf1r (NM_007779.1,1114-1132).
cgcaagcttgagtttatca

SEQ ID NO: 498833 - DNA, 19 bp, Mus musculus
  siRNA target sequence for Csf1r (NM_007779.1,1224-1242).
caaggcaggctggaataat

SEQ ID NO: 498834 - DNA, 19 bp, Mus musculus
  siRNA target sequence for Csf1r (NM_007779.1,1272-1290).
cccagaggtcagtgttaca

SEQ ID NO: 498835 - DNA, 19 bp, Mus musculus
  siRNA target sequence for Csf1r (NM_007779.1,1380-1398).
caccgataggtgtgatgaa

SEQ ID NO: 498836 - DNA, 19 bp, Mus musculus
  siRNA target sequence for Csf1r (NM_007779.1,1722-1740).
gatcatcgagagatacgaa

SEQ ID NO: 498837 - DNA, 19 bp, Mus musculus
  siRNA target sequence for Csf1r (NM_007779.1,1733-1751).
gatacgaaggcaatagcta

SEQ ID NO: 498838 - DNA, 19 bp, Mus musculus
  siRNA target sequence for Csf1r (NM_007779.1,1769-1787).
ctcagttgccctacaatga

SEQ ID NO: 498839 - DNA, 19 bp, Mus musculus
  siRNA target sequence for Csf1r (NM_007779.1,1771-1789).
cagttgccctacaatgaga

SEQ ID NO: 498840 - DNA, 19 bp, Mus musculus
  siRNA target sequence for Csf1r (NM_007779.1,1909-1927).
gctgtgaagatgctaaagt

SEQ ID NO: 498841 - DNA, 19 bp, Mus musculus
  siRNA target sequence for Csf1r (NM_007779.1,1931-1949).
cggctcatgctgatgagaa

SEQ ID NO: 498842 - DNA, 19 bp, Mus musculus
  siRNA target sequence for Csf1r (NM_007779.1,1987-2005).
ctgggacagcacgagaata

SEQ ID NO: 498843 - DNA, 19 bp, Mus musculus
  siRNA target sequence for Csf1r (NM_007779.1,1989-2007).
gggacagcacgagaatata

SEQ ID NO: 498844 - DNA, 19 bp, Mus musculus
  siRNA target sequence for Csf1r (NM_007779.1,1991-2009).
gacagcacgagaatatagt

SEQ ID NO: 498845 - DNA, 19 bp, Mus musculus
  siRNA target sequence for Csf1r (NM_007779.1,1993-2011).
cagcacgagaatatagtca

SEQ ID NO: 498846 - DNA, 19 bp, Mus musculus
  siRNA target sequence for Csf1r (NM_007779.1,2100-2118).
gaaggccgaggctatgcta

SEQ ID NO: 498847 - DNA, 19 bp, Mus musculus
  siRNA target sequence for Csf1r (NM_007779.1,2175-2193).
ccacctggagaagaaatat

SEQ ID NO: 498848 - DNA, 19 bp, Mus musculus
  siRNA target sequence for Csf1r (NM_007779.1,2267-2285).
caagtgactccttctttaa

SEQ ID NO: 498849 - DNA, 19 bp, Mus musculus
  siRNA target sequence for Csf1r (NM_007779.1,2270-2288).
gtgactccttctttaagca

SEQ ID NO: 498850 - DNA, 19 bp, Mus musculus
  siRNA target sequence for Csf1r (NM_007779.1,2276-2294).
ccttctttaagcaagatct

SEQ ID NO: 498851 - DNA, 19 bp, Mus musculus
  siRNA target sequence for Csf1r (NM_007779.1,2367-2385).
ggccttccttgcttctaaa

SEQ ID NO: 498852 - DNA, 19 bp, Mus musculus
  siRNA target sequence for Csf1r (NM_007779.1,2433-2451).
cggacatgtggccaagatt

SEQ ID NO: 498853 - DNA, 19 bp, Mus musculus
  siRNA target sequence for Csf1r (NM_007779.1,2462-2480).
gactggctagggacatcat

SEQ ID NO: 498854 - DNA, 19 bp, Mus musculus
  siRNA target sequence for Csf1r (NM_007779.1,2466-2484).
ggctagggacatcatgaat

SEQ ID NO: 498855 - DNA, 19 bp, Mus musculus
  siRNA target sequence for Csf1r (NM_007779.1,2468-2486).
ctagggacatcatgaatga

SEQ ID NO: 498856 - DNA, 19 bp, Mus musculus
  siRNA target sequence for Csf1r (NM_007779.1,2701-2719).
gtatttgcaccgaagaaca

SEQ ID NO: 498857 - DNA, 19 bp, Mus musculus
  siRNA target sequence for Csk (NM_007783.2,269-287).
ctggccatccggtacagaa

SEQ ID NO: 498858 - DNA, 19 bp, Mus musculus
  siRNA target sequence for Csk (NM_007783.2,272-290).
gccatccggtacagaatgt

SEQ ID NO: 498859 - DNA, 19 bp, Mus musculus
  siRNA target sequence for Csk (NM_007783.2,519-537).
caggccgagcggcttcttt

SEQ ID NO: 498860 - DNA, 19 bp, Mus musculus
  siRNA target sequence for Csk (NM_007783.2,627-645).
gagcactaccgcatcatgt

SEQ ID NO: 498861 - DNA, 19 bp, Mus musculus
  siRNA target sequence for Csk (NM_007783.2,629-647).
gcactaccgcatcatgtat

SEQ ID NO: 498862 - DNA, 19 bp, Mus musculus
  siRNA target sequence for Csk (NM_007783.2,632-650).
ctaccgcatcatgtatcat

SEQ ID NO: 498863 - DNA, 19 bp, Mus musculus
  siRNA target sequence for Csk (NM_007783.2,655-673).
gcaagctgagcattgatga

SEQ ID NO: 498864 - DNA, 19 bp, Mus musculus
  siRNA target sequence for Csk (NM_007783.2,737-755).
ctgcactcgcctcatcaaa

SEQ ID NO: 498865 - DNA, 19 bp, Mus musculus
  siRNA target sequence for Csk (NM_007783.2,833-851).
gaagctgctacagacaata

SEQ ID NO: 498866 - DNA, 19 bp, Mus musculus
  siRNA target sequence for Csk (NM_007783.2,859-877).
gggagtttggagatgtgat

SEQ ID NO: 498867 - DNA, 19 bp, Mus musculus
  siRNA target sequence for Csk (NM_007783.2,1063-1081).
ggagtttggtggactatct

SEQ ID NO: 498868 - DNA, 19 bp, Mus musculus
  siRNA target sequence for Csk (NM_007783.2,1111-1129).
gagactgtctcctcaaatt

SEQ ID NO: 498869 - DNA, 19 bp, Mus musculus
  siRNA target sequence for Csk (NM_007783.2,1113-1131).
gactgtctcctcaaattct

SEQ ID NO: 498870 - DNA, 19 bp, Mus musculus
  siRNA target sequence for Csk (NM_007783.2,1117-1135).
gtctcctcaaattctcatt

SEQ ID NO: 498871 - DNA, 19 bp, Mus musculus
  siRNA target sequence for Csk (NM_007783.2,1319-1337).
cttgagagagaagaaattt

SEQ ID NO: 498872 - DNA, 19 bp, Mus musculus
  siRNA target sequence for Csk (NM_007783.2,1370-1388).
ccttctctgggaaatctat

SEQ ID NO: 498873 - DNA, 19 bp, Mus musculus
  siRNA target sequence for Csk (NM_007783.2,1441-1459).
gggtggaaaagggctataa

SEQ ID NO: 498874 - DNA, 19 bp, Mus musculus
  siRNA target sequence for Csk (NM_007783.2,1491-1509).
gtctacgaggtgatgaaga

SEQ ID NO: 498875 - DNA, 19 bp, Mus musculus
  siRNA target sequence for Csk (NM_007783.2,1530-1548).
gccacacggcccacgtttt

SEQ ID NO: 498876 - DNA, 19 bp, Mus musculus
  siRNA target sequence for Csk (NM_007783.2,1563-1581).
cagctcgagcacatcaaga

SEQ ID NO: 498877 - DNA, 19 bp, Mus musculus
  siRNA target sequence for Csnk1a1 (NM_146087.1,189-207).
ccaaggccgaatttatcgt

SEQ ID NO: 498878 - DNA, 19 bp, Mus musculus
  siRNA target sequence for Csnk1a1 (NM_146087.1,245-263).
ggctctttcggggacattt

SEQ ID NO: 498879 - DNA, 19 bp, Mus musculus
  siRNA target sequence for Csnk1a1 (NM_146087.1,247-265).
ctctttcggggacatttat

SEQ ID NO: 498880 - DNA, 19 bp, Mus musculus
  siRNA target sequence for Csnk1a1 (NM_146087.1,249-267).
ctttcggggacatttatct

SEQ ID NO: 498881 - DNA, 19 bp, Mus musculus
  siRNA target sequence for Csnk1a1 (NM_146087.1,341-359).
ctgtacgagagcaaactgt

SEQ ID NO: 498882 - DNA, 19 bp, Mus musculus
  siRNA target sequence for Csnk1a1 (NM_146087.1,343-361).
gtacgagagcaaactgtat

SEQ ID NO: 498883 - DNA, 19 bp, Mus musculus
  siRNA target sequence for Csnk1a1 (NM_146087.1,349-367).
gagcaaactgtataagatt

SEQ ID NO: 498884 - DNA, 19 bp, Mus musculus
  siRNA target sequence for Csnk1a1 (NM_146087.1,379-397).
ggttggcatccctcacata

SEQ ID NO: 498885 - DNA, 19 bp, Mus musculus
  siRNA target sequence for Csnk1a1 (NM_146087.1,398-416).
cggtggtatgggcaagaaa

SEQ ID NO: 498886 - DNA, 19 bp, Mus musculus
  siRNA target sequence for Csnk1a1 (NM_146087.1,409-427).
gcaagaaaaagactataat

SEQ ID NO: 498887 - DNA, 19 bp, Mus musculus
  siRNA target sequence for Csnk1a1 (NM_146087.1,480-498).
gttcaaggaggttcactat

SEQ ID NO: 498888 - DNA, 19 bp, Mus musculus
  siRNA target sequence for Csnk1a1 (NM_146087.1,499-517).
gaagaccgtacttatgtta

SEQ ID NO: 498889 - DNA, 19 bp, Mus musculus
  siRNA target sequence for Csnk1a1 (NM_146087.1,521-539).
gaccagatgatcagtagaa

SEQ ID NO: 498890 - DNA, 19 bp, Mus musculus
  siRNA target sequence for Csnk1a1 (NM_146087.1,529-547).
gatcagtagaattgaatat

SEQ ID NO: 498891 - DNA, 19 bp, Mus musculus
  siRNA target sequence for Csnk1a1 (NM_146087.1,603-621).
gtattgggcgtcactgtaa

SEQ ID NO: 498892 - DNA, 19 bp, Mus musculus
  siRNA target sequence for Csnk1a1 (NM_146087.1,608-626).
gggcgtcactgtaataagt

SEQ ID NO: 498893 - DNA, 19 bp, Mus musculus
  siRNA target sequence for Csnk1a1 (NM_146087.1,609-627).
ggcgtcactgtaataagtt

SEQ ID NO: 498894 - DNA, 19 bp, Mus musculus
  siRNA target sequence for Csnk1a1 (NM_146087.1,610-628).
gcgtcactgtaataagtta

SEQ ID NO: 498895 - DNA, 19 bp, Mus musculus
  siRNA target sequence for Csnk1a1 (NM_146087.1,611-629).
cgtcactgtaataagttat

SEQ ID NO: 498896 - DNA, 19 bp, Mus musculus
  siRNA target sequence for Csnk1a1 (NM_146087.1,618-636).
gtaataagttattccttat

SEQ ID NO: 498897 - DNA, 19 bp, Mus musculus
  siRNA target sequence for Csnk1a1 (NM_146087.1,675-693).
caaggcaacacataccata

SEQ ID NO: 498898 - DNA, 19 bp, Mus musculus
  siRNA target sequence for Csnk1a1 (NM_146087.1,724-742).
ccgatacgccagcatcaat

SEQ ID NO: 498899 - DNA, 19 bp, Mus musculus
  siRNA target sequence for Csnk1a1 (NM_146087.1,733-751).
cagcatcaatgcacatctt

SEQ ID NO: 498900 - DNA, 19 bp, Mus musculus
  siRNA target sequence for Csnk1a1 (NM_146087.1,776-794).
gacatggaatctttaggat

SEQ ID NO: 498901 - DNA, 19 bp, Mus musculus
  siRNA target sequence for Csnk1a1 (NM_146087.1,781-799).
ggaatctttaggatatgtt

SEQ ID NO: 498902 - DNA, 19 bp, Mus musculus
  siRNA target sequence for Csnk1a1 (NM_146087.1,899-917).
cctgttgaggtgttgtgta

SEQ ID NO: 498903 - DNA, 19 bp, Mus musculus
  siRNA target sequence for Csnk1a1 (NM_146087.1,900-918).
ctgttgaggtgttgtgtaa

SEQ ID NO: 498904 - DNA, 19 bp, Mus musculus
  siRNA target sequence for Csnk1a1 (NM_146087.1,977-995).
gaagctccggattacatgt

SEQ ID NO: 498905 - DNA, 19 bp, Mus musculus
  siRNA target sequence for Csnk1a1 (NM_146087.1,983-1001).
ccggattacatgtatctga

SEQ ID NO: 498906 - DNA, 19 bp, Mus musculus
  siRNA target sequence for Csnk1a1 (NM_146087.1,1004-1022).
cagctattccgcatccttt

SEQ ID NO: 498907 - DNA, 19 bp, Mus musculus
  siRNA target sequence for Csnk1a1 (NM_146087.1,1031-1049).
ctgaaccaccaatatgact

SEQ ID NO: 498908 - DNA, 19 bp, Mus musculus
  siRNA target sequence for Csnk1a1 (NM_146087.1,1037-1055).
caccaatatgactacacat

SEQ ID NO: 498909 - DNA, 19 bp, Mus musculus
  siRNA target sequence for Csnk1d (NM_027874.1,393-411).
cattgctgcgggagaagaa

SEQ ID NO: 498910 - DNA, 19 bp, Mus musculus
  siRNA target sequence for Csnk1d (NM_027874.1,420-438).
caagcttgaatgtgtcaaa

SEQ ID NO: 498911 - DNA, 19 bp, Mus musculus
  siRNA target sequence for Csnk1d (NM_027874.1,499-517).
ggcatccctaccatcagat

SEQ ID NO: 498912 - DNA, 19 bp, Mus musculus
  siRNA target sequence for Csnk1d (NM_027874.1,611-629).
gtctcaaaactgttctgtt

SEQ ID NO: 498913 - DNA, 19 bp, Mus musculus
  siRNA target sequence for Csnk1d (NM_027874.1,639-657).
ccaaatgataagtcgtatt

SEQ ID NO: 498914 - DNA, 19 bp, Mus musculus
  siRNA target sequence for Csnk1d (NM_027874.1,650-668).
gtcgtattgagtacattca

SEQ ID NO: 498915 - DNA, 19 bp, Mus musculus
  siRNA target sequence for Csnk1d (NM_027874.1,652-670).
cgtattgagtacattcatt

SEQ ID NO: 498916 - DNA, 19 bp, Mus musculus
  siRNA target sequence for Csnk1d (NM_027874.1,805-823).
ccctatcgagagaacaaga

SEQ ID NO: 498917 - DNA, 19 bp, Mus musculus
  siRNA target sequence for Csnk1d (NM_027874.1,858-876).
cacgcaccttggcattgaa

SEQ ID NO: 498918 - DNA, 19 bp, Mus musculus
  siRNA target sequence for Csnk1d (NM_027874.1,860-878).
cgcaccttggcattgaaca

SEQ ID NO: 498919 - DNA, 19 bp, Mus musculus
  siRNA target sequence for Csnk1d (NM_027874.1,861-879).
gcaccttggcattgaacaa

SEQ ID NO: 498920 - DNA, 19 bp, Mus musculus
  siRNA target sequence for Csnk1d (NM_027874.1,862-880).
caccttggcattgaacaat

SEQ ID NO: 498921 - DNA, 19 bp, Mus musculus
  siRNA target sequence for Csnk1d (NM_027874.1,908-926).
ggtacgtgctgatgtactt

SEQ ID NO: 498922 - DNA, 19 bp, Mus musculus
  siRNA target sequence for Csnk1d (NM_027874.1,1027-1045).
ctgtgcaagggctatcctt

SEQ ID NO: 498923 - DNA, 19 bp, Mus musculus
  siRNA target sequence for Csnk1d (NM_027874.1,1035-1053).
gggctatccttctgaattt

SEQ ID NO: 498924 - DNA, 19 bp, Mus musculus
  siRNA target sequence for Csnk1d (NM_027874.1,1065-1083).
gaatttctgccgttcctta

SEQ ID NO: 498925 - DNA, 19 bp, Mus musculus
  siRNA target sequence for Csnk1d (NM_027874.1,1071-1089).
ctgccgttccttacgtttt

SEQ ID NO: 498926 - DNA, 19 bp, Mus musculus
  siRNA target sequence for Csnk1d (NM_027874.1,1073-1091).
gccgttccttacgttttga

SEQ ID NO: 498927 - DNA, 19 bp, Mus musculus
  siRNA target sequence for Csnk1d (NM_027874.1,1074-1092).
ccgttccttacgttttgat

SEQ ID NO: 498928 - DNA, 19 bp, Mus musculus
  siRNA target sequence for Csnk1d (NM_027874.1,1079-1097).
ccttacgttttgatgacaa

SEQ ID NO: 498929 - DNA, 19 bp, Mus musculus
  siRNA target sequence for Csnk1d (NM_027874.1,1080-1098).
cttacgttttgatgacaaa

SEQ ID NO: 498930 - DNA, 19 bp, Mus musculus
  siRNA target sequence for Csnk1d (NM_027874.1,1237-1255).
gatcgagaagaacgattaa

SEQ ID NO: 498931 - DNA, 19 bp, Mus musculus
  siRNA target sequence for Csnk1d (NM_027874.1,1506-1524).
gaatagcattcctttcgaa

SEQ ID NO: 498932 - DNA, 19 bp, Mus musculus
  siRNA target sequence for Csnk1e (NM_013767.3,281-299).
gggatcccgtccatcaagt

SEQ ID NO: 498933 - DNA, 19 bp, Mus musculus
  siRNA target sequence for Csnk1e (NM_013767.3,309-327).
ctgagggagactataacgt

SEQ ID NO: 498934 - DNA, 19 bp, Mus musculus
  siRNA target sequence for Csnk1e (NM_013767.3,432-450).
gccgcatcgagtacataca

SEQ ID NO: 498935 - DNA, 19 bp, Mus musculus
  siRNA target sequence for Csnk1e (NM_013767.3,434-452).
cgcatcgagtacatacact

SEQ ID NO: 498936 - DNA, 19 bp, Mus musculus
  siRNA target sequence for Csnk1e (NM_013767.3,568-586).
ccgcacacaccagcatatt

SEQ ID NO: 498937 - DNA, 19 bp, Mus musculus
  siRNA target sequence for Csnk1e (NM_013767.3,824-842).
ccctccgagttctcaacat

SEQ ID NO: 498938 - DNA, 19 bp, Mus musculus
  siRNA target sequence for Csnk1e (NM_013767.3,861-879).
ccctgcggttcgatgataa

SEQ ID NO: 498939 - DNA, 19 bp, Mus musculus
  siRNA target sequence for Csnk1e (NM_013767.3,1150-1168).
ctcccgcatccaacaaact

SEQ ID NO: 498940 - DNA, 19 bp, Mus musculus
  siRNA target sequence for Csnk1e (NM_013767.3,1238-1256).
ggtgcccctgccaatgtct

SEQ ID NO: 498941 - DNA, 19 bp, Mus musculus
  siRNA target sequence for Csnk1g1 (NM_173185.1,449-467).
gatagacaacggacaacta

SEQ ID NO: 498942 - DNA, 19 bp, Mus musculus
  siRNA target sequence for Csnk1g1 (NM_173185.1,586-604).
cggagagctcagattaggt

SEQ ID NO: 498943 - DNA, 19 bp, Mus musculus
  siRNA target sequence for Csnk1g1 (NM_173185.1,587-605).
ggagagctcagattaggta

SEQ ID NO: 498944 - DNA, 19 bp, Mus musculus
  siRNA target sequence for Csnk1g1 (NM_173185.1,592-610).
gctcagattaggtaaaaat

SEQ ID NO: 498945 - DNA, 19 bp, Mus musculus
  siRNA target sequence for Csnk1g1 (NM_173185.1,613-631).
ctacaccaatgaatatgta

SEQ ID NO: 498946 - DNA, 19 bp, Mus musculus
  siRNA target sequence for Csnk1g1 (NM_173185.1,634-652).
cattaaactggaaccaata

SEQ ID NO: 498947 - DNA, 19 bp, Mus musculus
  siRNA target sequence for Csnk1g1 (NM_173185.1,659-677).
cgtgctccacaacttcatt

SEQ ID NO: 498948 - DNA, 19 bp, Mus musculus
  siRNA target sequence for Csnk1g1 (NM_173185.1,660-678).
gtgctccacaacttcattt

SEQ ID NO: 498949 - DNA, 19 bp, Mus musculus
  siRNA target sequence for Csnk1g1 (NM_173185.1,663-681).
ctccacaacttcatttaga

SEQ ID NO: 498950 - DNA, 19 bp, Mus musculus
  siRNA target sequence for Csnk1g1 (NM_173185.1,665-683).
ccacaacttcatttagagt

SEQ ID NO: 498951 - DNA, 19 bp, Mus musculus
  siRNA target sequence for Csnk1g1 (NM_173185.1,722-740).
ctcccacaggtttattact

SEQ ID NO: 498952 - DNA, 19 bp, Mus musculus
  siRNA target sequence for Csnk1g1 (NM_173185.1,811-829).
cctctgtgaccgaacgttt

SEQ ID NO: 498953 - DNA, 19 bp, Mus musculus
  siRNA target sequence for Csnk1g1 (NM_173185.1,812-830).
ctctgtgaccgaacgttta

SEQ ID NO: 498954 - DNA, 19 bp, Mus musculus
  siRNA target sequence for Csnk1g1 (NM_173185.1,814-832).
ctgtgaccgaacgtttact

SEQ ID NO: 498955 - DNA, 19 bp, Mus musculus
  siRNA target sequence for Csnk1g1 (NM_173185.1,816-834).
gtgaccgaacgtttacttt

SEQ ID NO: 498956 - DNA, 19 bp, Mus musculus
  siRNA target sequence for Csnk1g1 (NM_173185.1,818-836).
gaccgaacgtttactttga

SEQ ID NO: 498957 - DNA, 19 bp, Mus musculus
  siRNA target sequence for Csnk1g1 (NM_173185.1,821-839).
cgaacgtttactttgaaga

SEQ ID NO: 498958 - DNA, 19 bp, Mus musculus
  siRNA target sequence for Csnk1g1 (NM_173185.1,831-849).
ctttgaagacggtgttaat

SEQ ID NO: 498959 - DNA, 19 bp, Mus musculus
  siRNA target sequence for Csnk1g1 (NM_173185.1,884-902).
gtacactcaaagaatctta

SEQ ID NO: 498960 - DNA, 19 bp, Mus musculus
  siRNA target sequence for Csnk1g1 (NM_173185.1,940-958).
ccgacaaggcaataagaaa

SEQ ID NO: 498961 - DNA, 19 bp, Mus musculus
  siRNA target sequence for Csnk1g1 (NM_173185.1,987-1005).
gactggccaaggaatatgt

SEQ ID NO: 498962 - DNA, 19 bp, Mus musculus
  siRNA target sequence for Csnk1g1 (NM_173185.1,1017-1035).
ccaaaaaacacatacctta

SEQ ID NO: 498963 - DNA, 19 bp, Mus musculus
  siRNA target sequence for Csnk1g1 (NM_173185.1,1056-1074).
ctggaactgcgagatacat

SEQ ID NO: 498964 - DNA, 19 bp, Mus musculus
  siRNA target sequence for Csnk1g1 (NM_173185.1,1062-1080).
ctgcgagatacatgtctat

SEQ ID NO: 498965 - DNA, 19 bp, Mus musculus
  siRNA target sequence for Csnk1g1 (NM_173185.1,1064-1082).
gcgagatacatgtctatca

SEQ ID NO: 498966 - DNA, 19 bp, Mus musculus
  siRNA target sequence for Csnk1g1 (NM_173185.1,1065-1083).
cgagatacatgtctatcaa

SEQ ID NO: 498967 - DNA, 19 bp, Mus musculus
  siRNA target sequence for Csnk1g1 (NM_173185.1,1075-1093).
gtctatcaacacacatcta

SEQ ID NO: 498968 - DNA, 19 bp, Mus musculus
  siRNA target sequence for Csnk1g1 (NM_173185.1,1181-1199).
ctcaaggctgatacattaa

SEQ ID NO: 498969 - DNA, 19 bp, Mus musculus
  siRNA target sequence for Csnk1g1 (NM_173185.1,1219-1237).
cggtgataccaaaaggaat

SEQ ID NO: 498970 - DNA, 19 bp, Mus musculus
  siRNA target sequence for Csnk1g1 (NM_173185.1,1279-1297).
ggcaacctaccttcgatat

SEQ ID NO: 498971 - DNA, 19 bp, Mus musculus
  siRNA target sequence for Csnk1g1 (NM_173185.1,1293-1311).
gatatgtcaggcgattaga

SEQ ID NO: 498972 - DNA, 19 bp, Mus musculus
  siRNA target sequence for Csnk1g1 (NM_173185.1,1300-1318).
caggcgattagacttcttt

SEQ ID NO: 498973 - DNA, 19 bp, Mus musculus
  siRNA target sequence for Csnk1g1 (NM_173185.1,1302-1320).
ggcgattagacttctttga

SEQ ID NO: 498974 - DNA, 19 bp, Mus musculus
  siRNA target sequence for Csnk1g1 (NM_173185.1,1303-1321).
gcgattagacttctttgaa

SEQ ID NO: 498975 - DNA, 19 bp, Mus musculus
  siRNA target sequence for Csnk1g1 (NM_173185.1,1315-1333).
ctttgaaaaacctgattat

SEQ ID NO: 498976 - DNA, 19 bp, Mus musculus
  siRNA target sequence for Csnk1g1 (NM_173185.1,1319-1337).
gaaaaacctgattatgagt

SEQ ID NO: 498977 - DNA, 19 bp, Mus musculus
  siRNA target sequence for Csnk1g1 (NM_173185.1,1347-1365).
ccctcttcacagatctgtt

SEQ ID NO: 498978 - DNA, 19 bp, Mus musculus
  siRNA target sequence for Csnk1g1 (NM_173185.1,1348-1366).
cctcttcacagatctgttt

SEQ ID NO: 498979 - DNA, 19 bp, Mus musculus
  siRNA target sequence for Csnk1g1 (NM_173185.1,1367-1385).
gaacggaaaggctatacct

SEQ ID NO: 498980 - DNA, 19 bp, Mus musculus
  siRNA target sequence for Csnk1g1 (NM_173185.1,1405-1423).
ggttggaaggcctattcct

SEQ ID NO: 498981 - DNA, 19 bp, Mus musculus
  siRNA target sequence for Csnk1g1 (NM_173185.1,1428-1446).
cagtaggatcagttcatgt

SEQ ID NO: 498982 - DNA, 19 bp, Mus musculus
  siRNA target sequence for Csnk1g1 (NM_173185.1,1489-1507).
cagggatcggccatcacaa

SEQ ID NO: 498983 - DNA, 19 bp, Mus musculus
  siRNA target sequence for Csnk1g1 (NM_173185.1,1492-1510).
ggatcggccatcacaacaa

SEQ ID NO: 498984 - DNA, 19 bp, Mus musculus
  siRNA target sequence for Csnk1g1 (NM_173185.1,1568-1586).
cccagccggcagaccaata

SEQ ID NO: 498985 - DNA, 19 bp, Mus musculus
  siRNA target sequence for Csnk1g1 (NM_173185.1,1618-1636).
ccgccatgggggttcagta

SEQ ID NO: 498986 - DNA, 19 bp, Mus musculus
  siRNA target sequence for Csnk1g1 (NM_173185.1,1639-1657).
ggtggttagctcaaccaat

SEQ ID NO: 498987 - DNA, 19 bp, Mus musculus
  siRNA target sequence for Csnk2a1 (NM_007788.2,484-502).
cgaacccctgccttggttt

SEQ ID NO: 498988 - DNA, 19 bp, Mus musculus
  siRNA target sequence for Csnk2a1 (NM_007788.2,495-513).
cttggtttttgaacatgta

SEQ ID NO: 498989 - DNA, 19 bp, Mus musculus
  siRNA target sequence for Csnk2a1 (NM_007788.2,532-550).
caattgtaccagacgttaa

SEQ ID NO: 498990 - DNA, 19 bp, Mus musculus
  siRNA target sequence for Csnk2a1 (NM_007788.2,540-558).
ccagacgttaacagactat

SEQ ID NO: 498991 - DNA, 19 bp, Mus musculus
  siRNA target sequence for Csnk2a1 (NM_007788.2,545-563).
cgttaacagactatgacat

SEQ ID NO: 498992 - DNA, 19 bp, Mus musculus
  siRNA target sequence for Csnk2a1 (NM_007788.2,546-564).
gttaacagactatgacatt

SEQ ID NO: 498993 - DNA, 19 bp, Mus musculus
  siRNA target sequence for Csnk2a1 (NM_007788.2,551-569).
cagactatgacattcgatt

SEQ ID NO: 498994 - DNA, 19 bp, Mus musculus
  siRNA target sequence for Csnk2a1 (NM_007788.2,553-571).
gactatgacattcgatttt

SEQ ID NO: 498995 - DNA, 19 bp, Mus musculus
  siRNA target sequence for Csnk2a1 (NM_007788.2,559-577).
gacattcgattttacatgt

SEQ ID NO: 498996 - DNA, 19 bp, Mus musculus
  siRNA target sequence for Csnk2a1 (NM_007788.2,641-659).
cccataatgtcatgattga

SEQ ID NO: 498997 - DNA, 19 bp, Mus musculus
  siRNA target sequence for Csnk2a1 (NM_007788.2,642-660).
ccataatgtcatgattgat

SEQ ID NO: 498998 - DNA, 19 bp, Mus musculus
  siRNA target sequence for Csnk2a1 (NM_007788.2,669-687).
cagaaagcttcggctaata

SEQ ID NO: 498999 - DNA, 19 bp, Mus musculus
  siRNA target sequence for Csnk2a1 (NM_007788.2,692-710).
ggggtttagctgagtttta

SEQ ID NO: 499000 - DNA, 19 bp, Mus musculus
  siRNA target sequence for Csnk2a1 (NM_007788.2,695-713).
gtttagctgagttttacca

SEQ ID NO: 499001 - DNA, 19 bp, Mus musculus
  siRNA target sequence for Csnk2a1 (NM_007788.2,910-928).
ctgggaacagaagatttat

SEQ ID NO: 499002 - DNA, 19 bp, Mus musculus
  siRNA target sequence for Csnk2a1 (NM_007788.2,919-937).
gaagatttatatgactata

SEQ ID NO: 499003 - DNA, 19 bp, Mus musculus
  siRNA target sequence for Csnk2a1 (NM_007788.2,940-958).
gacaagtacaacattgaat

SEQ ID NO: 499004 - DNA, 19 bp, Mus musculus
  siRNA target sequence for Csnk2a1 (NM_007788.2,964-982).
ccacgtttcaacgatatct

SEQ ID NO: 499005 - DNA, 19 bp, Mus musculus
  siRNA target sequence for Csnk2a1 (NM_007788.2,965-983).
cacgtttcaacgatatctt

SEQ ID NO: 499006 - DNA, 19 bp, Mus musculus
  siRNA target sequence for Csnk2a1 (NM_007788.2,1068-1086).
ggacaagctgcttcgatat

SEQ ID NO: 499007 - DNA, 19 bp, Mus musculus
  siRNA target sequence for Csnk2a2 (NM_009974.2,436-454).
cccgagctggggtaatcaa

SEQ ID NO: 499008 - DNA, 19 bp, Mus musculus
  siRNA target sequence for Csnk2a2 (NM_009974.2,438-456).
cgagctggggtaatcaaga

SEQ ID NO: 499009 - DNA, 19 bp, Mus musculus
  siRNA target sequence for Csnk2a2 (NM_009974.2,439-457).
gagctggggtaatcaagat

SEQ ID NO: 499010 - DNA, 19 bp, Mus musculus
  siRNA target sequence for Csnk2a2 (NM_009974.2,441-459).
gctggggtaatcaagatga

SEQ ID NO: 499011 - DNA, 19 bp, Mus musculus
  siRNA target sequence for Csnk2a2 (NM_009974.2,463-481).
ccaactggttcgaaaactt

SEQ ID NO: 499012 - DNA, 19 bp, Mus musculus
  siRNA target sequence for Csnk2a2 (NM_009974.2,479-497).
cttggtcggggcaagtata

SEQ ID NO: 499013 - DNA, 19 bp, Mus musculus
  siRNA target sequence for Csnk2a2 (NM_009974.2,483-501).
gtcggggcaagtatagtga

SEQ ID NO: 499014 - DNA, 19 bp, Mus musculus
  siRNA target sequence for Csnk2a2 (NM_009974.2,487-505).
gggcaagtatagtgaagta

SEQ ID NO: 499015 - DNA, 19 bp, Mus musculus
  siRNA target sequence for Csnk2a2 (NM_009974.2,488-506).
ggcaagtatagtgaagtat

SEQ ID NO: 499016 - DNA, 19 bp, Mus musculus
  siRNA target sequence for Csnk2a2 (NM_009974.2,489-507).
gcaagtatagtgaagtatt

SEQ ID NO: 499017 - DNA, 19 bp, Mus musculus
  siRNA target sequence for Csnk2a2 (NM_009974.2,607-625).
ccttcgtggtggaacaaat

SEQ ID NO: 499018 - DNA, 19 bp, Mus musculus
  siRNA target sequence for Csnk2a2 (NM_009974.2,611-629).
cgtggtggaacaaatatca

SEQ ID NO: 499019 - DNA, 19 bp, Mus musculus
  siRNA target sequence for Csnk2a2 (NM_009974.2,612-630).
gtggtggaacaaatatcat

SEQ ID NO: 499020 - DNA, 19 bp, Mus musculus
  siRNA target sequence for Csnk2a2 (NM_009974.2,614-632).
ggtggaacaaatatcatta

SEQ ID NO: 499021 - DNA, 19 bp, Mus musculus
  siRNA target sequence for Csnk2a2 (NM_009974.2,615-633).
gtggaacaaatatcattaa

SEQ ID NO: 499022 - DNA, 19 bp, Mus musculus
  siRNA target sequence for Csnk2a2 (NM_009974.2,618-636).
gaacaaatatcattaagct

SEQ ID NO: 499023 - DNA, 19 bp, Mus musculus
  siRNA target sequence for Csnk2a2 (NM_009974.2,669-687).
caccagctttggtatttga

SEQ ID NO: 499024 - DNA, 19 bp, Mus musculus
  siRNA target sequence for Csnk2a2 (NM_009974.2,674-692).
gctttggtatttgaatata

SEQ ID NO: 499025 - DNA, 19 bp, Mus musculus
  siRNA target sequence for Csnk2a2 (NM_009974.2,679-697).
ggtatttgaatatatcaat

SEQ ID NO: 499026 - DNA, 19 bp, Mus musculus
  siRNA target sequence for Csnk2a2 (NM_009974.2,680-698).
gtatttgaatatatcaata

SEQ ID NO: 499027 - DNA, 19 bp, Mus musculus
  siRNA target sequence for Csnk2a2 (NM_009974.2,702-720).
cagattttaagcaactcta

SEQ ID NO: 499028 - DNA, 19 bp, Mus musculus
  siRNA target sequence for Csnk2a2 (NM_009974.2,736-754).
ctttgatatccggttttat

SEQ ID NO: 499029 - DNA, 19 bp, Mus musculus
  siRNA target sequence for Csnk2a2 (NM_009974.2,740-758).
gatatccggttttatatgt

SEQ ID NO: 499030 - DNA, 19 bp, Mus musculus
  siRNA target sequence for Csnk2a2 (NM_009974.2,767-785).
cttaaagctctggattact

SEQ ID NO: 499031 - DNA, 19 bp, Mus musculus
  siRNA target sequence for Csnk2a2 (NM_009974.2,786-804).
gccacagcaagggaatcat

SEQ ID NO: 499032 - DNA, 19 bp, Mus musculus
  siRNA target sequence for Csnk2a2 (NM_009974.2,822-840).
ctcacaatgtcatgataga

SEQ ID NO: 499033 - DNA, 19 bp, Mus musculus
  siRNA target sequence for Csnk2a2 (NM_009974.2,874-892).
gggtctggcagagttctat

SEQ ID NO: 499034 - DNA, 19 bp, Mus musculus
  siRNA target sequence for Csnk2a2 (NM_009974.2,876-894).
gtctggcagagttctatca

SEQ ID NO: 499035 - DNA, 19 bp, Mus musculus
  siRNA target sequence for Csnk2a2 (NM_009974.2,950-968).
ctccttgtggactatcaga

SEQ ID NO: 499036 - DNA, 19 bp, Mus musculus
  siRNA target sequence for Csnk2a2 (NM_009974.2,958-976).
ggactatcagatgtatgat

SEQ ID NO: 499037 - DNA, 19 bp, Mus musculus
  siRNA target sequence for Csnk2a2 (NM_009974.2,1006-1024).
catgttagcgagcatgata

SEQ ID NO: 499038 - DNA, 19 bp, Mus musculus
  siRNA target sequence for Csnk2a2 (NM_009974.2,1045-1063).
ccacgggcaggacaactat

SEQ ID NO: 499039 - DNA, 19 bp, Mus musculus
  siRNA target sequence for Csnk2a2 (NM_009974.2,1096-1114).
gacagatgaactatatggt

SEQ ID NO: 499040 - DNA, 19 bp, Mus musculus
  siRNA target sequence for Csnk2a2 (NM_009974.2,1103-1121).
gaactatatggttatctga

SEQ ID NO: 499041 - DNA, 19 bp, Mus musculus
  siRNA target sequence for Csnk2a2 (NM_009974.2,1138-1156).
cctagatccacacttcaat

SEQ ID NO: 499042 - DNA, 19 bp, Mus musculus
  siRNA target sequence for Csnk2a2 (NM_009974.2,1146-1164).
cacacttcaatgatatcct

SEQ ID NO: 499043 - DNA, 19 bp, Mus musculus
  siRNA target sequence for Csnk2a2 (NM_009974.2,1178-1196).
cggaagcgctgggaaaact

SEQ ID NO: 499044 - DNA, 19 bp, Mus musculus
  siRNA target sequence for Csnk2a2 (NM_009974.2,1230-1248).
cggaggccctagatcttct

SEQ ID NO: 499045 - DNA, 19 bp, Mus musculus
  siRNA target sequence for Cspg6 (NM_007790.2,132-150).
gttaccgagaccaaacaat

SEQ ID NO: 499046 - DNA, 19 bp, Mus musculus
  siRNA target sequence for Cspg6 (NM_007790.2,136-154).
ccgagaccaaacaattgta

SEQ ID NO: 499047 - DNA, 19 bp, Mus musculus
  siRNA target sequence for Cspg6 (NM_007790.2,138-156).
gagaccaaacaattgtaga

SEQ ID NO: 499048 - DNA, 19 bp, Mus musculus
  siRNA target sequence for Cspg6 (NM_007790.2,159-177).
ccttcagctccaaacataa

SEQ ID NO: 499049 - DNA, 19 bp, Mus musculus
  siRNA target sequence for Cspg6 (NM_007790.2,165-183).
gctccaaacataatgtcat

SEQ ID NO: 499050 - DNA, 19 bp, Mus musculus
  siRNA target sequence for Cspg6 (NM_007790.2,210-228).
gcaacttcttttatgcaat

SEQ ID NO: 499051 - DNA, 19 bp, Mus musculus
  siRNA target sequence for Cspg6 (NM_007790.2,348-366).
cggacaaccggttaccaat

SEQ ID NO: 499052 - DNA, 19 bp, Mus musculus
  siRNA target sequence for Cspg6 (NM_007790.2,349-367).
ggacaaccggttaccaatt

SEQ ID NO: 499053 - DNA, 19 bp, Mus musculus
  siRNA target sequence for Cspg6 (NM_007790.2,352-370).
caaccggttaccaattgat

SEQ ID NO: 499054 - DNA, 19 bp, Mus musculus
  siRNA target sequence for Cspg6 (NM_007790.2,355-373).
ccggttaccaattgataaa

SEQ ID NO: 499055 - DNA, 19 bp, Mus musculus
  siRNA target sequence for Cspg6 (NM_007790.2,357-375).
ggttaccaattgataaaga

SEQ ID NO: 499056 - DNA, 19 bp, Mus musculus
  siRNA target sequence for Cspg6 (NM_007790.2,380-398).
gtttcacttcgaagagtta

SEQ ID NO: 499057 - DNA, 19 bp, Mus musculus
  siRNA target sequence for Cspg6 (NM_007790.2,393-411).
gagttattggtgccaaaaa

SEQ ID NO: 499058 - DNA, 19 bp, Mus musculus
  siRNA target sequence for Cspg6 (NM_007790.2,405-423).
ccaaaaaggatcagtattt

SEQ ID NO: 499059 - DNA, 19 bp, Mus musculus
  siRNA target sequence for Cspg6 (NM_007790.2,416-434).
cagtatttcctagataaga

SEQ ID NO: 499060 - DNA, 19 bp, Mus musculus
  siRNA target sequence for Cspg6 (NM_007790.2,444-462).
cgaaaaatgatgtgatgaa

SEQ ID NO: 499061 - DNA, 19 bp, Mus musculus
  siRNA target sequence for Cspg6 (NM_007790.2,476-494).
gctgggttttccagaagta

SEQ ID NO: 499062 - DNA, 19 bp, Mus musculus
  siRNA target sequence for Cspg6 (NM_007790.2,489-507).
gaagtaatccttattacat

SEQ ID NO: 499063 - DNA, 19 bp, Mus musculus
  siRNA target sequence for Cspg6 (NM_007790.2,537-555).
caacggcaccagattctca

SEQ ID NO: 499064 - DNA, 19 bp, Mus musculus
  siRNA target sequence for Cspg6 (NM_007790.2,582-600).
ctggtactagagtgtatga

SEQ ID NO: 499065 - DNA, 19 bp, Mus musculus
  siRNA target sequence for Cspg6 (NM_007790.2,585-603).
gtactagagtgtatgatga

SEQ ID NO: 499066 - DNA, 19 bp, Mus musculus
  siRNA target sequence for Cspg6 (NM_007790.2,595-613).
gtatgatgaacggaaagaa

SEQ ID NO: 499067 - DNA, 19 bp, Mus musculus
  siRNA target sequence for Cspg6 (NM_007790.2,644-662).
ggcaaacgggaaaagatca

SEQ ID NO: 499068 - DNA, 19 bp, Mus musculus
  siRNA target sequence for Cspg6 (NM_007790.2,650-668).
cgggaaaagatcaatgagt

SEQ ID NO: 499069 - DNA, 19 bp, Mus musculus
  siRNA target sequence for Cspg6 (NM_007790.2,761-779).
ctggagtacaccatctaca

SEQ ID NO: 499070 - DNA, 19 bp, Mus musculus
  siRNA target sequence for Cspg6 (NM_007790.2,833-851).
gaaacgagtggagagaaat

SEQ ID NO: 499071 - DNA, 19 bp, Mus musculus
  siRNA target sequence for Cspg6 (NM_007790.2,1053-1071).
gtgaacagcggaaacgttt

SEQ ID NO: 499072 - DNA, 19 bp, Mus musculus
  siRNA target sequence for Cspg6 (NM_007790.2,1055-1073).
gaacagcggaaacgtttat

SEQ ID NO: 499073 - DNA, 19 bp, Mus musculus
  siRNA target sequence for Cspg6 (NM_007790.2,1058-1076).
cagcggaaacgtttattaa

SEQ ID NO: 499074 - DNA, 19 bp, Mus musculus
  siRNA target sequence for Cspg6 (NM_007790.2,1232-1250).
ggtcgaggaagccagttta

SEQ ID NO: 499075 - DNA, 19 bp, Mus musculus
  siRNA target sequence for Cspg6 (NM_007790.2,1235-1253).
cgaggaagccagtttacgt

SEQ ID NO: 499076 - DNA, 19 bp, Mus musculus
  siRNA target sequence for Cspg6 (NM_007790.2,1242-1260).
gccagtttacgtcaaaaga

SEQ ID NO: 499077 - DNA, 19 bp, Mus musculus
  siRNA target sequence for Cspg6 (NM_007790.2,1246-1264).
gtttacgtcaaaagaagaa

SEQ ID NO: 499078 - DNA, 19 bp, Mus musculus
  siRNA target sequence for Cspg6 (NM_007790.2,1301-1319).
gatcaggcaattaatgata

SEQ ID NO: 499079 - DNA, 19 bp, Mus musculus
  siRNA target sequence for Cspg6 (NM_007790.2,1304-1322).
caggcaattaatgataaga

SEQ ID NO: 499080 - DNA, 19 bp, Mus musculus
  siRNA target sequence for Cspg6 (NM_007790.2,1306-1324).
ggcaattaatgataagaaa

SEQ ID NO: 499081 - DNA, 19 bp, Mus musculus
  siRNA target sequence for Cspg6 (NM_007790.2,1326-1344).
gacagattgctgctattca

SEQ ID NO: 499082 - DNA, 19 bp, Mus musculus
  siRNA target sequence for Cspg6 (NM_007790.2,1334-1352).
gctgctattcacaaggatt

SEQ ID NO: 499083 - DNA, 19 bp, Mus musculus
  siRNA target sequence for Cspg6 (NM_007790.2,1426-1444).
caaagctcgagttgaagaa

SEQ ID NO: 499084 - DNA, 19 bp, Mus musculus
  siRNA target sequence for Cspg6 (NM_007790.2,1484-1502).
gaactacaaagtgaaagaa

SEQ ID NO: 499085 - DNA, 19 bp, Mus musculus
  siRNA target sequence for Cspg6 (NM_007790.2,1603-1621).
ggccattttaaatggaata

SEQ ID NO: 499086 - DNA, 19 bp, Mus musculus
  siRNA target sequence for Cspg6 (NM_007790.2,1616-1634).
ggaatagatagcattaaca

SEQ ID NO: 499087 - DNA, 19 bp, Mus musculus
  siRNA target sequence for Cspg6 (NM_007790.2,1653-1671).
ggcgaaaaggtataaacca

SEQ ID NO: 499088 - DNA, 19 bp, Mus musculus
  siRNA target sequence for Cspg6 (NM_007790.2,1685-1703).
ggctaccatggcatcgtaa

SEQ ID NO: 499089 - DNA, 19 bp, Mus musculus
  siRNA target sequence for Cspg6 (NM_007790.2,1686-1704).
gctaccatggcatcgtaat

SEQ ID NO: 499090 - DNA, 19 bp, Mus musculus
  siRNA target sequence for Cspg6 (NM_007790.2,1694-1712).
ggcatcgtaatgaataact

SEQ ID NO: 499091 - DNA, 19 bp, Mus musculus
  siRNA target sequence for Cspg6 (NM_007790.2,1696-1714).
catcgtaatgaataacttt

SEQ ID NO: 499092 - DNA, 19 bp, Mus musculus
  siRNA target sequence for Cspg6 (NM_007790.2,1752-1770).
ctgctggtaacaggttatt

SEQ ID NO: 499093 - DNA, 19 bp, Mus musculus
  siRNA target sequence for Cspg6 (NM_007790.2,1758-1776).
gtaacaggttattttatca

SEQ ID NO: 499094 - DNA, 19 bp, Mus musculus
  siRNA target sequence for Cspg6 (NM_007790.2,1793-1811).
gaagtcagcacgaaaattt

SEQ ID NO: 499095 - DNA, 19 bp, Mus musculus
  siRNA target sequence for Cspg6 (NM_007790.2,1796-1814).
gtcagcacgaaaattttaa

SEQ ID NO: 499096 - DNA, 19 bp, Mus musculus
  siRNA target sequence for Cspg6 (NM_007790.2,1855-1873).
cctgcctcttaacaagtta

SEQ ID NO: 499097 - DNA, 19 bp, Mus musculus
  siRNA target sequence for Cspg6 (NM_007790.2,1870-1888).
gttagatgtgagagatact

SEQ ID NO: 499098 - DNA, 19 bp, Mus musculus
  siRNA target sequence for Cspg6 (NM_007790.2,1896-1914).
ctgaaactaacgatgctat

SEQ ID NO: 499099 - DNA, 19 bp, Mus musculus
  siRNA target sequence for Cspg6 (NM_007790.2,1910-1928).
gctattcctatgatcagta

SEQ ID NO: 499100 - DNA, 19 bp, Mus musculus
  siRNA target sequence for Cspg6 (NM_007790.2,1911-1929).
ctattcctatgatcagtaa

SEQ ID NO: 499101 - DNA, 19 bp, Mus musculus
  siRNA target sequence for Cspg6 (NM_007790.2,1935-1953).
ggtacaatcccagatttga

SEQ ID NO: 499102 - DNA, 19 bp, Mus musculus
  siRNA target sequence for Cspg6 (NM_007790.2,1994-2012).
cggagcatggaagtttcaa

SEQ ID NO: 499103 - DNA, 19 bp, Mus musculus
  siRNA target sequence for Cspg6 (NM_007790.2,2081-2099).
gctctgactggaggttatt

SEQ ID NO: 499104 - DNA, 19 bp, Mus musculus
  siRNA target sequence for Cspg6 (NM_007790.2,2082-2100).
ctctgactggaggttatta

SEQ ID NO: 499105 - DNA, 19 bp, Mus musculus
  siRNA target sequence for Cspg6 (NM_007790.2,2093-2111).
ggttattacgacacaagaa

SEQ ID NO: 499106 - DNA, 19 bp, Mus musculus
  siRNA target sequence for Cspg6 (NM_007790.2,2109-2127).
gaaagtctcgacttgagtt

SEQ ID NO: 499107 - DNA, 19 bp, Mus musculus
  siRNA target sequence for Cspg6 (NM_007790.2,2115-2133).
ctcgacttgagttacagaa

SEQ ID NO: 499108 - DNA, 19 bp, Mus musculus
  siRNA target sequence for Cspg6 (NM_007790.2,2191-2209).
cctacgcaggaacattgaa

SEQ ID NO: 499109 - DNA, 19 bp, Mus musculus
  siRNA target sequence for Cspg6 (NM_007790.2,2192-2210).
ctacgcaggaacattgaaa

SEQ ID NO: 499110 - DNA, 19 bp, Mus musculus
  siRNA target sequence for Cspg6 (NM_007790.2,2211-2229).
ggattaataatgaaattga

SEQ ID NO: 499111 - DNA, 19 bp, Mus musculus
  siRNA target sequence for Cspg6 (NM_007790.2,2222-2240).
gaaattgaccagttgatga

SEQ ID NO: 499112 - DNA, 19 bp, Mus musculus
  siRNA target sequence for Cspg6 (NM_007790.2,2228-2246).
gaccagttgatgaaccaaa

SEQ ID NO: 499113 - DNA, 19 bp, Mus musculus
  siRNA target sequence for Cspg6 (NM_007790.2,2282-2300).
gcatccagagatagcatat

SEQ ID NO: 499114 - DNA, 19 bp, Mus musculus
  siRNA target sequence for Cspg6 (NM_007790.2,2283-2301).
catccagagatagcatatt

SEQ ID NO: 499115 - DNA, 19 bp, Mus musculus
  siRNA target sequence for Cspg6 (NM_007790.2,2295-2313).
gcatattatcagagatgaa

SEQ ID NO: 499116 - DNA, 19 bp, Mus musculus
  siRNA target sequence for Cspg6 (NM_007790.2,2347-2365).
gaccttcatgccaaagcaa

SEQ ID NO: 499117 - DNA, 19 bp, Mus musculus
  siRNA target sequence for Cspg6 (NM_007790.2,2356-2374).
gccaaagcaacgtagctta

SEQ ID NO: 499118 - DNA, 19 bp, Mus musculus
  siRNA target sequence for Cspg6 (NM_007790.2,2434-2452).
gctaggaacggatttgctt

SEQ ID NO: 499119 - DNA, 19 bp, Mus musculus
  siRNA target sequence for Cspg6 (NM_007790.2,2435-2453).
ctaggaacggatttgcttt

SEQ ID NO: 499120 - DNA, 19 bp, Mus musculus
  siRNA target sequence for Cspg6 (NM_007790.2,2481-2499).
gagtcgacgctctgaatga

SEQ ID NO: 499121 - DNA, 19 bp, Mus musculus
  siRNA target sequence for Cspg6 (NM_007790.2,2485-2503).
cgacgctctgaatgatgaa

SEQ ID NO: 499122 - DNA, 19 bp, Mus musculus
  siRNA target sequence for Cspg6 (NM_007790.2,2486-2504).
gacgctctgaatgatgaaa

SEQ ID NO: 499123 - DNA, 19 bp, Mus musculus
  siRNA target sequence for Cspg6 (NM_007790.2,2534-2552).
ctgctaaatgaaagaatta

SEQ ID NO: 499124 - DNA, 19 bp, Mus musculus
  siRNA target sequence for Cspg6 (NM_007790.2,2654-2672).
gaaggtggtactgttctta

SEQ ID NO: 499125 - DNA, 19 bp, Mus musculus
  siRNA target sequence for Cspg6 (NM_007790.2,2758-2776).
caaaacagaagctggaatt

SEQ ID NO: 499126 - DNA, 19 bp, Mus musculus
  siRNA target sequence for Cspg6 (NM_007790.2,2793-2811).
gtatggagcgctggaaaaa

SEQ ID NO: 499127 - DNA, 19 bp, Mus musculus
  siRNA target sequence for Cspg6 (NM_007790.2,2830-2848).
ggatgccataaatcatgat

SEQ ID NO: 499128 - DNA, 19 bp, Mus musculus
  siRNA target sequence for Cspg6 (NM_007790.2,2834-2852).
gccataaatcatgatacta

SEQ ID NO: 499129 - DNA, 19 bp, Mus musculus
  siRNA target sequence for Cspg6 (NM_007790.2,2978-2996).
ctgaagcagttgtttcgaa

SEQ ID NO: 499130 - DNA, 19 bp, Mus musculus
  siRNA target sequence for Cspg6 (NM_007790.2,3050-3068).
gctctagatcagtttgtga

SEQ ID NO: 499131 - DNA, 19 bp, Mus musculus
  siRNA target sequence for Cspg6 (NM_007790.2,3051-3069).
ctctagatcagtttgtgaa

SEQ ID NO: 499132 - DNA, 19 bp, Mus musculus
  siRNA target sequence for Cspg6 (NM_007790.2,3053-3071).
ctagatcagtttgtgaatt

SEQ ID NO: 499133 - DNA, 19 bp, Mus musculus
  siRNA target sequence for Cspg6 (NM_007790.2,3101-3119).
cggcaagaggaattggata

SEQ ID NO: 499134 - DNA, 19 bp, Mus musculus
  siRNA target sequence for Cspg6 (NM_007790.2,3139-3157).
ggaattgatgaatgtactt

SEQ ID NO: 499135 - DNA, 19 bp, Mus musculus
  siRNA target sequence for Cspg6 (NM_007790.2,3385-3403).
gatcagggtgtcatttaca

SEQ ID NO: 499136 - DNA, 19 bp, Mus musculus
  siRNA target sequence for Cspg6 (NM_007790.2,3495-3513).
gcgaccctgctccttttta

SEQ ID NO: 499137 - DNA, 19 bp, Mus musculus
  siRNA target sequence for Cspg6 (NM_007790.2,3560-3578).
gccgtgtcagatatgatta

SEQ ID NO: 499138 - DNA, 19 bp, Mus musculus
  siRNA target sequence for Cspg6 (NM_007790.2,3587-3605).
gccgtgcatgcccagttta

SEQ ID NO: 499139 - DNA, 19 bp, Mus musculus
  siRNA target sequence for Cspg6 (NM_007790.2,3588-3606).
ccgtgcatgcccagtttat

SEQ ID NO: 499140 - DNA, 19 bp, Mus musculus
  siRNA target sequence for Cspg6 (NM_007790.2,3589-3607).
cgtgcatgcccagtttatt

SEQ ID NO: 499141 - DNA, 19 bp, Mus musculus
  siRNA target sequence for Cspg6 (NM_007790.2,3590-3608).
gtgcatgcccagtttatta

SEQ ID NO: 499142 - DNA, 19 bp, Mus musculus
  siRNA target sequence for Cspg6 (NM_007790.2,3631-3649).
gcttgagtcagctgacaaa

SEQ ID NO: 499143 - DNA, 19 bp, Mus musculus
  siRNA target sequence for Cspg6 (NM_007790.2,3632-3650).
cttgagtcagctgacaaat

SEQ ID NO: 499144 - DNA, 19 bp, Mus musculus
  siRNA target sequence for Cspg6 (NM_007790.2,3656-3674).
ggtgtaaagttcagaaata

SEQ ID NO: 499145 - DNA, 19 bp, Mus musculus
  siRNA target sequence for Cspg6 (NM_007790.2,3701-3719).
gcagagatggccaaagatt

SEQ ID NO: 499146 - DNA, 19 bp, Mus musculus
  siRNA target sequence for Cspg6 (NM_007790.2,3706-3724).
gatggccaaagattttgta

SEQ ID NO: 499147 - DNA, 19 bp, Mus musculus
  siRNA target sequence for D14Ertd732e (NM_023209.1,271-289).
gacgccaaacaaatctgaa

SEQ ID NO: 499148 - DNA, 19 bp, Mus musculus
  siRNA target sequence for D14Ertd732e (NM_023209.1,369-387).
ctggggtcagcgtttacct

SEQ ID NO: 499149 - DNA, 19 bp, Mus musculus
  siRNA target sequence for D14Ertd732e (NM_023209.1,371-389).
ggggtcagcgtttacctaa

SEQ ID NO: 499150 - DNA, 19 bp, Mus musculus
  siRNA target sequence for D14Ertd732e (NM_023209.1,372-390).
gggtcagcgtttacctaat

SEQ ID NO: 499151 - DNA, 19 bp, Mus musculus
  siRNA target sequence for D14Ertd732e (NM_023209.1,374-392).
gtcagcgtttacctaatga

SEQ ID NO: 499152 - DNA, 19 bp, Mus musculus
  siRNA target sequence for D14Ertd732e (NM_023209.1,376-394).
cagcgtttacctaatgaaa

SEQ ID NO: 499153 - DNA, 19 bp, Mus musculus
  siRNA target sequence for D14Ertd732e (NM_023209.1,379-397).
cgtttacctaatgaaaaga

SEQ ID NO: 499154 - DNA, 19 bp, Mus musculus
  siRNA target sequence for D14Ertd732e (NM_023209.1,423-441).
cttgggccgtgaaaaagat

SEQ ID NO: 499155 - DNA, 19 bp, Mus musculus
  siRNA target sequence for D14Ertd732e (NM_023209.1,427-445).
ggccgtgaaaaagataagt

SEQ ID NO: 499156 - DNA, 19 bp, Mus musculus
  siRNA target sequence for D14Ertd732e (NM_023209.1,446-464).
cttttatgcgatgatcatt

SEQ ID NO: 499157 - DNA, 19 bp, Mus musculus
  siRNA target sequence for D14Ertd732e (NM_023209.1,475-493).
gtatcagaagagactaact

SEQ ID NO: 499158 - DNA, 19 bp, Mus musculus
  siRNA target sequence for D14Ertd732e (NM_023209.1,492-510).
ctgatgaagctaagatttt

SEQ ID NO: 499159 - DNA, 19 bp, Mus musculus
  siRNA target sequence for D14Ertd732e (NM_023209.1,501-519).
ctaagattttaaaaaacct

SEQ ID NO: 499160 - DNA, 19 bp, Mus musculus
  siRNA target sequence for D14Ertd732e (NM_023209.1,517-535).
ccttaatcacccaaacatt

SEQ ID NO: 499161 - DNA, 19 bp, Mus musculus
  siRNA target sequence for D14Ertd732e (NM_023209.1,518-536).
cttaatcacccaaacatta

SEQ ID NO: 499162 - DNA, 19 bp, Mus musculus
  siRNA target sequence for D14Ertd732e (NM_023209.1,1132-1150).
cttctgtgtgtgcactaat

SEQ ID NO: 499163 - DNA, 19 bp, Mus musculus
  siRNA target sequence for D14Ertd813e (NM_145458.1,162-180).
gcagtcgcacacggaatat

SEQ ID NO: 499164 - DNA, 19 bp, Mus musculus
  siRNA target sequence for D14Ertd813e (NM_145458.1,163-181).
cagtcgcacacggaatata

SEQ ID NO: 499165 - DNA, 19 bp, Mus musculus
  siRNA target sequence for D14Ertd813e (NM_145458.1,244-262).
gacttcgatctgcttaaca

SEQ ID NO: 499166 - DNA, 19 bp, Mus musculus
  siRNA target sequence for D14Ertd813e (NM_145458.1,261-279).
caacagcttgcaaattaca

SEQ ID NO: 499167 - DNA, 19 bp, Mus musculus
  siRNA target sequence for D14Ertd813e (NM_145458.1,355-373).
ggcctgcagaactacctta

SEQ ID NO: 499168 - DNA, 19 bp, Mus musculus
  siRNA target sequence for D14Ertd813e (NM_145458.1,356-374).
gcctgcagaactaccttaa

SEQ ID NO: 499169 - DNA, 19 bp, Mus musculus
  siRNA target sequence for D14Ertd813e (NM_145458.1,375-393).
cgtcatcatggcaaatcat

SEQ ID NO: 499170 - DNA, 19 bp, Mus musculus
  siRNA target sequence for D14Ertd813e (NM_145458.1,532-550).
gacataggttggaggataa

SEQ ID NO: 499171 - DNA, 19 bp, Mus musculus
  siRNA target sequence for D14Ertd813e (NM_145458.1,603-621).
gctaagctgggctgatctt

SEQ ID NO: 499172 - DNA, 19 bp, Mus musculus
  siRNA target sequence for D14Ertd813e (NM_145458.1,622-640).
ggcccagacaagtacttgt

SEQ ID NO: 499173 - DNA, 19 bp, Mus musculus
  siRNA target sequence for D14Ertd813e (NM_145458.1,636-654).
cttgtcagataaagatttt

SEQ ID NO: 499174 - DNA, 19 bp, Mus musculus
  siRNA target sequence for D14Ertd813e (NM_145458.1,732-750).
ctccgcattgctgattaga

SEQ ID NO: 499175 - DNA, 19 bp, Mus musculus
  siRNA target sequence for D14Ertd813e (NM_145458.1,741-759).
gctgattagagcctttaat

SEQ ID NO: 499176 - DNA, 19 bp, Mus musculus
  siRNA target sequence for D14Ertd813e (NM_145458.1,767-785).
gaactttgaaggatctgat

SEQ ID NO: 499177 - DNA, 19 bp, Mus musculus
  siRNA target sequence for D14Ertd813e (NM_145458.1,849-867).
ccttgaactccagcaaata

SEQ ID NO: 499178 - DNA, 19 bp, Mus musculus
  siRNA target sequence for D14Ertd813e (NM_145458.1,977-995).
ggctgctagacctcgaaaa

SEQ ID NO: 499179 - DNA, 19 bp, Mus musculus
  siRNA target sequence for D14Ertd813e (NM_145458.1,979-997).
ctgctagacctcgaaaact

SEQ ID NO: 499180 - DNA, 19 bp, Mus musculus
  siRNA target sequence for D14Ertd813e (NM_145458.1,981-999).
gctagacctcgaaaactca

SEQ ID NO: 499181 - DNA, 19 bp, Mus musculus
  siRNA target sequence for D14Ertd813e (NM_145458.1,1024-1042).
cgatcctacttcacacaat

SEQ ID NO: 499182 - DNA, 19 bp, Mus musculus
  siRNA target sequence for D14Ertd813e (NM_145458.1,1025-1043).
gatcctacttcacacaatt

SEQ ID NO: 499183 - DNA, 19 bp, Mus musculus
  siRNA target sequence for D14Ertd813e (NM_145458.1,1082-1100).
gttttggccacttactcta

SEQ ID NO: 499184 - DNA, 19 bp, Mus musculus
  siRNA target sequence for D14Ertd813e (NM_145458.1,1088-1106).
gccacttactctatgaaat

SEQ ID NO: 499185 - DNA, 19 bp, Mus musculus
  siRNA target sequence for D14Ertd813e (NM_145458.1,1169-1187).
ctgtggtggccgtattgga

SEQ ID NO: 499186 - DNA, 19 bp, Mus musculus
  siRNA target sequence for D14Ertd813e (NM_145458.1,1188-1206).
gtctacgctgtcttgtgaa

SEQ ID NO: 499187 - DNA, 19 bp, Mus musculus
  siRNA target sequence for D14Ertd813e (NM_145458.1,1229-1247).
ccgtctcccggctcttaca

SEQ ID NO: 499188 - DNA, 19 bp, Mus musculus
  siRNA target sequence for D14Ertd813e (NM_145458.1,1231-1249).
gtctcccggctcttacaga

SEQ ID NO: 499189 - DNA, 19 bp, Mus musculus
  siRNA target sequence for D14Ertd813e (NM_145458.1,1252-1270).
ccattattcagtgatgttt

SEQ ID NO: 499190 - DNA, 19 bp, Mus musculus
  siRNA target sequence for D14Ertd813e (NM_145458.1,1331-1349).
gaattgccaaggaatgcat

SEQ ID NO: 499191 - DNA, 19 bp, Mus musculus
  siRNA target sequence for D14Ertd813e (NM_145458.1,1358-1376).
gactcaccgaggaacagaa

SEQ ID NO: 499192 - DNA, 19 bp, Mus musculus
  siRNA target sequence for D14Ertd813e (NM_145458.1,1384-1402).
caccagcatcgaagactaa

SEQ ID NO: 499193 - DNA, 19 bp, Mus musculus
  siRNA target sequence for D14Ertd813e (NM_145458.1,1462-1480).
cgaaagaagtcaaaacgat

SEQ ID NO: 499194 - DNA, 19 bp, Mus musculus
  siRNA target sequence for D14Ertd813e (NM_145458.1,1477-1495).
cgatctgctgttgaaaaca

SEQ ID NO: 499195 - DNA, 19 bp, Mus musculus
  siRNA target sequence for D14Ertd813e (NM_145458.1,1516-1534).
cacagtaactccaataact

SEQ ID NO: 499196 - DNA, 19 bp, Mus musculus
  siRNA target sequence for D14Ertd813e (NM_145458.1,1518-1536).
cagtaactccaataactca

SEQ ID NO: 499197 - DNA, 19 bp, Mus musculus
  siRNA target sequence for D530020C15Rik (NM_172665.1,336-354).
ggacttcgggtcagtgaat

SEQ ID NO: 499198 - DNA, 19 bp, Mus musculus
  siRNA target sequence for D530020C15Rik (NM_172665.1,359-377).
gtgaaaagacctcgtttat

SEQ ID NO: 499199 - DNA, 19 bp, Mus musculus
  siRNA target sequence for D530020C15Rik (NM_172665.1,397-415).
cctgttagattggcaaata

SEQ ID NO: 499200 - DNA, 19 bp, Mus musculus
  siRNA target sequence for D530020C15Rik (NM_172665.1,398-416).
ctgttagattggcaaatat

SEQ ID NO: 499201 - DNA, 19 bp, Mus musculus
  siRNA target sequence for D530020C15Rik (NM_172665.1,400-418).
gttagattggcaaatataa

SEQ ID NO: 499202 - DNA, 19 bp, Mus musculus
  siRNA target sequence for D530020C15Rik (NM_172665.1,404-422).
gattggcaaatataatgaa

SEQ ID NO: 499203 - DNA, 19 bp, Mus musculus
  siRNA target sequence for D530020C15Rik (NM_172665.1,431-449).
gcctcctccccgacaatct

SEQ ID NO: 499204 - DNA, 19 bp, Mus musculus
  siRNA target sequence for D530020C15Rik (NM_172665.1,432-450).
cctcctccccgacaatctt

SEQ ID NO: 499205 - DNA, 19 bp, Mus musculus
  siRNA target sequence for D530020C15Rik (NM_172665.1,466-484).
gtacagctggtgcaaagtt

SEQ ID NO: 499206 - DNA, 19 bp, Mus musculus
  siRNA target sequence for D530020C15Rik (NM_172665.1,477-495).
gcaaagttggtatatccaa

SEQ ID NO: 499207 - DNA, 19 bp, Mus musculus
  siRNA target sequence for D530020C15Rik (NM_172665.1,478-496).
caaagttggtatatccaaa

SEQ ID NO: 499208 - DNA, 19 bp, Mus musculus
  siRNA target sequence for D530020C15Rik (NM_172665.1,502-520).
caggagttgcttgatttta

SEQ ID NO: 499209 - DNA, 19 bp, Mus musculus
  siRNA target sequence for D530020C15Rik (NM_172665.1,504-522).
ggagttgcttgattttaaa

SEQ ID NO: 499210 - DNA, 19 bp, Mus musculus
  siRNA target sequence for D530020C15Rik (NM_172665.1,588-606).
ccggcacaatgatgtcatt

SEQ ID NO: 499211 - DNA, 19 bp, Mus musculus
  siRNA target sequence for D530020C15Rik (NM_172665.1,616-634).
gcccagggtgtgactgaat

SEQ ID NO: 499212 - DNA, 19 bp, Mus musculus
  siRNA target sequence for D530020C15Rik (NM_172665.1,617-635).
cccagggtgtgactgaata

SEQ ID NO: 499213 - DNA, 19 bp, Mus musculus
  siRNA target sequence for D530020C15Rik (NM_172665.1,665-683).
ccagccaaaatgttcagta

SEQ ID NO: 499214 - DNA, 19 bp, Mus musculus
  siRNA target sequence for D530020C15Rik (NM_172665.1,705-723).
gagtcgcatctcaattaga

SEQ ID NO: 499215 - DNA, 19 bp, Mus musculus
  siRNA target sequence for D530020C15Rik (NM_172665.1,707-725).
gtcgcatctcaattagaat

SEQ ID NO: 499216 - DNA, 19 bp, Mus musculus
  siRNA target sequence for D530020C15Rik (NM_172665.1,711-729).
catctcaattagaatgcta

SEQ ID NO: 499217 - DNA, 19 bp, Mus musculus
  siRNA target sequence for D530020C15Rik (NM_172665.1,716-734).
caattagaatgctactcaa

SEQ ID NO: 499218 - DNA, 19 bp, Mus musculus
  siRNA target sequence for D530020C15Rik (NM_172665.1,730-748).
ctcaaccagcactccttat

SEQ ID NO: 499219 - DNA, 19 bp, Mus musculus
  siRNA target sequence for D530020C15Rik (NM_172665.1,764-782).
gaagtccatctcatcgaaa

SEQ ID NO: 499220 - DNA, 19 bp, Mus musculus
  siRNA target sequence for D530020C15Rik (NM_172665.1,775-793).
catcgaaagcacattggaa

SEQ ID NO: 499221 - DNA, 19 bp, Mus musculus
  siRNA target sequence for D530020C15Rik (NM_172665.1,786-804).
cattggaagcataaatcca

SEQ ID NO: 499222 - DNA, 19 bp, Mus musculus
  siRNA target sequence for D530020C15Rik (NM_172665.1,846-864).
cgctaggcggctttgtgat

SEQ ID NO: 499223 - DNA, 19 bp, Mus musculus
  siRNA target sequence for D530020C15Rik (NM_172665.1,847-865).
gctaggcggctttgtgatt

SEQ ID NO: 499224 - DNA, 19 bp, Mus musculus
  siRNA target sequence for D530020C15Rik (NM_172665.1,852-870).
gcggctttgtgatttgtat

SEQ ID NO: 499225 - DNA, 19 bp, Mus musculus
  siRNA target sequence for D530020C15Rik (NM_172665.1,853-871).
cggctttgtgatttgtatt

SEQ ID NO: 499226 - DNA, 19 bp, Mus musculus
  siRNA target sequence for D530020C15Rik (NM_172665.1,854-872).
ggctttgtgatttgtatta

SEQ ID NO: 499227 - DNA, 19 bp, Mus musculus
  siRNA target sequence for D530020C15Rik (NM_172665.1,855-873).
gctttgtgatttgtattat

SEQ ID NO: 499228 - DNA, 19 bp, Mus musculus
  siRNA target sequence for D530020C15Rik (NM_172665.1,929-947).
caatacaagtggtttatgt

SEQ ID NO: 499229 - DNA, 19 bp, Mus musculus
  siRNA target sequence for D530020C15Rik (NM_172665.1,970-988).
gtgtttgaactgttcaaga

SEQ ID NO: 499230 - DNA, 19 bp, Mus musculus
  siRNA target sequence for D530020C15Rik (NM_172665.1,1017-1035).
cgcggacaaaggcgtttat

SEQ ID NO: 499231 - DNA, 19 bp, Mus musculus
  siRNA target sequence for D530020C15Rik (NM_172665.1,1126-1144).
gacagactcttcaactaca

SEQ ID NO: 499232 - DNA, 19 bp, Mus musculus
  siRNA target sequence for D530020C15Rik (NM_172665.1,1257-1275).
cctaaagctgtattcctta

SEQ ID NO: 499233 - DNA, 19 bp, Mus musculus
  siRNA target sequence for D530020C15Rik (NM_172665.1,1291-1309).
gatgcggttatctacatta

SEQ ID NO: 499234 - DNA, 19 bp, Mus musculus
  siRNA target sequence for D530020C15Rik (NM_172665.1,1335-1353).
gagactccctgtgtacaat

SEQ ID NO: 499235 - DNA, 19 bp, Mus musculus
  siRNA target sequence for D530020C15Rik (NM_172665.1,1412-1430).
gccgagagccgaaagacat

SEQ ID NO: 499236 - DNA, 19 bp, Mus musculus
  siRNA target sequence for D830007F02Rik (NM_175441.2,289-307).
gtcgacagactcttgcatt

SEQ ID NO: 499237 - DNA, 19 bp, Mus musculus
  siRNA target sequence for D830007F02Rik (NM_175441.2,669-687).
gaggcagggagttgaagtt

SEQ ID NO: 499238 - DNA, 19 bp, Mus musculus
  siRNA target sequence for D830007F02Rik (NM_175441.2,779-797).
ccgtagcaatcgacagaat

SEQ ID NO: 499239 - DNA, 19 bp, Mus musculus
  siRNA target sequence for D830007F02Rik (NM_175441.2,863-881).
ctgactgttggctttcaga

SEQ ID NO: 499240 - DNA, 19 bp, Mus musculus
  siRNA target sequence for D830007F02Rik (NM_175441.2,918-936).
gcccctaggaccactaact

SEQ ID NO: 499241 - DNA, 19 bp, Mus musculus
  siRNA target sequence for D830007F02Rik (NM_175441.2,935-953).
ctccagacagtgacattca

SEQ ID NO: 499242 - DNA, 19 bp, Mus musculus
  siRNA target sequence for D830007F02Rik (NM_175441.2,970-988).
cccaggatccctatcaata

SEQ ID NO: 499243 - DNA, 19 bp, Mus musculus
  siRNA target sequence for D830007F02Rik (NM_175441.2,974-992).
ggatccctatcaatatgca

SEQ ID NO: 499244 - DNA, 19 bp, Mus musculus
  siRNA target sequence for D830007F02Rik (NM_175441.2,975-993).
gatccctatcaatatgcaa

SEQ ID NO: 499245 - DNA, 19 bp, Mus musculus
  siRNA target sequence for D830007F02Rik (NM_175441.2,1327-1345).
gaagctggaaggctatctt

SEQ ID NO: 499246 - DNA, 19 bp, Mus musculus
  siRNA target sequence for D830007F02Rik (NM_175441.2,1358-1376).
ctgccattgtggttctaga

SEQ ID NO: 499247 - DNA, 19 bp, Mus musculus
  siRNA target sequence for D830007F02Rik (NM_175441.2,1361-1379).
ccattgtggttctagatga

SEQ ID NO: 499248 - DNA, 19 bp, Mus musculus
  siRNA target sequence for D830007F02Rik (NM_175441.2,1414-1432).
gtagtgagcatcaaagata

SEQ ID NO: 499249 - DNA, 19 bp, Mus musculus
  siRNA target sequence for D830007F02Rik (NM_175441.2,1452-1470).
cacggtatcccaacatgaa

SEQ ID NO: 499250 - DNA, 19 bp, Mus musculus
  siRNA target sequence for D830007F02Rik (NM_175441.2,1612-1630).
ctcagccacgtaaacttga

SEQ ID NO: 499251 - DNA, 19 bp, Mus musculus
  siRNA target sequence for D830007F02Rik (NM_175441.2,1621-1639).
gtaaacttgatccaacttt

SEQ ID NO: 499252 - DNA, 19 bp, Mus musculus
  siRNA target sequence for D830007F02Rik (NM_175441.2,1636-1654).
ctttatgatgcgtttgaga

SEQ ID NO: 499253 - DNA, 19 bp, Mus musculus
  siRNA target sequence for D830007F02Rik (NM_175441.2,1661-1679).
gcagcttcactctgatcat

SEQ ID NO: 499254 - DNA, 19 bp, Mus musculus
  siRNA target sequence for D830007F02Rik (NM_175441.2,1851-1869).
ccagacagggcatcaaatt

SEQ ID NO: 499255 - DNA, 19 bp, Mus musculus
  siRNA target sequence for D830007F02Rik (NM_175441.2,1852-1870).
cagacagggcatcaaatta

SEQ ID NO: 499256 - DNA, 19 bp, Mus musculus
  siRNA target sequence for D830007F02Rik (NM_175441.2,1859-1877).
ggcatcaaattaagatcat

SEQ ID NO: 499257 - DNA, 19 bp, Mus musculus
  siRNA target sequence for D830007F02Rik (NM_175441.2,1860-1878).
gcatcaaattaagatcatt

SEQ ID NO: 499258 - DNA, 19 bp, Mus musculus
  siRNA target sequence for D830007F02Rik (NM_175441.2,1864-1882).
caaattaagatcattgact

SEQ ID NO: 499259 - DNA, 19 bp, Mus musculus
  siRNA target sequence for D830007F02Rik (NM_175441.2,1885-1903).
gggctggctagaagataca

SEQ ID NO: 499260 - DNA, 19 bp, Mus musculus
  siRNA target sequence for D830007F02Rik (NM_175441.2,1886-1904).
ggctggctagaagatacaa

SEQ ID NO: 499261 - DNA, 19 bp, Mus musculus
  siRNA target sequence for D830007F02Rik (NM_175441.2,1963-1981).
gttaactatgagtttgtgt

SEQ ID NO: 499262 - DNA, 19 bp, Mus musculus
  siRNA target sequence for D830007F02Rik (NM_175441.2,1968-1986).
ctatgagtttgtgtcattt

SEQ ID NO: 499263 - DNA, 19 bp, Mus musculus
  siRNA target sequence for D830007F02Rik (NM_175441.2,2066-2084).
cagagaccatgaattttat

SEQ ID NO: 499264 - DNA, 19 bp, Mus musculus
  siRNA target sequence for D830007F02Rik (NM_175441.2,2106-2124).
cgatgctgataccttcaaa

SEQ ID NO: 499265 - DNA, 19 bp, Mus musculus
  siRNA target sequence for D830007F02Rik (NM_175441.2,2156-2174).
cccggttactggtcaaaga

SEQ ID NO: 499266 - DNA, 19 bp, Mus musculus
  siRNA target sequence for D830007F02Rik (NM_175441.2,2158-2176).
cggttactggtcaaagaga

SEQ ID NO: 499267 - DNA, 19 bp, Mus musculus
  siRNA target sequence for D830007F02Rik (NM_175441.2,2159-2177).
ggttactggtcaaagagaa

SEQ ID NO: 499268 - DNA, 19 bp, Mus musculus
  siRNA target sequence for D830007F02Rik (NM_175441.2,2206-2224).
ctgaaacacgagtggttaa

SEQ ID NO: 499269 - DNA, 19 bp, Mus musculus
  siRNA target sequence for D830007F02Rik (NM_175441.2,2208-2226).
gaaacacgagtggttaagt

SEQ ID NO: 499270 - DNA, 19 bp, Mus musculus
  siRNA target sequence for D830007F02Rik (NM_175441.2,2301-2319).
gagtaaatggaaggtattt

SEQ ID NO: 499271 - DNA, 19 bp, Mus musculus
  siRNA target sequence for D8Ertd82e (NM_172911.1,1471-1489).
gaggcccgagcccaagaaa

SEQ ID NO: 499272 - DNA, 19 bp, Mus musculus
  siRNA target sequence for D8Ertd82e (NM_172911.1,1473-1491).
ggcccgagcccaagaaaga

SEQ ID NO: 499273 - DNA, 19 bp, Mus musculus
  siRNA target sequence for D8Ertd82e (NM_172911.1,1508-1526).
catagccagggccaagtat

SEQ ID NO: 499274 - DNA, 19 bp, Mus musculus
  siRNA target sequence for D8Ertd82e (NM_172911.1,1643-1661).
gaggaccacaggactattt

SEQ ID NO: 499275 - DNA, 19 bp, Mus musculus
  siRNA target sequence for D8Ertd82e (NM_172911.1,1710-1728).
cttcgaaccaggacttaca

SEQ ID NO: 499276 - DNA, 19 bp, Mus musculus
  siRNA target sequence for D8Ertd82e (NM_172911.1,1773-1791).
gggagagccatccacataa

SEQ ID NO: 499277 - DNA, 19 bp, Mus musculus
  siRNA target sequence for D8Ertd82e (NM_172911.1,1774-1792).
ggagagccatccacataat

SEQ ID NO: 499278 - DNA, 19 bp, Mus musculus
  siRNA target sequence for D8Ertd82e (NM_172911.1,1823-1841).
gccattccccccaaactgt

SEQ ID NO: 499279 - DNA, 19 bp, Mus musculus
  siRNA target sequence for D8Ertd82e (NM_172911.1,1832-1850).
cccaaactgtccaaaagca

SEQ ID NO: 499280 - DNA, 19 bp, Mus musculus
  siRNA target sequence for D8Ertd82e (NM_172911.1,1923-1941).
gcgtcggaccccaactttt

SEQ ID NO: 499281 - DNA, 19 bp, Mus musculus
  siRNA target sequence for D8Ertd82e (NM_172911.1,1925-1943).
gtcggaccccaacttttgt

SEQ ID NO: 499282 - DNA, 19 bp, Mus musculus
  siRNA target sequence for D8Ertd82e (NM_172911.1,1928-1946).
ggaccccaacttttgtcta

SEQ ID NO: 499283 - DNA, 19 bp, Mus musculus
  siRNA target sequence for D8Ertd82e (NM_172911.1,2086-2104).
ccgccagtgccggatagaa

SEQ ID NO: 499284 - DNA, 19 bp, Mus musculus
  siRNA target sequence for D8Ertd82e (NM_172911.1,2088-2106).
gccagtgccggatagaaga

SEQ ID NO: 499285 - DNA, 19 bp, Mus musculus
  siRNA target sequence for D8Ertd82e (NM_172911.1,2122-2140).
gcaggagttgagtcaaagt

SEQ ID NO: 499286 - DNA, 19 bp, Mus musculus
  siRNA target sequence for D8Ertd82e (NM_172911.1,2123-2141).
caggagttgagtcaaagtt

SEQ ID NO: 499287 - DNA, 19 bp, Mus musculus
  siRNA target sequence for D8Ertd82e (NM_172911.1,2162-2180).
ggtaccgcagaccattcaa

SEQ ID NO: 499288 - DNA, 19 bp, Mus musculus
  siRNA target sequence for D8Ertd82e (NM_172911.1,2225-2243).
gggcagaacagcaaaacta

SEQ ID NO: 499289 - DNA, 19 bp, Mus musculus
  siRNA target sequence for D8Ertd82e (NM_172911.1,2226-2244).
ggcagaacagcaaaactaa

SEQ ID NO: 499290 - DNA, 19 bp, Mus musculus
  siRNA target sequence for D8Ertd82e (NM_172911.1,2494-2512).
cgatggaggtccatcatat

SEQ ID NO: 499291 - DNA, 19 bp, Mus musculus
  siRNA target sequence for D8Ertd82e (NM_172911.1,2630-2648).
ccccagaaaaagatagtga

SEQ ID NO: 499292 - DNA, 19 bp, Mus musculus
  siRNA target sequence for D8Ertd82e (NM_172911.1,2758-2776).
ccatgacgagcctcctttt

SEQ ID NO: 499293 - DNA, 19 bp, Mus musculus
  siRNA target sequence for D8Ertd82e (NM_172911.1,2762-2780).
gacgagcctccttttaact

SEQ ID NO: 499294 - DNA, 19 bp, Mus musculus
  siRNA target sequence for D8Ertd82e (NM_172911.1,3134-3152).
ctgcgcttcaatgagaatt

SEQ ID NO: 499295 - DNA, 19 bp, Mus musculus
  siRNA target sequence for D8Ertd82e (NM_172911.1,3137-3155).
cgcttcaatgagaattact

SEQ ID NO: 499296 - DNA, 19 bp, Mus musculus
  siRNA target sequence for D8Ertd82e (NM_172911.1,3192-3210).
gtgactcgggggatgcaat

SEQ ID NO: 499297 - DNA, 19 bp, Mus musculus
  siRNA target sequence for D8Ertd82e (NM_172911.1,3198-3216).
cgggggatgcaatttacta

SEQ ID NO: 499298 - DNA, 19 bp, Mus musculus
  siRNA target sequence for D8Ertd82e (NM_172911.1,3200-3218).
ggggatgcaatttactact

SEQ ID NO: 499299 - DNA, 19 bp, Mus musculus
  siRNA target sequence for D8Ertd82e (NM_172911.1,3235-3253).
ggacccaggcagcatctat

SEQ ID NO: 499300 - DNA, 19 bp, Mus musculus
  siRNA target sequence for D8Ertd82e (NM_172911.1,3246-3264).
gcatctatgctgtgaaaat

SEQ ID NO: 499301 - DNA, 19 bp, Mus musculus
  siRNA target sequence for D8Ertd82e (NM_172911.1,3306-3324).
catctgtgccggtgcattt

SEQ ID NO: 499302 - DNA, 19 bp, Mus musculus
  siRNA target sequence for D8Ertd82e (NM_172911.1,3309-3327).
ctgtgccggtgcatttcaa

SEQ ID NO: 499303 - DNA, 19 bp, Mus musculus
  siRNA target sequence for D8Ertd82e (NM_172911.1,3895-3913).
ctcccagtaccgcaagttt

SEQ ID NO: 499304 - DNA, 19 bp, Mus musculus
  siRNA target sequence for D8Ertd82e (NM_172911.1,3897-3915).
cccagtaccgcaagtttga

SEQ ID NO: 499305 - DNA, 19 bp, Mus musculus
  siRNA target sequence for D8Ertd82e (NM_172911.1,3898-3916).
ccagtaccgcaagtttgat

SEQ ID NO: 499306 - DNA, 19 bp, Mus musculus
  siRNA target sequence for D8Ertd82e (NM_172911.1,3925-3943).
gacgggcatcctcatctat

SEQ ID NO: 499307 - DNA, 19 bp, Mus musculus
  siRNA target sequence for D8Ertd82e (NM_172911.1,4189-4207).
ggaggtactgtgtaacact

SEQ ID NO: 499308 - DNA, 19 bp, Mus musculus
  siRNA target sequence for D8Ertd82e (NM_172911.1,4232-4250).
cgagcactgatgatgatga

SEQ ID NO: 499309 - DNA, 19 bp, Mus musculus
  siRNA target sequence for D8Ertd82e (NM_172911.1,4353-4371).
ccctgaagctcctacaact

SEQ ID NO: 499310 - DNA, 19 bp, Mus musculus
  siRNA target sequence for Dao1 (NM_010018.1,18-36).
gatcggagcaggagtcatt

SEQ ID NO: 499311 - DNA, 19 bp, Mus musculus
  siRNA target sequence for Dao1 (NM_010018.1,45-63).
cacagccctctgcattcat

SEQ ID NO: 499312 - DNA, 19 bp, Mus musculus
  siRNA target sequence for Dao1 (NM_010018.1,85-103).
ccactgcacatgaagatct

SEQ ID NO: 499313 - DNA, 19 bp, Mus musculus
  siRNA target sequence for Dao1 (NM_010018.1,86-104).
cactgcacatgaagatcta

SEQ ID NO: 499314 - DNA, 19 bp, Mus musculus
  siRNA target sequence for Dao1 (NM_010018.1,198-216).
gtggagccagcaaacgttt

SEQ ID NO: 499315 - DNA, 19 bp, Mus musculus
  siRNA target sequence for Dao1 (NM_010018.1,201-219).
gagccagcaaacgtttgat

SEQ ID NO: 499316 - DNA, 19 bp, Mus musculus
  siRNA target sequence for Dao1 (NM_010018.1,203-221).
gccagcaaacgtttgatta

SEQ ID NO: 499317 - DNA, 19 bp, Mus musculus
  siRNA target sequence for Dao1 (NM_010018.1,307-325).
ccggaccctttctggaaaa

SEQ ID NO: 499318 - DNA, 19 bp, Mus musculus
  siRNA target sequence for Dao1 (NM_010018.1,366-384).
ggacctgttccctgattat

SEQ ID NO: 499319 - DNA, 19 bp, Mus musculus
  siRNA target sequence for Dao1 (NM_010018.1,385-403).
ggctacggctggttcaata

SEQ ID NO: 499320 - DNA, 19 bp, Mus musculus
  siRNA target sequence for Dao1 (NM_010018.1,387-405).
ctacggctggttcaataca

SEQ ID NO: 499321 - DNA, 19 bp, Mus musculus
  siRNA target sequence for Dao1 (NM_010018.1,441-459).
gctaactgagaggttaact

SEQ ID NO: 499322 - DNA, 19 bp, Mus musculus
  siRNA target sequence for Dao1 (NM_010018.1,518-536).
gaggagtggatgtgattat

SEQ ID NO: 499323 - DNA, 19 bp, Mus musculus
  siRNA target sequence for Dao1 (NM_010018.1,521-539).
gagtggatgtgattatcaa

SEQ ID NO: 499324 - DNA, 19 bp, Mus musculus
  siRNA target sequence for Dao1 (NM_010018.1,612-630).
ggtggaggccccttggatt

SEQ ID NO: 499325 - DNA, 19 bp, Mus musculus
  siRNA target sequence for Dao1 (NM_010018.1,613-631).
gtggaggccccttggatta

SEQ ID NO: 499326 - DNA, 19 bp, Mus musculus
  siRNA target sequence for Dao1 (NM_010018.1,615-633).
ggaggccccttggattaaa

SEQ ID NO: 499327 - DNA, 19 bp, Mus musculus
  siRNA target sequence for Dao1 (NM_010018.1,620-638).
ccccttggattaaacactt

SEQ ID NO: 499328 - DNA, 19 bp, Mus musculus
  siRNA target sequence for Dao1 (NM_010018.1,759-777).
ccgtgaccacaataccatt

SEQ ID NO: 499329 - DNA, 19 bp, Mus musculus
  siRNA target sequence for Dao1 (NM_010018.1,760-778).
cgtgaccacaataccattt

SEQ ID NO: 499330 - DNA, 19 bp, Mus musculus
  siRNA target sequence for Dao1 (NM_010018.1,859-877).
cctcaggtccggctagaaa

SEQ ID NO: 499331 - DNA, 19 bp, Mus musculus
  siRNA target sequence for Dao1 (NM_010018.1,865-883).
gtccggctagaaagagaat

SEQ ID NO: 499332 - DNA, 19 bp, Mus musculus
  siRNA target sequence for Dao1 (NM_010018.1,908-926).
cagaggtcatccacaacta

SEQ ID NO: 499333 - DNA, 19 bp, Mus musculus
  siRNA target sequence for Dao1 (NM_010018.1,935-953).
gaggttacgggctcacaat

SEQ ID NO: 499334 - DNA, 19 bp, Mus musculus
  siRNA target sequence for Dapk1 (NM_029653.1,181-199).
cgcagttgtgaagaaatgt

SEQ ID NO: 499335 - DNA, 19 bp, Mus musculus
  siRNA target sequence for Dapk1 (NM_029653.1,193-211).
gaaatgtcgtgagaaaagt

SEQ ID NO: 499336 - DNA, 19 bp, Mus musculus
  siRNA target sequence for Dapk1 (NM_029653.1,342-360).
ccctgcatgaggtctatga

SEQ ID NO: 499337 - DNA, 19 bp, Mus musculus
  siRNA target sequence for Dapk1 (NM_029653.1,452-470).
gaggcaacggaattcctta

SEQ ID NO: 499338 - DNA, 19 bp, Mus musculus
  siRNA target sequence for Dapk1 (NM_029653.1,456-474).
caacggaattccttaagca

SEQ ID NO: 499339 - DNA, 19 bp, Mus musculus
  siRNA target sequence for Dapk1 (NM_029653.1,567-585).
ccaaacctcggatcaagat

SEQ ID NO: 499340 - DNA, 19 bp, Mus musculus
  siRNA target sequence for Dapk1 (NM_029653.1,573-591).
ctcggatcaagatcataga

SEQ ID NO: 499341 - DNA, 19 bp, Mus musculus
  siRNA target sequence for Dapk1 (NM_029653.1,597-615).
gcttggcccataaaattga

SEQ ID NO: 499342 - DNA, 19 bp, Mus musculus
  siRNA target sequence for Dapk1 (NM_029653.1,659-677).
gtggctccggagatagtca

SEQ ID NO: 499343 - DNA, 19 bp, Mus musculus
  siRNA target sequence for Dapk1 (NM_029653.1,663-681).
ctccggagatagtcaacta

SEQ ID NO: 499344 - DNA, 19 bp, Mus musculus
  siRNA target sequence for Dapk1 (NM_029653.1,666-684).
cggagatagtcaactatga

SEQ ID NO: 499345 - DNA, 19 bp, Mus musculus
  siRNA target sequence for Dapk1 (NM_029653.1,714-732).
gcatcggggtaataaccta

SEQ ID NO: 499346 - DNA, 19 bp, Mus musculus
  siRNA target sequence for Dapk1 (NM_029653.1,715-733).
catcggggtaataacctat

SEQ ID NO: 499347 - DNA, 19 bp, Mus musculus
  siRNA target sequence for Dapk1 (NM_029653.1,720-738).
gggtaataacctatatcct

SEQ ID NO: 499348 - DNA, 19 bp, Mus musculus
  siRNA target sequence for Dapk1 (NM_029653.1,927-945).
cctggatcaagcctaaaga

SEQ ID NO: 499349 - DNA, 19 bp, Mus musculus
  siRNA target sequence for Dapk1 (NM_029653.1,977-995).
gcagtaaacatggagaaat

SEQ ID NO: 499350 - DNA, 19 bp, Mus musculus
  siRNA target sequence for Dapk1 (NM_029653.1,980-998).
gtaaacatggagaaattca

SEQ ID NO: 499351 - DNA, 19 bp, Mus musculus
  siRNA target sequence for Dapk1 (NM_029653.1,1007-1025).
gcagctcggaaaaaatgga

SEQ ID NO: 499352 - DNA, 19 bp, Mus musculus
  siRNA target sequence for Dapk1 (NM_029653.1,1028-1046).
caatctgttcgcttgatat

SEQ ID NO: 499353 - DNA, 19 bp, Mus musculus
  siRNA target sequence for Dapk1 (NM_029653.1,1059-1077).
gattatccaggtcattttt

SEQ ID NO: 499354 - DNA, 19 bp, Mus musculus
  siRNA target sequence for Dapk1 (NM_029653.1,1244-1262).
gggacacctccattactga

SEQ ID NO: 499355 - DNA, 19 bp, Mus musculus
  siRNA target sequence for Dapk1 (NM_029653.1,1275-1293).
gtggcaacatccagatgtt

SEQ ID NO: 499356 - DNA, 19 bp, Mus musculus
  siRNA target sequence for Dapk1 (NM_029653.1,1278-1296).
gcaacatccagatgttaca

SEQ ID NO: 499357 - DNA, 19 bp, Mus musculus
  siRNA target sequence for Dapk1 (NM_029653.1,1320-1338).
ggattgacgtccaggataa

SEQ ID NO: 499358 - DNA, 19 bp, Mus musculus
  siRNA target sequence for Dapk1 (NM_029653.1,1333-1351).
ggataagggaggatccaat

SEQ ID NO: 499359 - DNA, 19 bp, Mus musculus
  siRNA target sequence for Dapk1 (NM_029653.1,1418-1436).
cctttggatgttaaagaca

SEQ ID NO: 499360 - DNA, 19 bp, Mus musculus
  siRNA target sequence for Dapk1 (NM_029653.1,1565-1583).
gcctggcatggctattact

SEQ ID NO: 499361 - DNA, 19 bp, Mus musculus
  siRNA target sequence for Dapk1 (NM_029653.1,1588-1606).
ggctaaagctctttgtgaa

SEQ ID NO: 499362 - DNA, 19 bp, Mus musculus
  siRNA target sequence for Dapk1 (NM_029653.1,1607-1625).
gttggctgcaacgtgaata

SEQ ID NO: 499363 - DNA, 19 bp, Mus musculus
  siRNA target sequence for Dapk1 (NM_029653.1,1611-1629).
gctgcaacgtgaatatcaa

SEQ ID NO: 499364 - DNA, 19 bp, Mus musculus
  siRNA target sequence for Dapk1 (NM_029653.1,1615-1633).
caacgtgaatatcaagaat

SEQ ID NO: 499365 - DNA, 19 bp, Mus musculus
  siRNA target sequence for Dapk1 (NM_029653.1,1663-1681).
gtctgccaggggctatcat

SEQ ID NO: 499366 - DNA, 19 bp, Mus musculus
  siRNA target sequence for Dapk1 (NM_029653.1,1668-1686).
ccaggggctatcatgacat

SEQ ID NO: 499367 - DNA, 19 bp, Mus musculus
  siRNA target sequence for Dapk1 (NM_029653.1,1669-1687).
caggggctatcatgacatt

SEQ ID NO: 499368 - DNA, 19 bp, Mus musculus
  siRNA target sequence for Dapk1 (NM_029653.1,1671-1689).
ggggctatcatgacattgt

SEQ ID NO: 499369 - DNA, 19 bp, Mus musculus
  siRNA target sequence for Dapk1 (NM_029653.1,1690-1708).
ggagtgtctggctgaacat

SEQ ID NO: 499370 - DNA, 19 bp, Mus musculus
  siRNA target sequence for Dapk1 (NM_029653.1,1740-1758).
gacacatcgctcttcatct

SEQ ID NO: 499371 - DNA, 19 bp, Mus musculus
  siRNA target sequence for Dapk1 (NM_029653.1,1852-1870).
gcacgtggcctgcaaagat

SEQ ID NO: 499372 - DNA, 19 bp, Mus musculus
  siRNA target sequence for Dapk1 (NM_029653.1,1911-1929).
gcaatctggacatctcaaa

SEQ ID NO: 499373 - DNA, 19 bp, Mus musculus
  siRNA target sequence for Dapk1 (NM_029653.1,1985-2003).
gtccgctacctctgtttga

SEQ ID NO: 499374 - DNA, 19 bp, Mus musculus
  siRNA target sequence for Dapk1 (NM_029653.1,2166-2184).
ccagaatcaagctcaaact

SEQ ID NO: 499375 - DNA, 19 bp, Mus musculus
  siRNA target sequence for Dapk1 (NM_029653.1,2228-2246).
ctcaagtgtgggctgttaa

SEQ ID NO: 499376 - DNA, 19 bp, Mus musculus
  siRNA target sequence for Dapk1 (NM_029653.1,2385-2403).
ggagccgcagcatgatgtt

SEQ ID NO: 499377 - DNA, 19 bp, Mus musculus
  siRNA target sequence for Dapk1 (NM_029653.1,2497-2515).
cgacatccagaatgcttat

SEQ ID NO: 499378 - DNA, 19 bp, Mus musculus
  siRNA target sequence for Dapk1 (NM_029653.1,2498-2516).
gacatccagaatgcttatt

SEQ ID NO: 499379 - DNA, 19 bp, Mus musculus
  siRNA target sequence for Dapk1 (NM_029653.1,2521-2539).
cggagttggtgatttcagt

SEQ ID NO: 499380 - DNA, 19 bp, Mus musculus
  siRNA target sequence for Dapk1 (NM_029653.1,2604-2622).
ccacgtccatccacatcat

SEQ ID NO: 499381 - DNA, 19 bp, Mus musculus
  siRNA target sequence for Dapk1 (NM_029653.1,2614-2632).
ccacatcatcgttttcagt

SEQ ID NO: 499382 - DNA, 19 bp, Mus musculus
  siRNA target sequence for Dapk1 (NM_029653.1,2766-2784).
caacacatgctgacatcat

SEQ ID NO: 499383 - DNA, 19 bp, Mus musculus
  siRNA target sequence for Dapk1 (NM_029653.1,2801-2819).
gctggaggcgagtttggat

SEQ ID NO: 499384 - DNA, 19 bp, Mus musculus
  siRNA target sequence for Dapk1 (NM_029653.1,2802-2820).
ctggaggcgagtttggata

SEQ ID NO: 499385 - DNA, 19 bp, Mus musculus
  siRNA target sequence for Dapk1 (NM_029653.1,2805-2823).
gaggcgagtttggatatga

SEQ ID NO: 499386 - DNA, 19 bp, Mus musculus
  siRNA target sequence for Dapk1 (NM_029653.1,2807-2825).
ggcgagtttggatatgaca

SEQ ID NO: 499387 - DNA, 19 bp, Mus musculus
  siRNA target sequence for Dapk1 (NM_029653.1,2808-2826).
gcgagtttggatatgacaa

SEQ ID NO: 499388 - DNA, 19 bp, Mus musculus
  siRNA target sequence for Dapk1 (NM_029653.1,2942-2960).
cggaatcacctgcaagaaa

SEQ ID NO: 499389 - DNA, 19 bp, Mus musculus
  siRNA target sequence for Dapk1 (NM_029653.1,3192-3210).
cagtgcaggacgtgttact

SEQ ID NO: 499390 - DNA, 19 bp, Mus musculus
  siRNA target sequence for Dapk1 (NM_029653.1,3399-3417).
gtgggactatggtggatat

SEQ ID NO: 499391 - DNA, 19 bp, Mus musculus
  siRNA target sequence for Dapk1 (NM_029653.1,3885-3903).
gtgcgcagaccctgaaaga

SEQ ID NO: 499392 - DNA, 19 bp, Mus musculus
  siRNA target sequence for Dapk1 (NM_029653.1,3989-4007).
gccagtcttggcatggata

SEQ ID NO: 499393 - DNA, 19 bp, Mus musculus
  siRNA target sequence for Dapk1 (NM_029653.1,3990-4008).
ccagtcttggcatggatat

SEQ ID NO: 499394 - DNA, 19 bp, Mus musculus
  siRNA target sequence for Dapk1 (NM_029653.1,3993-4011).
gtcttggcatggatatcca

SEQ ID NO: 499395 - DNA, 19 bp, Mus musculus
  siRNA target sequence for Dapk1 (NM_029653.1,4031-4049).
ctgacccggaggaaactga

SEQ ID NO: 499396 - DNA, 19 bp, Mus musculus
  siRNA target sequence for Dapk1 (NM_029653.1,4152-4170).
gggcttctagggatttcct

SEQ ID NO: 499397 - DNA, 19 bp, Mus musculus
  siRNA target sequence for Dapk1 (NM_029653.1,4221-4239).
gcacggtgggcatccttat

SEQ ID NO: 499398 - DNA, 19 bp, Mus musculus
  siRNA target sequence for Dapk1 (NM_029653.1,4222-4240).
cacggtgggcatccttata

SEQ ID NO: 499399 - DNA, 19 bp, Mus musculus
  siRNA target sequence for Dapk1 (NM_029653.1,4226-4244).
gtgggcatccttatatcca

SEQ ID NO: 499400 - DNA, 19 bp, Mus musculus
  siRNA target sequence for Dapk1 (NM_029653.1,4228-4246).
gggcatccttatatccaaa

SEQ ID NO: 499401 - DNA, 19 bp, Mus musculus
  siRNA target sequence for Dapk1 (NM_029653.1,4231-4249).
catccttatatccaaactt

SEQ ID NO: 499402 - DNA, 19 bp, Mus musculus
  siRNA target sequence for Dapk1 (NM_029653.1,4265-4283).
cgggatgctgcggactttt

SEQ ID NO: 499403 - DNA, 19 bp, Mus musculus
  siRNA target sequence for Dapk1 (NM_029653.1,4266-4284).
gggatgctgcggacttttt

SEQ ID NO: 499404 - DNA, 19 bp, Mus musculus
  siRNA target sequence for Dapk1 (NM_029653.1,4267-4285).
ggatgctgcggacttttta

SEQ ID NO: 499405 - DNA, 19 bp, Mus musculus
  siRNA target sequence for Dapk1 (NM_029653.1,4271-4289).
gctgcggactttttactga

SEQ ID NO: 499406 - DNA, 19 bp, Mus musculus
  siRNA target sequence for Dapk1 (NM_029653.1,4357-4375).
cagtggcacgtcctacaat

SEQ ID NO: 499407 - DNA, 19 bp, Mus musculus
  siRNA target sequence for Dapk1 (NM_029653.1,4361-4379).
ggcacgtcctacaattcca

SEQ ID NO: 499408 - DNA, 19 bp, Mus musculus
  siRNA target sequence for Dapk1 (NM_029653.1,4362-4380).
gcacgtcctacaattccat

SEQ ID NO: 499409 - DNA, 19 bp, Mus musculus
  siRNA target sequence for Dapk1 (NM_029653.1,4363-4381).
cacgtcctacaattccatt

SEQ ID NO: 499410 - DNA, 19 bp, Mus musculus
  siRNA target sequence for Dapk2 (NM_010019.2,104-122).
cgatgaggagcccaaatat

SEQ ID NO: 499411 - DNA, 19 bp, Mus musculus
  siRNA target sequence for Dapk2 (NM_010019.2,408-426).
gtccggaggagaactgttt

SEQ ID NO: 499412 - DNA, 19 bp, Mus musculus
  siRNA target sequence for Dapk2 (NM_010019.2,436-454).
gcccagaaggagtcgttaa

SEQ ID NO: 499413 - DNA, 19 bp, Mus musculus
  siRNA target sequence for Dapk2 (NM_010019.2,492-510).
ggatggggtgaattacctt

SEQ ID NO: 499414 - DNA, 19 bp, Mus musculus
  siRNA target sequence for Dapk2 (NM_010019.2,584-602).
cacacatcaagctgattga

SEQ ID NO: 499415 - DNA, 19 bp, Mus musculus
  siRNA target sequence for Dapk2 (NM_010019.2,609-627).
cctggctcacgaaatagaa

SEQ ID NO: 499416 - DNA, 19 bp, Mus musculus
  siRNA target sequence for Dapk2 (NM_010019.2,612-630).
ggctcacgaaatagaagat

SEQ ID NO: 499417 - DNA, 19 bp, Mus musculus
  siRNA target sequence for Dapk2 (NM_010019.2,774-792).
gggagacacaaaacaagaa

SEQ ID NO: 499418 - DNA, 19 bp, Mus musculus
  siRNA target sequence for Dapk2 (NM_010019.2,790-808).
gaaaccctggcaaatatca

SEQ ID NO: 499419 - DNA, 19 bp, Mus musculus
  siRNA target sequence for Dapk2 (NM_010019.2,899-917).
cccggaaacggcttaccat

SEQ ID NO: 499420 - DNA, 19 bp, Mus musculus
  siRNA target sequence for Dapk3 (NM_007828.1,30-48).
ggatgttgaggaccattat

SEQ ID NO: 499421 - DNA, 19 bp, Mus musculus
  siRNA target sequence for Dapk3 (NM_007828.1,223-241).
cgccaccccaacatcataa

SEQ ID NO: 499422 - DNA, 19 bp, Mus musculus
  siRNA target sequence for Dapk3 (NM_007828.1,299-317).
ccggtggcgagcttttcga

SEQ ID NO: 499423 - DNA, 19 bp, Mus musculus
  siRNA target sequence for Dapk3 (NM_007828.1,325-343).
gccgagaaggagtcattga

SEQ ID NO: 499424 - DNA, 19 bp, Mus musculus
  siRNA target sequence for Dapk3 (NM_007828.1,405-423).
caagcgcatcgcacacttt

SEQ ID NO: 499425 - DNA, 19 bp, Mus musculus
  siRNA target sequence for Dapk3 (NM_007828.1,679-697).
gagacgctgacgaacatct

SEQ ID NO: 499426 - DNA, 19 bp, Mus musculus
  siRNA target sequence for Dapk3 (NM_007828.1,1277-1295).
ccgctgaggtgcaattcgt

SEQ ID NO: 499427 - DNA, 19 bp, Mus musculus
  siRNA target sequence for Dcamkl1 (NM_019978.1,149-167).
cgttcggcagagatatgga

SEQ ID NO: 499428 - DNA, 19 bp, Mus musculus
  siRNA target sequence for Dcamkl1 (NM_019978.1,165-183).
ggagttggagcattttgat

SEQ ID NO: 499429 - DNA, 19 bp, Mus musculus
  siRNA target sequence for Dcamkl1 (NM_019978.1,210-228).
cagggggtcccgtgtgaat

SEQ ID NO: 499430 - DNA, 19 bp, Mus musculus
  siRNA target sequence for Dcamkl1 (NM_019978.1,318-336).
ggttcgattctacagaaat

SEQ ID NO: 499431 - DNA, 19 bp, Mus musculus
  siRNA target sequence for Dcamkl1 (NM_019978.1,340-358).
gaccgctacttcaaaggaa

SEQ ID NO: 499432 - DNA, 19 bp, Mus musculus
  siRNA target sequence for Dcamkl1 (NM_019978.1,342-360).
ccgctacttcaaaggaatt

SEQ ID NO: 499433 - DNA, 19 bp, Mus musculus
  siRNA target sequence for Dcamkl1 (NM_019978.1,376-394).
ccagaccgcttcagatctt

SEQ ID NO: 499434 - DNA, 19 bp, Mus musculus
  siRNA target sequence for Dcamkl1 (NM_019978.1,420-438).
ccgaactctctcggataat

SEQ ID NO: 499435 - DNA, 19 bp, Mus musculus
  siRNA target sequence for Dcamkl1 (NM_019978.1,422-440).
gaactctctcggataatgt

SEQ ID NO: 499436 - DNA, 19 bp, Mus musculus
  siRNA target sequence for Dcamkl1 (NM_019978.1,425-443).
ctctctcggataatgtgaa

SEQ ID NO: 499437 - DNA, 19 bp, Mus musculus
  siRNA target sequence for Dcamkl1 (NM_019978.1,427-445).
ctctcggataatgtgaatt

SEQ ID NO: 499438 - DNA, 19 bp, Mus musculus
  siRNA target sequence for Dcamkl1 (NM_019978.1,454-472).
ggggtgagaaccatctaca

SEQ ID NO: 499439 - DNA, 19 bp, Mus musculus
  siRNA target sequence for Dcamkl1 (NM_019978.1,539-557).
gctccatcgagccctttaa

SEQ ID NO: 499440 - DNA, 19 bp, Mus musculus
  siRNA target sequence for Dcamkl1 (NM_019978.1,665-683).
cggaggttcgggagaataa

SEQ ID NO: 499441 - DNA, 19 bp, Mus musculus
  siRNA target sequence for Dcamkl1 (NM_019978.1,669-687).
ggttcgggagaataaggat

SEQ ID NO: 499442 - DNA, 19 bp, Mus musculus
  siRNA target sequence for Dcamkl1 (NM_019978.1,670-688).
gttcgggagaataaggatt

SEQ ID NO: 499443 - DNA, 19 bp, Mus musculus
  siRNA target sequence for Dcamkl1 (NM_019978.1,675-693).
ggagaataaggatttcatt

SEQ ID NO: 499444 - DNA, 19 bp, Mus musculus
  siRNA target sequence for Dcamkl1 (NM_019978.1,749-767).
gaatcctgctgaacaagaa

SEQ ID NO: 499445 - DNA, 19 bp, Mus musculus
  siRNA target sequence for Dcamkl1 (NM_019978.1,892-910).
ggtgacgatgacattttta

SEQ ID NO: 499446 - DNA, 19 bp, Mus musculus
  siRNA target sequence for Dcamkl1 (NM_019978.1,934-952).
cgttaccaggatgatttct

SEQ ID NO: 499447 - DNA, 19 bp, Mus musculus
  siRNA target sequence for Dcamkl1 (NM_019978.1,973-991).
cgagtggtgaaatcaactt

SEQ ID NO: 499448 - DNA, 19 bp, Mus musculus
  siRNA target sequence for Dcamkl1 (NM_019978.1,1208-1226).
cactttcatccactaaagt

SEQ ID NO: 499449 - DNA, 19 bp, Mus musculus
  siRNA target sequence for Dcamkl1 (NM_019978.1,1332-1350).
ccagattcctgccacaata

SEQ ID NO: 499450 - DNA, 19 bp, Mus musculus
  siRNA target sequence for Dcamkl1 (NM_019978.1,1346-1364).
caataacagagagatacaa

SEQ ID NO: 499451 - DNA, 19 bp, Mus musculus
  siRNA target sequence for Dcamkl1 (NM_019978.1,1362-1380).
caaagtcgggagaacaata

SEQ ID NO: 499452 - DNA, 19 bp, Mus musculus
  siRNA target sequence for Dcamkl1 (NM_019978.1,1388-1406).
gaaattttgctgttgtcaa

SEQ ID NO: 499453 - DNA, 19 bp, Mus musculus
  siRNA target sequence for Dcamkl1 (NM_019978.1,1396-1414).
gctgttgtcaaggaatgta

SEQ ID NO: 499454 - DNA, 19 bp, Mus musculus
  siRNA target sequence for Dcamkl1 (NM_019978.1,1397-1415).
ctgttgtcaaggaatgtat

SEQ ID NO: 499455 - DNA, 19 bp, Mus musculus
  siRNA target sequence for Dcamkl1 (NM_019978.1,1472-1490).
gaggcaaagagcacatgat

SEQ ID NO: 499456 - DNA, 19 bp, Mus musculus
  siRNA target sequence for Dcamkl1 (NM_019978.1,1568-1586).
ctgaactgtatcttgtaat

SEQ ID NO: 499457 - DNA, 19 bp, Mus musculus
  siRNA target sequence for Dcamkl1 (NM_019978.1,1575-1593).
gtatcttgtaatggaatta

SEQ ID NO: 499458 - DNA, 19 bp, Mus musculus
  siRNA target sequence for Dcamkl1 (NM_019978.1,1599-1617).
gggtggagaccttttcgat

SEQ ID NO: 499459 - DNA, 19 bp, Mus musculus
  siRNA target sequence for Dcamkl1 (NM_019978.1,1620-1638).
catcacctccactagcaaa

SEQ ID NO: 499460 - DNA, 19 bp, Mus musculus
  siRNA target sequence for Dcamkl1 (NM_019978.1,1655-1673).
ccagcgggatgctgtacaa

SEQ ID NO: 499461 - DNA, 19 bp, Mus musculus
  siRNA target sequence for Dcamkl1 (NM_019978.1,1866-1884).
cattgcagagactggatat

SEQ ID NO: 499462 - DNA, 19 bp, Mus musculus
  siRNA target sequence for Dcamkl1 (NM_019978.1,1909-1927).
gctggcgtgatcacttata

SEQ ID NO: 499463 - DNA, 19 bp, Mus musculus
  siRNA target sequence for Dcamkl1 (NM_019978.1,1910-1928).
ctggcgtgatcacttatat

SEQ ID NO: 499464 - DNA, 19 bp, Mus musculus
  siRNA target sequence for Dcamkl1 (NM_019978.1,1913-1931).
gcgtgatcacttatatcct

SEQ ID NO: 499465 - DNA, 19 bp, Mus musculus
  siRNA target sequence for Dcamkl1 (NM_019978.1,2023-2041).
ccgtattgggacaatgtgt

SEQ ID NO: 499466 - DNA, 19 bp, Mus musculus
  siRNA target sequence for Dcamkl1 (NM_019978.1,2085-2103).
cgtggaccagagattttca

SEQ ID NO: 499467 - DNA, 19 bp, Mus musculus
  siRNA target sequence for Dcamkl1 (NM_019978.1,2121-2139).
gcatccctgggttaatgat

SEQ ID NO: 499468 - DNA, 19 bp, Mus musculus
  siRNA target sequence for Dcamkl1 (NM_019978.1,2171-2189).
cagtagctggcaaaatcaa

SEQ ID NO: 499469 - DNA, 19 bp, Mus musculus
  siRNA target sequence for Dcamkl1 (NM_019978.1,2248-2266).
gcaaccaccgctcttgata

SEQ ID NO: 499470 - DNA, 19 bp, Mus musculus
  siRNA target sequence for Dcamkl1 (NM_019978.1,2249-2267).
caaccaccgctcttgataa

SEQ ID NO: 499471 - DNA, 19 bp, Mus musculus
  siRNA target sequence for Dcamkl1 (NM_019978.1,2330-2348).
cagctccaccggaattgaa

SEQ ID NO: 499472 - DNA, 19 bp, Mus musculus
  siRNA target sequence for Dcamkl1 (NM_019978.1,2332-2350).
gctccaccggaattgaact

SEQ ID NO: 499473 - DNA, 19 bp, Mus musculus
  siRNA target sequence for Dck (NM_007832.2,132-150).
gggacccgcatcaagaaga

SEQ ID NO: 499474 - DNA, 19 bp, Mus musculus
  siRNA target sequence for Dck (NM_007832.2,184-202).
caacgtttgtgaatatcct

SEQ ID NO: 499475 - DNA, 19 bp, Mus musculus
  siRNA target sequence for Dck (NM_007832.2,308-326).
gagcggtggaaatgttctt

SEQ ID NO: 499476 - DNA, 19 bp, Mus musculus
  siRNA target sequence for Dck (NM_007832.2,311-329).
cggtggaaatgttcttcaa

SEQ ID NO: 499477 - DNA, 19 bp, Mus musculus
  siRNA target sequence for Dck (NM_007832.2,345-363).
cctgaacggtggtctttca

SEQ ID NO: 499478 - DNA, 19 bp, Mus musculus
  siRNA target sequence for Dck (NM_007832.2,358-376).
ctttcaccttccagtcata

SEQ ID NO: 499479 - DNA, 19 bp, Mus musculus
  siRNA target sequence for Dck (NM_007832.2,416-434).
caatggcaagctcaaagat

SEQ ID NO: 499480 - DNA, 19 bp, Mus musculus
  siRNA target sequence for Dck (NM_007832.2,444-462).
cctgtattattttttgaaa

SEQ ID NO: 499481 - DNA, 19 bp, Mus musculus
  siRNA target sequence for Dck (NM_007832.2,470-488).
gtatagtgacaggtacatt

SEQ ID NO: 499482 - DNA, 19 bp, Mus musculus
  siRNA target sequence for Dck (NM_007832.2,482-500).
gtacattttcgcttctaat

SEQ ID NO: 499483 - DNA, 19 bp, Mus musculus
  siRNA target sequence for Dck (NM_007832.2,492-510).
gcttctaatttgtacgaat

SEQ ID NO: 499484 - DNA, 19 bp, Mus musculus
  siRNA target sequence for Dck (NM_007832.2,496-514).
ctaatttgtacgaatctga

SEQ ID NO: 499485 - DNA, 19 bp, Mus musculus
  siRNA target sequence for Dck (NM_007832.2,529-547).
cagagtggaccatatatca

SEQ ID NO: 499486 - DNA, 19 bp, Mus musculus
  siRNA target sequence for Dck (NM_007832.2,580-598).
gccaaagccttgaattgga

SEQ ID NO: 499487 - DNA, 19 bp, Mus musculus
  siRNA target sequence for Dck (NM_007832.2,581-599).
ccaaagccttgaattggat

SEQ ID NO: 499488 - DNA, 19 bp, Mus musculus
  siRNA target sequence for Dck (NM_007832.2,586-604).
gccttgaattggatggaat

SEQ ID NO: 499489 - DNA, 19 bp, Mus musculus
  siRNA target sequence for Dck (NM_007832.2,587-605).
ccttgaattggatggaata

SEQ ID NO: 499490 - DNA, 19 bp, Mus musculus
  siRNA target sequence for Dck (NM_007832.2,615-633).
cgagctactcccgagaaat

SEQ ID NO: 499491 - DNA, 19 bp, Mus musculus
  siRNA target sequence for Dck (NM_007832.2,619-637).
ctactcccgagaaatgctt

SEQ ID NO: 499492 - DNA, 19 bp, Mus musculus
  siRNA target sequence for Dck (NM_007832.2,624-642).
cccgagaaatgcttaaaca

SEQ ID NO: 499493 - DNA, 19 bp, Mus musculus
  siRNA target sequence for Dck (NM_007832.2,626-644).
cgagaaatgcttaaacaga

SEQ ID NO: 499494 - DNA, 19 bp, Mus musculus
  siRNA target sequence for Dck (NM_007832.2,634-652).
gcttaaacagaatatacct

SEQ ID NO: 499495 - DNA, 19 bp, Mus musculus
  siRNA target sequence for Dck (NM_007832.2,635-653).
cttaaacagaatataccta

SEQ ID NO: 499496 - DNA, 19 bp, Mus musculus
  siRNA target sequence for Dck (NM_007832.2,675-693).
ggcattcctcttgaatatt

SEQ ID NO: 499497 - DNA, 19 bp, Mus musculus
  siRNA target sequence for Dck (NM_007832.2,676-694).
gcattcctcttgaatattt

SEQ ID NO: 499498 - DNA, 19 bp, Mus musculus
  siRNA target sequence for Dck (NM_007832.2,681-699).
cctcttgaatatttagaga

SEQ ID NO: 499499 - DNA, 19 bp, Mus musculus
  siRNA target sequence for Dck (NM_007832.2,728-746).
ccttcatcggactctgaaa

SEQ ID NO: 499500 - DNA, 19 bp, Mus musculus
  siRNA target sequence for Dck (NM_007832.2,729-747).
cttcatcggactctgaaaa

SEQ ID NO: 499501 - DNA, 19 bp, Mus musculus
  siRNA target sequence for Dck (NM_007832.2,732-750).
catcggactctgaaaacca

SEQ ID NO: 499502 - DNA, 19 bp, Mus musculus
  siRNA target sequence for Dck (NM_007832.2,782-800).
cacactggatgttaatgaa

SEQ ID NO: 499503 - DNA, 19 bp, Mus musculus
  siRNA target sequence for Dck (NM_007832.2,816-834).
cacgaaagcctggttgaaa

SEQ ID NO: 499504 - DNA, 19 bp, Mus musculus
  siRNA target sequence for Dck (NM_007832.2,843-861).
gaatttctgagtactttgt

SEQ ID NO: 499505 - DNA, 19 bp, Mus musculus
  siRNA target sequence for Ddr1 (NM_007584.1,674-692).
gatggactcctgtcatata

SEQ ID NO: 499506 - DNA, 19 bp, Mus musculus
  siRNA target sequence for Ddr1 (NM_007584.1,704-722).
gggcagaccatgcagttat

SEQ ID NO: 499507 - DNA, 19 bp, Mus musculus
  siRNA target sequence for Ddr1 (NM_007584.1,742-760).
caatgattccacttacgat

SEQ ID NO: 499508 - DNA, 19 bp, Mus musculus
  siRNA target sequence for Ddr1 (NM_007584.1,818-836).
gtgggcctggatgatttca

SEQ ID NO: 499509 - DNA, 19 bp, Mus musculus
  siRNA target sequence for Ddr1 (NM_007584.1,1011-1029).
gggtggaatgccggtttaa

SEQ ID NO: 499510 - DNA, 19 bp, Mus musculus
  siRNA target sequence for Ddr1 (NM_007584.1,1012-1030).
ggtggaatgccggtttaaa

SEQ ID NO: 499511 - DNA, 19 bp, Mus musculus
  siRNA target sequence for Ddr1 (NM_007584.1,1013-1031).
gtggaatgccggtttaaaa

SEQ ID NO: 499512 - DNA, 19 bp, Mus musculus
  siRNA target sequence for Ddr1 (NM_007584.1,1165-1183).
ctttgcaggtccttggtta

SEQ ID NO: 499513 - DNA, 19 bp, Mus musculus
  siRNA target sequence for Ddr1 (NM_007584.1,1725-1743).
cctgcagtggggactatat

SEQ ID NO: 499514 - DNA, 19 bp, Mus musculus
  siRNA target sequence for Ddr1 (NM_007584.1,1789-1807).
gaacagcgtcccccattat

SEQ ID NO: 499515 - DNA, 19 bp, Mus musculus
  siRNA target sequence for Ddr1 (NM_007584.1,1945-1963).
gcttggcgagggccaattt

SEQ ID NO: 499516 - DNA, 19 bp, Mus musculus
  siRNA target sequence for Ddr1 (NM_007584.1,1969-1987).
ggtacacctgtgtgaagta

SEQ ID NO: 499517 - DNA, 19 bp, Mus musculus
  siRNA target sequence for Ddr1 (NM_007584.1,2316-2334).
gctaccctatgctgttaca

SEQ ID NO: 499518 - DNA, 19 bp, Mus musculus
  siRNA target sequence for Ddr1 (NM_007584.1,2413-2431).
ctgcttggttggggaaaat

SEQ ID NO: 499519 - DNA, 19 bp, Mus musculus
  siRNA target sequence for Ddr1 (NM_007584.1,2425-2443).
ggaaaatttcaccatcaaa

SEQ ID NO: 499520 - DNA, 19 bp, Mus musculus
  siRNA target sequence for Ddr1 (NM_007584.1,2426-2444).
gaaaatttcaccatcaaaa

SEQ ID NO: 499521 - DNA, 19 bp, Mus musculus
  siRNA target sequence for Ddr1 (NM_007584.1,2457-2475).
gcatgagccggaatctcta

SEQ ID NO: 499522 - DNA, 19 bp, Mus musculus
  siRNA target sequence for Ddr1 (NM_007584.1,2471-2489).
ctctacgctggggattatt

SEQ ID NO: 499523 - DNA, 19 bp, Mus musculus
  siRNA target sequence for Ddr1 (NM_007584.1,2532-2550).
cttgggagtgcattctcat

SEQ ID NO: 499524 - DNA, 19 bp, Mus musculus
  siRNA target sequence for Ddr2 (NM_022563.1,754-772).
cttgcgaaccctacacttt

SEQ ID NO: 499525 - DNA, 19 bp, Mus musculus
  siRNA target sequence for Ddr2 (NM_022563.1,758-776).
cgaaccctacactttatca

SEQ ID NO: 499526 - DNA, 19 bp, Mus musculus
  siRNA target sequence for Ddr2 (NM_022563.1,827-845).
gcacccatgtacaagatca

SEQ ID NO: 499527 - DNA, 19 bp, Mus musculus
  siRNA target sequence for Ddr2 (NM_022563.1,831-849).
ccatgtacaagatcaacta

SEQ ID NO: 499528 - DNA, 19 bp, Mus musculus
  siRNA target sequence for Ddr2 (NM_022563.1,901-919).
ggtgcttgatggaaacagt

SEQ ID NO: 499529 - DNA, 19 bp, Mus musculus
  siRNA target sequence for Ddr2 (NM_022563.1,902-920).
gtgcttgatggaaacagta

SEQ ID NO: 499530 - DNA, 19 bp, Mus musculus
  siRNA target sequence for Ddr2 (NM_022563.1,916-934).
cagtaacccttatgatgta

SEQ ID NO: 499531 - DNA, 19 bp, Mus musculus
  siRNA target sequence for Ddr2 (NM_022563.1,957-975).
ccatcgtcgccagatttgt

SEQ ID NO: 499532 - DNA, 19 bp, Mus musculus
  siRNA target sequence for Ddr2 (NM_022563.1,958-976).
catcgtcgccagatttgtt

SEQ ID NO: 499533 - DNA, 19 bp, Mus musculus
  siRNA target sequence for Ddr2 (NM_022563.1,1018-1036).
gagggttgagctttatggt

SEQ ID NO: 499534 - DNA, 19 bp, Mus musculus
  siRNA target sequence for Ddr2 (NM_022563.1,1190-1208).
gtatccggcctggatgatt

SEQ ID NO: 499535 - DNA, 19 bp, Mus musculus
  siRNA target sequence for Ddr2 (NM_022563.1,1253-1271).
gtgggatggcggaacgaaa

SEQ ID NO: 499536 - DNA, 19 bp, Mus musculus
  siRNA target sequence for Ddr2 (NM_022563.1,1272-1290).
gtgctaccaacggtttcat

SEQ ID NO: 499537 - DNA, 19 bp, Mus musculus
  siRNA target sequence for Ddr2 (NM_022563.1,1275-1293).
ctaccaacggtttcattga

SEQ ID NO: 499538 - DNA, 19 bp, Mus musculus
  siRNA target sequence for Ddr2 (NM_022563.1,1278-1296).
ccaacggtttcattgagat

SEQ ID NO: 499539 - DNA, 19 bp, Mus musculus
  siRNA target sequence for Ddr2 (NM_022563.1,1284-1302).
gtttcattgagatcatgtt

SEQ ID NO: 499540 - DNA, 19 bp, Mus musculus
  siRNA target sequence for Ddr2 (NM_022563.1,1310-1328).
gaccgaatcaggaatttta

SEQ ID NO: 499541 - DNA, 19 bp, Mus musculus
  siRNA target sequence for Ddr2 (NM_022563.1,1312-1330).
ccgaatcaggaattttact

SEQ ID NO: 499542 - DNA, 19 bp, Mus musculus
  siRNA target sequence for Ddr2 (NM_022563.1,1313-1331).
cgaatcaggaattttacta

SEQ ID NO: 499543 - DNA, 19 bp, Mus musculus
  siRNA target sequence for Ddr2 (NM_022563.1,1362-1380).
ctaaaggtgtgaagatttt

SEQ ID NO: 499544 - DNA, 19 bp, Mus musculus
  siRNA target sequence for Ddr2 (NM_022563.1,1384-1402).
ggaggtccagtgctacttt

SEQ ID NO: 499545 - DNA, 19 bp, Mus musculus
  siRNA target sequence for Ddr2 (NM_022563.1,1469-1487).
cccagtgcccggtttgtca

SEQ ID NO: 499546 - DNA, 19 bp, Mus musculus
  siRNA target sequence for Ddr2 (NM_022563.1,1518-1536).
ccatcaagtgccaatacca

SEQ ID NO: 499547 - DNA, 19 bp, Mus musculus
  siRNA target sequence for Ddr2 (NM_022563.1,1522-1540).
caagtgccaataccatttt

SEQ ID NO: 499548 - DNA, 19 bp, Mus musculus
  siRNA target sequence for Ddr2 (NM_022563.1,1541-1559).
gccgacacgtggatgatgt

SEQ ID NO: 499549 - DNA, 19 bp, Mus musculus
  siRNA target sequence for Ddr2 (NM_022563.1,1542-1560).
ccgacacgtggatgatgtt

SEQ ID NO: 499550 - DNA, 19 bp, Mus musculus
  siRNA target sequence for Ddr2 (NM_022563.1,1544-1562).
gacacgtggatgatgttca

SEQ ID NO: 499551 - DNA, 19 bp, Mus musculus
  siRNA target sequence for Ddr2 (NM_022563.1,1567-1585).
gatcactttccaatcagat

SEQ ID NO: 499552 - DNA, 19 bp, Mus musculus
  siRNA target sequence for Ddr2 (NM_022563.1,1749-1767).
ggcagttctggcagaagat

SEQ ID NO: 499553 - DNA, 19 bp, Mus musculus
  siRNA target sequence for Ddr2 (NM_022563.1,1879-1897).
ggagtccaactctacttat

SEQ ID NO: 499554 - DNA, 19 bp, Mus musculus
  siRNA target sequence for Ddr2 (NM_022563.1,1882-1900).
gtccaactctacttatgat

SEQ ID NO: 499555 - DNA, 19 bp, Mus musculus
  siRNA target sequence for Ddr2 (NM_022563.1,1890-1908).
ctacttatgatcgaatctt

SEQ ID NO: 499556 - DNA, 19 bp, Mus musculus
  siRNA target sequence for Ddr2 (NM_022563.1,1948-1966).
ccgaaagcttccagagttt

SEQ ID NO: 499557 - DNA, 19 bp, Mus musculus
  siRNA target sequence for Ddr2 (NM_022563.1,2049-2067).
cagaagccgacatagtgaa

SEQ ID NO: 499558 - DNA, 19 bp, Mus musculus
  siRNA target sequence for Ddr2 (NM_022563.1,2465-2483).
gatcttaatcagtttcttt

SEQ ID NO: 499559 - DNA, 19 bp, Mus musculus
  siRNA target sequence for Ddr2 (NM_022563.1,2495-2513).
cctctgagttcctgttcta

SEQ ID NO: 499560 - DNA, 19 bp, Mus musculus
  siRNA target sequence for Ddr2 (NM_022563.1,2500-2518).
gagttcctgttctagtgat

SEQ ID NO: 499561 - DNA, 19 bp, Mus musculus
  siRNA target sequence for Ddr2 (NM_022563.1,2614-2632).
ggccacacgaaactgttta

SEQ ID NO: 499562 - DNA, 19 bp, Mus musculus
  siRNA target sequence for Ddr2 (NM_022563.1,2616-2634).
ccacacgaaactgtttagt

SEQ ID NO: 499563 - DNA, 19 bp, Mus musculus
  siRNA target sequence for Ddr2 (NM_022563.1,2940-2958).
gccccgactctgtgtataa

SEQ ID NO: 499564 - DNA, 19 bp, Mus musculus
  siRNA target sequence for Dguok (NM_013764.1,119-137).
ccgaaggctctgcattgaa

SEQ ID NO: 499565 - DNA, 19 bp, Mus musculus
  siRNA target sequence for Dguok (NM_013764.1,203-221).
ggtggcgacagaacctata

SEQ ID NO: 499566 - DNA, 19 bp, Mus musculus
  siRNA target sequence for Dguok (NM_013764.1,206-224).
ggcgacagaacctatagca

SEQ ID NO: 499567 - DNA, 19 bp, Mus musculus
  siRNA target sequence for Dguok (NM_013764.1,315-333).
gcacgatggtcctacacat

SEQ ID NO: 499568 - DNA, 19 bp, Mus musculus
  siRNA target sequence for Dguok (NM_013764.1,316-334).
cacgatggtcctacacatt

SEQ ID NO: 499569 - DNA, 19 bp, Mus musculus
  siRNA target sequence for Dguok (NM_013764.1,444-462).
gacaggtatatctttgcaa

SEQ ID NO: 499570 - DNA, 19 bp, Mus musculus
  siRNA target sequence for Dguok (NM_013764.1,449-467).
gtatatctttgcaaagaat

SEQ ID NO: 499571 - DNA, 19 bp, Mus musculus
  siRNA target sequence for Dguok (NM_013764.1,545-563).
cgcaaaccggcttttgtta

SEQ ID NO: 499572 - DNA, 19 bp, Mus musculus
  siRNA target sequence for Dguok (NM_013764.1,560-578).
gttacacggcttcatctat

SEQ ID NO: 499573 - DNA, 19 bp, Mus musculus
  siRNA target sequence for Dguok (NM_013764.1,681-699).
cacgaagactggtttatta

SEQ ID NO: 499574 - DNA, 19 bp, Mus musculus
  siRNA target sequence for Dguok (NM_013764.1,684-702).
gaagactggtttattaaca

SEQ ID NO: 499575 - DNA, 19 bp, Mus musculus
  siRNA target sequence for Dlat (NM_145614.2,633-651).
catagcccgctgggaaaaa

SEQ ID NO: 499576 - DNA, 19 bp, Mus musculus
  siRNA target sequence for Dlat (NM_145614.2,669-687).
cagtgagggtgatctaatt

SEQ ID NO: 499577 - DNA, 19 bp, Mus musculus
  siRNA target sequence for Dlat (NM_145614.2,728-746).
gcctggaggagtgctatat

SEQ ID NO: 499578 - DNA, 19 bp, Mus musculus
  siRNA target sequence for Dlat (NM_145614.2,784-802).
ccagttgggtccatcatct

SEQ ID NO: 499579 - DNA, 19 bp, Mus musculus
  siRNA target sequence for Dlat (NM_145614.2,825-843).
ggatattgaggcctttaaa

SEQ ID NO: 499580 - DNA, 19 bp, Mus musculus
  siRNA target sequence for Dlat (NM_145614.2,943-961).
cccggtagctcctatccta

SEQ ID NO: 499581 - DNA, 19 bp, Mus musculus
  siRNA target sequence for Dlat (NM_145614.2,953-971).
cctatcctactcatatgca

SEQ ID NO: 499582 - DNA, 19 bp, Mus musculus
  siRNA target sequence for Dlat (NM_145614.2,959-977).
ctactcatatgcagattgt

SEQ ID NO: 499583 - DNA, 19 bp, Mus musculus
  siRNA target sequence for Dlat (NM_145614.2,962-980).
ctcatatgcagattgttct

SEQ ID NO: 499584 - DNA, 19 bp, Mus musculus
  siRNA target sequence for Dlat (NM_145614.2,1089-1107).
ggccaccataggctttgaa

SEQ ID NO: 499585 - DNA, 19 bp, Mus musculus
  siRNA target sequence for Dlat (NM_145614.2,1091-1109).
ccaccataggctttgaagt

SEQ ID NO: 499586 - DNA, 19 bp, Mus musculus
  siRNA target sequence for Dlat (NM_145614.2,1092-1110).
caccataggctttgaagta

SEQ ID NO: 499587 - DNA, 19 bp, Mus musculus
  siRNA target sequence for Dlat (NM_145614.2,1094-1112).
ccataggctttgaagtaca

SEQ ID NO: 499588 - DNA, 19 bp, Mus musculus
  siRNA target sequence for Dlat (NM_145614.2,1095-1113).
cataggctttgaagtacaa

SEQ ID NO: 499589 - DNA, 19 bp, Mus musculus
  siRNA target sequence for Dlat (NM_145614.2,1168-1186).
ctgggagctccactatgta

SEQ ID NO: 499590 - DNA, 19 bp, Mus musculus
  siRNA target sequence for Dlat (NM_145614.2,1171-1189).
ggagctccactatgtatca

SEQ ID NO: 499591 - DNA, 19 bp, Mus musculus
  siRNA target sequence for Dlat (NM_145614.2,1172-1190).
gagctccactatgtatcat

SEQ ID NO: 499592 - DNA, 19 bp, Mus musculus
  siRNA target sequence for Dlat (NM_145614.2,1175-1193).
ctccactatgtatcatagt

SEQ ID NO: 499593 - DNA, 19 bp, Mus musculus
  siRNA target sequence for Dlat (NM_145614.2,1180-1198).
ctatgtatcatagtagaaa

SEQ ID NO: 499594 - DNA, 19 bp, Mus musculus
  siRNA target sequence for Dlat (NM_145614.2,1184-1202).
gtatcatagtagaaaaaca

SEQ ID NO: 499595 - DNA, 19 bp, Mus musculus
  siRNA target sequence for Dlat (NM_145614.2,1238-1256).
cagaagtgaccagcttaaa

SEQ ID NO: 499596 - DNA, 19 bp, Mus musculus
  siRNA target sequence for Dlat (NM_145614.2,1578-1596).
caacattcgtcgagtgatt

SEQ ID NO: 499597 - DNA, 19 bp, Mus musculus
  siRNA target sequence for Dlat (NM_145614.2,1611-1629).
gcagtcgaagcagactata

SEQ ID NO: 499598 - DNA, 19 bp, Mus musculus
  siRNA target sequence for Dlat (NM_145614.2,1620-1638).
gcagactatacctcattat

SEQ ID NO: 499599 - DNA, 19 bp, Mus musculus
  siRNA target sequence for Dlat (NM_145614.2,1625-1643).
ctatacctcattattacct

SEQ ID NO: 499600 - DNA, 19 bp, Mus musculus
  siRNA target sequence for Dlat (NM_145614.2,1641-1659).
cctttctgtcgatgtaaat

SEQ ID NO: 499601 - DNA, 19 bp, Mus musculus
  siRNA target sequence for Dlat (NM_145614.2,1677-1695).
ggtacggaaggaacttaat

SEQ ID NO: 499602 - DNA, 19 bp, Mus musculus
  siRNA target sequence for Dlat (NM_145614.2,1678-1696).
gtacggaaggaacttaata

SEQ ID NO: 499603 - DNA, 19 bp, Mus musculus
  siRNA target sequence for Dlat (NM_145614.2,1722-1740).
ctccgtcaacgacttcatt

SEQ ID NO: 499604 - DNA, 19 bp, Mus musculus
  siRNA target sequence for Dlat (NM_145614.2,1724-1742).
ccgtcaacgacttcattat

SEQ ID NO: 499605 - DNA, 19 bp, Mus musculus
  siRNA target sequence for Dlat (NM_145614.2,1725-1743).
cgtcaacgacttcattata

SEQ ID NO: 499606 - DNA, 19 bp, Mus musculus
  siRNA target sequence for Dlat (NM_145614.2,1726-1744).
gtcaacgacttcattataa

SEQ ID NO: 499607 - DNA, 19 bp, Mus musculus
  siRNA target sequence for Dlat (NM_145614.2,1859-1877).
gacttatcacccctattgt

SEQ ID NO: 499608 - DNA, 19 bp, Mus musculus
  siRNA target sequence for Dlat (NM_145614.2,1861-1879).
cttatcacccctattgtgt

SEQ ID NO: 499609 - DNA, 19 bp, Mus musculus
  siRNA target sequence for Dlat (NM_145614.2,1902-1920).
ggaaaccattgctagtgat

SEQ ID NO: 499610 - DNA, 19 bp, Mus musculus
  siRNA target sequence for Dlat (NM_145614.2,1907-1925).
ccattgctagtgatgttgt

SEQ ID NO: 499611 - DNA, 19 bp, Mus musculus
  siRNA target sequence for Dlat (NM_145614.2,2028-2046).
ctctgcaattattaatcca

SEQ ID NO: 499612 - DNA, 19 bp, Mus musculus
  siRNA target sequence for Dlat (NM_145614.2,2188-2206).
cagtggcttgctgaattca

SEQ ID NO: 499613 - DNA, 19 bp, Mus musculus
  siRNA target sequence for Dlat (NM_145614.2,2194-2212).
cttgctgaattcaaaaagt

SEQ ID NO: 499614 - DNA, 19 bp, Mus musculus
  siRNA target sequence for Dlat (NM_145614.2,2218-2236).
gaaaagcctataactatgt

SEQ ID NO: 499615 - DNA, 19 bp, Mus musculus
  siRNA target sequence for Dlat (NM_145614.2,2224-2242).
cctataactatgttgttat

SEQ ID NO: 499616 - DNA, 19 bp, Mus musculus
  siRNA target sequence for Dm15 (NM_032418.1,120-138).
cctagcccaggacaagtat

SEQ ID NO: 499617 - DNA, 19 bp, Mus musculus
  siRNA target sequence for Dm15 (NM_032418.1,793-811).
ggcgtgttcgcctatgaga

SEQ ID NO: 499618 - DNA, 19 bp, Mus musculus
  siRNA target sequence for Dm15 (NM_032418.1,794-812).
gcgtgttcgcctatgagat

SEQ ID NO: 499619 - DNA, 19 bp, Mus musculus
  siRNA target sequence for Dm15 (NM_032418.1,801-819).
cgcctatgagatgttctat

SEQ ID NO: 499620 - DNA, 19 bp, Mus musculus
  siRNA target sequence for Dm15 (NM_032418.1,843-861).
ctccacagccgagacatat

SEQ ID NO: 499621 - DNA, 19 bp, Mus musculus
  siRNA target sequence for Dm15 (NM_032418.1,852-870).
cgagacatatgccaagatt

SEQ ID NO: 499622 - DNA, 19 bp, Mus musculus
  siRNA target sequence for Dm15 (NM_032418.1,1047-1065).
cagtgtacccccctttaca

SEQ ID NO: 499623 - DNA, 19 bp, Mus musculus
  siRNA target sequence for Dm15 (NM_032418.1,1081-1099).
gccacggacacatgcaatt

SEQ ID NO: 499624 - DNA, 19 bp, Mus musculus
  siRNA target sequence for Dm15 (NM_032418.1,1086-1104).
ggacacatgcaatttcgat

SEQ ID NO: 499625 - DNA, 19 bp, Mus musculus
  siRNA target sequence for Dnahc11 (NM_010060.1,454-472).
cagcctggtgtttagtgtt

SEQ ID NO: 499626 - DNA, 19 bp, Mus musculus
  siRNA target sequence for Dnahc11 (NM_010060.1,635-653).
gcattcctagatgagatat

SEQ ID NO: 499627 - DNA, 19 bp, Mus musculus
  siRNA target sequence for Dnahc11 (NM_010060.1,662-680).
gttctgtctaataagaaca

SEQ ID NO: 499628 - DNA, 19 bp, Mus musculus
  siRNA target sequence for Dnahc11 (NM_010060.1,687-705).
cgtcctggtcatgctttat

SEQ ID NO: 499629 - DNA, 19 bp, Mus musculus
  siRNA target sequence for Dnahc11 (NM_010060.1,790-808).
gccaattcctactattgca

SEQ ID NO: 499630 - DNA, 19 bp, Mus musculus
  siRNA target sequence for Dnahc11 (NM_010060.1,841-859).
gaccaggccacaatcagat

SEQ ID NO: 499631 - DNA, 19 bp, Mus musculus
  siRNA target sequence for Dnahc11 (NM_010060.1,872-890).
ctccatgccattgaatctt

SEQ ID NO: 499632 - DNA, 19 bp, Mus musculus
  siRNA target sequence for Dnahc11 (NM_010060.1,874-892).
ccatgccattgaatcttta

SEQ ID NO: 499633 - DNA, 19 bp, Mus musculus
  siRNA target sequence for Dnahc11 (NM_010060.1,878-896).
gccattgaatctttagtca

SEQ ID NO: 499634 - DNA, 19 bp, Mus musculus
  siRNA target sequence for Dnahc11 (NM_010060.1,880-898).
cattgaatctttagtcatt

SEQ ID NO: 499635 - DNA, 19 bp, Mus musculus
  siRNA target sequence for Dnahc11 (NM_010060.1,906-924).
cacatcagatccaagaaat

SEQ ID NO: 499636 - DNA, 19 bp, Mus musculus
  siRNA target sequence for Dnahc11 (NM_010060.1,996-1014).
ggaccatgaggcatgataa

SEQ ID NO: 499637 - DNA, 19 bp, Mus musculus
  siRNA target sequence for Dnahc11 (NM_010060.1,999-1017).
ccatgaggcatgataactt

SEQ ID NO: 499638 - DNA, 19 bp, Mus musculus
  siRNA target sequence for Dnahc11 (NM_010060.1,1003-1021).
gaggcatgataacttgaaa

SEQ ID NO: 499639 - DNA, 19 bp, Mus musculus
  siRNA target sequence for Dnahc11 (NM_010060.1,1007-1025).
catgataacttgaaatgca

SEQ ID NO: 499640 - DNA, 19 bp, Mus musculus
  siRNA target sequence for Dnahc11 (NM_010060.1,1015-1033).
cttgaaatgcatatactct

SEQ ID NO: 499641 - DNA, 19 bp, Mus musculus
  siRNA target sequence for Dnahc11 (NM_010060.1,1023-1041).
gcatatactctcaacttca

SEQ ID NO: 499642 - DNA, 19 bp, Mus musculus
  siRNA target sequence for Dnahc11 (NM_010060.1,1064-1082).
gttaagatactgagaacaa

SEQ ID NO: 499643 - DNA, 19 bp, Mus musculus
  siRNA target sequence for Dnahc11 (NM_010060.1,1117-1135).
ctttaccacggtagaaaat

SEQ ID NO: 499644 - DNA, 19 bp, Mus musculus
  siRNA target sequence for Dnahc11 (NM_010060.1,1149-1167).
cccaggatgtggaacttca

SEQ ID NO: 499645 - DNA, 19 bp, Mus musculus
  siRNA target sequence for Dnahc11 (NM_010060.1,1211-1229).
gaattcccacagactagaa

SEQ ID NO: 499646 - DNA, 19 bp, Mus musculus
  siRNA target sequence for Dnahc11 (NM_010060.1,1247-1265).
cttcacaccatctgtctta

SEQ ID NO: 499647 - DNA, 19 bp, Mus musculus
  siRNA target sequence for Dnahc11 (NM_010060.1,1272-1290).
gtcattccaagttttataa

SEQ ID NO: 499648 - DNA, 19 bp, Mus musculus
  siRNA target sequence for Dnahc11 (NM_010060.1,1293-1311).
cccctgctcgggttatagt

SEQ ID NO: 499649 - DNA, 19 bp, Mus musculus
  siRNA target sequence for Dnahc11 (NM_010060.1,1294-1312).
ccctgctcgggttatagtt

SEQ ID NO: 499650 - DNA, 19 bp, Mus musculus
  siRNA target sequence for Dnahc11 (NM_010060.1,1295-1313).
cctgctcgggttatagttt

SEQ ID NO: 499651 - DNA, 19 bp, Mus musculus
  siRNA target sequence for Dnahc11 (NM_010060.1,1296-1314).
ctgctcgggttatagtttt

SEQ ID NO: 499652 - DNA, 19 bp, Mus musculus
  siRNA target sequence for Dnahc11 (NM_010060.1,1299-1317).
ctcgggttatagttttact

SEQ ID NO: 499653 - DNA, 19 bp, Mus musculus
  siRNA target sequence for Dnahc11 (NM_010060.1,1365-1383).
cacctgaagatcttctgaa

SEQ ID NO: 499654 - DNA, 19 bp, Mus musculus
  siRNA target sequence for Dnahc11 (NM_010060.1,1472-1490).
ggattgacaagctatttca

SEQ ID NO: 499655 - DNA, 19 bp, Mus musculus
  siRNA target sequence for Dnahc11 (NM_010060.1,1532-1550).
ctggtgtttggcagattta

SEQ ID NO: 499656 - DNA, 19 bp, Mus musculus
  siRNA target sequence for Dnahc11 (NM_010060.1,1535-1553).
gtgtttggcagatttaaca

SEQ ID NO: 499657 - DNA, 19 bp, Mus musculus
  siRNA target sequence for Dnahc11 (NM_010060.1,1559-1577).
cttgaccggctggtaaaaa

SEQ ID NO: 499658 - DNA, 19 bp, Mus musculus
  siRNA target sequence for Dnahc11 (NM_010060.1,1571-1589).
gtaaaaatagaggatatgt

SEQ ID NO: 499659 - DNA, 19 bp, Mus musculus
  siRNA target sequence for Dnahc11 (NM_010060.1,1597-1615).
catactggaatttgagaaa

SEQ ID NO: 499660 - DNA, 19 bp, Mus musculus
  siRNA target sequence for Dnahc11 (NM_010060.1,1642-1660).
caagggagccgtcctaaat

SEQ ID NO: 499661 - DNA, 19 bp, Mus musculus
  siRNA target sequence for Dnahc11 (NM_010060.1,1645-1663).
gggagccgtcctaaatgca

SEQ ID NO: 499662 - DNA, 19 bp, Mus musculus
  siRNA target sequence for Dnahc11 (NM_010060.1,1650-1668).
ccgtcctaaatgcacaaat

SEQ ID NO: 499663 - DNA, 19 bp, Mus musculus
  siRNA target sequence for Dnahc11 (NM_010060.1,1674-1692).
caacaagtgaggaatttat

SEQ ID NO: 499664 - DNA, 19 bp, Mus musculus
  siRNA target sequence for Dnahc11 (NM_010060.1,1677-1695).
caagtgaggaatttatcga

SEQ ID NO: 499665 - DNA, 19 bp, Mus musculus
  siRNA target sequence for Dnahc11 (NM_010060.1,1750-1768).
ggagttcgaaagtgattat

SEQ ID NO: 499666 - DNA, 19 bp, Mus musculus
  siRNA target sequence for Dnahc11 (NM_010060.1,1751-1769).
gagttcgaaagtgattatt

SEQ ID NO: 499667 - DNA, 19 bp, Mus musculus
  siRNA target sequence for Dnahc11 (NM_010060.1,1756-1774).
cgaaagtgattatttcaaa

SEQ ID NO: 499668 - DNA, 19 bp, Mus musculus
  siRNA target sequence for Dnahc11 (NM_010060.1,1963-1981).
gttggatgtgtgtaagcaa

SEQ ID NO: 499669 - DNA, 19 bp, Mus musculus
  siRNA target sequence for Dnahc11 (NM_010060.1,1974-1992).
gtaagcaactgtatgatga

SEQ ID NO: 499670 - DNA, 19 bp, Mus musculus
  siRNA target sequence for Dnahc11 (NM_010060.1,2012-2030).
cacgggcatgaaattctga

SEQ ID NO: 499671 - DNA, 19 bp, Mus musculus
  siRNA target sequence for Dnahc11 (NM_010060.1,2042-2060).
ccattcacctctggaaata

SEQ ID NO: 499672 - DNA, 19 bp, Mus musculus
  siRNA target sequence for Dnahc11 (NM_010060.1,2081-2099).
cttgaacgccttcaaatgt

SEQ ID NO: 499673 - DNA, 19 bp, Mus musculus
  siRNA target sequence for Dnahc11 (NM_010060.1,2093-2111).
caaatgttctggtcaaact

SEQ ID NO: 499674 - DNA, 19 bp, Mus musculus
  siRNA target sequence for Dnahc11 (NM_010060.1,2098-2116).
gttctggtcaaactttaca

SEQ ID NO: 499675 - DNA, 19 bp, Mus musculus
  siRNA target sequence for Dnahc11 (NM_010060.1,2163-2181).
gtcagaagtatgctgaaat

SEQ ID NO: 499676 - DNA, 19 bp, Mus musculus
  siRNA target sequence for Dnahc11 (NM_010060.1,2184-2202).
ccactttgctggatcaatt

SEQ ID NO: 499677 - DNA, 19 bp, Mus musculus
  siRNA target sequence for Dnahc11 (NM_010060.1,2187-2205).
ctttgctggatcaatttga

SEQ ID NO: 499678 - DNA, 19 bp, Mus musculus
  siRNA target sequence for Dnahc11 (NM_010060.1,2191-2209).
gctggatcaatttgaaagt

SEQ ID NO: 499679 - DNA, 19 bp, Mus musculus
  siRNA target sequence for Dnahc11 (NM_010060.1,2237-2255).
gtggacgaaacctgtgaat

SEQ ID NO: 499680 - DNA, 19 bp, Mus musculus
  siRNA target sequence for Dnahc11 (NM_010060.1,2240-2258).
gacgaaacctgtgaattta

SEQ ID NO: 499681 - DNA, 19 bp, Mus musculus
  siRNA target sequence for Dnahc11 (NM_010060.1,2261-2279).
ctgaatcaacccttggtta

SEQ ID NO: 499682 - DNA, 19 bp, Mus musculus
  siRNA target sequence for Dnahc11 (NM_010060.1,2263-2281).
gaatcaacccttggttaaa

SEQ ID NO: 499683 - DNA, 19 bp, Mus musculus
  siRNA target sequence for Dnahc11 (NM_010060.1,2267-2285).
caacccttggttaaattca

SEQ ID NO: 499684 - DNA, 19 bp, Mus musculus
  siRNA target sequence for Dnahc11 (NM_010060.1,2288-2306).
cccataaacggccttctta

SEQ ID NO: 499685 - DNA, 19 bp, Mus musculus
  siRNA target sequence for Dnahc11 (NM_010060.1,2290-2308).
cataaacggccttcttagt

SEQ ID NO: 499686 - DNA, 19 bp, Mus musculus
  siRNA target sequence for Dnahc11 (NM_010060.1,2311-2329).
caactttgacccaaagctt

SEQ ID NO: 499687 - DNA, 19 bp, Mus musculus
  siRNA target sequence for Dnahc11 (NM_010060.1,2341-2359).
gagagaagtcaaatacctt

SEQ ID NO: 499688 - DNA, 19 bp, Mus musculus
  siRNA target sequence for Dnahc11 (NM_010060.1,2343-2361).
gagaagtcaaatacctttt

SEQ ID NO: 499689 - DNA, 19 bp, Mus musculus
  siRNA target sequence for Dnahc11 (NM_010060.1,2380-2398).
cataccagattcagcttta

SEQ ID NO: 499690 - DNA, 19 bp, Mus musculus
  siRNA target sequence for Dnahc11 (NM_010060.1,2453-2471).
cttgtacaaggctacaata

SEQ ID NO: 499691 - DNA, 19 bp, Mus musculus
  siRNA target sequence for Dnahc11 (NM_010060.1,2463-2481).
gctacaataagctgaaaca

SEQ ID NO: 499692 - DNA, 19 bp, Mus musculus
  siRNA target sequence for Dnahc11 (NM_010060.1,2648-2666).
cagagcaacatgctaacaa

SEQ ID NO: 499693 - DNA, 19 bp, Mus musculus
  siRNA target sequence for Dnahc11 (NM_010060.1,2749-2767).
cgacaagggggatctgttt

SEQ ID NO: 499694 - DNA, 19 bp, Mus musculus
  siRNA target sequence for Dnahc11 (NM_010060.1,2756-2774).
ggggatctgtttgcaaaaa

SEQ ID NO: 499695 - DNA, 19 bp, Mus musculus
  siRNA target sequence for Dnahc11 (NM_010060.1,2757-2775).
gggatctgtttgcaaaaaa

SEQ ID NO: 499696 - DNA, 19 bp, Mus musculus
  siRNA target sequence for Dnahc11 (NM_010060.1,2795-2813).
gatggttgcaagatacaca

SEQ ID NO: 499697 - DNA, 19 bp, Mus musculus
  siRNA target sequence for Dnahc11 (NM_010060.1,2799-2817).
gttgcaagatacacaactt

SEQ ID NO: 499698 - DNA, 19 bp, Mus musculus
  siRNA target sequence for Dnahc11 (NM_010060.1,2857-2875).
cctggattcctggaaaatt

SEQ ID NO: 499699 - DNA, 19 bp, Mus musculus
  siRNA target sequence for Dnahc11 (NM_010060.1,2968-2986).
gttaaaacccacaccattt

SEQ ID NO: 499700 - DNA, 19 bp, Mus musculus
  siRNA target sequence for Dnahc11 (NM_010060.1,3004-3022).
cttaatgcccccagagatt

SEQ ID NO: 499701 - DNA, 19 bp, Mus musculus
  siRNA target sequence for Dnahc11 (NM_010060.1,3146-3164).
gcagactaccagaacgata

SEQ ID NO: 499702 - DNA, 19 bp, Mus musculus
  siRNA target sequence for Dnahc11 (NM_010060.1,3287-3305).
gaccgggtagagattctaa

SEQ ID NO: 499703 - DNA, 19 bp, Mus musculus
  siRNA target sequence for Dnahc11 (NM_010060.1,3376-3394).
gcaaccaccaacactagaa

SEQ ID NO: 499704 - DNA, 19 bp, Mus musculus
  siRNA target sequence for Dnahc11 (NM_010060.1,3381-3399).
caccaacactagaacaatt

SEQ ID NO: 499705 - DNA, 19 bp, Mus musculus
  siRNA target sequence for Dnahc11 (NM_010060.1,3534-3552).
ggagttggatgtttcaaga

SEQ ID NO: 499706 - DNA, 19 bp, Mus musculus
  siRNA target sequence for Dnahc11 (NM_010060.1,3587-3605).
gagctgcaaggattcatca

SEQ ID NO: 499707 - DNA, 19 bp, Mus musculus
  siRNA target sequence for Dnahc11 (NM_010060.1,3597-3615).
gattcatcaagcagacaaa

SEQ ID NO: 499708 - DNA, 19 bp, Mus musculus
  siRNA target sequence for Dnahc11 (NM_010060.1,3637-3655).
gtgtgagggcgatcatgat

SEQ ID NO: 499709 - DNA, 19 bp, Mus musculus
  siRNA target sequence for Dnahc11 (NM_010060.1,3697-3715).
ccgacagagagctactgat

SEQ ID NO: 499710 - DNA, 19 bp, Mus musculus
  siRNA target sequence for Dnahc11 (NM_010060.1,3728-3746).
cctctgaaagaaacaatca

SEQ ID NO: 499711 - DNA, 19 bp, Mus musculus
  siRNA target sequence for Dnahc11 (NM_010060.1,3986-4004).
ccatacgcagtgcttgata

SEQ ID NO: 499712 - DNA, 19 bp, Mus musculus
  siRNA target sequence for Dnahc11 (NM_010060.1,3987-4005).
catacgcagtgcttgataa

SEQ ID NO: 499713 - DNA, 19 bp, Mus musculus
  siRNA target sequence for Dnahc11 (NM_010060.1,4078-4096).
ggctcttccggagtacaaa

SEQ ID NO: 499714 - DNA, 19 bp, Mus musculus
  siRNA target sequence for Dnahc11 (NM_010060.1,4080-4098).
ctcttccggagtacaaaca

SEQ ID NO: 499715 - DNA, 19 bp, Mus musculus
  siRNA target sequence for Dnahc11 (NM_010060.1,4082-4100).
cttccggagtacaaacaaa

SEQ ID NO: 499716 - DNA, 19 bp, Mus musculus
  siRNA target sequence for Dnahc11 (NM_010060.1,4085-4103).
ccggagtacaaacaaatga

SEQ ID NO: 499717 - DNA, 19 bp, Mus musculus
  siRNA target sequence for Dnahc11 (NM_010060.1,4136-4154).
gggctctgggatgtcatta

SEQ ID NO: 499718 - DNA, 19 bp, Mus musculus
  siRNA target sequence for Dnahc11 (NM_010060.1,4137-4155).
ggctctgggatgtcattat

SEQ ID NO: 499719 - DNA, 19 bp, Mus musculus
  siRNA target sequence for Dnahc11 (NM_010060.1,4139-4157).
ctctgggatgtcattattt

SEQ ID NO: 499720 - DNA, 19 bp, Mus musculus
  siRNA target sequence for Dnahc11 (NM_010060.1,4141-4159).
ctgggatgtcattatttat

SEQ ID NO: 499721 - DNA, 19 bp, Mus musculus
  siRNA target sequence for Dnahc11 (NM_010060.1,4143-4161).
gggatgtcattatttatgt

SEQ ID NO: 499722 - DNA, 19 bp, Mus musculus
  siRNA target sequence for Dnahc11 (NM_010060.1,4160-4178).
gttaggagaagcattgata

SEQ ID NO: 499723 - DNA, 19 bp, Mus musculus
  siRNA target sequence for Dnahc11 (NM_010060.1,4276-4294).
ccgcgtctgggatgcttat

SEQ ID NO: 499724 - DNA, 19 bp, Mus musculus
  siRNA target sequence for Dnahc11 (NM_010060.1,4309-4327).
cactgtgaaggatatgaca

SEQ ID NO: 499725 - DNA, 19 bp, Mus musculus
  siRNA target sequence for Dnahc11 (NM_010060.1,4400-4418).
gccattggggtcagattct

SEQ ID NO: 499726 - DNA, 19 bp, Mus musculus
  siRNA target sequence for Dnahc11 (NM_010060.1,4402-4420).
cattggggtcagattctca

SEQ ID NO: 499727 - DNA, 19 bp, Mus musculus
  siRNA target sequence for Dnahc11 (NM_010060.1,4406-4424).
ggggtcagattctcaataa

SEQ ID NO: 499728 - DNA, 19 bp, Mus musculus
  siRNA target sequence for Dnahc11 (NM_010060.1,4407-4425).
gggtcagattctcaataaa

SEQ ID NO: 499729 - DNA, 19 bp, Mus musculus
  siRNA target sequence for Dnahc11 (NM_010060.1,4459-4477).
gcagctgcaccgagtagaa

SEQ ID NO: 499730 - DNA, 19 bp, Mus musculus
  siRNA target sequence for Dnahc11 (NM_010060.1,4462-4480).
gctgcaccgagtagaagat

SEQ ID NO: 499731 - DNA, 19 bp, Mus musculus
  siRNA target sequence for Dnahc11 (NM_010060.1,4719-4737).
ggcaaaacaagctaaatgt

SEQ ID NO: 499732 - DNA, 19 bp, Mus musculus
  siRNA target sequence for Dnahc11 (NM_010060.1,4736-4754).
gtagccgatgcagttatct

SEQ ID NO: 499733 - DNA, 19 bp, Mus musculus
  siRNA target sequence for Dnahc11 (NM_010060.1,4739-4757).
gccgatgcagttatcttta

SEQ ID NO: 499734 - DNA, 19 bp, Mus musculus
  siRNA target sequence for Dnahc11 (NM_010060.1,4741-4759).
cgatgcagttatctttact

SEQ ID NO: 499735 - DNA, 19 bp, Mus musculus
  siRNA target sequence for Dnahc11 (NM_010060.1,4793-4811).
gaaagcatcttcgtttgtt

SEQ ID NO: 499736 - DNA, 19 bp, Mus musculus
  siRNA target sequence for Dnahc11 (NM_010060.1,4798-4816).
catcttcgtttgttcagaa

SEQ ID NO: 499737 - DNA, 19 bp, Mus musculus
  siRNA target sequence for Dnahc11 (NM_010060.1,4869-4887).
ccgaatttaaggagttaat

SEQ ID NO: 499738 - DNA, 19 bp, Mus musculus
  siRNA target sequence for Dnahc11 (NM_010060.1,4888-4906).
gttcgagacagccaaagta

SEQ ID NO: 499739 - DNA, 19 bp, Mus musculus
  siRNA target sequence for Dnahc11 (NM_010060.1,4900-4918).
caaagtaaagaatgtctta

SEQ ID NO: 499740 - DNA, 19 bp, Mus musculus
  siRNA target sequence for Dnahc11 (NM_010060.1,4929-4947).
gcagaccccacctctatga

SEQ ID NO: 499741 - DNA, 19 bp, Mus musculus
  siRNA target sequence for Dnahc11 (NM_010060.1,4932-4950).
gaccccacctctatgagaa

SEQ ID NO: 499742 - DNA, 19 bp, Mus musculus
  siRNA target sequence for Dnahc11 (NM_010060.1,4935-4953).
cccacctctatgagaaact

SEQ ID NO: 499743 - DNA, 19 bp, Mus musculus
  siRNA target sequence for Dnahc11 (NM_010060.1,4937-4955).
cacctctatgagaaactta

SEQ ID NO: 499744 - DNA, 19 bp, Mus musculus
  siRNA target sequence for Dnahc11 (NM_010060.1,5057-5075).
gacttgctggacattctct

SEQ ID NO: 499745 - DNA, 19 bp, Mus musculus
  siRNA target sequence for Dnahc11 (NM_010060.1,5105-5123).
caccaccttgtcaaactct

SEQ ID NO: 499746 - DNA, 19 bp, Mus musculus
  siRNA target sequence for Dnahc11 (NM_010060.1,5107-5125).
ccaccttgtcaaactcttt

SEQ ID NO: 499747 - DNA, 19 bp, Mus musculus
  siRNA target sequence for Dnahc11 (NM_010060.1,5111-5129).
cttgtcaaactctttgaca

SEQ ID NO: 499748 - DNA, 19 bp, Mus musculus
  siRNA target sequence for Dnahc11 (NM_010060.1,5224-5242).
ggccggatgtgaatgcata

SEQ ID NO: 499749 - DNA, 19 bp, Mus musculus
  siRNA target sequence for Dnahc11 (NM_010060.1,5345-5363).
gagctctggatctttgatt

SEQ ID NO: 499750 - DNA, 19 bp, Mus musculus
  siRNA target sequence for Dnahc11 (NM_010060.1,5377-5395).
ggctctaactggatcacaa

SEQ ID NO: 499751 - DNA, 19 bp, Mus musculus
  siRNA target sequence for Dnahc11 (NM_010060.1,5403-5421).
ggaccacagacgtaggaat

SEQ ID NO: 499752 - DNA, 19 bp, Mus musculus
  siRNA target sequence for Dnahc11 (NM_010060.1,5404-5422).
gaccacagacgtaggaatt

SEQ ID NO: 499753 - DNA, 19 bp, Mus musculus
  siRNA target sequence for Dnahc11 (NM_010060.1,5435-5453).
ctagaggagggctatgaaa

SEQ ID NO: 499754 - DNA, 19 bp, Mus musculus
  siRNA target sequence for Dnahc11 (NM_010060.1,5456-5474).
gccttgaaggatttccata

SEQ ID NO: 499755 - DNA, 19 bp, Mus musculus
  siRNA target sequence for Dnahc11 (NM_010060.1,5457-5475).
ccttgaaggatttccataa

SEQ ID NO: 499756 - DNA, 19 bp, Mus musculus
  siRNA target sequence for Dnahc11 (NM_010060.1,5618-5636).
gtcagcccccatgctttta

SEQ ID NO: 499757 - DNA, 19 bp, Mus musculus
  siRNA target sequence for Dnahc11 (NM_010060.1,5657-5675).
cacgagtgggaggattcaa

SEQ ID NO: 499758 - DNA, 19 bp, Mus musculus
  siRNA target sequence for Dnahc11 (NM_010060.1,5666-5684).
gaggattcaaggaaacact

SEQ ID NO: 499759 - DNA, 19 bp, Mus musculus
  siRNA target sequence for Dnahc11 (NM_010060.1,5676-5694).
ggaaacactgcgttgttaa

SEQ ID NO: 499760 - DNA, 19 bp, Mus musculus
  siRNA target sequence for Dnahc11 (NM_010060.1,5681-5699).
cactgcgttgttaatattt

SEQ ID NO: 499761 - DNA, 19 bp, Mus musculus
  siRNA target sequence for Dnahc11 (NM_010060.1,5685-5703).
gcgttgttaatatttgtga

SEQ ID NO: 499762 - DNA, 19 bp, Mus musculus
  siRNA target sequence for Dnahc11 (NM_010060.1,5714-5732).
cagtacttctacgaatact

SEQ ID NO: 499763 - DNA, 19 bp, Mus musculus
  siRNA target sequence for Dnahc11 (NM_010060.1,5725-5743).
cgaatacttgggaaacagt

SEQ ID NO: 499764 - DNA, 19 bp, Mus musculus
  siRNA target sequence for Dnahc11 (NM_010060.1,5771-5789).
gacaggtgttacatcactt

SEQ ID NO: 499765 - DNA, 19 bp, Mus musculus
  siRNA target sequence for Dnahc11 (NM_010060.1,5773-5791).
caggtgttacatcacttta

SEQ ID NO: 499766 - DNA, 19 bp, Mus musculus
  siRNA target sequence for Dnahc11 (NM_010060.1,5778-5796).
gttacatcactttaactca

SEQ ID NO: 499767 - DNA, 19 bp, Mus musculus
  siRNA target sequence for Dnahc11 (NM_010060.1,5879-5897).
gccctgggcatgatggttt

SEQ ID NO: 499768 - DNA, 19 bp, Mus musculus
  siRNA target sequence for Dnahc11 (NM_010060.1,5884-5902).
gggcatgatggtttacgta

SEQ ID NO: 499769 - DNA, 19 bp, Mus musculus
  siRNA target sequence for Dnahc11 (NM_010060.1,5924-5942).
gactacaggtccataggaa

SEQ ID NO: 499770 - DNA, 19 bp, Mus musculus
  siRNA target sequence for Dnahc11 (NM_010060.1,6543-6561).
ggaaaccacactttgaaca

SEQ ID NO: 499771 - DNA, 19 bp, Mus musculus
  siRNA target sequence for Dnahc11 (NM_010060.1,6649-6667).
cgtgcgacactctgtcttt

SEQ ID NO: 499772 - DNA, 19 bp, Mus musculus
  siRNA target sequence for Dnahc11 (NM_010060.1,6720-6738).
gaacatatgttaacatgaa

SEQ ID NO: 499773 - DNA, 19 bp, Mus musculus
  siRNA target sequence for Dnahc11 (NM_010060.1,6723-6741).
catatgttaacatgaaaca

SEQ ID NO: 499774 - DNA, 19 bp, Mus musculus
  siRNA target sequence for Dnahc11 (NM_010060.1,6745-6763).
gcccgtttggagtgactta

SEQ ID NO: 499775 - DNA, 19 bp, Mus musculus
  siRNA target sequence for Dnahc11 (NM_010060.1,6747-6765).
ccgtttggagtgacttaaa

SEQ ID NO: 499776 - DNA, 19 bp, Mus musculus
  siRNA target sequence for Dnahc11 (NM_010060.1,6862-6880).
ggcaaatctcacacatgat

SEQ ID NO: 499777 - DNA, 19 bp, Mus musculus
  siRNA target sequence for Dnahc11 (NM_010060.1,7005-7023).
ccatgaggcttctattcga

SEQ ID NO: 499778 - DNA, 19 bp, Mus musculus
  siRNA target sequence for Dnahc11 (NM_010060.1,7063-7081).
cagagctggcattttgtat

SEQ ID NO: 499779 - DNA, 19 bp, Mus musculus
  siRNA target sequence for Dnahc11 (NM_010060.1,7111-7129).
gtatgtggccagttggata

SEQ ID NO: 499780 - DNA, 19 bp, Mus musculus
  siRNA target sequence for Dnahc11 (NM_010060.1,7115-7133).
gtggccagttggatagaca

SEQ ID NO: 499781 - DNA, 19 bp, Mus musculus
  siRNA target sequence for Dnahc11 (NM_010060.1,7137-7155).
gacggcatcaatcagaaaa

SEQ ID NO: 499782 - DNA, 19 bp, Mus musculus
  siRNA target sequence for Dnahc11 (NM_010060.1,7156-7174).
ggccaatttaactattctt

SEQ ID NO: 499783 - DNA, 19 bp, Mus musculus
  siRNA target sequence for Dnahc11 (NM_010060.1,7207-7225).
gctaagaacgagctttaaa

SEQ ID NO: 499784 - DNA, 19 bp, Mus musculus
  siRNA target sequence for Dnahc11 (NM_010060.1,7248-7266).
gcagcctggtgcagactat

SEQ ID NO: 499785 - DNA, 19 bp, Mus musculus
  siRNA target sequence for Dnahc11 (NM_010060.1,7249-7267).
cagcctggtgcagactatt

SEQ ID NO: 499786 - DNA, 19 bp, Mus musculus
  siRNA target sequence for Dnahc11 (NM_010060.1,7255-7273).
ggtgcagactatttgtact

SEQ ID NO: 499787 - DNA, 19 bp, Mus musculus
  siRNA target sequence for Dnahc11 (NM_010060.1,7258-7276).
gcagactatttgtactctt

SEQ ID NO: 499788 - DNA, 19 bp, Mus musculus
  siRNA target sequence for Dnahc11 (NM_010060.1,7259-7277).
cagactatttgtactcttt

SEQ ID NO: 499789 - DNA, 19 bp, Mus musculus
  siRNA target sequence for Dnahc11 (NM_010060.1,7288-7306).
gttgactcccgagaacata

SEQ ID NO: 499790 - DNA, 19 bp, Mus musculus
  siRNA target sequence for Dnahc11 (NM_010060.1,7310-7328).
cctgacagtcctaaagaga

SEQ ID NO: 499791 - DNA, 19 bp, Mus musculus
  siRNA target sequence for Dnahc11 (NM_010060.1,7320-7338).
ctaaagagacctatgaagt

SEQ ID NO: 499792 - DNA, 19 bp, Mus musculus
  siRNA target sequence for Dnahc11 (NM_010060.1,7325-7343).
gagacctatgaagtctatt

SEQ ID NO: 499793 - DNA, 19 bp, Mus musculus
  siRNA target sequence for Dnahc11 (NM_010060.1,7426-7444).
gtggcataaggaaatgaaa

SEQ ID NO: 499794 - DNA, 19 bp, Mus musculus
  siRNA target sequence for Dnahc11 (NM_010060.1,7470-7488).
ccatctttgattattatct

SEQ ID NO: 499795 - DNA, 19 bp, Mus musculus
  siRNA target sequence for Dnahc11 (NM_010060.1,7629-7647).
gcaaaggcaaaccgataat

SEQ ID NO: 499796 - DNA, 19 bp, Mus musculus
  siRNA target sequence for Dnahc11 (NM_010060.1,7641-7659).
cgataatgctggttggaaa

SEQ ID NO: 499797 - DNA, 19 bp, Mus musculus
  siRNA target sequence for Dnahc11 (NM_010060.1,7667-7685).
gtggggaaaacggtctttt

SEQ ID NO: 499798 - DNA, 19 bp, Mus musculus
  siRNA target sequence for Dnahc11 (NM_010060.1,7701-7719).
caagtctctctgagaacta

SEQ ID NO: 499799 - DNA, 19 bp, Mus musculus
  siRNA target sequence for Dnahc11 (NM_010060.1,7761-7779).
cagccctgcagagaattct

SEQ ID NO: 499800 - DNA, 19 bp, Mus musculus
  siRNA target sequence for Dnahc11 (NM_010060.1,7813-7831).
ctatggtccaaaaggaaat

SEQ ID NO: 499801 - DNA, 19 bp, Mus musculus
  siRNA target sequence for Dnahc11 (NM_010060.1,7840-7858).
ggtttatttcattgatgat

SEQ ID NO: 499802 - DNA, 19 bp, Mus musculus
  siRNA target sequence for Dnahc11 (NM_010060.1,7905-7923).
cgctgcttcggcagcatat

SEQ ID NO: 499803 - DNA, 19 bp, Mus musculus
  siRNA target sequence for Dnahc11 (NM_010060.1,7906-7924).
gctgcttcggcagcatatt

SEQ ID NO: 499804 - DNA, 19 bp, Mus musculus
  siRNA target sequence for Dnahc11 (NM_010060.1,7936-7954).
ctggtacgatcgacataaa

SEQ ID NO: 499805 - DNA, 19 bp, Mus musculus
  siRNA target sequence for Dnahc11 (NM_010060.1,7938-7956).
ggtacgatcgacataaaat

SEQ ID NO: 499806 - DNA, 19 bp, Mus musculus
  siRNA target sequence for Dnahc11 (NM_010060.1,7939-7957).
gtacgatcgacataaaatt

SEQ ID NO: 499807 - DNA, 19 bp, Mus musculus
  siRNA target sequence for Dnahc11 (NM_010060.1,7984-8002).
gtacgtagcctgcatgaat

SEQ ID NO: 499808 - DNA, 19 bp, Mus musculus
  siRNA target sequence for Dnahc11 (NM_010060.1,8052-8070).
ctgtgtttgcattcaactt

SEQ ID NO: 499809 - DNA, 19 bp, Mus musculus
  siRNA target sequence for Dnahc11 (NM_010060.1,8215-8233).
ctttgtgcctacagctatt

SEQ ID NO: 499810 - DNA, 19 bp, Mus musculus
  siRNA target sequence for Dnahc11 (NM_010060.1,8259-8277).
gagacttatcaaacatctt

SEQ ID NO: 499811 - DNA, 19 bp, Mus musculus
  siRNA target sequence for Dnahc11 (NM_010060.1,8294-8312).
gcttctcctgagtgtttaa

SEQ ID NO: 499812 - DNA, 19 bp, Mus musculus
  siRNA target sequence for Dnahc11 (NM_010060.1,8377-8395).
gatagacacaaacgatttt

SEQ ID NO: 499813 - DNA, 19 bp, Mus musculus
  siRNA target sequence for Dnahc11 (NM_010060.1,8381-8399).
gacacaaacgattttgact

SEQ ID NO: 499814 - DNA, 19 bp, Mus musculus
  siRNA target sequence for Dnahc11 (NM_010060.1,8383-8401).
cacaaacgattttgactta

SEQ ID NO: 499815 - DNA, 19 bp, Mus musculus
  siRNA target sequence for Dnahc11 (NM_010060.1,8420-8438).
gaaactgcccataagtact

SEQ ID NO: 499816 - DNA, 19 bp, Mus musculus
  siRNA target sequence for Dnahc11 (NM_010060.1,8434-8452).
gtactttaaaggtgtagat

SEQ ID NO: 499817 - DNA, 19 bp, Mus musculus
  siRNA target sequence for Dnahc11 (NM_010060.1,8468-8486).
cggcagccccttgtctatt

SEQ ID NO: 499818 - DNA, 19 bp, Mus musculus
  siRNA target sequence for Dnahc11 (NM_010060.1,8470-8488).
gcagccccttgtctattgt

SEQ ID NO: 499819 - DNA, 19 bp, Mus musculus
  siRNA target sequence for Dnahc11 (NM_010060.1,8598-8616).
cgatgcacctggtgctatt

SEQ ID NO: 499820 - DNA, 19 bp, Mus musculus
  siRNA target sequence for Dnahc11 (NM_010060.1,8721-8739).
cccggctggcagcttacat

SEQ ID NO: 499821 - DNA, 19 bp, Mus musculus
  siRNA target sequence for Dnahc11 (NM_010060.1,8723-8741).
cggctggcagcttacatct

SEQ ID NO: 499822 - DNA, 19 bp, Mus musculus
  siRNA target sequence for Dnahc11 (NM_010060.1,8745-8763).
gcttggaggtctttcagat

SEQ ID NO: 499823 - DNA, 19 bp, Mus musculus
  siRNA target sequence for Dnahc11 (NM_010060.1,8799-8817).
gggtagatctggccaattt

SEQ ID NO: 499824 - DNA, 19 bp, Mus musculus
  siRNA target sequence for Dnahc11 (NM_010060.1,8826-8844).
gaactggagccaaaaacat

SEQ ID NO: 499825 - DNA, 19 bp, Mus musculus
  siRNA target sequence for Dnahc11 (NM_010060.1,8939-8957).
ctgttcagtgatgaagata

SEQ ID NO: 499826 - DNA, 19 bp, Mus musculus
  siRNA target sequence for Dnahc11 (NM_010060.1,8968-8986).
catttccgggattcgtaat

SEQ ID NO: 499827 - DNA, 19 bp, Mus musculus
  siRNA target sequence for Dnahc11 (NM_010060.1,8973-8991).
ccgggattcgtaatgaagt

SEQ ID NO: 499828 - DNA, 19 bp, Mus musculus
  siRNA target sequence for Dnahc11 (NM_010060.1,8974-8992).
cgggattcgtaatgaagtt

SEQ ID NO: 499829 - DNA, 19 bp, Mus musculus
  siRNA target sequence for Dnahc11 (NM_010060.1,9008-9026).
gtggactccagggaaaact

SEQ ID NO: 499830 - DNA, 19 bp, Mus musculus
  siRNA target sequence for Dnahc11 (NM_010060.1,9050-9068).
gtccgacaacagctcaaaa

SEQ ID NO: 499831 - DNA, 19 bp, Mus musculus
  siRNA target sequence for Dnahc11 (NM_010060.1,9056-9074).
caacagctcaaaatggttt

SEQ ID NO: 499832 - DNA, 19 bp, Mus musculus
  siRNA target sequence for Dnahc11 (NM_010060.1,9094-9112).
ccacacactgcgagttaga

SEQ ID NO: 499833 - DNA, 19 bp, Mus musculus
  siRNA target sequence for Dnahc11 (NM_010060.1,9201-9219).
ggttcatcgaagaaattga

SEQ ID NO: 499834 - DNA, 19 bp, Mus musculus
  siRNA target sequence for Dnahc11 (NM_010060.1,9231-9249).
cacagcacaaagattctat

SEQ ID NO: 499835 - DNA, 19 bp, Mus musculus
  siRNA target sequence for Dnahc11 (NM_010060.1,9266-9284).
catgttcacaccagtgtaa

SEQ ID NO: 499836 - DNA, 19 bp, Mus musculus
  siRNA target sequence for Dnahc11 (NM_010060.1,9336-9354).
cccccaggagtttcttaga

SEQ ID NO: 499837 - DNA, 19 bp, Mus musculus
  siRNA target sequence for Dnahc11 (NM_010060.1,9339-9357).
ccaggagtttcttagaaca

SEQ ID NO: 499838 - DNA, 19 bp, Mus musculus
  siRNA target sequence for Dnahc11 (NM_010060.1,9342-9360).
ggagtttcttagaacaaat

SEQ ID NO: 499839 - DNA, 19 bp, Mus musculus
  siRNA target sequence for Dnahc11 (NM_010060.1,9456-9474).
cctcacaggtgggaaatct

SEQ ID NO: 499840 - DNA, 19 bp, Mus musculus
  siRNA target sequence for Dnahc11 (NM_010060.1,9459-9477).
cacaggtgggaaatctgaa

SEQ ID NO: 499841 - DNA, 19 bp, Mus musculus
  siRNA target sequence for Dnahc11 (NM_010060.1,9501-9519).
ctgagttgcagctcagaaa

SEQ ID NO: 499842 - DNA, 19 bp, Mus musculus
  siRNA target sequence for Dnahc11 (NM_010060.1,9528-9546).
ccgaggccctgatcacaaa

SEQ ID NO: 499843 - DNA, 19 bp, Mus musculus
  siRNA target sequence for Dnahc11 (NM_010060.1,9685-9703).
cctggtggctgctaaggat

SEQ ID NO: 499844 - DNA, 19 bp, Mus musculus
  siRNA target sequence for Dnahc11 (NM_010060.1,9731-9749).
ctcacagaactgaaaacgt

SEQ ID NO: 499845 - DNA, 19 bp, Mus musculus
  siRNA target sequence for Dnahc11 (NM_010060.1,9840-9858).
ggaaagcagctaaaatctt

SEQ ID NO: 499846 - DNA, 19 bp, Mus musculus
  siRNA target sequence for Dnahc11 (NM_010060.1,9877-9895).
cttcctacaagcgttaatt

SEQ ID NO: 499847 - DNA, 19 bp, Mus musculus
  siRNA target sequence for Dnahc11 (NM_010060.1,9881-9899).
ctacaagcgttaattaact

SEQ ID NO: 499848 - DNA, 19 bp, Mus musculus
  siRNA target sequence for Dnahc11 (NM_010060.1,9887-9905).
gcgttaattaactacgata

SEQ ID NO: 499849 - DNA, 19 bp, Mus musculus
  siRNA target sequence for Dnahc11 (NM_010060.1,9888-9906).
cgttaattaactacgataa

SEQ ID NO: 499850 - DNA, 19 bp, Mus musculus
  siRNA target sequence for Dnahc11 (NM_010060.1,9889-9907).
gttaattaactacgataaa

SEQ ID NO: 499851 - DNA, 19 bp, Mus musculus
  siRNA target sequence for Dnahc11 (NM_010060.1,9925-9943).
ctgtctaaaagtagtcaat

SEQ ID NO: 499852 - DNA, 19 bp, Mus musculus
  siRNA target sequence for Dnahc11 (NM_010060.1,9935-9953).
gtagtcaatgaacaatatt

SEQ ID NO: 499853 - DNA, 19 bp, Mus musculus
  siRNA target sequence for Dnahc11 (NM_010060.1,9979-9997).
cctgattcggaccaaatct

SEQ ID NO: 499854 - DNA, 19 bp, Mus musculus
  siRNA target sequence for Dnahc11 (NM_010060.1,10021-10039).
ctgggtcatcaacatcatt

SEQ ID NO: 499855 - DNA, 19 bp, Mus musculus
  siRNA target sequence for Dnahc11 (NM_010060.1,10024-10042).
ggtcatcaacatcattaga

SEQ ID NO: 499856 - DNA, 19 bp, Mus musculus
  siRNA target sequence for Dnahc11 (NM_010060.1,10079-10097).
caggcattggcccaaacaa

SEQ ID NO: 499857 - DNA, 19 bp, Mus musculus
  siRNA target sequence for Dnahc11 (NM_010060.1,10083-10101).
cattggcccaaacaaactt

SEQ ID NO: 499858 - DNA, 19 bp, Mus musculus
  siRNA target sequence for Dnahc11 (NM_010060.1,10163-10181).
cataatctgagcagactta

SEQ ID NO: 499859 - DNA, 19 bp, Mus musculus
  siRNA target sequence for Dnahc11 (NM_010060.1,10221-10239).
gtcaggaagaagtgaatca

SEQ ID NO: 499860 - DNA, 19 bp, Mus musculus
  siRNA target sequence for Dnahc11 (NM_010060.1,10252-10270).
gatcgacctagccaacaaa

SEQ ID NO: 499861 - DNA, 19 bp, Mus musculus
  siRNA target sequence for Dnahc11 (NM_010060.1,10255-10273).
cgacctagccaacaaactt

SEQ ID NO: 499862 - DNA, 19 bp, Mus musculus
  siRNA target sequence for Dnahc11 (NM_010060.1,10301-10319).
cgatggggtcagtccatta

SEQ ID NO: 499863 - DNA, 19 bp, Mus musculus
  siRNA target sequence for Dnahc11 (NM_010060.1,10302-10320).
gatggggtcagtccattaa

SEQ ID NO: 499864 - DNA, 19 bp, Mus musculus
  siRNA target sequence for Dnahc11 (NM_010060.1,10315-10333).
cattaagtcctttgaaact

SEQ ID NO: 499865 - DNA, 19 bp, Mus musculus
  siRNA target sequence for Dnahc11 (NM_010060.1,10372-10390).
ggcatttgtgtcttacatt

SEQ ID NO: 499866 - DNA, 19 bp, Mus musculus
  siRNA target sequence for Dnahc11 (NM_010060.1,10427-10445).
gactgcaagtggattccat

SEQ ID NO: 499867 - DNA, 19 bp, Mus musculus
  siRNA target sequence for Dnahc11 (NM_010060.1,10431-10449).
gcaagtggattccatttct

SEQ ID NO: 499868 - DNA, 19 bp, Mus musculus
  siRNA target sequence for Dnahc11 (NM_010060.1,10504-10522).
gacagacgatgctacaatt

SEQ ID NO: 499869 - DNA, 19 bp, Mus musculus
  siRNA target sequence for Dnahc11 (NM_010060.1,10552-10570).
cgacaggatgtcaactgaa

SEQ ID NO: 499870 - DNA, 19 bp, Mus musculus
  siRNA target sequence for Dnahc11 (NM_010060.1,10622-10640).
cagcaacagggaattaagt

SEQ ID NO: 499871 - DNA, 19 bp, Mus musculus
  siRNA target sequence for Dnahc11 (NM_010060.1,10729-10747).
cggtgatgtcatcctaatt

SEQ ID NO: 499872 - DNA, 19 bp, Mus musculus
  siRNA target sequence for Dnahc11 (NM_010060.1,10822-10840).
catcaggattggcgataaa

SEQ ID NO: 499873 - DNA, 19 bp, Mus musculus
  siRNA target sequence for Dnahc11 (NM_010060.1,10825-10843).
caggattggcgataaagaa

SEQ ID NO: 499874 - DNA, 19 bp, Mus musculus
  siRNA target sequence for Dnahc11 (NM_010060.1,10835-10853).
gataaagaatgcgaattca

SEQ ID NO: 499875 - DNA, 19 bp, Mus musculus
  siRNA target sequence for Dnahc11 (NM_010060.1,10841-10859).
gaatgcgaattcaacaaga

SEQ ID NO: 499876 - DNA, 19 bp, Mus musculus
  siRNA target sequence for Dnahc11 (NM_010060.1,10845-10863).
gcgaattcaacaagaactt

SEQ ID NO: 499877 - DNA, 19 bp, Mus musculus
  siRNA target sequence for Dnahc11 (NM_010060.1,10982-11000).
gaggtggtcagtatcgaaa

SEQ ID NO: 499878 - DNA, 19 bp, Mus musculus
  siRNA target sequence for Dnahc11 (NM_010060.1,11034-11052).
ccaagcagcaaaatgactt

SEQ ID NO: 499879 - DNA, 19 bp, Mus musculus
  siRNA target sequence for Dnahc11 (NM_010060.1,11039-11057).
cagcaaaatgactttaaga

SEQ ID NO: 499880 - DNA, 19 bp, Mus musculus
  siRNA target sequence for Dnahc11 (NM_010060.1,11286-11304).
gtgacctcaggagaatcaa

SEQ ID NO: 499881 - DNA, 19 bp, Mus musculus
  siRNA target sequence for Dnahc11 (NM_010060.1,11392-11410).
gcgcatctgtgccctaata

SEQ ID NO: 499882 - DNA, 19 bp, Mus musculus
  siRNA target sequence for Dnahc11 (NM_010060.1,11492-11510).
gcctttcagatcttgttga

SEQ ID NO: 499883 - DNA, 19 bp, Mus musculus
  siRNA target sequence for Dnahc11 (NM_010060.1,11525-11543).
caccccctcgagttggatt

SEQ ID NO: 499884 - DNA, 19 bp, Mus musculus
  siRNA target sequence for Dnahc11 (NM_010060.1,11578-11596).
gagccctgtggattttcta

SEQ ID NO: 499885 - DNA, 19 bp, Mus musculus
  siRNA target sequence for Dnahc11 (NM_010060.1,11642-11660).
gaattccgaggcttagaca

SEQ ID NO: 499886 - DNA, 19 bp, Mus musculus
  siRNA target sequence for Dnahc11 (NM_010060.1,11691-11709).
ggaaatgggtagaatcaga

SEQ ID NO: 499887 - DNA, 19 bp, Mus musculus
  siRNA target sequence for Dnahc11 (NM_010060.1,11754-11772).
gtttaatacagaaactgat

SEQ ID NO: 499888 - DNA, 19 bp, Mus musculus
  siRNA target sequence for Dnahc11 (NM_010060.1,11817-11835).
ggaatttcgtagaagagaa

SEQ ID NO: 499889 - DNA, 19 bp, Mus musculus
  siRNA target sequence for Dnahc11 (NM_010060.1,11833-11851).
gaaactaggagcaaagtat

SEQ ID NO: 499890 - DNA, 19 bp, Mus musculus
  siRNA target sequence for Dnahc11 (NM_010060.1,11872-11890).
cctgggcaaagcatttgaa

SEQ ID NO: 499891 - DNA, 19 bp, Mus musculus
  siRNA target sequence for Dnahc11 (NM_010060.1,11901-11919).
cgagcaccccggtgttctt

SEQ ID NO: 499892 - DNA, 19 bp, Mus musculus
  siRNA target sequence for Dnahc11 (NM_010060.1,11934-11952).
gtgtggatgcccttaaaga

SEQ ID NO: 499893 - DNA, 19 bp, Mus musculus
  siRNA target sequence for Dnahc11 (NM_010060.1,11975-11993).
ctggggtttacgattgact

SEQ ID NO: 499894 - DNA, 19 bp, Mus musculus
  siRNA target sequence for Dnahc11 (NM_010060.1,12021-12039).
ggcaaggtcaggaactagt

SEQ ID NO: 499895 - DNA, 19 bp, Mus musculus
  siRNA target sequence for Dnahc11 (NM_010060.1,12081-12099).
gggtcatccttcagaatgt

SEQ ID NO: 499896 - DNA, 19 bp, Mus musculus
  siRNA target sequence for Dnahc11 (NM_010060.1,12082-12100).
ggtcatccttcagaatgtt

SEQ ID NO: 499897 - DNA, 19 bp, Mus musculus
  siRNA target sequence for Dnahc11 (NM_010060.1,12198-12216).
ctgtaccttcccaacatga

SEQ ID NO: 499898 - DNA, 19 bp, Mus musculus
  siRNA target sequence for Dnahc11 (NM_010060.1,12230-12248).
caaggcctcctggaaaatt

SEQ ID NO: 499899 - DNA, 19 bp, Mus musculus
  siRNA target sequence for Dnahc11 (NM_010060.1,12235-12253).
cctcctggaaaattccatt

SEQ ID NO: 499900 - DNA, 19 bp, Mus musculus
  siRNA target sequence for Dnahc11 (NM_010060.1,12313-12331).
ctttgaccaggatacactt

SEQ ID NO: 499901 - DNA, 19 bp, Mus musculus
  siRNA target sequence for Dnahc11 (NM_010060.1,12323-12341).
gatacacttgagatgtgtt

SEQ ID NO: 499902 - DNA, 19 bp, Mus musculus
  siRNA target sequence for Dnahc11 (NM_010060.1,12427-12445).
gggctggagccgaagctat

SEQ ID NO: 499903 - DNA, 19 bp, Mus musculus
  siRNA target sequence for Dnahc11 (NM_010060.1,12432-12450).
ggagccgaagctatccttt

SEQ ID NO: 499904 - DNA, 19 bp, Mus musculus
  siRNA target sequence for Dnahc11 (NM_010060.1,12436-12454).
ccgaagctatcctttcagt

SEQ ID NO: 499905 - DNA, 19 bp, Mus musculus
  siRNA target sequence for Dnahc11 (NM_010060.1,12453-12471).
gtcctggagacctgactat

SEQ ID NO: 499906 - DNA, 19 bp, Mus musculus
  siRNA target sequence for Dnahc11 (NM_010060.1,12573-12591).
cagatgcctgggatcgaaa

SEQ ID NO: 499907 - DNA, 19 bp, Mus musculus
  siRNA target sequence for Dnahc11 (NM_010060.1,12578-12596).
gcctgggatcgaaaactat

SEQ ID NO: 499908 - DNA, 19 bp, Mus musculus
  siRNA target sequence for Dnahc11 (NM_010060.1,12597-12615).
gccgggtgtatctagaaga

SEQ ID NO: 499909 - DNA, 19 bp, Mus musculus
  siRNA target sequence for Dnahc11 (NM_010060.1,12598-12616).
ccgggtgtatctagaagaa

SEQ ID NO: 499910 - DNA, 19 bp, Mus musculus
  siRNA target sequence for Dnahc11 (NM_010060.1,12599-12617).
cgggtgtatctagaagaat

SEQ ID NO: 499911 - DNA, 19 bp, Mus musculus
  siRNA target sequence for Dnahc11 (NM_010060.1,12630-12648).
ctctgatcgaggatgaagt

SEQ ID NO: 499912 - DNA, 19 bp, Mus musculus
  siRNA target sequence for Dnahc11 (NM_010060.1,12652-12670).
gctggcaccaggatttgca

SEQ ID NO: 499913 - DNA, 19 bp, Mus musculus
  siRNA target sequence for Dnahc11 (NM_010060.1,12671-12689).
gcccctccctactcagatt

SEQ ID NO: 499914 - DNA, 19 bp, Mus musculus
  siRNA target sequence for Dnahc11 (NM_010060.1,12674-12692).
cctccctactcagattatt

SEQ ID NO: 499915 - DNA, 19 bp, Mus musculus
  siRNA target sequence for Dnahc11 (NM_010060.1,12693-12711).
ctggttatcaccagtacat

SEQ ID NO: 499916 - DNA, 19 bp, Mus musculus
  siRNA target sequence for Dnahc11 (NM_010060.1,12696-12714).
gttatcaccagtacataga

SEQ ID NO: 499917 - DNA, 19 bp, Mus musculus
  siRNA target sequence for Dnahc11 (NM_010060.1,12764-12782).
gctgaaatagagttactaa

SEQ ID NO: 499918 - DNA, 19 bp, Mus musculus
  siRNA target sequence for Dnahc11 (NM_010060.1,12869-12887).
gaagacaaggttaagaata

SEQ ID NO: 499919 - DNA, 19 bp, Mus musculus
  siRNA target sequence for Dnahc11 (NM_010060.1,12966-12984).
cgtatgttctcgtttgctt

SEQ ID NO: 499920 - DNA, 19 bp, Mus musculus
  siRNA target sequence for Dnahc11 (NM_010060.1,13026-13044).
gtgtgtcgcttcaacactt

SEQ ID NO: 499921 - DNA, 19 bp, Mus musculus
  siRNA target sequence for Dnahc11 (NM_010060.1,13057-13075).
gaagggagagttgacatta

SEQ ID NO: 499922 - DNA, 19 bp, Mus musculus
  siRNA target sequence for Dnahc11 (NM_010060.1,13060-13078).
gggagagttgacattatct

SEQ ID NO: 499923 - DNA, 19 bp, Mus musculus
  siRNA target sequence for Dnahc11 (NM_010060.1,13096-13114).
gctgtccgccctgagttat

SEQ ID NO: 499924 - DNA, 19 bp, Mus musculus
  siRNA target sequence for Dnahc11 (NM_010060.1,13115-13133).
gaccgggttccagatacat

SEQ ID NO: 499925 - DNA, 19 bp, Mus musculus
  siRNA target sequence for Dnahc11 (NM_010060.1,13135-13153).
gaacaaactggcatatcca

SEQ ID NO: 499926 - DNA, 19 bp, Mus musculus
  siRNA target sequence for Dnahc11 (NM_010060.1,13144-13162).
ggcatatccatctacttat

SEQ ID NO: 499927 - DNA, 19 bp, Mus musculus
  siRNA target sequence for Dnahc11 (NM_010060.1,13164-13182).
gcctggcccagtggtttaa

SEQ ID NO: 499928 - DNA, 19 bp, Mus musculus
  siRNA target sequence for Dnahc11 (NM_010060.1,13196-13214).
cgctgccgggaacttgata

SEQ ID NO: 499929 - DNA, 19 bp, Mus musculus
  siRNA target sequence for Dnahc11 (NM_010060.1,13198-13216).
ctgccgggaacttgatact

SEQ ID NO: 499930 - DNA, 19 bp, Mus musculus
  siRNA target sequence for Dnahc11 (NM_010060.1,13261-13279).
gttcttcaaccctcaatct

SEQ ID NO: 499931 - DNA, 19 bp, Mus musculus
  siRNA target sequence for Dnahc11 (NM_010060.1,13267-13285).
caaccctcaatctttctta

SEQ ID NO: 499932 - DNA, 19 bp, Mus musculus
  siRNA target sequence for Dnahc11 (NM_010060.1,13278-13296).
ctttcttaacagcaatcat

SEQ ID NO: 499933 - DNA, 19 bp, Mus musculus
  siRNA target sequence for Dnahc11 (NM_010060.1,13297-13315).
gcagaccatggctcgaaaa

SEQ ID NO: 499934 - DNA, 19 bp, Mus musculus
  siRNA target sequence for Dnahc11 (NM_010060.1,13325-13343).
ccactggacagaatgtgtt

SEQ ID NO: 499935 - DNA, 19 bp, Mus musculus
  siRNA target sequence for Dnahc11 (NM_010060.1,13345-13363).
gactatagatgttactaaa

SEQ ID NO: 499936 - DNA, 19 bp, Mus musculus
  siRNA target sequence for Dnahc11 (NM_010060.1,13450-13468).
gtcaggagcccttgttgat

SEQ ID NO: 499937 - DNA, 19 bp, Mus musculus
  siRNA target sequence for Dnahc11 (NM_010060.1,13472-13490).
cgccttaaggagttaacgt

SEQ ID NO: 499938 - DNA, 19 bp, Mus musculus
  siRNA target sequence for Dnahc11 (NM_010060.1,13491-13509).
ccatgatgcccgtcatctt

SEQ ID NO: 499939 - DNA, 19 bp, Mus musculus
  siRNA target sequence for Dnahc11 (NM_010060.1,13492-13510).
catgatgcccgtcatcttt

SEQ ID NO: 499940 - DNA, 19 bp, Mus musculus
  siRNA target sequence for Dnahc11 (NM_010060.1,13524-13542).
ccgtggacagacaagaaat

SEQ ID NO: 499941 - DNA, 19 bp, Mus musculus
  siRNA target sequence for Dnahc11 (NM_010060.1,13525-13543).
cgtggacagacaagaaatt

SEQ ID NO: 499942 - DNA, 19 bp, Mus musculus
  siRNA target sequence for Dnahc11 (NM_010060.1,13526-13544).
gtggacagacaagaaatta

SEQ ID NO: 499943 - DNA, 19 bp, Mus musculus
  siRNA target sequence for Dnahc11 (NM_010060.1,13551-13569).
cctacgagtgccctgttta

SEQ ID NO: 499944 - DNA, 19 bp, Mus musculus
  siRNA target sequence for Dnahc11 (NM_010060.1,13555-13573).
cgagtgccctgtttacaaa

SEQ ID NO: 499945 - DNA, 19 bp, Mus musculus
  siRNA target sequence for Dnahc11 (NM_010060.1,13556-13574).
gagtgccctgtttacaaaa

SEQ ID NO: 499946 - DNA, 19 bp, Mus musculus
  siRNA target sequence for Dnahc5 (NM_133365.1,328-346).
ctatctgtttgcaattgta

SEQ ID NO: 499947 - DNA, 19 bp, Mus musculus
  siRNA target sequence for Dnahc5 (NM_133365.1,387-405).
ctcttcttgagggtaatca

SEQ ID NO: 499948 - DNA, 19 bp, Mus musculus
  siRNA target sequence for Dnahc5 (NM_133365.1,395-413).
gagggtaatcagattgaaa

SEQ ID NO: 499949 - DNA, 19 bp, Mus musculus
  siRNA target sequence for Dnahc5 (NM_133365.1,441-459).
gactccgtcatctcatgtt

SEQ ID NO: 499950 - DNA, 19 bp, Mus musculus
  siRNA target sequence for Dnahc5 (NM_133365.1,443-461).
ctccgtcatctcatgtttt

SEQ ID NO: 499951 - DNA, 19 bp, Mus musculus
  siRNA target sequence for Dnahc5 (NM_133365.1,521-539).
cctgcctccggaaagatga

SEQ ID NO: 499952 - DNA, 19 bp, Mus musculus
  siRNA target sequence for Dnahc5 (NM_133365.1,524-542).
gcctccggaaagatgaaaa

SEQ ID NO: 499953 - DNA, 19 bp, Mus musculus
  siRNA target sequence for Dnahc5 (NM_133365.1,525-543).
cctccggaaagatgaaaaa

SEQ ID NO: 499954 - DNA, 19 bp, Mus musculus
  siRNA target sequence for Dnahc5 (NM_133365.1,567-585).
ggaaagacgttgctcttat

SEQ ID NO: 499955 - DNA, 19 bp, Mus musculus
  siRNA target sequence for Dnahc5 (NM_133365.1,607-625).
caggtctgacccatccaaa

SEQ ID NO: 499956 - DNA, 19 bp, Mus musculus
  siRNA target sequence for Dnahc5 (NM_133365.1,647-665).
caccgggaggtgagcttta

SEQ ID NO: 499957 - DNA, 19 bp, Mus musculus
  siRNA target sequence for Dnahc5 (NM_133365.1,711-729).
gtctgctctcagacatctt

SEQ ID NO: 499958 - DNA, 19 bp, Mus musculus
  siRNA target sequence for Dnahc5 (NM_133365.1,934-952).
cttggctctagctagtaat

SEQ ID NO: 499959 - DNA, 19 bp, Mus musculus
  siRNA target sequence for Dnahc5 (NM_133365.1,954-972).
ccgagactgtggaaaaagt

SEQ ID NO: 499960 - DNA, 19 bp, Mus musculus
  siRNA target sequence for Dnahc5 (NM_133365.1,982-1000).
catgagagtgtggatcaaa

SEQ ID NO: 499961 - DNA, 19 bp, Mus musculus
  siRNA target sequence for Dnahc5 (NM_133365.1,1144-1162).
ggctgcgctggcattgctt

SEQ ID NO: 499962 - DNA, 19 bp, Mus musculus
  siRNA target sequence for Dnahc5 (NM_133365.1,1197-1215).
gagatacagacattaggat

SEQ ID NO: 499963 - DNA, 19 bp, Mus musculus
  siRNA target sequence for Dnahc5 (NM_133365.1,1236-1254).
caaaagacaatgtcaagta

SEQ ID NO: 499964 - DNA, 19 bp, Mus musculus
  siRNA target sequence for Dnahc5 (NM_133365.1,1261-1279).
cacactggagaaatgttgt

SEQ ID NO: 499965 - DNA, 19 bp, Mus musculus
  siRNA target sequence for Dnahc5 (NM_133365.1,1291-1309).
cagcagtgaccctgtaact

SEQ ID NO: 499966 - DNA, 19 bp, Mus musculus
  siRNA target sequence for Dnahc5 (NM_133365.1,1293-1311).
gcagtgaccctgtaactat

SEQ ID NO: 499967 - DNA, 19 bp, Mus musculus
  siRNA target sequence for Dnahc5 (NM_133365.1,1316-1334).
gatgcgattcctacactta

SEQ ID NO: 499968 - DNA, 19 bp, Mus musculus
  siRNA target sequence for Dnahc5 (NM_133365.1,1320-1338).
cgattcctacacttataaa

SEQ ID NO: 499969 - DNA, 19 bp, Mus musculus
  siRNA target sequence for Dnahc5 (NM_133365.1,1321-1339).
gattcctacacttataaat

SEQ ID NO: 499970 - DNA, 19 bp, Mus musculus
  siRNA target sequence for Dnahc5 (NM_133365.1,1326-1344).
ctacacttataaatgcaat

SEQ ID NO: 499971 - DNA, 19 bp, Mus musculus
  siRNA target sequence for Dnahc5 (NM_133365.1,1357-1375).
cagcatctctcactactat

SEQ ID NO: 499972 - DNA, 19 bp, Mus musculus
  siRNA target sequence for Dnahc5 (NM_133365.1,1359-1377).
gcatctctcactactataa

SEQ ID NO: 499973 - DNA, 19 bp, Mus musculus
  siRNA target sequence for Dnahc5 (NM_133365.1,1395-1413).
catctctgtttgtaaaggt

SEQ ID NO: 499974 - DNA, 19 bp, Mus musculus
  siRNA target sequence for Dnahc5 (NM_133365.1,1414-1432).
gacaaatcagatgatatct

SEQ ID NO: 499975 - DNA, 19 bp, Mus musculus
  siRNA target sequence for Dnahc5 (NM_133365.1,1423-1441).
gatgatatctgcatgtaaa

SEQ ID NO: 499976 - DNA, 19 bp, Mus musculus
  siRNA target sequence for Dnahc5 (NM_133365.1,1481-1499).
cagcctcaggagattgtta

SEQ ID NO: 499977 - DNA, 19 bp, Mus musculus
  siRNA target sequence for Dnahc5 (NM_133365.1,1526-1544).
ctcaagcagggataccaat

SEQ ID NO: 499978 - DNA, 19 bp, Mus musculus
  siRNA target sequence for Dnahc5 (NM_133365.1,1587-1605).
gcgaaaaacaatttgactt

SEQ ID NO: 499979 - DNA, 19 bp, Mus musculus
  siRNA target sequence for Dnahc5 (NM_133365.1,1588-1606).
cgaaaaacaatttgacttt

SEQ ID NO: 499980 - DNA, 19 bp, Mus musculus
  siRNA target sequence for Dnahc5 (NM_133365.1,1646-1664).
cgacgtctggccaagataa

SEQ ID NO: 499981 - DNA, 19 bp, Mus musculus
  siRNA target sequence for Dnahc5 (NM_133365.1,1647-1665).
gacgtctggccaagataat

SEQ ID NO: 499982 - DNA, 19 bp, Mus musculus
  siRNA target sequence for Dnahc5 (NM_133365.1,1656-1674).
ccaagataatggacatctt

SEQ ID NO: 499983 - DNA, 19 bp, Mus musculus
  siRNA target sequence for Dnahc5 (NM_133365.1,1697-1715).
gtcctgcaagattccaaaa

SEQ ID NO: 499984 - DNA, 19 bp, Mus musculus
  siRNA target sequence for Dnahc5 (NM_133365.1,1699-1717).
cctgcaagattccaaaata

SEQ ID NO: 499985 - DNA, 19 bp, Mus musculus
  siRNA target sequence for Dnahc5 (NM_133365.1,1740-1758).
ctaagtaccaggacattgt

SEQ ID NO: 499986 - DNA, 19 bp, Mus musculus
  siRNA target sequence for Dnahc5 (NM_133365.1,1793-1811).
gatcaacgggaaatggatt

SEQ ID NO: 499987 - DNA, 19 bp, Mus musculus
  siRNA target sequence for Dnahc5 (NM_133365.1,1807-1825).
ggattttgaccaagattat

SEQ ID NO: 499988 - DNA, 19 bp, Mus musculus
  siRNA target sequence for Dnahc5 (NM_133365.1,1831-1849).
gttttgcaagcggattaat

SEQ ID NO: 499989 - DNA, 19 bp, Mus musculus
  siRNA target sequence for Dnahc5 (NM_133365.1,1841-1859).
cggattaatgagcttcata

SEQ ID NO: 499990 - DNA, 19 bp, Mus musculus
  siRNA target sequence for Dnahc5 (NM_133365.1,1872-1890).
ggttcatggacatcacatt

SEQ ID NO: 499991 - DNA, 19 bp, Mus musculus
  siRNA target sequence for Dnahc5 (NM_133365.1,1873-1891).
gttcatggacatcacattt

SEQ ID NO: 499992 - DNA, 19 bp, Mus musculus
  siRNA target sequence for Dnahc5 (NM_133365.1,1876-1894).
catggacatcacatttgaa

SEQ ID NO: 499993 - DNA, 19 bp, Mus musculus
  siRNA target sequence for Dnahc5 (NM_133365.1,1923-1941).
gcacgctgaagaaattcga

SEQ ID NO: 499994 - DNA, 19 bp, Mus musculus
  siRNA target sequence for Dnahc5 (NM_133365.1,1933-1951).
gaaattcgaaagactgaat

SEQ ID NO: 499995 - DNA, 19 bp, Mus musculus
  siRNA target sequence for Dnahc5 (NM_133365.1,1944-1962).
gactgaatatacctaatct

SEQ ID NO: 499996 - DNA, 19 bp, Mus musculus
  siRNA target sequence for Dnahc5 (NM_133365.1,2189-2207).
gtgatccgcagctataaca

SEQ ID NO: 499997 - DNA, 19 bp, Mus musculus
  siRNA target sequence for Dnahc5 (NM_133365.1,2258-2276).
cttcagcagattgaagaaa

SEQ ID NO: 499998 - DNA, 19 bp, Mus musculus
  siRNA target sequence for Dnahc5 (NM_133365.1,2286-2304).
gtcttgaggcttccttatt

SEQ ID NO: 499999 - DNA, 19 bp, Mus musculus
  siRNA target sequence for Dnahc5 (NM_133365.1,2316-2334).
caggcacaggggagttgtt

SEQ ID NO: 500000 - DNA, 19 bp, Mus musculus
  siRNA target sequence for Dnahc5 (NM_133365.1,2345-2363).
gatcctcagatattagtct

SEQ ID NO: 500001 - DNA, 19 bp, Mus musculus
  siRNA target sequence for Dnahc5 (NM_133365.1,2432-2450).
cagaagcgggacatgttca

SEQ ID NO: 500002 - DNA, 19 bp, Mus musculus
  siRNA target sequence for Dnahc5 (NM_133365.1,2446-2464).
gttcaaaaagaatttcagt

SEQ ID NO: 500003 - DNA, 19 bp, Mus musculus
  siRNA target sequence for Dnahc5 (NM_133365.1,2517-2535).
ctgccatcgagcagttgat

SEQ ID NO: 500004 - DNA, 19 bp, Mus musculus
  siRNA target sequence for Dnahc5 (NM_133365.1,2519-2537).
gccatcgagcagttgatgt

SEQ ID NO: 500005 - DNA, 19 bp, Mus musculus
  siRNA target sequence for Dnahc5 (NM_133365.1,2520-2538).
ccatcgagcagttgatgtt

SEQ ID NO: 500006 - DNA, 19 bp, Mus musculus
  siRNA target sequence for Dnahc5 (NM_133365.1,2521-2539).
catcgagcagttgatgttt

SEQ ID NO: 500007 - DNA, 19 bp, Mus musculus
  siRNA target sequence for Dnahc5 (NM_133365.1,2592-2610).
cttggacgtccctgaatat

SEQ ID NO: 500008 - DNA, 19 bp, Mus musculus
  siRNA target sequence for Dnahc5 (NM_133365.1,2605-2623).
gaatattgggggctattta

SEQ ID NO: 500009 - DNA, 19 bp, Mus musculus
  siRNA target sequence for Dnahc5 (NM_133365.1,2663-2681).
cttgaccgggtcaatgact

SEQ ID NO: 500010 - DNA, 19 bp, Mus musculus
  siRNA target sequence for Dnahc5 (NM_133365.1,2668-2686).
ccgggtcaatgacttgatt

SEQ ID NO: 500011 - DNA, 19 bp, Mus musculus
  siRNA target sequence for Dnahc5 (NM_133365.1,2670-2688).
gggtcaatgacttgattga

SEQ ID NO: 500012 - DNA, 19 bp, Mus musculus
  siRNA target sequence for Dnahc5 (NM_133365.1,2672-2690).
gtcaatgacttgattgagt

SEQ ID NO: 500013 - DNA, 19 bp, Mus musculus
  siRNA target sequence for Dnahc5 (NM_133365.1,2721-2739).
gtagcatggctctttgtca

SEQ ID NO: 500014 - DNA, 19 bp, Mus musculus
  siRNA target sequence for Dnahc5 (NM_133365.1,2755-2773).
ccccctgacttgtgaagaa

SEQ ID NO: 500015 - DNA, 19 bp, Mus musculus
  siRNA target sequence for Dnahc5 (NM_133365.1,2756-2774).
cccctgacttgtgaagaat

SEQ ID NO: 500016 - DNA, 19 bp, Mus musculus
  siRNA target sequence for Dnahc5 (NM_133365.1,2757-2775).
ccctgacttgtgaagaatt

SEQ ID NO: 500017 - DNA, 19 bp, Mus musculus
  siRNA target sequence for Dnahc5 (NM_133365.1,2776-2794).
cctccaaatgacaaaggat

SEQ ID NO: 500018 - DNA, 19 bp, Mus musculus
  siRNA target sequence for Dnahc5 (NM_133365.1,2808-2826).
gtgcgcagctactccattt

SEQ ID NO: 500019 - DNA, 19 bp, Mus musculus
  siRNA target sequence for Dnahc5 (NM_133365.1,2810-2828).
gcgcagctactccatttta

SEQ ID NO: 500020 - DNA, 19 bp, Mus musculus
  siRNA target sequence for Dnahc5 (NM_133365.1,2813-2831).
cagctactccattttaaaa

SEQ ID NO: 500021 - DNA, 19 bp, Mus musculus
  siRNA target sequence for Dnahc5 (NM_133365.1,2932-2950).
cagtcctagcggtaacact

SEQ ID NO: 500022 - DNA, 19 bp, Mus musculus
  siRNA target sequence for Dnahc5 (NM_133365.1,3473-3491).
ctggagatagcatccataa

SEQ ID NO: 500023 - DNA, 19 bp, Mus musculus
  siRNA target sequence for Dnahc5 (NM_133365.1,3476-3494).
gagatagcatccataaact

SEQ ID NO: 500024 - DNA, 19 bp, Mus musculus
  siRNA target sequence for Dnahc5 (NM_133365.1,3478-3496).
gatagcatccataaactta

SEQ ID NO: 500025 - DNA, 19 bp, Mus musculus
  siRNA target sequence for Dnahc5 (NM_133365.1,3508-3526).
gcaaacccagaattactat

SEQ ID NO: 500026 - DNA, 19 bp, Mus musculus
  siRNA target sequence for Dnahc5 (NM_133365.1,3509-3527).
caaacccagaattactata

SEQ ID NO: 500027 - DNA, 19 bp, Mus musculus
  siRNA target sequence for Dnahc5 (NM_133365.1,3548-3566).
gagattgtaaagttggtat

SEQ ID NO: 500028 - DNA, 19 bp, Mus musculus
  siRNA target sequence for Dnahc5 (NM_133365.1,3628-3646).
caaacgctacaatcacatt

SEQ ID NO: 500029 - DNA, 19 bp, Mus musculus
  siRNA target sequence for Dnahc5 (NM_133365.1,3667-3685).
caccatcatgacctttatt

SEQ ID NO: 500030 - DNA, 19 bp, Mus musculus
  siRNA target sequence for Dnahc5 (NM_133365.1,3792-3810).
ctctatatacagctgattt

SEQ ID NO: 500031 - DNA, 19 bp, Mus musculus
  siRNA target sequence for Dnahc5 (NM_133365.1,3794-3812).
ctatatacagctgatttga

SEQ ID NO: 500032 - DNA, 19 bp, Mus musculus
  siRNA target sequence for Dnahc5 (NM_133365.1,3882-3900).
gggctgagatggaaaacat

SEQ ID NO: 500033 - DNA, 19 bp, Mus musculus
  siRNA target sequence for Dnahc5 (NM_133365.1,3946-3964).
caaggacctggatgatatt

SEQ ID NO: 500034 - DNA, 19 bp, Mus musculus
  siRNA target sequence for Dnahc5 (NM_133365.1,3950-3968).
gacctggatgatattagga

SEQ ID NO: 500035 - DNA, 19 bp, Mus musculus
  siRNA target sequence for Dnahc5 (NM_133365.1,4018-4036).
cttccaagtgggacctatt

SEQ ID NO: 500036 - DNA, 19 bp, Mus musculus
  siRNA target sequence for Dnahc5 (NM_133365.1,4029-4047).
gacctattgaggaatccta

SEQ ID NO: 500037 - DNA, 19 bp, Mus musculus
  siRNA target sequence for Dnahc5 (NM_133365.1,4044-4062).
cctatgccctccttaacaa

SEQ ID NO: 500038 - DNA, 19 bp, Mus musculus
  siRNA target sequence for Dnahc5 (NM_133365.1,4243-4261).
cctggactatgatttgaat

SEQ ID NO: 500039 - DNA, 19 bp, Mus musculus
  siRNA target sequence for Dnahc5 (NM_133365.1,4296-4314).
ccagcggcaggcttattat

SEQ ID NO: 500040 - DNA, 19 bp, Mus musculus
  siRNA target sequence for Dnahc5 (NM_133365.1,4297-4315).
cagcggcaggcttattata

SEQ ID NO: 500041 - DNA, 19 bp, Mus musculus
  siRNA target sequence for Dnahc5 (NM_133365.1,4302-4320).
gcaggcttattatattcca

SEQ ID NO: 500042 - DNA, 19 bp, Mus musculus
  siRNA target sequence for Dnahc5 (NM_133365.1,4319-4337).
cagaatcaattcgataaca

SEQ ID NO: 500043 - DNA, 19 bp, Mus musculus
  siRNA target sequence for Dnahc5 (NM_133365.1,4321-4339).
gaatcaattcgataacata

SEQ ID NO: 500044 - DNA, 19 bp, Mus musculus
  siRNA target sequence for Dnahc5 (NM_133365.1,4330-4348).
cgataacatatatcgtaaa

SEQ ID NO: 500045 - DNA, 19 bp, Mus musculus
  siRNA target sequence for Dnahc5 (NM_133365.1,4429-4447).
gctgaatcttctacagaaa

SEQ ID NO: 500046 - DNA, 19 bp, Mus musculus
  siRNA target sequence for Dnahc5 (NM_133365.1,4471-4489).
catcgagactgtgaatagt

SEQ ID NO: 500047 - DNA, 19 bp, Mus musculus
  siRNA target sequence for Dnahc5 (NM_133365.1,4474-4492).
cgagactgtgaatagttat

SEQ ID NO: 500048 - DNA, 19 bp, Mus musculus
  siRNA target sequence for Dnahc5 (NM_133365.1,4477-4495).
gactgtgaatagttatcaa

SEQ ID NO: 500049 - DNA, 19 bp, Mus musculus
  siRNA target sequence for Dnahc5 (NM_133365.1,4506-4524).
ggtcagacgtgaacattga

SEQ ID NO: 500050 - DNA, 19 bp, Mus musculus
  siRNA target sequence for Dnahc5 (NM_133365.1,4765-4783).
ggaagctcctctgctaaaa

SEQ ID NO: 500051 - DNA, 19 bp, Mus musculus
  siRNA target sequence for Dnahc5 (NM_133365.1,4830-4848).
gagacattgagcaaaagct

SEQ ID NO: 500052 - DNA, 19 bp, Mus musculus
  siRNA target sequence for Dnahc5 (NM_133365.1,4861-4879).
caatgagtgggacaacaaa

SEQ ID NO: 500053 - DNA, 19 bp, Mus musculus
  siRNA target sequence for Dnahc5 (NM_133365.1,4870-4888).
ggacaacaaaacattaaca

SEQ ID NO: 500054 - DNA, 19 bp, Mus musculus
  siRNA target sequence for Dnahc5 (NM_133365.1,4990-5008).
ccttagcaacaggtacaat

SEQ ID NO: 500055 - DNA, 19 bp, Mus musculus
  siRNA target sequence for Dnahc5 (NM_133365.1,5002-5020).
gtacaatatgccattcaaa

SEQ ID NO: 500056 - DNA, 19 bp, Mus musculus
  siRNA target sequence for Dnahc5 (NM_133365.1,5052-5070).
ccaactcaacagacatcat

SEQ ID NO: 500057 - DNA, 19 bp, Mus musculus
  siRNA target sequence for Dnahc5 (NM_133365.1,5095-5113).
cttgtggatttatctagaa

SEQ ID NO: 500058 - DNA, 19 bp, Mus musculus
  siRNA target sequence for Dnahc5 (NM_133365.1,5119-5137).
cttcgtgggaggagacatt

SEQ ID NO: 500059 - DNA, 19 bp, Mus musculus
  siRNA target sequence for Dnahc5 (NM_133365.1,5159-5177).
gccaagcgcttttccaata

SEQ ID NO: 500060 - DNA, 19 bp, Mus musculus
  siRNA target sequence for Dnahc5 (NM_133365.1,5160-5178).
ccaagcgcttttccaatat

SEQ ID NO: 500061 - DNA, 19 bp, Mus musculus
  siRNA target sequence for Dnahc5 (NM_133365.1,5161-5179).
caagcgcttttccaatata

SEQ ID NO: 500062 - DNA, 19 bp, Mus musculus
  siRNA target sequence for Dnahc5 (NM_133365.1,5164-5182).
gcgcttttccaatatagat

SEQ ID NO: 500063 - DNA, 19 bp, Mus musculus
  siRNA target sequence for Dnahc5 (NM_133365.1,5165-5183).
cgcttttccaatatagata

SEQ ID NO: 500064 - DNA, 19 bp, Mus musculus
  siRNA target sequence for Dnahc5 (NM_133365.1,5166-5184).
gcttttccaatatagataa

SEQ ID NO: 500065 - DNA, 19 bp, Mus musculus
  siRNA target sequence for Dnahc5 (NM_133365.1,5207-5225).
cgggcacatgagataccaa

SEQ ID NO: 500066 - DNA, 19 bp, Mus musculus
  siRNA target sequence for Dnahc5 (NM_133365.1,5208-5226).
gggcacatgagataccaaa

SEQ ID NO: 500067 - DNA, 19 bp, Mus musculus
  siRNA target sequence for Dnahc5 (NM_133365.1,5211-5229).
cacatgagataccaaatgt

SEQ ID NO: 500068 - DNA, 19 bp, Mus musculus
  siRNA target sequence for Dnahc5 (NM_133365.1,5282-5300).
ctggaccagttggaaatct

SEQ ID NO: 500069 - DNA, 19 bp, Mus musculus
  siRNA target sequence for Dnahc5 (NM_133365.1,5373-5391).
ccgctctgctggagattct

SEQ ID NO: 500070 - DNA, 19 bp, Mus musculus
  siRNA target sequence for Dnahc5 (NM_133365.1,5434-5452).
gaacgtgtttgacaacatt

SEQ ID NO: 500071 - DNA, 19 bp, Mus musculus
  siRNA target sequence for Dnahc5 (NM_133365.1,5483-5501).
gatcggattctgtcaatct

SEQ ID NO: 500072 - DNA, 19 bp, Mus musculus
  siRNA target sequence for Dnahc5 (NM_133365.1,5510-5528).
gagggcgagacaattgaat

SEQ ID NO: 500073 - DNA, 19 bp, Mus musculus
  siRNA target sequence for Dnahc5 (NM_133365.1,5558-5576).
gtggaagtctggcttaatt

SEQ ID NO: 500074 - DNA, 19 bp, Mus musculus
  siRNA target sequence for Dnahc5 (NM_133365.1,5587-5605).
ggagtcacagtcctcatta

SEQ ID NO: 500075 - DNA, 19 bp, Mus musculus
  siRNA target sequence for Dnahc5 (NM_133365.1,5590-5608).
gtcacagtcctcattacat

SEQ ID NO: 500076 - DNA, 19 bp, Mus musculus
  siRNA target sequence for Dnahc5 (NM_133365.1,5598-5616).
cctcattacatcttgtgat

SEQ ID NO: 500077 - DNA, 19 bp, Mus musculus
  siRNA target sequence for Dnahc5 (NM_133365.1,5599-5617).
ctcattacatcttgtgatt

SEQ ID NO: 500078 - DNA, 19 bp, Mus musculus
  siRNA target sequence for Dnahc5 (NM_133365.1,5618-5636).
cgccaggcagctgcaaata

SEQ ID NO: 500079 - DNA, 19 bp, Mus musculus
  siRNA target sequence for Dnahc5 (NM_133365.1,5620-5638).
ccaggcagctgcaaatatt

SEQ ID NO: 500080 - DNA, 19 bp, Mus musculus
  siRNA target sequence for Dnahc5 (NM_133365.1,5639-5657).
caagaacccggtttccaat

SEQ ID NO: 500081 - DNA, 19 bp, Mus musculus
  siRNA target sequence for Dnahc5 (NM_133365.1,5642-5660).
gaacccggtttccaattga

SEQ ID NO: 500082 - DNA, 19 bp, Mus musculus
  siRNA target sequence for Dnahc5 (NM_133365.1,5646-5664).
ccggtttccaattgattga

SEQ ID NO: 500083 - DNA, 19 bp, Mus musculus
  siRNA target sequence for Dnahc5 (NM_133365.1,5647-5665).
cggtttccaattgattgaa

SEQ ID NO: 500084 - DNA, 19 bp, Mus musculus
  siRNA target sequence for Dnahc5 (NM_133365.1,5648-5666).
ggtttccaattgattgaat

SEQ ID NO: 500085 - DNA, 19 bp, Mus musculus
  siRNA target sequence for Dnahc5 (NM_133365.1,5653-5671).
ccaattgattgaatttctt

SEQ ID NO: 500086 - DNA, 19 bp, Mus musculus
  siRNA target sequence for Dnahc5 (NM_133365.1,5680-5698).
ccccgctcaggttggatta

SEQ ID NO: 500087 - DNA, 19 bp, Mus musculus
  siRNA target sequence for Dnahc5 (NM_133365.1,5681-5699).
cccgctcaggttggattat

SEQ ID NO: 500088 - DNA, 19 bp, Mus musculus
  siRNA target sequence for Dnahc5 (NM_133365.1,5682-5700).
ccgctcaggttggattatt

SEQ ID NO: 500089 - DNA, 19 bp, Mus musculus
  siRNA target sequence for Dnahc5 (NM_133365.1,5683-5701).
cgctcaggttggattatta

SEQ ID NO: 500090 - DNA, 19 bp, Mus musculus
  siRNA target sequence for Dnahc5 (NM_133365.1,5689-5707).
ggttggattattaggaatt

SEQ ID NO: 500091 - DNA, 19 bp, Mus musculus
  siRNA target sequence for Dnahc5 (NM_133365.1,5693-5711).
ggattattaggaattcaga

SEQ ID NO: 500092 - DNA, 19 bp, Mus musculus
  siRNA target sequence for Dnahc5 (NM_133365.1,5694-5712).
gattattaggaattcagat

SEQ ID NO: 500093 - DNA, 19 bp, Mus musculus
  siRNA target sequence for Dnahc5 (NM_133365.1,5719-5737).
gacccgggactcagaagaa

SEQ ID NO: 500094 - DNA, 19 bp, Mus musculus
  siRNA target sequence for Dnahc5 (NM_133365.1,5740-5758).
ccttcgaaatgccaagttt

SEQ ID NO: 500095 - DNA, 19 bp, Mus musculus
  siRNA target sequence for Dnahc5 (NM_133365.1,5744-5762).
cgaaatgccaagtttgata

SEQ ID NO: 500096 - DNA, 19 bp, Mus musculus
  siRNA target sequence for Dnahc5 (NM_133365.1,5844-5862).
ccatggaacgggttaaata

SEQ ID NO: 500097 - DNA, 19 bp, Mus musculus
  siRNA target sequence for Dnahc5 (NM_133365.1,5866-5884).
gactctgattactatccat

SEQ ID NO: 500098 - DNA, 19 bp, Mus musculus
  siRNA target sequence for Dnahc5 (NM_133365.1,5890-5908).
ccaaagggacatctttgat

SEQ ID NO: 500099 - DNA, 19 bp, Mus musculus
  siRNA target sequence for Dnahc5 (NM_133365.1,5956-5974).
gaaacagtgcaggttctat

SEQ ID NO: 500100 - DNA, 19 bp, Mus musculus
  siRNA target sequence for Dnahc5 (NM_133365.1,5960-5978).
cagtgcaggttctatttta

SEQ ID NO: 500101 - DNA, 19 bp, Mus musculus
  siRNA target sequence for Dnahc5 (NM_133365.1,6010-6028).
caccgacgtggctttcata

SEQ ID NO: 500102 - DNA, 19 bp, Mus musculus
  siRNA target sequence for Dnahc5 (NM_133365.1,6021-6039).
ctttcatataccagaatga

SEQ ID NO: 500103 - DNA, 19 bp, Mus musculus
  siRNA target sequence for Dnahc5 (NM_133365.1,6051-6069).
gcactgacagacttgtcat

SEQ ID NO: 500104 - DNA, 19 bp, Mus musculus
  siRNA target sequence for Dnahc5 (NM_133365.1,6052-6070).
cactgacagacttgtcata

SEQ ID NO: 500105 - DNA, 19 bp, Mus musculus
  siRNA target sequence for Dnahc5 (NM_133365.1,6082-6100).
ggacaggtgctatatcaca

SEQ ID NO: 500106 - DNA, 19 bp, Mus musculus
  siRNA target sequence for Dnahc5 (NM_133365.1,6083-6101).
gacaggtgctatatcacat

SEQ ID NO: 500107 - DNA, 19 bp, Mus musculus
  siRNA target sequence for Dnahc5 (NM_133365.1,6186-6204).
gccgatgtcttgggaaata

SEQ ID NO: 500108 - DNA, 19 bp, Mus musculus
  siRNA target sequence for Dnahc5 (NM_133365.1,6222-6240).
gctcggaccagatggattt

SEQ ID NO: 500109 - DNA, 19 bp, Mus musculus
  siRNA target sequence for Dnahc5 (NM_133365.1,6243-6261).
gaggacttgggcggatatt

SEQ ID NO: 500110 - DNA, 19 bp, Mus musculus
  siRNA target sequence for Dnahc5 (NM_133365.1,6245-6263).
ggacttgggcggatattca

SEQ ID NO: 500111 - DNA, 19 bp, Mus musculus
  siRNA target sequence for Dnahc5 (NM_133365.1,6246-6264).
gacttgggcggatattcaa

SEQ ID NO: 500112 - DNA, 19 bp, Mus musculus
  siRNA target sequence for Dnahc5 (NM_133365.1,6333-6351).
cagttgcagcccagcaaat

SEQ ID NO: 500113 - DNA, 19 bp, Mus musculus
  siRNA target sequence for Dnahc5 (NM_133365.1,6341-6359).
gcccagcaaatctccatta

SEQ ID NO: 500114 - DNA, 19 bp, Mus musculus
  siRNA target sequence for Dnahc5 (NM_133365.1,6343-6361).
ccagcaaatctccattatt

SEQ ID NO: 500115 - DNA, 19 bp, Mus musculus
  siRNA target sequence for Dnahc5 (NM_133365.1,6347-6365).
caaatctccattattctca

SEQ ID NO: 500116 - DNA, 19 bp, Mus musculus
  siRNA target sequence for Dnahc5 (NM_133365.1,6355-6373).
cattattctcacgtgtaaa

SEQ ID NO: 500117 - DNA, 19 bp, Mus musculus
  siRNA target sequence for Dnahc5 (NM_133365.1,6366-6384).
cgtgtaaaaaggagcataa

SEQ ID NO: 500118 - DNA, 19 bp, Mus musculus
  siRNA target sequence for Dnahc5 (NM_133365.1,6367-6385).
gtgtaaaaaggagcataaa

SEQ ID NO: 500119 - DNA, 19 bp, Mus musculus
  siRNA target sequence for Dnahc5 (NM_133365.1,6418-6436).
gaccatgaacccagaattt

SEQ ID NO: 500120 - DNA, 19 bp, Mus musculus
  siRNA target sequence for Dnahc5 (NM_133365.1,6527-6545).
gtccctgaccggcagatta

SEQ ID NO: 500121 - DNA, 19 bp, Mus musculus
  siRNA target sequence for Dnahc5 (NM_133365.1,6530-6548).
cctgaccggcagattatca

SEQ ID NO: 500122 - DNA, 19 bp, Mus musculus
  siRNA target sequence for Dnahc5 (NM_133365.1,6531-6549).
ctgaccggcagattatcat

SEQ ID NO: 500123 - DNA, 19 bp, Mus musculus
  siRNA target sequence for Dnahc5 (NM_133365.1,6533-6551).
gaccggcagattatcatca

SEQ ID NO: 500124 - DNA, 19 bp, Mus musculus
  siRNA target sequence for Dnahc5 (NM_133365.1,6567-6585).
gctgcggcttcattgataa

SEQ ID NO: 500125 - DNA, 19 bp, Mus musculus
  siRNA target sequence for Dnahc5 (NM_133365.1,6570-6588).
gcggcttcattgataacgt

SEQ ID NO: 500126 - DNA, 19 bp, Mus musculus
  siRNA target sequence for Dnahc5 (NM_133365.1,6571-6589).
cggcttcattgataacgta

SEQ ID NO: 500127 - DNA, 19 bp, Mus musculus
  siRNA target sequence for Dnahc5 (NM_133365.1,6586-6604).
cgtagttctggccagaaaa

SEQ ID NO: 500128 - DNA, 19 bp, Mus musculus
  siRNA target sequence for Dnahc5 (NM_133365.1,6593-6611).
ctggccagaaaatttttca

SEQ ID NO: 500129 - DNA, 19 bp, Mus musculus
  siRNA target sequence for Dnahc5 (NM_133365.1,6640-6658).
ctcgaagcaggttcactat

SEQ ID NO: 500130 - DNA, 19 bp, Mus musculus
  siRNA target sequence for Dnahc5 (NM_133365.1,6665-6683).
ggtctccgcaacattctgt

SEQ ID NO: 500131 - DNA, 19 bp, Mus musculus
  siRNA target sequence for Dnahc5 (NM_133365.1,6717-6735).
ccagtcccacggatacaga

SEQ ID NO: 500132 - DNA, 19 bp, Mus musculus
  siRNA target sequence for Dnahc5 (NM_133365.1,6718-6736).
cagtcccacggatacagaa

SEQ ID NO: 500133 - DNA, 19 bp, Mus musculus
  siRNA target sequence for Dnahc5 (NM_133365.1,6754-6772).
cgtgctgcgggacatgaat

SEQ ID NO: 500134 - DNA, 19 bp, Mus musculus
  siRNA target sequence for Dnahc5 (NM_133365.1,6758-6776).
ctgcgggacatgaatcttt

SEQ ID NO: 500135 - DNA, 19 bp, Mus musculus
  siRNA target sequence for Dnahc5 (NM_133365.1,6801-6819).
ccctgtttttgagtttgat

SEQ ID NO: 500136 - DNA, 19 bp, Mus musculus
  siRNA target sequence for Dnahc5 (NM_133365.1,6965-6983).
gtgaggcacggcatgatga

SEQ ID NO: 500137 - DNA, 19 bp, Mus musculus
  siRNA target sequence for Dnahc5 (NM_133365.1,7033-7051).
gaaagccatgacagattgt

SEQ ID NO: 500138 - DNA, 19 bp, Mus musculus
  siRNA target sequence for Dnahc5 (NM_133365.1,7063-7081).
cagagaaatgaggatgaat

SEQ ID NO: 500139 - DNA, 19 bp, Mus musculus
  siRNA target sequence for Dnahc5 (NM_133365.1,7074-7092).
ggatgaatcccaaagcaat

SEQ ID NO: 500140 - DNA, 19 bp, Mus musculus
  siRNA target sequence for Dnahc5 (NM_133365.1,7135-7153).
cgactggactgatggaata

SEQ ID NO: 500141 - DNA, 19 bp, Mus musculus
  siRNA target sequence for Dnahc5 (NM_133365.1,7136-7154).
gactggactgatggaatat

SEQ ID NO: 500142 - DNA, 19 bp, Mus musculus
  siRNA target sequence for Dnahc5 (NM_133365.1,7184-7202).
gcaaagaaaggggaacata

SEQ ID NO: 500143 - DNA, 19 bp, Mus musculus
  siRNA target sequence for Dnahc5 (NM_133365.1,7233-7251).
ccatctggattgaaaatct

SEQ ID NO: 500144 - DNA, 19 bp, Mus musculus
  siRNA target sequence for Dnahc5 (NM_133365.1,7314-7332).
ctccaaactgcaagattgt

SEQ ID NO: 500145 - DNA, 19 bp, Mus musculus
  siRNA target sequence for Dnahc5 (NM_133365.1,7316-7334).
ccaaactgcaagattgttt

SEQ ID NO: 500146 - DNA, 19 bp, Mus musculus
  siRNA target sequence for Dnahc5 (NM_133365.1,7337-7355).
gaacctcataacattgaca

SEQ ID NO: 500147 - DNA, 19 bp, Mus musculus
  siRNA target sequence for Dnahc5 (NM_133365.1,7343-7361).
cataacattgacaatgctt

SEQ ID NO: 500148 - DNA, 19 bp, Mus musculus
  siRNA target sequence for Dnahc5 (NM_133365.1,7364-7382).
cccgccaccgtctcaagaa

SEQ ID NO: 500149 - DNA, 19 bp, Mus musculus
  siRNA target sequence for Dnahc5 (NM_133365.1,7365-7383).
ccgccaccgtctcaagaaa

SEQ ID NO: 500150 - DNA, 19 bp, Mus musculus
  siRNA target sequence for Dnahc5 (NM_133365.1,7366-7384).
cgccaccgtctcaagaaat

SEQ ID NO: 500151 - DNA, 19 bp, Mus musculus
  siRNA target sequence for Dnahc5 (NM_133365.1,7411-7429).
cctcgactggagtcctatt

SEQ ID NO: 500152 - DNA, 19 bp, Mus musculus
  siRNA target sequence for Dnahc5 (NM_133365.1,7414-7432).
cgactggagtcctattctt

SEQ ID NO: 500153 - DNA, 19 bp, Mus musculus
  siRNA target sequence for Dnahc5 (NM_133365.1,7425-7443).
ctattcttgagggttttct

SEQ ID NO: 500154 - DNA, 19 bp, Mus musculus
  siRNA target sequence for Dnahc5 (NM_133365.1,7458-7476).
ctcaagaggctgaaatcct

SEQ ID NO: 500155 - DNA, 19 bp, Mus musculus
  siRNA target sequence for Dnahc5 (NM_133365.1,7643-7661).
ctggggaggctgtttgtct

SEQ ID NO: 500156 - DNA, 19 bp, Mus musculus
  siRNA target sequence for Dnahc5 (NM_133365.1,11449-11467).
ggatgtaactgcaaacaaa

SEQ ID NO: 500157 - DNA, 19 bp, Mus musculus
  siRNA target sequence for Dnahc5 (NM_133365.1,11697-11715).
cggagatgcgcttggttaa

SEQ ID NO: 500158 - DNA, 19 bp, Mus musculus
  siRNA target sequence for Dnahc5 (NM_133365.1,11698-11716).
ggagatgcgcttggttaat

SEQ ID NO: 500159 - DNA, 19 bp, Mus musculus
  siRNA target sequence for Dnahc5 (NM_133365.1,11706-11724).
gcttggttaatgagatgta

SEQ ID NO: 500160 - DNA, 19 bp, Mus musculus
  siRNA target sequence for Dnahc5 (NM_133365.1,11728-11746).
gacttcgctccgtcagttt

SEQ ID NO: 500161 - DNA, 19 bp, Mus musculus
  siRNA target sequence for Dnahc5 (NM_133365.1,11779-11797).
gtcaagagccccaattaca

SEQ ID NO: 500162 - DNA, 19 bp, Mus musculus
  siRNA target sequence for Dnahc5 (NM_133365.1,11799-11817).
gcaagaggattgctaatat

SEQ ID NO: 500163 - DNA, 19 bp, Mus musculus
  siRNA target sequence for Dnahc5 (NM_133365.1,11803-11821).
gaggattgctaatatcatt

SEQ ID NO: 500164 - DNA, 19 bp, Mus musculus
  siRNA target sequence for Dnahc5 (NM_133365.1,11832-11850).
cctatgaggtattcaagta

SEQ ID NO: 500165 - DNA, 19 bp, Mus musculus
  siRNA target sequence for Dnahc5 (NM_133365.1,11853-11871).
ctgcccgaggcctatatga

SEQ ID NO: 500166 - DNA, 19 bp, Mus musculus
  siRNA target sequence for Dnahc5 (NM_133365.1,11856-11874).
cccgaggcctatatgaaga

SEQ ID NO: 500167 - DNA, 19 bp, Mus musculus
  siRNA target sequence for Dnahc5 (NM_133365.1,11862-11880).
gcctatatgaagagcataa

SEQ ID NO: 500168 - DNA, 19 bp, Mus musculus
  siRNA target sequence for Dnahc5 (NM_133365.1,11876-11894).
cataaattcctgttcactt

SEQ ID NO: 500169 - DNA, 19 bp, Mus musculus
  siRNA target sequence for Dnahc5 (NM_133365.1,11923-11941).
gaggaacctagtcaaacat

SEQ ID NO: 500170 - DNA, 19 bp, Mus musculus
  siRNA target sequence for Dnahc5 (NM_133365.1,11944-11962).
ggagtttctcactctcatt

SEQ ID NO: 500171 - DNA, 19 bp, Mus musculus
  siRNA target sequence for Dnahc5 (NM_133365.1,12000-12018).
ctaagccatcaaaatggat

SEQ ID NO: 500172 - DNA, 19 bp, Mus musculus
  siRNA target sequence for Dnahc5 (NM_133365.1,12023-12041).
gacatgacttggctgaatt

SEQ ID NO: 500173 - DNA, 19 bp, Mus musculus
  siRNA target sequence for Dnahc5 (NM_133365.1,12035-12053).
ctgaatttggtggaactta

SEQ ID NO: 500174 - DNA, 19 bp, Mus musculus
  siRNA target sequence for Dnahc5 (NM_133365.1,12046-12064).
ggaacttagcaaacttaaa

SEQ ID NO: 500175 - DNA, 19 bp, Mus musculus
  siRNA target sequence for Dnahc5 (NM_133365.1,12050-12068).
cttagcaaacttaaacagt

SEQ ID NO: 500176 - DNA, 19 bp, Mus musculus
  siRNA target sequence for Dnahc5 (NM_133365.1,12055-12073).
caaacttaaacagttttca

SEQ ID NO: 500177 - DNA, 19 bp, Mus musculus
  siRNA target sequence for Dnahc5 (NM_133365.1,12076-12094).
catccttgatcagatatca

SEQ ID NO: 500178 - DNA, 19 bp, Mus musculus
  siRNA target sequence for Dnahc5 (NM_133365.1,12152-12170).
cttccaaatgcctacgata

SEQ ID NO: 500179 - DNA, 19 bp, Mus musculus
  siRNA target sequence for Dnahc5 (NM_133365.1,12187-12205).
cagacgcctccttctgatt

SEQ ID NO: 500180 - DNA, 19 bp, Mus musculus
  siRNA target sequence for Dnahc5 (NM_133365.1,12191-12209).
cgcctccttctgattaggt

SEQ ID NO: 500181 - DNA, 19 bp, Mus musculus
  siRNA target sequence for Dnahc5 (NM_133365.1,12214-12232).
gtgtcccgacagaaccatt

SEQ ID NO: 500182 - DNA, 19 bp, Mus musculus
  siRNA target sequence for Dnahc5 (NM_133365.1,12233-12251).
gcccaggctcgcaagtaca

SEQ ID NO: 500183 - DNA, 19 bp, Mus musculus
  siRNA target sequence for Dnahc5 (NM_133365.1,12359-12377).
ggctccgaccccacagatt

SEQ ID NO: 500184 - DNA, 19 bp, Mus musculus
  siRNA target sequence for Dnahc5 (NM_133365.1,12363-12381).
ccgaccccacagattccat

SEQ ID NO: 500185 - DNA, 19 bp, Mus musculus
  siRNA target sequence for Dnahc5 (NM_133365.1,12486-12504).
gaggatgggtacttctaca

SEQ ID NO: 500186 - DNA, 19 bp, Mus musculus
  siRNA target sequence for Dnahc5 (NM_133365.1,12510-12528).
gccacctgggacttgactt

SEQ ID NO: 500187 - DNA, 19 bp, Mus musculus
  siRNA target sequence for Dnahc5 (NM_133365.1,12536-12554).
gagctaatggacgtagtta

SEQ ID NO: 500188 - DNA, 19 bp, Mus musculus
  siRNA target sequence for Dnahc5 (NM_133365.1,12538-12556).
gctaatggacgtagttaca

SEQ ID NO: 500189 - DNA, 19 bp, Mus musculus
  siRNA target sequence for Dnahc5 (NM_133365.1,12743-12761).
cagtggaagcccatgctat

SEQ ID NO: 500190 - DNA, 19 bp, Mus musculus
  siRNA target sequence for Dnahc5 (NM_133365.1,12745-12763).
gtggaagcccatgctatat

SEQ ID NO: 500191 - DNA, 19 bp, Mus musculus
  siRNA target sequence for Dnahc5 (NM_133365.1,12829-12847).
cccttacgaatttaaccaa

SEQ ID NO: 500192 - DNA, 19 bp, Mus musculus
  siRNA target sequence for Dnahc5 (NM_133365.1,12862-12880).
cacggtgcagttcattcaa

SEQ ID NO: 500193 - DNA, 19 bp, Mus musculus
  siRNA target sequence for Dnahc5 (NM_133365.1,12924-12942).
ccactgtccgctacatgat

SEQ ID NO: 500194 - DNA, 19 bp, Mus musculus
  siRNA target sequence for Dnahc5 (NM_133365.1,12925-12943).
cactgtccgctacatgata

SEQ ID NO: 500195 - DNA, 19 bp, Mus musculus
  siRNA target sequence for Dnahc5 (NM_133365.1,12934-12952).
ctacatgataggagagatt

SEQ ID NO: 500196 - DNA, 19 bp, Mus musculus
  siRNA target sequence for Dnahc5 (NM_133365.1,13038-13056).
gaccagatttcacctttta

SEQ ID NO: 500197 - DNA, 19 bp, Mus musculus
  siRNA target sequence for Dnahc5 (NM_133365.1,13050-13068).
ccttttaccaaggatacaa

SEQ ID NO: 500198 - DNA, 19 bp, Mus musculus
  siRNA target sequence for Dnahc5 (NM_133365.1,13058-13076).
caaggatacaacattccaa

SEQ ID NO: 500199 - DNA, 19 bp, Mus musculus
  siRNA target sequence for Dnahc5 (NM_133365.1,13061-13079).
ggatacaacattccaaaat

SEQ ID NO: 500200 - DNA, 19 bp, Mus musculus
  siRNA target sequence for Dnahc5 (NM_133365.1,13284-13302).
ctgatgatatgctagagaa

SEQ ID NO: 500201 - DNA, 19 bp, Mus musculus
  siRNA target sequence for Dnahc5 (NM_133365.1,13455-13473).
ctgttgatggcaccattat

SEQ ID NO: 500202 - DNA, 19 bp, Mus musculus
  siRNA target sequence for Dnahc5 (NM_133365.1,13460-13478).
gatggcaccattatcatga

SEQ ID NO: 500203 - DNA, 19 bp, Mus musculus
  siRNA target sequence for Dnahc5 (NM_133365.1,13467-13485).
ccattatcatgagtgaaaa

SEQ ID NO: 500204 - DNA, 19 bp, Mus musculus
  siRNA target sequence for Dnahc5 (NM_133365.1,13468-13486).
cattatcatgagtgaaaat

SEQ ID NO: 500205 - DNA, 19 bp, Mus musculus
  siRNA target sequence for Dnahc5 (NM_133365.1,13491-13509).
gagatgctctggattgcat

SEQ ID NO: 500206 - DNA, 19 bp, Mus musculus
  siRNA target sequence for Dnahc5 (NM_133365.1,13544-13562).
gcatcatgggtgtctagta

SEQ ID NO: 500207 - DNA, 19 bp, Mus musculus
  siRNA target sequence for Dnahc5 (NM_133365.1,13666-13684).
cccgcagggattcttaact

SEQ ID NO: 500208 - DNA, 19 bp, Mus musculus
  siRNA target sequence for Dnahc5 (NM_133365.1,13683-13701).
ctgcgatgcgacaggaaat

SEQ ID NO: 500209 - DNA, 19 bp, Mus musculus
  siRNA target sequence for Dnahc5 (NM_133365.1,13685-13703).
gcgatgcgacaggaaataa

SEQ ID NO: 500210 - DNA, 19 bp, Mus musculus
  siRNA target sequence for Dnahc5 (NM_133365.1,13719-13737).
gatgggctttggacaatat

SEQ ID NO: 500211 - DNA, 19 bp, Mus musculus
  siRNA target sequence for Dnahc5 (NM_133365.1,13723-13741).
ggctttggacaatatggtt

SEQ ID NO: 500212 - DNA, 19 bp, Mus musculus
  siRNA target sequence for Dnahc5 (NM_133365.1,13804-13822).
ctacgtctatggcttatat

SEQ ID NO: 500213 - DNA, 19 bp, Mus musculus
  siRNA target sequence for Dnahc5 (NM_133365.1,13832-13850).
gctggctgggacaaaagga

SEQ ID NO: 500214 - DNA, 19 bp, Mus musculus
  siRNA target sequence for Dnahc5 (NM_133365.1,13855-13873).
gaaactcattgaatccaaa

SEQ ID NO: 500215 - DNA, 19 bp, Mus musculus
  siRNA target sequence for Dnahc5 (NM_133365.1,13889-13907).
gagctgatgcctgtcataa

SEQ ID NO: 500216 - DNA, 19 bp, Mus musculus
  siRNA target sequence for Dnahc5 (NM_133365.1,13894-13912).
gatgcctgtcataaggatt

SEQ ID NO: 500217 - DNA, 19 bp, Mus musculus
  siRNA target sequence for Dnahc8 (NM_013811.1,669-687).
ctaagttccgccgaagtat

SEQ ID NO: 500218 - DNA, 19 bp, Mus musculus
  siRNA target sequence for Dnahc8 (NM_013811.1,673-691).
gttccgccgaagtatgact

SEQ ID NO: 500219 - DNA, 19 bp, Mus musculus
  siRNA target sequence for Dnahc8 (NM_013811.1,773-791).
ggcccctcgcataaataca

SEQ ID NO: 500220 - DNA, 19 bp, Mus musculus
  siRNA target sequence for Dnahc8 (NM_013811.1,774-792).
gcccctcgcataaatacat

SEQ ID NO: 500221 - DNA, 19 bp, Mus musculus
  siRNA target sequence for Dnahc8 (NM_013811.1,775-793).
cccctcgcataaatacata

SEQ ID NO: 500222 - DNA, 19 bp, Mus musculus
  siRNA target sequence for Dnahc8 (NM_013811.1,777-795).
cctcgcataaatacatatt

SEQ ID NO: 500223 - DNA, 19 bp, Mus musculus
  siRNA target sequence for Dnahc8 (NM_013811.1,778-796).
ctcgcataaatacatattt

SEQ ID NO: 500224 - DNA, 19 bp, Mus musculus
  siRNA target sequence for Dnahc8 (NM_013811.1,780-798).
cgcataaatacatatttga

SEQ ID NO: 500225 - DNA, 19 bp, Mus musculus
  siRNA target sequence for Dnahc8 (NM_013811.1,839-857).
gaagaactaattttggatt

SEQ ID NO: 500226 - DNA, 19 bp, Mus musculus
  siRNA target sequence for Dnahc8 (NM_013811.1,890-908).
gagaaaggtggctgtaaga

SEQ ID NO: 500227 - DNA, 19 bp, Mus musculus
  siRNA target sequence for Dnahc8 (NM_013811.1,901-919).
ctgtaagacgctgaagttt

SEQ ID NO: 500228 - DNA, 19 bp, Mus musculus
  siRNA target sequence for Dnahc8 (NM_013811.1,903-921).
gtaagacgctgaagttttt

SEQ ID NO: 500229 - DNA, 19 bp, Mus musculus
  siRNA target sequence for Dnahc8 (NM_013811.1,933-951).
gagaagtgcccggttttga

SEQ ID NO: 500230 - DNA, 19 bp, Mus musculus
  siRNA target sequence for Dnahc8 (NM_013811.1,935-953).
gaagtgcccggttttgaat

SEQ ID NO: 500231 - DNA, 19 bp, Mus musculus
  siRNA target sequence for Dnahc8 (NM_013811.1,1031-1049).
ctgaaagggctgtgcttat

SEQ ID NO: 500232 - DNA, 19 bp, Mus musculus
  siRNA target sequence for Dnahc8 (NM_013811.1,1054-1072).
cgtccgttgtcgtaatgat

SEQ ID NO: 500233 - DNA, 19 bp, Mus musculus
  siRNA target sequence for Dnahc8 (NM_013811.1,1057-1075).
ccgttgtcgtaatgatgtt

SEQ ID NO: 500234 - DNA, 19 bp, Mus musculus
  siRNA target sequence for Dnahc8 (NM_013811.1,1070-1088).
gatgttgccataaattcca

SEQ ID NO: 500235 - DNA, 19 bp, Mus musculus
  siRNA target sequence for Dnahc8 (NM_013811.1,1077-1095).
ccataaattccaaaaccat

SEQ ID NO: 500236 - DNA, 19 bp, Mus musculus
  siRNA target sequence for Dnahc8 (NM_013811.1,1148-1166).
ggaatcaagcacatgttga

SEQ ID NO: 500237 - DNA, 19 bp, Mus musculus
  siRNA target sequence for Dnahc8 (NM_013811.1,1156-1174).
gcacatgttgaaaagcata

SEQ ID NO: 500238 - DNA, 19 bp, Mus musculus
  siRNA target sequence for Dnahc8 (NM_013811.1,1200-1218).
gcaactggggagctttaaa

SEQ ID NO: 500239 - DNA, 19 bp, Mus musculus
  siRNA target sequence for Dnahc8 (NM_013811.1,1270-1288).
cagatatcttgcatcttta

SEQ ID NO: 500240 - DNA, 19 bp, Mus musculus
  siRNA target sequence for Dnahc8 (NM_013811.1,1289-1307).
gatgatgctaccataagca

SEQ ID NO: 500241 - DNA, 19 bp, Mus musculus
  siRNA target sequence for Dnahc8 (NM_013811.1,1503-1521).
gtcccctcaccgaattgga

SEQ ID NO: 500242 - DNA, 19 bp, Mus musculus
  siRNA target sequence for Dnahc8 (NM_013811.1,1582-1600).
ctgtaaggccgtcataaat

SEQ ID NO: 500243 - DNA, 19 bp, Mus musculus
  siRNA target sequence for Dnahc8 (NM_013811.1,1584-1602).
gtaaggccgtcataaatgt

SEQ ID NO: 500244 - DNA, 19 bp, Mus musculus
  siRNA target sequence for Dnahc8 (NM_013811.1,1590-1608).
ccgtcataaatgtgctaaa

SEQ ID NO: 500245 - DNA, 19 bp, Mus musculus
  siRNA target sequence for Dnahc8 (NM_013811.1,1613-1631).
gcacactccaagctgttaa

SEQ ID NO: 500246 - DNA, 19 bp, Mus musculus
  siRNA target sequence for Dnahc8 (NM_013811.1,1663-1681).
cgactccgctaatgaatca

SEQ ID NO: 500247 - DNA, 19 bp, Mus musculus
  siRNA target sequence for Dnahc8 (NM_013811.1,1664-1682).
gactccgctaatgaatcaa

SEQ ID NO: 500248 - DNA, 19 bp, Mus musculus
  siRNA target sequence for Dnahc8 (NM_013811.1,1669-1687).
cgctaatgaatcaaaggat

SEQ ID NO: 500249 - DNA, 19 bp, Mus musculus
  siRNA target sequence for Dnahc8 (NM_013811.1,1670-1688).
gctaatgaatcaaaggata

SEQ ID NO: 500250 - DNA, 19 bp, Mus musculus
  siRNA target sequence for Dnahc8 (NM_013811.1,1685-1703).
gataacgtgcgctatttgt

SEQ ID NO: 500251 - DNA, 19 bp, Mus musculus
  siRNA target sequence for Dnahc8 (NM_013811.1,1718-1736).
gtgtgtcagcccctctata

SEQ ID NO: 500252 - DNA, 19 bp, Mus musculus
  siRNA target sequence for Dnahc8 (NM_013811.1,1722-1740).
gtcagcccctctataacta

SEQ ID NO: 500253 - DNA, 19 bp, Mus musculus
  siRNA target sequence for Dnahc8 (NM_013811.1,1799-1817).
cacagtgtgtcgaggtatt

SEQ ID NO: 500254 - DNA, 19 bp, Mus musculus
  siRNA target sequence for Dnahc8 (NM_013811.1,1801-1819).
cagtgtgtcgaggtattat

SEQ ID NO: 500255 - DNA, 19 bp, Mus musculus
  siRNA target sequence for Dnahc8 (NM_013811.1,1803-1821).
gtgtgtcgaggtattataa

SEQ ID NO: 500256 - DNA, 19 bp, Mus musculus
  siRNA target sequence for Dnahc8 (NM_013811.1,1805-1823).
gtgtcgaggtattataata

SEQ ID NO: 500257 - DNA, 19 bp, Mus musculus
  siRNA target sequence for Dnahc8 (NM_013811.1,1807-1825).
gtcgaggtattataataca

SEQ ID NO: 500258 - DNA, 19 bp, Mus musculus
  siRNA target sequence for Dnahc8 (NM_013811.1,1810-1828).
gaggtattataatacatca

SEQ ID NO: 500259 - DNA, 19 bp, Mus musculus
  siRNA target sequence for Dnahc8 (NM_013811.1,1877-1895).
gcctgcaaagcatacatta

SEQ ID NO: 500260 - DNA, 19 bp, Mus musculus
  siRNA target sequence for Dnahc8 (NM_013811.1,1881-1899).
gcaaagcatacattactga

SEQ ID NO: 500261 - DNA, 19 bp, Mus musculus
  siRNA target sequence for Dnahc8 (NM_013811.1,1927-1945).
ggaaacgccagctgtacta

SEQ ID NO: 500262 - DNA, 19 bp, Mus musculus
  siRNA target sequence for Dnahc8 (NM_013811.1,1932-1950).
cgccagctgtactaaaaaa

SEQ ID NO: 500263 - DNA, 19 bp, Mus musculus
  siRNA target sequence for Dnahc8 (NM_013811.1,1933-1951).
gccagctgtactaaaaaaa

SEQ ID NO: 500264 - DNA, 19 bp, Mus musculus
  siRNA target sequence for Dnahc8 (NM_013811.1,1987-2005).
ggcatcctttcacaaaaca

SEQ ID NO: 500265 - DNA, 19 bp, Mus musculus
  siRNA target sequence for Dnahc8 (NM_013811.1,1988-2006).
gcatcctttcacaaaacaa

SEQ ID NO: 500266 - DNA, 19 bp, Mus musculus
  siRNA target sequence for Dnahc8 (NM_013811.1,2004-2022).
caaggaagcagattttaga

SEQ ID NO: 500267 - DNA, 19 bp, Mus musculus
  siRNA target sequence for Dnahc8 (NM_013811.1,2146-2164).
gagcaactctacaatcgaa

SEQ ID NO: 500268 - DNA, 19 bp, Mus musculus
  siRNA target sequence for Dnahc8 (NM_013811.1,2157-2175).
caatcgaaggaatcgatat

SEQ ID NO: 500269 - DNA, 19 bp, Mus musculus
  siRNA target sequence for Dnahc8 (NM_013811.1,2207-2225).
ggcattaagaagaaccaat

SEQ ID NO: 500270 - DNA, 19 bp, Mus musculus
  siRNA target sequence for Dnahc8 (NM_013811.1,2208-2226).
gcattaagaagaaccaata

SEQ ID NO: 500271 - DNA, 19 bp, Mus musculus
  siRNA target sequence for Dnahc8 (NM_013811.1,2209-2227).
cattaagaagaaccaatat

SEQ ID NO: 500272 - DNA, 19 bp, Mus musculus
  siRNA target sequence for Dnahc8 (NM_013811.1,2237-2255).
gatccacggagaacagaat

SEQ ID NO: 500273 - DNA, 19 bp, Mus musculus
  siRNA target sequence for Dnahc8 (NM_013811.1,2241-2259).
cacggagaacagaatttga

SEQ ID NO: 500274 - DNA, 19 bp, Mus musculus
  siRNA target sequence for Dnahc8 (NM_013811.1,2243-2261).
cggagaacagaatttgaca

SEQ ID NO: 500275 - DNA, 19 bp, Mus musculus
  siRNA target sequence for Dnahc8 (NM_013811.1,2273-2291).
gagtttatggggaaaatca

SEQ ID NO: 500276 - DNA, 19 bp, Mus musculus
  siRNA target sequence for Dnahc8 (NM_013811.1,2306-2324).
caaatccaggcgtttatga

SEQ ID NO: 500277 - DNA, 19 bp, Mus musculus
  siRNA target sequence for Dnahc8 (NM_013811.1,2413-2431).
ggaaatcaatcacacaatt

SEQ ID NO: 500278 - DNA, 19 bp, Mus musculus
  siRNA target sequence for Dnahc8 (NM_013811.1,2425-2443).
cacaattgaacggattctt

SEQ ID NO: 500279 - DNA, 19 bp, Mus musculus
  siRNA target sequence for Dnahc8 (NM_013811.1,2427-2445).
caattgaacggattcttca

SEQ ID NO: 500280 - DNA, 19 bp, Mus musculus
  siRNA target sequence for Dnahc8 (NM_013811.1,2448-2466).
gctatgtggctgaacttga

SEQ ID NO: 500281 - DNA, 19 bp, Mus musculus
  siRNA target sequence for Dnahc8 (NM_013811.1,2449-2467).
ctatgtggctgaacttgaa

SEQ ID NO: 500282 - DNA, 19 bp, Mus musculus
  siRNA target sequence for Dnahc8 (NM_013811.1,2527-2545).
ccccatagcagggaaaatt

SEQ ID NO: 500283 - DNA, 19 bp, Mus musculus
  siRNA target sequence for Dnahc8 (NM_013811.1,2579-2597).
gaacccatcaactatttct

SEQ ID NO: 500284 - DNA, 19 bp, Mus musculus
  siRNA target sequence for Dnahc8 (NM_013811.1,2636-2654).
gctgtcatccgtcagtata

SEQ ID NO: 500285 - DNA, 19 bp, Mus musculus
  siRNA target sequence for Dnahc8 (NM_013811.1,2637-2655).
ctgtcatccgtcagtataa

SEQ ID NO: 500286 - DNA, 19 bp, Mus musculus
  siRNA target sequence for Dnahc8 (NM_013811.1,2774-2792).
gggaagttgctggttaact

SEQ ID NO: 500287 - DNA, 19 bp, Mus musculus
  siRNA target sequence for Dnahc8 (NM_013811.1,2776-2794).
gaagttgctggttaacttt

SEQ ID NO: 500288 - DNA, 19 bp, Mus musculus
  siRNA target sequence for Dnahc8 (NM_013811.1,2799-2817).
ctaagattctggaagttgt

SEQ ID NO: 500289 - DNA, 19 bp, Mus musculus
  siRNA target sequence for Dnahc8 (NM_013811.1,2813-2831).
gttgtgcgggaaacgaaat

SEQ ID NO: 500290 - DNA, 19 bp, Mus musculus
  siRNA target sequence for Dnahc8 (NM_013811.1,2816-2834).
gtgcgggaaacgaaatgca

SEQ ID NO: 500291 - DNA, 19 bp, Mus musculus
  siRNA target sequence for Dnahc8 (NM_013811.1,2822-2840).
gaaacgaaatgcatgataa

SEQ ID NO: 500292 - DNA, 19 bp, Mus musculus
  siRNA target sequence for Dnahc8 (NM_013811.1,2826-2844).
cgaaatgcatgataaagat

SEQ ID NO: 500293 - DNA, 19 bp, Mus musculus
  siRNA target sequence for Dnahc8 (NM_013811.1,2858-2876).
ccggaacaagcaaagaatt

SEQ ID NO: 500294 - DNA, 19 bp, Mus musculus
  siRNA target sequence for Dnahc8 (NM_013811.1,3258-3276).
gtgctgatattctaaacca

SEQ ID NO: 500295 - DNA, 19 bp, Mus musculus
  siRNA target sequence for Dnahc8 (NM_013811.1,3299-3317).
gccgtgaaagagctgatat

SEQ ID NO: 500296 - DNA, 19 bp, Mus musculus
  siRNA target sequence for Dnahc8 (NM_013811.1,3300-3318).
ccgtgaaagagctgatatt

SEQ ID NO: 500297 - DNA, 19 bp, Mus musculus
  siRNA target sequence for Dnahc8 (NM_013811.1,3301-3319).
cgtgaaagagctgatatta

SEQ ID NO: 500298 - DNA, 19 bp, Mus musculus
  siRNA target sequence for Dnahc8 (NM_013811.1,3326-3344).
gaacaaatctacgaagtta

SEQ ID NO: 500299 - DNA, 19 bp, Mus musculus
  siRNA target sequence for Dnahc8 (NM_013811.1,3329-3347).
caaatctacgaagttaaat

SEQ ID NO: 500300 - DNA, 19 bp, Mus musculus
  siRNA target sequence for Dnahc8 (NM_013811.1,3360-3378).
cagccaaatcggtgaaaga

SEQ ID NO: 500301 - DNA, 19 bp, Mus musculus
  siRNA target sequence for Dnahc8 (NM_013811.1,3420-3438).
ccgaaggcctcgactttga

SEQ ID NO: 500302 - DNA, 19 bp, Mus musculus
  siRNA target sequence for Dnahc8 (NM_013811.1,3421-3439).
cgaaggcctcgactttgaa

SEQ ID NO: 500303 - DNA, 19 bp, Mus musculus
  siRNA target sequence for Dnahc8 (NM_013811.1,3422-3440).
gaaggcctcgactttgaat

SEQ ID NO: 500304 - DNA, 19 bp, Mus musculus
  siRNA target sequence for Dnahc8 (NM_013811.1,3451-3469).
ggaggtcgacaccaatgat

SEQ ID NO: 500305 - DNA, 19 bp, Mus musculus
  siRNA target sequence for Dnahc8 (NM_013811.1,3452-3470).
gaggtcgacaccaatgata

SEQ ID NO: 500306 - DNA, 19 bp, Mus musculus
  siRNA target sequence for Dnahc8 (NM_013811.1,3454-3472).
ggtcgacaccaatgataaa

SEQ ID NO: 500307 - DNA, 19 bp, Mus musculus
  siRNA target sequence for Dnahc8 (NM_013811.1,3457-3475).
cgacaccaatgataaagaa

SEQ ID NO: 500308 - DNA, 19 bp, Mus musculus
  siRNA target sequence for Dnahc8 (NM_013811.1,3510-3528).
ctttcttctcgcatcaatt

SEQ ID NO: 500309 - DNA, 19 bp, Mus musculus
  siRNA target sequence for Dnahc8 (NM_013811.1,3544-3562).
gaaggcgacgcgcttatct

SEQ ID NO: 500310 - DNA, 19 bp, Mus musculus
  siRNA target sequence for Dnahc8 (NM_013811.1,3611-3629).
cggtcagaggacatcgttt

SEQ ID NO: 500311 - DNA, 19 bp, Mus musculus
  siRNA target sequence for Dnahc8 (NM_013811.1,3619-3637).
ggacatcgtttccttcata

SEQ ID NO: 500312 - DNA, 19 bp, Mus musculus
  siRNA target sequence for Dnahc8 (NM_013811.1,3622-3640).
catcgtttccttcataaaa

SEQ ID NO: 500313 - DNA, 19 bp, Mus musculus
  siRNA target sequence for Dnahc8 (NM_013811.1,3625-3643).
cgtttccttcataaaaact

SEQ ID NO: 500314 - DNA, 19 bp, Mus musculus
  siRNA target sequence for Dnahc8 (NM_013811.1,3642-3660).
ctgaagtgcaccttgcaat

SEQ ID NO: 500315 - DNA, 19 bp, Mus musculus
  siRNA target sequence for Dnahc8 (NM_013811.1,3767-3785).
cagcaggtcaggcagataa

SEQ ID NO: 500316 - DNA, 19 bp, Mus musculus
  siRNA target sequence for Dnahc8 (NM_013811.1,3772-3790).
ggtcaggcagataaagtct

SEQ ID NO: 500317 - DNA, 19 bp, Mus musculus
  siRNA target sequence for Dnahc8 (NM_013811.1,3773-3791).
gtcaggcagataaagtctt

SEQ ID NO: 500318 - DNA, 19 bp, Mus musculus
  siRNA target sequence for Dnahc8 (NM_013811.1,3829-3847).
ctcggggaaaccactgaaa

SEQ ID NO: 500319 - DNA, 19 bp, Mus musculus
  siRNA target sequence for Dnahc8 (NM_013811.1,3850-3868).
ggaagagaggtcttttgaa

SEQ ID NO: 500320 - DNA, 19 bp, Mus musculus
  siRNA target sequence for Dnahc8 (NM_013811.1,3886-3904).
gaagctgaagaacttctat

SEQ ID NO: 500321 - DNA, 19 bp, Mus musculus
  siRNA target sequence for Dnahc8 (NM_013811.1,4001-4019).
gactttcagaagtacaaga

SEQ ID NO: 500322 - DNA, 19 bp, Mus musculus
  siRNA target sequence for Dnahc8 (NM_013811.1,4081-4099).
gactgagatccgatcagaa

SEQ ID NO: 500323 - DNA, 19 bp, Mus musculus
  siRNA target sequence for Dnahc8 (NM_013811.1,4113-4131).
ccacccttgagcaagagat

SEQ ID NO: 500324 - DNA, 19 bp, Mus musculus
  siRNA target sequence for Dnahc8 (NM_013811.1,4141-4159).
gaagcccattattgttgta

SEQ ID NO: 500325 - DNA, 19 bp, Mus musculus
  siRNA target sequence for Dnahc8 (NM_013811.1,4177-4195).
cacagagccaatgaagtta

SEQ ID NO: 500326 - DNA, 19 bp, Mus musculus
  siRNA target sequence for Dnahc8 (NM_013811.1,4228-4246).
gctgctctgtcgctactta

SEQ ID NO: 500327 - DNA, 19 bp, Mus musculus
  siRNA target sequence for Dnahc8 (NM_013811.1,4229-4247).
ctgctctgtcgctacttaa

SEQ ID NO: 500328 - DNA, 19 bp, Mus musculus
  siRNA target sequence for Dnahc8 (NM_013811.1,4238-4256).
cgctacttaaatgaagaat

SEQ ID NO: 500329 - DNA, 19 bp, Mus musculus
  siRNA target sequence for Dnahc8 (NM_013811.1,4270-4288).
gtcagacatgataacgttt

SEQ ID NO: 500330 - DNA, 19 bp, Mus musculus
  siRNA target sequence for Dnahc8 (NM_013811.1,4274-4292).
gacatgataacgtttatca

SEQ ID NO: 500331 - DNA, 19 bp, Mus musculus
  siRNA target sequence for Dnahc8 (NM_013811.1,4284-4302).
cgtttatcaacgaatactt

SEQ ID NO: 500332 - DNA, 19 bp, Mus musculus
  siRNA target sequence for Dnahc8 (NM_013811.1,4344-4362).
gattcgctatggaagcttt

SEQ ID NO: 500333 - DNA, 19 bp, Mus musculus
  siRNA target sequence for Dnahc8 (NM_013811.1,4368-4386).
gtattcgagataatgaaat

SEQ ID NO: 500334 - DNA, 19 bp, Mus musculus
  siRNA target sequence for Dnahc8 (NM_013811.1,4418-4436).
gaagcctacggcattttga

SEQ ID NO: 500335 - DNA, 19 bp, Mus musculus
  siRNA target sequence for Dnahc8 (NM_013811.1,4428-4446).
gcattttgaacagatttga

SEQ ID NO: 500336 - DNA, 19 bp, Mus musculus
  siRNA target sequence for Dnahc8 (NM_013811.1,4476-4494).
gcgttgacaccctgagata

SEQ ID NO: 500337 - DNA, 19 bp, Mus musculus
  siRNA target sequence for Dnahc8 (NM_013811.1,4478-4496).
gttgacaccctgagatact

SEQ ID NO: 500338 - DNA, 19 bp, Mus musculus
  siRNA target sequence for Dnahc8 (NM_013811.1,4481-4499).
gacaccctgagatactcat

SEQ ID NO: 500339 - DNA, 19 bp, Mus musculus
  siRNA target sequence for Dnahc8 (NM_013811.1,4485-4503).
ccctgagatactcattcaa

SEQ ID NO: 500340 - DNA, 19 bp, Mus musculus
  siRNA target sequence for Dnahc8 (NM_013811.1,4527-4545).
ccgtacaaggtgaacttgt

SEQ ID NO: 500341 - DNA, 19 bp, Mus musculus
  siRNA target sequence for Dnahc8 (NM_013811.1,4594-4612).
cttctgtgaggacgttata

SEQ ID NO: 500342 - DNA, 19 bp, Mus musculus
  siRNA target sequence for Dnahc8 (NM_013811.1,4599-4617).
gtgaggacgttataaactt

SEQ ID NO: 500343 - DNA, 19 bp, Mus musculus
  siRNA target sequence for Dnahc8 (NM_013811.1,4601-4619).
gaggacgttataaacttta

SEQ ID NO: 500344 - DNA, 19 bp, Mus musculus
  siRNA target sequence for Dnahc8 (NM_013811.1,4603-4621).
ggacgttataaactttaca

SEQ ID NO: 500345 - DNA, 19 bp, Mus musculus
  siRNA target sequence for Dnahc8 (NM_013811.1,4699-4717).
ggccaatttcgacgattta

SEQ ID NO: 500346 - DNA, 19 bp, Mus musculus
  siRNA target sequence for Dnahc8 (NM_013811.1,4700-4718).
gccaatttcgacgatttat

SEQ ID NO: 500347 - DNA, 19 bp, Mus musculus
  siRNA target sequence for Dnahc8 (NM_013811.1,4709-4727).
gacgatttatggaggaaat

SEQ ID NO: 500348 - DNA, 19 bp, Mus musculus
  siRNA target sequence for Dnahc8 (NM_013811.1,4711-4729).
cgatttatggaggaaattt

SEQ ID NO: 500349 - DNA, 19 bp, Mus musculus
  siRNA target sequence for Dnahc8 (NM_013811.1,4720-4738).
gaggaaatttgtcacatat

SEQ ID NO: 500350 - DNA, 19 bp, Mus musculus
  siRNA target sequence for Dnahc8 (NM_013811.1,4744-4762).
cggggagcaactttttgga

SEQ ID NO: 500351 - DNA, 19 bp, Mus musculus
  siRNA target sequence for Dnahc8 (NM_013811.1,4750-4768).
gcaactttttggattacct

SEQ ID NO: 500352 - DNA, 19 bp, Mus musculus
  siRNA target sequence for Dnahc8 (NM_013811.1,4771-4789).
gactgactacgaggtttta

SEQ ID NO: 500353 - DNA, 19 bp, Mus musculus
  siRNA target sequence for Dnahc8 (NM_013811.1,4773-4791).
ctgactacgaggttttaca

SEQ ID NO: 500354 - DNA, 19 bp, Mus musculus
  siRNA target sequence for Dnahc8 (NM_013811.1,4775-4793).
gactacgaggttttacaca

SEQ ID NO: 500355 - DNA, 19 bp, Mus musculus
  siRNA target sequence for Dnahc8 (NM_013811.1,4777-4795).
ctacgaggttttacacaaa

SEQ ID NO: 500356 - DNA, 19 bp, Mus musculus
  siRNA target sequence for Dnahc8 (NM_013811.1,4857-4875).
gcatcagtggctactatga

SEQ ID NO: 500357 - DNA, 19 bp, Mus musculus
  siRNA target sequence for Dnahc8 (NM_013811.1,4889-4907).
gatgtagacatcgaaaaga

SEQ ID NO: 500358 - DNA, 19 bp, Mus musculus
  siRNA target sequence for Dnahc8 (NM_013811.1,4892-4910).
gtagacatcgaaaagatca

SEQ ID NO: 500359 - DNA, 19 bp, Mus musculus
  siRNA target sequence for Dnahc8 (NM_013811.1,4930-4948).
ccagaacagatgtcgaaaa

SEQ ID NO: 500360 - DNA, 19 bp, Mus musculus
  siRNA target sequence for Dnahc8 (NM_013811.1,4998-5016).
gaatcgacgactttagtga

SEQ ID NO: 500361 - DNA, 19 bp, Mus musculus
  siRNA target sequence for Dnahc8 (NM_013811.1,5022-5040).
gtccgctgctggagatgat

SEQ ID NO: 500362 - DNA, 19 bp, Mus musculus
  siRNA target sequence for Dnahc8 (NM_013811.1,5032-5050).
ggagatgatgaccaataaa

SEQ ID NO: 500363 - DNA, 19 bp, Mus musculus
  siRNA target sequence for Dnahc8 (NM_013811.1,5105-5123).
gatgtggaatcggatacat

SEQ ID NO: 500364 - DNA, 19 bp, Mus musculus
  siRNA target sequence for Dnahc8 (NM_013811.1,5108-5126).
gtggaatcggatacattct

SEQ ID NO: 500365 - DNA, 19 bp, Mus musculus
  siRNA target sequence for Dnahc8 (NM_013811.1,5144-5162).
gaagcgccactccttaaga

SEQ ID NO: 500366 - DNA, 19 bp, Mus musculus
  siRNA target sequence for Dnahc8 (NM_013811.1,5147-5165).
gcgccactccttaagaaca

SEQ ID NO: 500367 - DNA, 19 bp, Mus musculus
  siRNA target sequence for Dnahc8 (NM_013811.1,5310-5328).
cagagtctggagagattat

SEQ ID NO: 500368 - DNA, 19 bp, Mus musculus
  siRNA target sequence for Dnahc8 (NM_013811.1,5318-5336).
ggagagattatcaccttaa

SEQ ID NO: 500369 - DNA, 19 bp, Mus musculus
  siRNA target sequence for Dnahc8 (NM_013811.1,5319-5337).
gagagattatcaccttaat

SEQ ID NO: 500370 - DNA, 19 bp, Mus musculus
  siRNA target sequence for Dnahc8 (NM_013811.1,5331-5349).
ccttaatggaggatagctt

SEQ ID NO: 500371 - DNA, 19 bp, Mus musculus
  siRNA target sequence for Dnahc8 (NM_013811.1,5364-5382).
ccttgctaagcaacagata

SEQ ID NO: 500372 - DNA, 19 bp, Mus musculus
  siRNA target sequence for Dnahc8 (NM_013811.1,5379-5397).
gatacaataccccgtttaa

SEQ ID NO: 500373 - DNA, 19 bp, Mus musculus
  siRNA target sequence for Dnahc8 (NM_013811.1,5430-5448).
ccacttcctcggatatcat

SEQ ID NO: 500374 - DNA, 19 bp, Mus musculus
  siRNA target sequence for Dnahc8 (NM_013811.1,5431-5449).
cacttcctcggatatcatt

SEQ ID NO: 500375 - DNA, 19 bp, Mus musculus
  siRNA target sequence for Dnahc8 (NM_013811.1,5433-5451).
cttcctcggatatcattga

SEQ ID NO: 500376 - DNA, 19 bp, Mus musculus
  siRNA target sequence for Dnahc8 (NM_013811.1,5436-5454).
cctcggatatcattgaaga

SEQ ID NO: 500377 - DNA, 19 bp, Mus musculus
  siRNA target sequence for Dnahc8 (NM_013811.1,5473-5491).
cctgtgggtctatcttgaa

SEQ ID NO: 500378 - DNA, 19 bp, Mus musculus
  siRNA target sequence for Dnahc8 (NM_013811.1,5537-5555).
gccaagcgtttccagaata

SEQ ID NO: 500379 - DNA, 19 bp, Mus musculus
  siRNA target sequence for Dnahc8 (NM_013811.1,5539-5557).
caagcgtttccagaatatt

SEQ ID NO: 500380 - DNA, 19 bp, Mus musculus
  siRNA target sequence for Dnahc8 (NM_013811.1,5549-5567).
cagaatattgacaagtcat

SEQ ID NO: 500381 - DNA, 19 bp, Mus musculus
  siRNA target sequence for Dnahc8 (NM_013811.1,5710-5728).
gaagaggttgctatttcca

SEQ ID NO: 500382 - DNA, 19 bp, Mus musculus
  siRNA target sequence for Dnahc8 (NM_013811.1,5715-5733).
ggttgctatttccaagatt

SEQ ID NO: 500383 - DNA, 19 bp, Mus musculus
  siRNA target sequence for Dnahc8 (NM_013811.1,5836-5854).
ggtgaccttccatgctaaa

SEQ ID NO: 500384 - DNA, 19 bp, Mus musculus
  siRNA target sequence for Dnahc8 (NM_013811.1,5864-5882).
cggatgacggccgttatat

SEQ ID NO: 500385 - DNA, 19 bp, Mus musculus
  siRNA target sequence for Dnahc8 (NM_013811.1,5866-5884).
gatgacggccgttatatca

SEQ ID NO: 500386 - DNA, 19 bp, Mus musculus
  siRNA target sequence for Dnahc8 (NM_013811.1,5869-5887).
gacggccgttatatcaaga

SEQ ID NO: 500387 - DNA, 19 bp, Mus musculus
  siRNA target sequence for Dnahc8 (NM_013811.1,5872-5890).
ggccgttatatcaagagaa

SEQ ID NO: 500388 - DNA, 19 bp, Mus musculus
  siRNA target sequence for Dnahc8 (NM_013811.1,5924-5942).
gccaaagggcctgtagaaa

SEQ ID NO: 500389 - DNA, 19 bp, Mus musculus
  siRNA target sequence for Dnahc8 (NM_013811.1,5925-5943).
ccaaagggcctgtagaaat

SEQ ID NO: 500390 - DNA, 19 bp, Mus musculus
  siRNA target sequence for Dnahc8 (NM_013811.1,5926-5944).
caaagggcctgtagaaatt

SEQ ID NO: 500391 - DNA, 19 bp, Mus musculus
  siRNA target sequence for Dnahc8 (NM_013811.1,6166-6184).
gaaatttttggacattcta

SEQ ID NO: 500392 - DNA, 19 bp, Mus musculus
  siRNA target sequence for Dnahc8 (NM_013811.1,6233-6251).
gtgaagtttgaaactttga

SEQ ID NO: 500393 - DNA, 19 bp, Mus musculus
  siRNA target sequence for Dnahc8 (NM_013811.1,6263-6281).
gtgcaccagagagatatct

SEQ ID NO: 500394 - DNA, 19 bp, Mus musculus
  siRNA target sequence for Dnahc8 (NM_013811.1,6331-6349).
gctgaaacagagcagattt

SEQ ID NO: 500395 - DNA, 19 bp, Mus musculus
  siRNA target sequence for Dnahc8 (NM_013811.1,6395-6413).
gtggacttcatttaccaaa

SEQ ID NO: 500396 - DNA, 19 bp, Mus musculus
  siRNA target sequence for Dnahc8 (NM_013811.1,6429-6447).
gcacggatcgccttgtgat

SEQ ID NO: 500397 - DNA, 19 bp, Mus musculus
  siRNA target sequence for Dnahc8 (NM_013811.1,6445-6463).
gatcaccccgttaacagat

SEQ ID NO: 500398 - DNA, 19 bp, Mus musculus
  siRNA target sequence for Dnahc8 (NM_013811.1,6448-6466).
caccccgttaacagataga

SEQ ID NO: 500399 - DNA, 19 bp, Mus musculus
  siRNA target sequence for Dnahc8 (NM_013811.1,6565-6583).
caggtgtttgggcaagtat

SEQ ID NO: 500400 - DNA, 19 bp, Mus musculus
  siRNA target sequence for Dnahc8 (NM_013811.1,6621-6639).
gaggcctcggacggatttt

SEQ ID NO: 500401 - DNA, 19 bp, Mus musculus
  siRNA target sequence for Dnahc8 (NM_013811.1,6623-6641).
ggcctcggacggattttca

SEQ ID NO: 500402 - DNA, 19 bp, Mus musculus
  siRNA target sequence for Dnahc8 (NM_013811.1,6624-6642).
gcctcggacggattttcaa

SEQ ID NO: 500403 - DNA, 19 bp, Mus musculus
  siRNA target sequence for Dnahc8 (NM_013811.1,6720-6738).
cgcaacaaatttacatagt

SEQ ID NO: 500404 - DNA, 19 bp, Mus musculus
  siRNA target sequence for Dnahc8 (NM_013811.1,6721-6739).
gcaacaaatttacatagtt

SEQ ID NO: 500405 - DNA, 19 bp, Mus musculus
  siRNA target sequence for Dnahc8 (NM_013811.1,6722-6740).
caacaaatttacatagttt

SEQ ID NO: 500406 - DNA, 19 bp, Mus musculus
  siRNA target sequence for Dnahc8 (NM_013811.1,6786-6804).
gcgattgtgtggatttaaa

SEQ ID NO: 500407 - DNA, 19 bp, Mus musculus
  siRNA target sequence for Dnahc8 (NM_013811.1,6787-6805).
cgattgtgtggatttaaat

SEQ ID NO: 500408 - DNA, 19 bp, Mus musculus
  siRNA target sequence for Dnahc8 (NM_013811.1,6852-6870).
gccaggaactgccagaaaa

SEQ ID NO: 500409 - DNA, 19 bp, Mus musculus
  siRNA target sequence for Dnahc8 (NM_013811.1,6857-6875).
gaactgccagaaaacttaa

SEQ ID NO: 500410 - DNA, 19 bp, Mus musculus
  siRNA target sequence for Dnahc8 (NM_013811.1,6908-6926).
cctgatcggcagatcatta

SEQ ID NO: 500411 - DNA, 19 bp, Mus musculus
  siRNA target sequence for Dnahc8 (NM_013811.1,6909-6927).
ctgatcggcagatcattat

SEQ ID NO: 500412 - DNA, 19 bp, Mus musculus
  siRNA target sequence for Dnahc8 (NM_013811.1,6970-6988).
cttggcgcagaagttttat

SEQ ID NO: 500413 - DNA, 19 bp, Mus musculus
  siRNA target sequence for Dnahc8 (NM_013811.1,6973-6991).
ggcgcagaagttttatgtt

SEQ ID NO: 500414 - DNA, 19 bp, Mus musculus
  siRNA target sequence for Dnahc8 (NM_013811.1,7006-7024).
cgaagagcagcttactaaa

SEQ ID NO: 500415 - DNA, 19 bp, Mus musculus
  siRNA target sequence for Dnahc8 (NM_013811.1,7020-7038).
ctaaacaggtccactatga

SEQ ID NO: 500416 - DNA, 19 bp, Mus musculus
  siRNA target sequence for Dnahc8 (NM_013811.1,7103-7121).
gaagacagtgagttaagca

SEQ ID NO: 500417 - DNA, 19 bp, Mus musculus
  siRNA target sequence for Dnahc8 (NM_013811.1,7131-7149).
gagggctacgagacatgaa

SEQ ID NO: 500418 - DNA, 19 bp, Mus musculus
  siRNA target sequence for Dnahc8 (NM_013811.1,7136-7154).
ctacgagacatgaaccttt

SEQ ID NO: 500419 - DNA, 19 bp, Mus musculus
  siRNA target sequence for Dnahc8 (NM_013811.1,7139-7157).
cgagacatgaacctttcta

SEQ ID NO: 500420 - DNA, 19 bp, Mus musculus
  siRNA target sequence for Dnahc8 (NM_013811.1,7140-7158).
gagacatgaacctttctaa

SEQ ID NO: 500421 - DNA, 19 bp, Mus musculus
  siRNA target sequence for Dnahc8 (NM_013811.1,7220-7238).
caactggacagcagtactt

SEQ ID NO: 500422 - DNA, 19 bp, Mus musculus
  siRNA target sequence for Dnahc8 (NM_013811.1,7257-7275).
cggtggacaaccaggttaa

SEQ ID NO: 500423 - DNA, 19 bp, Mus musculus
  siRNA target sequence for Dnahc8 (NM_013811.1,7299-7317).
caccctggaacctcaaatt

SEQ ID NO: 500424 - DNA, 19 bp, Mus musculus
  siRNA target sequence for Dnahc8 (NM_013811.1,7302-7320).
cctggaacctcaaattagt

SEQ ID NO: 500425 - DNA, 19 bp, Mus musculus
  siRNA target sequence for Dnahc8 (NM_013811.1,7312-7330).
caaattagtgcagttatat

SEQ ID NO: 500426 - DNA, 19 bp, Mus musculus
  siRNA target sequence for Dnahc8 (NM_013811.1,7382-7400).
gggaagacgacggtcataa

SEQ ID NO: 500427 - DNA, 19 bp, Mus musculus
  siRNA target sequence for Dnahc8 (NM_013811.1,7384-7402).
gaagacgacggtcataaca

SEQ ID NO: 500428 - DNA, 19 bp, Mus musculus
  siRNA target sequence for Dnahc8 (NM_013811.1,7387-7405).
gacgacggtcataacaatt

SEQ ID NO: 500429 - DNA, 19 bp, Mus musculus
  siRNA target sequence for Dnahc8 (NM_013811.1,7389-7407).
cgacggtcataacaattct

SEQ ID NO: 500430 - DNA, 19 bp, Mus musculus
  siRNA target sequence for Dnahc8 (NM_013811.1,7392-7410).
cggtcataacaattctgat

SEQ ID NO: 500431 - DNA, 19 bp, Mus musculus
  siRNA target sequence for Dnahc8 (NM_013811.1,7445-7463).
gagatgcgaatgaatccaa

SEQ ID NO: 500432 - DNA, 19 bp, Mus musculus
  siRNA target sequence for Dnahc8 (NM_013811.1,7563-7581).
ctaaaaagggtgagaacat

SEQ ID NO: 500433 - DNA, 19 bp, Mus musculus
  siRNA target sequence for Dnahc8 (NM_013811.1,7612-7630).
catctggattgagaactta

SEQ ID NO: 500434 - DNA, 19 bp, Mus musculus
  siRNA target sequence for Dnahc8 (NM_013811.1,7711-7729).
gtttgaggtgcacaacatt

SEQ ID NO: 500435 - DNA, 19 bp, Mus musculus
  siRNA target sequence for Dnahc8 (NM_013811.1,7924-7942).
gcagctcctggagtgtaat

SEQ ID NO: 500436 - DNA, 19 bp, Mus musculus
  siRNA target sequence for Dnahc8 (NM_013811.1,7925-7943).
cagctcctggagtgtaatt

SEQ ID NO: 500437 - DNA, 19 bp, Mus musculus
  siRNA target sequence for Dnahc8 (NM_013811.1,7931-7949).
ctggagtgtaattacatca

SEQ ID NO: 500438 - DNA, 19 bp, Mus musculus
  siRNA target sequence for Dnahc8 (NM_013811.1,8163-8181).
ctatgtatgagttttacgt

SEQ ID NO: 500439 - DNA, 19 bp, Mus musculus
  siRNA target sequence for Dnahc8 (NM_013811.1,8293-8311).
caggaccaacttcttgata

SEQ ID NO: 500440 - DNA, 19 bp, Mus musculus
  siRNA target sequence for Dnahc8 (NM_013811.1,8295-8313).
ggaccaacttcttgataga

SEQ ID NO: 500441 - DNA, 19 bp, Mus musculus
  siRNA target sequence for Dnahc8 (NM_013811.1,8364-8382).
cggcaaaaacggtaatggt

SEQ ID NO: 500442 - DNA, 19 bp, Mus musculus
  siRNA target sequence for Dnahc8 (NM_013811.1,8383-8401).
gaaggcgtacctgaagaaa

SEQ ID NO: 500443 - DNA, 19 bp, Mus musculus
  siRNA target sequence for Dnahc8 (NM_013811.1,8388-8406).
cgtacctgaagaaatacga

SEQ ID NO: 500444 - DNA, 19 bp, Mus musculus
  siRNA target sequence for Dnahc8 (NM_013811.1,8536-8554).
gatgacggtgtttattgat

SEQ ID NO: 500445 - DNA, 19 bp, Mus musculus
  siRNA target sequence for Dnahc8 (NM_013811.1,8539-8557).
gacggtgtttattgatgat

SEQ ID NO: 500446 - DNA, 19 bp, Mus musculus
  siRNA target sequence for Dnahc8 (NM_013811.1,8728-8746).
catcccacagcgcttaaaa

SEQ ID NO: 500447 - DNA, 19 bp, Mus musculus
  siRNA target sequence for Dnahc8 (NM_013811.1,8738-8756).
cgcttaaaaaggcagttta

SEQ ID NO: 500448 - DNA, 19 bp, Mus musculus
  siRNA target sequence for Dnahc8 (NM_013811.1,8750-8768).
cagtttaccgtgttcaact

SEQ ID NO: 500449 - DNA, 19 bp, Mus musculus
  siRNA target sequence for Dnahc8 (NM_013811.1,8776-8794).
gccttccaacacgtctatt

SEQ ID NO: 500450 - DNA, 19 bp, Mus musculus
  siRNA target sequence for Dnahc8 (NM_013811.1,8778-8796).
cttccaacacgtctattga

SEQ ID NO: 500451 - DNA, 19 bp, Mus musculus
  siRNA target sequence for Dnahc8 (NM_013811.1,8781-8799).
ccaacacgtctattgacaa

SEQ ID NO: 500452 - DNA, 19 bp, Mus musculus
  siRNA target sequence for Dnahc8 (NM_013811.1,8782-8800).
caacacgtctattgacaaa

SEQ ID NO: 500453 - DNA, 19 bp, Mus musculus
  siRNA target sequence for Dnahc8 (NM_013811.1,8787-8805).
cgtctattgacaaaatctt

SEQ ID NO: 500454 - DNA, 19 bp, Mus musculus
  siRNA target sequence for Dnahc8 (NM_013811.1,8795-8813).
gacaaaatcttcggaatta

SEQ ID NO: 500455 - DNA, 19 bp, Mus musculus
  siRNA target sequence for Dnahc8 (NM_013811.1,8831-8849).
gacccgtgtagaaagttca

SEQ ID NO: 500456 - DNA, 19 bp, Mus musculus
  siRNA target sequence for Dnahc8 (NM_013811.1,8845-8863).
gttcagacccgaaatatgt

SEQ ID NO: 500457 - DNA, 19 bp, Mus musculus
  siRNA target sequence for Dnahc8 (NM_013811.1,8904-8922).
ggcagtggacaaaggtaaa

SEQ ID NO: 500458 - DNA, 19 bp, Mus musculus
  siRNA target sequence for Dnahc8 (NM_013811.1,8927-8945).
ctacccacgccttcaaagt

SEQ ID NO: 500459 - DNA, 19 bp, Mus musculus
  siRNA target sequence for Dnahc8 (NM_013811.1,8931-8949).
ccacgccttcaaagtttca

SEQ ID NO: 500460 - DNA, 19 bp, Mus musculus
  siRNA target sequence for Dnahc8 (NM_013811.1,8932-8950).
cacgccttcaaagtttcat

SEQ ID NO: 500461 - DNA, 19 bp, Mus musculus
  siRNA target sequence for Dnahc8 (NM_013811.1,8934-8952).
cgccttcaaagtttcatta

SEQ ID NO: 500462 - DNA, 19 bp, Mus musculus
  siRNA target sequence for Dnahc8 (NM_013811.1,8966-8984).
cgggacctttcgagaatct

SEQ ID NO: 500463 - DNA, 19 bp, Mus musculus
  siRNA target sequence for Dnahc8 (NM_013811.1,8989-9007).
ggggatgttaaccgtaaaa

SEQ ID NO: 500464 - DNA, 19 bp, Mus musculus
  siRNA target sequence for Dnahc8 (NM_013811.1,8992-9010).
gatgttaaccgtaaaagca

SEQ ID NO: 500465 - DNA, 19 bp, Mus musculus
  siRNA target sequence for Dnahc8 (NM_013811.1,9068-9086).
gtgatcgcagacaggttta

SEQ ID NO: 500466 - DNA, 19 bp, Mus musculus
  siRNA target sequence for Dnahc8 (NM_013811.1,9070-9088).
gatcgcagacaggtttata

SEQ ID NO: 500467 - DNA, 19 bp, Mus musculus
  siRNA target sequence for Dnahc8 (NM_013811.1,9098-9116).
gacgagcagtggttcaact

SEQ ID NO: 500468 - DNA, 19 bp, Mus musculus
  siRNA target sequence for Dnahc8 (NM_013811.1,9153-9171).
cagaggtcgcagccaatat

SEQ ID NO: 500469 - DNA, 19 bp, Mus musculus
  siRNA target sequence for Dnahc8 (NM_013811.1,9230-9248).
gaacccgaagacactatgt

SEQ ID NO: 500470 - DNA, 19 bp, Mus musculus
  siRNA target sequence for Dnahc8 (NM_013811.1,9254-9272).
gtgcccaaaatctacgaat

SEQ ID NO: 500471 - DNA, 19 bp, Mus musculus
  siRNA target sequence for Dnahc8 (NM_013811.1,9258-9276).
ccaaaatctacgaattggt

SEQ ID NO: 500472 - DNA, 19 bp, Mus musculus
  siRNA target sequence for Dnahc8 (NM_013811.1,9321-9339).
ggcaattcaacgagatcat

SEQ ID NO: 500473 - DNA, 19 bp, Mus musculus
  siRNA target sequence for Dnahc8 (NM_013811.1,9378-9396).
ccatgactcacctcgttaa

SEQ ID NO: 500474 - DNA, 19 bp, Mus musculus
  siRNA target sequence for Dnahc8 (NM_013811.1,9474-9492).
caaaactggcctcctttat

SEQ ID NO: 500475 - DNA, 19 bp, Mus musculus
  siRNA target sequence for Dnahc8 (NM_013811.1,9528-9546).
ggtcttacaacgtaagcaa

SEQ ID NO: 500476 - DNA, 19 bp, Mus musculus
  siRNA target sequence for Dnahc8 (NM_013811.1,9538-9556).
cgtaagcaacctcatagaa

SEQ ID NO: 500477 - DNA, 19 bp, Mus musculus
  siRNA target sequence for Dnahc8 (NM_013811.1,9613-9631).
ctttacggacaatgagata

SEQ ID NO: 500478 - DNA, 19 bp, Mus musculus
  siRNA target sequence for Dnahc8 (NM_013811.1,9641-9659).
gcgttcctggaatacctta

SEQ ID NO: 500479 - DNA, 19 bp, Mus musculus
  siRNA target sequence for Dnahc8 (NM_013811.1,9643-9661).
gttcctggaataccttaat

SEQ ID NO: 500480 - DNA, 19 bp, Mus musculus
  siRNA target sequence for Dnahc8 (NM_013811.1,9677-9695).
ggggagatctccaatttat

SEQ ID NO: 500481 - DNA, 19 bp, Mus musculus
  siRNA target sequence for Dnahc8 (NM_013811.1,9678-9696).
gggagatctccaatttatt

SEQ ID NO: 500482 - DNA, 19 bp, Mus musculus
  siRNA target sequence for Dnahc8 (NM_013811.1,9701-9719).
cgagacgagatggatgaaa

SEQ ID NO: 500483 - DNA, 19 bp, Mus musculus
  siRNA target sequence for Dnahc8 (NM_013811.1,9704-9722).
gacgagatggatgaaatca

SEQ ID NO: 500484 - DNA, 19 bp, Mus musculus
  siRNA target sequence for Dnahc8 (NM_013811.1,9729-9747).
gcctgatatcggtgatgaa

SEQ ID NO: 500485 - DNA, 19 bp, Mus musculus
  siRNA target sequence for Dnahc8 (NM_013811.1,9775-9793).
ctttgacaacctgtatgaa

SEQ ID NO: 500486 - DNA, 19 bp, Mus musculus
  siRNA target sequence for Dnahc8 (NM_013811.1,9779-9797).
gacaacctgtatgaatact

SEQ ID NO: 500487 - DNA, 19 bp, Mus musculus
  siRNA target sequence for Dnahc8 (NM_013811.1,9843-9861).
ccccggttggagagaagtt

SEQ ID NO: 500488 - DNA, 19 bp, Mus musculus
  siRNA target sequence for Dnahc8 (NM_013811.1,9952-9970).
ggcctcatacttcctttta

SEQ ID NO: 500489 - DNA, 19 bp, Mus musculus
  siRNA target sequence for Dnahc8 (NM_013811.1,9954-9972).
cctcatacttccttttaga

SEQ ID NO: 500490 - DNA, 19 bp, Mus musculus
  siRNA target sequence for Dnahc8 (NM_013811.1,10003-10021).
gaggcatgttgtagaaact

SEQ ID NO: 500491 - DNA, 19 bp, Mus musculus
  siRNA target sequence for Dnahc8 (NM_013811.1,10005-10023).
ggcatgttgtagaaactat

SEQ ID NO: 500492 - DNA, 19 bp, Mus musculus
  siRNA target sequence for Dnahc8 (NM_013811.1,10047-10065).
ctgaaagctgcgagaatta

SEQ ID NO: 500493 - DNA, 19 bp, Mus musculus
  siRNA target sequence for Dnahc8 (NM_013811.1,10049-10067).
gaaagctgcgagaattact

SEQ ID NO: 500494 - DNA, 19 bp, Mus musculus
  siRNA target sequence for Dnahc8 (NM_013811.1,10137-10155).
gcatttacaccgataaggt

SEQ ID NO: 500495 - DNA, 19 bp, Mus musculus
  siRNA target sequence for Dnahc8 (NM_013811.1,10144-10162).
caccgataaggtgaaatat

SEQ ID NO: 500496 - DNA, 19 bp, Mus musculus
  siRNA target sequence for Dnahc8 (NM_013811.1,10146-10164).
ccgataaggtgaaatatat

SEQ ID NO: 500497 - DNA, 19 bp, Mus musculus
  siRNA target sequence for Dnahc8 (NM_013811.1,10153-10171).
ggtgaaatatatcaatgaa

SEQ ID NO: 500498 - DNA, 19 bp, Mus musculus
  siRNA target sequence for Dnahc8 (NM_013811.1,10172-10190).
caagcggaacggatgaata

SEQ ID NO: 500499 - DNA, 19 bp, Mus musculus
  siRNA target sequence for Dnahc8 (NM_013811.1,10270-10288).
ggcggtggcttccattaaa

SEQ ID NO: 500500 - DNA, 19 bp, Mus musculus
  siRNA target sequence for Dnahc8 (NM_013811.1,10273-10291).
ggtggcttccattaaagca

SEQ ID NO: 500501 - DNA, 19 bp, Mus musculus
  siRNA target sequence for Dnahc8 (NM_013811.1,10348-10366).
cgaagtccaggaagtaaaa

SEQ ID NO: 500502 - DNA, 19 bp, Mus musculus
  siRNA target sequence for Dnahc8 (NM_013811.1,10460-10478).
gaagcagccctgaatacca

SEQ ID NO: 500503 - DNA, 19 bp, Mus musculus
  siRNA target sequence for Dnahc8 (NM_013811.1,10516-10534).
caaaccaccacatctcatt

SEQ ID NO: 500504 - DNA, 19 bp, Mus musculus
  siRNA target sequence for Dnahc8 (NM_013811.1,10523-10541).
ccacatctcattatgagaa

SEQ ID NO: 500505 - DNA, 19 bp, Mus musculus
  siRNA target sequence for Dnahc8 (NM_013811.1,10524-10542).
cacatctcattatgagaat

SEQ ID NO: 500506 - DNA, 19 bp, Mus musculus
  siRNA target sequence for Dnahc8 (NM_013811.1,10553-10571).
gtcctgttgctgttccaaa

SEQ ID NO: 500507 - DNA, 19 bp, Mus musculus
  siRNA target sequence for Dnahc8 (NM_013811.1,10623-10641).
catggggagagtcgttaaa

SEQ ID NO: 500508 - DNA, 19 bp, Mus musculus
  siRNA target sequence for Dnahc8 (NM_013811.1,10626-10644).
ggggagagtcgttaaagct

SEQ ID NO: 500509 - DNA, 19 bp, Mus musculus
  siRNA target sequence for Dnahc8 (NM_013811.1,10715-10733).
gaactactgcagccatatt

SEQ ID NO: 500510 - DNA, 19 bp, Mus musculus
  siRNA target sequence for Dnahc8 (NM_013811.1,10718-10736).
ctactgcagccatatttta

SEQ ID NO: 500511 - DNA, 19 bp, Mus musculus
  siRNA target sequence for Dnahc8 (NM_013811.1,10741-10759).
ggacgactacacttttgaa

SEQ ID NO: 500512 - DNA, 19 bp, Mus musculus
  siRNA target sequence for Dnahc8 (NM_013811.1,10744-10762).
cgactacacttttgaaagt

SEQ ID NO: 500513 - DNA, 19 bp, Mus musculus
  siRNA target sequence for Dnahc8 (NM_013811.1,10757-10775).
gaaagtgccaaaaaagtgt

SEQ ID NO: 500514 - DNA, 19 bp, Mus musculus
  siRNA target sequence for Dnahc8 (NM_013811.1,10830-10848).
gcatcaacagggaagtgtt

SEQ ID NO: 500515 - DNA, 19 bp, Mus musculus
  siRNA target sequence for Dnahc8 (NM_013811.1,11107-11125).
caagacgcagattaataga

SEQ ID NO: 500516 - DNA, 19 bp, Mus musculus
  siRNA target sequence for Dnahc8 (NM_013811.1,11124-11142).
gactcgtaggcgatgttct

SEQ ID NO: 500517 - DNA, 19 bp, Mus musculus
  siRNA target sequence for Dnahc8 (NM_013811.1,11173-11191).
ccccttcaatcagatattt

SEQ ID NO: 500518 - DNA, 19 bp, Mus musculus
  siRNA target sequence for Dnahc8 (NM_013811.1,11193-11211).
ggaactatttgcttaaaga

SEQ ID NO: 500519 - DNA, 19 bp, Mus musculus
  siRNA target sequence for Dnahc8 (NM_013811.1,11227-11245).
gttgaaagcacggaaaatt

SEQ ID NO: 500520 - DNA, 19 bp, Mus musculus
  siRNA target sequence for Dnahc8 (NM_013811.1,11325-11343).
ctggagatgacttgtcaat

SEQ ID NO: 500521 - DNA, 19 bp, Mus musculus
  siRNA target sequence for Dnahc8 (NM_013811.1,11345-11363).
cagaatggcatcattgtga

SEQ ID NO: 500522 - DNA, 19 bp, Mus musculus
  siRNA target sequence for Dnahc8 (NM_013811.1,11399-11417).
cagactcagggaaaaacgt

SEQ ID NO: 500523 - DNA, 19 bp, Mus musculus
  siRNA target sequence for Dnahc8 (NM_013811.1,11418-11436).
ggatcaaatcgaaggaaaa

SEQ ID NO: 500524 - DNA, 19 bp, Mus musculus
  siRNA target sequence for Dnahc8 (NM_013811.1,11419-11437).
gatcaaatcgaaggaaaaa

SEQ ID NO: 500525 - DNA, 19 bp, Mus musculus
  siRNA target sequence for Dnahc8 (NM_013811.1,11635-11653).
catcatggacacgtttaaa

SEQ ID NO: 500526 - DNA, 19 bp, Mus musculus
  siRNA target sequence for Dnahc8 (NM_013811.1,11638-11656).
catggacacgtttaaactt

SEQ ID NO: 500527 - DNA, 19 bp, Mus musculus
  siRNA target sequence for Dnahc8 (NM_013811.1,11642-11660).
gacacgtttaaactttaca

SEQ ID NO: 500528 - DNA, 19 bp, Mus musculus
  siRNA target sequence for Dnahc8 (NM_013811.1,11706-11724).
ccaagacgtccgtcattga

SEQ ID NO: 500529 - DNA, 19 bp, Mus musculus
  siRNA target sequence for Dnahc8 (NM_013811.1,11707-11725).
caagacgtccgtcattgat

SEQ ID NO: 500530 - DNA, 19 bp, Mus musculus
  siRNA target sequence for Dnahc8 (NM_013811.1,11745-11763).
gactcgagaaccagttact

SEQ ID NO: 500531 - DNA, 19 bp, Mus musculus
  siRNA target sequence for Dnahc8 (NM_013811.1,11747-11765).
ctcgagaaccagttactca

SEQ ID NO: 500532 - DNA, 19 bp, Mus musculus
  siRNA target sequence for Dnahc8 (NM_013811.1,11758-11776).
gttactcaggagagtcatt

SEQ ID NO: 500533 - DNA, 19 bp, Mus musculus
  siRNA target sequence for Dnahc8 (NM_013811.1,11819-11837).
ctcgaggacgtgactttca

SEQ ID NO: 500534 - DNA, 19 bp, Mus musculus
  siRNA target sequence for Dnahc8 (NM_013811.1,11821-11839).
cgaggacgtgactttcaat

SEQ ID NO: 500535 - DNA, 19 bp, Mus musculus
  siRNA target sequence for Dnahc8 (NM_013811.1,11881-11899).
gctgagcgccacaaaaggt

SEQ ID NO: 500536 - DNA, 19 bp, Mus musculus
  siRNA target sequence for Dnahc8 (NM_013811.1,11882-11900).
ctgagcgccacaaaaggtt

SEQ ID NO: 500537 - DNA, 19 bp, Mus musculus
  siRNA target sequence for Dnahc8 (NM_013811.1,11958-11976).
cggaagtgagcgaaaagct

SEQ ID NO: 500538 - DNA, 19 bp, Mus musculus
  siRNA target sequence for Dnahc8 (NM_013811.1,12141-12159).
ccatggccaggtctgaaaa

SEQ ID NO: 500539 - DNA, 19 bp, Mus musculus
  siRNA target sequence for Dnahc8 (NM_013811.1,12160-12178).
gtctccgctacctcaaaaa

SEQ ID NO: 500540 - DNA, 19 bp, Mus musculus
  siRNA target sequence for Dnahc8 (NM_013811.1,12166-12184).
gctacctcaaaaaagaatt

SEQ ID NO: 500541 - DNA, 19 bp, Mus musculus
  siRNA target sequence for Dnahc8 (NM_013811.1,12211-12229).
cgaggtcttcacctattct

SEQ ID NO: 500542 - DNA, 19 bp, Mus musculus
  siRNA target sequence for Dnahc8 (NM_013811.1,12234-12252).
gaggcctgtacgaaaacca

SEQ ID NO: 500543 - DNA, 19 bp, Mus musculus
  siRNA target sequence for Dnahc8 (NM_013811.1,12437-12455).
ccccagtttgcagaaatta

SEQ ID NO: 500544 - DNA, 19 bp, Mus musculus
  siRNA target sequence for Dnahc8 (NM_013811.1,12438-12456).
cccagtttgcagaaattat

SEQ ID NO: 500545 - DNA, 19 bp, Mus musculus
  siRNA target sequence for Dnahc8 (NM_013811.1,12563-12581).
cgcaagcttctgcttatca

SEQ ID NO: 500546 - DNA, 19 bp, Mus musculus
  siRNA target sequence for Dnahc8 (NM_013811.1,12591-12609).
gccctgaccgcactgtttt

SEQ ID NO: 500547 - DNA, 19 bp, Mus musculus
  siRNA target sequence for Dnahc8 (NM_013811.1,12605-12623).
gttttccaagcgagaaagt

SEQ ID NO: 500548 - DNA, 19 bp, Mus musculus
  siRNA target sequence for Dnahc8 (NM_013811.1,12654-12672).
cggagccagttatcctaaa

SEQ ID NO: 500549 - DNA, 19 bp, Mus musculus
  siRNA target sequence for Dnahc8 (NM_013811.1,12655-12673).
ggagccagttatcctaaat

SEQ ID NO: 500550 - DNA, 19 bp, Mus musculus
  siRNA target sequence for Dnahc8 (NM_013811.1,12785-12803).
gaatgcaggactatctcaa

SEQ ID NO: 500551 - DNA, 19 bp, Mus musculus
  siRNA target sequence for Dnahc8 (NM_013811.1,12885-12903).
gtcacctcggtctagaatt

SEQ ID NO: 500552 - DNA, 19 bp, Mus musculus
  siRNA target sequence for Dnahc8 (NM_013811.1,12887-12905).
cacctcggtctagaattca

SEQ ID NO: 500553 - DNA, 19 bp, Mus musculus
  siRNA target sequence for Dnahc8 (NM_013811.1,12911-12929).
gagttactagagatgttga

SEQ ID NO: 500554 - DNA, 19 bp, Mus musculus
  siRNA target sequence for Dnahc8 (NM_013811.1,12980-12998).
ccccatgatcggtttccaa

SEQ ID NO: 500555 - DNA, 19 bp, Mus musculus
  siRNA target sequence for Dnahc8 (NM_013811.1,12981-12999).
cccatgatcggtttccaat

SEQ ID NO: 500556 - DNA, 19 bp, Mus musculus
  siRNA target sequence for Dnahc8 (NM_013811.1,12982-13000).
ccatgatcggtttccaatt

SEQ ID NO: 500557 - DNA, 19 bp, Mus musculus
  siRNA target sequence for Dnahc8 (NM_013811.1,12983-13001).
catgatcggtttccaatta

SEQ ID NO: 500558 - DNA, 19 bp, Mus musculus
  siRNA target sequence for Dnahc8 (NM_013811.1,13002-13020).
cactactccagacttctat

SEQ ID NO: 500559 - DNA, 19 bp, Mus musculus
  siRNA target sequence for Dnahc8 (NM_013811.1,13004-13022).
ctactccagacttctatca

SEQ ID NO: 500560 - DNA, 19 bp, Mus musculus
  siRNA target sequence for Dnahc8 (NM_013811.1,13049-13067).
gtccgggcaggcctgaaaa

SEQ ID NO: 500561 - DNA, 19 bp, Mus musculus
  siRNA target sequence for Dnahc8 (NM_013811.1,13162-13180).
cgtgcaggagcgacgaaaa

SEQ ID NO: 500562 - DNA, 19 bp, Mus musculus
  siRNA target sequence for Dnahc8 (NM_013811.1,13163-13181).
gtgcaggagcgacgaaaat

SEQ ID NO: 500563 - DNA, 19 bp, Mus musculus
  siRNA target sequence for Dnahc8 (NM_013811.1,13168-13186).
ggagcgacgaaaatttgga

SEQ ID NO: 500564 - DNA, 19 bp, Mus musculus
  siRNA target sequence for Dnahc8 (NM_013811.1,13184-13202).
ggacccttgggatggaata

SEQ ID NO: 500565 - DNA, 19 bp, Mus musculus
  siRNA target sequence for Dnahc8 (NM_013811.1,13185-13203).
gacccttgggatggaatat

SEQ ID NO: 500566 - DNA, 19 bp, Mus musculus
  siRNA target sequence for Dnahc8 (NM_013811.1,13231-13249).
ctcggccagcgttcagttt

SEQ ID NO: 500567 - DNA, 19 bp, Mus musculus
  siRNA target sequence for Dnahc8 (NM_013811.1,13233-13251).
cggccagcgttcagtttat

SEQ ID NO: 500568 - DNA, 19 bp, Mus musculus
  siRNA target sequence for Dnahc8 (NM_013811.1,13234-13252).
ggccagcgttcagtttatt

SEQ ID NO: 500569 - DNA, 19 bp, Mus musculus
  siRNA target sequence for Dnahc8 (NM_013811.1,13236-13254).
ccagcgttcagtttattca

SEQ ID NO: 500570 - DNA, 19 bp, Mus musculus
  siRNA target sequence for Dnahc8 (NM_013811.1,13239-13257).
gcgttcagtttattcagaa

SEQ ID NO: 500571 - DNA, 19 bp, Mus musculus
  siRNA target sequence for Dnahc8 (NM_013811.1,13259-13277).
cacctcgatgagtgtgata

SEQ ID NO: 500572 - DNA, 19 bp, Mus musculus
  siRNA target sequence for Dnahc8 (NM_013811.1,13261-13279).
cctcgatgagtgtgatatt

SEQ ID NO: 500573 - DNA, 19 bp, Mus musculus
  siRNA target sequence for Dnahc8 (NM_013811.1,13262-13280).
ctcgatgagtgtgatatta

SEQ ID NO: 500574 - DNA, 19 bp, Mus musculus
  siRNA target sequence for Dnahc8 (NM_013811.1,13309-13327).
gtacatgattggtgaagta

SEQ ID NO: 500575 - DNA, 19 bp, Mus musculus
  siRNA target sequence for Dnahc8 (NM_013811.1,13358-13376).
gacaaaaggctgcttaact

SEQ ID NO: 500576 - DNA, 19 bp, Mus musculus
  siRNA target sequence for Dnahc8 (NM_013811.1,13461-13479).
ccctggaccagtattttga

SEQ ID NO: 500577 - DNA, 19 bp, Mus musculus
  siRNA target sequence for Dnahc8 (NM_013811.1,13463-13481).
ctggaccagtattttgagt

SEQ ID NO: 500578 - DNA, 19 bp, Mus musculus
  siRNA target sequence for Dnahc8 (NM_013811.1,13491-13509).
ctctgccatccctcgataa

SEQ ID NO: 500579 - DNA, 19 bp, Mus musculus
  siRNA target sequence for Dnahc8 (NM_013811.1,13504-13522).
cgataacccagaagtcttt

SEQ ID NO: 500580 - DNA, 19 bp, Mus musculus
  siRNA target sequence for Dnahc8 (NM_013811.1,13538-13556).
gccgacatcacgtatcaga

SEQ ID NO: 500581 - DNA, 19 bp, Mus musculus
  siRNA target sequence for Dnahc8 (NM_013811.1,13563-13581).
cagcttccgacgttcttga

SEQ ID NO: 500582 - DNA, 19 bp, Mus musculus
  siRNA target sequence for Dnahc8 (NM_013811.1,13565-13583).
gcttccgacgttcttgaaa

SEQ ID NO: 500583 - DNA, 19 bp, Mus musculus
  siRNA target sequence for Dnahc8 (NM_013811.1,13632-13650).
cgcgcgaggccattgtcta

SEQ ID NO: 500584 - DNA, 19 bp, Mus musculus
  siRNA target sequence for Dnahc8 (NM_013811.1,13674-13692).
gcaagctgccccctaacta

SEQ ID NO: 500585 - DNA, 19 bp, Mus musculus
  siRNA target sequence for Dnahc8 (NM_013811.1,13675-13693).
caagctgccccctaactat

SEQ ID NO: 500586 - DNA, 19 bp, Mus musculus
  siRNA target sequence for Dnahc8 (NM_013811.1,13706-13724).
gtgaaagctcgcttgatga

SEQ ID NO: 500587 - DNA, 19 bp, Mus musculus
  siRNA target sequence for Dnahc8 (NM_013811.1,13733-13751).
cacctgaactcaatgaaca

SEQ ID NO: 500588 - DNA, 19 bp, Mus musculus
  siRNA target sequence for Dnahc8 (NM_013811.1,13735-13753).
cctgaactcaatgaacata

SEQ ID NO: 500589 - DNA, 19 bp, Mus musculus
  siRNA target sequence for Dnahc8 (NM_013811.1,13809-13827).
gcctgagtgacctaaaact

SEQ ID NO: 500590 - DNA, 19 bp, Mus musculus
  siRNA target sequence for Dnahc8 (NM_013811.1,13835-13853).
gaagggacgatcatcatga

SEQ ID NO: 500591 - DNA, 19 bp, Mus musculus
  siRNA target sequence for Dnahc8 (NM_013811.1,13872-13890).
cgttggataacatgtatga

SEQ ID NO: 500592 - DNA, 19 bp, Mus musculus
  siRNA target sequence for Dnahc8 (NM_013811.1,13873-13891).
gttggataacatgtatgat

SEQ ID NO: 500593 - DNA, 19 bp, Mus musculus
  siRNA target sequence for Dnahc8 (NM_013811.1,13882-13900).
catgtatgatgctcgtata

SEQ ID NO: 500594 - DNA, 19 bp, Mus musculus
  siRNA target sequence for Dnahc8 (NM_013811.1,13885-13903).
gtatgatgctcgtatacct

SEQ ID NO: 500595 - DNA, 19 bp, Mus musculus
  siRNA target sequence for Dnahc8 (NM_013811.1,13979-13997).
cagttctcgacatggatat

SEQ ID NO: 500596 - DNA, 19 bp, Mus musculus
  siRNA target sequence for Dnahc8 (NM_013811.1,13981-13999).
gttctcgacatggatattt

SEQ ID NO: 500597 - DNA, 19 bp, Mus musculus
  siRNA target sequence for Dnahc8 (NM_013811.1,14109-14127).
ctgtgaccatccacaatga

SEQ ID NO: 500598 - DNA, 19 bp, Mus musculus
  siRNA target sequence for Dnahc8 (NM_013811.1,14166-14184).
cagcggaaggcgtgtatat

SEQ ID NO: 500599 - DNA, 19 bp, Mus musculus
  siRNA target sequence for Dnahc8 (NM_013811.1,14168-14186).
gcggaaggcgtgtatattt

SEQ ID NO: 500600 - DNA, 19 bp, Mus musculus
  siRNA target sequence for Dnahc8 (NM_013811.1,14169-14187).
cggaaggcgtgtatattta

SEQ ID NO: 500601 - DNA, 19 bp, Mus musculus
  siRNA target sequence for Dnchc1 (NM_030238.1,457-475).
cctataacatcaacataga

SEQ ID NO: 500602 - DNA, 19 bp, Mus musculus
  siRNA target sequence for Dnchc1 (NM_030238.1,515-533).
caagcgagctcctgtgatt

SEQ ID NO: 500603 - DNA, 19 bp, Mus musculus
  siRNA target sequence for Dnchc1 (NM_030238.1,597-615).
gagacactgcactctttca

SEQ ID NO: 500604 - DNA, 19 bp, Mus musculus
  siRNA target sequence for Dnchc1 (NM_030238.1,670-688).
cagacagggatggtgataa

SEQ ID NO: 500605 - DNA, 19 bp, Mus musculus
  siRNA target sequence for Dnchc1 (NM_030238.1,689-707).
gatggctccttcagttgaa

SEQ ID NO: 500606 - DNA, 19 bp, Mus musculus
  siRNA target sequence for Dnchc1 (NM_030238.1,740-758).
ccacctgcagcagaacatt

SEQ ID NO: 500607 - DNA, 19 bp, Mus musculus
  siRNA target sequence for Dnchc1 (NM_030238.1,770-788).
gatcagcttgccaattcat

SEQ ID NO: 500608 - DNA, 19 bp, Mus musculus
  siRNA target sequence for Dnchc1 (NM_030238.1,872-890).
cccaactttccttaaccaa

SEQ ID NO: 500609 - DNA, 19 bp, Mus musculus
  siRNA target sequence for Dnchc1 (NM_030238.1,873-891).
ccaactttccttaaccaat

SEQ ID NO: 500610 - DNA, 19 bp, Mus musculus
  siRNA target sequence for Dnchc1 (NM_030238.1,874-892).
caactttccttaaccaatt

SEQ ID NO: 500611 - DNA, 19 bp, Mus musculus
  siRNA target sequence for Dnchc1 (NM_030238.1,877-895).
ctttccttaaccaattaca

SEQ ID NO: 500612 - DNA, 19 bp, Mus musculus
  siRNA target sequence for Dnchc1 (NM_030238.1,910-928).
ggtggatccgagaaattca

SEQ ID NO: 500613 - DNA, 19 bp, Mus musculus
  siRNA target sequence for Dnchc1 (NM_030238.1,913-931).
ggatccgagaaattcaaaa

SEQ ID NO: 500614 - DNA, 19 bp, Mus musculus
  siRNA target sequence for Dnchc1 (NM_030238.1,1151-1169).
ctacaaccctctgatgaaa

SEQ ID NO: 500615 - DNA, 19 bp, Mus musculus
  siRNA target sequence for Dnchc1 (NM_030238.1,1166-1184).
gaaagacttccctctgaat

SEQ ID NO: 500616 - DNA, 19 bp, Mus musculus
  siRNA target sequence for Dnchc1 (NM_030238.1,1224-1242).
gcccttgttgcaattttca

SEQ ID NO: 500617 - DNA, 19 bp, Mus musculus
  siRNA target sequence for Dnchc1 (NM_030238.1,1226-1244).
ccttgttgcaattttcaca

SEQ ID NO: 500618 - DNA, 19 bp, Mus musculus
  siRNA target sequence for Dnchc1 (NM_030238.1,1624-1642).
cagcagtcgcacaacagaa

SEQ ID NO: 500619 - DNA, 19 bp, Mus musculus
  siRNA target sequence for Dnchc1 (NM_030238.1,1657-1675).
ctgaaccccaagacatgaa

SEQ ID NO: 500620 - DNA, 19 bp, Mus musculus
  siRNA target sequence for Dnchc1 (NM_030238.1,1802-1820).
cgcgatgaagagatacgat

SEQ ID NO: 500621 - DNA, 19 bp, Mus musculus
  siRNA target sequence for Dnchc1 (NM_030238.1,1871-1889).
gctcggcacggccaagaat

SEQ ID NO: 500622 - DNA, 19 bp, Mus musculus
  siRNA target sequence for Dnchc1 (NM_030238.1,1951-1969).
gaggggccattcgtgaata

SEQ ID NO: 500623 - DNA, 19 bp, Mus musculus
  siRNA target sequence for Dnchc1 (NM_030238.1,1954-1972).
gggccattcgtgaatacca

SEQ ID NO: 500624 - DNA, 19 bp, Mus musculus
  siRNA target sequence for Dnchc1 (NM_030238.1,1979-1997).
gctgatccaacgtgtgaaa

SEQ ID NO: 500625 - DNA, 19 bp, Mus musculus
  siRNA target sequence for Dnchc1 (NM_030238.1,1982-2000).
gatccaacgtgtgaaagat

SEQ ID NO: 500626 - DNA, 19 bp, Mus musculus
  siRNA target sequence for Dnchc1 (NM_030238.1,1992-2010).
gtgaaagatgacatcgaat

SEQ ID NO: 500627 - DNA, 19 bp, Mus musculus
  siRNA target sequence for Dnchc1 (NM_030238.1,2041-2059).
cgcaaagccaagcttgtaa

SEQ ID NO: 500628 - DNA, 19 bp, Mus musculus
  siRNA target sequence for Dnchc1 (NM_030238.1,2085-2103).
cccgtgtcagggtctatca

SEQ ID NO: 500629 - DNA, 19 bp, Mus musculus
  siRNA target sequence for Dnchc1 (NM_030238.1,2086-2104).
ccgtgtcagggtctatcat

SEQ ID NO: 500630 - DNA, 19 bp, Mus musculus
  siRNA target sequence for Dnchc1 (NM_030238.1,2346-2364).
gggaatgtcctcaagctaa

SEQ ID NO: 500631 - DNA, 19 bp, Mus musculus
  siRNA target sequence for Dnchc1 (NM_030238.1,2434-2452).
gagtgccacttgcaattgt

SEQ ID NO: 500632 - DNA, 19 bp, Mus musculus
  siRNA target sequence for Dnchc1 (NM_030238.1,2490-2508).
gccatctcgctgattgaaa

SEQ ID NO: 500633 - DNA, 19 bp, Mus musculus
  siRNA target sequence for Dnchc1 (NM_030238.1,2667-2685).
gcagagacggttttcaact

SEQ ID NO: 500634 - DNA, 19 bp, Mus musculus
  siRNA target sequence for Dnchc1 (NM_030238.1,2668-2686).
cagagacggttttcaactt

SEQ ID NO: 500635 - DNA, 19 bp, Mus musculus
  siRNA target sequence for Dnchc1 (NM_030238.1,2696-2714).
ggtggacgacctactgatt

SEQ ID NO: 500636 - DNA, 19 bp, Mus musculus
  siRNA target sequence for Dnchc1 (NM_030238.1,2697-2715).
gtggacgacctactgatta

SEQ ID NO: 500637 - DNA, 19 bp, Mus musculus
  siRNA target sequence for Dnchc1 (NM_030238.1,2699-2717).
ggacgacctactgattatt

SEQ ID NO: 500638 - DNA, 19 bp, Mus musculus
  siRNA target sequence for Dnchc1 (NM_030238.1,2709-2727).
ctgattattgaggaaaaga

SEQ ID NO: 500639 - DNA, 19 bp, Mus musculus
  siRNA target sequence for Dnchc1 (NM_030238.1,2820-2838).
ctaaacctgcactcctatt

SEQ ID NO: 500640 - DNA, 19 bp, Mus musculus
  siRNA target sequence for Dnchc1 (NM_030238.1,3007-3025).
gtggagagcccaagatcaa

SEQ ID NO: 500641 - DNA, 19 bp, Mus musculus
  siRNA target sequence for Dnchc1 (NM_030238.1,3033-3051).
gttcacgagctgaggataa

SEQ ID NO: 500642 - DNA, 19 bp, Mus musculus
  siRNA target sequence for Dnchc1 (NM_030238.1,3036-3054).
cacgagctgaggataacaa

SEQ ID NO: 500643 - DNA, 19 bp, Mus musculus
  siRNA target sequence for Dnchc1 (NM_030238.1,3038-3056).
cgagctgaggataacaaat

SEQ ID NO: 500644 - DNA, 19 bp, Mus musculus
  siRNA target sequence for Dnchc1 (NM_030238.1,3052-3070).
caaatcaggtcatctatct

SEQ ID NO: 500645 - DNA, 19 bp, Mus musculus
  siRNA target sequence for Dnchc1 (NM_030238.1,3281-3299).
gggcatagtgactgaagtt

SEQ ID NO: 500646 - DNA, 19 bp, Mus musculus
  siRNA target sequence for Dnchc1 (NM_030238.1,3292-3310).
ctgaagttgagcagtatgt

SEQ ID NO: 500647 - DNA, 19 bp, Mus musculus
  siRNA target sequence for Dnchc1 (NM_030238.1,3300-3318).
gagcagtatgttaaggttt

SEQ ID NO: 500648 - DNA, 19 bp, Mus musculus
  siRNA target sequence for Dnchc1 (NM_030238.1,3370-3388).
ggctaggggaagatctcaa

SEQ ID NO: 500649 - DNA, 19 bp, Mus musculus
  siRNA target sequence for Dnchc1 (NM_030238.1,3399-3417).
gctctcctggtccagataa

SEQ ID NO: 500650 - DNA, 19 bp, Mus musculus
  siRNA target sequence for Dnchc1 (NM_030238.1,3419-3437).
gaaagccagaggaaccttt

SEQ ID NO: 500651 - DNA, 19 bp, Mus musculus
  siRNA target sequence for Dnchc1 (NM_030238.1,3444-3462).
gcggaaaccaagaaagagt

SEQ ID NO: 500652 - DNA, 19 bp, Mus musculus
  siRNA target sequence for Dnchc1 (NM_030238.1,3446-3464).
ggaaaccaagaaagagttt

SEQ ID NO: 500653 - DNA, 19 bp, Mus musculus
  siRNA target sequence for Dnchc1 (NM_030238.1,3465-3483).
ggtccggtggtgatagatt

SEQ ID NO: 500654 - DNA, 19 bp, Mus musculus
  siRNA target sequence for Dnchc1 (NM_030238.1,3466-3484).
gtccggtggtgatagatta

SEQ ID NO: 500655 - DNA, 19 bp, Mus musculus
  siRNA target sequence for Dnchc1 (NM_030238.1,3533-3551).
ggaggttctcagcaagttt

SEQ ID NO: 500656 - DNA, 19 bp, Mus musculus
  siRNA target sequence for Dnchc1 (NM_030238.1,3585-3603).
cactcccagatctcaaagt

SEQ ID NO: 500657 - DNA, 19 bp, Mus musculus
  siRNA target sequence for Dnchc1 (NM_030238.1,3704-3722).
gtttgagaagcaagttgaa

SEQ ID NO: 500658 - DNA, 19 bp, Mus musculus
  siRNA target sequence for Dnchc1 (NM_030238.1,3736-3754).
gtcagcgtctgctggaaaa

SEQ ID NO: 500659 - DNA, 19 bp, Mus musculus
  siRNA target sequence for Dnchc1 (NM_030238.1,3741-3759).
cgtctgctggaaaaacaaa

SEQ ID NO: 500660 - DNA, 19 bp, Mus musculus
  siRNA target sequence for Dnchc1 (NM_030238.1,3778-3796).
cttggctttacattgacaa

SEQ ID NO: 500661 - DNA, 19 bp, Mus musculus
  siRNA target sequence for Dnchc1 (NM_030238.1,3864-3882).
gtggcaaacctgcaaatga

SEQ ID NO: 500662 - DNA, 19 bp, Mus musculus
  siRNA target sequence for Dnchc1 (NM_030238.1,3913-3931).
gccggaccacggatctgtt

SEQ ID NO: 500663 - DNA, 19 bp, Mus musculus
  siRNA target sequence for Dnchc1 (NM_030238.1,3987-4005).
cttcaggccctcaccatat

SEQ ID NO: 500664 - DNA, 19 bp, Mus musculus
  siRNA target sequence for Dnchc1 (NM_030238.1,4152-4170).
gtgtggtcagagctttcta

SEQ ID NO: 500665 - DNA, 19 bp, Mus musculus
  siRNA target sequence for Dnchc1 (NM_030238.1,4168-4186).
ctaaggtctgggaacaaat

SEQ ID NO: 500666 - DNA, 19 bp, Mus musculus
  siRNA target sequence for Dnchc1 (NM_030238.1,4172-4190).
ggtctgggaacaaattgat

SEQ ID NO: 500667 - DNA, 19 bp, Mus musculus
  siRNA target sequence for Dnchc1 (NM_030238.1,4175-4193).
ctgggaacaaattgatcaa

SEQ ID NO: 500668 - DNA, 19 bp, Mus musculus
  siRNA target sequence for Dnchc1 (NM_030238.1,4179-4197).
gaacaaattgatcaaatga

SEQ ID NO: 500669 - DNA, 19 bp, Mus musculus
  siRNA target sequence for Dnchc1 (NM_030238.1,4225-4243).
ctcggaagcttcgacaaaa

SEQ ID NO: 500670 - DNA, 19 bp, Mus musculus
  siRNA target sequence for Dnchc1 (NM_030238.1,4229-4247).
gaagcttcgacaaaaccta

SEQ ID NO: 500671 - DNA, 19 bp, Mus musculus
  siRNA target sequence for Dnchc1 (NM_030238.1,4462-4480).
gggacgtggaccttcagaa

SEQ ID NO: 500672 - DNA, 19 bp, Mus musculus
  siRNA target sequence for Dnchc1 (NM_030238.1,4524-4542).
gagatggccttggaagaat

SEQ ID NO: 500673 - DNA, 19 bp, Mus musculus
  siRNA target sequence for Dnchc1 (NM_030238.1,4557-4575).
cgagaagtgtggaacacat

SEQ ID NO: 500674 - DNA, 19 bp, Mus musculus
  siRNA target sequence for Dnchc1 (NM_030238.1,4584-4602).
gacttggtcaactatcaga

SEQ ID NO: 500675 - DNA, 19 bp, Mus musculus
  siRNA target sequence for Dnchc1 (NM_030238.1,4664-4682).
cagcgtctctgccatgaaa

SEQ ID NO: 500676 - DNA, 19 bp, Mus musculus
  siRNA target sequence for Dnchc1 (NM_030238.1,4666-4684).
gcgtctctgccatgaaact

SEQ ID NO: 500677 - DNA, 19 bp, Mus musculus
  siRNA target sequence for Dnchc1 (NM_030238.1,4687-4705).
ctccctattacaaggtttt

SEQ ID NO: 500678 - DNA, 19 bp, Mus musculus
  siRNA target sequence for Dnchc1 (NM_030238.1,4690-4708).
cctattacaaggtttttga

SEQ ID NO: 500679 - DNA, 19 bp, Mus musculus
  siRNA target sequence for Dnchc1 (NM_030238.1,4691-4709).
ctattacaaggtttttgaa

SEQ ID NO: 500680 - DNA, 19 bp, Mus musculus
  siRNA target sequence for Dnchc1 (NM_030238.1,4813-4831).
caggcagtgcggacatcaa

SEQ ID NO: 500681 - DNA, 19 bp, Mus musculus
  siRNA target sequence for Dnchc1 (NM_030238.1,4817-4835).
cagtgcggacatcaaacat

SEQ ID NO: 500682 - DNA, 19 bp, Mus musculus
  siRNA target sequence for Dnchc1 (NM_030238.1,4819-4837).
gtgcggacatcaaacatct

SEQ ID NO: 500683 - DNA, 19 bp, Mus musculus
  siRNA target sequence for Dnchc1 (NM_030238.1,4867-4885).
gtatcagcacggagttttt

SEQ ID NO: 500684 - DNA, 19 bp, Mus musculus
  siRNA target sequence for Dnchc1 (NM_030238.1,4887-4905).
gctctgatgaaaaaagtct

SEQ ID NO: 500685 - DNA, 19 bp, Mus musculus
  siRNA target sequence for Dnchc1 (NM_030238.1,4906-4924).
ccaagtctccacttgtgat

SEQ ID NO: 500686 - DNA, 19 bp, Mus musculus
  siRNA target sequence for Dnchc1 (NM_030238.1,5054-5072).
gggtgatgaggatttgctt

SEQ ID NO: 500687 - DNA, 19 bp, Mus musculus
  siRNA target sequence for Dnchc1 (NM_030238.1,5089-5107).
gcaagaacgtggctaagtt

SEQ ID NO: 500688 - DNA, 19 bp, Mus musculus
  siRNA target sequence for Dnchc1 (NM_030238.1,5136-5154).
ggcgtttccagcatcatct

SEQ ID NO: 500689 - DNA, 19 bp, Mus musculus
  siRNA target sequence for Dnchc1 (NM_030238.1,5137-5155).
gcgtttccagcatcatctt

SEQ ID NO: 500690 - DNA, 19 bp, Mus musculus
  siRNA target sequence for Dnchc1 (NM_030238.1,5172-5190).
gtggtcctcggcatctcat

SEQ ID NO: 500691 - DNA, 19 bp, Mus musculus
  siRNA target sequence for Dnchc1 (NM_030238.1,5201-5219).
ggaggaggttatgtttaaa

SEQ ID NO: 500692 - DNA, 19 bp, Mus musculus
  siRNA target sequence for Dnchc1 (NM_030238.1,5204-5222).
ggaggttatgtttaaaact

SEQ ID NO: 500693 - DNA, 19 bp, Mus musculus
  siRNA target sequence for Dnchc1 (NM_030238.1,5241-5259).
caccccaaaatcaatgagt

SEQ ID NO: 500694 - DNA, 19 bp, Mus musculus
  siRNA target sequence for Dnchc1 (NM_030238.1,5287-5305).
gagtcaccttggctaaact

SEQ ID NO: 500695 - DNA, 19 bp, Mus musculus
  siRNA target sequence for Dnchc1 (NM_030238.1,5353-5371).
ctattgacccaaataccta

SEQ ID NO: 500696 - DNA, 19 bp, Mus musculus
  siRNA target sequence for Dnchc1 (NM_030238.1,5369-5387).
ctacattacttggattgat

SEQ ID NO: 500697 - DNA, 19 bp, Mus musculus
  siRNA target sequence for Dnchc1 (NM_030238.1,5377-5395).
cttggattgataaatacca

SEQ ID NO: 500698 - DNA, 19 bp, Mus musculus
  siRNA target sequence for Dnchc1 (NM_030238.1,5397-5415).
gcccagctagtggtattgt

SEQ ID NO: 500699 - DNA, 19 bp, Mus musculus
  siRNA target sequence for Dnchc1 (NM_030238.1,5399-5417).
ccagctagtggtattgtca

SEQ ID NO: 500700 - DNA, 19 bp, Mus musculus
  siRNA target sequence for Dnchc1 (NM_030238.1,5645-5663).
gatcgacaacgccaaatct

SEQ ID NO: 500701 - DNA, 19 bp, Mus musculus
  siRNA target sequence for Dnchc1 (NM_030238.1,5651-5669).
caacgccaaatctttcgaa

SEQ ID NO: 500702 - DNA, 19 bp, Mus musculus
  siRNA target sequence for Dnchc1 (NM_030238.1,5673-5691).
ctcagccagatgcgatttt

SEQ ID NO: 500703 - DNA, 19 bp, Mus musculus
  siRNA target sequence for Dnchc1 (NM_030238.1,5677-5695).
gccagatgcgattttactt

SEQ ID NO: 500704 - DNA, 19 bp, Mus musculus
  siRNA target sequence for Dnchc1 (NM_030238.1,5678-5696).
ccagatgcgattttacttt

SEQ ID NO: 500705 - DNA, 19 bp, Mus musculus
  siRNA target sequence for Dnchc1 (NM_030238.1,5814-5832).
gaccgttgctatttgacaa

SEQ ID NO: 500706 - DNA, 19 bp, Mus musculus
  siRNA target sequence for Dnchc1 (NM_030238.1,5817-5835).
cgttgctatttgacaatga

SEQ ID NO: 500707 - DNA, 19 bp, Mus musculus
  siRNA target sequence for Dnchc1 (NM_030238.1,5931-5949).
cggttcgtcttagttttca

SEQ ID NO: 500708 - DNA, 19 bp, Mus musculus
  siRNA target sequence for Dnchc1 (NM_030238.1,5951-5969).
ctgtgacgaaacctttgat

SEQ ID NO: 500709 - DNA, 19 bp, Mus musculus
  siRNA target sequence for Dnchc1 (NM_030238.1,5953-5971).
gtgacgaaacctttgattt

SEQ ID NO: 500710 - DNA, 19 bp, Mus musculus
  siRNA target sequence for Dnchc1 (NM_030238.1,5975-5993).
ggcgatgggacgtatcttt

SEQ ID NO: 500711 - DNA, 19 bp, Mus musculus
  siRNA target sequence for Dnchc1 (NM_030238.1,5977-5995).
cgatgggacgtatctttgt

SEQ ID NO: 500712 - DNA, 19 bp, Mus musculus
  siRNA target sequence for Dnchc1 (NM_030238.1,6077-6095).
gcaggtgcagtgcatacaa

SEQ ID NO: 500713 - DNA, 19 bp, Mus musculus
  siRNA target sequence for Dnchc1 (NM_030238.1,6100-6118).
cactgcgggagcattccaa

SEQ ID NO: 500714 - DNA, 19 bp, Mus musculus
  siRNA target sequence for Dnchc1 (NM_030238.1,6134-6152).
gacctcagcccccattact

SEQ ID NO: 500715 - DNA, 19 bp, Mus musculus
  siRNA target sequence for Dnchc1 (NM_030238.1,6186-6204).
ccagacatggctatcttca

SEQ ID NO: 500716 - DNA, 19 bp, Mus musculus
  siRNA target sequence for Dnchc1 (NM_030238.1,6187-6205).
cagacatggctatcttcat

SEQ ID NO: 500717 - DNA, 19 bp, Mus musculus
  siRNA target sequence for Dnchc1 (NM_030238.1,6362-6380).
gatcgtcccgttcttcaaa

SEQ ID NO: 500718 - DNA, 19 bp, Mus musculus
  siRNA target sequence for Dnchc1 (NM_030238.1,6366-6384).
gtcccgttcttcaaactgt

SEQ ID NO: 500719 - DNA, 19 bp, Mus musculus
  siRNA target sequence for Dnchc1 (NM_030238.1,6400-6418).
cttctcaaagccattatga

SEQ ID NO: 500720 - DNA, 19 bp, Mus musculus
  siRNA target sequence for Dnchc1 (NM_030238.1,6437-6455).
gaagagtgtgcttgtaagt

SEQ ID NO: 500721 - DNA, 19 bp, Mus musculus
  siRNA target sequence for Dnchc1 (NM_030238.1,6711-6729).
gtgtgtcaggagatgtact

SEQ ID NO: 500722 - DNA, 19 bp, Mus musculus
  siRNA target sequence for Dnchc1 (NM_030238.1,6719-6737).
ggagatgtacttgacatat

SEQ ID NO: 500723 - DNA, 19 bp, Mus musculus
  siRNA target sequence for Dnchc1 (NM_030238.1,6760-6778).
ggatgtgggttgaaaaggt

SEQ ID NO: 500724 - DNA, 19 bp, Mus musculus
  siRNA target sequence for Dnchc1 (NM_030238.1,6761-6779).
gatgtgggttgaaaaggtt

SEQ ID NO: 500725 - DNA, 19 bp, Mus musculus
  siRNA target sequence for Dnchc1 (NM_030238.1,7000-7018).
cacacgtgctgagaaagat

SEQ ID NO: 500726 - DNA, 19 bp, Mus musculus
  siRNA target sequence for Dnchc1 (NM_030238.1,7004-7022).
cgtgctgagaaagatcata

SEQ ID NO: 500727 - DNA, 19 bp, Mus musculus
  siRNA target sequence for Dnchc1 (NM_030238.1,7559-7577).
caacgtggcgcagtacaat

SEQ ID NO: 500728 - DNA, 19 bp, Mus musculus
  siRNA target sequence for Dnchc1 (NM_030238.1,7649-7667).
catcctctggtccttatct

SEQ ID NO: 500729 - DNA, 19 bp, Mus musculus
  siRNA target sequence for Dnchc1 (NM_030238.1,7669-7687).
gagacagccggctgaagat

SEQ ID NO: 500730 - DNA, 19 bp, Mus musculus
  siRNA target sequence for Dnchc1 (NM_030238.1,7671-7689).
gacagccggctgaagatga

SEQ ID NO: 500731 - DNA, 19 bp, Mus musculus
  siRNA target sequence for Dnchc1 (NM_030238.1,7745-7763).
gcccaacgtccccatcatt

SEQ ID NO: 500732 - DNA, 19 bp, Mus musculus
  siRNA target sequence for Dnchc1 (NM_030238.1,7751-7769).
cgtccccatcattgactat

SEQ ID NO: 500733 - DNA, 19 bp, Mus musculus
  siRNA target sequence for Dnchc1 (NM_030238.1,7805-7823).
ggccaaggtgcctcagatt

SEQ ID NO: 500734 - DNA, 19 bp, Mus musculus
  siRNA target sequence for Dnchc1 (NM_030238.1,7807-7825).
ccaaggtgcctcagattga

SEQ ID NO: 500735 - DNA, 19 bp, Mus musculus
  siRNA target sequence for Dnchc1 (NM_030238.1,7808-7826).
caaggtgcctcagattgaa

SEQ ID NO: 500736 - DNA, 19 bp, Mus musculus
  siRNA target sequence for Dnchc1 (NM_030238.1,7859-7877).
cgtcgtgccaaccttagat

SEQ ID NO: 500737 - DNA, 19 bp, Mus musculus
  siRNA target sequence for Dnchc1 (NM_030238.1,7860-7878).
gtcgtgccaaccttagata

SEQ ID NO: 500738 - DNA, 19 bp, Mus musculus
  siRNA target sequence for Dnchc1 (NM_030238.1,7862-7880).
cgtgccaaccttagataca

SEQ ID NO: 500739 - DNA, 19 bp, Mus musculus
  siRNA target sequence for Dnchc1 (NM_030238.1,7890-7908).
gaagctctcctgtacactt

SEQ ID NO: 500740 - DNA, 19 bp, Mus musculus
  siRNA target sequence for Dnchc1 (NM_030238.1,7906-7924).
cttggctggctgaacacaa

SEQ ID NO: 500741 - DNA, 19 bp, Mus musculus
  siRNA target sequence for Dnchc1 (NM_030238.1,7922-7940).
caaacccctggtcttatgt

SEQ ID NO: 500742 - DNA, 19 bp, Mus musculus
  siRNA target sequence for Dnchc1 (NM_030238.1,8004-8022).
gaggttgtgggcctaaact

SEQ ID NO: 500743 - DNA, 19 bp, Mus musculus
  siRNA target sequence for Dnchc1 (NM_030238.1,8007-8025).
gttgtgggcctaaacttct

SEQ ID NO: 500744 - DNA, 19 bp, Mus musculus
  siRNA target sequence for Dnchc1 (NM_030238.1,8010-8028).
gtgggcctaaacttctcaa

SEQ ID NO: 500745 - DNA, 19 bp, Mus musculus
  siRNA target sequence for Dnchc1 (NM_030238.1,8064-8082).
gaccactactgcgaataca

SEQ ID NO: 500746 - DNA, 19 bp, Mus musculus
  siRNA target sequence for Dnchc1 (NM_030238.1,8089-8107).
cacctaacggtgttgtctt

SEQ ID NO: 500747 - DNA, 19 bp, Mus musculus
  siRNA target sequence for Dnchc1 (NM_030238.1,8125-8143).
gaaagtggctggtcttgtt

SEQ ID NO: 500748 - DNA, 19 bp, Mus musculus
  siRNA target sequence for Dnchc1 (NM_030238.1,8156-8174).
caacttgcccgatatggat

SEQ ID NO: 500749 - DNA, 19 bp, Mus musculus
  siRNA target sequence for Dnchc1 (NM_030238.1,8249-8267).
ccaaacgtgggtaaagcta

SEQ ID NO: 500750 - DNA, 19 bp, Mus musculus
  siRNA target sequence for Dnchc1 (NM_030238.1,8342-8360).
gcgccacgtgcctgttgta

SEQ ID NO: 500751 - DNA, 19 bp, Mus musculus
  siRNA target sequence for Dnchc1 (NM_030238.1,8343-8361).
cgccacgtgcctgttgtat

SEQ ID NO: 500752 - DNA, 19 bp, Mus musculus
  siRNA target sequence for Dnchc1 (NM_030238.1,8383-8401).
cctccctgacgcaaatcta

SEQ ID NO: 500753 - DNA, 19 bp, Mus musculus
  siRNA target sequence for Dnchc1 (NM_030238.1,8384-8402).
ctccctgacgcaaatctat

SEQ ID NO: 500754 - DNA, 19 bp, Mus musculus
  siRNA target sequence for Dnchc1 (NM_030238.1,8471-8489).
cgccatggtggagttctat

SEQ ID NO: 500755 - DNA, 19 bp, Mus musculus
  siRNA target sequence for Dnchc1 (NM_030238.1,8472-8490).
gccatggtggagttctata

SEQ ID NO: 500756 - DNA, 19 bp, Mus musculus
  siRNA target sequence for Dnchc1 (NM_030238.1,8495-8513).
gtcacaggagcggtttact

SEQ ID NO: 500757 - DNA, 19 bp, Mus musculus
  siRNA target sequence for Dnchc1 (NM_030238.1,8497-8515).
cacaggagcggtttactca

SEQ ID NO: 500758 - DNA, 19 bp, Mus musculus
  siRNA target sequence for Dnchc1 (NM_030238.1,8516-8534).
ggacacacagccacactat

SEQ ID NO: 500759 - DNA, 19 bp, Mus musculus
  siRNA target sequence for Dnchc1 (NM_030238.1,8521-8539).
cacagccacactatatcta

SEQ ID NO: 500760 - DNA, 19 bp, Mus musculus
  siRNA target sequence for Dnchc1 (NM_030238.1,8563-8581).
gggtaagaggaatctttga

SEQ ID NO: 500761 - DNA, 19 bp, Mus musculus
  siRNA target sequence for Dnchc1 (NM_030238.1,8610-8628).
gttgaaggtctcattcgta

SEQ ID NO: 500762 - DNA, 19 bp, Mus musculus
  siRNA target sequence for Dnchc1 (NM_030238.1,8613-8631).
gaaggtctcattcgtattt

SEQ ID NO: 500763 - DNA, 19 bp, Mus musculus
  siRNA target sequence for Dnchc1 (NM_030238.1,8688-8706).
cgctggactgacgaaaaca

SEQ ID NO: 500764 - DNA, 19 bp, Mus musculus
  siRNA target sequence for Dnchc1 (NM_030238.1,8689-8707).
gctggactgacgaaaacat

SEQ ID NO: 500765 - DNA, 19 bp, Mus musculus
  siRNA target sequence for Dnchc1 (NM_030238.1,8690-8708).
ctggactgacgaaaacatt

SEQ ID NO: 500766 - DNA, 19 bp, Mus musculus
  siRNA target sequence for Dnchc1 (NM_030238.1,8734-8752).
ctaacatagacaaagagaa

SEQ ID NO: 500767 - DNA, 19 bp, Mus musculus
  siRNA target sequence for Dnchc1 (NM_030238.1,8820-8838).
gagctaagggattatgtca

SEQ ID NO: 500768 - DNA, 19 bp, Mus musculus
  siRNA target sequence for Dnchc1 (NM_030238.1,8842-8860).
ctaggctgaaggtcttcta

SEQ ID NO: 500769 - DNA, 19 bp, Mus musculus
  siRNA target sequence for Dnchc1 (NM_030238.1,8970-8988).
gttagtggagctggaaaaa

SEQ ID NO: 500770 - DNA, 19 bp, Mus musculus
  siRNA target sequence for Dnchc1 (NM_030238.1,9002-9020).
ctttgtcgcctggatgaat

SEQ ID NO: 500771 - DNA, 19 bp, Mus musculus
  siRNA target sequence for Dnchc1 (NM_030238.1,9028-9046).
gtgtataccagattaaggt

SEQ ID NO: 500772 - DNA, 19 bp, Mus musculus
  siRNA target sequence for Dnchc1 (NM_030238.1,9069-9087).
gacttcgatgaagatctta

SEQ ID NO: 500773 - DNA, 19 bp, Mus musculus
  siRNA target sequence for Dnchc1 (NM_030238.1,9098-9116).
gagacggtctggctgtaaa

SEQ ID NO: 500774 - DNA, 19 bp, Mus musculus
  siRNA target sequence for Dnchc1 (NM_030238.1,9100-9118).
gacggtctggctgtaaaaa

SEQ ID NO: 500775 - DNA, 19 bp, Mus musculus
  siRNA target sequence for Dnchc1 (NM_030238.1,9120-9138).
gaaaagatagcattcataa

SEQ ID NO: 500776 - DNA, 19 bp, Mus musculus
  siRNA target sequence for Dnchc1 (NM_030238.1,9163-9181).
ccggattcctggaacgaat

SEQ ID NO: 500777 - DNA, 19 bp, Mus musculus
  siRNA target sequence for Dnchc1 (NM_030238.1,9166-9184).
gattcctggaacgaatgaa

SEQ ID NO: 500778 - DNA, 19 bp, Mus musculus
  siRNA target sequence for Dnchc1 (NM_030238.1,9206-9224).
ggttcctgggctctttgaa

SEQ ID NO: 500779 - DNA, 19 bp, Mus musculus
  siRNA target sequence for Dnchc1 (NM_030238.1,9468-9486).
caagtcggcaaagaattca

SEQ ID NO: 500780 - DNA, 19 bp, Mus musculus
  siRNA target sequence for Dnchc1 (NM_030238.1,9503-9521).
ggagaagccgaactatata

SEQ ID NO: 500781 - DNA, 19 bp, Mus musculus
  siRNA target sequence for Dnchc1 (NM_030238.1,9765-9783).
gttgggctccgaaaaatca

SEQ ID NO: 500782 - DNA, 19 bp, Mus musculus
  siRNA target sequence for Dnchc1 (NM_030238.1,10167-10185).
cagatccgctccatcatca

SEQ ID NO: 500783 - DNA, 19 bp, Mus musculus
  siRNA target sequence for Dnchc1 (NM_030238.1,10277-10295).
caaccccagttacaactat

SEQ ID NO: 500784 - DNA, 19 bp, Mus musculus
  siRNA target sequence for Dnchc1 (NM_030238.1,10281-10299).
cccagttacaactatgaga

SEQ ID NO: 500785 - DNA, 19 bp, Mus musculus
  siRNA target sequence for Dnchc1 (NM_030238.1,10282-10300).
ccagttacaactatgagat

SEQ ID NO: 500786 - DNA, 19 bp, Mus musculus
  siRNA target sequence for Dnchc1 (NM_030238.1,10344-10362).
gcgattgcacagctcaatt

SEQ ID NO: 500787 - DNA, 19 bp, Mus musculus
  siRNA target sequence for Dnchc1 (NM_030238.1,10345-10363).
cgattgcacagctcaatta

SEQ ID NO: 500788 - DNA, 19 bp, Mus musculus
  siRNA target sequence for Dnchc1 (NM_030238.1,10346-10364).
gattgcacagctcaattat

SEQ ID NO: 500789 - DNA, 19 bp, Mus musculus
  siRNA target sequence for Dnchc1 (NM_030238.1,10358-10376).
caattatgcagacatgtta

SEQ ID NO: 500790 - DNA, 19 bp, Mus musculus
  siRNA target sequence for Dnchc1 (NM_030238.1,10557-10575).
gctgtggaagcaaaggtaa

SEQ ID NO: 500791 - DNA, 19 bp, Mus musculus
  siRNA target sequence for Dnchc1 (NM_030238.1,10577-10595).
ccggagcactgcacttcta

SEQ ID NO: 500792 - DNA, 19 bp, Mus musculus
  siRNA target sequence for Dnchc1 (NM_030238.1,10578-10596).
cggagcactgcacttctaa

SEQ ID NO: 500793 - DNA, 19 bp, Mus musculus
  siRNA target sequence for Dnchc1 (NM_030238.1,10583-10601).
cactgcacttctaaagagt

SEQ ID NO: 500794 - DNA, 19 bp, Mus musculus
  siRNA target sequence for Dnchc1 (NM_030238.1,10585-10603).
ctgcacttctaaagagttt

SEQ ID NO: 500795 - DNA, 19 bp, Mus musculus
  siRNA target sequence for Dnchc1 (NM_030238.1,10587-10605).
gcacttctaaagagtttat

SEQ ID NO: 500796 - DNA, 19 bp, Mus musculus
  siRNA target sequence for Dnchc1 (NM_030238.1,10625-10643).
ggaaaagacgagtgaaact

SEQ ID NO: 500797 - DNA, 19 bp, Mus musculus
  siRNA target sequence for Dnchc1 (NM_030238.1,10711-10729).
gctactttgaccagcaaat

SEQ ID NO: 500798 - DNA, 19 bp, Mus musculus
  siRNA target sequence for Dnchc1 (NM_030238.1,10725-10743).
caaatgcgccagaacttgt

SEQ ID NO: 500799 - DNA, 19 bp, Mus musculus
  siRNA target sequence for Dnchc1 (NM_030238.1,10750-10768).
cctggtctcatcacttaca

SEQ ID NO: 500800 - DNA, 19 bp, Mus musculus
  siRNA target sequence for Dnchc1 (NM_030238.1,10781-10799).
ccagttccgcacagacatt

SEQ ID NO: 500801 - DNA, 19 bp, Mus musculus
  siRNA target sequence for Dnchc1 (NM_030238.1,10887-10905).
gccatcatgctaaaacgat

SEQ ID NO: 500802 - DNA, 19 bp, Mus musculus
  siRNA target sequence for Dnchc1 (NM_030238.1,10892-10910).
catgctaaaacgattcaat

SEQ ID NO: 500803 - DNA, 19 bp, Mus musculus
  siRNA target sequence for Dnchc1 (NM_030238.1,10896-10914).
ctaaaacgattcaataggt

SEQ ID NO: 500804 - DNA, 19 bp, Mus musculus
  siRNA target sequence for Dnchc1 (NM_030238.1,10936-10954).
ccggacaggccacagaatt

SEQ ID NO: 500805 - DNA, 19 bp, Mus musculus
  siRNA target sequence for Dnchc1 (NM_030238.1,10990-11008).
ggaccagcttcttagatga

SEQ ID NO: 500806 - DNA, 19 bp, Mus musculus
  siRNA target sequence for Dnchc1 (NM_030238.1,10991-11009).
gaccagcttcttagatgat

SEQ ID NO: 500807 - DNA, 19 bp, Mus musculus
  siRNA target sequence for Dnchc1 (NM_030238.1,11007-11025).
gatgccttccggaagaatt

SEQ ID NO: 500808 - DNA, 19 bp, Mus musculus
  siRNA target sequence for Dnchc1 (NM_030238.1,11077-11095).
gctacgatccagttttgaa

SEQ ID NO: 500809 - DNA, 19 bp, Mus musculus
  siRNA target sequence for Dnchc1 (NM_030238.1,11078-11096).
ctacgatccagttttgaat

SEQ ID NO: 500810 - DNA, 19 bp, Mus musculus
  siRNA target sequence for Dnchc1 (NM_030238.1,11239-11257).
cccgggtgacctttgtgaa

SEQ ID NO: 500811 - DNA, 19 bp, Mus musculus
  siRNA target sequence for Dnchc1 (NM_030238.1,11264-11282).
cgtcacccgcagcagttta

SEQ ID NO: 500812 - DNA, 19 bp, Mus musculus
  siRNA target sequence for Dnchc1 (NM_030238.1,11341-11359).
gctccgacctcctgaaact

SEQ ID NO: 500813 - DNA, 19 bp, Mus musculus
  siRNA target sequence for Dnchc1 (NM_030238.1,11379-11397).
cgtttacggcagcttgaaa

SEQ ID NO: 500814 - DNA, 19 bp, Mus musculus
  siRNA target sequence for Dnchc1 (NM_030238.1,11445-11463).
gacgacaccatcattacaa

SEQ ID NO: 500815 - DNA, 19 bp, Mus musculus
  siRNA target sequence for Dnchc1 (NM_030238.1,11511-11529).
gaggagacagatattgtca

SEQ ID NO: 500816 - DNA, 19 bp, Mus musculus
  siRNA target sequence for Dnchc1 (NM_030238.1,11608-11626).
ccttgaagcaggttcactt

SEQ ID NO: 500817 - DNA, 19 bp, Mus musculus
  siRNA target sequence for Dnchc1 (NM_030238.1,11667-11685).
cacaacgtgctgtatgaga

SEQ ID NO: 500818 - DNA, 19 bp, Mus musculus
  siRNA target sequence for Dnchc1 (NM_030238.1,11846-11864).
gggggagcccacctatgat

SEQ ID NO: 500819 - DNA, 19 bp, Mus musculus
  siRNA target sequence for Dnchc1 (NM_030238.1,11974-11992).
gctgtctgcctgcatttaa

SEQ ID NO: 500820 - DNA, 19 bp, Mus musculus
  siRNA target sequence for Dnchc1 (NM_030238.1,11977-11995).
gtctgcctgcatttaaaga

SEQ ID NO: 500821 - DNA, 19 bp, Mus musculus
  siRNA target sequence for Dnchc1 (NM_030238.1,12083-12101).
cgaggaaacgcctacaact

SEQ ID NO: 500822 - DNA, 19 bp, Mus musculus
  siRNA target sequence for Dnchc1 (NM_030238.1,12122-12140).
ccgcctgctcctgattcaa

SEQ ID NO: 500823 - DNA, 19 bp, Mus musculus
  siRNA target sequence for Dnchc1 (NM_030238.1,12166-12184).
ccatggcccacatgtttgt

SEQ ID NO: 500824 - DNA, 19 bp, Mus musculus
  siRNA target sequence for Dnchc1 (NM_030238.1,12347-12365).
cacgcagatcacgtctatt

SEQ ID NO: 500825 - DNA, 19 bp, Mus musculus
  siRNA target sequence for Dnchc1 (NM_030238.1,12385-12403).
gctttaaccaagcagataa

SEQ ID NO: 500826 - DNA, 19 bp, Mus musculus
  siRNA target sequence for Dnchc1 (NM_030238.1,12429-12447).
ggcaggtgggtgatgttga

SEQ ID NO: 500827 - DNA, 19 bp, Mus musculus
  siRNA target sequence for Dnchc1 (NM_030238.1,12575-12593).
ccgtgctggtcggatcttt

SEQ ID NO: 500828 - DNA, 19 bp, Mus musculus
  siRNA target sequence for Dnchc1 (NM_030238.1,12577-12595).
gtgctggtcggatctttgt

SEQ ID NO: 500829 - DNA, 19 bp, Mus musculus
  siRNA target sequence for Dnchc1 (NM_030238.1,12579-12597).
gctggtcggatctttgtgt

SEQ ID NO: 500830 - DNA, 19 bp, Mus musculus
  siRNA target sequence for Dnchc1 (NM_030238.1,12580-12598).
ctggtcggatctttgtgtt

SEQ ID NO: 500831 - DNA, 19 bp, Mus musculus
  siRNA target sequence for Dnchc1 (NM_030238.1,12623-12641).
caacatgctgaggacattt

SEQ ID NO: 500832 - DNA, 19 bp, Mus musculus
  siRNA target sequence for Dnchc1 (NM_030238.1,12652-12670).
ctgtctctaggatatgcaa

SEQ ID NO: 500833 - DNA, 19 bp, Mus musculus
  siRNA target sequence for Dnchc1 (NM_030238.1,12662-12680).
gatatgcaagtctccaaat

SEQ ID NO: 500834 - DNA, 19 bp, Mus musculus
  siRNA target sequence for Dnchc1 (NM_030238.1,12760-12778).
ggtcaaagaagtacgaatt

SEQ ID NO: 500835 - DNA, 19 bp, Mus musculus
  siRNA target sequence for Dnchc1 (NM_030238.1,12761-12779).
gtcaaagaagtacgaattt

SEQ ID NO: 500836 - DNA, 19 bp, Mus musculus
  siRNA target sequence for Dnchc1 (NM_030238.1,12984-13002).
cgcagcttcgacagtgaat

SEQ ID NO: 500837 - DNA, 19 bp, Mus musculus
  siRNA target sequence for Dnchc1 (NM_030238.1,12988-13006).
gcttcgacagtgaattcaa

SEQ ID NO: 500838 - DNA, 19 bp, Mus musculus
  siRNA target sequence for Dnchc1 (NM_030238.1,13118-13136).
gctgggcctccccaacaat

SEQ ID NO: 500839 - DNA, 19 bp, Mus musculus
  siRNA target sequence for Dnchc1 (NM_030238.1,13159-13177).
cccaaggcgtggacatgat

SEQ ID NO: 500840 - DNA, 19 bp, Mus musculus
  siRNA target sequence for Dnchc1 (NM_030238.1,13161-13179).
caaggcgtggacatgatca

SEQ ID NO: 500841 - DNA, 19 bp, Mus musculus
  siRNA target sequence for Dnchc1 (NM_030238.1,13420-13438).
ccaagttactccaagatgt

SEQ ID NO: 500842 - DNA, 19 bp, Mus musculus
  siRNA target sequence for Dnchc1 (NM_030238.1,13499-13517).
cctgcgcacgctcatcaat

SEQ ID NO: 500843 - DNA, 19 bp, Mus musculus
  siRNA target sequence for Dnchc1 (NM_030238.1,13542-13560).
cggagctggtcccattaca

SEQ ID NO: 500844 - DNA, 19 bp, Mus musculus
  siRNA target sequence for Dnchc1 (NM_030238.1,13654-13672).
gtggtgccaaggaactgaa

SEQ ID NO: 500845 - DNA, 19 bp, Mus musculus
  siRNA target sequence for Dnchc1 (NM_030238.1,13704-13722).
gtacctgaggcctacatca

SEQ ID NO: 500846 - DNA, 19 bp, Mus musculus
  siRNA target sequence for Dnchc1 (NM_030238.1,13723-13741).
ctgccaccagacagtatgt

SEQ ID NO: 500847 - DNA, 19 bp, Mus musculus
  siRNA target sequence for Dnchc1 (NM_030238.1,13925-13943).
gctgcgctgggtgaaacaa

SEQ ID NO: 500848 - DNA, 19 bp, Mus musculus
  siRNA target sequence for Dnchc1 (NM_030238.1,14015-14033).
cttcaccgtggactttgaa

SEQ ID NO: 500849 - DNA, 19 bp, Mus musculus
  siRNA target sequence for Dqx1 (NM_033606.1,347-365).
caagggtggctgatgagat

SEQ ID NO: 500850 - DNA, 19 bp, Mus musculus
  siRNA target sequence for Dqx1 (NM_033606.1,372-390).
gaccctgggtcatgagatt

SEQ ID NO: 500851 - DNA, 19 bp, Mus musculus
  siRNA target sequence for Dqx1 (NM_033606.1,376-394).
ctgggtcatgagattggat

SEQ ID NO: 500852 - DNA, 19 bp, Mus musculus
  siRNA target sequence for Dqx1 (NM_033606.1,533-551).
ggtcagtggcctcagattt

SEQ ID NO: 500853 - DNA, 19 bp, Mus musculus
  siRNA target sequence for Dqx1 (NM_033606.1,534-552).
gtcagtggcctcagattta

SEQ ID NO: 500854 - DNA, 19 bp, Mus musculus
  siRNA target sequence for Dqx1 (NM_033606.1,569-587).
gagataccagactgagaaa

SEQ ID NO: 500855 - DNA, 19 bp, Mus musculus
  siRNA target sequence for Dqx1 (NM_033606.1,624-642).
cccagcgcttgaaccaaaa

SEQ ID NO: 500856 - DNA, 19 bp, Mus musculus
  siRNA target sequence for Dqx1 (NM_033606.1,625-643).
ccagcgcttgaaccaaaat

SEQ ID NO: 500857 - DNA, 19 bp, Mus musculus
  siRNA target sequence for Dqx1 (NM_033606.1,626-644).
cagcgcttgaaccaaaatt

SEQ ID NO: 500858 - DNA, 19 bp, Mus musculus
  siRNA target sequence for Dqx1 (NM_033606.1,629-647).
cgcttgaaccaaaattcca

SEQ ID NO: 500859 - DNA, 19 bp, Mus musculus
  siRNA target sequence for Dqx1 (NM_033606.1,648-666).
ggctttctggggcaattct

SEQ ID NO: 500860 - DNA, 19 bp, Mus musculus
  siRNA target sequence for Dqx1 (NM_033606.1,816-834).
gcccagcgaagaggaaatt

SEQ ID NO: 500861 - DNA, 19 bp, Mus musculus
  siRNA target sequence for Dqx1 (NM_033606.1,819-837).
cagcgaagaggaaatttct

SEQ ID NO: 500862 - DNA, 19 bp, Mus musculus
  siRNA target sequence for Dqx1 (NM_033606.1,821-839).
gcgaagaggaaatttctct

SEQ ID NO: 500863 - DNA, 19 bp, Mus musculus
  siRNA target sequence for Dqx1 (NM_033606.1,963-981).
gagtgttcgcaaaatcgta

SEQ ID NO: 500864 - DNA, 19 bp, Mus musculus
  siRNA target sequence for Dqx1 (NM_033606.1,1048-1066).
ctggaacttcgtagtgttt

SEQ ID NO: 500865 - DNA, 19 bp, Mus musculus
  siRNA target sequence for Dqx1 (NM_033606.1,1051-1069).
gaacttcgtagtgtttaca

SEQ ID NO: 500866 - DNA, 19 bp, Mus musculus
  siRNA target sequence for Dqx1 (NM_033606.1,1093-1111).
caggtgttgagaccaatta

SEQ ID NO: 500867 - DNA, 19 bp, Mus musculus
  siRNA target sequence for Dqx1 (NM_033606.1,1096-1114).
gtgttgagaccaattagca

SEQ ID NO: 500868 - DNA, 19 bp, Mus musculus
  siRNA target sequence for Dqx1 (NM_033606.1,1169-1187).
gcctccgcctgtattctaa

SEQ ID NO: 500869 - DNA, 19 bp, Mus musculus
  siRNA target sequence for Dqx1 (NM_033606.1,1170-1188).
cctccgcctgtattctaaa

SEQ ID NO: 500870 - DNA, 19 bp, Mus musculus
  siRNA target sequence for Dqx1 (NM_033606.1,1171-1189).
ctccgcctgtattctaaat

SEQ ID NO: 500871 - DNA, 19 bp, Mus musculus
  siRNA target sequence for Dqx1 (NM_033606.1,1174-1192).
cgcctgtattctaaatcca

SEQ ID NO: 500872 - DNA, 19 bp, Mus musculus
  siRNA target sequence for Dqx1 (NM_033606.1,1184-1202).
ctaaatccaccctagaact

SEQ ID NO: 500873 - DNA, 19 bp, Mus musculus
  siRNA target sequence for Dqx1 (NM_033606.1,1253-1271).
ctctggtgttgctactaat

SEQ ID NO: 500874 - DNA, 19 bp, Mus musculus
  siRNA target sequence for Dqx1 (NM_033606.1,1343-1361).
ccctggaagacttagacta

SEQ ID NO: 500875 - DNA, 19 bp, Mus musculus
  siRNA target sequence for Dqx1 (NM_033606.1,1456-1474).
gcctcctgcgagtttaact

SEQ ID NO: 500876 - DNA, 19 bp, Mus musculus
  siRNA target sequence for Dqx1 (NM_033606.1,1458-1476).
ctcctgcgagtttaactgt

SEQ ID NO: 500877 - DNA, 19 bp, Mus musculus
  siRNA target sequence for Dqx1 (NM_033606.1,1611-1629).
ggtctatgaagcctttgta

SEQ ID NO: 500878 - DNA, 19 bp, Mus musculus
  siRNA target sequence for Dqx1 (NM_033606.1,1655-1673).
gtcaggctcggggtctaaa

SEQ ID NO: 500879 - DNA, 19 bp, Mus musculus
  siRNA target sequence for Dqx1 (NM_033606.1,1657-1675).
caggctcggggtctaaact

SEQ ID NO: 500880 - DNA, 19 bp, Mus musculus
  siRNA target sequence for Dqx1 (NM_033606.1,1669-1687).
ctaaactgggagtcattat

SEQ ID NO: 500881 - DNA, 19 bp, Mus musculus
  siRNA target sequence for Dqx1 (NM_033606.1,1674-1692).
ctgggagtcattatgtcaa

SEQ ID NO: 500882 - DNA, 19 bp, Mus musculus
  siRNA target sequence for Dqx1 (NM_033606.1,2033-2051).
ctccatacttcctgagtaa

SEQ ID NO: 500883 - DNA, 19 bp, Mus musculus
  siRNA target sequence for Dqx1 (NM_033606.1,2035-2053).
ccatacttcctgagtaact

SEQ ID NO: 500884 - DNA, 19 bp, Mus musculus
  siRNA target sequence for Dtymk (NM_023136.1,168-186).
gcgtttccccgaaagatca

SEQ ID NO: 500885 - DNA, 19 bp, Mus musculus
  siRNA target sequence for Dtymk (NM_023136.1,169-187).
cgtttccccgaaagatcaa

SEQ ID NO: 500886 - DNA, 19 bp, Mus musculus
  siRNA target sequence for Dtymk (NM_023136.1,197-215).
gcaagcttctgaattccta

SEQ ID NO: 500887 - DNA, 19 bp, Mus musculus
  siRNA target sequence for Dtymk (NM_023136.1,269-287).
caaaccgctgggaacaagt

SEQ ID NO: 500888 - DNA, 19 bp, Mus musculus
  siRNA target sequence for Dyrk1a (NM_007890.1,84-102).
cttgcaccgtcgttctcat

SEQ ID NO: 500889 - DNA, 19 bp, Mus musculus
  siRNA target sequence for Dyrk1a (NM_007890.1,162-180).
cgtcgccagccgagcataa

SEQ ID NO: 500890 - DNA, 19 bp, Mus musculus
  siRNA target sequence for Dyrk1a (NM_007890.1,166-184).
gccagccgagcataagtga

SEQ ID NO: 500891 - DNA, 19 bp, Mus musculus
  siRNA target sequence for Dyrk1a (NM_007890.1,218-236).
gattcagcaacctctaact

SEQ ID NO: 500892 - DNA, 19 bp, Mus musculus
  siRNA target sequence for Dyrk1a (NM_007890.1,248-266).
gcctgacattgtcatgtta

SEQ ID NO: 500893 - DNA, 19 bp, Mus musculus
  siRNA target sequence for Dyrk1a (NM_007890.1,405-423).
ggggacgattccagtcata

SEQ ID NO: 500894 - DNA, 19 bp, Mus musculus
  siRNA target sequence for Dyrk1a (NM_007890.1,406-424).
gggacgattccagtcataa

SEQ ID NO: 500895 - DNA, 19 bp, Mus musculus
  siRNA target sequence for Dyrk1a (NM_007890.1,408-426).
gacgattccagtcataaga

SEQ ID NO: 500896 - DNA, 19 bp, Mus musculus
  siRNA target sequence for Dyrk1a (NM_007890.1,431-449).
gcggaaggtttacaatgat

SEQ ID NO: 500897 - DNA, 19 bp, Mus musculus
  siRNA target sequence for Dyrk1a (NM_007890.1,450-468).
ggttacgatgatgataact

SEQ ID NO: 500898 - DNA, 19 bp, Mus musculus
  siRNA target sequence for Dyrk1a (NM_007890.1,451-469).
gttacgatgatgataacta

SEQ ID NO: 500899 - DNA, 19 bp, Mus musculus
  siRNA target sequence for Dyrk1a (NM_007890.1,480-498).
gtaaaaaacggggaaaagt

SEQ ID NO: 500900 - DNA, 19 bp, Mus musculus
  siRNA target sequence for Dyrk1a (NM_007890.1,497-515).
gtggatggatcggtatgaa

SEQ ID NO: 500901 - DNA, 19 bp, Mus musculus
  siRNA target sequence for Dyrk1a (NM_007890.1,499-517).
ggatggatcggtatgaaat

SEQ ID NO: 500902 - DNA, 19 bp, Mus musculus
  siRNA target sequence for Dyrk1a (NM_007890.1,582-600).
gaatgggtcgccattaaaa

SEQ ID NO: 500903 - DNA, 19 bp, Mus musculus
  siRNA target sequence for Dyrk1a (NM_007890.1,586-604).
gggtcgccattaaaatcat

SEQ ID NO: 500904 - DNA, 19 bp, Mus musculus
  siRNA target sequence for Dyrk1a (NM_007890.1,588-606).
gtcgccattaaaatcatca

SEQ ID NO: 500905 - DNA, 19 bp, Mus musculus
  siRNA target sequence for Dyrk1a (NM_007890.1,614-632).
gaaagcgtttctgaatcaa

SEQ ID NO: 500906 - DNA, 19 bp, Mus musculus
  siRNA target sequence for Dyrk1a (NM_007890.1,626-644).
gaatcaagcccagatagaa

SEQ ID NO: 500907 - DNA, 19 bp, Mus musculus
  siRNA target sequence for Dyrk1a (NM_007890.1,649-667).
ggctgcttgagctcatgaa

SEQ ID NO: 500908 - DNA, 19 bp, Mus musculus
  siRNA target sequence for Dyrk1a (NM_007890.1,651-669).
ctgcttgagctcatgaaca

SEQ ID NO: 500909 - DNA, 19 bp, Mus musculus
  siRNA target sequence for Dyrk1a (NM_007890.1,653-671).
gcttgagctcatgaacaaa

SEQ ID NO: 500910 - DNA, 19 bp, Mus musculus
  siRNA target sequence for Dyrk1a (NM_007890.1,675-693).
gacactgaaatgaagtact

SEQ ID NO: 500911 - DNA, 19 bp, Mus musculus
  siRNA target sequence for Dyrk1a (NM_007890.1,702-720).
catttgaaacgccacttta

SEQ ID NO: 500912 - DNA, 19 bp, Mus musculus
  siRNA target sequence for Dyrk1a (NM_007890.1,711-729).
cgccactttatgtttcgaa

SEQ ID NO: 500913 - DNA, 19 bp, Mus musculus
  siRNA target sequence for Dyrk1a (NM_007890.1,755-773).
gctgtcctataatctctat

SEQ ID NO: 500914 - DNA, 19 bp, Mus musculus
  siRNA target sequence for Dyrk1a (NM_007890.1,758-776).
gtcctataatctctatgat

SEQ ID NO: 500915 - DNA, 19 bp, Mus musculus
  siRNA target sequence for Dyrk1a (NM_007890.1,768-786).
ctctatgatttgttgagaa

SEQ ID NO: 500916 - DNA, 19 bp, Mus musculus
  siRNA target sequence for Dyrk1a (NM_007890.1,812-830).
gaacctaacacgaaagttt

SEQ ID NO: 500917 - DNA, 19 bp, Mus musculus
  siRNA target sequence for Dyrk1a (NM_007890.1,823-841).
gaaagtttgcgcaacagat

SEQ ID NO: 500918 - DNA, 19 bp, Mus musculus
  siRNA target sequence for Dyrk1a (NM_007890.1,861-879).
cttgcgactccagaactta

SEQ ID NO: 500919 - DNA, 19 bp, Mus musculus
  siRNA target sequence for Dyrk1a (NM_007890.1,868-886).
ctccagaacttagtatcat

SEQ ID NO: 500920 - DNA, 19 bp, Mus musculus
  siRNA target sequence for Dyrk1a (NM_007890.1,873-891).
gaacttagtatcattcact

SEQ ID NO: 500921 - DNA, 19 bp, Mus musculus
  siRNA target sequence for Dyrk1a (NM_007890.1,928-946).
ccaaacggagtgcaatcaa

SEQ ID NO: 500922 - DNA, 19 bp, Mus musculus
  siRNA target sequence for Dyrk1a (NM_007890.1,937-955).
gtgcaatcaagattgttga

SEQ ID NO: 500923 - DNA, 19 bp, Mus musculus
  siRNA target sequence for Dyrk1a (NM_007890.1,940-958).
caatcaagattgttgattt

SEQ ID NO: 500924 - DNA, 19 bp, Mus musculus
  siRNA target sequence for Dyrk1a (NM_007890.1,1077-1095).
ggatgtatcttggttgaaa

SEQ ID NO: 500925 - DNA, 19 bp, Mus musculus
  siRNA target sequence for Dyrk1a (NM_007890.1,1078-1096).
gatgtatcttggttgaaat

SEQ ID NO: 500926 - DNA, 19 bp, Mus musculus
  siRNA target sequence for Dyrk1a (NM_007890.1,1081-1099).
gtatcttggttgaaatgca

SEQ ID NO: 500927 - DNA, 19 bp, Mus musculus
  siRNA target sequence for Dyrk1a (NM_007890.1,1133-1151).
ggtcgatcagatgaataaa

SEQ ID NO: 500928 - DNA, 19 bp, Mus musculus
  siRNA target sequence for Dyrk1a (NM_007890.1,1174-1192).
cacctgctcatattcttga

SEQ ID NO: 500929 - DNA, 19 bp, Mus musculus
  siRNA target sequence for Dyrk1a (NM_007890.1,1197-1215).
gcaccgaaagcaagaaagt

SEQ ID NO: 500930 - DNA, 19 bp, Mus musculus
  siRNA target sequence for Dyrk1a (NM_007890.1,1198-1216).
caccgaaagcaagaaagtt

SEQ ID NO: 500931 - DNA, 19 bp, Mus musculus
  siRNA target sequence for Dyrk1a (NM_007890.1,1200-1218).
ccgaaagcaagaaagttct

SEQ ID NO: 500932 - DNA, 19 bp, Mus musculus
  siRNA target sequence for Dyrk1a (NM_007890.1,1236-1254).
ggcacttggagcttaaaga

SEQ ID NO: 500933 - DNA, 19 bp, Mus musculus
  siRNA target sequence for Dyrk1a (NM_007890.1,1288-1306).
caggaacccgtaaacttca

SEQ ID NO: 500934 - DNA, 19 bp, Mus musculus
  siRNA target sequence for Dyrk1a (NM_007890.1,1290-1308).
ggaacccgtaaacttcata

SEQ ID NO: 500935 - DNA, 19 bp, Mus musculus
  siRNA target sequence for Dyrk1a (NM_007890.1,1291-1309).
gaacccgtaaacttcataa

SEQ ID NO: 500936 - DNA, 19 bp, Mus musculus
  siRNA target sequence for Dyrk1a (NM_007890.1,1294-1312).
cccgtaaacttcataatat

SEQ ID NO: 500937 - DNA, 19 bp, Mus musculus
  siRNA target sequence for Dyrk1a (NM_007890.1,1295-1313).
ccgtaaacttcataatatt

SEQ ID NO: 500938 - DNA, 19 bp, Mus musculus
  siRNA target sequence for Dyrk1a (NM_007890.1,1354-1372).
gggaatcgggtcatactgt

SEQ ID NO: 500939 - DNA, 19 bp, Mus musculus
  siRNA target sequence for Dyrk1a (NM_007890.1,1371-1389).
gtagctgactacttgaagt

SEQ ID NO: 500940 - DNA, 19 bp, Mus musculus
  siRNA target sequence for Dyrk1a (NM_007890.1,1374-1392).
gctgactacttgaagttca

SEQ ID NO: 500941 - DNA, 19 bp, Mus musculus
  siRNA target sequence for Dyrk1a (NM_007890.1,1388-1406).
gttcaaagacctcatttta

SEQ ID NO: 500942 - DNA, 19 bp, Mus musculus
  siRNA target sequence for Dyrk1a (NM_007890.1,1424-1442).
ccccaaaactcggattcaa

SEQ ID NO: 500943 - DNA, 19 bp, Mus musculus
  siRNA target sequence for Dyrk1a (NM_007890.1,1432-1450).
ctcggattcaaccttatta

SEQ ID NO: 500944 - DNA, 19 bp, Mus musculus
  siRNA target sequence for Dyrk1a (NM_007890.1,1472-1490).
caagaaaacagctgatgaa

SEQ ID NO: 500945 - DNA, 19 bp, Mus musculus
  siRNA target sequence for Dyrk1a (NM_007890.1,1485-1503).
gatgaaggtaccaacacaa

SEQ ID NO: 500946 - DNA, 19 bp, Mus musculus
  siRNA target sequence for Dyrk1a (NM_007890.1,1488-1506).
gaaggtaccaacacaagta

SEQ ID NO: 500947 - DNA, 19 bp, Mus musculus
  siRNA target sequence for Dyrk1a (NM_007890.1,1589-1607).
ctcgggaacgagtaacagt

SEQ ID NO: 500948 - DNA, 19 bp, Mus musculus
  siRNA target sequence for Dyrk1a (NM_007890.1,1745-1763).
cactgaagctcctacacaa

SEQ ID NO: 500949 - DNA, 19 bp, Mus musculus
  siRNA target sequence for Dyrk1a (NM_007890.1,1922-1940).
gccaagggtctacaattct

SEQ ID NO: 500950 - DNA, 19 bp, Mus musculus
  siRNA target sequence for Dyrk1a (NM_007890.1,1954-1972).
cctctacccaggattctat

SEQ ID NO: 500951 - DNA, 19 bp, Mus musculus
  siRNA target sequence for Dyrk1a (NM_007890.1,2041-2059).
cctcctctactggtaatca

SEQ ID NO: 500952 - DNA, 19 bp, Mus musculus
  siRNA target sequence for Dyrk1a (NM_007890.1,2042-2060).
ctcctctactggtaatcaa

SEQ ID NO: 500953 - DNA, 19 bp, Mus musculus
  siRNA target sequence for Dyrk1a (NM_007890.1,2121-2139).
ggagctatggacgttaatt

SEQ ID NO: 500954 - DNA, 19 bp, Mus musculus
  siRNA target sequence for Dyrk1a (NM_007890.1,2122-2140).
gagctatggacgttaattt

SEQ ID NO: 500955 - DNA, 19 bp, Mus musculus
  siRNA target sequence for Dyrk1a (NM_007890.1,2212-2230).
caggtcctgcacattacat

SEQ ID NO: 500956 - DNA, 19 bp, Mus musculus
  siRNA target sequence for Dyrk1a (NM_007890.1,2214-2232).
ggtcctgcacattacatga

SEQ ID NO: 500957 - DNA, 19 bp, Mus musculus
  siRNA target sequence for Dyrk1a (NM_007890.1,2252-2270).
gagacaaggggctgataga

SEQ ID NO: 500958 - DNA, 19 bp, Mus musculus
  siRNA target sequence for Dyrk1a (NM_007890.1,2254-2272).
gacaaggggctgatagaga

SEQ ID NO: 500959 - DNA, 19 bp, Mus musculus
  siRNA target sequence for Dyrk1b (NM_010092.1,410-428).
gacctacaagcacatcaat

SEQ ID NO: 500960 - DNA, 19 bp, Mus musculus
  siRNA target sequence for Dyrk1b (NM_010092.1,420-438).
cacatcaatgaggtatact

SEQ ID NO: 500961 - DNA, 19 bp, Mus musculus
  siRNA target sequence for Dyrk1b (NM_010092.1,422-440).
catcaatgaggtatactat

SEQ ID NO: 500962 - DNA, 19 bp, Mus musculus
  siRNA target sequence for Dyrk1b (NM_010092.1,432-450).
gtatactatgcgaagaaga

SEQ ID NO: 500963 - DNA, 19 bp, Mus musculus
  siRNA target sequence for Dyrk1b (NM_010092.1,568-586).
ggctagagcgctatgagat

SEQ ID NO: 500964 - DNA, 19 bp, Mus musculus
  siRNA target sequence for Dyrk1b (NM_010092.1,729-747).
ctgatgaaccagcatgata

SEQ ID NO: 500965 - DNA, 19 bp, Mus musculus
  siRNA target sequence for Dyrk1b (NM_010092.1,731-749).
gatgaaccagcatgataca

SEQ ID NO: 500966 - DNA, 19 bp, Mus musculus
  siRNA target sequence for Dyrk1b (NM_010092.1,741-759).
catgatacagagatgaagt

SEQ ID NO: 500967 - DNA, 19 bp, Mus musculus
  siRNA target sequence for Dyrk1b (NM_010092.1,774-792).
cttaagcggcacttcatgt

SEQ ID NO: 500968 - DNA, 19 bp, Mus musculus
  siRNA target sequence for Dyrk1b (NM_010092.1,1267-1285).
cacccaaggctcgaaagta

SEQ ID NO: 500969 - DNA, 19 bp, Mus musculus
  siRNA target sequence for Dyrk1b (NM_010092.1,1269-1287).
cccaaggctcgaaagtact

SEQ ID NO: 500970 - DNA, 19 bp, Mus musculus
  siRNA target sequence for Dyrk1b (NM_010092.1,1270-1288).
ccaaggctcgaaagtactt

SEQ ID NO: 500971 - DNA, 19 bp, Mus musculus
  siRNA target sequence for Dyrk1b (NM_010092.1,1271-1289).
caaggctcgaaagtacttt

SEQ ID NO: 500972 - DNA, 19 bp, Mus musculus
  siRNA target sequence for Dyrk1b (NM_010092.1,1578-1596).
cgatacagcaaccgatatt

SEQ ID NO: 500973 - DNA, 19 bp, Mus musculus
  siRNA target sequence for Dyrk1b (NM_010092.1,1801-1819).
caccacccccagagttgat

SEQ ID NO: 500974 - DNA, 19 bp, Mus musculus
  siRNA target sequence for Dyrk3 (NM_145508.1,156-174).
gttgggggatggtgtctat

SEQ ID NO: 500975 - DNA, 19 bp, Mus musculus
  siRNA target sequence for Dyrk3 (NM_145508.1,166-184).
ggtgtctatgatactttca

SEQ ID NO: 500976 - DNA, 19 bp, Mus musculus
  siRNA target sequence for Dyrk3 (NM_145508.1,167-185).
gtgtctatgatactttcat

SEQ ID NO: 500977 - DNA, 19 bp, Mus musculus
  siRNA target sequence for Dyrk3 (NM_145508.1,209-227).
caccctattcggacacatt

SEQ ID NO: 500978 - DNA, 19 bp, Mus musculus
  siRNA target sequence for Dyrk3 (NM_145508.1,211-229).
ccctattcggacacattca

SEQ ID NO: 500979 - DNA, 19 bp, Mus musculus
  siRNA target sequence for Dyrk3 (NM_145508.1,297-315).
cactcagcactttgtgaat

SEQ ID NO: 500980 - DNA, 19 bp, Mus musculus
  siRNA target sequence for Dyrk3 (NM_145508.1,355-373).
ggcaacagaagatccaata

SEQ ID NO: 500981 - DNA, 19 bp, Mus musculus
  siRNA target sequence for Dyrk3 (NM_145508.1,512-530).
cgctgaagcagtataaaca

SEQ ID NO: 500982 - DNA, 19 bp, Mus musculus
  siRNA target sequence for Dyrk3 (NM_145508.1,606-624).
gcggcagggagttattggt

SEQ ID NO: 500983 - DNA, 19 bp, Mus musculus
  siRNA target sequence for Dyrk3 (NM_145508.1,653-671).
cggatggggcctatattca

SEQ ID NO: 500984 - DNA, 19 bp, Mus musculus
  siRNA target sequence for Dyrk3 (NM_145508.1,698-716).
gctatgaggtgctgaaaat

SEQ ID NO: 500985 - DNA, 19 bp, Mus musculus
  siRNA target sequence for Dyrk3 (NM_145508.1,717-735).
catcggcaaggggagtttt

SEQ ID NO: 500986 - DNA, 19 bp, Mus musculus
  siRNA target sequence for Dyrk3 (NM_145508.1,772-790).
cagtacgtggccctgaaaa

SEQ ID NO: 500987 - DNA, 19 bp, Mus musculus
  siRNA target sequence for Dyrk3 (NM_145508.1,838-856).
cggatcttggagcatctta

SEQ ID NO: 500988 - DNA, 19 bp, Mus musculus
  siRNA target sequence for Dyrk3 (NM_145508.1,886-904).
gtcatccacatgctagaaa

SEQ ID NO: 500989 - DNA, 19 bp, Mus musculus
  siRNA target sequence for Dyrk3 (NM_145508.1,936-954).
ctttgaactgctaagcata

SEQ ID NO: 500990 - DNA, 19 bp, Mus musculus
  siRNA target sequence for Dyrk3 (NM_145508.1,955-973).
gacctgtatgagcttatta

SEQ ID NO: 500991 - DNA, 19 bp, Mus musculus
  siRNA target sequence for Dyrk3 (NM_145508.1,1045-1063).
gacgctctgcacaaaaaca

SEQ ID NO: 500992 - DNA, 19 bp, Mus musculus
  siRNA target sequence for Dyrk3 (NM_145508.1,1048-1066).
gctctgcacaaaaacaaga

SEQ ID NO: 500993 - DNA, 19 bp, Mus musculus
  siRNA target sequence for Dyrk3 (NM_145508.1,1049-1067).
ctctgcacaaaaacaagat

SEQ ID NO: 500994 - DNA, 19 bp, Mus musculus
  siRNA target sequence for Dyrk3 (NM_145508.1,1165-1183).
cagaagctttacacgtata

SEQ ID NO: 500995 - DNA, 19 bp, Mus musculus
  siRNA target sequence for Dyrk3 (NM_145508.1,1323-1341).
ccagttggcctgcatgata

SEQ ID NO: 500996 - DNA, 19 bp, Mus musculus
  siRNA target sequence for Dyrk3 (NM_145508.1,1352-1370).
gaatgccaccgcagaaact

SEQ ID NO: 500997 - DNA, 19 bp, Mus musculus
  siRNA target sequence for Dyrk3 (NM_145508.1,1383-1401).
caagcgtgccaagtacttt

SEQ ID NO: 500998 - DNA, 19 bp, Mus musculus
  siRNA target sequence for Dyrk3 (NM_145508.1,1423-1441).
cgatactgctccgtatcta

SEQ ID NO: 500999 - DNA, 19 bp, Mus musculus
  siRNA target sequence for Dyrk3 (NM_145508.1,1477-1495).
cgctcacgcaggggtaaaa

SEQ ID NO: 501000 - DNA, 19 bp, Mus musculus
  siRNA target sequence for Dyrk3 (NM_145508.1,1478-1496).
gctcacgcaggggtaaaaa

SEQ ID NO: 501001 - DNA, 19 bp, Mus musculus
  siRNA target sequence for Dyrk3 (NM_145508.1,1540-1558).
ggctgtggtgactacttgt

SEQ ID NO: 501002 - DNA, 19 bp, Mus musculus
  siRNA target sequence for Dyrk3 (NM_145508.1,1541-1559).
gctgtggtgactacttgtt

SEQ ID NO: 501003 - DNA, 19 bp, Mus musculus
  siRNA target sequence for Dyrk3 (NM_145508.1,1547-1565).
gtgactacttgttcataga

SEQ ID NO: 501004 - DNA, 19 bp, Mus musculus
  siRNA target sequence for Dyrk3 (NM_145508.1,1549-1567).
gactacttgttcatagagt

SEQ ID NO: 501005 - DNA, 19 bp, Mus musculus
  siRNA target sequence for Dyrk3 (NM_145508.1,1551-1569).
ctacttgttcatagagttt

SEQ ID NO: 501006 - DNA, 19 bp, Mus musculus
  siRNA target sequence for Dyrk3 (NM_145508.1,1557-1575).
gttcatagagtttctgaaa

SEQ ID NO: 501007 - DNA, 19 bp, Mus musculus
  siRNA target sequence for Dyrk3 (NM_145508.1,1613-1631).
cggctcaagcattaagaca

SEQ ID NO: 501008 - DNA, 19 bp, Mus musculus
  siRNA target sequence for Dyrk3 (NM_145508.1,1614-1632).
ggctcaagcattaagacat

SEQ ID NO: 501009 - DNA, 19 bp, Mus musculus
  siRNA target sequence for Dyrk3 (NM_145508.1,1628-1646).
gacatccttggattagcaa

SEQ ID NO: 501010 - DNA, 19 bp, Mus musculus
  siRNA target sequence for Dyrk3 (NM_145508.1,1633-1651).
ccttggattagcaagtcta

SEQ ID NO: 501011 - DNA, 19 bp, Mus musculus
  siRNA target sequence for Dyrk3 (NM_145508.1,1681-1699).
ccagggaagcgggtagtta

SEQ ID NO: 501012 - DNA, 19 bp, Mus musculus
  siRNA target sequence for Dyrk3 (NM_145508.1,1682-1700).
cagggaagcgggtagttaa

SEQ ID NO: 501013 - DNA, 19 bp, Mus musculus
  siRNA target sequence for Dyrk3 (NM_145508.1,1691-1709).
gggtagttaaccctacaaa

SEQ ID NO: 501014 - DNA, 19 bp, Mus musculus
  siRNA target sequence for Dyrk3 (NM_145508.1,1692-1710).
ggtagttaaccctacaaat

SEQ ID NO: 501015 - DNA, 19 bp, Mus musculus
  siRNA target sequence for Dyrk3 (NM_145508.1,1696-1714).
gttaaccctacaaatgctt

SEQ ID NO: 501016 - DNA, 19 bp, Mus musculus
  siRNA target sequence for Dyrk3 (NM_145508.1,1750-1768).
gggatagccagtaagctta

SEQ ID NO: 501017 - DNA, 19 bp, Mus musculus
  siRNA target sequence for Dyrk3 (NM_145508.1,1752-1770).
gatagccagtaagcttaaa

SEQ ID NO: 501018 - DNA, 19 bp, Mus musculus
  siRNA target sequence for Dyrk3 (NM_145508.1,1756-1774).
gccagtaagcttaaagcta

SEQ ID NO: 501019 - DNA, 19 bp, Mus musculus
  siRNA target sequence for Dyrk3 (NM_145508.1,1816-1834).
gtattgccaaagctgatta

SEQ ID NO: 501020 - DNA, 19 bp, Mus musculus
  siRNA target sequence for Dyt1 (NM_144884.1,138-156).
ggcgtactcaccacctata

SEQ ID NO: 501021 - DNA, 19 bp, Mus musculus
  siRNA target sequence for Dyt1 (NM_144884.1,139-157).
gcgtactcaccacctatat

SEQ ID NO: 501022 - DNA, 19 bp, Mus musculus
  siRNA target sequence for Dyt1 (NM_144884.1,141-159).
gtactcaccacctatatct

SEQ ID NO: 501023 - DNA, 19 bp, Mus musculus
  siRNA target sequence for Dyt1 (NM_144884.1,264-282).
catcttgcaaaaaaagtca

SEQ ID NO: 501024 - DNA, 19 bp, Mus musculus
  siRNA target sequence for Dyt1 (NM_144884.1,290-308).
cgccgtgtctggtttccta

SEQ ID NO: 501025 - DNA, 19 bp, Mus musculus
  siRNA target sequence for Dyt1 (NM_144884.1,291-309).
gccgtgtctggtttcctaa

SEQ ID NO: 501026 - DNA, 19 bp, Mus musculus
  siRNA target sequence for Dyt1 (NM_144884.1,355-373).
ggacgggcaccggcaaaaa

SEQ ID NO: 501027 - DNA, 19 bp, Mus musculus
  siRNA target sequence for Dyt1 (NM_144884.1,386-404).
gatcatcgcggagaatatt

SEQ ID NO: 501028 - DNA, 19 bp, Mus musculus
  siRNA target sequence for Dyt1 (NM_144884.1,413-431).
cggactgaacagtgactat

SEQ ID NO: 501029 - DNA, 19 bp, Mus musculus
  siRNA target sequence for Dyt1 (NM_144884.1,472-490).
ctaacatcacacagtataa

SEQ ID NO: 501030 - DNA, 19 bp, Mus musculus
  siRNA target sequence for Dyt1 (NM_144884.1,601-619).
ctttcctagactattacga

SEQ ID NO: 501031 - DNA, 19 bp, Mus musculus
  siRNA target sequence for Dyt1 (NM_144884.1,767-785).
ggccgtgtcggtcttcaat

SEQ ID NO: 501032 - DNA, 19 bp, Mus musculus
  siRNA target sequence for Dyt1 (NM_144884.1,768-786).
gccgtgtcggtcttcaata

SEQ ID NO: 501033 - DNA, 19 bp, Mus musculus
  siRNA target sequence for Dyt1 (NM_144884.1,822-840).
gaccggaacctcatagatt

SEQ ID NO: 501034 - DNA, 19 bp, Mus musculus
  siRNA target sequence for Dyt1 (NM_144884.1,824-842).
ccggaacctcatagattat

SEQ ID NO: 501035 - DNA, 19 bp, Mus musculus
  siRNA target sequence for Dyt1 (NM_144884.1,825-843).
cggaacctcatagattatt

SEQ ID NO: 501036 - DNA, 19 bp, Mus musculus
  siRNA target sequence for Dyt1 (NM_144884.1,826-844).
ggaacctcatagattattt

SEQ ID NO: 501037 - DNA, 19 bp, Mus musculus
  siRNA target sequence for Dyt1 (NM_144884.1,827-845).
gaacctcatagattatttt

SEQ ID NO: 501038 - DNA, 19 bp, Mus musculus
  siRNA target sequence for Dyt1 (NM_144884.1,902-920).
gcagtcccgaggctatgaa

SEQ ID NO: 501039 - DNA, 19 bp, Mus musculus
  siRNA target sequence for Dyt1 (NM_144884.1,905-923).
gtcccgaggctatgaagta

SEQ ID NO: 501040 - DNA, 19 bp, Mus musculus
  siRNA target sequence for Dyt1 (NM_144884.1,907-925).
cccgaggctatgaagtaga

SEQ ID NO: 501041 - DNA, 19 bp, Mus musculus
  siRNA target sequence for Dyt1 (NM_144884.1,910-928).
gaggctatgaagtagatga

SEQ ID NO: 501042 - DNA, 19 bp, Mus musculus
  siRNA target sequence for Dyt1 (NM_144884.1,921-939).
gtagatgaggacatcatca

SEQ ID NO: 501043 - DNA, 19 bp, Mus musculus
  siRNA target sequence for Dyt1 (NM_144884.1,940-958).
gcaaggtagcggaagagat

SEQ ID NO: 501044 - DNA, 19 bp, Mus musculus
  siRNA target sequence for E030025C11Rik (NM_177343.2,302-320).
gcagctcctcctggaaaaa

SEQ ID NO: 501045 - DNA, 19 bp, Mus musculus
  siRNA target sequence for E030025C11Rik (NM_177343.2,490-508).
gccgtgcttagaaagatta

SEQ ID NO: 501046 - DNA, 19 bp, Mus musculus
  siRNA target sequence for E030025C11Rik (NM_177343.2,491-509).
ccgtgcttagaaagattaa

SEQ ID NO: 501047 - DNA, 19 bp, Mus musculus
  siRNA target sequence for E030025C11Rik (NM_177343.2,661-679).
gtcctggatgccgtatact

SEQ ID NO: 501048 - DNA, 19 bp, Mus musculus
  siRNA target sequence for E030025C11Rik (NM_177343.2,718-736).
ccggagaatctcttatact

SEQ ID NO: 501049 - DNA, 19 bp, Mus musculus
  siRNA target sequence for E030025C11Rik (NM_177343.2,719-737).
cggagaatctcttatacta

SEQ ID NO: 501050 - DNA, 19 bp, Mus musculus
  siRNA target sequence for E030025C11Rik (NM_177343.2,721-739).
gagaatctcttatactaca

SEQ ID NO: 501051 - DNA, 19 bp, Mus musculus
  siRNA target sequence for E030025C11Rik (NM_177343.2,742-760).
caagacgaggagtccaaaa

SEQ ID NO: 501052 - DNA, 19 bp, Mus musculus
  siRNA target sequence for E030025C11Rik (NM_177343.2,745-763).
gacgaggagtccaaaataa

SEQ ID NO: 501053 - DNA, 19 bp, Mus musculus
  siRNA target sequence for E030025C11Rik (NM_177343.2,825-843).
cgggaccccaggctatgtt

SEQ ID NO: 501054 - DNA, 19 bp, Mus musculus
  siRNA target sequence for E030025C11Rik (NM_177343.2,901-919).
ggggtgatcgcctatatct

SEQ ID NO: 501055 - DNA, 19 bp, Mus musculus
  siRNA target sequence for E030025C11Rik (NM_177343.2,902-920).
gggtgatcgcctatatctt

SEQ ID NO: 501056 - DNA, 19 bp, Mus musculus
  siRNA target sequence for E030025C11Rik (NM_177343.2,959-977).
cgaagctgtttgaacagat

SEQ ID NO: 501057 - DNA, 19 bp, Mus musculus
  siRNA target sequence for E030025C11Rik (NM_177343.2,1163-1181).
cccagatccggaagaattt

SEQ ID NO: 501058 - DNA, 19 bp, Mus musculus
  siRNA target sequence for E030025C11Rik (NM_177343.2,1217-1235).
cggcagtcgtgagacatat

SEQ ID NO: 501059 - DNA, 19 bp, Mus musculus
  siRNA target sequence for E030025C11Rik (NM_177343.2,1296-1314).
cagtttggccagccaaaaa

SEQ ID NO: 501060 - DNA, 19 bp, Mus musculus
  siRNA target sequence for E030025C11Rik (NM_177343.2,1302-1320).
ggccagccaaaaagattgt

SEQ ID NO: 501061 - DNA, 19 bp, Mus musculus
  siRNA target sequence for E030025C11Rik (NM_177343.2,1328-1346).
cttccacgctctgtagttt

SEQ ID NO: 501062 - DNA, 19 bp, Mus musculus
  siRNA target sequence for E130013P03 (NM_173432.2,213-231).
cccttcagtggcactaaga

SEQ ID NO: 501063 - DNA, 19 bp, Mus musculus
  siRNA target sequence for E130013P03 (NM_173432.2,218-236).
cagtggcactaagaatgat

SEQ ID NO: 501064 - DNA, 19 bp, Mus musculus
  siRNA target sequence for E130013P03 (NM_173432.2,226-244).
ctaagaatgatgtatacaa

SEQ ID NO: 501065 - DNA, 19 bp, Mus musculus
  siRNA target sequence for E130013P03 (NM_173432.2,293-311).
cccagctactagtcagtat

SEQ ID NO: 501066 - DNA, 19 bp, Mus musculus
  siRNA target sequence for E130013P03 (NM_173432.2,415-433).
gagtgacagctaagtatga

SEQ ID NO: 501067 - DNA, 19 bp, Mus musculus
  siRNA target sequence for E130013P03 (NM_173432.2,496-514).
cccgacagccatatgctat

SEQ ID NO: 501068 - DNA, 19 bp, Mus musculus
  siRNA target sequence for E130013P03 (NM_173432.2,504-522).
ccatatgctatcaagatga

SEQ ID NO: 501069 - DNA, 19 bp, Mus musculus
  siRNA target sequence for E130013P03 (NM_173432.2,585-603).
gtgcgccacgccaacatca

SEQ ID NO: 501070 - DNA, 19 bp, Mus musculus
  siRNA target sequence for E130013P03 (NM_173432.2,626-644).
gacacaggagcgtgtatat

SEQ ID NO: 501071 - DNA, 19 bp, Mus musculus
  siRNA target sequence for E130013P03 (NM_173432.2,798-816).
cctgagaatctcctttact

SEQ ID NO: 501072 - DNA, 19 bp, Mus musculus
  siRNA target sequence for E130013P03 (NM_173432.2,799-817).
ctgagaatctcctttacta

SEQ ID NO: 501073 - DNA, 19 bp, Mus musculus
  siRNA target sequence for E130013P03 (NM_173432.2,863-881).
ggccagtgcccggaagaaa

SEQ ID NO: 501074 - DNA, 19 bp, Mus musculus
  siRNA target sequence for E130013P03 (NM_173432.2,948-966).
cgaaaaccctacaccaatt

SEQ ID NO: 501075 - DNA, 19 bp, Mus musculus
  siRNA target sequence for E130013P03 (NM_173432.2,1064-1082).
cctcaggggcaaatacagt

SEQ ID NO: 501076 - DNA, 19 bp, Mus musculus
  siRNA target sequence for E130013P03 (NM_173432.2,1067-1085).
caggggcaaatacagttat

SEQ ID NO: 501077 - DNA, 19 bp, Mus musculus
  siRNA target sequence for E130013P03 (NM_173432.2,1069-1087).
ggggcaaatacagttatct

SEQ ID NO: 501078 - DNA, 19 bp, Mus musculus
  siRNA target sequence for E130013P03 (NM_173432.2,1091-1109).
ggagccctggcctagtgta

SEQ ID NO: 501079 - DNA, 19 bp, Mus musculus
  siRNA target sequence for E130013P03 (NM_173432.2,1092-1110).
gagccctggcctagtgtat

SEQ ID NO: 501080 - DNA, 19 bp, Mus musculus
  siRNA target sequence for E130013P03 (NM_173432.2,1094-1112).
gccctggcctagtgtatct

SEQ ID NO: 501081 - DNA, 19 bp, Mus musculus
  siRNA target sequence for E130013P03 (NM_173432.2,1097-1115).
ctggcctagtgtatctaat

SEQ ID NO: 501082 - DNA, 19 bp, Mus musculus
  siRNA target sequence for E130013P03 (NM_173432.2,1099-1117).
ggcctagtgtatctaatct

SEQ ID NO: 501083 - DNA, 19 bp, Mus musculus
  siRNA target sequence for E130013P03 (NM_173432.2,1376-1394).
gcttaacctgcgctatcaa

SEQ ID NO: 501084 - DNA, 19 bp, Mus musculus
  siRNA target sequence for E130304F04Rik (NM_175538.2,869-887).
ggcctggtgaacacacatt

SEQ ID NO: 501085 - DNA, 19 bp, Mus musculus
  siRNA target sequence for E130304F04Rik (NM_175538.2,1045-1063).
gaaacgcattggcttctat

SEQ ID NO: 501086 - DNA, 19 bp, Mus musculus
  siRNA target sequence for E130304F04Rik (NM_175538.2,1103-1121).
gtcaagctggggattcact

SEQ ID NO: 501087 - DNA, 19 bp, Mus musculus
  siRNA target sequence for E130304F04Rik (NM_175538.2,1113-1131).
ggattcactccctaaccaa

SEQ ID NO: 501088 - DNA, 19 bp, Mus musculus
  siRNA target sequence for E130304F04Rik (NM_175538.2,1114-1132).
gattcactccctaaccaaa

SEQ ID NO: 501089 - DNA, 19 bp, Mus musculus
  siRNA target sequence for E130304F04Rik (NM_175538.2,1233-1251).
ccaacatcgtccgtcttta

SEQ ID NO: 501090 - DNA, 19 bp, Mus musculus
  siRNA target sequence for E130304F04Rik (NM_175538.2,1234-1252).
caacatcgtccgtctttat

SEQ ID NO: 501091 - DNA, 19 bp, Mus musculus
  siRNA target sequence for E130304F04Rik (NM_175538.2,1237-1255).
catcgtccgtctttatgaa

SEQ ID NO: 501092 - DNA, 19 bp, Mus musculus
  siRNA target sequence for E130304F04Rik (NM_175538.2,1272-1290).
ccaagctacacctagtgat

SEQ ID NO: 501093 - DNA, 19 bp, Mus musculus
  siRNA target sequence for E130304F04Rik (NM_175538.2,1353-1371).
cggaaagcaagcttatctt

SEQ ID NO: 501094 - DNA, 19 bp, Mus musculus
  siRNA target sequence for E130304F04Rik (NM_175538.2,1391-1409).
gtgaagcacatgcatgaaa

SEQ ID NO: 501095 - DNA, 19 bp, Mus musculus
  siRNA target sequence for E130304F04Rik (NM_175538.2,1439-1457).
gaaaacgtcttttatacca

SEQ ID NO: 501096 - DNA, 19 bp, Mus musculus
  siRNA target sequence for E130304F04Rik (NM_175538.2,1487-1505).
ggattcagcacagtaagta

SEQ ID NO: 501097 - DNA, 19 bp, Mus musculus
  siRNA target sequence for E130304F04Rik (NM_175538.2,1511-1529).
ggcgagatgctgaacactt

SEQ ID NO: 501098 - DNA, 19 bp, Mus musculus
  siRNA target sequence for E130304F04Rik (NM_175538.2,1512-1530).
gcgagatgctgaacacttt

SEQ ID NO: 501099 - DNA, 19 bp, Mus musculus
  siRNA target sequence for E130304F04Rik (NM_175538.2,1614-1632).
gtgtccttttgtacttcat

SEQ ID NO: 501100 - DNA, 19 bp, Mus musculus
  siRNA target sequence for E130304F04Rik (NM_175538.2,1661-1679).
gagaccgtggccaagctaa

SEQ ID NO: 501101 - DNA, 19 bp, Mus musculus
  siRNA target sequence for E130304F04Rik (NM_175538.2,1779-1797).
ggtatgggatcaactacat

SEQ ID NO: 501102 - DNA, 19 bp, Mus musculus
  siRNA target sequence for E130304F04Rik (NM_175538.2,1881-1899).
ccagtaccctcaaagaaga

SEQ ID NO: 501103 - DNA, 19 bp, Mus musculus
  siRNA target sequence for E130304F04Rik (NM_175538.2,1882-1900).
cagtaccctcaaagaagaa

SEQ ID NO: 501104 - DNA, 19 bp, Mus musculus
  siRNA target sequence for E130304F04Rik (NM_175538.2,1884-1902).
gtaccctcaaagaagaaga

SEQ ID NO: 501105 - DNA, 19 bp, Mus musculus
  siRNA target sequence for E130304F04Rik (NM_175538.2,1906-1924).
cgaggtgaagagcacttta

SEQ ID NO: 501106 - DNA, 19 bp, Mus musculus
  siRNA target sequence for E130304F04Rik (NM_175538.2,1934-1952).
gggattacagacgaacata

SEQ ID NO: 501107 - DNA, 19 bp, Mus musculus
  siRNA target sequence for E130304F04Rik (NM_175538.2,1935-1953).
ggattacagacgaacatat

SEQ ID NO: 501108 - DNA, 19 bp, Mus musculus
  siRNA target sequence for E130304F04Rik (NM_175538.2,1992-2010).
cgggggtctatagaatcat

SEQ ID NO: 501109 - DNA, 19 bp, Mus musculus
  siRNA target sequence for E130304F04Rik (NM_175538.2,1995-2013).
gggtctatagaatcatttt

SEQ ID NO: 501110 - DNA, 19 bp, Mus musculus
  siRNA target sequence for E130304F04Rik (NM_175538.2,1996-2014).
ggtctatagaatcatttta

SEQ ID NO: 501111 - DNA, 19 bp, Mus musculus
  siRNA target sequence for E130304F04Rik (NM_175538.2,2015-2033).
catcgagtgcaaagaagaa

SEQ ID NO: 501112 - DNA, 19 bp, Mus musculus
  siRNA target sequence for E130304F04Rik (NM_175538.2,2059-2077).
gatactaccagaacctaaa

SEQ ID NO: 501113 - DNA, 19 bp, Mus musculus
  siRNA target sequence for E130304F04Rik (NM_175538.2,2116-2134).
cataagacacacatctaaa

SEQ ID NO: 501114 - DNA, 19 bp, Mus musculus
  siRNA target sequence for E230025N22 (NM_172831.1,77-95).
gcccacaggaacaaagctt

SEQ ID NO: 501115 - DNA, 19 bp, Mus musculus
  siRNA target sequence for E230025N22 (NM_172831.1,327-345).
gcagattaaccgtattgga

SEQ ID NO: 501116 - DNA, 19 bp, Mus musculus
  siRNA target sequence for E230025N22 (NM_172831.1,460-478).
gcctctgagctgtacctaa

SEQ ID NO: 501117 - DNA, 19 bp, Mus musculus
  siRNA target sequence for E230025N22 (NM_172831.1,461-479).
cctctgagctgtacctaaa

SEQ ID NO: 501118 - DNA, 19 bp, Mus musculus
  siRNA target sequence for E230025N22 (NM_172831.1,506-524).
gccccctgctgcgagtatt

SEQ ID NO: 501119 - DNA, 19 bp, Mus musculus
  siRNA target sequence for E230025N22 (NM_172831.1,597-615).
cagctacagaggtgtactt

SEQ ID NO: 501120 - DNA, 19 bp, Mus musculus
  siRNA target sequence for E230025N22 (NM_172831.1,599-617).
gctacagaggtgtacttct

SEQ ID NO: 501121 - DNA, 19 bp, Mus musculus
  siRNA target sequence for E230025N22 (NM_172831.1,600-618).
ctacagaggtgtacttctt

SEQ ID NO: 501122 - DNA, 19 bp, Mus musculus
  siRNA target sequence for E230025N22 (NM_172831.1,632-650).
gaggtagctccctgagttt

SEQ ID NO: 501123 - DNA, 19 bp, Mus musculus
  siRNA target sequence for E230025N22 (NM_172831.1,647-665).
gtttgctccagaatgcttt

SEQ ID NO: 501124 - DNA, 19 bp, Mus musculus
  siRNA target sequence for E230025N22 (NM_172831.1,746-764).
gcagggccactctgaagat

SEQ ID NO: 501125 - DNA, 19 bp, Mus musculus
  siRNA target sequence for E230025N22 (NM_172831.1,833-851).
gggaactacaggttgtaaa

SEQ ID NO: 501126 - DNA, 19 bp, Mus musculus
  siRNA target sequence for E230025N22 (NM_172831.1,909-927).
ccttgaaccccaggttaaa

SEQ ID NO: 501127 - DNA, 19 bp, Mus musculus
  siRNA target sequence for E230025N22 (NM_172831.1,928-946).
ggcgagccactgaactact

SEQ ID NO: 501128 - DNA, 19 bp, Mus musculus
  siRNA target sequence for E230025N22 (NM_172831.1,1226-1244).
ggagagagagtcaacgtaa

SEQ ID NO: 501129 - DNA, 19 bp, Mus musculus
  siRNA target sequence for E230025N22 (NM_172831.1,1248-1266).
gcaggcagtgctaaaactt

SEQ ID NO: 501130 - DNA, 19 bp, Mus musculus
  siRNA target sequence for E230025N22 (NM_172831.1,1317-1335).
ggtcctatatgacttgtat

SEQ ID NO: 501131 - DNA, 19 bp, Mus musculus
  siRNA target sequence for E230025N22 (NM_172831.1,1320-1338).
cctatatgacttgtatgta

SEQ ID NO: 501132 - DNA, 19 bp, Mus musculus
  siRNA target sequence for E230025N22 (NM_172831.1,1455-1473).
cctccaaggctccattgat

SEQ ID NO: 501133 - DNA, 19 bp, Mus musculus
  siRNA target sequence for E230025N22 (NM_172831.1,1652-1670).
cgaccaagatggctttcat

SEQ ID NO: 501134 - DNA, 19 bp, Mus musculus
  siRNA target sequence for E230025N22 (NM_172831.1,1673-1691).
cagaaacctaccaatacca

SEQ ID NO: 501135 - DNA, 19 bp, Mus musculus
  siRNA target sequence for E430001P04Rik (NM_172015.1,125-143).
ggagttctggtccaaacat

SEQ ID NO: 501136 - DNA, 19 bp, Mus musculus
  siRNA target sequence for E430001P04Rik (NM_172015.1,126-144).
gagttctggtccaaacata

SEQ ID NO: 501137 - DNA, 19 bp, Mus musculus
  siRNA target sequence for E430001P04Rik (NM_172015.1,160-178).
gcctcaaacagtcaaaact

SEQ ID NO: 501138 - DNA, 19 bp, Mus musculus
  siRNA target sequence for E430001P04Rik (NM_172015.1,201-219).
gatgggcctccctttgcta

SEQ ID NO: 501139 - DNA, 19 bp, Mus musculus
  siRNA target sequence for E430001P04Rik (NM_172015.1,227-245).
gcctcactatggacacata

SEQ ID NO: 501140 - DNA, 19 bp, Mus musculus
  siRNA target sequence for E430001P04Rik (NM_172015.1,249-267).
gctgggacaatcaaagata

SEQ ID NO: 501141 - DNA, 19 bp, Mus musculus
  siRNA target sequence for E430001P04Rik (NM_172015.1,253-271).
ggacaatcaaagatatcgt

SEQ ID NO: 501142 - DNA, 19 bp, Mus musculus
  siRNA target sequence for E430001P04Rik (NM_172015.1,254-272).
gacaatcaaagatatcgtt

SEQ ID NO: 501143 - DNA, 19 bp, Mus musculus
  siRNA target sequence for E430001P04Rik (NM_172015.1,340-358).
ctgtggagtacgaaatcga

SEQ ID NO: 501144 - DNA, 19 bp, Mus musculus
  siRNA target sequence for E430001P04Rik (NM_172015.1,342-360).
gtggagtacgaaatcgata

SEQ ID NO: 501145 - DNA, 19 bp, Mus musculus
  siRNA target sequence for E430001P04Rik (NM_172015.1,345-363).
gagtacgaaatcgataaga

SEQ ID NO: 501146 - DNA, 19 bp, Mus musculus
  siRNA target sequence for E430001P04Rik (NM_172015.1,347-365).
gtacgaaatcgataagaca

SEQ ID NO: 501147 - DNA, 19 bp, Mus musculus
  siRNA target sequence for E430001P04Rik (NM_172015.1,382-400).
cggaggatgtggccaaaat

SEQ ID NO: 501148 - DNA, 19 bp, Mus musculus
  siRNA target sequence for E430001P04Rik (NM_172015.1,402-420).
gggattgcagagtacaaca

SEQ ID NO: 501149 - DNA, 19 bp, Mus musculus
  siRNA target sequence for E430001P04Rik (NM_172015.1,429-447).
cgagcaatcgtgatgagat

SEQ ID NO: 501150 - DNA, 19 bp, Mus musculus
  siRNA target sequence for E430001P04Rik (NM_172015.1,430-448).
gagcaatcgtgatgagata

SEQ ID NO: 501151 - DNA, 19 bp, Mus musculus
  siRNA target sequence for E430001P04Rik (NM_172015.1,432-450).
gcaatcgtgatgagatact

SEQ ID NO: 501152 - DNA, 19 bp, Mus musculus
  siRNA target sequence for E430001P04Rik (NM_172015.1,456-474).
gagtggaagtctactgtta

SEQ ID NO: 501153 - DNA, 19 bp, Mus musculus
  siRNA target sequence for E430001P04Rik (NM_172015.1,484-502).
gccgatggatcgactttga

SEQ ID NO: 501154 - DNA, 19 bp, Mus musculus
  siRNA target sequence for E430001P04Rik (NM_172015.1,486-504).
cgatggatcgactttgaca

SEQ ID NO: 501155 - DNA, 19 bp, Mus musculus
  siRNA target sequence for E430001P04Rik (NM_172015.1,487-505).
gatggatcgactttgacaa

SEQ ID NO: 501156 - DNA, 19 bp, Mus musculus
  siRNA target sequence for E430001P04Rik (NM_172015.1,490-508).
ggatcgactttgacaatga

SEQ ID NO: 501157 - DNA, 19 bp, Mus musculus
  siRNA target sequence for E430001P04Rik (NM_172015.1,517-535).
cactatacccacagttcat

SEQ ID NO: 501158 - DNA, 19 bp, Mus musculus
  siRNA target sequence for E430001P04Rik (NM_172015.1,633-651).
ctctccaacttcgaatcta

SEQ ID NO: 501159 - DNA, 19 bp, Mus musculus
  siRNA target sequence for E430001P04Rik (NM_172015.1,645-663).
gaatctaaccagaattaca

SEQ ID NO: 501160 - DNA, 19 bp, Mus musculus
  siRNA target sequence for E430001P04Rik (NM_172015.1,674-692).
ggatccctcagtatttgta

SEQ ID NO: 501161 - DNA, 19 bp, Mus musculus
  siRNA target sequence for E430001P04Rik (NM_172015.1,675-693).
gatccctcagtatttgtaa

SEQ ID NO: 501162 - DNA, 19 bp, Mus musculus
  siRNA target sequence for E430001P04Rik (NM_172015.1,778-796).
gcgtcaatccagaaataca

SEQ ID NO: 501163 - DNA, 19 bp, Mus musculus
  siRNA target sequence for E430001P04Rik (NM_172015.1,780-798).
gtcaatccagaaatacagt

SEQ ID NO: 501164 - DNA, 19 bp, Mus musculus
  siRNA target sequence for E430001P04Rik (NM_172015.1,787-805).
cagaaatacagtatgtgaa

SEQ ID NO: 501165 - DNA, 19 bp, Mus musculus
  siRNA target sequence for E430001P04Rik (NM_172015.1,839-857).
cttaacggaagccagatta

SEQ ID NO: 501166 - DNA, 19 bp, Mus musculus
  siRNA target sequence for E430001P04Rik (NM_172015.1,853-871).
gattatcggccctctataa

SEQ ID NO: 501167 - DNA, 19 bp, Mus musculus
  siRNA target sequence for E430001P04Rik (NM_172015.1,878-896).
gagcgactatgagatactt

SEQ ID NO: 501168 - DNA, 19 bp, Mus musculus
  siRNA target sequence for E430001P04Rik (NM_172015.1,881-899).
cgactatgagatacttgaa

SEQ ID NO: 501169 - DNA, 19 bp, Mus musculus
  siRNA target sequence for E430001P04Rik (NM_172015.1,918-936).
ctcaaaggcaagaaataca

SEQ ID NO: 501170 - DNA, 19 bp, Mus musculus
  siRNA target sequence for E430001P04Rik (NM_172015.1,929-947).
gaaatacaagccgttgttt

SEQ ID NO: 501171 - DNA, 19 bp, Mus musculus
  siRNA target sequence for E430001P04Rik (NM_172015.1,938-956).
gccgttgtttgactacttt

SEQ ID NO: 501172 - DNA, 19 bp, Mus musculus
  siRNA target sequence for E430001P04Rik (NM_172015.1,939-957).
ccgttgtttgactacttta

SEQ ID NO: 501173 - DNA, 19 bp, Mus musculus
  siRNA target sequence for E430001P04Rik (NM_172015.1,940-958).
cgttgtttgactactttat

SEQ ID NO: 501174 - DNA, 19 bp, Mus musculus
  siRNA target sequence for E430001P04Rik (NM_172015.1,941-959).
gttgtttgactactttatt

SEQ ID NO: 501175 - DNA, 19 bp, Mus musculus
  siRNA target sequence for E430001P04Rik (NM_172015.1,1069-1087).
gtgtctgtatggacttcaa

SEQ ID NO: 501176 - DNA, 19 bp, Mus musculus
  siRNA target sequence for E430001P04Rik (NM_172015.1,1071-1089).
gtctgtatggacttcaaca

SEQ ID NO: 501177 - DNA, 19 bp, Mus musculus
  siRNA target sequence for E430001P04Rik (NM_172015.1,1080-1098).
gacttcaacattattcaga

SEQ ID NO: 501178 - DNA, 19 bp, Mus musculus
  siRNA target sequence for E430001P04Rik (NM_172015.1,1276-1294).
cagacacgcccctcattta

SEQ ID NO: 501179 - DNA, 19 bp, Mus musculus
  siRNA target sequence for E430001P04Rik (NM_172015.1,1278-1296).
gacacgcccctcatttaca

SEQ ID NO: 501180 - DNA, 19 bp, Mus musculus
  siRNA target sequence for E430001P04Rik (NM_172015.1,1338-1356).
gaccagctactgaagaaca

SEQ ID NO: 501181 - DNA, 19 bp, Mus musculus
  siRNA target sequence for E430001P04Rik (NM_172015.1,1389-1407).
cgagaaaaacggtttggaa

SEQ ID NO: 501182 - DNA, 19 bp, Mus musculus
  siRNA target sequence for E430001P04Rik (NM_172015.1,1497-1515).
gaggtagtgtgcattggat

SEQ ID NO: 501183 - DNA, 19 bp, Mus musculus
  siRNA target sequence for E430001P04Rik (NM_172015.1,1624-1642).
gcgtctctgaggtgtttga

SEQ ID NO: 501184 - DNA, 19 bp, Mus musculus
  siRNA target sequence for E430001P04Rik (NM_172015.1,1648-1666).
ggttcgagagtggaagtat

SEQ ID NO: 501185 - DNA, 19 bp, Mus musculus
  siRNA target sequence for E430001P04Rik (NM_172015.1,1873-1891).
gcaagcggaaaaagaacta

SEQ ID NO: 501186 - DNA, 19 bp, Mus musculus
  siRNA target sequence for E430001P04Rik (NM_172015.1,1899-1917).
ccagtttccatcatcgata

SEQ ID NO: 501187 - DNA, 19 bp, Mus musculus
  siRNA target sequence for E430001P04Rik (NM_172015.1,1900-1918).
cagtttccatcatcgataa

SEQ ID NO: 501188 - DNA, 19 bp, Mus musculus
  siRNA target sequence for E430001P04Rik (NM_172015.1,1902-1920).
gtttccatcatcgataagt

SEQ ID NO: 501189 - DNA, 19 bp, Mus musculus
  siRNA target sequence for E430001P04Rik (NM_172015.1,1926-1944).
gcggacgccctcaggttat

SEQ ID NO: 501190 - DNA, 19 bp, Mus musculus
  siRNA target sequence for E430001P04Rik (NM_172015.1,1927-1945).
cggacgccctcaggttata

SEQ ID NO: 501191 - DNA, 19 bp, Mus musculus
  siRNA target sequence for E430001P04Rik (NM_172015.1,1928-1946).
ggacgccctcaggttatat

SEQ ID NO: 501192 - DNA, 19 bp, Mus musculus
  siRNA target sequence for E430001P04Rik (NM_172015.1,1932-1950).
gccctcaggttatatctga

SEQ ID NO: 501193 - DNA, 19 bp, Mus musculus
  siRNA target sequence for E430001P04Rik (NM_172015.1,1933-1951).
ccctcaggttatatctgat

SEQ ID NO: 501194 - DNA, 19 bp, Mus musculus
  siRNA target sequence for E430001P04Rik (NM_172015.1,2005-2023).
gggatgtcctcaaagatgt

SEQ ID NO: 501195 - DNA, 19 bp, Mus musculus
  siRNA target sequence for E430001P04Rik (NM_172015.1,2171-2189).
gtcgctccttggcttcttt

SEQ ID NO: 501196 - DNA, 19 bp, Mus musculus
  siRNA target sequence for E430001P04Rik (NM_172015.1,2173-2191).
cgctccttggcttctttga

SEQ ID NO: 501197 - DNA, 19 bp, Mus musculus
  siRNA target sequence for E430001P04Rik (NM_172015.1,2240-2258).
caagtttgtagatattcta

SEQ ID NO: 501198 - DNA, 19 bp, Mus musculus
  siRNA target sequence for E430001P04Rik (NM_172015.1,2379-2397).
ccttacacgccctttctga

SEQ ID NO: 501199 - DNA, 19 bp, Mus musculus
  siRNA target sequence for E430001P04Rik (NM_172015.1,2402-2420).
gctgatgtaccagaatcta

SEQ ID NO: 501200 - DNA, 19 bp, Mus musculus
  siRNA target sequence for E430001P04Rik (NM_172015.1,2504-2522).
gctgattgacaagaaaact

SEQ ID NO: 501201 - DNA, 19 bp, Mus musculus
  siRNA target sequence for E430001P04Rik (NM_172015.1,2568-2586).
gtgatacgagaccgaaaaa

SEQ ID NO: 501202 - DNA, 19 bp, Mus musculus
  siRNA target sequence for E430001P04Rik (NM_172015.1,2570-2588).
gatacgagaccgaaaaact

SEQ ID NO: 501203 - DNA, 19 bp, Mus musculus
  siRNA target sequence for E430001P04Rik (NM_172015.1,2638-2656).
cagaagctctagaggatat

SEQ ID NO: 501204 - DNA, 19 bp, Mus musculus
  siRNA target sequence for E430001P04Rik (NM_172015.1,2640-2658).
gaagctctagaggatatca

SEQ ID NO: 501205 - DNA, 19 bp, Mus musculus
  siRNA target sequence for E430001P04Rik (NM_172015.1,2659-2677).
ggtccttggagaagtatat

SEQ ID NO: 501206 - DNA, 19 bp, Mus musculus
  siRNA target sequence for E430001P04Rik (NM_172015.1,2662-2680).
ccttggagaagtatatcat

SEQ ID NO: 501207 - DNA, 19 bp, Mus musculus
  siRNA target sequence for E430001P04Rik (NM_172015.1,2672-2690).
gtatatcattgaggaatta

SEQ ID NO: 501208 - DNA, 19 bp, Mus musculus
  siRNA target sequence for E430001P04Rik (NM_172015.1,2684-2702).
ggaattaaatgttcgaaaa

SEQ ID NO: 501209 - DNA, 19 bp, Mus musculus
  siRNA target sequence for E430001P04Rik (NM_172015.1,2703-2721).
gtcacgctgtctactgata

SEQ ID NO: 501210 - DNA, 19 bp, Mus musculus
  siRNA target sequence for E430001P04Rik (NM_172015.1,2705-2723).
cacgctgtctactgataaa

SEQ ID NO: 501211 - DNA, 19 bp, Mus musculus
  siRNA target sequence for E430001P04Rik (NM_172015.1,2707-2725).
cgctgtctactgataaaaa

SEQ ID NO: 501212 - DNA, 19 bp, Mus musculus
  siRNA target sequence for E430001P04Rik (NM_172015.1,2746-2764).
gggctgaaccagatcacat

SEQ ID NO: 501213 - DNA, 19 bp, Mus musculus
  siRNA target sequence for E430001P04Rik (NM_172015.1,2852-2870).
gaagagcgggagcattgtt

SEQ ID NO: 501214 - DNA, 19 bp, Mus musculus
  siRNA target sequence for E430001P04Rik (NM_172015.1,2898-2916).
gacattcgcctcatgtaca

SEQ ID NO: 501215 - DNA, 19 bp, Mus musculus
  siRNA target sequence for E430001P04Rik (NM_172015.1,3075-3093).
ctggttccaacggatgaaa

SEQ ID NO: 501216 - DNA, 19 bp, Mus musculus
  siRNA target sequence for E430001P04Rik (NM_172015.1,3077-3095).
ggttccaacggatgaaata

SEQ ID NO: 501217 - DNA, 19 bp, Mus musculus
  siRNA target sequence for E430001P04Rik (NM_172015.1,3078-3096).
gttccaacggatgaaataa

SEQ ID NO: 501218 - DNA, 19 bp, Mus musculus
  siRNA target sequence for E430001P04Rik (NM_172015.1,3104-3122).
ctataatgcaaaatctgaa

SEQ ID NO: 501219 - DNA, 19 bp, Mus musculus
  siRNA target sequence for E430001P04Rik (NM_172015.1,3118-3136).
ctgaaggaagatacttgaa

SEQ ID NO: 501220 - DNA, 19 bp, Mus musculus
  siRNA target sequence for E430001P04Rik (NM_172015.1,3127-3145).
gatacttgaataatgtcat

SEQ ID NO: 501221 - DNA, 19 bp, Mus musculus
  siRNA target sequence for E430001P04Rik (NM_172015.1,3131-3149).
cttgaataatgtcattgaa

SEQ ID NO: 501222 - DNA, 19 bp, Mus musculus
  siRNA target sequence for E430001P04Rik (NM_172015.1,3208-3226).
caacatcagataatatcct

SEQ ID NO: 501223 - DNA, 19 bp, Mus musculus
  siRNA target sequence for E430001P04Rik (NM_172015.1,3252-3270).
gggtccgagctggaaatca

SEQ ID NO: 501224 - DNA, 19 bp, Mus musculus
  siRNA target sequence for E430001P04Rik (NM_172015.1,3307-3325).
gtgcttatgtgaaccttaa

SEQ ID NO: 501225 - DNA, 19 bp, Mus musculus
  siRNA target sequence for E430001P04Rik (NM_172015.1,3310-3328).
cttatgtgaaccttaacat

SEQ ID NO: 501226 - DNA, 19 bp, Mus musculus
  siRNA target sequence for E430001P04Rik (NM_172015.1,3371-3389).
gaatccgaaaggtgataat

SEQ ID NO: 501227 - DNA, 19 bp, Mus musculus
  siRNA target sequence for E430001P04Rik (NM_172015.1,3424-3442).
ccagcgtatttggtgttaa

SEQ ID NO: 501228 - DNA, 19 bp, Mus musculus
  siRNA target sequence for E430001P04Rik (NM_172015.1,3425-3443).
cagcgtatttggtgttaaa

SEQ ID NO: 501229 - DNA, 19 bp, Mus musculus
  siRNA target sequence for E430001P04Rik (NM_172015.1,3427-3445).
gcgtatttggtgttaaaaa

SEQ ID NO: 501230 - DNA, 19 bp, Mus musculus
  siRNA target sequence for E430001P04Rik (NM_172015.1,3464-3482).
ccacggtgaaacagaaata

SEQ ID NO: 501231 - DNA, 19 bp, Mus musculus
  siRNA target sequence for E430001P04Rik (NM_172015.1,3610-3628).
cagagccacaagagtgttt

SEQ ID NO: 501232 - DNA, 19 bp, Mus musculus
  siRNA target sequence for E430001P04Rik (NM_172015.1,3612-3630).
gagccacaagagtgtttaa

SEQ ID NO: 501233 - DNA, 19 bp, Mus musculus
  siRNA target sequence for E430001P04Rik (NM_172015.1,3642-3660).
ggcaccctcctgcttgaaa

SEQ ID NO: 501234 - DNA, 19 bp, Mus musculus
  siRNA target sequence for E430001P04Rik (NM_172015.1,3755-3773).
gaatgagactcaaacacaa

SEQ ID NO: 501235 - DNA, 19 bp, Mus musculus
  siRNA target sequence for E430001P04Rik (NM_172015.1,3761-3779).
gactcaaacacaagaaatt

SEQ ID NO: 501236 - DNA, 19 bp, Mus musculus
  siRNA target sequence for E530005C20Rik (NM_177357.2,1077-1095).
gactcttggactaccttat

SEQ ID NO: 501237 - DNA, 19 bp, Mus musculus
  siRNA target sequence for E530005C20Rik (NM_177357.2,1084-1102).
ggactaccttatgaatcat

SEQ ID NO: 501238 - DNA, 19 bp, Mus musculus
  siRNA target sequence for E530005C20Rik (NM_177357.2,1176-1194).
gtagggtcgcacatttgga

SEQ ID NO: 501239 - DNA, 19 bp, Mus musculus
  siRNA target sequence for E530005C20Rik (NM_177357.2,1203-1221).
ccgaaaacctgctcattga

SEQ ID NO: 501240 - DNA, 19 bp, Mus musculus
  siRNA target sequence for E530005C20Rik (NM_177357.2,1281-1299).
caggccacttccatatcca

SEQ ID NO: 501241 - DNA, 19 bp, Mus musculus
  siRNA target sequence for E530005C20Rik (NM_177357.2,1386-1404).
gggttctgacatatgtcat

SEQ ID NO: 501242 - DNA, 19 bp, Mus musculus
  siRNA target sequence for E530005C20Rik (NM_177357.2,1413-1431).
gggtctcccccttcttaga

SEQ ID NO: 501243 - DNA, 19 bp, Mus musculus
  siRNA target sequence for E530005C20Rik (NM_177357.2,1414-1432).
ggtctcccccttcttagat

SEQ ID NO: 501244 - DNA, 19 bp, Mus musculus
  siRNA target sequence for E530005C20Rik (NM_177357.2,1521-1539).
gggatttcatcaacgtaat

SEQ ID NO: 501245 - DNA, 19 bp, Mus musculus
  siRNA target sequence for E530005C20Rik (NM_177357.2,1523-1541).
gatttcatcaacgtaatct

SEQ ID NO: 501246 - DNA, 19 bp, Mus musculus
  siRNA target sequence for E530005C20Rik (NM_177357.2,1645-1663).
ccgtctggcctgcttcata

SEQ ID NO: 501247 - DNA, 19 bp, Mus musculus
  siRNA target sequence for E530005C20Rik (NM_177357.2,1647-1665).
gtctggcctgcttcataga

SEQ ID NO: 501248 - DNA, 19 bp, Mus musculus
  siRNA target sequence for E530005C20Rik (NM_177357.2,1668-1686).
gccgcaagcaccagaatga

SEQ ID NO: 501249 - DNA, 19 bp, Mus musculus
  siRNA target sequence for E530005C20Rik (NM_177357.2,1700-1718).
cccaatgtcaagagttaca

SEQ ID NO: 501250 - DNA, 19 bp, Mus musculus
  siRNA target sequence for E530005C20Rik (NM_177357.2,1701-1719).
ccaatgtcaagagttacat

SEQ ID NO: 501251 - DNA, 19 bp, Mus musculus
  siRNA target sequence for Edg3 (NM_010101.2,372-390).
gacactctccgggaacatt

SEQ ID NO: 501252 - DNA, 19 bp, Mus musculus
  siRNA target sequence for Edg3 (NM_010101.2,376-394).
ctctccgggaacattacga

SEQ ID NO: 501253 - DNA, 19 bp, Mus musculus
  siRNA target sequence for Edg3 (NM_010101.2,378-396).
ctccgggaacattacgatt

SEQ ID NO: 501254 - DNA, 19 bp, Mus musculus
  siRNA target sequence for Edg3 (NM_010101.2,382-400).
gggaacattacgattacgt

SEQ ID NO: 501255 - DNA, 19 bp, Mus musculus
  siRNA target sequence for Edg3 (NM_010101.2,495-513).
gagaacctgatggttttga

SEQ ID NO: 501256 - DNA, 19 bp, Mus musculus
  siRNA target sequence for Edg3 (NM_010101.2,735-753).
cgacacctgaccatgatca

SEQ ID NO: 501257 - DNA, 19 bp, Mus musculus
  siRNA target sequence for Edg3 (NM_010101.2,736-754).
gacacctgaccatgatcaa

SEQ ID NO: 501258 - DNA, 19 bp, Mus musculus
  siRNA target sequence for Edg3 (NM_010101.2,954-972).
gtgaccatcgtcatcttgt

SEQ ID NO: 501259 - DNA, 19 bp, Mus musculus
  siRNA target sequence for Edg3 (NM_010101.2,1093-1111).
ggtccccactttttatcct

SEQ ID NO: 501260 - DNA, 19 bp, Mus musculus
  siRNA target sequence for Edg3 (NM_010101.2,1320-1338).
ctcgacccaagcagaagta

SEQ ID NO: 501261 - DNA, 19 bp, Mus musculus
  siRNA target sequence for Eef2k (NM_007908.2,299-317).
cagacgaagacctcatctt

SEQ ID NO: 501262 - DNA, 19 bp, Mus musculus
  siRNA target sequence for Eef2k (NM_007908.2,427-445).
gaccacatgtccaatcaga

SEQ ID NO: 501263 - DNA, 19 bp, Mus musculus
  siRNA target sequence for Eef2k (NM_007908.2,456-474).
caaagtccagagctactat

SEQ ID NO: 501264 - DNA, 19 bp, Mus musculus
  siRNA target sequence for Eef2k (NM_007908.2,606-624).
ggacatcgccacagaacat

SEQ ID NO: 501265 - DNA, 19 bp, Mus musculus
  siRNA target sequence for Eef2k (NM_007908.2,726-744).
gtgcttcaggacgaagaaa

SEQ ID NO: 501266 - DNA, 19 bp, Mus musculus
  siRNA target sequence for Eef2k (NM_007908.2,728-746).
gcttcaggacgaagaaact

SEQ ID NO: 501267 - DNA, 19 bp, Mus musculus
  siRNA target sequence for Eef2k (NM_007908.2,929-947).
gcatcattgagctaaagga

SEQ ID NO: 501268 - DNA, 19 bp, Mus musculus
  siRNA target sequence for Eef2k (NM_007908.2,969-987).
ccacttggagcactacatt

SEQ ID NO: 501269 - DNA, 19 bp, Mus musculus
  siRNA target sequence for Eef2k (NM_007908.2,991-1009).
ggcaagtacatcaagtaca

SEQ ID NO: 501270 - DNA, 19 bp, Mus musculus
  siRNA target sequence for Eef2k (NM_007908.2,992-1010).
gcaagtacatcaagtacaa

SEQ ID NO: 501271 - DNA, 19 bp, Mus musculus
  siRNA target sequence for Eef2k (NM_007908.2,993-1011).
caagtacatcaagtacaat

SEQ ID NO: 501272 - DNA, 19 bp, Mus musculus
  siRNA target sequence for Eef2k (NM_007908.2,1088-1106).
ctggtcatcagctgattgt

SEQ ID NO: 501273 - DNA, 19 bp, Mus musculus
  siRNA target sequence for Eef2k (NM_007908.2,1091-1109).
gtcatcagctgattgtagt

SEQ ID NO: 501274 - DNA, 19 bp, Mus musculus
  siRNA target sequence for Eef2k (NM_007908.2,1288-1306).
caggatgcggtgaatcaga

SEQ ID NO: 501275 - DNA, 19 bp, Mus musculus
  siRNA target sequence for Eef2k (NM_007908.2,1363-1381).
gggagtccccgcataagga

SEQ ID NO: 501276 - DNA, 19 bp, Mus musculus
  siRNA target sequence for Eef2k (NM_007908.2,1681-1699).
ggcaaccgaaggcatgaat

SEQ ID NO: 501277 - DNA, 19 bp, Mus musculus
  siRNA target sequence for Eef2k (NM_007908.2,1683-1701).
caaccgaaggcatgaatct

SEQ ID NO: 501278 - DNA, 19 bp, Mus musculus
  siRNA target sequence for Eef2k (NM_007908.2,1790-1808).
cggccgtggccctagaagt

SEQ ID NO: 501279 - DNA, 19 bp, Mus musculus
  siRNA target sequence for Eef2k (NM_007908.2,1996-2014).
ggcctaggcctcatgtact

SEQ ID NO: 501280 - DNA, 19 bp, Mus musculus
  siRNA target sequence for Eef2k (NM_007908.2,2070-2088).
caagacaaaaggctttgat

SEQ ID NO: 501281 - DNA, 19 bp, Mus musculus
  siRNA target sequence for Eef2k (NM_007908.2,2075-2093).
caaaaggctttgattactt

SEQ ID NO: 501282 - DNA, 19 bp, Mus musculus
  siRNA target sequence for Eef2k (NM_007908.2,2111-2129).
ctggtgacaggcattccat

SEQ ID NO: 501283 - DNA, 19 bp, Mus musculus
  siRNA target sequence for Eef2k (NM_007908.2,2116-2134).
gacaggcattccatgattt

SEQ ID NO: 501284 - DNA, 19 bp, Mus musculus
  siRNA target sequence for Eef2k (NM_007908.2,2137-2155).
gtggcccgagcttttgaca

SEQ ID NO: 501285 - DNA, 19 bp, Mus musculus
  siRNA target sequence for Eef2k (NM_007908.2,2340-2358).
caagaacccccaaagatca

SEQ ID NO: 501286 - DNA, 19 bp, Mus musculus
  siRNA target sequence for Eef2k (NM_007908.2,2411-2429).
ggctagccaaccagtacta

SEQ ID NO: 501287 - DNA, 19 bp, Mus musculus
  siRNA target sequence for Egfr (NM_007912.1,302-320).
gtctgccaaggcacaagta

SEQ ID NO: 501288 - DNA, 19 bp, Mus musculus
  siRNA target sequence for Egfr (NM_007912.1,429-447).
ggaattacgacctttcctt

SEQ ID NO: 501289 - DNA, 19 bp, Mus musculus
  siRNA target sequence for Egfr (NM_007912.1,537-555).
ggggaaatgctctttatga

SEQ ID NO: 501290 - DNA, 19 bp, Mus musculus
  siRNA target sequence for Egfr (NM_007912.1,538-556).
gggaaatgctctttatgaa

SEQ ID NO: 501291 - DNA, 19 bp, Mus musculus
  siRNA target sequence for Egfr (NM_007912.1,675-693).
ccatcctctgcaatatgga

SEQ ID NO: 501292 - DNA, 19 bp, Mus musculus
  siRNA target sequence for Egfr (NM_007912.1,705-723).
ggagggacatcgtccaaaa

SEQ ID NO: 501293 - DNA, 19 bp, Mus musculus
  siRNA target sequence for Egfr (NM_007912.1,708-726).
gggacatcgtccaaaacgt

SEQ ID NO: 501294 - DNA, 19 bp, Mus musculus
  siRNA target sequence for Egfr (NM_007912.1,716-734).
gtccaaaacgtctttatga

SEQ ID NO: 501295 - DNA, 19 bp, Mus musculus
  siRNA target sequence for Egfr (NM_007912.1,725-743).
gtctttatgagcaacatgt

SEQ ID NO: 501296 - DNA, 19 bp, Mus musculus
  siRNA target sequence for Egfr (NM_007912.1,768-786).
gcagttgccccaaatgtga

SEQ ID NO: 501297 - DNA, 19 bp, Mus musculus
  siRNA target sequence for Egfr (NM_007912.1,769-787).
cagttgccccaaatgtgat

SEQ ID NO: 501298 - DNA, 19 bp, Mus musculus
  siRNA target sequence for Egfr (NM_007912.1,983-1001).
gaggccacatgcaaagaca

SEQ ID NO: 501299 - DNA, 19 bp, Mus musculus
  siRNA target sequence for Egfr (NM_007912.1,1108-1126).
ctacgtggtgacagatcat

SEQ ID NO: 501300 - DNA, 19 bp, Mus musculus
  siRNA target sequence for Egfr (NM_007912.1,1175-1193).
gatggcatccgcaagtgta

SEQ ID NO: 501301 - DNA, 19 bp, Mus musculus
  siRNA target sequence for Egfr (NM_007912.1,1180-1198).
catccgcaagtgtaaaaaa

SEQ ID NO: 501302 - DNA, 19 bp, Mus musculus
  siRNA target sequence for Egfr (NM_007912.1,1209-1227).
cctgtcgcaaagtttgtaa

SEQ ID NO: 501303 - DNA, 19 bp, Mus musculus
  siRNA target sequence for Egfr (NM_007912.1,1210-1228).
ctgtcgcaaagtttgtaat

SEQ ID NO: 501304 - DNA, 19 bp, Mus musculus
  siRNA target sequence for Egfr (NM_007912.1,1230-1248).
gcataggcattggtgaatt

SEQ ID NO: 501305 - DNA, 19 bp, Mus musculus
  siRNA target sequence for Egfr (NM_007912.1,1271-1289).
gctacaaacatcaaacact

SEQ ID NO: 501306 - DNA, 19 bp, Mus musculus
  siRNA target sequence for Egfr (NM_007912.1,1376-1394).
gacccacgagaactagaaa

SEQ ID NO: 501307 - DNA, 19 bp, Mus musculus
  siRNA target sequence for Egfr (NM_007912.1,1378-1396).
cccacgagaactagaaatt

SEQ ID NO: 501308 - DNA, 19 bp, Mus musculus
  siRNA target sequence for Egfr (NM_007912.1,1380-1398).
cacgagaactagaaattct

SEQ ID NO: 501309 - DNA, 19 bp, Mus musculus
  siRNA target sequence for Egfr (NM_007912.1,1382-1400).
cgagaactagaaattctaa

SEQ ID NO: 501310 - DNA, 19 bp, Mus musculus
  siRNA target sequence for Egfr (NM_007912.1,1455-1473).
ggactgacctccatgcttt

SEQ ID NO: 501311 - DNA, 19 bp, Mus musculus
  siRNA target sequence for Egfr (NM_007912.1,1530-1548).
cggtcgttggcctgaacat

SEQ ID NO: 501312 - DNA, 19 bp, Mus musculus
  siRNA target sequence for Egfr (NM_007912.1,1532-1550).
gtcgttggcctgaacatca

SEQ ID NO: 501313 - DNA, 19 bp, Mus musculus
  siRNA target sequence for Egfr (NM_007912.1,1657-1675).
cgggacacccaatcagaaa

SEQ ID NO: 501314 - DNA, 19 bp, Mus musculus
  siRNA target sequence for Egfr (NM_007912.1,1723-1741).
ccacgtctgcaatccttta

SEQ ID NO: 501315 - DNA, 19 bp, Mus musculus
  siRNA target sequence for Egfr (NM_007912.1,1724-1742).
cacgtctgcaatcctttat

SEQ ID NO: 501316 - DNA, 19 bp, Mus musculus
  siRNA target sequence for Egfr (NM_007912.1,1727-1745).
gtctgcaatcctttatgct

SEQ ID NO: 501317 - DNA, 19 bp, Mus musculus
  siRNA target sequence for Egfr (NM_007912.1,2041-2059).
gtatgcagatgccaataat

SEQ ID NO: 501318 - DNA, 19 bp, Mus musculus
  siRNA target sequence for Egfr (NM_007912.1,2045-2063).
gcagatgccaataatgtct

SEQ ID NO: 501319 - DNA, 19 bp, Mus musculus
  siRNA target sequence for Egfr (NM_007912.1,2078-2096).
gccaactgtacctatggat

SEQ ID NO: 501320 - DNA, 19 bp, Mus musculus
  siRNA target sequence for Egfr (NM_007912.1,2132-2150).
ccatctgggtacgttcaat

SEQ ID NO: 501321 - DNA, 19 bp, Mus musculus
  siRNA target sequence for Egfr (NM_007912.1,2147-2165).
caatggcagtggatcttaa

SEQ ID NO: 501322 - DNA, 19 bp, Mus musculus
  siRNA target sequence for Ehd1 (NM_010119.3,1232-1250).
gatatgctggccaacgata

SEQ ID NO: 501323 - DNA, 19 bp, Mus musculus
  siRNA target sequence for Ehd1 (NM_010119.3,1237-1255).
gctggccaacgatatagct

SEQ ID NO: 501324 - DNA, 19 bp, Mus musculus
  siRNA target sequence for Ehd1 (NM_010119.3,1369-1387).
ggctggcgagggcattgat

SEQ ID NO: 501325 - DNA, 19 bp, Mus musculus
  siRNA target sequence for Ehd1 (NM_010119.3,1374-1392).
gcgagggcattgatgatgt

SEQ ID NO: 501326 - DNA, 19 bp, Mus musculus
  siRNA target sequence for Ehd1 (NM_010119.3,1411-1429).
ggacaagcccacctatgat

SEQ ID NO: 501327 - DNA, 19 bp, Mus musculus
  siRNA target sequence for Ehd1 (NM_010119.3,1451-1469).
cctgtcaacggcaagatca

SEQ ID NO: 501328 - DNA, 19 bp, Mus musculus
  siRNA target sequence for Ehd3 (NM_020578.1,379-397).
cagttggctgggtaacgat

SEQ ID NO: 501329 - DNA, 19 bp, Mus musculus
  siRNA target sequence for Ehd3 (NM_020578.1,434-452).
gtgagcgatggactcaaaa

SEQ ID NO: 501330 - DNA, 19 bp, Mus musculus
  siRNA target sequence for Ehd3 (NM_020578.1,438-456).
gcgatggactcaaaaaact

SEQ ID NO: 501331 - DNA, 19 bp, Mus musculus
  siRNA target sequence for Ehd3 (NM_020578.1,641-659).
cctgagccgaccactgatt

SEQ ID NO: 501332 - DNA, 19 bp, Mus musculus
  siRNA target sequence for Ehd3 (NM_020578.1,711-729).
ccttggtggtggatccaaa

SEQ ID NO: 501333 - DNA, 19 bp, Mus musculus
  siRNA target sequence for Ehd3 (NM_020578.1,715-733).
ggtggtggatccaaagaaa

SEQ ID NO: 501334 - DNA, 19 bp, Mus musculus
  siRNA target sequence for Ehd3 (NM_020578.1,799-817).
caacgccgtgcttgaaagt

SEQ ID NO: 501335 - DNA, 19 bp, Mus musculus
  siRNA target sequence for Ehd3 (NM_020578.1,803-821).
gccgtgcttgaaagtatca

SEQ ID NO: 501336 - DNA, 19 bp, Mus musculus
  siRNA target sequence for Ehd3 (NM_020578.1,805-823).
cgtgcttgaaagtatcagt

SEQ ID NO: 501337 - DNA, 19 bp, Mus musculus
  siRNA target sequence for Ehd3 (NM_020578.1,888-906).
ctgcggtcctcgaatggtt

SEQ ID NO: 501338 - DNA, 19 bp, Mus musculus
  siRNA target sequence for Ehd3 (NM_020578.1,911-929).
gagcgggtggaccgaatta

SEQ ID NO: 501339 - DNA, 19 bp, Mus musculus
  siRNA target sequence for Ehd3 (NM_020578.1,915-933).
gggtggaccgaattatcct

SEQ ID NO: 501340 - DNA, 19 bp, Mus musculus
  siRNA target sequence for Ehd3 (NM_020578.1,916-934).
ggtggaccgaattatccta

SEQ ID NO: 501341 - DNA, 19 bp, Mus musculus
  siRNA target sequence for Ehd3 (NM_020578.1,1117-1135).
ggtgatccgggtctacatt

SEQ ID NO: 501342 - DNA, 19 bp, Mus musculus
  siRNA target sequence for Ehd3 (NM_020578.1,1222-1240).
gagtctaccccgtaatgct

SEQ ID NO: 501343 - DNA, 19 bp, Mus musculus
  siRNA target sequence for Ehd3 (NM_020578.1,1233-1251).
gtaatgctgctcttcgaaa

SEQ ID NO: 501344 - DNA, 19 bp, Mus musculus
  siRNA target sequence for Ehd3 (NM_020578.1,1248-1266).
gaaagctcaacgatctcat

SEQ ID NO: 501345 - DNA, 19 bp, Mus musculus
  siRNA target sequence for Ehd3 (NM_020578.1,1508-1526).
ctggaagtggttgatgata

SEQ ID NO: 501346 - DNA, 19 bp, Mus musculus
  siRNA target sequence for Ehd3 (NM_020578.1,1710-1728).
ctatgtatgatgagatctt

SEQ ID NO: 501347 - DNA, 19 bp, Mus musculus
  siRNA target sequence for Eif2ak1 (NM_013557.1,311-329).
gtcggaccccaagtatgat

SEQ ID NO: 501348 - DNA, 19 bp, Mus musculus
  siRNA target sequence for Eif2ak1 (NM_013557.1,313-331).
cggaccccaagtatgatga

SEQ ID NO: 501349 - DNA, 19 bp, Mus musculus
  siRNA target sequence for Eif2ak1 (NM_013557.1,343-361).
ccgcagagctccaagtgtt

SEQ ID NO: 501350 - DNA, 19 bp, Mus musculus
  siRNA target sequence for Eif2ak1 (NM_013557.1,344-362).
cgcagagctccaagtgtta

SEQ ID NO: 501351 - DNA, 19 bp, Mus musculus
  siRNA target sequence for Eif2ak1 (NM_013557.1,1083-1101).
ggggagtctgaggttaaaa

SEQ ID NO: 501352 - DNA, 19 bp, Mus musculus
  siRNA target sequence for Eif2ak1 (NM_013557.1,1085-1103).
ggagtctgaggttaaaaat

SEQ ID NO: 501353 - DNA, 19 bp, Mus musculus
  siRNA target sequence for Eif2ak1 (NM_013557.1,1185-1203).
gaagacggcttgactgatt

SEQ ID NO: 501354 - DNA, 19 bp, Mus musculus
  siRNA target sequence for Eif2ak1 (NM_013557.1,1188-1206).
gacggcttgactgatttgt

SEQ ID NO: 501355 - DNA, 19 bp, Mus musculus
  siRNA target sequence for Eif2ak1 (NM_013557.1,1243-1261).
ggcatagctcggaattgga

SEQ ID NO: 501356 - DNA, 19 bp, Mus musculus
  siRNA target sequence for Eif2ak1 (NM_013557.1,1244-1262).
gcatagctcggaattggaa

SEQ ID NO: 501357 - DNA, 19 bp, Mus musculus
  siRNA target sequence for Eif2ak1 (NM_013557.1,1431-1449).
gctgcttgtccctatgtta

SEQ ID NO: 501358 - DNA, 19 bp, Mus musculus
  siRNA target sequence for Eif2ak1 (NM_013557.1,1432-1450).
ctgcttgtccctatgttat

SEQ ID NO: 501359 - DNA, 19 bp, Mus musculus
  siRNA target sequence for Eif2ak1 (NM_013557.1,1454-1472).
cagtgttgcaacaaaaatt

SEQ ID NO: 501360 - DNA, 19 bp, Mus musculus
  siRNA target sequence for Eif2ak1 (NM_013557.1,1491-1509).
ggtgtcttttacatacata

SEQ ID NO: 501361 - DNA, 19 bp, Mus musculus
  siRNA target sequence for Eif2ak1 (NM_013557.1,1728-1746).
gccaagtcagatatgtata

SEQ ID NO: 501362 - DNA, 19 bp, Mus musculus
  siRNA target sequence for Eif2ak1 (NM_013557.1,1776-1794).
cagccattcgggacagaaa

SEQ ID NO: 501363 - DNA, 19 bp, Mus musculus
  siRNA target sequence for Eif2ak1 (NM_013557.1,1797-1815).
gagagggcaacagtcttaa

SEQ ID NO: 501364 - DNA, 19 bp, Mus musculus
  siRNA target sequence for Eif2ak1 (NM_013557.1,1839-1857).
cccgaatccctcagtaaaa

SEQ ID NO: 501365 - DNA, 19 bp, Mus musculus
  siRNA target sequence for Eif2ak1 (NM_013557.1,1863-1881).
ccggtgcaagccaagtata

SEQ ID NO: 501366 - DNA, 19 bp, Mus musculus
  siRNA target sequence for Eif2ak1 (NM_013557.1,1864-1882).
cggtgcaagccaagtatat

SEQ ID NO: 501367 - DNA, 19 bp, Mus musculus
  siRNA target sequence for Eif2ak1 (NM_013557.1,1890-1908).
ctaaccgggaggaatgtgt

SEQ ID NO: 501368 - DNA, 19 bp, Mus musculus
  siRNA target sequence for Eif2ak1 (NM_013557.1,1953-1971).
caaacaactggaaatgtta

SEQ ID NO: 501369 - DNA, 19 bp, Mus musculus
  siRNA target sequence for Eif2ak1 (NM_013557.1,1963-1981).
gaaatgttaatctcacatt

SEQ ID NO: 501370 - DNA, 19 bp, Mus musculus
  siRNA target sequence for Eif2ak1 (NM_013557.1,2006-2024).
gaaggaaattgaagaacta

SEQ ID NO: 501371 - DNA, 19 bp, Mus musculus
  siRNA target sequence for Eif2ak3 (NM_010121.1,481-499).
gcggcaggtccttggtaat

SEQ ID NO: 501372 - DNA, 19 bp, Mus musculus
  siRNA target sequence for Eif2ak3 (NM_010121.1,494-512).
ggtaatcatcagcacttta

SEQ ID NO: 501373 - DNA, 19 bp, Mus musculus
  siRNA target sequence for Eif2ak3 (NM_010121.1,538-556).
ccgagaatgatgggaaaaa

SEQ ID NO: 501374 - DNA, 19 bp, Mus musculus
  siRNA target sequence for Eif2ak3 (NM_010121.1,576-594).
gggtctggttccttggttt

SEQ ID NO: 501375 - DNA, 19 bp, Mus musculus
  siRNA target sequence for Eif2ak3 (NM_010121.1,725-743).
cgaatcttcctacaagttt

SEQ ID NO: 501376 - DNA, 19 bp, Mus musculus
  siRNA target sequence for Eif2ak3 (NM_010121.1,841-859).
gtcgccgatgggatagtga

SEQ ID NO: 501377 - DNA, 19 bp, Mus musculus
  siRNA target sequence for Eif2ak3 (NM_010121.1,845-863).
ccgatgggatagtgatgaa

SEQ ID NO: 501378 - DNA, 19 bp, Mus musculus
  siRNA target sequence for Eif2ak3 (NM_010121.1,846-864).
cgatgggatagtgatgaaa

SEQ ID NO: 501379 - DNA, 19 bp, Mus musculus
  siRNA target sequence for Eif2ak3 (NM_010121.1,847-865).
gatgggatagtgatgaaat

SEQ ID NO: 501380 - DNA, 19 bp, Mus musculus
  siRNA target sequence for Eif2ak3 (NM_010121.1,956-974).
cagtgttggccactttgaa

SEQ ID NO: 501381 - DNA, 19 bp, Mus musculus
  siRNA target sequence for Eif2ak3 (NM_010121.1,968-986).
ctttgaacttcggtatatt

SEQ ID NO: 501382 - DNA, 19 bp, Mus musculus
  siRNA target sequence for Eif2ak3 (NM_010121.1,1013-1031).
cattgaaagcacctttaaa

SEQ ID NO: 501383 - DNA, 19 bp, Mus musculus
  siRNA target sequence for Eif2ak3 (NM_010121.1,1172-1190).
ggagtaccagttttgtact

SEQ ID NO: 501384 - DNA, 19 bp, Mus musculus
  siRNA target sequence for Eif2ak3 (NM_010121.1,1285-1303).
gagacgaagaagacattgt

SEQ ID NO: 501385 - DNA, 19 bp, Mus musculus
  siRNA target sequence for Eif2ak3 (NM_010121.1,1324-1342).
cagagaacagcgtgtactt

SEQ ID NO: 501386 - DNA, 19 bp, Mus musculus
  siRNA target sequence for Eif2ak3 (NM_010121.1,1424-1442).
gtctgtaaatggcgaaaat

SEQ ID NO: 501387 - DNA, 19 bp, Mus musculus
  siRNA target sequence for Eif2ak3 (NM_010121.1,1428-1446).
gtaaatggcgaaaatgcaa

SEQ ID NO: 501388 - DNA, 19 bp, Mus musculus
  siRNA target sequence for Eif2ak3 (NM_010121.1,1436-1454).
cgaaaatgcaattattcct

SEQ ID NO: 501389 - DNA, 19 bp, Mus musculus
  siRNA target sequence for Eif2ak3 (NM_010121.1,1452-1470).
cctctgccgacgatcaaat

SEQ ID NO: 501390 - DNA, 19 bp, Mus musculus
  siRNA target sequence for Eif2ak3 (NM_010121.1,1511-1529).
ggttgggtctgatgaattt

SEQ ID NO: 501391 - DNA, 19 bp, Mus musculus
  siRNA target sequence for Eif2ak3 (NM_010121.1,1532-1550).
caaatgtctaagtaatgat

SEQ ID NO: 501392 - DNA, 19 bp, Mus musculus
  siRNA target sequence for Eif2ak3 (NM_010121.1,1537-1555).
gtctaagtaatgataagta

SEQ ID NO: 501393 - DNA, 19 bp, Mus musculus
  siRNA target sequence for Eif2ak3 (NM_010121.1,1558-1576).
cccacgaagaatacagtaa

SEQ ID NO: 501394 - DNA, 19 bp, Mus musculus
  siRNA target sequence for Eif2ak3 (NM_010121.1,1559-1577).
ccacgaagaatacagtaat

SEQ ID NO: 501395 - DNA, 19 bp, Mus musculus
  siRNA target sequence for Eif2ak3 (NM_010121.1,1562-1580).
cgaagaatacagtaatggt

SEQ ID NO: 501396 - DNA, 19 bp, Mus musculus
  siRNA target sequence for Eif2ak3 (NM_010121.1,1592-1610).
cctccagtatccatacgat

SEQ ID NO: 501397 - DNA, 19 bp, Mus musculus
  siRNA target sequence for Eif2ak3 (NM_010121.1,1593-1611).
ctccagtatccatacgata

SEQ ID NO: 501398 - DNA, 19 bp, Mus musculus
  siRNA target sequence for Eif2ak3 (NM_010121.1,1603-1621).
catacgataacggttacta

SEQ ID NO: 501399 - DNA, 19 bp, Mus musculus
  siRNA target sequence for Eif2ak3 (NM_010121.1,1615-1633).
gttactatctgccatacta

SEQ ID NO: 501400 - DNA, 19 bp, Mus musculus
  siRNA target sequence for Eif2ak3 (NM_010121.1,1626-1644).
ccatactacaagagagaaa

SEQ ID NO: 501401 - DNA, 19 bp, Mus musculus
  siRNA target sequence for Eif2ak3 (NM_010121.1,1737-1755).
cactggtggaaggagatat

SEQ ID NO: 501402 - DNA, 19 bp, Mus musculus
  siRNA target sequence for Eif2ak3 (NM_010121.1,1830-1848).
cagcggaaggagtctgaaa

SEQ ID NO: 501403 - DNA, 19 bp, Mus musculus
  siRNA target sequence for Eif2ak3 (NM_010121.1,1919-1937).
gaagtactcaggatacgta

SEQ ID NO: 501404 - DNA, 19 bp, Mus musculus
  siRNA target sequence for Eif2ak3 (NM_010121.1,1930-1948).
gatacgtatcccgatatct

SEQ ID NO: 501405 - DNA, 19 bp, Mus musculus
  siRNA target sequence for Eif2ak3 (NM_010121.1,1934-1952).
cgtatcccgatatctaaca

SEQ ID NO: 501406 - DNA, 19 bp, Mus musculus
  siRNA target sequence for Eif2ak3 (NM_010121.1,1939-1957).
cccgatatctaacagattt

SEQ ID NO: 501407 - DNA, 19 bp, Mus musculus
  siRNA target sequence for Eif2ak3 (NM_010121.1,1940-1958).
ccgatatctaacagatttt

SEQ ID NO: 501408 - DNA, 19 bp, Mus musculus
  siRNA target sequence for Eif2ak3 (NM_010121.1,1993-2011).
gcgttgtctttgaagctaa

SEQ ID NO: 501409 - DNA, 19 bp, Mus musculus
  siRNA target sequence for Eif2ak3 (NM_010121.1,2084-2102).
ggtaatgcgggaagttaaa

SEQ ID NO: 501410 - DNA, 19 bp, Mus musculus
  siRNA target sequence for Eif2ak3 (NM_010121.1,2118-2136).
gaacacccaggcattgtga

SEQ ID NO: 501411 - DNA, 19 bp, Mus musculus
  siRNA target sequence for Eif2ak3 (NM_010121.1,2125-2143).
caggcattgtgaggtattt

SEQ ID NO: 501412 - DNA, 19 bp, Mus musculus
  siRNA target sequence for Eif2ak3 (NM_010121.1,2246-2264).
gatggatgccccatctgtt

SEQ ID NO: 501413 - DNA, 19 bp, Mus musculus
  siRNA target sequence for Eif2ak3 (NM_010121.1,2522-2540).
cgagggacactcctttgaa

SEQ ID NO: 501414 - DNA, 19 bp, Mus musculus
  siRNA target sequence for Eif2ak3 (NM_010121.1,2590-2608).
cctcctccatagtgtttga

SEQ ID NO: 501415 - DNA, 19 bp, Mus musculus
  siRNA target sequence for Eif2ak3 (NM_010121.1,2661-2679).
ctgcatgatggcaaccatt

SEQ ID NO: 501416 - DNA, 19 bp, Mus musculus
  siRNA target sequence for Eif2ak3 (NM_010121.1,2663-2681).
gcatgatggcaaccattat

SEQ ID NO: 501417 - DNA, 19 bp, Mus musculus
  siRNA target sequence for Eif2ak3 (NM_010121.1,2667-2685).
gatggcaaccattatgtta

SEQ ID NO: 501418 - DNA, 19 bp, Mus musculus
  siRNA target sequence for Eif2ak3 (NM_010121.1,2670-2688).
ggcaaccattatgttaata

SEQ ID NO: 501419 - DNA, 19 bp, Mus musculus
  siRNA target sequence for Eif2ak3 (NM_010121.1,2675-2693).
ccattatgttaataagcta

SEQ ID NO: 501420 - DNA, 19 bp, Mus musculus
  siRNA target sequence for Eif2ak3 (NM_010121.1,2730-2748).
gaagccaccaccttgtcta

SEQ ID NO: 501421 - DNA, 19 bp, Mus musculus
  siRNA target sequence for Eif2ak3 (NM_010121.1,2767-2785).
ccactctaagcttggattt

SEQ ID NO: 501422 - DNA, 19 bp, Mus musculus
  siRNA target sequence for Eif2ak3 (NM_010121.1,2821-2839).
cccccaaggtgtatctgta

SEQ ID NO: 501423 - DNA, 19 bp, Mus musculus
  siRNA target sequence for Eif2ak3 (NM_010121.1,2824-2842).
ccaaggtgtatctgtacat

SEQ ID NO: 501424 - DNA, 19 bp, Mus musculus
  siRNA target sequence for Eif2ak3 (NM_010121.1,2825-2843).
caaggtgtatctgtacatt

SEQ ID NO: 501425 - DNA, 19 bp, Mus musculus
  siRNA target sequence for Eif2ak3 (NM_010121.1,2829-2847).
gtgtatctgtacattcaga

SEQ ID NO: 501426 - DNA, 19 bp, Mus musculus
  siRNA target sequence for Eif2ak3 (NM_010121.1,3011-3029).
catattcttcacaatggat

SEQ ID NO: 501427 - DNA, 19 bp, Mus musculus
  siRNA target sequence for Eif2ak3 (NM_010121.1,3135-3153).
caagtagggaccaagctat

SEQ ID NO: 501428 - DNA, 19 bp, Mus musculus
  siRNA target sequence for Eif2ak3 (NM_010121.1,3141-3159).
gggaccaagctatacatga

SEQ ID NO: 501429 - DNA, 19 bp, Mus musculus
  siRNA target sequence for Eif2ak3 (NM_010121.1,3260-3278).
ggaacgagtccggatttta

SEQ ID NO: 501430 - DNA, 19 bp, Mus musculus
  siRNA target sequence for Eif2ak3 (NM_010121.1,3261-3279).
gaacgagtccggattttaa

SEQ ID NO: 501431 - DNA, 19 bp, Mus musculus
  siRNA target sequence for Eif2ak3 (NM_010121.1,3265-3283).
gagtccggattttaactga

SEQ ID NO: 501432 - DNA, 19 bp, Mus musculus
  siRNA target sequence for Eif2ak3 (NM_010121.1,3456-3474).
cggtcccgctccatgagtt

SEQ ID NO: 501433 - DNA, 19 bp, Mus musculus
  siRNA target sequence for Eif2ak4 (NM_013719.1,252-270).
gaaatcaacttagttcttt

SEQ ID NO: 501434 - DNA, 19 bp, Mus musculus
  siRNA target sequence for Eif2ak4 (NM_013719.1,282-300).
ctagctggtgaagaagtat

SEQ ID NO: 501435 - DNA, 19 bp, Mus musculus
  siRNA target sequence for Eif2ak4 (NM_013719.1,286-304).
ctggtgaagaagtatacgt

SEQ ID NO: 501436 - DNA, 19 bp, Mus musculus
  siRNA target sequence for Eif2ak4 (NM_013719.1,382-400).
gcctgtcgaatgaaagtgt

SEQ ID NO: 501437 - DNA, 19 bp, Mus musculus
  siRNA target sequence for Eif2ak4 (NM_013719.1,383-401).
cctgtcgaatgaaagtgtt

SEQ ID NO: 501438 - DNA, 19 bp, Mus musculus
  siRNA target sequence for Eif2ak4 (NM_013719.1,384-402).
ctgtcgaatgaaagtgtta

SEQ ID NO: 501439 - DNA, 19 bp, Mus musculus
  siRNA target sequence for Eif2ak4 (NM_013719.1,386-404).
gtcgaatgaaagtgttaat

SEQ ID NO: 501440 - DNA, 19 bp, Mus musculus
  siRNA target sequence for Eif2ak4 (NM_013719.1,388-406).
cgaatgaaagtgttaattt

SEQ ID NO: 501441 - DNA, 19 bp, Mus musculus
  siRNA target sequence for Eif2ak4 (NM_013719.1,443-461).
gtgtggagaggtgatgata

SEQ ID NO: 501442 - DNA, 19 bp, Mus musculus
  siRNA target sequence for Eif2ak4 (NM_013719.1,477-495).
catgtgcagtcgtttctca

SEQ ID NO: 501443 - DNA, 19 bp, Mus musculus
  siRNA target sequence for Eif2ak4 (NM_013719.1,487-505).
cgtttctcagcgagcataa

SEQ ID NO: 501444 - DNA, 19 bp, Mus musculus
  siRNA target sequence for Eif2ak4 (NM_013719.1,506-524).
caagcccccaccaaagtct

SEQ ID NO: 501445 - DNA, 19 bp, Mus musculus
  siRNA target sequence for Eif2ak4 (NM_013719.1,687-705).
gaacgtttggaaatcacta

SEQ ID NO: 501446 - DNA, 19 bp, Mus musculus
  siRNA target sequence for Eif2ak4 (NM_013719.1,696-714).
gaaatcactagcttgacaa

SEQ ID NO: 501447 - DNA, 19 bp, Mus musculus
  siRNA target sequence for Eif2ak4 (NM_013719.1,717-735).
caggactatgcctctaaga

SEQ ID NO: 501448 - DNA, 19 bp, Mus musculus
  siRNA target sequence for Eif2ak4 (NM_013719.1,786-804).
gactttgtaggaaatggta

SEQ ID NO: 501449 - DNA, 19 bp, Mus musculus
  siRNA target sequence for Eif2ak4 (NM_013719.1,833-851).
caggcgagaacgtcagtat

SEQ ID NO: 501450 - DNA, 19 bp, Mus musculus
  siRNA target sequence for Eif2ak4 (NM_013719.1,883-901).
cgtgtgacatcctccattt

SEQ ID NO: 501451 - DNA, 19 bp, Mus musculus
  siRNA target sequence for Eif2ak4 (NM_013719.1,932-950).
gcacaaagggagatgtgtt

SEQ ID NO: 501452 - DNA, 19 bp, Mus musculus
  siRNA target sequence for Eif2ak4 (NM_013719.1,968-986).
gggaaaggtggtatacaat

SEQ ID NO: 501453 - DNA, 19 bp, Mus musculus
  siRNA target sequence for Eif2ak4 (NM_013719.1,1167-1185).
cgctactttgcgatgaact

SEQ ID NO: 501454 - DNA, 19 bp, Mus musculus
  siRNA target sequence for Eif2ak4 (NM_013719.1,1395-1413).
gagggcactgtcaagataa

SEQ ID NO: 501455 - DNA, 19 bp, Mus musculus
  siRNA target sequence for Eif2ak4 (NM_013719.1,1399-1417).
gcactgtcaagataacaga

SEQ ID NO: 501456 - DNA, 19 bp, Mus musculus
  siRNA target sequence for Eif2ak4 (NM_013719.1,1469-1487).
gcaagctcgagttcgtttt

SEQ ID NO: 501457 - DNA, 19 bp, Mus musculus
  siRNA target sequence for Eif2ak4 (NM_013719.1,1474-1492).
ctcgagttcgttttagtga

SEQ ID NO: 501458 - DNA, 19 bp, Mus musculus
  siRNA target sequence for Eif2ak4 (NM_013719.1,1753-1771).
ctgggggacaagactacat

SEQ ID NO: 501459 - DNA, 19 bp, Mus musculus
  siRNA target sequence for Eif2ak4 (NM_013719.1,1833-1851).
cagttctcccggtacttca

SEQ ID NO: 501460 - DNA, 19 bp, Mus musculus
  siRNA target sequence for Eif2ak4 (NM_013719.1,1835-1853).
gttctcccggtacttcatt

SEQ ID NO: 501461 - DNA, 19 bp, Mus musculus
  siRNA target sequence for Eif2ak4 (NM_013719.1,1840-1858).
cccggtacttcattgagtt

SEQ ID NO: 501462 - DNA, 19 bp, Mus musculus
  siRNA target sequence for Eif2ak4 (NM_013719.1,1841-1859).
ccggtacttcattgagttt

SEQ ID NO: 501463 - DNA, 19 bp, Mus musculus
  siRNA target sequence for Eif2ak4 (NM_013719.1,1850-1868).
cattgagtttgaagaacta

SEQ ID NO: 501464 - DNA, 19 bp, Mus musculus
  siRNA target sequence for Eif2ak4 (NM_013719.1,1874-1892).
cctagggaaaggagctttt

SEQ ID NO: 501465 - DNA, 19 bp, Mus musculus
  siRNA target sequence for Eif2ak4 (NM_013719.1,2011-2029).
cgcgcctgcaccatgagaa

SEQ ID NO: 501466 - DNA, 19 bp, Mus musculus
  siRNA target sequence for Eif2ak4 (NM_013719.1,2130-2148).
gccacctgcgggaaaacat

SEQ ID NO: 501467 - DNA, 19 bp, Mus musculus
  siRNA target sequence for Eif2ak4 (NM_013719.1,2330-2348).
ctttctacctgcttcagat

SEQ ID NO: 501468 - DNA, 19 bp, Mus musculus
  siRNA target sequence for Eif2ak4 (NM_013719.1,2395-2413).
gtcaaaatcaggatgaaga

SEQ ID NO: 501469 - DNA, 19 bp, Mus musculus
  siRNA target sequence for Eif2ak4 (NM_013719.1,2426-2444).
ggacggtagccatgagatt

SEQ ID NO: 501470 - DNA, 19 bp, Mus musculus
  siRNA target sequence for Eif2ak4 (NM_013719.1,2465-2483).
ggctgtgcactacctttat

SEQ ID NO: 501471 - DNA, 19 bp, Mus musculus
  siRNA target sequence for Eif2ak4 (NM_013719.1,2466-2484).
gctgtgcactacctttata

SEQ ID NO: 501472 - DNA, 19 bp, Mus musculus
  siRNA target sequence for Eif2ak4 (NM_013719.1,2467-2485).
ctgtgcactacctttatat

SEQ ID NO: 501473 - DNA, 19 bp, Mus musculus
  siRNA target sequence for Eif2ak4 (NM_013719.1,2566-2584).
ggcttttccgagagattct

SEQ ID NO: 501474 - DNA, 19 bp, Mus musculus
  siRNA target sequence for Eif2ak4 (NM_013719.1,2579-2597).
gattctggatggattagct

SEQ ID NO: 501475 - DNA, 19 bp, Mus musculus
  siRNA target sequence for Eif2ak4 (NM_013719.1,2583-2601).
ctggatggattagcttata

SEQ ID NO: 501476 - DNA, 19 bp, Mus musculus
  siRNA target sequence for Eif2ak4 (NM_013719.1,2627-2645).
cgacttgaagcctgtcaat

SEQ ID NO: 501477 - DNA, 19 bp, Mus musculus
  siRNA target sequence for Eif2ak4 (NM_013719.1,2628-2646).
gacttgaagcctgtcaata

SEQ ID NO: 501478 - DNA, 19 bp, Mus musculus
  siRNA target sequence for Eif2ak4 (NM_013719.1,2633-2651).
gaagcctgtcaatattttt

SEQ ID NO: 501479 - DNA, 19 bp, Mus musculus
  siRNA target sequence for Eif2ak4 (NM_013719.1,2742-2760).
gcaggtgacggagtgatta

SEQ ID NO: 501480 - DNA, 19 bp, Mus musculus
  siRNA target sequence for Eif2ak4 (NM_013719.1,2743-2761).
caggtgacggagtgattaa

SEQ ID NO: 501481 - DNA, 19 bp, Mus musculus
  siRNA target sequence for Eif2ak4 (NM_013719.1,2745-2763).
ggtgacggagtgattaagt

SEQ ID NO: 501482 - DNA, 19 bp, Mus musculus
  siRNA target sequence for Eif2ak4 (NM_013719.1,2768-2786).
cccttcaggccatttgact

SEQ ID NO: 501483 - DNA, 19 bp, Mus musculus
  siRNA target sequence for Eif2ak4 (NM_013719.1,2796-2814).
ggtactgctctgtatgtaa

SEQ ID NO: 501484 - DNA, 19 bp, Mus musculus
  siRNA target sequence for Eif2ak4 (NM_013719.1,2833-2851).
gcaccaagtctgcatacaa

SEQ ID NO: 501485 - DNA, 19 bp, Mus musculus
  siRNA target sequence for Eif2ak4 (NM_013719.1,2877-2895).
ggaattatcttctttgaga

SEQ ID NO: 501486 - DNA, 19 bp, Mus musculus
  siRNA target sequence for Eif2ak4 (NM_013719.1,3137-3155).
ccacacgctggccaacata

SEQ ID NO: 501487 - DNA, 19 bp, Mus musculus
  siRNA target sequence for Eif2ak4 (NM_013719.1,3165-3183).
gcctaccgcaccatgatga

SEQ ID NO: 501488 - DNA, 19 bp, Mus musculus
  siRNA target sequence for Eif2ak4 (NM_013719.1,3243-3261).
ctgaagggcaacttcttga

SEQ ID NO: 501489 - DNA, 19 bp, Mus musculus
  siRNA target sequence for Eif2ak4 (NM_013719.1,3249-3267).
ggcaacttcttgattcgta

SEQ ID NO: 501490 - DNA, 19 bp, Mus musculus
  siRNA target sequence for Eif2ak4 (NM_013719.1,3299-3317).
catcgtccgcgtctttaaa

SEQ ID NO: 501491 - DNA, 19 bp, Mus musculus
  siRNA target sequence for Eif2ak4 (NM_013719.1,3357-3375).
ccccgaaacaggcaaatat

SEQ ID NO: 501492 - DNA, 19 bp, Mus musculus
  siRNA target sequence for Eif2ak4 (NM_013719.1,3358-3376).
cccgaaacaggcaaatata

SEQ ID NO: 501493 - DNA, 19 bp, Mus musculus
  siRNA target sequence for Eif2ak4 (NM_013719.1,3440-3458).
cctgcgggtcccttttgca

SEQ ID NO: 501494 - DNA, 19 bp, Mus musculus
  siRNA target sequence for Eif2ak4 (NM_013719.1,3441-3459).
ctgcgggtcccttttgcaa

SEQ ID NO: 501495 - DNA, 19 bp, Mus musculus
  siRNA target sequence for Eif2ak4 (NM_013719.1,3515-3533).
gttcagacctcggaagtta

SEQ ID NO: 501496 - DNA, 19 bp, Mus musculus
  siRNA target sequence for Eif2ak4 (NM_013719.1,3526-3544).
ggaagttagaccgatttca

SEQ ID NO: 501497 - DNA, 19 bp, Mus musculus
  siRNA target sequence for Eif2ak4 (NM_013719.1,3527-3545).
gaagttagaccgatttcat

SEQ ID NO: 501498 - DNA, 19 bp, Mus musculus
  siRNA target sequence for Eif2ak4 (NM_013719.1,3536-3554).
ccgatttcatcccaaagaa

SEQ ID NO: 501499 - DNA, 19 bp, Mus musculus
  siRNA target sequence for Eif2ak4 (NM_013719.1,3623-3641).
ctacaccatctatgaaata

SEQ ID NO: 501500 - DNA, 19 bp, Mus musculus
  siRNA target sequence for Eif2ak4 (NM_013719.1,3657-3675).
gcacttcaggaaaggaatt

SEQ ID NO: 501501 - DNA, 19 bp, Mus musculus
  siRNA target sequence for Eif2ak4 (NM_013719.1,3658-3676).
cacttcaggaaaggaatta

SEQ ID NO: 501502 - DNA, 19 bp, Mus musculus
  siRNA target sequence for Eif2ak4 (NM_013719.1,3670-3688).
ggaattacagcatttactt

SEQ ID NO: 501503 - DNA, 19 bp, Mus musculus
  siRNA target sequence for Eif2ak4 (NM_013719.1,3758-3776).
ctacgtcattctgtatgat

SEQ ID NO: 501504 - DNA, 19 bp, Mus musculus
  siRNA target sequence for Eif2ak4 (NM_013719.1,3807-3825).
gtggaagctaaattctgta

SEQ ID NO: 501505 - DNA, 19 bp, Mus musculus
  siRNA target sequence for Eif2ak4 (NM_013719.1,3849-3867).
ctgtgtagactctacaagt

SEQ ID NO: 501506 - DNA, 19 bp, Mus musculus
  siRNA target sequence for Eif2ak4 (NM_013719.1,3875-3893).
gcagaagggggatttgcaa

SEQ ID NO: 501507 - DNA, 19 bp, Mus musculus
  siRNA target sequence for Eif2ak4 (NM_013719.1,3903-3921).
ccaaccatcaactcactaa

SEQ ID NO: 501508 - DNA, 19 bp, Mus musculus
  siRNA target sequence for Eif2ak4 (NM_013719.1,3983-4001).
cgtcgggctgctgaagaaa

SEQ ID NO: 501509 - DNA, 19 bp, Mus musculus
  siRNA target sequence for Eif2ak4 (NM_013719.1,4056-4074).
cagcacactggcatcatct

SEQ ID NO: 501510 - DNA, 19 bp, Mus musculus
  siRNA target sequence for Eif2ak4 (NM_013719.1,4209-4227).
gtcagcatagccatagaca

SEQ ID NO: 501511 - DNA, 19 bp, Mus musculus
  siRNA target sequence for Eif2ak4 (NM_013719.1,4220-4238).
catagacaagatatttgct

SEQ ID NO: 501512 - DNA, 19 bp, Mus musculus
  siRNA target sequence for Eif2ak4 (NM_013719.1,4361-4379).
cactgcagaaatcatgtat

SEQ ID NO: 501513 - DNA, 19 bp, Mus musculus
  siRNA target sequence for Eif2ak4 (NM_013719.1,4393-4411).
cccaggaagagttacaaga

SEQ ID NO: 501514 - DNA, 19 bp, Mus musculus
  siRNA target sequence for Eif2ak4 (NM_013719.1,4507-4525).
cagaaaagcgtgtattgga

SEQ ID NO: 501515 - DNA, 19 bp, Mus musculus
  siRNA target sequence for Eif2ak4 (NM_013719.1,4509-4527).
gaaaagcgtgtattggaat

SEQ ID NO: 501516 - DNA, 19 bp, Mus musculus
  siRNA target sequence for Eif2ak4 (NM_013719.1,4569-4587).
gttggtgacgaaagaaatt

SEQ ID NO: 501517 - DNA, 19 bp, Mus musculus
  siRNA target sequence for Eif2ak4 (NM_013719.1,4572-4590).
ggtgacgaaagaaatttca

SEQ ID NO: 501518 - DNA, 19 bp, Mus musculus
  siRNA target sequence for Eif2ak4 (NM_013719.1,4591-4609).
gagacgcttctgataatct

SEQ ID NO: 501519 - DNA, 19 bp, Mus musculus
  siRNA target sequence for Eif2ak4 (NM_013719.1,4602-4620).
gataatcttgccgtacaaa

SEQ ID NO: 501520 - DNA, 19 bp, Mus musculus
  siRNA target sequence for Eif2ak4 (NM_013719.1,4628-4646).
ggggtcgttttctaatgct

SEQ ID NO: 501521 - DNA, 19 bp, Mus musculus
  siRNA target sequence for Eif2ak4 (NM_013719.1,4629-4647).
gggtcgttttctaatgctt

SEQ ID NO: 501522 - DNA, 19 bp, Mus musculus
  siRNA target sequence for Eif2ak4 (NM_013719.1,4639-4657).
ctaatgcttcaggtttgtt

SEQ ID NO: 501523 - DNA, 19 bp, Mus musculus
  siRNA target sequence for Eif2ak4 (NM_013719.1,4644-4662).
gcttcaggtttgtttgaaa

SEQ ID NO: 501524 - DNA, 19 bp, Mus musculus
  siRNA target sequence for Eif2ak4 (NM_013719.1,4682-4700).
ccccaacgtgattgttcta

SEQ ID NO: 501525 - DNA, 19 bp, Mus musculus
  siRNA target sequence for Eif2ak4 (NM_013719.1,4726-4744).
ccaggaggcgacatgagat

SEQ ID NO: 501526 - DNA, 19 bp, Mus musculus
  siRNA target sequence for Eif2ak4 (NM_013719.1,4727-4745).
caggaggcgacatgagatt

SEQ ID NO: 501527 - DNA, 19 bp, Mus musculus
  siRNA target sequence for Eif2ak4 (NM_013719.1,4766-4784).
gactacacttgccaactta

SEQ ID NO: 501528 - DNA, 19 bp, Mus musculus
  siRNA target sequence for Eif2ak4 (NM_013719.1,4818-4836).
gtggacctacccaaggaaa

SEQ ID NO: 501529 - DNA, 19 bp, Mus musculus
  siRNA target sequence for Eif2ak4 (NM_013719.1,4872-4890).
gatgaacaggcatttaaca

SEQ ID NO: 501530 - DNA, 19 bp, Mus musculus
  siRNA target sequence for Eif2ak4 (NM_013719.1,4941-4959).
ctcgtctgcgatgaaattt

SEQ ID NO: 501531 - DNA, 19 bp, Mus musculus
  siRNA target sequence for Eif2ak4 (NM_013719.1,4943-4961).
cgtctgcgatgaaatttat

SEQ ID NO: 501532 - DNA, 19 bp, Mus musculus
  siRNA target sequence for Eif2ak4 (NM_013719.1,4944-4962).
gtctgcgatgaaatttata

SEQ ID NO: 501533 - DNA, 19 bp, Mus musculus
  siRNA target sequence for Eif2ak4 (NM_013719.1,4948-4966).
gcgatgaaatttataacat

SEQ ID NO: 501534 - DNA, 19 bp, Mus musculus
  siRNA target sequence for Epha1 (NM_023580.2,135-153).
gccgaggaagtcactctaa

SEQ ID NO: 501535 - DNA, 19 bp, Mus musculus
  siRNA target sequence for Epha1 (NM_023580.2,217-235).
gtgaggtgcaacaaatgct

SEQ ID NO: 501536 - DNA, 19 bp, Mus musculus
  siRNA target sequence for Epha1 (NM_023580.2,219-237).
gaggtgcaacaaatgctaa

SEQ ID NO: 501537 - DNA, 19 bp, Mus musculus
  siRNA target sequence for Epha1 (NM_023580.2,241-259).
ggacacccctgtacatgta

SEQ ID NO: 501538 - DNA, 19 bp, Mus musculus
  siRNA target sequence for Epha1 (NM_023580.2,297-315).
cactggcttcgctccaatt

SEQ ID NO: 501539 - DNA, 19 bp, Mus musculus
  siRNA target sequence for Epha1 (NM_023580.2,301-319).
ggcttcgctccaattggat

SEQ ID NO: 501540 - DNA, 19 bp, Mus musculus
  siRNA target sequence for Epha1 (NM_023580.2,368-386).
cgtgcgggactgtaagagt

SEQ ID NO: 501541 - DNA, 19 bp, Mus musculus
  siRNA target sequence for Epha1 (NM_023580.2,369-387).
gtgcgggactgtaagagtt

SEQ ID NO: 501542 - DNA, 19 bp, Mus musculus
  siRNA target sequence for Epha1 (NM_023580.2,474-492).
cgacgacctttgttccaaa

SEQ ID NO: 501543 - DNA, 19 bp, Mus musculus
  siRNA target sequence for Epha1 (NM_023580.2,475-493).
gacgacctttgttccaaaa

SEQ ID NO: 501544 - DNA, 19 bp, Mus musculus
  siRNA target sequence for Epha1 (NM_023580.2,547-565).
gctctgtaaagctgaatgt

SEQ ID NO: 501545 - DNA, 19 bp, Mus musculus
  siRNA target sequence for Epha1 (NM_023580.2,550-568).
ctgtaaagctgaatgtaga

SEQ ID NO: 501546 - DNA, 19 bp, Mus musculus
  siRNA target sequence for Epha1 (NM_023580.2,597-615).
cgtggcctctacttagctt

SEQ ID NO: 501547 - DNA, 19 bp, Mus musculus
  siRNA target sequence for Epha1 (NM_023580.2,636-654).
gtggcgctagtgtctgtaa

SEQ ID NO: 501548 - DNA, 19 bp, Mus musculus
  siRNA target sequence for Epha1 (NM_023580.2,914-932).
ctatcgagtggacatgaat

SEQ ID NO: 501549 - DNA, 19 bp, Mus musculus
  siRNA target sequence for Epha1 (NM_023580.2,919-937).
gagtggacatgaatacact

SEQ ID NO: 501550 - DNA, 19 bp, Mus musculus
  siRNA target sequence for Epha1 (NM_023580.2,1060-1078).
catcggctccccaaaatct

SEQ ID NO: 501551 - DNA, 19 bp, Mus musculus
  siRNA target sequence for Epha1 (NM_023580.2,1135-1153).
cagggggacgccatgatat

SEQ ID NO: 501552 - DNA, 19 bp, Mus musculus
  siRNA target sequence for Epha1 (NM_023580.2,1137-1155).
gggggacgccatgatatca

SEQ ID NO: 501553 - DNA, 19 bp, Mus musculus
  siRNA target sequence for Epha1 (NM_023580.2,1139-1157).
gggacgccatgatatcaga

SEQ ID NO: 501554 - DNA, 19 bp, Mus musculus
  siRNA target sequence for Epha1 (NM_023580.2,1140-1158).
ggacgccatgatatcagat

SEQ ID NO: 501555 - DNA, 19 bp, Mus musculus
  siRNA target sequence for Epha1 (NM_023580.2,1143-1161).
cgccatgatatcagataca

SEQ ID NO: 501556 - DNA, 19 bp, Mus musculus
  siRNA target sequence for Epha1 (NM_023580.2,1290-1308).
gagccttacgccaactaca

SEQ ID NO: 501557 - DNA, 19 bp, Mus musculus
  siRNA target sequence for Epha1 (NM_023580.2,1293-1311).
ccttacgccaactacacat

SEQ ID NO: 501558 - DNA, 19 bp, Mus musculus
  siRNA target sequence for Epha1 (NM_023580.2,1294-1312).
cttacgccaactacacatt

SEQ ID NO: 501559 - DNA, 19 bp, Mus musculus
  siRNA target sequence for Epha1 (NM_023580.2,1316-1334).
cgtcaaatcccaaaacaga

SEQ ID NO: 501560 - DNA, 19 bp, Mus musculus
  siRNA target sequence for Epha1 (NM_023580.2,1366-1384).
gcgcctccctcagtatcaa

SEQ ID NO: 501561 - DNA, 19 bp, Mus musculus
  siRNA target sequence for Epha1 (NM_023580.2,1469-1487).
gtcccgaccccgaaatcct

SEQ ID NO: 501562 - DNA, 19 bp, Mus musculus
  siRNA target sequence for Epha1 (NM_023580.2,1561-1579).
gggtcttgctgacaaaact

SEQ ID NO: 501563 - DNA, 19 bp, Mus musculus
  siRNA target sequence for Epha1 (NM_023580.2,1643-1661).
ctcccctgaccatgagttt

SEQ ID NO: 501564 - DNA, 19 bp, Mus musculus
  siRNA target sequence for Epha1 (NM_023580.2,1703-1721).
gattgtggccgtcatcttt

SEQ ID NO: 501565 - DNA, 19 bp, Mus musculus
  siRNA target sequence for Epha1 (NM_023580.2,1741-1759).
ctctgctgatcgggattta

SEQ ID NO: 501566 - DNA, 19 bp, Mus musculus
  siRNA target sequence for Epha1 (NM_023580.2,1746-1764).
ctgatcgggatttatgtct

SEQ ID NO: 501567 - DNA, 19 bp, Mus musculus
  siRNA target sequence for Epha1 (NM_023580.2,1835-1853).
ggacaagctgtggctaaaa

SEQ ID NO: 501568 - DNA, 19 bp, Mus musculus
  siRNA target sequence for Epha1 (NM_023580.2,1887-1905).
gcacagggagccttagact

SEQ ID NO: 501569 - DNA, 19 bp, Mus musculus
  siRNA target sequence for Epha1 (NM_023580.2,1888-1906).
cacagggagccttagactt

SEQ ID NO: 501570 - DNA, 19 bp, Mus musculus
  siRNA target sequence for Epha1 (NM_023580.2,2052-2070).
gatggctactggtggaatt

SEQ ID NO: 501571 - DNA, 19 bp, Mus musculus
  siRNA target sequence for Epha1 (NM_023580.2,2073-2091).
cttcgagaggcaactatca

SEQ ID NO: 501572 - DNA, 19 bp, Mus musculus
  siRNA target sequence for Epha1 (NM_023580.2,2124-2142).
ctagaaggtgtcatcacaa

SEQ ID NO: 501573 - DNA, 19 bp, Mus musculus
  siRNA target sequence for Epha1 (NM_023580.2,2130-2148).
ggtgtcatcacaaaaagaa

SEQ ID NO: 501574 - DNA, 19 bp, Mus musculus
  siRNA target sequence for Epha1 (NM_023580.2,2146-2164).
gaaagcccatcatgatcat

SEQ ID NO: 501575 - DNA, 19 bp, Mus musculus
  siRNA target sequence for Epha1 (NM_023580.2,2564-2582).
ggtaatgaaaagcattgaa

SEQ ID NO: 501576 - DNA, 19 bp, Mus musculus
  siRNA target sequence for Epha1 (NM_023580.2,2642-2660).
gaactgctgggcttacgat

SEQ ID NO: 501577 - DNA, 19 bp, Mus musculus
  siRNA target sequence for Epha1 (NM_023580.2,2734-2752).
ggacaattgccaactttga

SEQ ID NO: 501578 - DNA, 19 bp, Mus musculus
  siRNA target sequence for Epha2 (NM_010139.2,288-306).
gacgacatgcctatctaca

SEQ ID NO: 501579 - DNA, 19 bp, Mus musculus
  siRNA target sequence for Epha2 (NM_010139.2,291-309).
gacatgcctatctacatgt

SEQ ID NO: 501580 - DNA, 19 bp, Mus musculus
  siRNA target sequence for Epha2 (NM_010139.2,380-398).
ggccgagcgcatctttatt

SEQ ID NO: 501581 - DNA, 19 bp, Mus musculus
  siRNA target sequence for Epha2 (NM_010139.2,382-400).
ccgagcgcatctttattga

SEQ ID NO: 501582 - DNA, 19 bp, Mus musculus
  siRNA target sequence for Epha2 (NM_010139.2,688-706).
ccgttcgcgtctactacaa

SEQ ID NO: 501583 - DNA, 19 bp, Mus musculus
  siRNA target sequence for Epha2 (NM_010139.2,690-708).
gttcgcgtctactacaaga

SEQ ID NO: 501584 - DNA, 19 bp, Mus musculus
  siRNA target sequence for Epha2 (NM_010139.2,761-779).
cgctgtctccgatacacaa

SEQ ID NO: 501585 - DNA, 19 bp, Mus musculus
  siRNA target sequence for Epha2 (NM_010139.2,1071-1089).
gacccactgtccatgtctt

SEQ ID NO: 501586 - DNA, 19 bp, Mus musculus
  siRNA target sequence for Epha2 (NM_010139.2,1256-1274).
ggcgagcgtgcgctattca

SEQ ID NO: 501587 - DNA, 19 bp, Mus musculus
  siRNA target sequence for Epha2 (NM_010139.2,1258-1276).
cgagcgtgcgctattcaga

SEQ ID NO: 501588 - DNA, 19 bp, Mus musculus
  siRNA target sequence for Epha2 (NM_010139.2,1259-1277).
gagcgtgcgctattcagaa

SEQ ID NO: 501589 - DNA, 19 bp, Mus musculus
  siRNA target sequence for Epha2 (NM_010139.2,1322-1340).
ggagccccacatgaactat

SEQ ID NO: 501590 - DNA, 19 bp, Mus musculus
  siRNA target sequence for Epha2 (NM_010139.2,1323-1341).
gagccccacatgaactata

SEQ ID NO: 501591 - DNA, 19 bp, Mus musculus
  siRNA target sequence for Epha2 (NM_010139.2,1326-1344).
ccccacatgaactatacct

SEQ ID NO: 501592 - DNA, 19 bp, Mus musculus
  siRNA target sequence for Epha2 (NM_010139.2,1402-1420).
ctgccagcgtcagtattaa

SEQ ID NO: 501593 - DNA, 19 bp, Mus musculus
  siRNA target sequence for Epha2 (NM_010139.2,1406-1424).
cagcgtcagtattaaccaa

SEQ ID NO: 501594 - DNA, 19 bp, Mus musculus
  siRNA target sequence for Epha2 (NM_010139.2,1741-1759).
ctgtaggtgttgttttgct

SEQ ID NO: 501595 - DNA, 19 bp, Mus musculus
  siRNA target sequence for Epha2 (NM_010139.2,1914-1932).
gctgtactcaagtttacca

SEQ ID NO: 501596 - DNA, 19 bp, Mus musculus
  siRNA target sequence for Epha2 (NM_010139.2,1985-2003).
gtttggagaggtctataaa

SEQ ID NO: 501597 - DNA, 19 bp, Mus musculus
  siRNA target sequence for Epha2 (NM_010139.2,2150-2168).
ggagggcgtggtctctaaa

SEQ ID NO: 501598 - DNA, 19 bp, Mus musculus
  siRNA target sequence for Epha2 (NM_010139.2,2151-2169).
gagggcgtggtctctaaat

SEQ ID NO: 501599 - DNA, 19 bp, Mus musculus
  siRNA target sequence for Epha2 (NM_010139.2,2154-2172).
ggcgtggtctctaaataca

SEQ ID NO: 501600 - DNA, 19 bp, Mus musculus
  siRNA target sequence for Epha2 (NM_010139.2,2211-2229).
gcgctagacaagttcctta

SEQ ID NO: 501601 - DNA, 19 bp, Mus musculus
  siRNA target sequence for Epha2 (NM_010139.2,2444-2462).
cggcaagatccctattcga

SEQ ID NO: 501602 - DNA, 19 bp, Mus musculus
  siRNA target sequence for Epha2 (NM_010139.2,2581-2599).
caaaccacgaggtcatgaa

SEQ ID NO: 501603 - DNA, 19 bp, Mus musculus
  siRNA target sequence for Epha2 (NM_010139.2,2641-2659).
gcccttcagccatttacca

SEQ ID NO: 501604 - DNA, 19 bp, Mus musculus
  siRNA target sequence for Epha2 (NM_010139.2,2650-2668).
ccatttaccagctcatgat

SEQ ID NO: 501605 - DNA, 19 bp, Mus musculus
  siRNA target sequence for Epha2 (NM_010139.2,2759-2777).
caagacgctggctgacttt

SEQ ID NO: 501606 - DNA, 19 bp, Mus musculus
  siRNA target sequence for Epha3 (NM_010140.1,186-204).
gccttccaacgaagttaat

SEQ ID NO: 501607 - DNA, 19 bp, Mus musculus
  siRNA target sequence for Epha3 (NM_010140.1,188-206).
cttccaacgaagttaatct

SEQ ID NO: 501608 - DNA, 19 bp, Mus musculus
  siRNA target sequence for Epha3 (NM_010140.1,191-209).
ccaacgaagttaatctact

SEQ ID NO: 501609 - DNA, 19 bp, Mus musculus
  siRNA target sequence for Epha3 (NM_010140.1,195-213).
cgaagttaatctactagat

SEQ ID NO: 501610 - DNA, 19 bp, Mus musculus
  siRNA target sequence for Epha3 (NM_010140.1,273-291).
gatcagtggtgttgatgaa

SEQ ID NO: 501611 - DNA, 19 bp, Mus musculus
  siRNA target sequence for Epha3 (NM_010140.1,330-348).
catggatcacagccaaaat

SEQ ID NO: 501612 - DNA, 19 bp, Mus musculus
  siRNA target sequence for Epha3 (NM_010140.1,333-351).
ggatcacagccaaaataat

SEQ ID NO: 501613 - DNA, 19 bp, Mus musculus
  siRNA target sequence for Epha3 (NM_010140.1,334-352).
gatcacagccaaaataatt

SEQ ID NO: 501614 - DNA, 19 bp, Mus musculus
  siRNA target sequence for Epha3 (NM_010140.1,496-514).
gatgatcatggcgtcaaat

SEQ ID NO: 501615 - DNA, 19 bp, Mus musculus
  siRNA target sequence for Epha3 (NM_010140.1,552-570).
cgctgatgaaagtttcact

SEQ ID NO: 501616 - DNA, 19 bp, Mus musculus
  siRNA target sequence for Epha3 (NM_010140.1,582-600).
cggggatcgcattctgaaa

SEQ ID NO: 501617 - DNA, 19 bp, Mus musculus
  siRNA target sequence for Epha3 (NM_010140.1,584-602).
gggatcgcattctgaaact

SEQ ID NO: 501618 - DNA, 19 bp, Mus musculus
  siRNA target sequence for Epha3 (NM_010140.1,622-640).
gtgggaccagtcaacaaaa

SEQ ID NO: 501619 - DNA, 19 bp, Mus musculus
  siRNA target sequence for Epha3 (NM_010140.1,692-710).
ctgtgagagtgtacttcaa

SEQ ID NO: 501620 - DNA, 19 bp, Mus musculus
  siRNA target sequence for Epha3 (NM_010140.1,708-726).
caaaaagtgcccgtttaca

SEQ ID NO: 501621 - DNA, 19 bp, Mus musculus
  siRNA target sequence for Epha3 (NM_010140.1,716-734).
gcccgtttacagtgaagaa

SEQ ID NO: 501622 - DNA, 19 bp, Mus musculus
  siRNA target sequence for Epha3 (NM_010140.1,717-735).
cccgtttacagtgaagaat

SEQ ID NO: 501623 - DNA, 19 bp, Mus musculus
  siRNA target sequence for Epha3 (NM_010140.1,719-737).
cgtttacagtgaagaatct

SEQ ID NO: 501624 - DNA, 19 bp, Mus musculus
  siRNA target sequence for Epha3 (NM_010140.1,791-809).
ggggctcttgtgtcaataa

SEQ ID NO: 501625 - DNA, 19 bp, Mus musculus
  siRNA target sequence for Epha3 (NM_010140.1,823-841).
gaccctcccaggatgtact

SEQ ID NO: 501626 - DNA, 19 bp, Mus musculus
  siRNA target sequence for Epha3 (NM_010140.1,929-947).
gtcgaccaggcttctacaa

SEQ ID NO: 501627 - DNA, 19 bp, Mus musculus
  siRNA target sequence for Epha3 (NM_010140.1,954-972).
cgatggtgctgctaagtgt

SEQ ID NO: 501628 - DNA, 19 bp, Mus musculus
  siRNA target sequence for Epha3 (NM_010140.1,1003-1021).
gaagatggttcaatgaact

SEQ ID NO: 501629 - DNA, 19 bp, Mus musculus
  siRNA target sequence for Epha3 (NM_010140.1,1022-1040).
gcaggtgtgagaataatta

SEQ ID NO: 501630 - DNA, 19 bp, Mus musculus
  siRNA target sequence for Epha3 (NM_010140.1,1023-1041).
caggtgtgagaataattat

SEQ ID NO: 501631 - DNA, 19 bp, Mus musculus
  siRNA target sequence for Epha3 (NM_010140.1,1085-1103).
ctccatccgcaccaagaaa

SEQ ID NO: 501632 - DNA, 19 bp, Mus musculus
  siRNA target sequence for Epha3 (NM_010140.1,1091-1109).
ccgcaccaagaaatgttat

SEQ ID NO: 501633 - DNA, 19 bp, Mus musculus
  siRNA target sequence for Epha3 (NM_010140.1,1093-1111).
gcaccaagaaatgttatct

SEQ ID NO: 501634 - DNA, 19 bp, Mus musculus
  siRNA target sequence for Epha3 (NM_010140.1,1100-1118).
gaaatgttatctcaaacat

SEQ ID NO: 501635 - DNA, 19 bp, Mus musculus
  siRNA target sequence for Epha3 (NM_010140.1,1165-1183).
ggaggccggaaggatatta

SEQ ID NO: 501636 - DNA, 19 bp, Mus musculus
  siRNA target sequence for Epha3 (NM_010140.1,1168-1186).
ggccggaaggatattacct

SEQ ID NO: 501637 - DNA, 19 bp, Mus musculus
  siRNA target sequence for Epha3 (NM_010140.1,1169-1187).
gccggaaggatattacctt

SEQ ID NO: 501638 - DNA, 19 bp, Mus musculus
  siRNA target sequence for Epha3 (NM_010140.1,1368-1386).
ctcgccaccgagacagtat

SEQ ID NO: 501639 - DNA, 19 bp, Mus musculus
  siRNA target sequence for Epha3 (NM_010140.1,1417-1435).
gctccatcaccagttatga

SEQ ID NO: 501640 - DNA, 19 bp, Mus musculus
  siRNA target sequence for Epha3 (NM_010140.1,1424-1442).
caccagttatgacaattaa

SEQ ID NO: 501641 - DNA, 19 bp, Mus musculus
  siRNA target sequence for Epha3 (NM_010140.1,1518-1536).
ctatgaggtcaaatactat

SEQ ID NO: 501642 - DNA, 19 bp, Mus musculus
  siRNA target sequence for Epha3 (NM_010140.1,1549-1567).
caagagacgagttatacca

SEQ ID NO: 501643 - DNA, 19 bp, Mus musculus
  siRNA target sequence for Epha3 (NM_010140.1,1557-1575).
gagttataccattttgaga

SEQ ID NO: 501644 - DNA, 19 bp, Mus musculus
  siRNA target sequence for Epha3 (NM_010140.1,1580-1598).
gaggcacaaatgttactat

SEQ ID NO: 501645 - DNA, 19 bp, Mus musculus
  siRNA target sequence for Epha3 (NM_010140.1,1608-1626).
caagccagatactacttat

SEQ ID NO: 501646 - DNA, 19 bp, Mus musculus
  siRNA target sequence for Epha3 (NM_010140.1,1664-1682).
gaaccaacagccgcaaatt

SEQ ID NO: 501647 - DNA, 19 bp, Mus musculus
  siRNA target sequence for Epha3 (NM_010140.1,1667-1685).
ccaacagccgcaaatttga

SEQ ID NO: 501648 - DNA, 19 bp, Mus musculus
  siRNA target sequence for Epha3 (NM_010140.1,1668-1686).
caacagccgcaaatttgaa

SEQ ID NO: 501649 - DNA, 19 bp, Mus musculus
  siRNA target sequence for Epha3 (NM_010140.1,1713-1731).
catctccggtgaaaacagt

SEQ ID NO: 501650 - DNA, 19 bp, Mus musculus
  siRNA target sequence for Epha3 (NM_010140.1,1728-1746).
cagtcatgtggtgatgatt

SEQ ID NO: 501651 - DNA, 19 bp, Mus musculus
  siRNA target sequence for Epha3 (NM_010140.1,1779-1797).
cacggtggtcacctatgtt

SEQ ID NO: 501652 - DNA, 19 bp, Mus musculus
  siRNA target sequence for Epha3 (NM_010140.1,1781-1799).
cggtggtcacctatgttct

SEQ ID NO: 501653 - DNA, 19 bp, Mus musculus
  siRNA target sequence for Epha3 (NM_010140.1,1795-1813).
gttctggtcgggaggtttt

SEQ ID NO: 501654 - DNA, 19 bp, Mus musculus
  siRNA target sequence for Epha3 (NM_010140.1,1814-1832).
gtggctatcacaagtcaaa

SEQ ID NO: 501655 - DNA, 19 bp, Mus musculus
  siRNA target sequence for Epha3 (NM_010140.1,1845-1863).
ggagaagcgccttcacttt

SEQ ID NO: 501656 - DNA, 19 bp, Mus musculus
  siRNA target sequence for Epha3 (NM_010140.1,1899-1917).
ctatgttgatccacataca

SEQ ID NO: 501657 - DNA, 19 bp, Mus musculus
  siRNA target sequence for Epha3 (NM_010140.1,1926-1944).
ccctactcaagcagttcat

SEQ ID NO: 501658 - DNA, 19 bp, Mus musculus
  siRNA target sequence for Epha3 (NM_010140.1,1931-1949).
ctcaagcagttcatgagtt

SEQ ID NO: 501659 - DNA, 19 bp, Mus musculus
  siRNA target sequence for Epha3 (NM_010140.1,1959-1977).
gttggatgccaccaatata

SEQ ID NO: 501660 - DNA, 19 bp, Mus musculus
  siRNA target sequence for Epha3 (NM_010140.1,1963-1981).
gatgccaccaatatatcca

SEQ ID NO: 501661 - DNA, 19 bp, Mus musculus
  siRNA target sequence for Epha3 (NM_010140.1,2086-2104).
gggtataccgagaaacaga

SEQ ID NO: 501662 - DNA, 19 bp, Mus musculus
  siRNA target sequence for Epha3 (NM_010140.1,2173-2191).
ggcgttgtcactaagagta

SEQ ID NO: 501663 - DNA, 19 bp, Mus musculus
  siRNA target sequence for Epha3 (NM_010140.1,2174-2192).
gcgttgtcactaagagtaa

SEQ ID NO: 501664 - DNA, 19 bp, Mus musculus
  siRNA target sequence for Epha3 (NM_010140.1,2187-2205).
gagtaagccagtgatgatt

SEQ ID NO: 501665 - DNA, 19 bp, Mus musculus
  siRNA target sequence for Epha3 (NM_010140.1,2189-2207).
gtaagccagtgatgattgt

SEQ ID NO: 501666 - DNA, 19 bp, Mus musculus
  siRNA target sequence for Epha3 (NM_010140.1,2370-2388).
cttgatcaacagtaactta

SEQ ID NO: 501667 - DNA, 19 bp, Mus musculus
  siRNA target sequence for Epha3 (NM_010140.1,2411-2429).
gactctctcgggtacttga

SEQ ID NO: 501668 - DNA, 19 bp, Mus musculus
  siRNA target sequence for Epha3 (NM_010140.1,2415-2433).
ctctcgggtacttgaagat

SEQ ID NO: 501669 - DNA, 19 bp, Mus musculus
  siRNA target sequence for Epha3 (NM_010140.1,2417-2435).
ctcgggtacttgaagatga

SEQ ID NO: 501670 - DNA, 19 bp, Mus musculus
  siRNA target sequence for Epha3 (NM_010140.1,2459-2477).
ggggaggaaagataccaat

SEQ ID NO: 501671 - DNA, 19 bp, Mus musculus
  siRNA target sequence for Epha3 (NM_010140.1,2464-2482).
ggaaagataccaataaggt

SEQ ID NO: 501672 - DNA, 19 bp, Mus musculus
  siRNA target sequence for Epha3 (NM_010140.1,2537-2555).
ggagttacgggattgttct

SEQ ID NO: 501673 - DNA, 19 bp, Mus musculus
  siRNA target sequence for Epha3 (NM_010140.1,2666-2684).
ctgccttgtatcagttgat

SEQ ID NO: 501674 - DNA, 19 bp, Mus musculus
  siRNA target sequence for Epha3 (NM_010140.1,2668-2686).
gccttgtatcagttgatgt

SEQ ID NO: 501675 - DNA, 19 bp, Mus musculus
  siRNA target sequence for Epha3 (NM_010140.1,2669-2687).
ccttgtatcagttgatgtt

SEQ ID NO: 501676 - DNA, 19 bp, Mus musculus
  siRNA target sequence for Epha3 (NM_010140.1,2804-2822).
ggccatcaaaccttcttct

SEQ ID NO: 501677 - DNA, 19 bp, Mus musculus
  siRNA target sequence for Epha3 (NM_010140.1,2890-2908).
gcacactgtaaggaaatct

SEQ ID NO: 501678 - DNA, 19 bp, Mus musculus
  siRNA target sequence for Epha3 (NM_010140.1,2952-2970).
ctccacagatgacatgaaa

SEQ ID NO: 501679 - DNA, 19 bp, Mus musculus
  siRNA target sequence for Epha3 (NM_010140.1,3006-3024).
gatcatcagcaccattaaa

SEQ ID NO: 501680 - DNA, 19 bp, Mus musculus
  siRNA target sequence for Epha4 (NM_007936.2,34-52).
ctgggattttctatttcat

SEQ ID NO: 501681 - DNA, 19 bp, Mus musculus
  siRNA target sequence for Epha4 (NM_007936.2,110-128).
cgcgaatgaagttacttta

SEQ ID NO: 501682 - DNA, 19 bp, Mus musculus
  siRNA target sequence for Epha4 (NM_007936.2,153-171).
gagcttgggtggatagcaa

SEQ ID NO: 501683 - DNA, 19 bp, Mus musculus
  siRNA target sequence for Epha4 (NM_007936.2,194-212).
ggaagtgagcattatggat

SEQ ID NO: 501684 - DNA, 19 bp, Mus musculus
  siRNA target sequence for Epha4 (NM_007936.2,202-220).
gcattatggatgagaaaaa

SEQ ID NO: 501685 - DNA, 19 bp, Mus musculus
  siRNA target sequence for Epha4 (NM_007936.2,310-328).
cgcagagggtgtacattga

SEQ ID NO: 501686 - DNA, 19 bp, Mus musculus
  siRNA target sequence for Epha4 (NM_007936.2,311-329).
gcagagggtgtacattgaa

SEQ ID NO: 501687 - DNA, 19 bp, Mus musculus
  siRNA target sequence for Epha4 (NM_007936.2,312-330).
cagagggtgtacattgaaa

SEQ ID NO: 501688 - DNA, 19 bp, Mus musculus
  siRNA target sequence for Epha4 (NM_007936.2,316-334).
gggtgtacattgaaattaa

SEQ ID NO: 501689 - DNA, 19 bp, Mus musculus
  siRNA target sequence for Epha4 (NM_007936.2,318-336).
gtgtacattgaaattaagt

SEQ ID NO: 501690 - DNA, 19 bp, Mus musculus
  siRNA target sequence for Epha4 (NM_007936.2,327-345).
gaaattaagttcactctaa

SEQ ID NO: 501691 - DNA, 19 bp, Mus musculus
  siRNA target sequence for Epha4 (NM_007936.2,510-528).
gaccgaatcatgaaactca

SEQ ID NO: 501692 - DNA, 19 bp, Mus musculus
  siRNA target sequence for Epha4 (NM_007936.2,568-586).
ggttttacctggcttttca

SEQ ID NO: 501693 - DNA, 19 bp, Mus musculus
  siRNA target sequence for Epha4 (NM_007936.2,618-636).
gtccgtgtgttctacaaga

SEQ ID NO: 501694 - DNA, 19 bp, Mus musculus
  siRNA target sequence for Epha4 (NM_007936.2,640-658).
gtccactcaccgttcgaaa

SEQ ID NO: 501695 - DNA, 19 bp, Mus musculus
  siRNA target sequence for Epha4 (NM_007936.2,643-661).
cactcaccgttcgaaatct

SEQ ID NO: 501696 - DNA, 19 bp, Mus musculus
  siRNA target sequence for Epha4 (NM_007936.2,848-866).
ccaagcttgcaaaattgga

SEQ ID NO: 501697 - DNA, 19 bp, Mus musculus
  siRNA target sequence for Epha4 (NM_007936.2,849-867).
caagcttgcaaaattggat

SEQ ID NO: 501698 - DNA, 19 bp, Mus musculus
  siRNA target sequence for Epha4 (NM_007936.2,853-871).
cttgcaaaattggatatta

SEQ ID NO: 501699 - DNA, 19 bp, Mus musculus
  siRNA target sequence for Epha4 (NM_007936.2,952-970).
cctgtgaccgaggcttttt

SEQ ID NO: 501700 - DNA, 19 bp, Mus musculus
  siRNA target sequence for Epha4 (NM_007936.2,1023-1041).
cccctcaacttgatttcta

SEQ ID NO: 501701 - DNA, 19 bp, Mus musculus
  siRNA target sequence for Epha4 (NM_007936.2,1095-1113).
ggccgtcaggacatttctt

SEQ ID NO: 501702 - DNA, 19 bp, Mus musculus
  siRNA target sequence for Epha4 (NM_007936.2,1096-1114).
gccgtcaggacatttctta

SEQ ID NO: 501703 - DNA, 19 bp, Mus musculus
  siRNA target sequence for Epha4 (NM_007936.2,1098-1116).
cgtcaggacatttcttaca

SEQ ID NO: 501704 - DNA, 19 bp, Mus musculus
  siRNA target sequence for Epha4 (NM_007936.2,1099-1117).
gtcaggacatttcttacaa

SEQ ID NO: 501705 - DNA, 19 bp, Mus musculus
  siRNA target sequence for Epha4 (NM_007936.2,1118-1136).
cgtggtctgcaagaaatgt

SEQ ID NO: 501706 - DNA, 19 bp, Mus musculus
  siRNA target sequence for Epha4 (NM_007936.2,1273-1291).
cagtgaatggagtgtctaa

SEQ ID NO: 501707 - DNA, 19 bp, Mus musculus
  siRNA target sequence for Epha4 (NM_007936.2,1275-1293).
gtgaatggagtgtctaagt

SEQ ID NO: 501708 - DNA, 19 bp, Mus musculus
  siRNA target sequence for Epha4 (NM_007936.2,1347-1365).
gcaccatcatccattgctt

SEQ ID NO: 501709 - DNA, 19 bp, Mus musculus
  siRNA target sequence for Epha4 (NM_007936.2,1368-1386).
gtccaggctaaagaagtta

SEQ ID NO: 501710 - DNA, 19 bp, Mus musculus
  siRNA target sequence for Epha4 (NM_007936.2,1370-1388).
ccaggctaaagaagttaca

SEQ ID NO: 501711 - DNA, 19 bp, Mus musculus
  siRNA target sequence for Epha4 (NM_007936.2,1374-1392).
gctaaagaagttacaagat

SEQ ID NO: 501712 - DNA, 19 bp, Mus musculus
  siRNA target sequence for Epha4 (NM_007936.2,1415-1433).
ggaaccagatcgaccaaat

SEQ ID NO: 501713 - DNA, 19 bp, Mus musculus
  siRNA target sequence for Epha4 (NM_007936.2,1513-1531).
ccaggaacacagatatcaa

SEQ ID NO: 501714 - DNA, 19 bp, Mus musculus
  siRNA target sequence for Epha4 (NM_007936.2,1538-1556).
gaaccctctgacttcctat

SEQ ID NO: 501715 - DNA, 19 bp, Mus musculus
  siRNA target sequence for Epha4 (NM_007936.2,1610-1628).
cctggaagtcactactaat

SEQ ID NO: 501716 - DNA, 19 bp, Mus musculus
  siRNA target sequence for Epha4 (NM_007936.2,1611-1629).
ctggaagtcactactaata

SEQ ID NO: 501717 - DNA, 19 bp, Mus musculus
  siRNA target sequence for Epha4 (NM_007936.2,1613-1631).
ggaagtcactactaataca

SEQ ID NO: 501718 - DNA, 19 bp, Mus musculus
  siRNA target sequence for Epha4 (NM_007936.2,1738-1756).
gccgaagacggagtaagta

SEQ ID NO: 501719 - DNA, 19 bp, Mus musculus
  siRNA target sequence for Epha4 (NM_007936.2,1740-1758).
cgaagacggagtaagtaca

SEQ ID NO: 501720 - DNA, 19 bp, Mus musculus
  siRNA target sequence for Epha4 (NM_007936.2,1820-1838).
ggatccctttacatacgaa

SEQ ID NO: 501721 - DNA, 19 bp, Mus musculus
  siRNA target sequence for Epha4 (NM_007936.2,1877-1895).
cgatgcatcctgcattaaa

SEQ ID NO: 501722 - DNA, 19 bp, Mus musculus
  siRNA target sequence for Epha4 (NM_007936.2,2085-2103).
gaaggcgttgtcaccaaat

SEQ ID NO: 501723 - DNA, 19 bp, Mus musculus
  siRNA target sequence for Epha4 (NM_007936.2,2088-2106).
ggcgttgtcaccaaatgta

SEQ ID NO: 501724 - DNA, 19 bp, Mus musculus
  siRNA target sequence for Epha4 (NM_007936.2,2089-2107).
gcgttgtcaccaaatgtaa

SEQ ID NO: 501725 - DNA, 19 bp, Mus musculus
  siRNA target sequence for Epha4 (NM_007936.2,2104-2122).
gtaaaccggtaatgatcat

SEQ ID NO: 501726 - DNA, 19 bp, Mus musculus
  siRNA target sequence for Epha4 (NM_007936.2,2176-2194).
gccgctttacagtcattca

SEQ ID NO: 501727 - DNA, 19 bp, Mus musculus
  siRNA target sequence for Epha4 (NM_007936.2,2225-2243).
ggggatgaagtacttatct

SEQ ID NO: 501728 - DNA, 19 bp, Mus musculus
  siRNA target sequence for Epha4 (NM_007936.2,2228-2246).
gatgaagtacttatctgat

SEQ ID NO: 501729 - DNA, 19 bp, Mus musculus
  siRNA target sequence for Epha4 (NM_007936.2,2374-2392).
ggggtggcaagattcctat

SEQ ID NO: 501730 - DNA, 19 bp, Mus musculus
  siRNA target sequence for Epha4 (NM_007936.2,2398-2416).
ggactgcgccagaagcaat

SEQ ID NO: 501731 - DNA, 19 bp, Mus musculus
  siRNA target sequence for Epha4 (NM_007936.2,2399-2417).
gactgcgccagaagcaatt

SEQ ID NO: 501732 - DNA, 19 bp, Mus musculus
  siRNA target sequence for Epha4 (NM_007936.2,2412-2430).
gcaattgcgtatcgtaaat

SEQ ID NO: 501733 - DNA, 19 bp, Mus musculus
  siRNA target sequence for Epha4 (NM_007936.2,2413-2431).
caattgcgtatcgtaaatt

SEQ ID NO: 501734 - DNA, 19 bp, Mus musculus
  siRNA target sequence for Epha4 (NM_007936.2,2418-2436).
gcgtatcgtaaatttacct

SEQ ID NO: 501735 - DNA, 19 bp, Mus musculus
  siRNA target sequence for Epha4 (NM_007936.2,2450-2468).
ctggagctacggaatcgtt

SEQ ID NO: 501736 - DNA, 19 bp, Mus musculus
  siRNA target sequence for Epha4 (NM_007936.2,2452-2470).
ggagctacggaatcgttat

SEQ ID NO: 501737 - DNA, 19 bp, Mus musculus
  siRNA target sequence for Epha4 (NM_007936.2,2584-2602).
ccctccatcagttaatgct

SEQ ID NO: 501738 - DNA, 19 bp, Mus musculus
  siRNA target sequence for Epha4 (NM_007936.2,2623-2641).
gaagtgacaggcctaaatt

SEQ ID NO: 501739 - DNA, 19 bp, Mus musculus
  siRNA target sequence for Epha4 (NM_007936.2,2834-2852).
cgggtacacgacactagaa

SEQ ID NO: 501740 - DNA, 19 bp, Mus musculus
  siRNA target sequence for Epha4 (NM_007936.2,2901-2919).
gccatcacgcaccagaata

SEQ ID NO: 501741 - DNA, 19 bp, Mus musculus
  siRNA target sequence for Epha4 (NM_007936.2,2902-2920).
ccatcacgcaccagaataa

SEQ ID NO: 501742 - DNA, 19 bp, Mus musculus
  siRNA target sequence for Epha4 (NM_007936.2,2906-2924).
cacgcaccagaataagatt

SEQ ID NO: 501743 - DNA, 19 bp, Mus musculus
  siRNA target sequence for Epha4 (NM_007936.2,2908-2926).
cgcaccagaataagatttt

SEQ ID NO: 501744 - DNA, 19 bp, Mus musculus
  siRNA target sequence for Epha4 (NM_007936.2,2910-2928).
caccagaataagattttga

SEQ ID NO: 501745 - DNA, 19 bp, Mus musculus
  siRNA target sequence for Epha5 (NM_007937.1,590-608).
gccccagcaacgaagtgaa

SEQ ID NO: 501746 - DNA, 19 bp, Mus musculus
  siRNA target sequence for Epha5 (NM_007937.1,592-610).
cccagcaacgaagtgaatt

SEQ ID NO: 501747 - DNA, 19 bp, Mus musculus
  siRNA target sequence for Epha5 (NM_007937.1,593-611).
ccagcaacgaagtgaattt

SEQ ID NO: 501748 - DNA, 19 bp, Mus musculus
  siRNA target sequence for Epha5 (NM_007937.1,663-681).
gaacgggtgggaagagatt

SEQ ID NO: 501749 - DNA, 19 bp, Mus musculus
  siRNA target sequence for Epha5 (NM_007937.1,768-786).
cagttggatctctaacgaa

SEQ ID NO: 501750 - DNA, 19 bp, Mus musculus
  siRNA target sequence for Epha5 (NM_007937.1,787-805).
ggtgcttccagaatcttta

SEQ ID NO: 501751 - DNA, 19 bp, Mus musculus
  siRNA target sequence for Epha5 (NM_007937.1,808-826).
gaactcaagtttactttaa

SEQ ID NO: 501752 - DNA, 19 bp, Mus musculus
  siRNA target sequence for Epha5 (NM_007937.1,847-865).
ggaggactggggacttgta

SEQ ID NO: 501753 - DNA, 19 bp, Mus musculus
  siRNA target sequence for Epha5 (NM_007937.1,863-881).
gtaaggagacatttaacat

SEQ ID NO: 501754 - DNA, 19 bp, Mus musculus
  siRNA target sequence for Epha5 (NM_007937.1,867-885).
ggagacatttaacatgtat

SEQ ID NO: 501755 - DNA, 19 bp, Mus musculus
  siRNA target sequence for Epha5 (NM_007937.1,906-924).
gaatgggagaagtatcaaa

SEQ ID NO: 501756 - DNA, 19 bp, Mus musculus
  siRNA target sequence for Epha5 (NM_007937.1,917-935).
gtatcaaagagaaccaata

SEQ ID NO: 501757 - DNA, 19 bp, Mus musculus
  siRNA target sequence for Epha5 (NM_007937.1,927-945).
gaaccaatacatcaagatt

SEQ ID NO: 501758 - DNA, 19 bp, Mus musculus
  siRNA target sequence for Epha5 (NM_007937.1,930-948).
ccaatacatcaagattgat

SEQ ID NO: 501759 - DNA, 19 bp, Mus musculus
  siRNA target sequence for Epha5 (NM_007937.1,968-986).
gcttcacagaacttgatct

SEQ ID NO: 501760 - DNA, 19 bp, Mus musculus
  siRNA target sequence for Epha5 (NM_007937.1,991-1009).
gaccgtgtcatgaaactga

SEQ ID NO: 501761 - DNA, 19 bp, Mus musculus
  siRNA target sequence for Epha5 (NM_007937.1,994-1012).
cgtgtcatgaaactgaata

SEQ ID NO: 501762 - DNA, 19 bp, Mus musculus
  siRNA target sequence for Epha5 (NM_007937.1,1027-1045).
gtcggacctctgagcaaaa

SEQ ID NO: 501763 - DNA, 19 bp, Mus musculus
  siRNA target sequence for Epha5 (NM_007937.1,1038-1056).
gagcaaaaagggattttat

SEQ ID NO: 501764 - DNA, 19 bp, Mus musculus
  siRNA target sequence for Epha5 (NM_007937.1,1097-1115).
ctgtccgtgtctactataa

SEQ ID NO: 501765 - DNA, 19 bp, Mus musculus
  siRNA target sequence for Epha5 (NM_007937.1,1099-1117).
gtccgtgtctactataaaa

SEQ ID NO: 501766 - DNA, 19 bp, Mus musculus
  siRNA target sequence for Epha5 (NM_007937.1,1102-1120).
cgtgtctactataaaaagt

SEQ ID NO: 501767 - DNA, 19 bp, Mus musculus
  siRNA target sequence for Epha5 (NM_007937.1,1119-1137).
gtgtccctctgtagtaaga

SEQ ID NO: 501768 - DNA, 19 bp, Mus musculus
  siRNA target sequence for Epha5 (NM_007937.1,1201-1219).
ggctcctgcgtcaaccatt

SEQ ID NO: 501769 - DNA, 19 bp, Mus musculus
  siRNA target sequence for Epha5 (NM_007937.1,1205-1223).
cctgcgtcaaccattctgt

SEQ ID NO: 501770 - DNA, 19 bp, Mus musculus
  siRNA target sequence for Epha5 (NM_007937.1,1231-1249).
gatcctcccaagatgcatt

SEQ ID NO: 501771 - DNA, 19 bp, Mus musculus
  siRNA target sequence for Epha5 (NM_007937.1,1293-1311).
gtgcaaggctggatatgaa

SEQ ID NO: 501772 - DNA, 19 bp, Mus musculus
  siRNA target sequence for Epha5 (NM_007937.1,1584-1602).
cagtcgaagatttgagttt

SEQ ID NO: 501773 - DNA, 19 bp, Mus musculus
  siRNA target sequence for Epha5 (NM_007937.1,1588-1606).
cgaagatttgagtttgaaa

SEQ ID NO: 501774 - DNA, 19 bp, Mus musculus
  siRNA target sequence for Epha5 (NM_007937.1,1673-1691).
cagtgggagtcatcttgtt

SEQ ID NO: 501775 - DNA, 19 bp, Mus musculus
  siRNA target sequence for Epha5 (NM_007937.1,1771-1789).
gcccatccaagcctaatat

SEQ ID NO: 501776 - DNA, 19 bp, Mus musculus
  siRNA target sequence for Epha5 (NM_007937.1,1866-1884).
gccaggagtcagaacctat

SEQ ID NO: 501777 - DNA, 19 bp, Mus musculus
  siRNA target sequence for Epha5 (NM_007937.1,1871-1889).
gagtcagaacctatattga

SEQ ID NO: 501778 - DNA, 19 bp, Mus musculus
  siRNA target sequence for Epha5 (NM_007937.1,1910-1928).
ccaatcaagctgttcatga

SEQ ID NO: 501779 - DNA, 19 bp, Mus musculus
  siRNA target sequence for Epha5 (NM_007937.1,1911-1929).
caatcaagctgttcatgaa

SEQ ID NO: 501780 - DNA, 19 bp, Mus musculus
  siRNA target sequence for Epha5 (NM_007937.1,2077-2095).
gaaaagcagcgcagagatt

SEQ ID NO: 501781 - DNA, 19 bp, Mus musculus
  siRNA target sequence for Epha5 (NM_007937.1,2097-2115).
cctgggtgaagcaagtatt

SEQ ID NO: 501782 - DNA, 19 bp, Mus musculus
  siRNA target sequence for Epha5 (NM_007937.1,2098-2116).
ctgggtgaagcaagtatta

SEQ ID NO: 501783 - DNA, 19 bp, Mus musculus
  siRNA target sequence for Epha5 (NM_007937.1,2120-2138).
ggcagttcgatcatccaaa

SEQ ID NO: 501784 - DNA, 19 bp, Mus musculus
  siRNA target sequence for Epha5 (NM_007937.1,2209-2227).
ggctccttagacacgtttt

SEQ ID NO: 501785 - DNA, 19 bp, Mus musculus
  siRNA target sequence for Epha5 (NM_007937.1,2243-2261).
ggcagttcactgtgattca

SEQ ID NO: 501786 - DNA, 19 bp, Mus musculus
  siRNA target sequence for Epha5 (NM_007937.1,2435-2453).
ccacaaggggaggcaaaat

SEQ ID NO: 501787 - DNA, 19 bp, Mus musculus
  siRNA target sequence for Epha5 (NM_007937.1,2436-2454).
cacaaggggaggcaaaatt

SEQ ID NO: 501788 - DNA, 19 bp, Mus musculus
  siRNA target sequence for Epha5 (NM_007937.1,2441-2459).
ggggaggcaaaattccaat

SEQ ID NO: 501789 - DNA, 19 bp, Mus musculus
  siRNA target sequence for Epha5 (NM_007937.1,2446-2464).
ggcaaaattccaatcagat

SEQ ID NO: 501790 - DNA, 19 bp, Mus musculus
  siRNA target sequence for Epha5 (NM_007937.1,2476-2494).
gaggcaatagcttttcgaa

SEQ ID NO: 501791 - DNA, 19 bp, Mus musculus
  siRNA target sequence for Epha5 (NM_007937.1,2480-2498).
caatagcttttcgaaagtt

SEQ ID NO: 501792 - DNA, 19 bp, Mus musculus
  siRNA target sequence for Epha5 (NM_007937.1,2533-2551).
gtaatgtgggaagttgtat

SEQ ID NO: 501793 - DNA, 19 bp, Mus musculus
  siRNA target sequence for Epha5 (NM_007937.1,2648-2666).
ctgctctctatcaattaat

SEQ ID NO: 501794 - DNA, 19 bp, Mus musculus
  siRNA target sequence for Epha5 (NM_007937.1,2651-2669).
ctctctatcaattaatgct

SEQ ID NO: 501795 - DNA, 19 bp, Mus musculus
  siRNA target sequence for Epha5 (NM_007937.1,2696-2714).
gcaggcccaagtttgatga

SEQ ID NO: 501796 - DNA, 19 bp, Mus musculus
  siRNA target sequence for Epha5 (NM_007937.1,2702-2720).
ccaagtttgatgaaatcgt

SEQ ID NO: 501797 - DNA, 19 bp, Mus musculus
  siRNA target sequence for Epha5 (NM_007937.1,2728-2746).
ctggacaaactgatacgaa

SEQ ID NO: 501798 - DNA, 19 bp, Mus musculus
  siRNA target sequence for Epha5 (NM_007937.1,2780-2798).
cgagcagagtgtctacatt

SEQ ID NO: 501799 - DNA, 19 bp, Mus musculus
  siRNA target sequence for Epha5 (NM_007937.1,2783-2801).
gcagagtgtctacattgtt

SEQ ID NO: 501800 - DNA, 19 bp, Mus musculus
  siRNA target sequence for Epha5 (NM_007937.1,2852-2870).
ggctggaagcaatcaaaat

SEQ ID NO: 501801 - DNA, 19 bp, Mus musculus
  siRNA target sequence for Epha5 (NM_007937.1,2871-2889).
gggtcggtacacagagatt

SEQ ID NO: 501802 - DNA, 19 bp, Mus musculus
  siRNA target sequence for Epha5 (NM_007937.1,2872-2890).
ggtcggtacacagagattt

SEQ ID NO: 501803 - DNA, 19 bp, Mus musculus
  siRNA target sequence for Epha5 (NM_007937.1,2873-2891).
gtcggtacacagagatttt

SEQ ID NO: 501804 - DNA, 19 bp, Mus musculus
  siRNA target sequence for Epha5 (NM_007937.1,2875-2893).
cggtacacagagattttca

SEQ ID NO: 501805 - DNA, 19 bp, Mus musculus
  siRNA target sequence for Epha5 (NM_007937.1,2892-2910).
catggaaaatggatacagt

SEQ ID NO: 501806 - DNA, 19 bp, Mus musculus
  siRNA target sequence for Epha6 (NM_007938.1,293-311).
ctgcgaagtccgggaattt

SEQ ID NO: 501807 - DNA, 19 bp, Mus musculus
  siRNA target sequence for Epha6 (NM_007938.1,295-313).
gcgaagtccgggaatttct

SEQ ID NO: 501808 - DNA, 19 bp, Mus musculus
  siRNA target sequence for Epha6 (NM_007938.1,296-314).
cgaagtccgggaatttctt

SEQ ID NO: 501809 - DNA, 19 bp, Mus musculus
  siRNA target sequence for Epha6 (NM_007938.1,302-320).
ccgggaatttcttttgcaa

SEQ ID NO: 501810 - DNA, 19 bp, Mus musculus
  siRNA target sequence for Epha6 (NM_007938.1,303-321).
cgggaatttcttttgcaat

SEQ ID NO: 501811 - DNA, 19 bp, Mus musculus
  siRNA target sequence for Epha6 (NM_007938.1,384-402).
gttgtgttgcttgatacaa

SEQ ID NO: 501812 - DNA, 19 bp, Mus musculus
  siRNA target sequence for Epha6 (NM_007938.1,417-435).
gaactaggatggaaaacat

SEQ ID NO: 501813 - DNA, 19 bp, Mus musculus
  siRNA target sequence for Epha6 (NM_007938.1,427-445).
ggaaaacatatccattaaa

SEQ ID NO: 501814 - DNA, 19 bp, Mus musculus
  siRNA target sequence for Epha6 (NM_007938.1,477-495).
cacaataggcccatacata

SEQ ID NO: 501815 - DNA, 19 bp, Mus musculus
  siRNA target sequence for Epha6 (NM_007938.1,508-526).
gcaatgtcatggaaccaaa

SEQ ID NO: 501816 - DNA, 19 bp, Mus musculus
  siRNA target sequence for Epha6 (NM_007938.1,561-579).
cgtgatgctgcacagaaaa

SEQ ID NO: 501817 - DNA, 19 bp, Mus musculus
  siRNA target sequence for Epha6 (NM_007938.1,701-719).
caagccaagccaatatata

SEQ ID NO: 501818 - DNA, 19 bp, Mus musculus
  siRNA target sequence for Epha6 (NM_007938.1,705-723).
ccaagccaatatataaaga

SEQ ID NO: 501819 - DNA, 19 bp, Mus musculus
  siRNA target sequence for Epha6 (NM_007938.1,706-724).
caagccaatatataaagat

SEQ ID NO: 501820 - DNA, 19 bp, Mus musculus
  siRNA target sequence for Epha6 (NM_007938.1,735-753).
gctgctgatgagagtttta

SEQ ID NO: 501821 - DNA, 19 bp, Mus musculus
  siRNA target sequence for Epha6 (NM_007938.1,767-785).
gggtgaccgcatccttaaa

SEQ ID NO: 501822 - DNA, 19 bp, Mus musculus
  siRNA target sequence for Epha6 (NM_007938.1,769-787).
gtgaccgcatccttaaact

SEQ ID NO: 501823 - DNA, 19 bp, Mus musculus
  siRNA target sequence for Epha6 (NM_007938.1,802-820).
gtgaggtggggcctataga

SEQ ID NO: 501824 - DNA, 19 bp, Mus musculus
  siRNA target sequence for Epha6 (NM_007938.1,839-857).
ggcttttcaagatattgga

SEQ ID NO: 501825 - DNA, 19 bp, Mus musculus
  siRNA target sequence for Epha6 (NM_007938.1,877-895).
cagtccgagttttctacaa

SEQ ID NO: 501826 - DNA, 19 bp, Mus musculus
  siRNA target sequence for Epha6 (NM_007938.1,882-900).
cgagttttctacaaaaaat

SEQ ID NO: 501827 - DNA, 19 bp, Mus musculus
  siRNA target sequence for Epha6 (NM_007938.1,941-959).
catcccaagggttgattct

SEQ ID NO: 501828 - DNA, 19 bp, Mus musculus
  siRNA target sequence for Epha6 (NM_007938.1,980-998).
gggctcatgtgtaaagagt

SEQ ID NO: 501829 - DNA, 19 bp, Mus musculus
  siRNA target sequence for Epha6 (NM_007938.1,1008-1026).
cgagatactcctaaactct

SEQ ID NO: 501830 - DNA, 19 bp, Mus musculus
  siRNA target sequence for Epha6 (NM_007938.1,1009-1027).
gagatactcctaaactcta

SEQ ID NO: 501831 - DNA, 19 bp, Mus musculus
  siRNA target sequence for Epha6 (NM_007938.1,1056-1074).
cctcttggaaggtgtatct

SEQ ID NO: 501832 - DNA, 19 bp, Mus musculus
  siRNA target sequence for Epha6 (NM_007938.1,1075-1093).
gcagtacagggtatgaaga

SEQ ID NO: 501833 - DNA, 19 bp, Mus musculus
  siRNA target sequence for Epha6 (NM_007938.1,1078-1096).
gtacagggtatgaagaaat

SEQ ID NO: 501834 - DNA, 19 bp, Mus musculus
  siRNA target sequence for Epha6 (NM_007938.1,1138-1156).
catttgctgggaacacaaa

SEQ ID NO: 501835 - DNA, 19 bp, Mus musculus
  siRNA target sequence for Epha6 (NM_007938.1,1453-1471).
gacacactggactgatcaa

SEQ ID NO: 501836 - DNA, 19 bp, Mus musculus
  siRNA target sequence for Epha6 (NM_007938.1,1455-1473).
cacactggactgatcaaca

SEQ ID NO: 501837 - DNA, 19 bp, Mus musculus
  siRNA target sequence for Epha6 (NM_007938.1,1497-1515).
gtgtctcacgtcaattata

SEQ ID NO: 501838 - DNA, 19 bp, Mus musculus
  siRNA target sequence for Epha6 (NM_007938.1,1605-1623).
gcaccttctctgattggta

SEQ ID NO: 501839 - DNA, 19 bp, Mus musculus
  siRNA target sequence for Epha6 (NM_007938.1,1606-1624).
caccttctctgattggtat

SEQ ID NO: 501840 - DNA, 19 bp, Mus musculus
  siRNA target sequence for Epha6 (NM_007938.1,1614-1632).
ctgattggtatgatgagaa

SEQ ID NO: 501841 - DNA, 19 bp, Mus musculus
  siRNA target sequence for Epha6 (NM_007938.1,1693-1711).
gagctattctggactatga

SEQ ID NO: 501842 - DNA, 19 bp, Mus musculus
  siRNA target sequence for Epha6 (NM_007938.1,1949-1967).
cgggggattcactctctta

SEQ ID NO: 501843 - DNA, 19 bp, Mus musculus
  siRNA target sequence for Epha6 (NM_007938.1,1951-1969).
ggggattcactctcttagt

SEQ ID NO: 501844 - DNA, 19 bp, Mus musculus
  siRNA target sequence for Epha6 (NM_007938.1,2000-2018).
gaggtgtcaatggtacata

SEQ ID NO: 501845 - DNA, 19 bp, Mus musculus
  siRNA target sequence for Epha6 (NM_007938.1,2002-2020).
ggtgtcaatggtacataaa

SEQ ID NO: 501846 - DNA, 19 bp, Mus musculus
  siRNA target sequence for Epha6 (NM_007938.1,2011-2029).
ggtacataaaggccaaaat

SEQ ID NO: 501847 - DNA, 19 bp, Mus musculus
  siRNA target sequence for Epha6 (NM_007938.1,2073-2091).
ctgcgcttcccgggaatta

SEQ ID NO: 501848 - DNA, 19 bp, Mus musculus
  siRNA target sequence for Epha6 (NM_007938.1,2075-2093).
gcgcttcccgggaattaaa

SEQ ID NO: 501849 - DNA, 19 bp, Mus musculus
  siRNA target sequence for Epha6 (NM_007938.1,2076-2094).
cgcttcccgggaattaaaa

SEQ ID NO: 501850 - DNA, 19 bp, Mus musculus
  siRNA target sequence for Epha6 (NM_007938.1,2078-2096).
cttcccgggaattaaaaca

SEQ ID NO: 501851 - DNA, 19 bp, Mus musculus
  siRNA target sequence for Epha6 (NM_007938.1,2082-2100).
ccgggaattaaaacataca

SEQ ID NO: 501852 - DNA, 19 bp, Mus musculus
  siRNA target sequence for Epha6 (NM_007938.1,2083-2101).
cgggaattaaaacatacat

SEQ ID NO: 501853 - DNA, 19 bp, Mus musculus
  siRNA target sequence for Epha6 (NM_007938.1,2128-2146).
ccctagcagtccacgaatt

SEQ ID NO: 501854 - DNA, 19 bp, Mus musculus
  siRNA target sequence for Epha6 (NM_007938.1,2129-2147).
cctagcagtccacgaattt

SEQ ID NO: 501855 - DNA, 19 bp, Mus musculus
  siRNA target sequence for Epha6 (NM_007938.1,2248-2266).
gggagatcccagttgcaat

SEQ ID NO: 501856 - DNA, 19 bp, Mus musculus
  siRNA target sequence for Epha6 (NM_007938.1,2249-2267).
ggagatcccagttgcaatt

SEQ ID NO: 501857 - DNA, 19 bp, Mus musculus
  siRNA target sequence for Epha6 (NM_007938.1,2255-2273).
cccagttgcaattaaaaca

SEQ ID NO: 501858 - DNA, 19 bp, Mus musculus
  siRNA target sequence for Epha6 (NM_007938.1,2256-2274).
ccagttgcaattaaaacat

SEQ ID NO: 501859 - DNA, 19 bp, Mus musculus
  siRNA target sequence for Epha6 (NM_007938.1,2257-2275).
cagttgcaattaaaacatt

SEQ ID NO: 501860 - DNA, 19 bp, Mus musculus
  siRNA target sequence for Epha6 (NM_007938.1,2285-2303).
ccacatggaccgacaaaga

SEQ ID NO: 501861 - DNA, 19 bp, Mus musculus
  siRNA target sequence for Epha6 (NM_007938.1,2286-2304).
cacatggaccgacaaagaa

SEQ ID NO: 501862 - DNA, 19 bp, Mus musculus
  siRNA target sequence for Epha6 (NM_007938.1,2288-2306).
catggaccgacaaagaaga

SEQ ID NO: 501863 - DNA, 19 bp, Mus musculus
  siRNA target sequence for Epha6 (NM_007938.1,2294-2312).
ccgacaaagaagagatttt

SEQ ID NO: 501864 - DNA, 19 bp, Mus musculus
  siRNA target sequence for Epha6 (NM_007938.1,2370-2388).
ggtgttgtcactaaaagat

SEQ ID NO: 501865 - DNA, 19 bp, Mus musculus
  siRNA target sequence for Epha6 (NM_007938.1,2506-2524).
ctgcaggtcggccagtaat

SEQ ID NO: 501866 - DNA, 19 bp, Mus musculus
  siRNA target sequence for Epha6 (NM_007938.1,2508-2526).
gcaggtcggccagtaatga

SEQ ID NO: 501867 - DNA, 19 bp, Mus musculus
  siRNA target sequence for Epha6 (NM_007938.1,2509-2527).
caggtcggccagtaatgat

SEQ ID NO: 501868 - DNA, 19 bp, Mus musculus
  siRNA target sequence for Epha6 (NM_007938.1,2518-2536).
cagtaatgatcgtagtaga

SEQ ID NO: 501869 - DNA, 19 bp, Mus musculus
  siRNA target sequence for Epha6 (NM_007938.1,2550-2568).
ggatcactggactcctttt

SEQ ID NO: 501870 - DNA, 19 bp, Mus musculus
  siRNA target sequence for Epha6 (NM_007938.1,2551-2569).
gatcactggactccttttt

SEQ ID NO: 501871 - DNA, 19 bp, Mus musculus
  siRNA target sequence for Epha6 (NM_007938.1,2627-2645).
cgcgtcaggcatgaagtat

SEQ ID NO: 501872 - DNA, 19 bp, Mus musculus
  siRNA target sequence for Epha6 (NM_007938.1,2741-2759).
ccgagtgctggaagatgat

SEQ ID NO: 501873 - DNA, 19 bp, Mus musculus
  siRNA target sequence for Epha6 (NM_007938.1,2820-2838).
gctattgcttacagaaagt

SEQ ID NO: 501874 - DNA, 19 bp, Mus musculus
  siRNA target sequence for Epha6 (NM_007938.1,2821-2839).
ctattgcttacagaaagtt

SEQ ID NO: 501875 - DNA, 19 bp, Mus musculus
  siRNA target sequence for Epha6 (NM_007938.1,3035-3053).
ccacaggccaaaattcact

SEQ ID NO: 501876 - DNA, 19 bp, Mus musculus
  siRNA target sequence for Epha6 (NM_007938.1,3059-3077).
cgtcagcttccttgacaaa

SEQ ID NO: 501877 - DNA, 19 bp, Mus musculus
  siRNA target sequence for Epha6 (NM_007938.1,3064-3082).
gcttccttgacaaactgat

SEQ ID NO: 501878 - DNA, 19 bp, Mus musculus
  siRNA target sequence for Epha6 (NM_007938.1,3180-3198).
ggtgactggctggattcta

SEQ ID NO: 501879 - DNA, 19 bp, Mus musculus
  siRNA target sequence for Epha6 (NM_007938.1,3181-3199).
gtgactggctggattctat

SEQ ID NO: 501880 - DNA, 19 bp, Mus musculus
  siRNA target sequence for Epha6 (NM_007938.1,3227-3245).
catggcagcgggttttaca

SEQ ID NO: 501881 - DNA, 19 bp, Mus musculus
  siRNA target sequence for Epha6 (NM_007938.1,3264-3282).
cgaatgagcatcgatgata

SEQ ID NO: 501882 - DNA, 19 bp, Mus musculus
  siRNA target sequence for Epha6 (NM_007938.1,3265-3283).
gaatgagcatcgatgatat

SEQ ID NO: 501883 - DNA, 19 bp, Mus musculus
  siRNA target sequence for Epha6 (NM_007938.1,3286-3304).
ggcgaattggagtcattct

SEQ ID NO: 501884 - DNA, 19 bp, Mus musculus
  siRNA target sequence for Epha6 (NM_007938.1,3288-3306).
cgaattggagtcattctca

SEQ ID NO: 501885 - DNA, 19 bp, Mus musculus
  siRNA target sequence for Epha6 (NM_007938.1,3310-3328).
gacatcagagacgaatagt

SEQ ID NO: 501886 - DNA, 19 bp, Mus musculus
  siRNA target sequence for Epha6 (NM_007938.1,3335-3353).
catacaaactttacgttta

SEQ ID NO: 501887 - DNA, 19 bp, Mus musculus
  siRNA target sequence for Epha6 (NM_007938.1,3339-3357).
caaactttacgtttacata

SEQ ID NO: 501888 - DNA, 19 bp, Mus musculus
  siRNA target sequence for Epha6 (NM_007938.1,3343-3361).
ctttacgtttacatatgat

SEQ ID NO: 501889 - DNA, 19 bp, Mus musculus
  siRNA target sequence for Epha6 (NM_007938.1,3372-3390).
gaaaaaggatttcatgtat

SEQ ID NO: 501890 - DNA, 19 bp, Mus musculus
  siRNA target sequence for Epha7 (NM_010141.2,248-266).
cggttcccttcgtggatta

SEQ ID NO: 501891 - DNA, 19 bp, Mus musculus
  siRNA target sequence for Epha7 (NM_010141.2,249-267).
ggttcccttcgtggattat

SEQ ID NO: 501892 - DNA, 19 bp, Mus musculus
  siRNA target sequence for Epha7 (NM_010141.2,250-268).
gttcccttcgtggattatt

SEQ ID NO: 501893 - DNA, 19 bp, Mus musculus
  siRNA target sequence for Epha7 (NM_010141.2,254-272).
ccttcgtggattattttgt

SEQ ID NO: 501894 - DNA, 19 bp, Mus musculus
  siRNA target sequence for Epha7 (NM_010141.2,316-334).
ggctgcgaaggaagtacta

SEQ ID NO: 501895 - DNA, 19 bp, Mus musculus
  siRNA target sequence for Epha7 (NM_010141.2,318-336).
ctgcgaaggaagtactatt

SEQ ID NO: 501896 - DNA, 19 bp, Mus musculus
  siRNA target sequence for Epha7 (NM_010141.2,321-339).
cgaaggaagtactattact

SEQ ID NO: 501897 - DNA, 19 bp, Mus musculus
  siRNA target sequence for Epha7 (NM_010141.2,340-358).
ggactcgaaagcacaacaa

SEQ ID NO: 501898 - DNA, 19 bp, Mus musculus
  siRNA target sequence for Epha7 (NM_010141.2,341-359).
gactcgaaagcacaacaaa

SEQ ID NO: 501899 - DNA, 19 bp, Mus musculus
  siRNA target sequence for Epha7 (NM_010141.2,421-439).
gaactacactccgataaga

SEQ ID NO: 501900 - DNA, 19 bp, Mus musculus
  siRNA target sequence for Epha7 (NM_010141.2,424-442).
ctacactccgataagaaca

SEQ ID NO: 501901 - DNA, 19 bp, Mus musculus
  siRNA target sequence for Epha7 (NM_010141.2,485-503).
ctgcggactaactggattt

SEQ ID NO: 501902 - DNA, 19 bp, Mus musculus
  siRNA target sequence for Epha7 (NM_010141.2,509-527).
ggcaacgcacaaaggattt

SEQ ID NO: 501903 - DNA, 19 bp, Mus musculus
  siRNA target sequence for Epha7 (NM_010141.2,547-565).
cttgagggattgtaatagt

SEQ ID NO: 501904 - DNA, 19 bp, Mus musculus
  siRNA target sequence for Epha7 (NM_010141.2,597-615).
cgtttaatttgtactatta

SEQ ID NO: 501905 - DNA, 19 bp, Mus musculus
  siRNA target sequence for Epha7 (NM_010141.2,598-616).
gtttaatttgtactattat

SEQ ID NO: 501906 - DNA, 19 bp, Mus musculus
  siRNA target sequence for Epha7 (NM_010141.2,628-646).
cgacaccggcaggaatata

SEQ ID NO: 501907 - DNA, 19 bp, Mus musculus
  siRNA target sequence for Epha7 (NM_010141.2,631-649).
caccggcaggaatatacga

SEQ ID NO: 501908 - DNA, 19 bp, Mus musculus
  siRNA target sequence for Epha7 (NM_010141.2,639-657).
ggaatatacgagaaaacct

SEQ ID NO: 501909 - DNA, 19 bp, Mus musculus
  siRNA target sequence for Epha7 (NM_010141.2,640-658).
gaatatacgagaaaacctt

SEQ ID NO: 501910 - DNA, 19 bp, Mus musculus
  siRNA target sequence for Epha7 (NM_010141.2,647-665).
cgagaaaacctttatgtta

SEQ ID NO: 501911 - DNA, 19 bp, Mus musculus
  siRNA target sequence for Epha7 (NM_010141.2,763-781).
gtccaaaaagggattctat

SEQ ID NO: 501912 - DNA, 19 bp, Mus musculus
  siRNA target sequence for Epha7 (NM_010141.2,793-811).
ggatgtaggggcttgcata

SEQ ID NO: 501913 - DNA, 19 bp, Mus musculus
  siRNA target sequence for Epha7 (NM_010141.2,797-815).
gtaggggcttgcatagcat

SEQ ID NO: 501914 - DNA, 19 bp, Mus musculus
  siRNA target sequence for Epha7 (NM_010141.2,887-905).
gtgactggttcggaatttt

SEQ ID NO: 501915 - DNA, 19 bp, Mus musculus
  siRNA target sequence for Epha7 (NM_010141.2,1000-1018).
gctagtacccattggaaaa

SEQ ID NO: 501916 - DNA, 19 bp, Mus musculus
  siRNA target sequence for Epha7 (NM_010141.2,1180-1198).
ctacagagctccttctgat

SEQ ID NO: 501917 - DNA, 19 bp, Mus musculus
  siRNA target sequence for Epha7 (NM_010141.2,1230-1248).
ctgcaccacagaaccttat

SEQ ID NO: 501918 - DNA, 19 bp, Mus musculus
  siRNA target sequence for Epha7 (NM_010141.2,1232-1250).
gcaccacagaaccttattt

SEQ ID NO: 501919 - DNA, 19 bp, Mus musculus
  siRNA target sequence for Epha7 (NM_010141.2,1235-1253).
ccacagaaccttattttca

SEQ ID NO: 501920 - DNA, 19 bp, Mus musculus
  siRNA target sequence for Epha7 (NM_010141.2,1258-1276).
caatcaaacgactgtaagt

SEQ ID NO: 501921 - DNA, 19 bp, Mus musculus
  siRNA target sequence for Epha7 (NM_010141.2,1300-1318).
caacgggggaagaaacgat

SEQ ID NO: 501922 - DNA, 19 bp, Mus musculus
  siRNA target sequence for Epha7 (NM_010141.2,1315-1333).
cgatgtcacctacagaata

SEQ ID NO: 501923 - DNA, 19 bp, Mus musculus
  siRNA target sequence for Epha7 (NM_010141.2,1368-1386).
gtgtgccatgcggaagtaa

SEQ ID NO: 501924 - DNA, 19 bp, Mus musculus
  siRNA target sequence for Epha7 (NM_010141.2,1370-1388).
gtgccatgcggaagtaaca

SEQ ID NO: 501925 - DNA, 19 bp, Mus musculus
  siRNA target sequence for Epha7 (NM_010141.2,1372-1390).
gccatgcggaagtaacatt

SEQ ID NO: 501926 - DNA, 19 bp, Mus musculus
  siRNA target sequence for Epha7 (NM_010141.2,1377-1395).
gcggaagtaacattggata

SEQ ID NO: 501927 - DNA, 19 bp, Mus musculus
  siRNA target sequence for Epha7 (NM_010141.2,1401-1419).
cccagcagacgggattaga

SEQ ID NO: 501928 - DNA, 19 bp, Mus musculus
  siRNA target sequence for Epha7 (NM_010141.2,1410-1428).
cgggattagaggataacta

SEQ ID NO: 501929 - DNA, 19 bp, Mus musculus
  siRNA target sequence for Epha7 (NM_010141.2,1411-1429).
gggattagaggataactat

SEQ ID NO: 501930 - DNA, 19 bp, Mus musculus
  siRNA target sequence for Epha7 (NM_010141.2,1444-1462).
cctacttgcccatgcaaat

SEQ ID NO: 501931 - DNA, 19 bp, Mus musculus
  siRNA target sequence for Epha7 (NM_010141.2,1448-1466).
cttgcccatgcaaattaca

SEQ ID NO: 501932 - DNA, 19 bp, Mus musculus
  siRNA target sequence for Epha7 (NM_010141.2,1451-1469).
gcccatgcaaattacactt

SEQ ID NO: 501933 - DNA, 19 bp, Mus musculus
  siRNA target sequence for Epha7 (NM_010141.2,1452-1470).
cccatgcaaattacacttt

SEQ ID NO: 501934 - DNA, 19 bp, Mus musculus
  siRNA target sequence for Epha7 (NM_010141.2,1669-1687).
gtattatgagaaagatcaa

SEQ ID NO: 501935 - DNA, 19 bp, Mus musculus
  siRNA target sequence for Epha7 (NM_010141.2,1696-1714).
gacgtactcaacactcaaa

SEQ ID NO: 501936 - DNA, 19 bp, Mus musculus
  siRNA target sequence for Epha7 (NM_010141.2,1722-1740).
ccacctccgcctccattaa

SEQ ID NO: 501937 - DNA, 19 bp, Mus musculus
  siRNA target sequence for Epha7 (NM_010141.2,1723-1741).
cacctccgcctccattaat

SEQ ID NO: 501938 - DNA, 19 bp, Mus musculus
  siRNA target sequence for Epha7 (NM_010141.2,1725-1743).
cctccgcctccattaataa

SEQ ID NO: 501939 - DNA, 19 bp, Mus musculus
  siRNA target sequence for Epha7 (NM_010141.2,1726-1744).
ctccgcctccattaataat

SEQ ID NO: 501940 - DNA, 19 bp, Mus musculus
  siRNA target sequence for Epha7 (NM_010141.2,1728-1746).
ccgcctccattaataatct

SEQ ID NO: 501941 - DNA, 19 bp, Mus musculus
  siRNA target sequence for Epha7 (NM_010141.2,1730-1748).
gcctccattaataatctga

SEQ ID NO: 501942 - DNA, 19 bp, Mus musculus
  siRNA target sequence for Epha7 (NM_010141.2,1731-1749).
cctccattaataatctgaa

SEQ ID NO: 501943 - DNA, 19 bp, Mus musculus
  siRNA target sequence for Epha7 (NM_010141.2,1758-1776).
cagtgtacgtctttcagat

SEQ ID NO: 501944 - DNA, 19 bp, Mus musculus
  siRNA target sequence for Epha7 (NM_010141.2,1786-1804).
cactgctgccggttatgga

SEQ ID NO: 501945 - DNA, 19 bp, Mus musculus
  siRNA target sequence for Epha7 (NM_010141.2,1791-1809).
ctgccggttatggaaacta

SEQ ID NO: 501946 - DNA, 19 bp, Mus musculus
  siRNA target sequence for Epha7 (NM_010141.2,1886-1904).
cagaatcctgtcatcataa

SEQ ID NO: 501947 - DNA, 19 bp, Mus musculus
  siRNA target sequence for Epha7 (NM_010141.2,1888-1906).
gaatcctgtcatcataatt

SEQ ID NO: 501948 - DNA, 19 bp, Mus musculus
  siRNA target sequence for Epha7 (NM_010141.2,1948-1966).
ggtgttcggcttcatcatt

SEQ ID NO: 501949 - DNA, 19 bp, Mus musculus
  siRNA target sequence for Epha7 (NM_010141.2,2012-2030).
gaagaactctactttcatt

SEQ ID NO: 501950 - DNA, 19 bp, Mus musculus
  siRNA target sequence for Epha7 (NM_010141.2,2043-2061).
gcaccaaaacctacattga

SEQ ID NO: 501951 - DNA, 19 bp, Mus musculus
  siRNA target sequence for Epha7 (NM_010141.2,2071-2089).
ctatgaggacccaaataga

SEQ ID NO: 501952 - DNA, 19 bp, Mus musculus
  siRNA target sequence for Epha7 (NM_010141.2,2114-2132).
ctagatgcctcctgtatta

SEQ ID NO: 501953 - DNA, 19 bp, Mus musculus
  siRNA target sequence for Epha7 (NM_010141.2,2210-2228).
gttgcagtggccataaaaa

SEQ ID NO: 501954 - DNA, 19 bp, Mus musculus
  siRNA target sequence for Epha7 (NM_010141.2,2230-2248).
cctgaaagttggttacaca

SEQ ID NO: 501955 - DNA, 19 bp, Mus musculus
  siRNA target sequence for Epha7 (NM_010141.2,2255-2273).
caaaggagggactttttat

SEQ ID NO: 501956 - DNA, 19 bp, Mus musculus
  siRNA target sequence for Epha7 (NM_010141.2,2307-2325).
caaatgtcgtccatttgga

SEQ ID NO: 501957 - DNA, 19 bp, Mus musculus
  siRNA target sequence for Epha7 (NM_010141.2,2343-2361).
ggaagcctgtcatgattgt

SEQ ID NO: 501958 - DNA, 19 bp, Mus musculus
  siRNA target sequence for Epha7 (NM_010141.2,2432-2450).
cagttggtaggaatgttga

SEQ ID NO: 501959 - DNA, 19 bp, Mus musculus
  siRNA target sequence for Epha7 (NM_010141.2,2460-2478).
ccgctgggatgcgatactt

SEQ ID NO: 501960 - DNA, 19 bp, Mus musculus
  siRNA target sequence for Epha7 (NM_010141.2,2479-2497).
ggctgatatgggatacgtt

SEQ ID NO: 501961 - DNA, 19 bp, Mus musculus
  siRNA target sequence for Epha7 (NM_010141.2,2530-2548).
caacagcaatcttgtttgt

SEQ ID NO: 501962 - DNA, 19 bp, Mus musculus
  siRNA target sequence for Epha7 (NM_010141.2,2608-2626).
cacgactggtggaaaaatt

SEQ ID NO: 501963 - DNA, 19 bp, Mus musculus
  siRNA target sequence for Epha7 (NM_010141.2,2767-2785).
cattaaagcgatagaagaa

SEQ ID NO: 501964 - DNA, 19 bp, Mus musculus
  siRNA target sequence for Epha7 (NM_010141.2,2776-2794).
gatagaagaaggttatcgt

SEQ ID NO: 501965 - DNA, 19 bp, Mus musculus
  siRNA target sequence for Epha7 (NM_010141.2,2820-2838).
ctggtcttcaccagctaat

SEQ ID NO: 501966 - DNA, 19 bp, Mus musculus
  siRNA target sequence for Epha7 (NM_010141.2,2823-2841).
gtcttcaccagctaatgct

SEQ ID NO: 501967 - DNA, 19 bp, Mus musculus
  siRNA target sequence for Epha7 (NM_010141.2,2865-2883).
cggaaaggccaaagtttga

SEQ ID NO: 501968 - DNA, 19 bp, Mus musculus
  siRNA target sequence for Epha7 (NM_010141.2,2884-2902).
gcagatagtcggaattcta

SEQ ID NO: 501969 - DNA, 19 bp, Mus musculus
  siRNA target sequence for Epha7 (NM_010141.2,2900-2918).
ctagacaaaatgattcgaa

SEQ ID NO: 501970 - DNA, 19 bp, Mus musculus
  siRNA target sequence for Epha7 (NM_010141.2,2939-2957).
cccctgggaacttgtagta

SEQ ID NO: 501971 - DNA, 19 bp, Mus musculus
  siRNA target sequence for Epha7 (NM_010141.2,3018-3036).
gagaatggttgcaagctat

SEQ ID NO: 501972 - DNA, 19 bp, Mus musculus
  siRNA target sequence for Epha7 (NM_010141.2,3020-3038).
gaatggttgcaagctatta

SEQ ID NO: 501973 - DNA, 19 bp, Mus musculus
  siRNA target sequence for Epha7 (NM_010141.2,3097-3115).
ggccaggatgactatcgat

SEQ ID NO: 501974 - DNA, 19 bp, Mus musculus
  siRNA target sequence for Epha7 (NM_010141.2,3102-3120).
ggatgactatcgatgatgt

SEQ ID NO: 501975 - DNA, 19 bp, Mus musculus
  siRNA target sequence for Epha7 (NM_010141.2,3146-3164).
ggccatcaaaagaagatca

SEQ ID NO: 501976 - DNA, 19 bp, Mus musculus
  siRNA target sequence for Epha7 (NM_010141.2,3180-3198).
ctatgcgggcacaaatgtt

SEQ ID NO: 501977 - DNA, 19 bp, Mus musculus
  siRNA target sequence for Epha7 (NM_010141.2,3185-3203).
cgggcacaaatgttgcatt

SEQ ID NO: 501978 - DNA, 19 bp, Mus musculus
  siRNA target sequence for Epha7 (NM_010141.2,3186-3204).
gggcacaaatgttgcattt

SEQ ID NO: 501979 - DNA, 19 bp, Mus musculus
  siRNA target sequence for Epha8 (NM_007939.1,169-187).
gtgaacttgttggatacat

SEQ ID NO: 501980 - DNA, 19 bp, Mus musculus
  siRNA target sequence for Epha8 (NM_007939.1,362-380).
gtgtctacgccgagatcaa

SEQ ID NO: 501981 - DNA, 19 bp, Mus musculus
  siRNA target sequence for Epha8 (NM_007939.1,364-382).
gtctacgccgagatcaaat

SEQ ID NO: 501982 - DNA, 19 bp, Mus musculus
  siRNA target sequence for Epha8 (NM_007939.1,658-676).
ctctcactccgaatctact

SEQ ID NO: 501983 - DNA, 19 bp, Mus musculus
  siRNA target sequence for Epha8 (NM_007939.1,793-811).
cgcgacacacccaagatgt

SEQ ID NO: 501984 - DNA, 19 bp, Mus musculus
  siRNA target sequence for Epha8 (NM_007939.1,794-812).
gcgacacacccaagatgta

SEQ ID NO: 501985 - DNA, 19 bp, Mus musculus
  siRNA target sequence for Epha8 (NM_007939.1,796-814).
gacacacccaagatgtact

SEQ ID NO: 501986 - DNA, 19 bp, Mus musculus
  siRNA target sequence for Epha8 (NM_007939.1,1077-1095).
cctgatctccagcgtaaat

SEQ ID NO: 501987 - DNA, 19 bp, Mus musculus
  siRNA target sequence for Epha8 (NM_007939.1,1080-1098).
gatctccagcgtaaatgga

SEQ ID NO: 501988 - DNA, 19 bp, Mus musculus
  siRNA target sequence for Epha8 (NM_007939.1,1279-1297).
ctgctagcccacatgaact

SEQ ID NO: 501989 - DNA, 19 bp, Mus musculus
  siRNA target sequence for Epha8 (NM_007939.1,1282-1300).
ctagcccacatgaactact

SEQ ID NO: 501990 - DNA, 19 bp, Mus musculus
  siRNA target sequence for Epha8 (NM_007939.1,1936-1954).
cgggcaggccggagcttta

SEQ ID NO: 501991 - DNA, 19 bp, Mus musculus
  siRNA target sequence for Epha8 (NM_007939.1,2102-2120).
gacagcgacaagacttctt

SEQ ID NO: 501992 - DNA, 19 bp, Mus musculus
  siRNA target sequence for Epha8 (NM_007939.1,2104-2122).
cagcgacaagacttcttga

SEQ ID NO: 501993 - DNA, 19 bp, Mus musculus
  siRNA target sequence for Epha8 (NM_007939.1,2189-2207).
gtggtcgcctggcaatgat

SEQ ID NO: 501994 - DNA, 19 bp, Mus musculus
  siRNA target sequence for Epha8 (NM_007939.1,2192-2210).
gtcgcctggcaatgattgt

SEQ ID NO: 501995 - DNA, 19 bp, Mus musculus
  siRNA target sequence for Epha8 (NM_007939.1,2194-2212).
cgcctggcaatgattgtga

SEQ ID NO: 501996 - DNA, 19 bp, Mus musculus
  siRNA target sequence for Epha8 (NM_007939.1,2330-2348).
cagacctgggctacattca

SEQ ID NO: 501997 - DNA, 19 bp, Mus musculus
  siRNA target sequence for Epha8 (NM_007939.1,2386-2404).
cgtctggtgtgcaaagtgt

SEQ ID NO: 501998 - DNA, 19 bp, Mus musculus
  siRNA target sequence for Ephb1 (NM_173447.2,344-362).
cgatggaagagacattgat

SEQ ID NO: 501999 - DNA, 19 bp, Mus musculus
  siRNA target sequence for Ephb1 (NM_173447.2,453-471).
caccatccgtacttaccaa

SEQ ID NO: 502000 - DNA, 19 bp, Mus musculus
  siRNA target sequence for Ephb1 (NM_173447.2,506-524).
ggctgcttaccacctttat

SEQ ID NO: 502001 - DNA, 19 bp, Mus musculus
  siRNA target sequence for Ephb1 (NM_173447.2,511-529).
cttaccacctttatcaaca

SEQ ID NO: 502002 - DNA, 19 bp, Mus musculus
  siRNA target sequence for Ephb1 (NM_173447.2,539-557).
cccatcgcatctatacaga

SEQ ID NO: 502003 - DNA, 19 bp, Mus musculus
  siRNA target sequence for Ephb1 (NM_173447.2,652-670).
gtgattgccaccaagaagt

SEQ ID NO: 502004 - DNA, 19 bp, Mus musculus
  siRNA target sequence for Ephb1 (NM_173447.2,728-746).
gcttctcccaggtggattt

SEQ ID NO: 502005 - DNA, 19 bp, Mus musculus
  siRNA target sequence for Ephb1 (NM_173447.2,749-767).
ggggaaggttgatgaaagt

SEQ ID NO: 502006 - DNA, 19 bp, Mus musculus
  siRNA target sequence for Ephb1 (NM_173447.2,751-769).
ggaaggttgatgaaagtca

SEQ ID NO: 502007 - DNA, 19 bp, Mus musculus
  siRNA target sequence for Ephb1 (NM_173447.2,796-814).
cttactaggaacggttttt

SEQ ID NO: 502008 - DNA, 19 bp, Mus musculus
  siRNA target sequence for Ephb1 (NM_173447.2,829-847).
gattatggagcctgtatgt

SEQ ID NO: 502009 - DNA, 19 bp, Mus musculus
  siRNA target sequence for Ephb1 (NM_173447.2,885-903).
cagcatcgtgcagaatttt

SEQ ID NO: 502010 - DNA, 19 bp, Mus musculus
  siRNA target sequence for Ephb1 (NM_173447.2,1199-1217).
cctgccggactggctatta

SEQ ID NO: 502011 - DNA, 19 bp, Mus musculus
  siRNA target sequence for Ephb1 (NM_173447.2,1237-1255).
ccagaggtggcgtgtacta

SEQ ID NO: 502012 - DNA, 19 bp, Mus musculus
  siRNA target sequence for Ephb1 (NM_173447.2,1265-1283).
cgggtcctcgaaatgtcat

SEQ ID NO: 502013 - DNA, 19 bp, Mus musculus
  siRNA target sequence for Ephb1 (NM_173447.2,1291-1309).
gtgaatgagacatctatca

SEQ ID NO: 502014 - DNA, 19 bp, Mus musculus
  siRNA target sequence for Ephb1 (NM_173447.2,1351-1369).
gacgtgacgtacaacatca

SEQ ID NO: 502015 - DNA, 19 bp, Mus musculus
  siRNA target sequence for Ephb1 (NM_173447.2,1354-1372).
gtgacgtacaacatcatct

SEQ ID NO: 502016 - DNA, 19 bp, Mus musculus
  siRNA target sequence for Ephb1 (NM_173447.2,1404-1422).
ctcccgctgcgatgacaat

SEQ ID NO: 502017 - DNA, 19 bp, Mus musculus
  siRNA target sequence for Ephb1 (NM_173447.2,1491-1509).
caccccgtacacctttgat

SEQ ID NO: 502018 - DNA, 19 bp, Mus musculus
  siRNA target sequence for Ephb1 (NM_173447.2,1493-1511).
ccccgtacacctttgatat

SEQ ID NO: 502019 - DNA, 19 bp, Mus musculus
  siRNA target sequence for Ephb1 (NM_173447.2,1496-1514).
cgtacacctttgatatcca

SEQ ID NO: 502020 - DNA, 19 bp, Mus musculus
  siRNA target sequence for Ephb1 (NM_173447.2,1558-1576).
cacgtctctgtcaacatca

SEQ ID NO: 502021 - DNA, 19 bp, Mus musculus
  siRNA target sequence for Ephb1 (NM_173447.2,1758-1776).
caacacagcacgtatcgat

SEQ ID NO: 502022 - DNA, 19 bp, Mus musculus
  siRNA target sequence for Ephb1 (NM_173447.2,1780-1798).
ctacggcctggcatggtat

SEQ ID NO: 502023 - DNA, 19 bp, Mus musculus
  siRNA target sequence for Ephb1 (NM_173447.2,1784-1802).
ggcctggcatggtatacgt

SEQ ID NO: 502024 - DNA, 19 bp, Mus musculus
  siRNA target sequence for Ephb1 (NM_173447.2,1863-1881).
ccagactctgacagatgat

SEQ ID NO: 502025 - DNA, 19 bp, Mus musculus
  siRNA target sequence for Ephb1 (NM_173447.2,1866-1884).
gactctgacagatgatgat

SEQ ID NO: 502026 - DNA, 19 bp, Mus musculus
  siRNA target sequence for Ephb1 (NM_173447.2,1931-1949).
cagcagctggagtcgtatt

SEQ ID NO: 502027 - DNA, 19 bp, Mus musculus
  siRNA target sequence for Ephb1 (NM_173447.2,1934-1952).
cagctggagtcgtatttgt

SEQ ID NO: 502028 - DNA, 19 bp, Mus musculus
  siRNA target sequence for Ephb1 (NM_173447.2,1963-1981).
gtggccatctctattgtct

SEQ ID NO: 502029 - DNA, 19 bp, Mus musculus
  siRNA target sequence for Ephb1 (NM_173447.2,2008-2026).
gaggctgcgtacagtgata

SEQ ID NO: 502030 - DNA, 19 bp, Mus musculus
  siRNA target sequence for Ephb1 (NM_173447.2,2073-2091).
ctacattgacccattcact

SEQ ID NO: 502031 - DNA, 19 bp, Mus musculus
  siRNA target sequence for Ephb1 (NM_173447.2,2076-2094).
cattgacccattcacttat

SEQ ID NO: 502032 - DNA, 19 bp, Mus musculus
  siRNA target sequence for Ephb1 (NM_173447.2,2275-2293).
cagcgtcgggattttctga

SEQ ID NO: 502033 - DNA, 19 bp, Mus musculus
  siRNA target sequence for Ephb1 (NM_173447.2,3019-3037).
gacttcacggcctttacca

SEQ ID NO: 502034 - DNA, 19 bp, Mus musculus
  siRNA target sequence for Ephb1 (NM_173447.2,3050-3068).
ggctaagtgccatcaaaat

SEQ ID NO: 502035 - DNA, 19 bp, Mus musculus
  siRNA target sequence for Ephb1 (NM_173447.2,3183-3201).
gaagattctgagtagcatt

SEQ ID NO: 502036 - DNA, 19 bp, Mus musculus
  siRNA target sequence for Ephb3 (NM_010143.1,504-522).
gctggcatggacatctcat

SEQ ID NO: 502037 - DNA, 19 bp, Mus musculus
  siRNA target sequence for Ephb3 (NM_010143.1,578-596).
gcacgtatcaggtgtgtaa

SEQ ID NO: 502038 - DNA, 19 bp, Mus musculus
  siRNA target sequence for Ephb3 (NM_010143.1,581-599).
cgtatcaggtgtgtaatgt

SEQ ID NO: 502039 - DNA, 19 bp, Mus musculus
  siRNA target sequence for Ephb3 (NM_010143.1,623-641).
ggctgcggacgggtttcat

SEQ ID NO: 502040 - DNA, 19 bp, Mus musculus
  siRNA target sequence for Ephb3 (NM_010143.1,625-643).
ctgcggacgggtttcatct

SEQ ID NO: 502041 - DNA, 19 bp, Mus musculus
  siRNA target sequence for Ephb3 (NM_010143.1,962-980).
ctgtgcgtgccttctacaa

SEQ ID NO: 502042 - DNA, 19 bp, Mus musculus
  siRNA target sequence for Ephb3 (NM_010143.1,964-982).
gtgcgtgccttctacaaga

SEQ ID NO: 502043 - DNA, 19 bp, Mus musculus
  siRNA target sequence for Ephb3 (NM_010143.1,1304-1322).
gcacctgccataataactt

SEQ ID NO: 502044 - DNA, 19 bp, Mus musculus
  siRNA target sequence for Ephb3 (NM_010143.1,1451-1469).
gacgagatgacctccttta

SEQ ID NO: 502045 - DNA, 19 bp, Mus musculus
  siRNA target sequence for Ephb3 (NM_010143.1,1453-1471).
cgagatgacctcctttata

SEQ ID NO: 502046 - DNA, 19 bp, Mus musculus
  siRNA target sequence for Ephb3 (NM_010143.1,1454-1472).
gagatgacctcctttataa

SEQ ID NO: 502047 - DNA, 19 bp, Mus musculus
  siRNA target sequence for Ephb3 (NM_010143.1,1459-1477).
gacctcctttataatgtta

SEQ ID NO: 502048 - DNA, 19 bp, Mus musculus
  siRNA target sequence for Ephb3 (NM_010143.1,1679-1697).
gctatgcagctgtgaatat

SEQ ID NO: 502049 - DNA, 19 bp, Mus musculus
  siRNA target sequence for Ephb3 (NM_010143.1,1861-1879).
gtaaccagccagaagaact

SEQ ID NO: 502050 - DNA, 19 bp, Mus musculus
  siRNA target sequence for Ephb3 (NM_010143.1,1945-1963).
gcgggttacggacagtata

SEQ ID NO: 502051 - DNA, 19 bp, Mus musculus
  siRNA target sequence for Ephb3 (NM_010143.1,1964-1982).
gccacccggctgagtttga

SEQ ID NO: 502052 - DNA, 19 bp, Mus musculus
  siRNA target sequence for Ephb3 (NM_010143.1,1966-1984).
cacccggctgagtttgaga

SEQ ID NO: 502053 - DNA, 19 bp, Mus musculus
  siRNA target sequence for Ephb3 (NM_010143.1,2051-2069).
ccgtagccgggtttgtctt

SEQ ID NO: 502054 - DNA, 19 bp, Mus musculus
  siRNA target sequence for Ephb3 (NM_010143.1,2145-2163).
gaagctgcagcaatacatt

SEQ ID NO: 502055 - DNA, 19 bp, Mus musculus
  siRNA target sequence for Ephb3 (NM_010143.1,2338-2356).
gtgttcgtggctatcaaga

SEQ ID NO: 502056 - DNA, 19 bp, Mus musculus
  siRNA target sequence for Ephb3 (NM_010143.1,2522-2540).
cctttctacggctcaatga

SEQ ID NO: 502057 - DNA, 19 bp, Mus musculus
  siRNA target sequence for Ephb3 (NM_010143.1,2559-2577).
ccagcttgtgggcatgtta

SEQ ID NO: 502058 - DNA, 19 bp, Mus musculus
  siRNA target sequence for Ephb3 (NM_010143.1,2787-2805).
catagcctatcggaagttt

SEQ ID NO: 502059 - DNA, 19 bp, Mus musculus
  siRNA target sequence for Ephb3 (NM_010143.1,3008-3026).
ccaagttctctcaaatcgt

SEQ ID NO: 502060 - DNA, 19 bp, Mus musculus
  siRNA target sequence for Ephb3 (NM_010143.1,3024-3042).
cgtcaacacactagacaaa

SEQ ID NO: 502061 - DNA, 19 bp, Mus musculus
  siRNA target sequence for Ephb3 (NM_010143.1,3027-3045).
caacacactagacaaactt

SEQ ID NO: 502062 - DNA, 19 bp, Mus musculus
  siRNA target sequence for Ephb3 (NM_010143.1,3115-3133).
cgcacagtcccagattata

SEQ ID NO: 502063 - DNA, 19 bp, Mus musculus
  siRNA target sequence for Ephb3 (NM_010143.1,3171-3189).
caagatggggaggtataaa

SEQ ID NO: 502064 - DNA, 19 bp, Mus musculus
  siRNA target sequence for Ephb4 (NM_010144.2,125-143).
ccctcgccactgctttaga

SEQ ID NO: 502065 - DNA, 19 bp, Mus musculus
  siRNA target sequence for Ephb4 (NM_010144.2,126-144).
cctcgccactgctttagaa

SEQ ID NO: 502066 - DNA, 19 bp, Mus musculus
  siRNA target sequence for Ephb4 (NM_010144.2,149-167).
ccctgttgaacacaaaact

SEQ ID NO: 502067 - DNA, 19 bp, Mus musculus
  siRNA target sequence for Ephb4 (NM_010144.2,168-186).
ggaaacggcggatctgaaa

SEQ ID NO: 502068 - DNA, 19 bp, Mus musculus
  siRNA target sequence for Ephb4 (NM_010144.2,169-187).
gaaacggcggatctgaaat

SEQ ID NO: 502069 - DNA, 19 bp, Mus musculus
  siRNA target sequence for Ephb4 (NM_010144.2,364-382).
cgcttcaccatgatggaat

SEQ ID NO: 502070 - DNA, 19 bp, Mus musculus
  siRNA target sequence for Ephb4 (NM_010144.2,420-438).
gacattcactgtcttctat

SEQ ID NO: 502071 - DNA, 19 bp, Mus musculus
  siRNA target sequence for Ephb4 (NM_010144.2,510-528).
cacagtggccgcagaacat

SEQ ID NO: 502072 - DNA, 19 bp, Mus musculus
  siRNA target sequence for Ephb4 (NM_010144.2,512-530).
cagtggccgcagaacatct

SEQ ID NO: 502073 - DNA, 19 bp, Mus musculus
  siRNA target sequence for Ephb4 (NM_010144.2,557-575).
ccacagggaaagttaatat

SEQ ID NO: 502074 - DNA, 19 bp, Mus musculus
  siRNA target sequence for Ephb4 (NM_010144.2,560-578).
cagggaaagttaatatcaa

SEQ ID NO: 502075 - DNA, 19 bp, Mus musculus
  siRNA target sequence for Ephb4 (NM_010144.2,875-893).
ctgcggaaagcaacaaagt

SEQ ID NO: 502076 - DNA, 19 bp, Mus musculus
  siRNA target sequence for Ephb4 (NM_010144.2,877-895).
gcggaaagcaacaaagtat

SEQ ID NO: 502077 - DNA, 19 bp, Mus musculus
  siRNA target sequence for Ephb4 (NM_010144.2,918-936).
cttcaagccccaaatagga

SEQ ID NO: 502078 - DNA, 19 bp, Mus musculus
  siRNA target sequence for Ephb4 (NM_010144.2,962-980).
ccaacagccactcgaataa

SEQ ID NO: 502079 - DNA, 19 bp, Mus musculus
  siRNA target sequence for Ephb4 (NM_010144.2,1076-1094).
gaagcgtggttcaccattt

SEQ ID NO: 502080 - DNA, 19 bp, Mus musculus
  siRNA target sequence for Ephb4 (NM_010144.2,1079-1097).
gcgtggttcaccatttgaa

SEQ ID NO: 502081 - DNA, 19 bp, Mus musculus
  siRNA target sequence for Ephb4 (NM_010144.2,1080-1098).
cgtggttcaccatttgaat

SEQ ID NO: 502082 - DNA, 19 bp, Mus musculus
  siRNA target sequence for Ephb4 (NM_010144.2,1145-1163).
gccgagaggacctcactta

SEQ ID NO: 502083 - DNA, 19 bp, Mus musculus
  siRNA target sequence for Ephb4 (NM_010144.2,1146-1164).
ccgagaggacctcacttat

SEQ ID NO: 502084 - DNA, 19 bp, Mus musculus
  siRNA target sequence for Ephb4 (NM_010144.2,1282-1300).
cgtcctgatgtcacctata

SEQ ID NO: 502085 - DNA, 19 bp, Mus musculus
  siRNA target sequence for Ephb4 (NM_010144.2,1320-1338).
gaatggtgtgtctacctta

SEQ ID NO: 502086 - DNA, 19 bp, Mus musculus
  siRNA target sequence for Ephb4 (NM_010144.2,1355-1373).
cttttgagcctgtcaatgt

SEQ ID NO: 502087 - DNA, 19 bp, Mus musculus
  siRNA target sequence for Ephb4 (NM_010144.2,1488-1506).
ggactacgaggtcaagtat

SEQ ID NO: 502088 - DNA, 19 bp, Mus musculus
  siRNA target sequence for Ephb4 (NM_010144.2,1491-1509).
ctacgaggtcaagtatcat

SEQ ID NO: 502089 - DNA, 19 bp, Mus musculus
  siRNA target sequence for Ephb4 (NM_010144.2,1848-1866).
cggtaccaaggtctacatt

SEQ ID NO: 502090 - DNA, 19 bp, Mus musculus
  siRNA target sequence for Ephb4 (NM_010144.2,1877-1895).
cttacgaagaccctaatga

SEQ ID NO: 502091 - DNA, 19 bp, Mus musculus
  siRNA target sequence for Ephb4 (NM_010144.2,1941-1959).
gattgaagaggtaattggt

SEQ ID NO: 502092 - DNA, 19 bp, Mus musculus
  siRNA target sequence for Ephb4 (NM_010144.2,2278-2296).
cggtacctggctgaaatga

SEQ ID NO: 502093 - DNA, 19 bp, Mus musculus
  siRNA target sequence for Ephb4 (NM_010144.2,2523-2541).
gtgggaggtcatgtctttt

SEQ ID NO: 502094 - DNA, 19 bp, Mus musculus
  siRNA target sequence for Ephb4 (NM_010144.2,2708-2726).
gcgctctggacaagatgat

SEQ ID NO: 502095 - DNA, 19 bp, Mus musculus
  siRNA target sequence for Ephb4 (NM_010144.2,2928-2946).
ggaccttctccgaattgga

SEQ ID NO: 502096 - DNA, 19 bp, Mus musculus
  siRNA target sequence for Ephb6 (NM_007680.2,979-997).
ggactgcagctgaatgtca

SEQ ID NO: 502097 - DNA, 19 bp, Mus musculus
  siRNA target sequence for Ephb6 (NM_007680.2,1020-1038).
cactcagcgtggcttctat

SEQ ID NO: 502098 - DNA, 19 bp, Mus musculus
  siRNA target sequence for Ephb6 (NM_007680.2,1356-1374).
ctgccctgagggatcctat

SEQ ID NO: 502099 - DNA, 19 bp, Mus musculus
  siRNA target sequence for Ephb6 (NM_007680.2,1377-1395).
ggccctggctgggaatgtt

SEQ ID NO: 502100 - DNA, 19 bp, Mus musculus
  siRNA target sequence for Ephb6 (NM_007680.2,1605-1623).
ggatctgctcttcaatgtt

SEQ ID NO: 502101 - DNA, 19 bp, Mus musculus
  siRNA target sequence for Ephb6 (NM_007680.2,1685-1703).
gggacgaggtgcatttcga

SEQ ID NO: 502102 - DNA, 19 bp, Mus musculus
  siRNA target sequence for Ephb6 (NM_007680.2,1754-1772).
gagcacacgtgccatacat

SEQ ID NO: 502103 - DNA, 19 bp, Mus musculus
  siRNA target sequence for Ephb6 (NM_007680.2,1756-1774).
gcacacgtgccatacatct

SEQ ID NO: 502104 - DNA, 19 bp, Mus musculus
  siRNA target sequence for Ephb6 (NM_007680.2,1757-1775).
cacacgtgccatacatctt

SEQ ID NO: 502105 - DNA, 19 bp, Mus musculus
  siRNA target sequence for Ephb6 (NM_007680.2,1962-1980).
ctaccagctgcgctactat

SEQ ID NO: 502106 - DNA, 19 bp, Mus musculus
  siRNA target sequence for Ephb6 (NM_007680.2,2111-2129).
cctatgggggcaaagtcta

SEQ ID NO: 502107 - DNA, 19 bp, Mus musculus
  siRNA target sequence for Ephb6 (NM_007680.2,2277-2295).
gaccggctacacagaacaa

SEQ ID NO: 502108 - DNA, 19 bp, Mus musculus
  siRNA target sequence for Ephb6 (NM_007680.2,2317-2335).
ggacttggagtgaagtatt

SEQ ID NO: 502109 - DNA, 19 bp, Mus musculus
  siRNA target sequence for Ephb6 (NM_007680.2,2320-2338).
cttggagtgaagtattaca

SEQ ID NO: 502110 - DNA, 19 bp, Mus musculus
  siRNA target sequence for Ephb6 (NM_007680.2,2392-2410).
gaggttgaccctacatata

SEQ ID NO: 502111 - DNA, 19 bp, Mus musculus
  siRNA target sequence for Ephb6 (NM_007680.2,2395-2413).
gttgaccctacatatatca

SEQ ID NO: 502112 - DNA, 19 bp, Mus musculus
  siRNA target sequence for Ephb6 (NM_007680.2,2398-2416).
gaccctacatatatcaaga

SEQ ID NO: 502113 - DNA, 19 bp, Mus musculus
  siRNA target sequence for Ephb6 (NM_007680.2,2400-2418).
ccctacatatatcaagatt

SEQ ID NO: 502114 - DNA, 19 bp, Mus musculus
  siRNA target sequence for Ephb6 (NM_007680.2,2402-2420).
ctacatatatcaagattga

SEQ ID NO: 502115 - DNA, 19 bp, Mus musculus
  siRNA target sequence for Ephb6 (NM_007680.2,2665-2683).
cccctggacagctttctta

SEQ ID NO: 502116 - DNA, 19 bp, Mus musculus
  siRNA target sequence for Ephb6 (NM_007680.2,2689-2707).
cgagagggccagttcagta

SEQ ID NO: 502117 - DNA, 19 bp, Mus musculus
  siRNA target sequence for Ephb6 (NM_007680.2,2795-2813).
cccgaagtgtgctagtgaa

SEQ ID NO: 502118 - DNA, 19 bp, Mus musculus
  siRNA target sequence for Ephb6 (NM_007680.2,2796-2814).
ccgaagtgtgctagtgaat

SEQ ID NO: 502119 - DNA, 19 bp, Mus musculus
  siRNA target sequence for Ephb6 (NM_007680.2,2797-2815).
cgaagtgtgctagtgaata

SEQ ID NO: 502120 - DNA, 19 bp, Mus musculus
  siRNA target sequence for Ephb6 (NM_007680.2,2889-2907).
cccagaggtcattacacat

SEQ ID NO: 502121 - DNA, 19 bp, Mus musculus
  siRNA target sequence for Ephb6 (NM_007680.2,2905-2923).
catggaaagtatacaacat

SEQ ID NO: 502122 - DNA, 19 bp, Mus musculus
  siRNA target sequence for Ephb6 (NM_007680.2,3006-3024).
ggaggtactaaatgcaata

SEQ ID NO: 502123 - DNA, 19 bp, Mus musculus
  siRNA target sequence for Ephb6 (NM_007680.2,3065-3083).
ctggactacatctactgat

SEQ ID NO: 502124 - DNA, 19 bp, Mus musculus
  siRNA target sequence for Ephb6 (NM_007680.2,3110-3128).
cccgtcggcctcattttga

SEQ ID NO: 502125 - DNA, 19 bp, Mus musculus
  siRNA target sequence for Ern2 (NM_012016.1,29-47).
gagaccagtccagagattt

SEQ ID NO: 502126 - DNA, 19 bp, Mus musculus
  siRNA target sequence for Ern2 (NM_012016.1,127-145).
ggccagagagccttctgtt

SEQ ID NO: 502127 - DNA, 19 bp, Mus musculus
  siRNA target sequence for Ern2 (NM_012016.1,132-150).
gagagccttctgtttgtgt

SEQ ID NO: 502128 - DNA, 19 bp, Mus musculus
  siRNA target sequence for Ern2 (NM_012016.1,277-295).
ctgacggcagcctgtatgt

SEQ ID NO: 502129 - DNA, 19 bp, Mus musculus
  siRNA target sequence for Ern2 (NM_012016.1,279-297).
gacggcagcctgtatgtct

SEQ ID NO: 502130 - DNA, 19 bp, Mus musculus
  siRNA target sequence for Ern2 (NM_012016.1,407-425).
gcaggatgcctggtttgta

SEQ ID NO: 502131 - DNA, 19 bp, Mus musculus
  siRNA target sequence for Ern2 (NM_012016.1,548-566).
gcggtggaacacaacctat

SEQ ID NO: 502132 - DNA, 19 bp, Mus musculus
  siRNA target sequence for Ern2 (NM_012016.1,594-612).
ggctcacccgggaaataca

SEQ ID NO: 502133 - DNA, 19 bp, Mus musculus
  siRNA target sequence for Ern2 (NM_012016.1,595-613).
gctcacccgggaaatacat

SEQ ID NO: 502134 - DNA, 19 bp, Mus musculus
  siRNA target sequence for Ern2 (NM_012016.1,656-674).
ggatccaggaagtggaatt

SEQ ID NO: 502135 - DNA, 19 bp, Mus musculus
  siRNA target sequence for Ern2 (NM_012016.1,702-720).
cctgtgacagggatttaca

SEQ ID NO: 502136 - DNA, 19 bp, Mus musculus
  siRNA target sequence for Ern2 (NM_012016.1,765-783).
gctcgggacaccctacatt

SEQ ID NO: 502137 - DNA, 19 bp, Mus musculus
  siRNA target sequence for Ern2 (NM_012016.1,766-784).
ctcgggacaccctacattt

SEQ ID NO: 502138 - DNA, 19 bp, Mus musculus
  siRNA target sequence for Ern2 (NM_012016.1,770-788).
ggacaccctacatttcctt

SEQ ID NO: 502139 - DNA, 19 bp, Mus musculus
  siRNA target sequence for Ern2 (NM_012016.1,861-879).
gacacccagcttttgatga

SEQ ID NO: 502140 - DNA, 19 bp, Mus musculus
  siRNA target sequence for Ern2 (NM_012016.1,900-918).
gaagctgggttctatgtct

SEQ ID NO: 502141 - DNA, 19 bp, Mus musculus
  siRNA target sequence for Ern2 (NM_012016.1,908-926).
gttctatgtctctaaagca

SEQ ID NO: 502142 - DNA, 19 bp, Mus musculus
  siRNA target sequence for Ern2 (NM_012016.1,980-998).
ggacggtcccacaacagat

SEQ ID NO: 502143 - DNA, 19 bp, Mus musculus
  siRNA target sequence for Ern2 (NM_012016.1,1086-1104).
cagtggctactcattggat

SEQ ID NO: 502144 - DNA, 19 bp, Mus musculus
  siRNA target sequence for Ern2 (NM_012016.1,1433-1451).
gctctcaagggacatctta

SEQ ID NO: 502145 - DNA, 19 bp, Mus musculus
  siRNA target sequence for Ern2 (NM_012016.1,1455-1473).
gaccagaggagatttcaaa

SEQ ID NO: 502146 - DNA, 19 bp, Mus musculus
  siRNA target sequence for Ern2 (NM_012016.1,1862-1880).
ggcccatctacattcctta

SEQ ID NO: 502147 - DNA, 19 bp, Mus musculus
  siRNA target sequence for Ern2 (NM_012016.1,2105-2123).
ctccgcaggctgcgtattt

SEQ ID NO: 502148 - DNA, 19 bp, Mus musculus
  siRNA target sequence for Ern2 (NM_012016.1,2107-2125).
ccgcaggctgcgtatttta

SEQ ID NO: 502149 - DNA, 19 bp, Mus musculus
  siRNA target sequence for Ern2 (NM_012016.1,2108-2126).
cgcaggctgcgtattttat

SEQ ID NO: 502150 - DNA, 19 bp, Mus musculus
  siRNA target sequence for Ern2 (NM_012016.1,2113-2131).
gctgcgtattttattacgt

SEQ ID NO: 502151 - DNA, 19 bp, Mus musculus
  siRNA target sequence for Farsl (NM_011811.2,55-73).
ccggacctacactgatgaa

SEQ ID NO: 502152 - DNA, 19 bp, Mus musculus
  siRNA target sequence for Farsl (NM_011811.2,60-78).
cctacactgatgaagagtt

SEQ ID NO: 502153 - DNA, 19 bp, Mus musculus
  siRNA target sequence for Farsl (NM_011811.2,76-94).
gtttgacgaactgtgtttt

SEQ ID NO: 502154 - DNA, 19 bp, Mus musculus
  siRNA target sequence for Farsl (NM_011811.2,177-195).
cctcagatgttgtgcttta

SEQ ID NO: 502155 - DNA, 19 bp, Mus musculus
  siRNA target sequence for Farsl (NM_011811.2,182-200).
gatgttgtgctttacaaga

SEQ ID NO: 502156 - DNA, 19 bp, Mus musculus
  siRNA target sequence for Farsl (NM_011811.2,277-295).
gatcaaagctccggtatat

SEQ ID NO: 502157 - DNA, 19 bp, Mus musculus
  siRNA target sequence for Farsl (NM_011811.2,322-340).
ccaaaagctggttatcaca

SEQ ID NO: 502158 - DNA, 19 bp, Mus musculus
  siRNA target sequence for Farsl (NM_011811.2,352-370).
caaagtgcgcccttttgct

SEQ ID NO: 502159 - DNA, 19 bp, Mus musculus
  siRNA target sequence for Farsl (NM_011811.2,375-393).
cagcagttctccggaatat

SEQ ID NO: 502160 - DNA, 19 bp, Mus musculus
  siRNA target sequence for Farsl (NM_011811.2,377-395).
gcagttctccggaatatca

SEQ ID NO: 502161 - DNA, 19 bp, Mus musculus
  siRNA target sequence for Farsl (NM_011811.2,378-396).
cagttctccggaatatcaa

SEQ ID NO: 502162 - DNA, 19 bp, Mus musculus
  siRNA target sequence for Farsl (NM_011811.2,383-401).
ctccggaatatcaagttca

SEQ ID NO: 502163 - DNA, 19 bp, Mus musculus
  siRNA target sequence for Farsl (NM_011811.2,386-404).
cggaatatcaagttcacta

SEQ ID NO: 502164 - DNA, 19 bp, Mus musculus
  siRNA target sequence for Farsl (NM_011811.2,387-405).
ggaatatcaagttcactaa

SEQ ID NO: 502165 - DNA, 19 bp, Mus musculus
  siRNA target sequence for Farsl (NM_011811.2,388-406).
gaatatcaagttcactaaa

SEQ ID NO: 502166 - DNA, 19 bp, Mus musculus
  siRNA target sequence for Farsl (NM_011811.2,409-427).
ccgatatgacagcttcatt

SEQ ID NO: 502167 - DNA, 19 bp, Mus musculus
  siRNA target sequence for Farsl (NM_011811.2,411-429).
gatatgacagcttcattga

SEQ ID NO: 502168 - DNA, 19 bp, Mus musculus
  siRNA target sequence for Farsl (NM_011811.2,437-455).
gagaaactacaccagaata

SEQ ID NO: 502169 - DNA, 19 bp, Mus musculus
  siRNA target sequence for Farsl (NM_011811.2,470-488).
gcgttggttgctattggaa

SEQ ID NO: 502170 - DNA, 19 bp, Mus musculus
  siRNA target sequence for Farsl (NM_011811.2,489-507).
ctcacgacttggacacttt

SEQ ID NO: 502171 - DNA, 19 bp, Mus musculus
  siRNA target sequence for Farsl (NM_011811.2,491-509).
cacgacttggacactttat

SEQ ID NO: 502172 - DNA, 19 bp, Mus musculus
  siRNA target sequence for Farsl (NM_011811.2,493-511).
cgacttggacactttatca

SEQ ID NO: 502173 - DNA, 19 bp, Mus musculus
  siRNA target sequence for Farsl (NM_011811.2,529-547).
cgcgaaacgtccttcagat

SEQ ID NO: 502174 - DNA, 19 bp, Mus musculus
  siRNA target sequence for Farsl (NM_011811.2,530-548).
gcgaaacgtccttcagata

SEQ ID NO: 502175 - DNA, 19 bp, Mus musculus
  siRNA target sequence for Farsl (NM_011811.2,531-549).
cgaaacgtccttcagatat

SEQ ID NO: 502176 - DNA, 19 bp, Mus musculus
  siRNA target sequence for Farsl (NM_011811.2,536-554).
cgtccttcagatatcaaat

SEQ ID NO: 502177 - DNA, 19 bp, Mus musculus
  siRNA target sequence for Farsl (NM_011811.2,537-555).
gtccttcagatatcaaatt

SEQ ID NO: 502178 - DNA, 19 bp, Mus musculus
  siRNA target sequence for Farsl (NM_011811.2,577-595).
ggagtatacagcttgtgaa

SEQ ID NO: 502179 - DNA, 19 bp, Mus musculus
  siRNA target sequence for Farsl (NM_011811.2,578-596).
gagtatacagcttgtgaat

SEQ ID NO: 502180 - DNA, 19 bp, Mus musculus
  siRNA target sequence for Farsl (NM_011811.2,580-598).
gtatacagcttgtgaatta

SEQ ID NO: 502181 - DNA, 19 bp, Mus musculus
  siRNA target sequence for Farsl (NM_011811.2,591-609).
gtgaattaatgaacatata

SEQ ID NO: 502182 - DNA, 19 bp, Mus musculus
  siRNA target sequence for Farsl (NM_011811.2,617-635).
gacaaccaccttaaacatt

SEQ ID NO: 502183 - DNA, 19 bp, Mus musculus
  siRNA target sequence for Farsl (NM_011811.2,619-637).
caaccaccttaaacattat

SEQ ID NO: 502184 - DNA, 19 bp, Mus musculus
  siRNA target sequence for Farsl (NM_011811.2,659-677).
cccctgtatccagttatct

SEQ ID NO: 502185 - DNA, 19 bp, Mus musculus
  siRNA target sequence for Farsl (NM_011811.2,700-718).
gtcgatgcctccgattata

SEQ ID NO: 502186 - DNA, 19 bp, Mus musculus
  siRNA target sequence for Farsl (NM_011811.2,702-720).
cgatgcctccgattataaa

SEQ ID NO: 502187 - DNA, 19 bp, Mus musculus
  siRNA target sequence for Farsl (NM_011811.2,712-730).
gattataaatgggaatcat

SEQ ID NO: 502188 - DNA, 19 bp, Mus musculus
  siRNA target sequence for Farsl (NM_011811.2,741-759).
cagtaaatactaggaatat

SEQ ID NO: 502189 - DNA, 19 bp, Mus musculus
  siRNA target sequence for Farsl (NM_011811.2,774-792).
cagggactgacttcactaa

SEQ ID NO: 502190 - DNA, 19 bp, Mus musculus
  siRNA target sequence for Farsl (NM_011811.2,795-813).
caaaaatcgtgcttgacat

SEQ ID NO: 502191 - DNA, 19 bp, Mus musculus
  siRNA target sequence for Farsl (NM_011811.2,881-899).
cctaatggaaaatcaagta

SEQ ID NO: 502192 - DNA, 19 bp, Mus musculus
  siRNA target sequence for Farsl (NM_011811.2,931-949).
ggtgagagctgatttaatt

SEQ ID NO: 502193 - DNA, 19 bp, Mus musculus
  siRNA target sequence for Farsl (NM_011811.2,936-954).
gagctgatttaattaacaa

SEQ ID NO: 502194 - DNA, 19 bp, Mus musculus
  siRNA target sequence for Farsl (NM_011811.2,1158-1176).
cgtacaccatagctaatca

SEQ ID NO: 502195 - DNA, 19 bp, Mus musculus
  siRNA target sequence for Farsl (NM_011811.2,1159-1177).
gtacaccatagctaatcaa

SEQ ID NO: 502196 - DNA, 19 bp, Mus musculus
  siRNA target sequence for Farsl (NM_011811.2,1165-1183).
catagctaatcaatttcct

SEQ ID NO: 502197 - DNA, 19 bp, Mus musculus
  siRNA target sequence for Farsl (NM_011811.2,1312-1330).
ggcagtgcacataagtaat

SEQ ID NO: 502198 - DNA, 19 bp, Mus musculus
  siRNA target sequence for Farsl (NM_011811.2,1440-1458).
ctgacgttgtagtaaaaga

SEQ ID NO: 502199 - DNA, 19 bp, Mus musculus
  siRNA target sequence for Farsl (NM_011811.2,1442-1460).
gacgttgtagtaaaagatt

SEQ ID NO: 502200 - DNA, 19 bp, Mus musculus
  siRNA target sequence for Farsl (NM_011811.2,1444-1462).
cgttgtagtaaaagattct

SEQ ID NO: 502201 - DNA, 19 bp, Mus musculus
  siRNA target sequence for Farsl (NM_011811.2,1469-1487).
gatgtaggtgcgaaaaact

SEQ ID NO: 502202 - DNA, 19 bp, Mus musculus
  siRNA target sequence for Farsl (NM_011811.2,1472-1490).
gtaggtgcgaaaaactaca

SEQ ID NO: 502203 - DNA, 19 bp, Mus musculus
  siRNA target sequence for Farsl (NM_011811.2,1544-1562).
ggcttgctggacagaatta

SEQ ID NO: 502204 - DNA, 19 bp, Mus musculus
  siRNA target sequence for Farsl (NM_011811.2,1644-1662).
gacggtgtgctgagatctt

SEQ ID NO: 502205 - DNA, 19 bp, Mus musculus
  siRNA target sequence for Farsl (NM_011811.2,1647-1665).
ggtgtgctgagatctttgt

SEQ ID NO: 502206 - DNA, 19 bp, Mus musculus
  siRNA target sequence for Farsl (NM_011811.2,1697-1715).
cttcatcctgatgttatca

SEQ ID NO: 502207 - DNA, 19 bp, Mus musculus
  siRNA target sequence for Farsl (NM_011811.2,1703-1721).
cctgatgttatcaccaaat

SEQ ID NO: 502208 - DNA, 19 bp, Mus musculus
  siRNA target sequence for Fert2 (NM_008000.1,583-601).
cccccagttctctaaaaaa

SEQ ID NO: 502209 - DNA, 19 bp, Mus musculus
  siRNA target sequence for Fert2 (NM_008000.1,664-682).
ggagaggctatccaaattt

SEQ ID NO: 502210 - DNA, 19 bp, Mus musculus
  siRNA target sequence for Fert2 (NM_008000.1,676-694).
caaatttgagtctattcgt

SEQ ID NO: 502211 - DNA, 19 bp, Mus musculus
  siRNA target sequence for Fert2 (NM_008000.1,683-701).
gagtctattcgtcattcaa

SEQ ID NO: 502212 - DNA, 19 bp, Mus musculus
  siRNA target sequence for Fert2 (NM_008000.1,685-703).
gtctattcgtcattcaatt

SEQ ID NO: 502213 - DNA, 19 bp, Mus musculus
  siRNA target sequence for Fert2 (NM_008000.1,727-745).
gtcggtactcggatcttca

SEQ ID NO: 502214 - DNA, 19 bp, Mus musculus
  siRNA target sequence for Fert2 (NM_008000.1,730-748).
ggtactcggatcttcaaca

SEQ ID NO: 502215 - DNA, 19 bp, Mus musculus
  siRNA target sequence for Fert2 (NM_008000.1,918-936).
gacaaaggaggcactttat

SEQ ID NO: 502216 - DNA, 19 bp, Mus musculus
  siRNA target sequence for Fert2 (NM_008000.1,937-955).
catacaatttgtcgataat

SEQ ID NO: 502217 - DNA, 19 bp, Mus musculus
  siRNA target sequence for Fert2 (NM_008000.1,941-959).
caatttgtcgataatctgt

SEQ ID NO: 502218 - DNA, 19 bp, Mus musculus
  siRNA target sequence for Fert2 (NM_008000.1,947-965).
gtcgataatctgtatcgat

SEQ ID NO: 502219 - DNA, 19 bp, Mus musculus
  siRNA target sequence for Fert2 (NM_008000.1,967-985).
cgagggcaccgggttttca

SEQ ID NO: 502220 - DNA, 19 bp, Mus musculus
  siRNA target sequence for Fert2 (NM_008000.1,968-986).
gagggcaccgggttttcaa

SEQ ID NO: 502221 - DNA, 19 bp, Mus musculus
  siRNA target sequence for Fert2 (NM_008000.1,971-989).
ggcaccgggttttcaaaca

SEQ ID NO: 502222 - DNA, 19 bp, Mus musculus
  siRNA target sequence for Fert2 (NM_008000.1,972-990).
gcaccgggttttcaaacat

SEQ ID NO: 502223 - DNA, 19 bp, Mus musculus
  siRNA target sequence for Fert2 (NM_008000.1,988-1006).
cattccccagcttatagat

SEQ ID NO: 502224 - DNA, 19 bp, Mus musculus
  siRNA target sequence for Fert2 (NM_008000.1,1081-1099).
gaaatgggttctcaatcat

SEQ ID NO: 502225 - DNA, 19 bp, Mus musculus
  siRNA target sequence for Fert2 (NM_008000.1,1148-1166).
gtgtataagggcacactaa

SEQ ID NO: 502226 - DNA, 19 bp, Mus musculus
  siRNA target sequence for Fert2 (NM_008000.1,1156-1174).
gggcacactaaaggataaa

SEQ ID NO: 502227 - DNA, 19 bp, Mus musculus
  siRNA target sequence for Fert2 (NM_008000.1,1246-1264).
caaaattctgaagcaatat

SEQ ID NO: 502228 - DNA, 19 bp, Mus musculus
  siRNA target sequence for Fert2 (NM_008000.1,1265-1283).
gatcatcccaatattgtca

SEQ ID NO: 502229 - DNA, 19 bp, Mus musculus
  siRNA target sequence for Fert2 (NM_008000.1,1272-1290).
ccaatattgtcaaactgat

SEQ ID NO: 502230 - DNA, 19 bp, Mus musculus
  siRNA target sequence for Fert2 (NM_008000.1,1308-1326).
gacagcctgtctacatcat

SEQ ID NO: 502231 - DNA, 19 bp, Mus musculus
  siRNA target sequence for Fert2 (NM_008000.1,1425-1443).
ctgctggcatgttgtatct

SEQ ID NO: 502232 - DNA, 19 bp, Mus musculus
  siRNA target sequence for Fert2 (NM_008000.1,1490-1508).
ctggtgggtgaaaataata

SEQ ID NO: 502233 - DNA, 19 bp, Mus musculus
  siRNA target sequence for Fert2 (NM_008000.1,1492-1510).
ggtgggtgaaaataatact

SEQ ID NO: 502234 - DNA, 19 bp, Mus musculus
  siRNA target sequence for Fert2 (NM_008000.1,1547-1565).
gacggtggagtgtattcat

SEQ ID NO: 502235 - DNA, 19 bp, Mus musculus
  siRNA target sequence for Fert2 (NM_008000.1,1550-1568).
ggtggagtgtattcatctt

SEQ ID NO: 502236 - DNA, 19 bp, Mus musculus
  siRNA target sequence for Fert2 (NM_008000.1,1696-1714).
cccgtaccctggaatgaca

SEQ ID NO: 502237 - DNA, 19 bp, Mus musculus
  siRNA target sequence for Fert2 (NM_008000.1,1697-1715).
ccgtaccctggaatgacaa

SEQ ID NO: 502238 - DNA, 19 bp, Mus musculus
  siRNA target sequence for Fert2 (NM_008000.1,1698-1716).
cgtaccctggaatgacaaa

SEQ ID NO: 502239 - DNA, 19 bp, Mus musculus
  siRNA target sequence for Fert2 (NM_008000.1,1775-1793).
ccagaggaggtttttacaa

SEQ ID NO: 502240 - DNA, 19 bp, Mus musculus
  siRNA target sequence for Fert2 (NM_008000.1,1776-1794).
cagaggaggtttttacaat

SEQ ID NO: 502241 - DNA, 19 bp, Mus musculus
  siRNA target sequence for Fert2 (NM_008000.1,1809-1827).
gggattacaagcctgaaaa

SEQ ID NO: 502242 - DNA, 19 bp, Mus musculus
  siRNA target sequence for Fert2 (NM_008000.1,1821-1839).
ctgaaaaccgccctaagtt

SEQ ID NO: 502243 - DNA, 19 bp, Mus musculus
  siRNA target sequence for Fert2 (NM_008000.1,1823-1841).
gaaaaccgccctaagttca

SEQ ID NO: 502244 - DNA, 19 bp, Mus musculus
  siRNA target sequence for Fes (NM_010194.1,124-142).
ctgagctgcgcttattgga

SEQ ID NO: 502245 - DNA, 19 bp, Mus musculus
  siRNA target sequence for Fes (NM_010194.1,185-203).
ggaatatgcaggattgctt

SEQ ID NO: 502246 - DNA, 19 bp, Mus musculus
  siRNA target sequence for Fes (NM_010194.1,289-307).
caagccagaccgagaactt

SEQ ID NO: 502247 - DNA, 19 bp, Mus musculus
  siRNA target sequence for Fes (NM_010194.1,848-866).
cttcctgcgacaatatgga

SEQ ID NO: 502248 - DNA, 19 bp, Mus musculus
  siRNA target sequence for Fes (NM_010194.1,883-901).
caccttgtgtcacttttga

SEQ ID NO: 502249 - DNA, 19 bp, Mus musculus
  siRNA target sequence for Fes (NM_010194.1,1317-1335).
cccacactggagatcctta

SEQ ID NO: 502250 - DNA, 19 bp, Mus musculus
  siRNA target sequence for Fes (NM_010194.1,1318-1336).
ccacactggagatccttaa

SEQ ID NO: 502251 - DNA, 19 bp, Mus musculus
  siRNA target sequence for Fes (NM_010194.1,1319-1337).
cacactggagatccttaaa

SEQ ID NO: 502252 - DNA, 19 bp, Mus musculus
  siRNA target sequence for Fes (NM_010194.1,1511-1529).
gggcaagcaggagtatgta

SEQ ID NO: 502253 - DNA, 19 bp, Mus musculus
  siRNA target sequence for Fes (NM_010194.1,1513-1531).
gcaagcaggagtatgtact

SEQ ID NO: 502254 - DNA, 19 bp, Mus musculus
  siRNA target sequence for Fes (NM_010194.1,1766-1784).
cttcggagaggtgtttagt

SEQ ID NO: 502255 - DNA, 19 bp, Mus musculus
  siRNA target sequence for Fes (NM_010194.1,1788-1806).
cgccttcgtgcagacaata

SEQ ID NO: 502256 - DNA, 19 bp, Mus musculus
  siRNA target sequence for Fes (NM_010194.1,1809-1827).
ccggtggctgtgaagtctt

SEQ ID NO: 502257 - DNA, 19 bp, Mus musculus
  siRNA target sequence for Fes (NM_010194.1,1892-1910).
gtacaaccaccccaacatt

SEQ ID NO: 502258 - DNA, 19 bp, Mus musculus
  siRNA target sequence for Fes (NM_010194.1,1922-1940).
cggggtctgcacacagaaa

SEQ ID NO: 502259 - DNA, 19 bp, Mus musculus
  siRNA target sequence for Fes (NM_010194.1,1935-1953).
cagaaacagccgatctaca

SEQ ID NO: 502260 - DNA, 19 bp, Mus musculus
  siRNA target sequence for Fes (NM_010194.1,2235-2253).
gcccctgaggcccttaact

SEQ ID NO: 502261 - DNA, 19 bp, Mus musculus
  siRNA target sequence for Fes (NM_010194.1,2455-2473).
ctgggcagagacctagttt

SEQ ID NO: 502262 - DNA, 19 bp, Mus musculus
  siRNA target sequence for Fes (NM_010194.1,2457-2475).
gggcagagacctagtttca

SEQ ID NO: 502263 - DNA, 19 bp, Mus musculus
  siRNA target sequence for Fgfr1 (NM_010206.1,221-239).
gtcggcttcgcgatgatgt

SEQ ID NO: 502264 - DNA, 19 bp, Mus musculus
  siRNA target sequence for Fgfr1 (NM_010206.1,423-441).
cccatcctcggaagatgat

SEQ ID NO: 502265 - DNA, 19 bp, Mus musculus
  siRNA target sequence for Fgfr1 (NM_010206.1,617-635).
ctctgcgctggttgaaaaa

SEQ ID NO: 502266 - DNA, 19 bp, Mus musculus
  siRNA target sequence for Fgfr1 (NM_010206.1,651-669).
gcctgaccaccgaattgga

SEQ ID NO: 502267 - DNA, 19 bp, Mus musculus
  siRNA target sequence for Fgfr1 (NM_010206.1,747-765).
catcgtggagaatgagtat

SEQ ID NO: 502268 - DNA, 19 bp, Mus musculus
  siRNA target sequence for Fgfr1 (NM_010206.1,900-918).
cgatccgcagcctcacatt

SEQ ID NO: 502269 - DNA, 19 bp, Mus musculus
  siRNA target sequence for Fgfr1 (NM_010206.1,904-922).
ccgcagcctcacattcagt

SEQ ID NO: 502270 - DNA, 19 bp, Mus musculus
  siRNA target sequence for Fgfr1 (NM_010206.1,990-1008).
gaagactgctggagttaat

SEQ ID NO: 502271 - DNA, 19 bp, Mus musculus
  siRNA target sequence for Fgfr1 (NM_010206.1,1033-1051).
cttcatctacggaatgtct

SEQ ID NO: 502272 - DNA, 19 bp, Mus musculus
  siRNA target sequence for Fgfr1 (NM_010206.1,1172-1190).
cgctctacctggagatcat

SEQ ID NO: 502273 - DNA, 19 bp, Mus musculus
  siRNA target sequence for Fgfr1 (NM_010206.1,1180-1198).
ctggagatcattatctact

SEQ ID NO: 502274 - DNA, 19 bp, Mus musculus
  siRNA target sequence for Fgfr1 (NM_010206.1,1428-1446).
ggctggagtctccgaatat

SEQ ID NO: 502275 - DNA, 19 bp, Mus musculus
  siRNA target sequence for Fgfr1 (NM_010206.1,1430-1448).
ctggagtctccgaatatga

SEQ ID NO: 502276 - DNA, 19 bp, Mus musculus
  siRNA target sequence for Fgfr1 (NM_010206.1,1547-1565).
ccatcgggctggataagga

SEQ ID NO: 502277 - DNA, 19 bp, Mus musculus
  siRNA target sequence for Fgfr1 (NM_010206.1,1717-1735).
gatggtcctctttatgtca

SEQ ID NO: 502278 - DNA, 19 bp, Mus musculus
  siRNA target sequence for Fgfr1 (NM_010206.1,1758-1776).
caatctccgggagtatcta

SEQ ID NO: 502279 - DNA, 19 bp, Mus musculus
  siRNA target sequence for Fgfr1 (NM_010206.1,1796-1814).
ggctggagtactgctataa

SEQ ID NO: 502280 - DNA, 19 bp, Mus musculus
  siRNA target sequence for Fgfr1 (NM_010206.1,1891-1909).
gagtatcttgcctctaaga

SEQ ID NO: 502281 - DNA, 19 bp, Mus musculus
  siRNA target sequence for Fgfr1 (NM_010206.1,1901-1919).
cctctaagaagtgtataca

SEQ ID NO: 502282 - DNA, 19 bp, Mus musculus
  siRNA target sequence for Fgfr1 (NM_010206.1,1947-1965).
ggtgaccgaggataacgta

SEQ ID NO: 502283 - DNA, 19 bp, Mus musculus
  siRNA target sequence for Fgfr1 (NM_010206.1,1948-1966).
gtgaccgaggataacgtaa

SEQ ID NO: 502284 - DNA, 19 bp, Mus musculus
  siRNA target sequence for Fgfr1 (NM_010206.1,1952-1970).
ccgaggataacgtaatgaa

SEQ ID NO: 502285 - DNA, 19 bp, Mus musculus
  siRNA target sequence for Fgfr1 (NM_010206.1,1985-2003).
gcttagctcgagacattca

SEQ ID NO: 502286 - DNA, 19 bp, Mus musculus
  siRNA target sequence for Fgfr1 (NM_010206.1,1986-2004).
cttagctcgagacattcat

SEQ ID NO: 502287 - DNA, 19 bp, Mus musculus
  siRNA target sequence for Fgfr1 (NM_010206.1,1991-2009).
ctcgagacattcatcatat

SEQ ID NO: 502288 - DNA, 19 bp, Mus musculus
  siRNA target sequence for Fgfr1 (NM_010206.1,1994-2012).
gagacattcatcatatcga

SEQ ID NO: 502289 - DNA, 19 bp, Mus musculus
  siRNA target sequence for Fgfr1 (NM_010206.1,2002-2020).
catcatatcgactactaca

SEQ ID NO: 502290 - DNA, 19 bp, Mus musculus
  siRNA target sequence for Fgfr1 (NM_010206.1,2005-2023).
catatcgactactacaaga

SEQ ID NO: 502291 - DNA, 19 bp, Mus musculus
  siRNA target sequence for Fgfr1 (NM_010206.1,2058-2076).
ggcccctgaggcgttgttt

SEQ ID NO: 502292 - DNA, 19 bp, Mus musculus
  siRNA target sequence for Fgfr1 (NM_010206.1,2060-2078).
cccctgaggcgttgtttga

SEQ ID NO: 502293 - DNA, 19 bp, Mus musculus
  siRNA target sequence for Fgfr2 (NM_010207.1,712-730).
gaagagccaccaaccaaat

SEQ ID NO: 502294 - DNA, 19 bp, Mus musculus
  siRNA target sequence for Fgfr2 (NM_010207.1,781-799).
gagttgcagtgcatgttga

SEQ ID NO: 502295 - DNA, 19 bp, Mus musculus
  siRNA target sequence for Fgfr2 (NM_010207.1,783-801).
gttgcagtgcatgttgaaa

SEQ ID NO: 502296 - DNA, 19 bp, Mus musculus
  siRNA target sequence for Fgfr2 (NM_010207.1,786-804).
gcagtgcatgttgaaagat

SEQ ID NO: 502297 - DNA, 19 bp, Mus musculus
  siRNA target sequence for Fgfr2 (NM_010207.1,813-831).
gatcagttggactaaggat

SEQ ID NO: 502298 - DNA, 19 bp, Mus musculus
  siRNA target sequence for Fgfr2 (NM_010207.1,912-930).
cggcctctatgcttgtact

SEQ ID NO: 502299 - DNA, 19 bp, Mus musculus
  siRNA target sequence for Fgfr2 (NM_010207.1,939-957).
gacggtagacagtgaaact

SEQ ID NO: 502300 - DNA, 19 bp, Mus musculus
  siRNA target sequence for Fgfr2 (NM_010207.1,1560-1578).
caccacggacaaagagatt

SEQ ID NO: 502301 - DNA, 19 bp, Mus musculus
  siRNA target sequence for Fgfr2 (NM_010207.1,1585-1603).
ctctatattcggaatgtaa

SEQ ID NO: 502302 - DNA, 19 bp, Mus musculus
  siRNA target sequence for Fgfr2 (NM_010207.1,1587-1605).
ctatattcggaatgtaact

SEQ ID NO: 502303 - DNA, 19 bp, Mus musculus
  siRNA target sequence for Fgfr3 (NM_008010.1,482-500).
gaggctgcaagtgctaaat

SEQ ID NO: 502304 - DNA, 19 bp, Mus musculus
  siRNA target sequence for Fgfr3 (NM_008010.1,566-584).
cttcagtgtgcgtgtaaca

SEQ ID NO: 502305 - DNA, 19 bp, Mus musculus
  siRNA target sequence for Fgfr3 (NM_008010.1,569-587).
cagtgtgcgtgtaacagat

SEQ ID NO: 502306 - DNA, 19 bp, Mus musculus
  siRNA target sequence for Fgfr3 (NM_008010.1,633-651).
gacacaggggctccttatt

SEQ ID NO: 502307 - DNA, 19 bp, Mus musculus
  siRNA target sequence for Fgfr3 (NM_008010.1,660-678).
ccggagcgaatggataaga

SEQ ID NO: 502308 - DNA, 19 bp, Mus musculus
  siRNA target sequence for Fgfr3 (NM_008010.1,662-680).
ggagcgaatggataagaaa

SEQ ID NO: 502309 - DNA, 19 bp, Mus musculus
  siRNA target sequence for Fgfr3 (NM_008010.1,854-872).
ctccgatcgtggcaactat

SEQ ID NO: 502310 - DNA, 19 bp, Mus musculus
  siRNA target sequence for Fgfr3 (NM_008010.1,1461-1479).
gtgtccttggaatctaact

SEQ ID NO: 502311 - DNA, 19 bp, Mus musculus
  siRNA target sequence for Fgfr3 (NM_008010.1,1470-1488).
gaatctaactcctctatga

SEQ ID NO: 502312 - DNA, 19 bp, Mus musculus
  siRNA target sequence for Fgfr3 (NM_008010.1,1539-1557).
cctgttctggccaatgttt

SEQ ID NO: 502313 - DNA, 19 bp, Mus musculus
  siRNA target sequence for Fgfr3 (NM_008010.1,1549-1567).
ccaatgtttctgaacttga

SEQ ID NO: 502314 - DNA, 19 bp, Mus musculus
  siRNA target sequence for Fgfr3 (NM_008010.1,1916-1934).
catggactactcctttgat

SEQ ID NO: 502315 - DNA, 19 bp, Mus musculus
  siRNA target sequence for Fgfr4 (NM_008011.1,283-301).
gtcgtcactggtacaaaga

SEQ ID NO: 502316 - DNA, 19 bp, Mus musculus
  siRNA target sequence for Fgfr4 (NM_008011.1,412-430).
ccatgaccgtcgtacacaa

SEQ ID NO: 502317 - DNA, 19 bp, Mus musculus
  siRNA target sequence for Fgfr4 (NM_008011.1,413-431).
catgaccgtcgtacacaat

SEQ ID NO: 502318 - DNA, 19 bp, Mus musculus
  siRNA target sequence for Fgfr4 (NM_008011.1,416-434).
gaccgtcgtacacaatctt

SEQ ID NO: 502319 - DNA, 19 bp, Mus musculus
  siRNA target sequence for Fgfr4 (NM_008011.1,426-444).
cacaatcttacgttgctta

SEQ ID NO: 502320 - DNA, 19 bp, Mus musculus
  siRNA target sequence for Fgfr4 (NM_008011.1,454-472).
ccttaacctccatcagtaa

SEQ ID NO: 502321 - DNA, 19 bp, Mus musculus
  siRNA target sequence for Fgfr4 (NM_008011.1,460-478).
cctccatcagtaatgatga

SEQ ID NO: 502322 - DNA, 19 bp, Mus musculus
  siRNA target sequence for Fgfr4 (NM_008011.1,461-479).
ctccatcagtaatgatgaa

SEQ ID NO: 502323 - DNA, 19 bp, Mus musculus
  siRNA target sequence for Fgfr4 (NM_008011.1,502-520).
cctcgagtggtcatgtcta

SEQ ID NO: 502324 - DNA, 19 bp, Mus musculus
  siRNA target sequence for Fgfr4 (NM_008011.1,585-603).
gccgggaatactgtcaaat

SEQ ID NO: 502325 - DNA, 19 bp, Mus musculus
  siRNA target sequence for Fgfr4 (NM_008011.1,586-604).
ccgggaatactgtcaaatt

SEQ ID NO: 502326 - DNA, 19 bp, Mus musculus
  siRNA target sequence for Fgfr4 (NM_008011.1,668-686).
ccacggggagaatcgtatt

SEQ ID NO: 502327 - DNA, 19 bp, Mus musculus
  siRNA target sequence for Fgfr4 (NM_008011.1,671-689).
cggggagaatcgtattgga

SEQ ID NO: 502328 - DNA, 19 bp, Mus musculus
  siRNA target sequence for Fgfr4 (NM_008011.1,1189-1207).
ccagatacacagatatcat

SEQ ID NO: 502329 - DNA, 19 bp, Mus musculus
  siRNA target sequence for Fgfr4 (NM_008011.1,1297-1315).
gccagcctgtcactataca

SEQ ID NO: 502330 - DNA, 19 bp, Mus musculus
  siRNA target sequence for Fgfr4 (NM_008011.1,1430-1448).
gctcacgggccttgtgaat

SEQ ID NO: 502331 - DNA, 19 bp, Mus musculus
  siRNA target sequence for Fgfr4 (NM_008011.1,1433-1451).
cacgggccttgtgaatcta

SEQ ID NO: 502332 - DNA, 19 bp, Mus musculus
  siRNA target sequence for Fgfr4 (NM_008011.1,1435-1453).
cgggccttgtgaatctaga

SEQ ID NO: 502333 - DNA, 19 bp, Mus musculus
  siRNA target sequence for Fgfr4 (NM_008011.1,1789-1807).
gaaaccttcgggaattcct

SEQ ID NO: 502334 - DNA, 19 bp, Mus musculus
  siRNA target sequence for Fgfr4 (NM_008011.1,1912-1930).
cccgaggcatgcagtatct

SEQ ID NO: 502335 - DNA, 19 bp, Mus musculus
  siRNA target sequence for Fgfr4 (NM_008011.1,2029-2047).
gtgtccaccacattgacta

SEQ ID NO: 502336 - DNA, 19 bp, Mus musculus
  siRNA target sequence for Fgfr4 (NM_008011.1,2033-2051).
ccaccacattgactactat

SEQ ID NO: 502337 - DNA, 19 bp, Mus musculus
  siRNA target sequence for Fgfr4 (NM_008011.1,2037-2055).
cacattgactactataaga

SEQ ID NO: 502338 - DNA, 19 bp, Mus musculus
  siRNA target sequence for Fgfr4 (NM_008011.1,2399-2417).
gacctttggacccttttct

SEQ ID NO: 502339 - DNA, 19 bp, Mus musculus
  siRNA target sequence for Fgr (NM_010208.2,291-309).
gagccaaacggctgaagaa

SEQ ID NO: 502340 - DNA, 19 bp, Mus musculus
  siRNA target sequence for Fgr (NM_010208.2,409-427).
gggaccggagtgaccatat

SEQ ID NO: 502341 - DNA, 19 bp, Mus musculus
  siRNA target sequence for Fgr (NM_010208.2,410-428).
ggaccggagtgaccatatt

SEQ ID NO: 502342 - DNA, 19 bp, Mus musculus
  siRNA target sequence for Fgr (NM_010208.2,413-431).
ccggagtgaccatattcgt

SEQ ID NO: 502343 - DNA, 19 bp, Mus musculus
  siRNA target sequence for Fgr (NM_010208.2,750-768).
gaacagaggcgatcacata

SEQ ID NO: 502344 - DNA, 19 bp, Mus musculus
  siRNA target sequence for Fgr (NM_010208.2,757-775).
ggcgatcacataaagcatt

SEQ ID NO: 502345 - DNA, 19 bp, Mus musculus
  siRNA target sequence for Fgr (NM_010208.2,758-776).
gcgatcacataaagcatta

SEQ ID NO: 502346 - DNA, 19 bp, Mus musculus
  siRNA target sequence for Fgr (NM_010208.2,759-777).
cgatcacataaagcattat

SEQ ID NO: 502347 - DNA, 19 bp, Mus musculus
  siRNA target sequence for Fgr (NM_010208.2,763-781).
cacataaagcattataaga

SEQ ID NO: 502348 - DNA, 19 bp, Mus musculus
  siRNA target sequence for Fgr (NM_010208.2,854-872).
ggcactacatggaagtgaa

SEQ ID NO: 502349 - DNA, 19 bp, Mus musculus
  siRNA target sequence for Fgr (NM_010208.2,855-873).
gcactacatggaagtgaat

SEQ ID NO: 502350 - DNA, 19 bp, Mus musculus
  siRNA target sequence for Fgr (NM_010208.2,877-895).
ggtctgtgctacttgctta

SEQ ID NO: 502351 - DNA, 19 bp, Mus musculus
  siRNA target sequence for Fgr (NM_010208.2,1186-1204).
gagttcatgtgctatggta

SEQ ID NO: 502352 - DNA, 19 bp, Mus musculus
  siRNA target sequence for Fgr (NM_010208.2,1228-1246).
cgagaaggtcagaacttga

SEQ ID NO: 502353 - DNA, 19 bp, Mus musculus
  siRNA target sequence for Fgr (NM_010208.2,1299-1317).
catggaacgcatgaactat

SEQ ID NO: 502354 - DNA, 19 bp, Mus musculus
  siRNA target sequence for Fgr (NM_010208.2,1348-1366).
ctggtgggggaatacctaa

SEQ ID NO: 502355 - DNA, 19 bp, Mus musculus
  siRNA target sequence for Fgr (NM_010208.2,1350-1368).
ggtgggggaatacctaata

SEQ ID NO: 502356 - DNA, 19 bp, Mus musculus
  siRNA target sequence for Fgr (NM_010208.2,1354-1372).
ggggaatacctaatatgca

SEQ ID NO: 502357 - DNA, 19 bp, Mus musculus
  siRNA target sequence for Fgr (NM_010208.2,1388-1406).
ggctggcacgcctcataga

SEQ ID NO: 502358 - DNA, 19 bp, Mus musculus
  siRNA target sequence for Fgr (NM_010208.2,1471-1489).
gccctctttggcagattca

SEQ ID NO: 502359 - DNA, 19 bp, Mus musculus
  siRNA target sequence for Fgr (NM_010208.2,1473-1491).
cctctttggcagattcact

SEQ ID NO: 502360 - DNA, 19 bp, Mus musculus
  siRNA target sequence for Fgr (NM_010208.2,1482-1500).
cagattcactgtcaaatca

SEQ ID NO: 502361 - DNA, 19 bp, Mus musculus
  siRNA target sequence for Fign (NM_021716.1,403-421).
caaagttgaagcctataga

SEQ ID NO: 502362 - DNA, 19 bp, Mus musculus
  siRNA target sequence for Fign (NM_021716.1,414-432).
cctatagaggtcatttaca

SEQ ID NO: 502363 - DNA, 19 bp, Mus musculus
  siRNA target sequence for Fign (NM_021716.1,445-463).
gtatgcctgggcgaatgat

SEQ ID NO: 502364 - DNA, 19 bp, Mus musculus
  siRNA target sequence for Fign (NM_021716.1,451-469).
ctgggcgaatgatgacata

SEQ ID NO: 502365 - DNA, 19 bp, Mus musculus
  siRNA target sequence for Fign (NM_021716.1,454-472).
ggcgaatgatgacatatct

SEQ ID NO: 502366 - DNA, 19 bp, Mus musculus
  siRNA target sequence for Fign (NM_021716.1,482-500).
gcgtccaaccttctgaaaa

SEQ ID NO: 502367 - DNA, 19 bp, Mus musculus
  siRNA target sequence for Fign (NM_021716.1,545-563).
cgacctgtactcagcaatt

SEQ ID NO: 502368 - DNA, 19 bp, Mus musculus
  siRNA target sequence for Fign (NM_021716.1,546-564).
gacctgtactcagcaatta

SEQ ID NO: 502369 - DNA, 19 bp, Mus musculus
  siRNA target sequence for Fign (NM_021716.1,548-566).
cctgtactcagcaattatt

SEQ ID NO: 502370 - DNA, 19 bp, Mus musculus
  siRNA target sequence for Fign (NM_021716.1,586-604).
cgtgaatggtcggaaaaat

SEQ ID NO: 502371 - DNA, 19 bp, Mus musculus
  siRNA target sequence for Fign (NM_021716.1,631-649).
gaattcagaagccgtttat

SEQ ID NO: 502372 - DNA, 19 bp, Mus musculus
  siRNA target sequence for Fign (NM_021716.1,636-654).
cagaagccgtttatcctat

SEQ ID NO: 502373 - DNA, 19 bp, Mus musculus
  siRNA target sequence for Fign (NM_021716.1,766-784).
gacagagccaagttactca

SEQ ID NO: 502374 - DNA, 19 bp, Mus musculus
  siRNA target sequence for Fign (NM_021716.1,770-788).
gagccaagttactcaagta

SEQ ID NO: 502375 - DNA, 19 bp, Mus musculus
  siRNA target sequence for Fign (NM_021716.1,772-790).
gccaagttactcaagtagt

SEQ ID NO: 502376 - DNA, 19 bp, Mus musculus
  siRNA target sequence for Fign (NM_021716.1,829-847).
gctcccatctcaggaatat

SEQ ID NO: 502377 - DNA, 19 bp, Mus musculus
  siRNA target sequence for Fign (NM_021716.1,832-850).
cccatctcaggaatatgct

SEQ ID NO: 502378 - DNA, 19 bp, Mus musculus
  siRNA target sequence for Fign (NM_021716.1,854-872).
ggatacaacggctcatatt

SEQ ID NO: 502379 - DNA, 19 bp, Mus musculus
  siRNA target sequence for Fign (NM_021716.1,855-873).
gatacaacggctcatattt

SEQ ID NO: 502380 - DNA, 19 bp, Mus musculus
  siRNA target sequence for Fign (NM_021716.1,863-881).
ggctcatatttgcattcta

SEQ ID NO: 502381 - DNA, 19 bp, Mus musculus
  siRNA target sequence for Fign (NM_021716.1,920-938).
catccgtccccgttgcata

SEQ ID NO: 502382 - DNA, 19 bp, Mus musculus
  siRNA target sequence for Fign (NM_021716.1,923-941).
ccgtccccgttgcatagtt

SEQ ID NO: 502383 - DNA, 19 bp, Mus musculus
  siRNA target sequence for Fign (NM_021716.1,925-943).
gtccccgttgcatagttct

SEQ ID NO: 502384 - DNA, 19 bp, Mus musculus
  siRNA target sequence for Fign (NM_021716.1,997-1015).
ctacaacgggacttccaat

SEQ ID NO: 502385 - DNA, 19 bp, Mus musculus
  siRNA target sequence for Fign (NM_021716.1,1012-1030).
caatctctccagttacagt

SEQ ID NO: 502386 - DNA, 19 bp, Mus musculus
  siRNA target sequence for Fign (NM_021716.1,1173-1191).
cctaccaaggtcatggttt

SEQ ID NO: 502387 - DNA, 19 bp, Mus musculus
  siRNA target sequence for Fign (NM_021716.1,1229-1247).
gcaagttctctcaaaagga

SEQ ID NO: 502388 - DNA, 19 bp, Mus musculus
  siRNA target sequence for Fign (NM_021716.1,1280-1298).
gactccagttacggaaatt

SEQ ID NO: 502389 - DNA, 19 bp, Mus musculus
  siRNA target sequence for Fign (NM_021716.1,1346-1364).
cccgacaacagcatttcaa

SEQ ID NO: 502390 - DNA, 19 bp, Mus musculus
  siRNA target sequence for Fign (NM_021716.1,1347-1365).
ccgacaacagcatttcaaa

SEQ ID NO: 502391 - DNA, 19 bp, Mus musculus
  siRNA target sequence for Fign (NM_021716.1,1349-1367).
gacaacagcatttcaaact

SEQ ID NO: 502392 - DNA, 19 bp, Mus musculus
  siRNA target sequence for Fign (NM_021716.1,1390-1408).
cagaaatgctgaaacatca

SEQ ID NO: 502393 - DNA, 19 bp, Mus musculus
  siRNA target sequence for Fign (NM_021716.1,1489-1507).
gacccctccttcctatagt

SEQ ID NO: 502394 - DNA, 19 bp, Mus musculus
  siRNA target sequence for Fign (NM_021716.1,1500-1518).
cctatagtactgctaaaaa

SEQ ID NO: 502395 - DNA, 19 bp, Mus musculus
  siRNA target sequence for Fign (NM_021716.1,1530-1548).
caaggtccagtgaatcctt

SEQ ID NO: 502396 - DNA, 19 bp, Mus musculus
  siRNA target sequence for Fign (NM_021716.1,1541-1559).
gaatcctttgggaagtata

SEQ ID NO: 502397 - DNA, 19 bp, Mus musculus
  siRNA target sequence for Fign (NM_021716.1,1603-1621).
cctcgctcatccaatacaa

SEQ ID NO: 502398 - DNA, 19 bp, Mus musculus
  siRNA target sequence for Fign (NM_021716.1,1768-1786).
cctggtgaaggcggttatt

SEQ ID NO: 502399 - DNA, 19 bp, Mus musculus
  siRNA target sequence for Fign (NM_021716.1,1769-1787).
ctggtgaaggcggttatta

SEQ ID NO: 502400 - DNA, 19 bp, Mus musculus
  siRNA target sequence for Fign (NM_021716.1,1813-1831).
gaggtcagatgcattcagt

SEQ ID NO: 502401 - DNA, 19 bp, Mus musculus
  siRNA target sequence for Fign (NM_021716.1,1832-1850).
gggctgaccgccttaccta

SEQ ID NO: 502402 - DNA, 19 bp, Mus musculus
  siRNA target sequence for Fign (NM_021716.1,1919-1937).
ctaggggccacgtttttca

SEQ ID NO: 502403 - DNA, 19 bp, Mus musculus
  siRNA target sequence for Fign (NM_021716.1,1947-1965).
gttccggactcgttgcaaa

SEQ ID NO: 502404 - DNA, 19 bp, Mus musculus
  siRNA target sequence for Fign (NM_021716.1,2021-2039).
cgccagccctcggtgattt

SEQ ID NO: 502405 - DNA, 19 bp, Mus musculus
  siRNA target sequence for Fign (NM_021716.1,2022-2040).
gccagccctcggtgatttt

SEQ ID NO: 502406 - DNA, 19 bp, Mus musculus
  siRNA target sequence for Fign (NM_021716.1,2023-2041).
ccagccctcggtgattttt

SEQ ID NO: 502407 - DNA, 19 bp, Mus musculus
  siRNA target sequence for Fign (NM_021716.1,2031-2049).
cggtgatttttgttagtga

SEQ ID NO: 502408 - DNA, 19 bp, Mus musculus
  siRNA target sequence for Fign (NM_021716.1,2093-2111).
ccagtcagtcggatgagaa

SEQ ID NO: 502409 - DNA, 19 bp, Mus musculus
  siRNA target sequence for Fign (NM_021716.1,2145-2163).
cttcggctgaggaccaaat

SEQ ID NO: 502410 - DNA, 19 bp, Mus musculus
  siRNA target sequence for Fign (NM_021716.1,2149-2167).
ggctgaggaccaaatcgta

SEQ ID NO: 502411 - DNA, 19 bp, Mus musculus
  siRNA target sequence for Fign (NM_021716.1,2208-2226).
ctcttcggaggtacttcat

SEQ ID NO: 502412 - DNA, 19 bp, Mus musculus
  siRNA target sequence for Fign (NM_021716.1,2213-2231).
cggaggtacttcatgaaaa

SEQ ID NO: 502413 - DNA, 19 bp, Mus musculus
  siRNA target sequence for Fign (NM_021716.1,2217-2235).
ggtacttcatgaaaagact

SEQ ID NO: 502414 - DNA, 19 bp, Mus musculus
  siRNA target sequence for Fign (NM_021716.1,2259-2277).
cagcgaggcaccagataat

SEQ ID NO: 502415 - DNA, 19 bp, Mus musculus
  siRNA target sequence for Fign (NM_021716.1,2262-2280).
cgaggcaccagataatagt

SEQ ID NO: 502416 - DNA, 19 bp, Mus musculus
  siRNA target sequence for Fign (NM_021716.1,2263-2281).
gaggcaccagataatagta

SEQ ID NO: 502417 - DNA, 19 bp, Mus musculus
  siRNA target sequence for Fign (NM_021716.1,2265-2283).
ggcaccagataatagtaca

SEQ ID NO: 502418 - DNA, 19 bp, Mus musculus
  siRNA target sequence for Fign (NM_021716.1,2361-2379).
gactagacgtggctcattt

SEQ ID NO: 502419 - DNA, 19 bp, Mus musculus
  siRNA target sequence for Fign (NM_021716.1,2363-2381).
ctagacgtggctcatttgt

SEQ ID NO: 502420 - DNA, 19 bp, Mus musculus
  siRNA target sequence for Fign (NM_021716.1,2450-2468).
cagttaaggcccgttacat

SEQ ID NO: 502421 - DNA, 19 bp, Mus musculus
  siRNA target sequence for Fign (NM_021716.1,2452-2470).
gttaaggcccgttacatat

SEQ ID NO: 502422 - DNA, 19 bp, Mus musculus
  siRNA target sequence for Fign (NM_021716.1,2457-2475).
ggcccgttacatatcaaga

SEQ ID NO: 502423 - DNA, 19 bp, Mus musculus
  siRNA target sequence for Fign (NM_021716.1,2460-2478).
ccgttacatatcaagactt

SEQ ID NO: 502424 - DNA, 19 bp, Mus musculus
  siRNA target sequence for Fign (NM_021716.1,2461-2479).
cgttacatatcaagacttt

SEQ ID NO: 502425 - DNA, 19 bp, Mus musculus
  siRNA target sequence for Fign (NM_021716.1,2525-2543).
cttgatatgtatgttgaat

SEQ ID NO: 502426 - DNA, 19 bp, Mus musculus
  siRNA target sequence for Fignl1 (NM_021891.2,287-305).
cataccgtgcactactact

SEQ ID NO: 502427 - DNA, 19 bp, Mus musculus
  siRNA target sequence for Fignl1 (NM_021891.2,293-311).
gtgcactactactgcatat

SEQ ID NO: 502428 - DNA, 19 bp, Mus musculus
  siRNA target sequence for Fignl1 (NM_021891.2,296-314).
cactactactgcatattca

SEQ ID NO: 502429 - DNA, 19 bp, Mus musculus
  siRNA target sequence for Fignl1 (NM_021891.2,298-316).
ctactactgcatattcagt

SEQ ID NO: 502430 - DNA, 19 bp, Mus musculus
  siRNA target sequence for Fignl1 (NM_021891.2,304-322).
ctgcatattcagtatgcat

SEQ ID NO: 502431 - DNA, 19 bp, Mus musculus
  siRNA target sequence for Fignl1 (NM_021891.2,306-324).
gcatattcagtatgcatat

SEQ ID NO: 502432 - DNA, 19 bp, Mus musculus
  siRNA target sequence for Fignl1 (NM_021891.2,357-375).
caacctgttcaaaaggtat

SEQ ID NO: 502433 - DNA, 19 bp, Mus musculus
  siRNA target sequence for Fignl1 (NM_021891.2,360-378).
cctgttcaaaaggtataca

SEQ ID NO: 502434 - DNA, 19 bp, Mus musculus
  siRNA target sequence for Fignl1 (NM_021891.2,372-390).
gtatacagaaaaatactct

SEQ ID NO: 502435 - DNA, 19 bp, Mus musculus
  siRNA target sequence for Fignl1 (NM_021891.2,387-405).
ctctgcaattattgattct

SEQ ID NO: 502436 - DNA, 19 bp, Mus musculus
  siRNA target sequence for Fignl1 (NM_021891.2,412-430).
gttgtaactggcttgaata

SEQ ID NO: 502437 - DNA, 19 bp, Mus musculus
  siRNA target sequence for Fignl1 (NM_021891.2,464-482).
ctcgacaggctgacagtaa

SEQ ID NO: 502438 - DNA, 19 bp, Mus musculus
  siRNA target sequence for Fignl1 (NM_021891.2,466-484).
cgacaggctgacagtaaca

SEQ ID NO: 502439 - DNA, 19 bp, Mus musculus
  siRNA target sequence for Fignl1 (NM_021891.2,467-485).
gacaggctgacagtaacaa

SEQ ID NO: 502440 - DNA, 19 bp, Mus musculus
  siRNA target sequence for Fignl1 (NM_021891.2,486-504).
gtggcagtctggattgtca

SEQ ID NO: 502441 - DNA, 19 bp, Mus musculus
  siRNA target sequence for Fignl1 (NM_021891.2,488-506).
ggcagtctggattgtcaat

SEQ ID NO: 502442 - DNA, 19 bp, Mus musculus
  siRNA target sequence for Fignl1 (NM_021891.2,489-507).
gcagtctggattgtcaata

SEQ ID NO: 502443 - DNA, 19 bp, Mus musculus
  siRNA target sequence for Fignl1 (NM_021891.2,497-515).
gattgtcaatagataatgt

SEQ ID NO: 502444 - DNA, 19 bp, Mus musculus
  siRNA target sequence for Fignl1 (NM_021891.2,527-545).
gttgtgtacaggagatgat

SEQ ID NO: 502445 - DNA, 19 bp, Mus musculus
  siRNA target sequence for Fignl1 (NM_021891.2,593-611).
catcagtagtcctgtgtaa

SEQ ID NO: 502446 - DNA, 19 bp, Mus musculus
  siRNA target sequence for Fignl1 (NM_021891.2,661-679).
gaagacgctgacatattat

SEQ ID NO: 502447 - DNA, 19 bp, Mus musculus
  siRNA target sequence for Fignl1 (NM_021891.2,664-682).
gacgctgacatattatcca

SEQ ID NO: 502448 - DNA, 19 bp, Mus musculus
  siRNA target sequence for Fignl1 (NM_021891.2,721-739).
gggagcagtctgagatgtt

SEQ ID NO: 502449 - DNA, 19 bp, Mus musculus
  siRNA target sequence for Fignl1 (NM_021891.2,759-777).
gctgcctaaggaaactaat

SEQ ID NO: 502450 - DNA, 19 bp, Mus musculus
  siRNA target sequence for Fignl1 (NM_021891.2,769-787).
gaaactaataccactaaga

SEQ ID NO: 502451 - DNA, 19 bp, Mus musculus
  siRNA target sequence for Fignl1 (NM_021891.2,798-816).
ctcctcaacatctttaggt

SEQ ID NO: 502452 - DNA, 19 bp, Mus musculus
  siRNA target sequence for Fignl1 (NM_021891.2,871-889).
gacactcaaagctttccta

SEQ ID NO: 502453 - DNA, 19 bp, Mus musculus
  siRNA target sequence for Fignl1 (NM_021891.2,904-922).
ctaaatatgttcttatcta

SEQ ID NO: 502454 - DNA, 19 bp, Mus musculus
  siRNA target sequence for Fignl1 (NM_021891.2,994-1012).
gacatactttccaatccaa

SEQ ID NO: 502455 - DNA, 19 bp, Mus musculus
  siRNA target sequence for Fignl1 (NM_021891.2,1017-1035).
gaacaaggctcctagtaaa

SEQ ID NO: 502456 - DNA, 19 bp, Mus musculus
  siRNA target sequence for Fignl1 (NM_021891.2,1020-1038).
caaggctcctagtaaaaca

SEQ ID NO: 502457 - DNA, 19 bp, Mus musculus
  siRNA target sequence for Fignl1 (NM_021891.2,1023-1041).
ggctcctagtaaaacagaa

SEQ ID NO: 502458 - DNA, 19 bp, Mus musculus
  siRNA target sequence for Fignl1 (NM_021891.2,1048-1066).
ggccgaagggaagataata

SEQ ID NO: 502459 - DNA, 19 bp, Mus musculus
  siRNA target sequence for Fignl1 (NM_021891.2,1134-1152).
ccagcatacatctaaatct

SEQ ID NO: 502460 - DNA, 19 bp, Mus musculus
  siRNA target sequence for Fignl1 (NM_021891.2,1135-1153).
cagcatacatctaaatctt

SEQ ID NO: 502461 - DNA, 19 bp, Mus musculus
  siRNA target sequence for Fignl1 (NM_021891.2,1138-1156).
catacatctaaatcttcta

SEQ ID NO: 502462 - DNA, 19 bp, Mus musculus
  siRNA target sequence for Fignl1 (NM_021891.2,1187-1205).
ggaggtcgagagggatatt

SEQ ID NO: 502463 - DNA, 19 bp, Mus musculus
  siRNA target sequence for Fignl1 (NM_021891.2,1310-1328).
ctgatgattgtctgaagaa

SEQ ID NO: 502464 - DNA, 19 bp, Mus musculus
  siRNA target sequence for Fignl1 (NM_021891.2,1340-1358).
ggatggttgaacttattat

SEQ ID NO: 502465 - DNA, 19 bp, Mus musculus
  siRNA target sequence for Fignl1 (NM_021891.2,1344-1362).
ggttgaacttattatgaat

SEQ ID NO: 502466 - DNA, 19 bp, Mus musculus
  siRNA target sequence for Fignl1 (NM_021891.2,1375-1393).
catgggcctccagtacatt

SEQ ID NO: 502467 - DNA, 19 bp, Mus musculus
  siRNA target sequence for Fignl1 (NM_021891.2,1385-1403).
cagtacattgggacgatat

SEQ ID NO: 502468 - DNA, 19 bp, Mus musculus
  siRNA target sequence for Fignl1 (NM_021891.2,1398-1416).
cgatattgctggagtagaa

SEQ ID NO: 502469 - DNA, 19 bp, Mus musculus
  siRNA target sequence for Fignl1 (NM_021891.2,1399-1417).
gatattgctggagtagaat

SEQ ID NO: 502470 - DNA, 19 bp, Mus musculus
  siRNA target sequence for Fignl1 (NM_021891.2,1427-1445).
ccacaataaaggaaatcgt

SEQ ID NO: 502471 - DNA, 19 bp, Mus musculus
  siRNA target sequence for Fignl1 (NM_021891.2,1444-1462).
gttgtgtggcccatgatga

SEQ ID NO: 502472 - DNA, 19 bp, Mus musculus
  siRNA target sequence for Fignl1 (NM_021891.2,1458-1476).
gatgaggccagatatcttt

SEQ ID NO: 502473 - DNA, 19 bp, Mus musculus
  siRNA target sequence for Fignl1 (NM_021891.2,1461-1479).
gaggccagatatctttact

SEQ ID NO: 502474 - DNA, 19 bp, Mus musculus
  siRNA target sequence for Fignl1 (NM_021891.2,1518-1536).
ccctccagggactggtaaa

SEQ ID NO: 502475 - DNA, 19 bp, Mus musculus
  siRNA target sequence for Fignl1 (NM_021891.2,1527-1545).
gactggtaaaactctgatt

SEQ ID NO: 502476 - DNA, 19 bp, Mus musculus
  siRNA target sequence for Fignl1 (NM_021891.2,1562-1580).
gccagtctggagcaacatt

SEQ ID NO: 502477 - DNA, 19 bp, Mus musculus
  siRNA target sequence for Fignl1 (NM_021891.2,1594-1612).
gcttcatcgttgacttcta

SEQ ID NO: 502478 - DNA, 19 bp, Mus musculus
  siRNA target sequence for Fignl1 (NM_021891.2,1595-1613).
cttcatcgttgacttctaa

SEQ ID NO: 502479 - DNA, 19 bp, Mus musculus
  siRNA target sequence for Fignl1 (NM_021891.2,1671-1689).
gcagccagctgtcatattt

SEQ ID NO: 502480 - DNA, 19 bp, Mus musculus
  siRNA target sequence for Fignl1 (NM_021891.2,1799-1817).
ctgaagaccggattcttgt

SEQ ID NO: 502481 - DNA, 19 bp, Mus musculus
  siRNA target sequence for Fignl1 (NM_021891.2,1913-1931).
ggaaacagatagtaggtaa

SEQ ID NO: 502482 - DNA, 19 bp, Mus musculus
  siRNA target sequence for Fignl1 (NM_021891.2,1918-1936).
cagatagtaggtaatctaa

SEQ ID NO: 502483 - DNA, 19 bp, Mus musculus
  siRNA target sequence for Fignl1 (NM_021891.2,2000-2018).
ggttttctggcgcagatat

SEQ ID NO: 502484 - DNA, 19 bp, Mus musculus
  siRNA target sequence for Fignl1 (NM_021891.2,2037-2055).
ggcttctcttggtcctatt

SEQ ID NO: 502485 - DNA, 19 bp, Mus musculus
  siRNA target sequence for Fignl1 (NM_021891.2,2071-2089).
gctgacattgctaccataa

SEQ ID NO: 502486 - DNA, 19 bp, Mus musculus
  siRNA target sequence for Fignl1 (NM_021891.2,2085-2103).
cataagtccagatcaagtt

SEQ ID NO: 502487 - DNA, 19 bp, Mus musculus
  siRNA target sequence for Fignl1 (NM_021891.2,2098-2116).
caagttcgaccaatagctt

SEQ ID NO: 502488 - DNA, 19 bp, Mus musculus
  siRNA target sequence for Fignl1 (NM_021891.2,2101-2119).
gttcgaccaatagcttata

SEQ ID NO: 502489 - DNA, 19 bp, Mus musculus
  siRNA target sequence for Fignl1 (NM_021891.2,2105-2123).
gaccaatagcttatattga

SEQ ID NO: 502490 - DNA, 19 bp, Mus musculus
  siRNA target sequence for Fignl1 (NM_021891.2,2156-2174).
ctgtatctccaaaagactt

SEQ ID NO: 502491 - DNA, 19 bp, Mus musculus
  siRNA target sequence for Flt1 (NM_010228.2,387-405).
ggccagactctctttctca

SEQ ID NO: 502492 - DNA, 19 bp, Mus musculus
  siRNA target sequence for Flt1 (NM_010228.2,388-406).
gccagactctctttctcaa

SEQ ID NO: 502493 - DNA, 19 bp, Mus musculus
  siRNA target sequence for Flt1 (NM_010228.2,561-579).
ggcctctacacctgtagat

SEQ ID NO: 502494 - DNA, 19 bp, Mus musculus
  siRNA target sequence for Flt1 (NM_010228.2,562-580).
gcctctacacctgtagata

SEQ ID NO: 502495 - DNA, 19 bp, Mus musculus
  siRNA target sequence for Flt1 (NM_010228.2,612-630).
gcggaatcttcaatctaca

SEQ ID NO: 502496 - DNA, 19 bp, Mus musculus
  siRNA target sequence for Flt1 (NM_010228.2,613-631).
cggaatcttcaatctacat

SEQ ID NO: 502497 - DNA, 19 bp, Mus musculus
  siRNA target sequence for Flt1 (NM_010228.2,614-632).
ggaatcttcaatctacata

SEQ ID NO: 502498 - DNA, 19 bp, Mus musculus
  siRNA target sequence for Flt1 (NM_010228.2,615-633).
gaatcttcaatctacatat

SEQ ID NO: 502499 - DNA, 19 bp, Mus musculus
  siRNA target sequence for Flt1 (NM_010228.2,619-637).
cttcaatctacatatttgt

SEQ ID NO: 502500 - DNA, 19 bp, Mus musculus
  siRNA target sequence for Flt1 (NM_010228.2,646-664).
cagggagtcctttcataga

SEQ ID NO: 502501 - DNA, 19 bp, Mus musculus
  siRNA target sequence for Flt1 (NM_010228.2,649-667).
ggagtcctttcatagagat

SEQ ID NO: 502502 - DNA, 19 bp, Mus musculus
  siRNA target sequence for Flt1 (NM_010228.2,671-689).
cactgacatacccaaactt

SEQ ID NO: 502503 - DNA, 19 bp, Mus musculus
  siRNA target sequence for Flt1 (NM_010228.2,673-691).
ctgacatacccaaacttgt

SEQ ID NO: 502504 - DNA, 19 bp, Mus musculus
  siRNA target sequence for Flt1 (NM_010228.2,746-764).
cgtcacagtcaccctaaaa

SEQ ID NO: 502505 - DNA, 19 bp, Mus musculus
  siRNA target sequence for Flt1 (NM_010228.2,747-765).
gtcacagtcaccctaaaaa

SEQ ID NO: 502506 - DNA, 19 bp, Mus musculus
  siRNA target sequence for Flt1 (NM_010228.2,751-769).
cagtcaccctaaaaaagtt

SEQ ID NO: 502507 - DNA, 19 bp, Mus musculus
  siRNA target sequence for Flt1 (NM_010228.2,757-775).
ccctaaaaaagtttccatt

SEQ ID NO: 502508 - DNA, 19 bp, Mus musculus
  siRNA target sequence for Flt1 (NM_010228.2,815-833).
cagtaggagaggctttata

SEQ ID NO: 502509 - DNA, 19 bp, Mus musculus
  siRNA target sequence for Flt1 (NM_010228.2,817-835).
gtaggagaggctttataat

SEQ ID NO: 502510 - DNA, 19 bp, Mus musculus
  siRNA target sequence for Flt1 (NM_010228.2,821-839).
gagaggctttataatagca

SEQ ID NO: 502511 - DNA, 19 bp, Mus musculus
  siRNA target sequence for Flt1 (NM_010228.2,823-841).
gaggctttataatagcaaa

SEQ ID NO: 502512 - DNA, 19 bp, Mus musculus
  siRNA target sequence for Flt1 (NM_010228.2,838-856).
caaatgcaacgtacaaaga

SEQ ID NO: 502513 - DNA, 19 bp, Mus musculus
  siRNA target sequence for Flt1 (NM_010228.2,894-912).
cacctgtaccagacaaact

SEQ ID NO: 502514 - DNA, 19 bp, Mus musculus
  siRNA target sequence for Flt1 (NM_010228.2,896-914).
cctgtaccagacaaactat

SEQ ID NO: 502515 - DNA, 19 bp, Mus musculus
  siRNA target sequence for Flt1 (NM_010228.2,921-939).
catcggcagaccaatacaa

SEQ ID NO: 502516 - DNA, 19 bp, Mus musculus
  siRNA target sequence for Flt1 (NM_010228.2,937-955).
caatcctagatgtccaaat

SEQ ID NO: 502517 - DNA, 19 bp, Mus musculus
  siRNA target sequence for Flt1 (NM_010228.2,1014-1032).
gccaccacggagctcaata

SEQ ID NO: 502518 - DNA, 19 bp, Mus musculus
  siRNA target sequence for Flt1 (NM_010228.2,1052-1070).
gaattaccctggtaaagca

SEQ ID NO: 502519 - DNA, 19 bp, Mus musculus
  siRNA target sequence for Flt1 (NM_010228.2,1105-1123).
ggagccattcccacaacaa

SEQ ID NO: 502520 - DNA, 19 bp, Mus musculus
  siRNA target sequence for Flt1 (NM_010228.2,1108-1126).
gccattcccacaacaatgt

SEQ ID NO: 502521 - DNA, 19 bp, Mus musculus
  siRNA target sequence for Flt1 (NM_010228.2,1135-1153).
gtgttcttaagatcaacaa

SEQ ID NO: 502522 - DNA, 19 bp, Mus musculus
  siRNA target sequence for Flt1 (NM_010228.2,1201-1219).
ggtcctcgttccagtcttt

SEQ ID NO: 502523 - DNA, 19 bp, Mus musculus
  siRNA target sequence for Flt1 (NM_010228.2,1204-1222).
cctcgttccagtctttcaa

SEQ ID NO: 502524 - DNA, 19 bp, Mus musculus
  siRNA target sequence for Flt1 (NM_010228.2,1223-1241).
cacctccgtgcatgtgtat

SEQ ID NO: 502525 - DNA, 19 bp, Mus musculus
  siRNA target sequence for Flt1 (NM_010228.2,1226-1244).
ctccgtgcatgtgtatgaa

SEQ ID NO: 502526 - DNA, 19 bp, Mus musculus
  siRNA target sequence for Flt1 (NM_010228.2,1228-1246).
ccgtgcatgtgtatgaaaa

SEQ ID NO: 502527 - DNA, 19 bp, Mus musculus
  siRNA target sequence for Flt1 (NM_010228.2,1232-1250).
gcatgtgtatgaaaaagga

SEQ ID NO: 502528 - DNA, 19 bp, Mus musculus
  siRNA target sequence for Flt1 (NM_010228.2,1233-1251).
catgtgtatgaaaaaggat

SEQ ID NO: 502529 - DNA, 19 bp, Mus musculus
  siRNA target sequence for Flt1 (NM_010228.2,1310-1328).
ctatcggctgtccatgaaa

SEQ ID NO: 502530 - DNA, 19 bp, Mus musculus
  siRNA target sequence for Flt1 (NM_010228.2,1314-1332).
cggctgtccatgaaagtga

SEQ ID NO: 502531 - DNA, 19 bp, Mus musculus
  siRNA target sequence for Flt1 (NM_010228.2,1315-1333).
ggctgtccatgaaagtgaa

SEQ ID NO: 502532 - DNA, 19 bp, Mus musculus
  siRNA target sequence for Flt1 (NM_010228.2,1341-1359).
ccctccccagaaatcgtat

SEQ ID NO: 502533 - DNA, 19 bp, Mus musculus
  siRNA target sequence for Flt1 (NM_010228.2,1345-1363).
ccccagaaatcgtatggtt

SEQ ID NO: 502534 - DNA, 19 bp, Mus musculus
  siRNA target sequence for Flt1 (NM_010228.2,1346-1364).
cccagaaatcgtatggtta

SEQ ID NO: 502535 - DNA, 19 bp, Mus musculus
  siRNA target sequence for Flt1 (NM_010228.2,1347-1365).
ccagaaatcgtatggttaa

SEQ ID NO: 502536 - DNA, 19 bp, Mus musculus
  siRNA target sequence for Flt1 (NM_010228.2,1348-1366).
cagaaatcgtatggttaaa

SEQ ID NO: 502537 - DNA, 19 bp, Mus musculus
  siRNA target sequence for Flt1 (NM_010228.2,1391-1409).
gtctgctcgctatttggta

SEQ ID NO: 502538 - DNA, 19 bp, Mus musculus
  siRNA target sequence for Flt1 (NM_010228.2,1413-1431).
ggctactcattaattatca

SEQ ID NO: 502539 - DNA, 19 bp, Mus musculus
  siRNA target sequence for Flt1 (NM_010228.2,1414-1432).
gctactcattaattatcaa

SEQ ID NO: 502540 - DNA, 19 bp, Mus musculus
  siRNA target sequence for Flt1 (NM_010228.2,1415-1433).
ctactcattaattatcaaa

SEQ ID NO: 502541 - DNA, 19 bp, Mus musculus
  siRNA target sequence for Flt1 (NM_010228.2,1420-1438).
cattaattatcaaagatgt

SEQ ID NO: 502542 - DNA, 19 bp, Mus musculus
  siRNA target sequence for Flt1 (NM_010228.2,1465-1483).
cgatcttgctgggcataaa

SEQ ID NO: 502543 - DNA, 19 bp, Mus musculus
  siRNA target sequence for Flt1 (NM_010228.2,1484-1502).
gcagtcaaggctatttaaa

SEQ ID NO: 502544 - DNA, 19 bp, Mus musculus
  siRNA target sequence for Flt1 (NM_010228.2,1536-1554).
cctcagatctacgaaaagt

SEQ ID NO: 502545 - DNA, 19 bp, Mus musculus
  siRNA target sequence for Flt1 (NM_010228.2,1627-1645).
gcatccctcggccaacaat

SEQ ID NO: 502546 - DNA, 19 bp, Mus musculus
  siRNA target sequence for Flt1 (NM_010228.2,1670-1688).
ccacaatcactccaaagaa

SEQ ID NO: 502547 - DNA, 19 bp, Mus musculus
  siRNA target sequence for Flt1 (NM_010228.2,1730-1748).
ggatcccagcagcaactta

SEQ ID NO: 502548 - DNA, 19 bp, Mus musculus
  siRNA target sequence for Flt1 (NM_010228.2,1775-1793).
gcgcatgacggtcatagaa

SEQ ID NO: 502549 - DNA, 19 bp, Mus musculus
  siRNA target sequence for Flt1 (NM_010228.2,1834-1852).
ctcagacccctggaatcta

SEQ ID NO: 502550 - DNA, 19 bp, Mus musculus
  siRNA target sequence for Flt1 (NM_010228.2,1977-1995).
ctgtcctgtgtggtcaata

SEQ ID NO: 502551 - DNA, 19 bp, Mus musculus
  siRNA target sequence for Flt1 (NM_010228.2,2031-2049).
cggacagttaacaacagaa

SEQ ID NO: 502552 - DNA, 19 bp, Mus musculus
  siRNA target sequence for Flt1 (NM_010228.2,2047-2065).
gaaccatgcaccatagtat

SEQ ID NO: 502553 - DNA, 19 bp, Mus musculus
  siRNA target sequence for Flt1 (NM_010228.2,2082-2100).
gccaccactcaagattact

SEQ ID NO: 502554 - DNA, 19 bp, Mus musculus
  siRNA target sequence for Flt1 (NM_010228.2,2109-2127).
ctgaaccttgtcatcaaga

SEQ ID NO: 502555 - DNA, 19 bp, Mus musculus
  siRNA target sequence for Flt1 (NM_010228.2,2123-2141).
caagaacgtgtctctagaa

SEQ ID NO: 502556 - DNA, 19 bp, Mus musculus
  siRNA target sequence for Flt1 (NM_010228.2,2195-2213).
ccttcggaagacagaagtt

SEQ ID NO: 502557 - DNA, 19 bp, Mus musculus
  siRNA target sequence for Flt1 (NM_010228.2,2280-2298).
ggctctacgaccttagact

SEQ ID NO: 502558 - DNA, 19 bp, Mus musculus
  siRNA target sequence for Flt1 (NM_010228.2,2348-2366).
ccacaaaatacaacaagaa

SEQ ID NO: 502559 - DNA, 19 bp, Mus musculus
  siRNA target sequence for Flt1 (NM_010228.2,2388-2406).
ggaaacagcacgctgttta

SEQ ID NO: 502560 - DNA, 19 bp, Mus musculus
  siRNA target sequence for Flt1 (NM_010228.2,2427-2445).
gatgagggtgtctataggt

SEQ ID NO: 502561 - DNA, 19 bp, Mus musculus
  siRNA target sequence for Flt1 (NM_010228.2,2502-2520).
ggaacctcagacaagtcaa

SEQ ID NO: 502562 - DNA, 19 bp, Mus musculus
  siRNA target sequence for Flt1 (NM_010228.2,2553-2571).
gtggctgcgaccctctttt

SEQ ID NO: 502563 - DNA, 19 bp, Mus musculus
  siRNA target sequence for Flt1 (NM_010228.2,2607-2625).
cggtcttcttccgaagtaa

SEQ ID NO: 502564 - DNA, 19 bp, Mus musculus
  siRNA target sequence for Flt1 (NM_010228.2,2608-2626).
ggtcttcttccgaagtaaa

SEQ ID NO: 502565 - DNA, 19 bp, Mus musculus
  siRNA target sequence for Flt1 (NM_010228.2,2788-2806).
ctgcatttggcattaagaa

SEQ ID NO: 502566 - DNA, 19 bp, Mus musculus
  siRNA target sequence for Flt1 (NM_010228.2,2790-2808).
gcatttggcattaagaaat

SEQ ID NO: 502567 - DNA, 19 bp, Mus musculus
  siRNA target sequence for Flt1 (NM_010228.2,2906-2924).
catcggccatcatctgaat

SEQ ID NO: 502568 - DNA, 19 bp, Mus musculus
  siRNA target sequence for Flt1 (NM_010228.2,3017-3035).
caagagcaaacgtgactta

SEQ ID NO: 502569 - DNA, 19 bp, Mus musculus
  siRNA target sequence for Flt1 (NM_010228.2,3023-3041).
caaacgtgacttattctgt

SEQ ID NO: 502570 - DNA, 19 bp, Mus musculus
  siRNA target sequence for Flt1 (NM_010228.2,3192-3210).
gaaggagacgaggattaca

SEQ ID NO: 502571 - DNA, 19 bp, Mus musculus
  siRNA target sequence for Flt1 (NM_010228.2,3454-3472).
ctgaatccatctttgacaa

SEQ ID NO: 502572 - DNA, 19 bp, Mus musculus
  siRNA target sequence for Flt1 (NM_010228.2,3547-3565).
catacccaggagtgcaaat

SEQ ID NO: 502573 - DNA, 19 bp, Mus musculus
  siRNA target sequence for Flt1 (NM_010228.2,3594-3612).
gaaggcatgcggatgagaa

SEQ ID NO: 502574 - DNA, 19 bp, Mus musculus
  siRNA target sequence for Flt1 (NM_010228.2,3628-3646).
cacctgaaatctaccaaat

SEQ ID NO: 502575 - DNA, 19 bp, Mus musculus
  siRNA target sequence for Flt1 (NM_010228.2,3630-3648).
cctgaaatctaccaaatca

SEQ ID NO: 502576 - DNA, 19 bp, Mus musculus
  siRNA target sequence for Flt1 (NM_010228.2,3771-3789).
gccatactgactagaaaca

SEQ ID NO: 502577 - DNA, 19 bp, Mus musculus
  siRNA target sequence for Flt1 (NM_010228.2,3784-3802).
gaaacagtggcttcacata

SEQ ID NO: 502578 - DNA, 19 bp, Mus musculus
  siRNA target sequence for Flt1 (NM_010228.2,3841-3859).
gctttgcagatccacattt

SEQ ID NO: 502579 - DNA, 19 bp, Mus musculus
  siRNA target sequence for Flt1 (NM_010228.2,3842-3860).
ctttgcagatccacatttt

SEQ ID NO: 502580 - DNA, 19 bp, Mus musculus
  siRNA target sequence for Flt1 (NM_010228.2,3871-3889).
gctctgatgatgtgagata

SEQ ID NO: 502581 - DNA, 19 bp, Mus musculus
  siRNA target sequence for Flt1 (NM_010228.2,3872-3890).
ctctgatgatgtgagatat

SEQ ID NO: 502582 - DNA, 19 bp, Mus musculus
  siRNA target sequence for Flt1 (NM_010228.2,3876-3894).
gatgatgtgagatatgtaa

SEQ ID NO: 502583 - DNA, 19 bp, Mus musculus
  siRNA target sequence for Flt1 (NM_010228.2,3891-3909).
gtaaacgctttcaaattca

SEQ ID NO: 502584 - DNA, 19 bp, Mus musculus
  siRNA target sequence for Flt1 (NM_010228.2,4067-4085).
cttgagaatagcgagtaaa

SEQ ID NO: 502585 - DNA, 19 bp, Mus musculus
  siRNA target sequence for Flt1 (NM_010228.2,4072-4090).
gaatagcgagtaaaagcaa

SEQ ID NO: 502586 - DNA, 19 bp, Mus musculus
  siRNA target sequence for Flt1 (NM_010228.2,4157-4175).
cgtgcaggacgatgaatct

SEQ ID NO: 502587 - DNA, 19 bp, Mus musculus
  siRNA target sequence for Flt3 (NM_010229.1,124-142).
cctgtgatcaagtgtgttt

SEQ ID NO: 502588 - DNA, 19 bp, Mus musculus
  siRNA target sequence for Flt3 (NM_010229.1,125-143).
ctgtgatcaagtgtgtttt

SEQ ID NO: 502589 - DNA, 19 bp, Mus musculus
  siRNA target sequence for Flt3 (NM_010229.1,127-145).
gtgatcaagtgtgttttaa

SEQ ID NO: 502590 - DNA, 19 bp, Mus musculus
  siRNA target sequence for Flt3 (NM_010229.1,379-397).
ccgcactttgatttacaaa

SEQ ID NO: 502591 - DNA, 19 bp, Mus musculus
  siRNA target sequence for Flt3 (NM_010229.1,380-398).
cgcactttgatttacaaaa

SEQ ID NO: 502592 - DNA, 19 bp, Mus musculus
  siRNA target sequence for Flt3 (NM_010229.1,449-467).
gagaatacctactccatat

SEQ ID NO: 502593 - DNA, 19 bp, Mus musculus
  siRNA target sequence for Flt3 (NM_010229.1,496-514).
ctgttcacagtgaatgtaa

SEQ ID NO: 502594 - DNA, 19 bp, Mus musculus
  siRNA target sequence for Flt3 (NM_010229.1,498-516).
gttcacagtgaatgtaaga

SEQ ID NO: 502595 - DNA, 19 bp, Mus musculus
  siRNA target sequence for Flt3 (NM_010229.1,662-680).
gccctgctgttgtcagaaa

SEQ ID NO: 502596 - DNA, 19 bp, Mus musculus
  siRNA target sequence for Flt3 (NM_010229.1,763-781).
ctgttcaccatagatctaa

SEQ ID NO: 502597 - DNA, 19 bp, Mus musculus
  siRNA target sequence for Flt3 (NM_010229.1,998-1016).
ggaacgacaccggatatta

SEQ ID NO: 502598 - DNA, 19 bp, Mus musculus
  siRNA target sequence for Flt3 (NM_010229.1,1056-1074).
ggtgaccatcctagaaaaa

SEQ ID NO: 502599 - DNA, 19 bp, Mus musculus
  siRNA target sequence for Flt3 (NM_010229.1,1065-1083).
cctagaaaaagggtttata

SEQ ID NO: 502600 - DNA, 19 bp, Mus musculus
  siRNA target sequence for Flt3 (NM_010229.1,1092-1110).
cagctcgcaagaagagtat

SEQ ID NO: 502601 - DNA, 19 bp, Mus musculus
  siRNA target sequence for Flt3 (NM_010229.1,1094-1112).
gctcgcaagaagagtatga

SEQ ID NO: 502602 - DNA, 19 bp, Mus musculus
  siRNA target sequence for Flt3 (NM_010229.1,1097-1115).
cgcaagaagagtatgaaat

SEQ ID NO: 502603 - DNA, 19 bp, Mus musculus
  siRNA target sequence for Flt3 (NM_010229.1,1111-1129).
gaaattgacccgtacgaaa

SEQ ID NO: 502604 - DNA, 19 bp, Mus musculus
  siRNA target sequence for Flt3 (NM_010229.1,1117-1135).
gacccgtacgaaaagttct

SEQ ID NO: 502605 - DNA, 19 bp, Mus musculus
  siRNA target sequence for Flt3 (NM_010229.1,1171-1189).
cgatgcacgtggatcttct

SEQ ID NO: 502606 - DNA, 19 bp, Mus musculus
  siRNA target sequence for Flt3 (NM_010229.1,1227-1245).
ggatgggtacagcatatct

SEQ ID NO: 502607 - DNA, 19 bp, Mus musculus
  siRNA target sequence for Flt3 (NM_010229.1,1228-1246).
gatgggtacagcatatcta

SEQ ID NO: 502608 - DNA, 19 bp, Mus musculus
  siRNA target sequence for Flt3 (NM_010229.1,1231-1249).
gggtacagcatatctaaat

SEQ ID NO: 502609 - DNA, 19 bp, Mus musculus
  siRNA target sequence for Flt3 (NM_010229.1,1232-1250).
ggtacagcatatctaaatt

SEQ ID NO: 502610 - DNA, 19 bp, Mus musculus
  siRNA target sequence for Flt3 (NM_010229.1,1244-1262).
ctaaattttgcgatcataa

SEQ ID NO: 502611 - DNA, 19 bp, Mus musculus
  siRNA target sequence for Flt3 (NM_010229.1,1303-1321).
gacgcccagttcaccaaaa

SEQ ID NO: 502612 - DNA, 19 bp, Mus musculus
  siRNA target sequence for Flt3 (NM_010229.1,1323-1341).
gttcacgctgaatataaga

SEQ ID NO: 502613 - DNA, 19 bp, Mus musculus
  siRNA target sequence for Flt3 (NM_010229.1,1328-1346).
cgctgaatataagaaagaa

SEQ ID NO: 502614 - DNA, 19 bp, Mus musculus
  siRNA target sequence for Flt3 (NM_010229.1,1428-1446).
gaagtgttcggacaaatct

SEQ ID NO: 502615 - DNA, 19 bp, Mus musculus
  siRNA target sequence for Flt3 (NM_010229.1,1448-1466).
ccaattgcacggaggaaat

SEQ ID NO: 502616 - DNA, 19 bp, Mus musculus
  siRNA target sequence for Flt3 (NM_010229.1,1468-1486).
ccagaaggagtttggaata

SEQ ID NO: 502617 - DNA, 19 bp, Mus musculus
  siRNA target sequence for Flt3 (NM_010229.1,1469-1487).
cagaaggagtttggaataa

SEQ ID NO: 502618 - DNA, 19 bp, Mus musculus
  siRNA target sequence for Flt3 (NM_010229.1,1491-1509).
ggctaacagaaaagtgttt

SEQ ID NO: 502619 - DNA, 19 bp, Mus musculus
  siRNA target sequence for Flt3 (NM_010229.1,1518-1536).
ggtgtcgagcagtactcta

SEQ ID NO: 502620 - DNA, 19 bp, Mus musculus
  siRNA target sequence for Flt3 (NM_010229.1,1521-1539).
gtcgagcagtactctaaat

SEQ ID NO: 502621 - DNA, 19 bp, Mus musculus
  siRNA target sequence for Flt3 (NM_010229.1,1523-1541).
cgagcagtactctaaatat

SEQ ID NO: 502622 - DNA, 19 bp, Mus musculus
  siRNA target sequence for Flt3 (NM_010229.1,1595-1613).
gcacgtcttgcgaaaccat

SEQ ID NO: 502623 - DNA, 19 bp, Mus musculus
  siRNA target sequence for Flt3 (NM_010229.1,1604-1622).
gcgaaaccatctttttaaa

SEQ ID NO: 502624 - DNA, 19 bp, Mus musculus
  siRNA target sequence for Flt3 (NM_010229.1,1692-1710).
cttcattgttgttctcatt

SEQ ID NO: 502625 - DNA, 19 bp, Mus musculus
  siRNA target sequence for Flt3 (NM_010229.1,1711-1729).
gtgttgatctgccacaaat

SEQ ID NO: 502626 - DNA, 19 bp, Mus musculus
  siRNA target sequence for Flt3 (NM_010229.1,1812-1830).
cttcagggactatgaatat

SEQ ID NO: 502627 - DNA, 19 bp, Mus musculus
  siRNA target sequence for Flt3 (NM_010229.1,1845-1863).
gttcccgagagagaactta

SEQ ID NO: 502628 - DNA, 19 bp, Mus musculus
  siRNA target sequence for Flt3 (NM_010229.1,1914-1932).
cacggcctatggcattagt

SEQ ID NO: 502629 - DNA, 19 bp, Mus musculus
  siRNA target sequence for Flt3 (NM_010229.1,1916-1934).
cggcctatggcattagtaa

SEQ ID NO: 502630 - DNA, 19 bp, Mus musculus
  siRNA target sequence for Flt3 (NM_010229.1,1917-1935).
ggcctatggcattagtaaa

SEQ ID NO: 502631 - DNA, 19 bp, Mus musculus
  siRNA target sequence for Flt3 (NM_010229.1,1918-1936).
gcctatggcattagtaaaa

SEQ ID NO: 502632 - DNA, 19 bp, Mus musculus
  siRNA target sequence for Flt3 (NM_010229.1,1931-1949).
gtaaaacgggagtctcaat

SEQ ID NO: 502633 - DNA, 19 bp, Mus musculus
  siRNA target sequence for Flt3 (NM_010229.1,2086-2104).
gggccagtgtacttgattt

SEQ ID NO: 502634 - DNA, 19 bp, Mus musculus
  siRNA target sequence for Flt3 (NM_010229.1,2087-2105).
ggccagtgtacttgatttt

SEQ ID NO: 502635 - DNA, 19 bp, Mus musculus
  siRNA target sequence for Flt3 (NM_010229.1,2088-2106).
gccagtgtacttgattttt

SEQ ID NO: 502636 - DNA, 19 bp, Mus musculus
  siRNA target sequence for Flt3 (NM_010229.1,2125-2143).
gacctcctcaactacctaa

SEQ ID NO: 502637 - DNA, 19 bp, Mus musculus
  siRNA target sequence for Flt3 (NM_010229.1,2128-2146).
ctcctcaactacctaagaa

SEQ ID NO: 502638 - DNA, 19 bp, Mus musculus
  siRNA target sequence for Flt3 (NM_010229.1,2130-2148).
cctcaactacctaagaagt

SEQ ID NO: 502639 - DNA, 19 bp, Mus musculus
  siRNA target sequence for Flt3 (NM_010229.1,2131-2149).
ctcaactacctaagaagta

SEQ ID NO: 502640 - DNA, 19 bp, Mus musculus
  siRNA target sequence for Flt3 (NM_010229.1,2136-2154).
ctacctaagaagtaaaaga

SEQ ID NO: 502641 - DNA, 19 bp, Mus musculus
  siRNA target sequence for Flt3 (NM_010229.1,2181-2199).
gatttttaaggaacataat

SEQ ID NO: 502642 - DNA, 19 bp, Mus musculus
  siRNA target sequence for Flt3 (NM_010229.1,2244-2262).
gcctggttcacgagaagtt

SEQ ID NO: 502643 - DNA, 19 bp, Mus musculus
  siRNA target sequence for Flt3 (NM_010229.1,2246-2264).
ctggttcacgagaagttca

SEQ ID NO: 502644 - DNA, 19 bp, Mus musculus
  siRNA target sequence for Flt3 (NM_010229.1,2249-2267).
gttcacgagaagttcagtt

SEQ ID NO: 502645 - DNA, 19 bp, Mus musculus
  siRNA target sequence for Flt3 (NM_010229.1,2252-2270).
cacgagaagttcagttaca

SEQ ID NO: 502646 - DNA, 19 bp, Mus musculus
  siRNA target sequence for Flt3 (NM_010229.1,2379-2397).
gaacgtgctgacgtttgaa

SEQ ID NO: 502647 - DNA, 19 bp, Mus musculus
  siRNA target sequence for Flt3 (NM_010229.1,2473-2491).
ctggcagccaggaatgtgt

SEQ ID NO: 502648 - DNA, 19 bp, Mus musculus
  siRNA target sequence for Flt3 (NM_010229.1,2626-2644).
gggatctacacaatcaaga

SEQ ID NO: 502649 - DNA, 19 bp, Mus musculus
  siRNA target sequence for Flt3 (NM_010229.1,2716-2734).
cctgtcgacgctaacttct

SEQ ID NO: 502650 - DNA, 19 bp, Mus musculus
  siRNA target sequence for Flt3 (NM_010229.1,2717-2735).
ctgtcgacgctaacttcta

SEQ ID NO: 502651 - DNA, 19 bp, Mus musculus
  siRNA target sequence for Flt3 (NM_010229.1,2719-2737).
gtcgacgctaacttctata

SEQ ID NO: 502652 - DNA, 19 bp, Mus musculus
  siRNA target sequence for Flt3 (NM_010229.1,2721-2739).
cgacgctaacttctataaa

SEQ ID NO: 502653 - DNA, 19 bp, Mus musculus
  siRNA target sequence for Flt3 (NM_010229.1,2740-2758).
ctgattcagagtggattta

SEQ ID NO: 502654 - DNA, 19 bp, Mus musculus
  siRNA target sequence for Flt3 (NM_010229.1,2742-2760).
gattcagagtggatttaaa

SEQ ID NO: 502655 - DNA, 19 bp, Mus musculus
  siRNA target sequence for Flt3 (NM_010229.1,2779-2797).
gccacagaagggatatact

SEQ ID NO: 502656 - DNA, 19 bp, Mus musculus
  siRNA target sequence for Flt3 (NM_010229.1,2780-2798).
ccacagaagggatatactt

SEQ ID NO: 502657 - DNA, 19 bp, Mus musculus
  siRNA target sequence for Flt3 (NM_010229.1,2781-2799).
cacagaagggatatacttt

SEQ ID NO: 502658 - DNA, 19 bp, Mus musculus
  siRNA target sequence for Flt3 (NM_010229.1,2912-2930).
ccatccatctaccaaaaca

SEQ ID NO: 502659 - DNA, 19 bp, Mus musculus
  siRNA target sequence for Flt4 (NM_008029.1,143-161).
catcacagaggattcatat

SEQ ID NO: 502660 - DNA, 19 bp, Mus musculus
  siRNA target sequence for Flt4 (NM_008029.1,172-190).
ccggggacagcctatccat

SEQ ID NO: 502661 - DNA, 19 bp, Mus musculus
  siRNA target sequence for Flt4 (NM_008029.1,173-191).
cggggacagcctatccata

SEQ ID NO: 502662 - DNA, 19 bp, Mus musculus
  siRNA target sequence for Flt4 (NM_008029.1,174-192).
ggggacagcctatccatat

SEQ ID NO: 502663 - DNA, 19 bp, Mus musculus
  siRNA target sequence for Flt4 (NM_008029.1,367-385).
gctaccactgctactacaa

SEQ ID NO: 502664 - DNA, 19 bp, Mus musculus
  siRNA target sequence for Flt4 (NM_008029.1,830-848).
caccttcgactgggattat

SEQ ID NO: 502665 - DNA, 19 bp, Mus musculus
  siRNA target sequence for Flt4 (NM_008029.1,833-851).
cttcgactgggattatcca

SEQ ID NO: 502666 - DNA, 19 bp, Mus musculus
  siRNA target sequence for Flt4 (NM_008029.1,1026-1044).
cacgaaaagcccttcatca

SEQ ID NO: 502667 - DNA, 19 bp, Mus musculus
  siRNA target sequence for Flt4 (NM_008029.1,1109-1127).
cgtgaagctggcagcttat

SEQ ID NO: 502668 - DNA, 19 bp, Mus musculus
  siRNA target sequence for Flt4 (NM_008029.1,1128-1146).
cccccaccggagttccaat

SEQ ID NO: 502669 - DNA, 19 bp, Mus musculus
  siRNA target sequence for Flt4 (NM_008029.1,1132-1150).
caccggagttccaatggta

SEQ ID NO: 502670 - DNA, 19 bp, Mus musculus
  siRNA target sequence for Flt4 (NM_008029.1,1645-1663).
gtgtggtcgtcaacaaagt

SEQ ID NO: 502671 - DNA, 19 bp, Mus musculus
  siRNA target sequence for Flt4 (NM_008029.1,1671-1689).
gatgagagactcatctact

SEQ ID NO: 502672 - DNA, 19 bp, Mus musculus
  siRNA target sequence for Flt4 (NM_008029.1,1674-1692).
gagagactcatctacttct

SEQ ID NO: 502673 - DNA, 19 bp, Mus musculus
  siRNA target sequence for Flt4 (NM_008029.1,1860-1878).
ctattgctggactgcaaaa

SEQ ID NO: 502674 - DNA, 19 bp, Mus musculus
  siRNA target sequence for Flt4 (NM_008029.1,1943-1961).
cgccaccctcagtttgaat

SEQ ID NO: 502675 - DNA, 19 bp, Mus musculus
  siRNA target sequence for Flt4 (NM_008029.1,2079-2097).
cggctcacgcagaacttga

SEQ ID NO: 502676 - DNA, 19 bp, Mus musculus
  siRNA target sequence for Flt4 (NM_008029.1,2360-2378).
cagcatggagattgtgata

SEQ ID NO: 502677 - DNA, 19 bp, Mus musculus
  siRNA target sequence for Flt4 (NM_008029.1,2389-2407).
ctggcgtcatcgcagtttt

SEQ ID NO: 502678 - DNA, 19 bp, Mus musculus
  siRNA target sequence for Flt4 (NM_008029.1,2391-2409).
ggcgtcatcgcagttttct

SEQ ID NO: 502679 - DNA, 19 bp, Mus musculus
  siRNA target sequence for Flt4 (NM_008029.1,2392-2410).
gcgtcatcgcagttttctt

SEQ ID NO: 502680 - DNA, 19 bp, Mus musculus
  siRNA target sequence for Flt4 (NM_008029.1,2632-2650).
cagcttttggcatcaataa

SEQ ID NO: 502681 - DNA, 19 bp, Mus musculus
  siRNA target sequence for Flt4 (NM_008029.1,2728-2746).
cggagctcaagatcctaat

SEQ ID NO: 502682 - DNA, 19 bp, Mus musculus
  siRNA target sequence for Flt4 (NM_008029.1,2729-2747).
ggagctcaagatcctaatt

SEQ ID NO: 502683 - DNA, 19 bp, Mus musculus
  siRNA target sequence for Flt4 (NM_008029.1,2817-2835).
gtgatcgtggagttttgca

SEQ ID NO: 502684 - DNA, 19 bp, Mus musculus
  siRNA target sequence for Flt4 (NM_008029.1,2819-2837).
gatcgtggagttttgcaaa

SEQ ID NO: 502685 - DNA, 19 bp, Mus musculus
  siRNA target sequence for Flt4 (NM_008029.1,3214-3232).
gcctcgctcgggacatcta

SEQ ID NO: 502686 - DNA, 19 bp, Mus musculus
  siRNA target sequence for Flt4 (NM_008029.1,3216-3234).
ctcgctcgggacatctaca

SEQ ID NO: 502687 - DNA, 19 bp, Mus musculus
  siRNA target sequence for Flt4 (NM_008029.1,3218-3236).
cgctcgggacatctacaaa

SEQ ID NO: 502688 - DNA, 19 bp, Mus musculus
  siRNA target sequence for Flt4 (NM_008029.1,3431-3449).
ggatggcactcgaatgaga

SEQ ID NO: 502689 - DNA, 19 bp, Mus musculus
  siRNA target sequence for Flt4 (NM_008029.1,3469-3487).
ctgccatacgccacatcat

SEQ ID NO: 502690 - DNA, 19 bp, Mus musculus
  siRNA target sequence for Flt4 (NM_008029.1,3652-3670).
ccaccacagctctacatat

SEQ ID NO: 502691 - DNA, 19 bp, Mus musculus
  siRNA target sequence for Flt4 (NM_008029.1,3674-3692).
cgaagcagacgctgatgat

SEQ ID NO: 502692 - DNA, 19 bp, Mus musculus
  siRNA target sequence for Flt4 (NM_008029.1,3764-3782).
ggccagaggcactaagact

SEQ ID NO: 502693 - DNA, 19 bp, Mus musculus
  siRNA target sequence for Flt4 (NM_008029.1,3929-3947).
cagcttcagctgtaaaggt

SEQ ID NO: 502694 - DNA, 19 bp, Mus musculus
  siRNA target sequence for Flt4 (NM_008029.1,3948-3966).
cctggccagcacatggata

SEQ ID NO: 502695 - DNA, 19 bp, Mus musculus
  siRNA target sequence for Flt4 (NM_008029.1,3949-3967).
ctggccagcacatggatat

SEQ ID NO: 502696 - DNA, 19 bp, Mus musculus
  siRNA target sequence for Flt4 (NM_008029.1,4030-4048).
gcaaggtgttttataacaa

SEQ ID NO: 502697 - DNA, 19 bp, Mus musculus
  siRNA target sequence for Fpgs (NM_010236.1,162-180).
caacaccctgcaaaccaat

SEQ ID NO: 502698 - DNA, 19 bp, Mus musculus
  siRNA target sequence for Fpgs (NM_010236.1,280-298).
gacttgaaccggctaaaca

SEQ ID NO: 502699 - DNA, 19 bp, Mus musculus
  siRNA target sequence for Fpgs (NM_010236.1,282-300).
cttgaaccggctaaacatt

SEQ ID NO: 502700 - DNA, 19 bp, Mus musculus
  siRNA target sequence for Fpgs (NM_010236.1,285-303).
gaaccggctaaacattatt

SEQ ID NO: 502701 - DNA, 19 bp, Mus musculus
  siRNA target sequence for Fpgs (NM_010236.1,288-306).
ccggctaaacattattcat

SEQ ID NO: 502702 - DNA, 19 bp, Mus musculus
  siRNA target sequence for Fpgs (NM_010236.1,290-308).
ggctaaacattattcatgt

SEQ ID NO: 502703 - DNA, 19 bp, Mus musculus
  siRNA target sequence for Fpgs (NM_010236.1,412-430).
gtgcgggagcggattcgaa

SEQ ID NO: 502704 - DNA, 19 bp, Mus musculus
  siRNA target sequence for Fpgs (NM_010236.1,416-434).
gggagcggattcgaatcaa

SEQ ID NO: 502705 - DNA, 19 bp, Mus musculus
  siRNA target sequence for Fpgs (NM_010236.1,427-445).
cgaatcaacgggaaaccaa

SEQ ID NO: 502706 - DNA, 19 bp, Mus musculus
  siRNA target sequence for Fpgs (NM_010236.1,428-446).
gaatcaacgggaaaccaat

SEQ ID NO: 502707 - DNA, 19 bp, Mus musculus
  siRNA target sequence for Fpgs (NM_010236.1,469-487).
cacttctggtgcctctata

SEQ ID NO: 502708 - DNA, 19 bp, Mus musculus
  siRNA target sequence for Fpgs (NM_010236.1,693-711).
cagtctactaggagataca

SEQ ID NO: 502709 - DNA, 19 bp, Mus musculus
  siRNA target sequence for Fpgs (NM_010236.1,811-829).
cgagcccagcagattggat

SEQ ID NO: 502710 - DNA, 19 bp, Mus musculus
  siRNA target sequence for Fpgs (NM_010236.1,840-858).
cctgtgtccgccattggaa

SEQ ID NO: 502711 - DNA, 19 bp, Mus musculus
  siRNA target sequence for Fpgs (NM_010236.1,962-980).
ggcaggaccaccaagacat

SEQ ID NO: 502712 - DNA, 19 bp, Mus musculus
  siRNA target sequence for Fpgs (NM_010236.1,993-1011).
ggtatccaggccaagcata

SEQ ID NO: 502713 - DNA, 19 bp, Mus musculus
  siRNA target sequence for Fpgs (NM_010236.1,1086-1104).
gcctggccggacacagata

SEQ ID NO: 502714 - DNA, 19 bp, Mus musculus
  siRNA target sequence for Fpgs (NM_010236.1,1088-1106).
ctggccggacacagatact

SEQ ID NO: 502715 - DNA, 19 bp, Mus musculus
  siRNA target sequence for Fpgs (NM_010236.1,1217-1235).
gagggtccgaagtacacat

SEQ ID NO: 502716 - DNA, 19 bp, Mus musculus
  siRNA target sequence for Fpgs (NM_010236.1,1220-1238).
ggtccgaagtacacatctt

SEQ ID NO: 502717 - DNA, 19 bp, Mus musculus
  siRNA target sequence for Fpgs (NM_010236.1,1336-1354).
gaggtttcatccataggaa

SEQ ID NO: 502718 - DNA, 19 bp, Mus musculus
  siRNA target sequence for Fpgs (NM_010236.1,1428-1446).
gaacggcctggctgagaaa

SEQ ID NO: 502719 - DNA, 19 bp, Mus musculus
  siRNA target sequence for Fpgs (NM_010236.1,1620-1638).
gagccttccaaggaatctt

SEQ ID NO: 502720 - DNA, 19 bp, Mus musculus
  siRNA target sequence for Frk (NM_010237.2,537-555).
gtcagtagtaattgagaat

SEQ ID NO: 502721 - DNA, 19 bp, Mus musculus
  siRNA target sequence for Frk (NM_010237.2,608-626).
gccatggccagtattttgt

SEQ ID NO: 502722 - DNA, 19 bp, Mus musculus
  siRNA target sequence for Frk (NM_010237.2,769-787).
ctacagggctacattcctt

SEQ ID NO: 502723 - DNA, 19 bp, Mus musculus
  siRNA target sequence for Frk (NM_010237.2,776-794).
gctacattccttccaatta

SEQ ID NO: 502724 - DNA, 19 bp, Mus musculus
  siRNA target sequence for Frk (NM_010237.2,819-837).
ggcagagccgtggtttttt

SEQ ID NO: 502725 - DNA, 19 bp, Mus musculus
  siRNA target sequence for Frk (NM_010237.2,921-939).
gagccagaagggtgacttt

SEQ ID NO: 502726 - DNA, 19 bp, Mus musculus
  siRNA target sequence for Frk (NM_010237.2,942-960).
cctctcagttttagatgaa

SEQ ID NO: 502727 - DNA, 19 bp, Mus musculus
  siRNA target sequence for Frk (NM_010237.2,1034-1052).
caaccctgaatgaattcgt

SEQ ID NO: 502728 - DNA, 19 bp, Mus musculus
  siRNA target sequence for Frk (NM_010237.2,1045-1063).
gaattcgtgaactactaca

SEQ ID NO: 502729 - DNA, 19 bp, Mus musculus
  siRNA target sequence for Frk (NM_010237.2,1093-1111).
ctggagaagccatgcttaa

SEQ ID NO: 502730 - DNA, 19 bp, Mus musculus
  siRNA target sequence for Frk (NM_010237.2,1119-1137).
ggtaccaaccccttttgat

SEQ ID NO: 502731 - DNA, 19 bp, Mus musculus
  siRNA target sequence for Frk (NM_010237.2,1120-1138).
gtaccaaccccttttgatt

SEQ ID NO: 502732 - DNA, 19 bp, Mus musculus
  siRNA target sequence for Frk (NM_010237.2,1230-1248).
ggaaggtctgtggaataat

SEQ ID NO: 502733 - DNA, 19 bp, Mus musculus
  siRNA target sequence for Frk (NM_010237.2,1234-1252).
ggtctgtggaataatacca

SEQ ID NO: 502734 - DNA, 19 bp, Mus musculus
  siRNA target sequence for Frk (NM_010237.2,1251-1269).
cactccagtggccgtaaaa

SEQ ID NO: 502735 - DNA, 19 bp, Mus musculus
  siRNA target sequence for Frk (NM_010237.2,1255-1273).
ccagtggccgtaaaaacgt

SEQ ID NO: 502736 - DNA, 19 bp, Mus musculus
  siRNA target sequence for Frk (NM_010237.2,1256-1274).
cagtggccgtaaaaacgtt

SEQ ID NO: 502737 - DNA, 19 bp, Mus musculus
  siRNA target sequence for Frk (NM_010237.2,1258-1276).
gtggccgtaaaaacgttaa

SEQ ID NO: 502738 - DNA, 19 bp, Mus musculus
  siRNA target sequence for Frk (NM_010237.2,1260-1278).
ggccgtaaaaacgttaaaa

SEQ ID NO: 502739 - DNA, 19 bp, Mus musculus
  siRNA target sequence for Frk (NM_010237.2,1271-1289).
cgttaaaaccaggttcaat

SEQ ID NO: 502740 - DNA, 19 bp, Mus musculus
  siRNA target sequence for Frk (NM_010237.2,1280-1298).
caggttcaatggatccaaa

SEQ ID NO: 502741 - DNA, 19 bp, Mus musculus
  siRNA target sequence for Frk (NM_010237.2,1373-1391).
ctttagaagatcccattta

SEQ ID NO: 502742 - DNA, 19 bp, Mus musculus
  siRNA target sequence for Frk (NM_010237.2,1381-1399).
gatcccatttatattatta

SEQ ID NO: 502743 - DNA, 19 bp, Mus musculus
  siRNA target sequence for Frk (NM_010237.2,1418-1436).
gaagcctgcaagaatatct

SEQ ID NO: 502744 - DNA, 19 bp, Mus musculus
  siRNA target sequence for Frk (NM_010237.2,1447-1465).
ggtgggtcaaaaatccatt

SEQ ID NO: 502745 - DNA, 19 bp, Mus musculus
  siRNA target sequence for Frk (NM_010237.2,1448-1466).
gtgggtcaaaaatccattt

SEQ ID NO: 502746 - DNA, 19 bp, Mus musculus
  siRNA target sequence for Frk (NM_010237.2,1451-1469).
ggtcaaaaatccatttgat

SEQ ID NO: 502747 - DNA, 19 bp, Mus musculus
  siRNA target sequence for Frk (NM_010237.2,1452-1470).
gtcaaaaatccatttgatt

SEQ ID NO: 502748 - DNA, 19 bp, Mus musculus
  siRNA target sequence for Frk (NM_010237.2,1516-1534).
cttgagtcgcagaactata

SEQ ID NO: 502749 - DNA, 19 bp, Mus musculus
  siRNA target sequence for Frk (NM_010237.2,1564-1582).
cttgttggtgaacataata

SEQ ID NO: 502750 - DNA, 19 bp, Mus musculus
  siRNA target sequence for Frk (NM_010237.2,1567-1585).
gttggtgaacataatatct

SEQ ID NO: 502751 - DNA, 19 bp, Mus musculus
  siRNA target sequence for Frk (NM_010237.2,1571-1589).
gtgaacataatatctacaa

SEQ ID NO: 502752 - DNA, 19 bp, Mus musculus
  siRNA target sequence for Frk (NM_010237.2,1649-1667).
ctaaacacgaaataaagct

SEQ ID NO: 502753 - DNA, 19 bp, Mus musculus
  siRNA target sequence for Frk (NM_010237.2,1684-1702).
gcacccgaagccattcgta

SEQ ID NO: 502754 - DNA, 19 bp, Mus musculus
  siRNA target sequence for Frk (NM_010237.2,1688-1706).
ccgaagccattcgtactaa

SEQ ID NO: 502755 - DNA, 19 bp, Mus musculus
  siRNA target sequence for Frk (NM_010237.2,1689-1707).
cgaagccattcgtactaat

SEQ ID NO: 502756 - DNA, 19 bp, Mus musculus
  siRNA target sequence for Frk (NM_010237.2,1693-1711).
gccattcgtactaataaat

SEQ ID NO: 502757 - DNA, 19 bp, Mus musculus
  siRNA target sequence for Frk (NM_010237.2,1694-1712).
ccattcgtactaataaatt

SEQ ID NO: 502758 - DNA, 19 bp, Mus musculus
  siRNA target sequence for Frk (NM_010237.2,1747-1765).
ctgctctatgaaatcatta

SEQ ID NO: 502759 - DNA, 19 bp, Mus musculus
  siRNA target sequence for Frk (NM_010237.2,1752-1770).
ctatgaaatcattacttat

SEQ ID NO: 502760 - DNA, 19 bp, Mus musculus
  siRNA target sequence for Frk (NM_010237.2,1798-1816).
ggtgctcaagtaattcaaa

SEQ ID NO: 502761 - DNA, 19 bp, Mus musculus
  siRNA target sequence for Frk (NM_010237.2,1799-1817).
gtgctcaagtaattcaaat

SEQ ID NO: 502762 - DNA, 19 bp, Mus musculus
  siRNA target sequence for Frk (NM_010237.2,1804-1822).
caagtaattcaaatgttga

SEQ ID NO: 502763 - DNA, 19 bp, Mus musculus
  siRNA target sequence for Frk (NM_010237.2,1835-1853).
gacttccacagccatctaa

SEQ ID NO: 502764 - DNA, 19 bp, Mus musculus
  siRNA target sequence for Frk (NM_010237.2,1850-1868).
ctaactgcccacagcaatt

SEQ ID NO: 502765 - DNA, 19 bp, Mus musculus
  siRNA target sequence for Frk (NM_010237.2,1881-1899).
gctagagtgctggaatgtt

SEQ ID NO: 502766 - DNA, 19 bp, Mus musculus
  siRNA target sequence for Frk (NM_010237.2,1904-1922).
ctaagcaacggccaacatt

SEQ ID NO: 502767 - DNA, 19 bp, Mus musculus
  siRNA target sequence for Frk (NM_010237.2,1909-1927).
caacggccaacatttgaga

SEQ ID NO: 502768 - DNA, 19 bp, Mus musculus
  siRNA target sequence for Frk (NM_010237.2,1928-1946).
ccctgcattggaaacttga

SEQ ID NO: 502769 - DNA, 19 bp, Mus musculus
  siRNA target sequence for Frk (NM_010237.2,1929-1947).
cctgcattggaaacttgaa

SEQ ID NO: 502770 - DNA, 19 bp, Mus musculus
  siRNA target sequence for Frk (NM_010237.2,1937-1955).
ggaaacttgaagactactt

SEQ ID NO: 502771 - DNA, 19 bp, Mus musculus
  siRNA target sequence for Frk (NM_010237.2,1938-1956).
gaaacttgaagactacttt

SEQ ID NO: 502772 - DNA, 19 bp, Mus musculus
  siRNA target sequence for Frk (NM_010237.2,1961-1979).
cagactgttcctattcaga

SEQ ID NO: 502773 - DNA, 19 bp, Mus musculus
  siRNA target sequence for Frk (NM_010237.2,1963-1981).
gactgttcctattcagata

SEQ ID NO: 502774 - DNA, 19 bp, Mus musculus
  siRNA target sequence for Frk (NM_010237.2,1978-1996).
gatacaaataacttcataa

SEQ ID NO: 502775 - DNA, 19 bp, Mus musculus
  siRNA target sequence for Fthfsdc1 (NM_172308.2,358-376).
gtcagagacgtcattcaca

SEQ ID NO: 502776 - DNA, 19 bp, Mus musculus
  siRNA target sequence for Fthfsdc1 (NM_172308.2,428-446).
cagtgcttgtggttattca

SEQ ID NO: 502777 - DNA, 19 bp, Mus musculus
  siRNA target sequence for Fthfsdc1 (NM_172308.2,445-463).
caggccggtgatgacaatt

SEQ ID NO: 502778 - DNA, 19 bp, Mus musculus
  siRNA target sequence for Fthfsdc1 (NM_172308.2,448-466).
gccggtgatgacaatttga

SEQ ID NO: 502779 - DNA, 19 bp, Mus musculus
  siRNA target sequence for Fthfsdc1 (NM_172308.2,449-467).
ccggtgatgacaatttgat

SEQ ID NO: 502780 - DNA, 19 bp, Mus musculus
  siRNA target sequence for Fthfsdc1 (NM_172308.2,457-475).
gacaatttgatgaaggata

SEQ ID NO: 502781 - DNA, 19 bp, Mus musculus
  siRNA target sequence for Fthfsdc1 (NM_172308.2,540-558).
cggagaggatgagatcata

SEQ ID NO: 502782 - DNA, 19 bp, Mus musculus
  siRNA target sequence for Fthfsdc1 (NM_172308.2,542-560).
gagaggatgagatcataga

SEQ ID NO: 502783 - DNA, 19 bp, Mus musculus
  siRNA target sequence for Fthfsdc1 (NM_172308.2,630-648).
gagcaacaaagttctcaat

SEQ ID NO: 502784 - DNA, 19 bp, Mus musculus
  siRNA target sequence for Fthfsdc1 (NM_172308.2,675-693).
cggggtgaccgacatcaat

SEQ ID NO: 502785 - DNA, 19 bp, Mus musculus
  siRNA target sequence for Fthfsdc1 (NM_172308.2,677-695).
gggtgaccgacatcaatct

SEQ ID NO: 502786 - DNA, 19 bp, Mus musculus
  siRNA target sequence for Fthfsdc1 (NM_172308.2,713-731).
gtgacgctccggagtgttt

SEQ ID NO: 502787 - DNA, 19 bp, Mus musculus
  siRNA target sequence for Fthfsdc1 (NM_172308.2,746-764).
ccaaagctgctgtagaact

SEQ ID NO: 502788 - DNA, 19 bp, Mus musculus
  siRNA target sequence for Fthfsdc1 (NM_172308.2,747-765).
caaagctgctgtagaactt

SEQ ID NO: 502789 - DNA, 19 bp, Mus musculus
  siRNA target sequence for Fthfsdc1 (NM_172308.2,752-770).
ctgctgtagaacttgttga

SEQ ID NO: 502790 - DNA, 19 bp, Mus musculus
  siRNA target sequence for Fthfsdc1 (NM_172308.2,757-775).
gtagaacttgttgaaaagt

SEQ ID NO: 502791 - DNA, 19 bp, Mus musculus
  siRNA target sequence for Fthfsdc1 (NM_172308.2,769-787).
gaaaagtcagggatcactt

SEQ ID NO: 502792 - DNA, 19 bp, Mus musculus
  siRNA target sequence for Fthfsdc1 (NM_172308.2,779-797).
ggatcactttggatggaaa

SEQ ID NO: 502793 - DNA, 19 bp, Mus musculus
  siRNA target sequence for Fthfsdc1 (NM_172308.2,915-933).
gcttcgagaggcagacatt

SEQ ID NO: 502794 - DNA, 19 bp, Mus musculus
  siRNA target sequence for Fthfsdc1 (NM_172308.2,1102-1120).
gcggctctgcgcattcaga

SEQ ID NO: 502795 - DNA, 19 bp, Mus musculus
  siRNA target sequence for Fthfsdc1 (NM_172308.2,1103-1121).
cggctctgcgcattcagaa

SEQ ID NO: 502796 - DNA, 19 bp, Mus musculus
  siRNA target sequence for Fthfsdc1 (NM_172308.2,1173-1191).
gcgactgcactgcttgaaa

SEQ ID NO: 502797 - DNA, 19 bp, Mus musculus
  siRNA target sequence for Fthfsdc1 (NM_172308.2,1205-1223).
cacctgtgcccagtgatat

SEQ ID NO: 502798 - DNA, 19 bp, Mus musculus
  siRNA target sequence for Fthfsdc1 (NM_172308.2,1213-1231).
cccagtgatattgagattt

SEQ ID NO: 502799 - DNA, 19 bp, Mus musculus
  siRNA target sequence for Fthfsdc1 (NM_172308.2,1215-1233).
cagtgatattgagatttct

SEQ ID NO: 502800 - DNA, 19 bp, Mus musculus
  siRNA target sequence for Fthfsdc1 (NM_172308.2,1337-1355).
ccctgctggagaggttaaa

SEQ ID NO: 502801 - DNA, 19 bp, Mus musculus
  siRNA target sequence for Fthfsdc1 (NM_172308.2,1457-1475).
ccgctcacctgaaagtcaa

SEQ ID NO: 502802 - DNA, 19 bp, Mus musculus
  siRNA target sequence for Fthfsdc1 (NM_172308.2,1639-1657).
gccatcgacacgagaattt

SEQ ID NO: 502803 - DNA, 19 bp, Mus musculus
  siRNA target sequence for Fthfsdc1 (NM_172308.2,1640-1658).
ccatcgacacgagaatttt

SEQ ID NO: 502804 - DNA, 19 bp, Mus musculus
  siRNA target sequence for Fthfsdc1 (NM_172308.2,1641-1659).
catcgacacgagaatttta

SEQ ID NO: 502805 - DNA, 19 bp, Mus musculus
  siRNA target sequence for Fthfsdc1 (NM_172308.2,1875-1893).
cgaccgatttctgagaaaa

SEQ ID NO: 502806 - DNA, 19 bp, Mus musculus
  siRNA target sequence for Fthfsdc1 (NM_172308.2,1876-1894).
gaccgatttctgagaaaaa

SEQ ID NO: 502807 - DNA, 19 bp, Mus musculus
  siRNA target sequence for Fthfsdc1 (NM_172308.2,1878-1896).
ccgatttctgagaaaaata

SEQ ID NO: 502808 - DNA, 19 bp, Mus musculus
  siRNA target sequence for Fthfsdc1 (NM_172308.2,1879-1897).
cgatttctgagaaaaataa

SEQ ID NO: 502809 - DNA, 19 bp, Mus musculus
  siRNA target sequence for Fthfsdc1 (NM_172308.2,1899-1917).
cattggacagggaagtaca

SEQ ID NO: 502810 - DNA, 19 bp, Mus musculus
  siRNA target sequence for Fthfsdc1 (NM_172308.2,1933-1951).
cggcaggcacagtttgaca

SEQ ID NO: 502811 - DNA, 19 bp, Mus musculus
  siRNA target sequence for Fthfsdc1 (NM_172308.2,1978-1996).
gtgctggccttgactgata

SEQ ID NO: 502812 - DNA, 19 bp, Mus musculus
  siRNA target sequence for Fthfsdc1 (NM_172308.2,2090-2108).
gcgctctgacagttttgat

SEQ ID NO: 502813 - DNA, 19 bp, Mus musculus
  siRNA target sequence for Fthfsdc1 (NM_172308.2,2363-2381).
ccgttcgagctctgaagat

SEQ ID NO: 502814 - DNA, 19 bp, Mus musculus
  siRNA target sequence for Fthfsdc1 (NM_172308.2,2408-2426).
ctggggttcctctcaagaa

SEQ ID NO: 502815 - DNA, 19 bp, Mus musculus
  siRNA target sequence for Fthfsdc1 (NM_172308.2,2411-2429).
gggttcctctcaagaaaga

SEQ ID NO: 502816 - DNA, 19 bp, Mus musculus
  siRNA target sequence for Fthfsdc1 (NM_172308.2,2413-2431).
gttcctctcaagaaagaat

SEQ ID NO: 502817 - DNA, 19 bp, Mus musculus
  siRNA target sequence for Fthfsdc1 (NM_172308.2,2822-2840).
cgcaacagggttttggaaa

SEQ ID NO: 502818 - DNA, 19 bp, Mus musculus
  siRNA target sequence for Fthfsdc1 (NM_172308.2,2823-2841).
gcaacagggttttggaaat

SEQ ID NO: 502819 - DNA, 19 bp, Mus musculus
  siRNA target sequence for Fthfsdc1 (NM_172308.2,2877-2895).
ctctcatgaacctgacaaa

SEQ ID NO: 502820 - DNA, 19 bp, Mus musculus
  siRNA target sequence for Fthfsdc1 (NM_172308.2,2879-2897).
ctcatgaacctgacaaaaa

SEQ ID NO: 502821 - DNA, 19 bp, Mus musculus
  siRNA target sequence for Fthfsdc1 (NM_172308.2,2899-2917).
ggagtgccgagggatttca

SEQ ID NO: 502822 - DNA, 19 bp, Mus musculus
  siRNA target sequence for Fthfsdc1 (NM_172308.2,2949-2967).
cggggctgggttcatttat

SEQ ID NO: 502823 - DNA, 19 bp, Mus musculus
  siRNA target sequence for Fthfsdc1 (NM_172308.2,3052-3070).
caagttaaaggcttgttct

SEQ ID NO: 502824 - DNA, 19 bp, Mus musculus
  siRNA target sequence for Fuk (NM_172283.2,67-85).
gcagtcagagggagtcaat

SEQ ID NO: 502825 - DNA, 19 bp, Mus musculus
  siRNA target sequence for Fuk (NM_172283.2,639-657).
cacagggcttggttttgga

SEQ ID NO: 502826 - DNA, 19 bp, Mus musculus
  siRNA target sequence for Fuk (NM_172283.2,672-690).
gcactaaggcggagataca

SEQ ID NO: 502827 - DNA, 19 bp, Mus musculus
  siRNA target sequence for Fuk (NM_172283.2,673-691).
cactaaggcggagatacaa

SEQ ID NO: 502828 - DNA, 19 bp, Mus musculus
  siRNA target sequence for Fuk (NM_172283.2,1005-1023).
ccctcacaatggtgtatgt

SEQ ID NO: 502829 - DNA, 19 bp, Mus musculus
  siRNA target sequence for Fuk (NM_172283.2,1360-1378).
gagccgtgtatttactctt

SEQ ID NO: 502830 - DNA, 19 bp, Mus musculus
  siRNA target sequence for Fuk (NM_172283.2,1413-1431).
caggcatgtatctcaacat

SEQ ID NO: 502831 - DNA, 19 bp, Mus musculus
  siRNA target sequence for Fuk (NM_172283.2,1415-1433).
ggcatgtatctcaacatgt

SEQ ID NO: 502832 - DNA, 19 bp, Mus musculus
  siRNA target sequence for Fuk (NM_172283.2,1477-1495).
cctgtgggacccagataca

SEQ ID NO: 502833 - DNA, 19 bp, Mus musculus
  siRNA target sequence for Fuk (NM_172283.2,1729-1747).
gaaggcaaggcatgtgtta

SEQ ID NO: 502834 - DNA, 19 bp, Mus musculus
  siRNA target sequence for Fuk (NM_172283.2,2195-2213).
ccagcccgtgtggatttct

SEQ ID NO: 502835 - DNA, 19 bp, Mus musculus
  siRNA target sequence for Fuk (NM_172283.2,2355-2373).
gacctcggcaggatgagat

SEQ ID NO: 502836 - DNA, 19 bp, Mus musculus
  siRNA target sequence for Fuk (NM_172283.2,2510-2528).
cagttgttacactccttta

SEQ ID NO: 502837 - DNA, 19 bp, Mus musculus
  siRNA target sequence for Fuk (NM_172283.2,2731-2749).
cctaatgcctggcatcaaa

SEQ ID NO: 502838 - DNA, 19 bp, Mus musculus
  siRNA target sequence for Fuk (NM_172283.2,2837-2855).
catctgctcctggtttata

SEQ ID NO: 502839 - DNA, 19 bp, Mus musculus
  siRNA target sequence for Fuk (NM_172283.2,2920-2938).
gcccgttgtggtacagaat

SEQ ID NO: 502840 - DNA, 19 bp, Mus musculus
  siRNA target sequence for Fuk (NM_172283.2,3135-3153).
gtggtgggggctttctcta

SEQ ID NO: 502841 - DNA, 19 bp, Mus musculus
  siRNA target sequence for Fuk (NM_172283.2,3141-3159).
ggggctttctctatctatt

SEQ ID NO: 502842 - DNA, 19 bp, Mus musculus
  siRNA target sequence for Fuk (NM_172283.2,3143-3161).
ggctttctctatctattga

SEQ ID NO: 502843 - DNA, 19 bp, Mus musculus
  siRNA target sequence for Fuk (NM_172283.2,3212-3230).
gagggccttggcaactaca

SEQ ID NO: 502844 - DNA, 19 bp, Mus musculus
  siRNA target sequence for Fyn (NM_008054.1,516-534).
cggaagatgacctgagttt

SEQ ID NO: 502845 - DNA, 19 bp, Mus musculus
  siRNA target sequence for Fyn (NM_008054.1,517-535).
ggaagatgacctgagtttt

SEQ ID NO: 502846 - DNA, 19 bp, Mus musculus
  siRNA target sequence for Fyn (NM_008054.1,670-688).
gtggtactttggaaaactt

SEQ ID NO: 502847 - DNA, 19 bp, Mus musculus
  siRNA target sequence for Fyn (NM_008054.1,732-750).
caagaggtacctttcttat

SEQ ID NO: 502848 - DNA, 19 bp, Mus musculus
  siRNA target sequence for Fyn (NM_008054.1,774-792).
gtgcctactcactttccat

SEQ ID NO: 502849 - DNA, 19 bp, Mus musculus
  siRNA target sequence for Fyn (NM_008054.1,815-833).
ggggaccacgtcaaacatt

SEQ ID NO: 502850 - DNA, 19 bp, Mus musculus
  siRNA target sequence for Fyn (NM_008054.1,816-834).
gggaccacgtcaaacatta

SEQ ID NO: 502851 - DNA, 19 bp, Mus musculus
  siRNA target sequence for Fyn (NM_008054.1,820-838).
ccacgtcaaacattataaa

SEQ ID NO: 502852 - DNA, 19 bp, Mus musculus
  siRNA target sequence for Fyn (NM_008054.1,902-920).
caactggtacagcattact

SEQ ID NO: 502853 - DNA, 19 bp, Mus musculus
  siRNA target sequence for Fyn (NM_008054.1,949-967).
cttaactgtggtttcatca

SEQ ID NO: 502854 - DNA, 19 bp, Mus musculus
  siRNA target sequence for Fyn (NM_008054.1,956-974).
gtggtttcatcaagttgta

SEQ ID NO: 502855 - DNA, 19 bp, Mus musculus
  siRNA target sequence for Fyn (NM_008054.1,1252-1270).
gagcaaaggaagtttgctt

SEQ ID NO: 502856 - DNA, 19 bp, Mus musculus
  siRNA target sequence for Fyn (NM_008054.1,1357-1375).
catcgagcgcatgaattat

SEQ ID NO: 502857 - DNA, 19 bp, Mus musculus
  siRNA target sequence for Fyn (NM_008054.1,1413-1431).
ggaatggactaatttgcaa

SEQ ID NO: 502858 - DNA, 19 bp, Mus musculus
  siRNA target sequence for Fyn (NM_008054.1,1446-1464).
gattggctcggttgattga

SEQ ID NO: 502859 - DNA, 19 bp, Mus musculus
  siRNA target sequence for Fyn (NM_008054.1,1452-1470).
ctcggttgattgaagacaa

SEQ ID NO: 502860 - DNA, 19 bp, Mus musculus
  siRNA target sequence for Fyn (NM_008054.1,1491-1509).
gtgcgaagtttcccattaa

SEQ ID NO: 502861 - DNA, 19 bp, Mus musculus
  siRNA target sequence for Fyn (NM_008054.1,1532-1550).
ctgtatggaaggttcacaa

SEQ ID NO: 502862 - DNA, 19 bp, Mus musculus
  siRNA target sequence for G630080D20Rik (NM_178710.3,329-347).
cggaggtggctataaaaat

SEQ ID NO: 502863 - DNA, 19 bp, Mus musculus
  siRNA target sequence for G630080D20Rik (NM_178710.3,420-438).
cgaccatcctcacatcatt

SEQ ID NO: 502864 - DNA, 19 bp, Mus musculus
  siRNA target sequence for G630080D20Rik (NM_178710.3,450-468).
ggtaatggagaccaaaagt

SEQ ID NO: 502865 - DNA, 19 bp, Mus musculus
  siRNA target sequence for G630080D20Rik (NM_178710.3,451-469).
gtaatggagaccaaaagta

SEQ ID NO: 502866 - DNA, 19 bp, Mus musculus
  siRNA target sequence for G630080D20Rik (NM_178710.3,523-541).
gctaatcatggccgattaa

SEQ ID NO: 502867 - DNA, 19 bp, Mus musculus
  siRNA target sequence for G630080D20Rik (NM_178710.3,534-552).
ccgattaaatgaatctgaa

SEQ ID NO: 502868 - DNA, 19 bp, Mus musculus
  siRNA target sequence for G630080D20Rik (NM_178710.3,676-694).
gatttcggctttggaaatt

SEQ ID NO: 502869 - DNA, 19 bp, Mus musculus
  siRNA target sequence for G630080D20Rik (NM_178710.3,781-799).
ggaccacagctggatatat

SEQ ID NO: 502870 - DNA, 19 bp, Mus musculus
  siRNA target sequence for G630080D20Rik (NM_178710.3,803-821).
gcatgggagttgttcttta

SEQ ID NO: 502871 - DNA, 19 bp, Mus musculus
  siRNA target sequence for G630080D20Rik (NM_178710.3,854-872).
gaccaactctccctatttt

SEQ ID NO: 502872 - DNA, 19 bp, Mus musculus
  siRNA target sequence for G630080D20Rik (NM_178710.3,856-874).
ccaactctccctattttga

SEQ ID NO: 502873 - DNA, 19 bp, Mus musculus
  siRNA target sequence for G630080D20Rik (NM_178710.3,873-891).
gaggcagagggttttagaa

SEQ ID NO: 502874 - DNA, 19 bp, Mus musculus
  siRNA target sequence for G630080D20Rik (NM_178710.3,896-914).
gattccggattccttattt

SEQ ID NO: 502875 - DNA, 19 bp, Mus musculus
  siRNA target sequence for G630080D20Rik (NM_178710.3,901-919).
cggattccttatttcatgt

SEQ ID NO: 502876 - DNA, 19 bp, Mus musculus
  siRNA target sequence for G630080D20Rik (NM_178710.3,925-943).
gattgtgaacacctcatta

SEQ ID NO: 502877 - DNA, 19 bp, Mus musculus
  siRNA target sequence for G630080D20Rik (NM_178710.3,965-983).
cttccaaacggctaagcat

SEQ ID NO: 502878 - DNA, 19 bp, Mus musculus
  siRNA target sequence for G630080D20Rik (NM_178710.3,1027-1045).
gtacagaggcctattctct

SEQ ID NO: 502879 - DNA, 19 bp, Mus musculus
  siRNA target sequence for G630080D20Rik (NM_178710.3,1073-1091).
ccattggagaatttaatga

SEQ ID NO: 502880 - DNA, 19 bp, Mus musculus
  siRNA target sequence for G630080D20Rik (NM_178710.3,1194-1212).
gttggtggaacgtctaaaa

SEQ ID NO: 502881 - DNA, 19 bp, Mus musculus
  siRNA target sequence for G630080D20Rik (NM_178710.3,1197-1215).
ggtggaacgtctaaaatca

SEQ ID NO: 502882 - DNA, 19 bp, Mus musculus
  siRNA target sequence for G630080D20Rik (NM_178710.3,1200-1218).
ggaacgtctaaaatcacat

SEQ ID NO: 502883 - DNA, 19 bp, Mus musculus
  siRNA target sequence for G630080D20Rik (NM_178710.3,1272-1290).
caccattgctgaacaaaca

SEQ ID NO: 502884 - DNA, 19 bp, Mus musculus
  siRNA target sequence for G630080D20Rik (NM_178710.3,1274-1292).
ccattgctgaacaaacagt

SEQ ID NO: 502885 - DNA, 19 bp, Mus musculus
  siRNA target sequence for G630080D20Rik (NM_178710.3,1387-1405).
gaggccttttcatttccaa

SEQ ID NO: 502886 - DNA, 19 bp, Mus musculus
  siRNA target sequence for G630080D20Rik (NM_178710.3,1523-1541).
cactgcccagcagtatgat

SEQ ID NO: 502887 - DNA, 19 bp, Mus musculus
  siRNA target sequence for G630080D20Rik (NM_178710.3,1649-1667).
ctctgtcagaagtgactaa

SEQ ID NO: 502888 - DNA, 19 bp, Mus musculus
  siRNA target sequence for G630080D20Rik (NM_178710.3,1655-1673).
cagaagtgactaaccaatt

SEQ ID NO: 502889 - DNA, 19 bp, Mus musculus
  siRNA target sequence for G630080D20Rik (NM_178710.3,1764-1782).
ccagagggacctgaacttt

SEQ ID NO: 502890 - DNA, 19 bp, Mus musculus
  siRNA target sequence for G630080D20Rik (NM_178710.3,1796-1814).
cttccttgaaggacatcat

SEQ ID NO: 502891 - DNA, 19 bp, Mus musculus
  siRNA target sequence for G630080D20Rik (NM_178710.3,1828-1846).
ccgtcaccccgcatgacat

SEQ ID NO: 502892 - DNA, 19 bp, Mus musculus
  siRNA target sequence for G630080D20Rik (NM_178710.3,1838-1856).
gcatgacatctcctttcat

SEQ ID NO: 502893 - DNA, 19 bp, Mus musculus
  siRNA target sequence for G630080D20Rik (NM_178710.3,1945-1963).
ggccgcagagcatcagata

SEQ ID NO: 502894 - DNA, 19 bp, Mus musculus
  siRNA target sequence for G630080D20Rik (NM_178710.3,1958-1976).
cagatacgtcccttacaca

SEQ ID NO: 502895 - DNA, 19 bp, Mus musculus
  siRNA target sequence for G630080D20Rik (NM_178710.3,1964-1982).
cgtcccttacacaaggaat

SEQ ID NO: 502896 - DNA, 19 bp, Mus musculus
  siRNA target sequence for G630080D20Rik (NM_178710.3,1965-1983).
gtcccttacacaaggaatt

SEQ ID NO: 502897 - DNA, 19 bp, Mus musculus
  siRNA target sequence for G630080D20Rik (NM_178710.3,1968-1986).
ccttacacaaggaattgta

SEQ ID NO: 502898 - DNA, 19 bp, Mus musculus
  siRNA target sequence for G630080D20Rik (NM_178710.3,1973-1991).
cacaaggaattgtagcatt

SEQ ID NO: 502899 - DNA, 19 bp, Mus musculus
  siRNA target sequence for G630080D20Rik (NM_178710.3,1975-1993).
caaggaattgtagcattta

SEQ ID NO: 502900 - DNA, 19 bp, Mus musculus
  siRNA target sequence for G630080D20Rik (NM_178710.3,2011-2029).
cttgctagaaccaaaggaa

SEQ ID NO: 502901 - DNA, 19 bp, Mus musculus
  siRNA target sequence for G630080D20Rik (NM_178710.3,2080-2098).
gcagaccctaccttaacat

SEQ ID NO: 502902 - DNA, 19 bp, Mus musculus
  siRNA target sequence for G630080D20Rik (NM_178710.3,2085-2103).
ccctaccttaacatcaact

SEQ ID NO: 502903 - DNA, 19 bp, Mus musculus
  siRNA target sequence for G630080D20Rik (NM_178710.3,2284-2302).
ccttgtccagtgtattgta

SEQ ID NO: 502904 - DNA, 19 bp, Mus musculus
  siRNA target sequence for G630080D20Rik (NM_178710.3,2285-2303).
cttgtccagtgtattgtaa

SEQ ID NO: 502905 - DNA, 19 bp, Mus musculus
  siRNA target sequence for G630080D20Rik (NM_178710.3,2389-2407).
caagcatattttaatcaga

SEQ ID NO: 502906 - DNA, 19 bp, Mus musculus
  siRNA target sequence for G630080D20Rik (NM_178710.3,2632-2650).
cctcccttaccctcacaat

SEQ ID NO: 502907 - DNA, 19 bp, Mus musculus
  siRNA target sequence for G630080D20Rik (NM_178710.3,2645-2663).
cacaattgcagcaacatca

SEQ ID NO: 502908 - DNA, 19 bp, Mus musculus
  siRNA target sequence for G630080D20Rik (NM_178710.3,2713-2731).
gctccaacctccttacagt

SEQ ID NO: 502909 - DNA, 19 bp, Mus musculus
  siRNA target sequence for G630080D20Rik (NM_178710.3,2714-2732).
ctccaacctccttacagtt

SEQ ID NO: 502910 - DNA, 19 bp, Mus musculus
  siRNA target sequence for G630080D20Rik (NM_178710.3,2868-2886).
ggacaccgcatctagctat

SEQ ID NO: 502911 - DNA, 19 bp, Mus musculus
  siRNA target sequence for G630080D20Rik (NM_178710.3,2908-2926).
ctccctggactctttgatt

SEQ ID NO: 502912 - DNA, 19 bp, Mus musculus
  siRNA target sequence for Gabarapl2 (NM_026693.2,144-162).
gtggaatccgcgaagatca

SEQ ID NO: 502913 - DNA, 19 bp, Mus musculus
  siRNA target sequence for Galk1 (NM_016905.1,199-217).
cggacagatgggcttgttt

SEQ ID NO: 502914 - DNA, 19 bp, Mus musculus
  siRNA target sequence for Galk1 (NM_016905.1,201-219).
gacagatgggcttgtttct

SEQ ID NO: 502915 - DNA, 19 bp, Mus musculus
  siRNA target sequence for Galk1 (NM_016905.1,242-260).
cagacgagccccaaagact

SEQ ID NO: 502916 - DNA, 19 bp, Mus musculus
  siRNA target sequence for Galk1 (NM_016905.1,306-324).
cccacagtgggccaattat

SEQ ID NO: 502917 - DNA, 19 bp, Mus musculus
  siRNA target sequence for Galk1 (NM_016905.1,310-328).
cagtgggccaattatgtca

SEQ ID NO: 502918 - DNA, 19 bp, Mus musculus
  siRNA target sequence for Galk1 (NM_016905.1,933-951).
ctcactcagggatgactat

SEQ ID NO: 502919 - DNA, 19 bp, Mus musculus
  siRNA target sequence for Galk1 (NM_016905.1,935-953).
cactcagggatgactatga

SEQ ID NO: 502920 - DNA, 19 bp, Mus musculus
  siRNA target sequence for Galk1 (NM_016905.1,962-980).
gccctgagctggatcaatt

SEQ ID NO: 502921 - DNA, 19 bp, Mus musculus
  siRNA target sequence for Galk1 (NM_016905.1,965-983).
ctgagctggatcaattggt

SEQ ID NO: 502922 - DNA, 19 bp, Mus musculus
  siRNA target sequence for Galk1 (NM_016905.1,1043-1061).
gtggctgcaccgtcacatt

SEQ ID NO: 502923 - DNA, 19 bp, Mus musculus
  siRNA target sequence for Galk1 (NM_016905.1,1079-1097).
cccctcttgtcatagatca

SEQ ID NO: 502924 - DNA, 19 bp, Mus musculus
  siRNA target sequence for Galk1 (NM_016905.1,1080-1098).
ccctcttgtcatagatcat

SEQ ID NO: 502925 - DNA, 19 bp, Mus musculus
  siRNA target sequence for Galk1 (NM_016905.1,1082-1100).
ctcttgtcatagatcatat

SEQ ID NO: 502926 - DNA, 19 bp, Mus musculus
  siRNA target sequence for Galk2 (NM_175154.2,143-161).
gcccgacctatctgaaaga

SEQ ID NO: 502927 - DNA, 19 bp, Mus musculus
  siRNA target sequence for Galk2 (NM_175154.2,144-162).
cccgacctatctgaaagat

SEQ ID NO: 502928 - DNA, 19 bp, Mus musculus
  siRNA target sequence for Galk2 (NM_175154.2,145-163).
ccgacctatctgaaagatt

SEQ ID NO: 502929 - DNA, 19 bp, Mus musculus
  siRNA target sequence for Galk2 (NM_175154.2,179-197).
gatgtttaactctaaattt

SEQ ID NO: 502930 - DNA, 19 bp, Mus musculus
  siRNA target sequence for Galk2 (NM_175154.2,199-217).
ggtccacacccaagtttta

SEQ ID NO: 502931 - DNA, 19 bp, Mus musculus
  siRNA target sequence for Galk2 (NM_175154.2,200-218).
gtccacacccaagttttat

SEQ ID NO: 502932 - DNA, 19 bp, Mus musculus
  siRNA target sequence for Galk2 (NM_175154.2,266-284).
ctgtggatattccgttatt

SEQ ID NO: 502933 - DNA, 19 bp, Mus musculus
  siRNA target sequence for Galk2 (NM_175154.2,292-310).
ctgtggaacaagacatgtt

SEQ ID NO: 502934 - DNA, 19 bp, Mus musculus
  siRNA target sequence for Galk2 (NM_175154.2,377-395).
cttcagtactacagctaat

SEQ ID NO: 502935 - DNA, 19 bp, Mus musculus
  siRNA target sequence for Galk2 (NM_175154.2,382-400).
gtactacagctaataacat

SEQ ID NO: 502936 - DNA, 19 bp, Mus musculus
  siRNA target sequence for Galk2 (NM_175154.2,420-438).
cctctatggcacaactact

SEQ ID NO: 502937 - DNA, 19 bp, Mus musculus
  siRNA target sequence for Galk2 (NM_175154.2,421-439).
ctctatggcacaactactt

SEQ ID NO: 502938 - DNA, 19 bp, Mus musculus
  siRNA target sequence for Galk2 (NM_175154.2,423-441).
ctatggcacaactacttct

SEQ ID NO: 502939 - DNA, 19 bp, Mus musculus
  siRNA target sequence for Galk2 (NM_175154.2,465-483).
gaacactttggccttagta

SEQ ID NO: 502940 - DNA, 19 bp, Mus musculus
  siRNA target sequence for Galk2 (NM_175154.2,612-630).
gtggaacttgcagaaatct

SEQ ID NO: 502941 - DNA, 19 bp, Mus musculus
  siRNA target sequence for Galk2 (NM_175154.2,635-653).
caagagtgagcgctacata

SEQ ID NO: 502942 - DNA, 19 bp, Mus musculus
  siRNA target sequence for Galk2 (NM_175154.2,702-720).
gaaggaactgccaagttaa

SEQ ID NO: 502943 - DNA, 19 bp, Mus musculus
  siRNA target sequence for Galk2 (NM_175154.2,711-729).
gccaagttaatagaattta

SEQ ID NO: 502944 - DNA, 19 bp, Mus musculus
  siRNA target sequence for Galk2 (NM_175154.2,731-749).
ccctctgagagcgactaat

SEQ ID NO: 502945 - DNA, 19 bp, Mus musculus
  siRNA target sequence for Galk2 (NM_175154.2,733-751).
ctctgagagcgactaatgt

SEQ ID NO: 502946 - DNA, 19 bp, Mus musculus
  siRNA target sequence for Galk2 (NM_175154.2,735-753).
ctgagagcgactaatgtga

SEQ ID NO: 502947 - DNA, 19 bp, Mus musculus
  siRNA target sequence for Galk2 (NM_175154.2,760-778).
ccagtggggcagtctttgt

SEQ ID NO: 502948 - DNA, 19 bp, Mus musculus
  siRNA target sequence for Galk2 (NM_175154.2,812-830).
ggccacttcacatttcaat

SEQ ID NO: 502949 - DNA, 19 bp, Mus musculus
  siRNA target sequence for Galk2 (NM_175154.2,856-874).
cggcaaaggtccttgctaa

SEQ ID NO: 502950 - DNA, 19 bp, Mus musculus
  siRNA target sequence for Galk2 (NM_175154.2,857-875).
ggcaaaggtccttgctaaa

SEQ ID NO: 502951 - DNA, 19 bp, Mus musculus
  siRNA target sequence for Galk2 (NM_175154.2,859-877).
caaaggtccttgctaaaca

SEQ ID NO: 502952 - DNA, 19 bp, Mus musculus
  siRNA target sequence for Galk2 (NM_175154.2,863-881).
ggtccttgctaaacacaaa

SEQ ID NO: 502953 - DNA, 19 bp, Mus musculus
  siRNA target sequence for Galk2 (NM_175154.2,925-943).
gcaaactcgggattagtct

SEQ ID NO: 502954 - DNA, 19 bp, Mus musculus
  siRNA target sequence for Galk2 (NM_175154.2,1036-1054).
gactccgcacccaaatcct

SEQ ID NO: 502955 - DNA, 19 bp, Mus musculus
  siRNA target sequence for Galk2 (NM_175154.2,1057-1075).
ctccaaatactcaagatga

SEQ ID NO: 502956 - DNA, 19 bp, Mus musculus
  siRNA target sequence for Galk2 (NM_175154.2,1060-1078).
caaatactcaagatgaact

SEQ ID NO: 502957 - DNA, 19 bp, Mus musculus
  siRNA target sequence for Galk2 (NM_175154.2,1068-1086).
caagatgaactcaccttta

SEQ ID NO: 502958 - DNA, 19 bp, Mus musculus
  siRNA target sequence for Galk2 (NM_175154.2,1125-1143).
gcacgcgtgctgcagttta

SEQ ID NO: 502959 - DNA, 19 bp, Mus musculus
  siRNA target sequence for Galk2 (NM_175154.2,1126-1144).
cacgcgtgctgcagtttaa

SEQ ID NO: 502960 - DNA, 19 bp, Mus musculus
  siRNA target sequence for Galk2 (NM_175154.2,1129-1147).
gcgtgctgcagtttaagca

SEQ ID NO: 502961 - DNA, 19 bp, Mus musculus
  siRNA target sequence for Galk2 (NM_175154.2,1139-1157).
gtttaagcaggtatgtgaa

SEQ ID NO: 502962 - DNA, 19 bp, Mus musculus
  siRNA target sequence for Galk2 (NM_175154.2,1265-1283).
ggacatctgccggaagttt

SEQ ID NO: 502963 - DNA, 19 bp, Mus musculus
  siRNA target sequence for Galk2 (NM_175154.2,1289-1307).
caaaggctcacgacttact

SEQ ID NO: 502964 - DNA, 19 bp, Mus musculus
  siRNA target sequence for Galk2 (NM_175154.2,1375-1393).
gtgtgcacgaagcttatta

SEQ ID NO: 502965 - DNA, 19 bp, Mus musculus
  siRNA target sequence for Galk2 (NM_175154.2,1421-1439).
ggagaagcatagcttgttt

SEQ ID NO: 502966 - DNA, 19 bp, Mus musculus
  siRNA target sequence for Gck (NM_010292.3,30-48).
caccaagaaggaaaaggta

SEQ ID NO: 502967 - DNA, 19 bp, Mus musculus
  siRNA target sequence for Gck (NM_010292.3,148-166).
catcaggaggccagtgtaa

SEQ ID NO: 502968 - DNA, 19 bp, Mus musculus
  siRNA target sequence for Gck (NM_010292.3,306-324).
gacgaaacaccagatgtat

SEQ ID NO: 502969 - DNA, 19 bp, Mus musculus
  siRNA target sequence for Gck (NM_010292.3,356-374).
cggagatgctctttgacta

SEQ ID NO: 502970 - DNA, 19 bp, Mus musculus
  siRNA target sequence for Gck (NM_010292.3,458-476).
ctgtaaggcacgaagacat

SEQ ID NO: 502971 - DNA, 19 bp, Mus musculus
  siRNA target sequence for Gck (NM_010292.3,553-571).
ctccgagatgctatcaaga

SEQ ID NO: 502972 - DNA, 19 bp, Mus musculus
  siRNA target sequence for Gck (NM_010292.3,659-677).
gtgaggtcggcatgattgt

SEQ ID NO: 502973 - DNA, 19 bp, Mus musculus
  siRNA target sequence for Gck (NM_010292.3,853-871).
ggtcagcagctgtacgaaa

SEQ ID NO: 502974 - DNA, 19 bp, Mus musculus
  siRNA target sequence for Gck (NM_010292.3,854-872).
gtcagcagctgtacgaaaa

SEQ ID NO: 502975 - DNA, 19 bp, Mus musculus
  siRNA target sequence for Gck (NM_010292.3,856-874).
cagcagctgtacgaaaaga

SEQ ID NO: 502976 - DNA, 19 bp, Mus musculus
  siRNA target sequence for Gck (NM_010292.3,924-942).
gctggtagaggagaatctt

SEQ ID NO: 502977 - DNA, 19 bp, Mus musculus
  siRNA target sequence for Gck (NM_010292.3,972-990).
gcgcacacgtggtgctttt

SEQ ID NO: 502978 - DNA, 19 bp, Mus musculus
  siRNA target sequence for Gck (NM_010292.3,974-992).
gcacacgtggtgcttttga

SEQ ID NO: 502979 - DNA, 19 bp, Mus musculus
  siRNA target sequence for Gck (NM_010292.3,986-1004).
cttttgagacccgttttgt

SEQ ID NO: 502980 - DNA, 19 bp, Mus musculus
  siRNA target sequence for Gck (NM_010292.3,1030-1048).
gaccgaaggcagatcctta

SEQ ID NO: 502981 - DNA, 19 bp, Mus musculus
  siRNA target sequence for Gck (NM_010292.3,1099-1117).
gtgcgccgtgcctgtgaaa

SEQ ID NO: 502982 - DNA, 19 bp, Mus musculus
  siRNA target sequence for Gck (NM_010292.3,1299-1317).
ctgcgaaatcaccttcatt

SEQ ID NO: 502983 - DNA, 19 bp, Mus musculus
  siRNA target sequence for Gck (NM_010292.3,1301-1319).
gcgaaatcaccttcattga

SEQ ID NO: 502984 - DNA, 19 bp, Mus musculus
  siRNA target sequence for Gldc (NM_138595.1,228-246).
cggggcaccggcttgagtt

SEQ ID NO: 502985 - DNA, 19 bp, Mus musculus
  siRNA target sequence for Gldc (NM_138595.1,419-437).
ggggctggcgagcattgat

SEQ ID NO: 502986 - DNA, 19 bp, Mus musculus
  siRNA target sequence for Gldc (NM_138595.1,421-439).
ggctggcgagcattgatga

SEQ ID NO: 502987 - DNA, 19 bp, Mus musculus
  siRNA target sequence for Gldc (NM_138595.1,479-497).
gagacccttgaaaatggaa

SEQ ID NO: 502988 - DNA, 19 bp, Mus musculus
  siRNA target sequence for Gldc (NM_138595.1,501-519).
cctatttgtgagaatgaaa

SEQ ID NO: 502989 - DNA, 19 bp, Mus musculus
  siRNA target sequence for Gldc (NM_138595.1,557-575).
gatctggaggtcgtatatt

SEQ ID NO: 502990 - DNA, 19 bp, Mus musculus
  siRNA target sequence for Gldc (NM_138595.1,598-616).
cggtgccccagaccatttt

SEQ ID NO: 502991 - DNA, 19 bp, Mus musculus
  siRNA target sequence for Gldc (NM_138595.1,608-626).
gaccattttgcggaactta

SEQ ID NO: 502992 - DNA, 19 bp, Mus musculus
  siRNA target sequence for Gldc (NM_138595.1,610-628).
ccattttgcggaacttact

SEQ ID NO: 502993 - DNA, 19 bp, Mus musculus
  siRNA target sequence for Gldc (NM_138595.1,618-636).
cggaacttactggagaatt

SEQ ID NO: 502994 - DNA, 19 bp, Mus musculus
  siRNA target sequence for Gldc (NM_138595.1,873-891).
cagactcgagccaaatata

SEQ ID NO: 502995 - DNA, 19 bp, Mus musculus
  siRNA target sequence for Gldc (NM_138595.1,899-917).
gcttgtcgagctgaagtta

SEQ ID NO: 502996 - DNA, 19 bp, Mus musculus
  siRNA target sequence for Gldc (NM_138595.1,914-932).
gttaccccacgaaatggat

SEQ ID NO: 502997 - DNA, 19 bp, Mus musculus
  siRNA target sequence for Gldc (NM_138595.1,918-936).
ccccacgaaatggatttca

SEQ ID NO: 502998 - DNA, 19 bp, Mus musculus
  siRNA target sequence for Gldc (NM_138595.1,995-1013).
ggacttcacagaacttgta

SEQ ID NO: 502999 - DNA, 19 bp, Mus musculus
  siRNA target sequence for Gldc (NM_138595.1,1115-1133).
gggcaactcccagagattt

SEQ ID NO: 503000 - DNA, 19 bp, Mus musculus
  siRNA target sequence for Gldc (NM_138595.1,1237-1255).
ccacagggaaggaagtgta

SEQ ID NO: 503001 - DNA, 19 bp, Mus musculus
  siRNA target sequence for Gldc (NM_138595.1,1238-1256).
cacagggaaggaagtgtat

SEQ ID NO: 503002 - DNA, 19 bp, Mus musculus
  siRNA target sequence for Gldc (NM_138595.1,1348-1366).
ctgccatgttcgccattta

SEQ ID NO: 503003 - DNA, 19 bp, Mus musculus
  siRNA target sequence for Gldc (NM_138595.1,1352-1370).
catgttcgccatttaccat

SEQ ID NO: 503004 - DNA, 19 bp, Mus musculus
  siRNA target sequence for Gldc (NM_138595.1,1382-1400).
gctgaagcacattgctaaa

SEQ ID NO: 503005 - DNA, 19 bp, Mus musculus
  siRNA target sequence for Gldc (NM_138595.1,1383-1401).
ctgaagcacattgctaaaa

SEQ ID NO: 503006 - DNA, 19 bp, Mus musculus
  siRNA target sequence for Gldc (NM_138595.1,1402-1420).
gggttcataatgctacttt

SEQ ID NO: 503007 - DNA, 19 bp, Mus musculus
  siRNA target sequence for Gldc (NM_138595.1,1404-1422).
gttcataatgctactttga

SEQ ID NO: 503008 - DNA, 19 bp, Mus musculus
  siRNA target sequence for Gldc (NM_138595.1,1407-1425).
cataatgctactttgattt

SEQ ID NO: 503009 - DNA, 19 bp, Mus musculus
  siRNA target sequence for Gldc (NM_138595.1,1533-1551).
gctcagaggcaaatcaact

SEQ ID NO: 503010 - DNA, 19 bp, Mus musculus
  siRNA target sequence for Gldc (NM_138595.1,1568-1586).
cggcacacttggcatttct

SEQ ID NO: 503011 - DNA, 19 bp, Mus musculus
  siRNA target sequence for Gldc (NM_138595.1,1597-1615).
cagtcactgagaaagatct

SEQ ID NO: 503012 - DNA, 19 bp, Mus musculus
  siRNA target sequence for Gldc (NM_138595.1,1646-1664).
gtcatctgcagaattagtt

SEQ ID NO: 503013 - DNA, 19 bp, Mus musculus
  siRNA target sequence for Gldc (NM_138595.1,1695-1713).
cttctagggtcttcattca

SEQ ID NO: 503014 - DNA, 19 bp, Mus musculus
  siRNA target sequence for Gldc (NM_138595.1,1751-1769).
cagctatcactcagaaact

SEQ ID NO: 503015 - DNA, 19 bp, Mus musculus
  siRNA target sequence for Gldc (NM_138595.1,1773-1791).
cttgtccggtatatgaaga

SEQ ID NO: 503016 - DNA, 19 bp, Mus musculus
  siRNA target sequence for Gldc (NM_138595.1,1942-1960).
gataccaacagcttttcca

SEQ ID NO: 503017 - DNA, 19 bp, Mus musculus
  siRNA target sequence for Gldc (NM_138595.1,1993-2011).
gctacgaccgagtctcatt

SEQ ID NO: 503018 - DNA, 19 bp, Mus musculus
  siRNA target sequence for Gldc (NM_138595.1,2054-2072).
caccatcagagcgtactta

SEQ ID NO: 503019 - DNA, 19 bp, Mus musculus
  siRNA target sequence for Gldc (NM_138595.1,2056-2074).
ccatcagagcgtacttaga

SEQ ID NO: 503020 - DNA, 19 bp, Mus musculus
  siRNA target sequence for Gldc (NM_138595.1,2093-2111).
cagaacagtctgtctcatt

SEQ ID NO: 503021 - DNA, 19 bp, Mus musculus
  siRNA target sequence for Gldc (NM_138595.1,2173-2191).
ctgtggaggtggacagata

SEQ ID NO: 503022 - DNA, 19 bp, Mus musculus
  siRNA target sequence for Gldc (NM_138595.1,2264-2282).
cacgtatccatctaccaat

SEQ ID NO: 503023 - DNA, 19 bp, Mus musculus
  siRNA target sequence for Gldc (NM_138595.1,2272-2290).
catctaccaatggtgtatt

SEQ ID NO: 503024 - DNA, 19 bp, Mus musculus
  siRNA target sequence for Gldc (NM_138595.1,2407-2425).
cagacgtctctcacctaaa

SEQ ID NO: 503025 - DNA, 19 bp, Mus musculus
  siRNA target sequence for Gldc (NM_138595.1,2520-2538).
caccccgtcatttccataa

SEQ ID NO: 503026 - DNA, 19 bp, Mus musculus
  siRNA target sequence for Gldc (NM_138595.1,2614-2632).
catgggcttacattaagat

SEQ ID NO: 503027 - DNA, 19 bp, Mus musculus
  siRNA target sequence for Gldc (NM_138595.1,2660-2678).
cacagaaatcgccattcta

SEQ ID NO: 503028 - DNA, 19 bp, Mus musculus
  siRNA target sequence for Gldc (NM_138595.1,2693-2711).
ggccaaacgactagagaaa

SEQ ID NO: 503029 - DNA, 19 bp, Mus musculus
  siRNA target sequence for Gldc (NM_138595.1,2712-2730).
cactacagagtcctcttta

SEQ ID NO: 503030 - DNA, 19 bp, Mus musculus
  siRNA target sequence for Gldc (NM_138595.1,2743-2761).
ggtatgtggctcatgagtt

SEQ ID NO: 503031 - DNA, 19 bp, Mus musculus
  siRNA target sequence for Gldc (NM_138595.1,2774-2792).
ccgacccttcaaaaagtct

SEQ ID NO: 503032 - DNA, 19 bp, Mus musculus
  siRNA target sequence for Gldc (NM_138595.1,2783-2801).
caaaaagtctgccaatgtt

SEQ ID NO: 503033 - DNA, 19 bp, Mus musculus
  siRNA target sequence for Gldc (NM_138595.1,2824-2842).
ggctccaggattatggatt

SEQ ID NO: 503034 - DNA, 19 bp, Mus musculus
  siRNA target sequence for Gldc (NM_138595.1,2825-2843).
gctccaggattatggattt

SEQ ID NO: 503035 - DNA, 19 bp, Mus musculus
  siRNA target sequence for Gldc (NM_138595.1,2872-2890).
cagggactctcatgattga

SEQ ID NO: 503036 - DNA, 19 bp, Mus musculus
  siRNA target sequence for Gldc (NM_138595.1,2913-2931).
gcagagctcgacagattct

SEQ ID NO: 503037 - DNA, 19 bp, Mus musculus
  siRNA target sequence for Gldc (NM_138595.1,2954-2972).
gcaagaaatcgctgacata

SEQ ID NO: 503038 - DNA, 19 bp, Mus musculus
  siRNA target sequence for Gldc (NM_138595.1,3050-3068).
ctgggatcggccgtattct

SEQ ID NO: 503039 - DNA, 19 bp, Mus musculus
  siRNA target sequence for Gldc (NM_138595.1,3053-3071).
ggatcggccgtattctaga

SEQ ID NO: 503040 - DNA, 19 bp, Mus musculus
  siRNA target sequence for Gldc (NM_138595.1,3113-3131).
caaattctggccaaccatt

SEQ ID NO: 503041 - DNA, 19 bp, Mus musculus
  siRNA target sequence for Gldc (NM_138595.1,3133-3151).
cccggatcgatgacatcta

SEQ ID NO: 503042 - DNA, 19 bp, Mus musculus
  siRNA target sequence for Gldc (NM_138595.1,3202-3220).
ctccattttctgaacagaa

SEQ ID NO: 503043 - DNA, 19 bp, Mus musculus
  siRNA target sequence for Gne (NM_015828.2,314-332).
gacgactatggaaacacat

SEQ ID NO: 503044 - DNA, 19 bp, Mus musculus
  siRNA target sequence for Gne (NM_015828.2,373-391).
gctccacacgattgttaga

SEQ ID NO: 503045 - DNA, 19 bp, Mus musculus
  siRNA target sequence for Gne (NM_015828.2,469-487).
gcccgacatcatgattgtt

SEQ ID NO: 503046 - DNA, 19 bp, Mus musculus
  siRNA target sequence for Gne (NM_015828.2,471-489).
ccgacatcatgattgttca

SEQ ID NO: 503047 - DNA, 19 bp, Mus musculus
  siRNA target sequence for Gne (NM_015828.2,571-589).
ggtcagcgggaccattgat

SEQ ID NO: 503048 - DNA, 19 bp, Mus musculus
  siRNA target sequence for Gne (NM_015828.2,583-601).
cattgatgactctatcaga

SEQ ID NO: 503049 - DNA, 19 bp, Mus musculus
  siRNA target sequence for Gne (NM_015828.2,598-616).
cagacacgccataacaaaa

SEQ ID NO: 503050 - DNA, 19 bp, Mus musculus
  siRNA target sequence for Gne (NM_015828.2,629-647).
catgtgtgctgcactagaa

SEQ ID NO: 503051 - DNA, 19 bp, Mus musculus
  siRNA target sequence for Gne (NM_015828.2,727-745).
gctctccgccaagaacaaa

SEQ ID NO: 503052 - DNA, 19 bp, Mus musculus
  siRNA target sequence for Gne (NM_015828.2,732-750).
ccgccaagaacaaagacta

SEQ ID NO: 503053 - DNA, 19 bp, Mus musculus
  siRNA target sequence for Gne (NM_015828.2,733-751).
cgccaagaacaaagactat

SEQ ID NO: 503054 - DNA, 19 bp, Mus musculus
  siRNA target sequence for Gne (NM_015828.2,771-789).
ggctaggcgatgatgtaaa

SEQ ID NO: 503055 - DNA, 19 bp, Mus musculus
  siRNA target sequence for Gne (NM_015828.2,773-791).
ctaggcgatgatgtaaaat

SEQ ID NO: 503056 - DNA, 19 bp, Mus musculus
  siRNA target sequence for Gne (NM_015828.2,776-794).
ggcgatgatgtaaaatgta

SEQ ID NO: 503057 - DNA, 19 bp, Mus musculus
  siRNA target sequence for Gne (NM_015828.2,777-795).
gcgatgatgtaaaatgtaa

SEQ ID NO: 503058 - DNA, 19 bp, Mus musculus
  siRNA target sequence for Gne (NM_015828.2,785-803).
gtaaaatgtaaggattaca

SEQ ID NO: 503059 - DNA, 19 bp, Mus musculus
  siRNA target sequence for Gne (NM_015828.2,821-839).
cccgtgaccactgacatta

SEQ ID NO: 503060 - DNA, 19 bp, Mus musculus
  siRNA target sequence for Gne (NM_015828.2,822-840).
ccgtgaccactgacattaa

SEQ ID NO: 503061 - DNA, 19 bp, Mus musculus
  siRNA target sequence for Gne (NM_015828.2,833-851).
gacattaagcattccataa

SEQ ID NO: 503062 - DNA, 19 bp, Mus musculus
  siRNA target sequence for Gne (NM_015828.2,872-890).
gatgccctgatctcgttta

SEQ ID NO: 503063 - DNA, 19 bp, Mus musculus
  siRNA target sequence for Gne (NM_015828.2,875-893).
gccctgatctcgtttaaca

SEQ ID NO: 503064 - DNA, 19 bp, Mus musculus
  siRNA target sequence for Gne (NM_015828.2,876-894).
ccctgatctcgtttaacaa

SEQ ID NO: 503065 - DNA, 19 bp, Mus musculus
  siRNA target sequence for Gne (NM_015828.2,878-896).
ctgatctcgtttaacaaga

SEQ ID NO: 503066 - DNA, 19 bp, Mus musculus
  siRNA target sequence for Gne (NM_015828.2,1006-1024).
cccgtttgaccagttcata

SEQ ID NO: 503067 - DNA, 19 bp, Mus musculus
  siRNA target sequence for Gne (NM_015828.2,1008-1026).
cgtttgaccagttcataca

SEQ ID NO: 503068 - DNA, 19 bp, Mus musculus
  siRNA target sequence for Gne (NM_015828.2,1140-1158).
ccggggagaatgttcttca

SEQ ID NO: 503069 - DNA, 19 bp, Mus musculus
  siRNA target sequence for Gne (NM_015828.2,1141-1159).
cggggagaatgttcttcat

SEQ ID NO: 503070 - DNA, 19 bp, Mus musculus
  siRNA target sequence for Gne (NM_015828.2,1169-1187).
gctgacacccaagataaaa

SEQ ID NO: 503071 - DNA, 19 bp, Mus musculus
  siRNA target sequence for Gne (NM_015828.2,1205-1223).
ctccagttcggcaaacagt

SEQ ID NO: 503072 - DNA, 19 bp, Mus musculus
  siRNA target sequence for Gne (NM_015828.2,1222-1240).
gtacccttgctcaaagata

SEQ ID NO: 503073 - DNA, 19 bp, Mus musculus
  siRNA target sequence for Gne (NM_015828.2,1252-1270).
gaatgctgttccaaggatt

SEQ ID NO: 503074 - DNA, 19 bp, Mus musculus
  siRNA target sequence for Gne (NM_015828.2,1331-1349).
cctgtaaaggagaacatct

SEQ ID NO: 503075 - DNA, 19 bp, Mus musculus
  siRNA target sequence for Gne (NM_015828.2,1342-1360).
gaacatctctcaagacatt

SEQ ID NO: 503076 - DNA, 19 bp, Mus musculus
  siRNA target sequence for Gne (NM_015828.2,1414-1432).
cctgagggtggcaatagtt

SEQ ID NO: 503077 - DNA, 19 bp, Mus musculus
  siRNA target sequence for Gne (NM_015828.2,1442-1460).
ggtgaaatcgttaagaagt

SEQ ID NO: 503078 - DNA, 19 bp, Mus musculus
  siRNA target sequence for Gne (NM_015828.2,1443-1461).
gtgaaatcgttaagaagta

SEQ ID NO: 503079 - DNA, 19 bp, Mus musculus
  siRNA target sequence for Gne (NM_015828.2,1466-1484).
cagttcaaccctaaaacct

SEQ ID NO: 503080 - DNA, 19 bp, Mus musculus
  siRNA target sequence for Gne (NM_015828.2,1468-1486).
gttcaaccctaaaacctat

SEQ ID NO: 503081 - DNA, 19 bp, Mus musculus
  siRNA target sequence for Gne (NM_015828.2,1483-1501).
ctatgaagaaaggattagt

SEQ ID NO: 503082 - DNA, 19 bp, Mus musculus
  siRNA target sequence for Gne (NM_015828.2,1538-1556).
gctgtgaaactcaattgca

SEQ ID NO: 503083 - DNA, 19 bp, Mus musculus
  siRNA target sequence for Gne (NM_015828.2,1737-1755).
ggaagttcggccaaggaaa

SEQ ID NO: 503084 - DNA, 19 bp, Mus musculus
  siRNA target sequence for Gne (NM_015828.2,1738-1756).
gaagttcggccaaggaaaa

SEQ ID NO: 503085 - DNA, 19 bp, Mus musculus
  siRNA target sequence for Gne (NM_015828.2,1741-1759).
gttcggccaaggaaaagga

SEQ ID NO: 503086 - DNA, 19 bp, Mus musculus
  siRNA target sequence for Gne (NM_015828.2,1998-2016).
ggatgtcagtaccaaaaga

SEQ ID NO: 503087 - DNA, 19 bp, Mus musculus
  siRNA target sequence for Gne (NM_015828.2,2072-2090).
gcccagagcatcttacgaa

SEQ ID NO: 503088 - DNA, 19 bp, Mus musculus
  siRNA target sequence for Gne (NM_015828.2,2125-2143).
catcctccacactatgaat

SEQ ID NO: 503089 - DNA, 19 bp, Mus musculus
  siRNA target sequence for Gprk2l (NM_019497.1,39-57).
gaaggcccgtctaggattt

SEQ ID NO: 503090 - DNA, 19 bp, Mus musculus
  siRNA target sequence for Gprk2l (NM_019497.1,43-61).
gcccgtctaggatttaaca

SEQ ID NO: 503091 - DNA, 19 bp, Mus musculus
  siRNA target sequence for Gprk2l (NM_019497.1,44-62).
cccgtctaggatttaacaa

SEQ ID NO: 503092 - DNA, 19 bp, Mus musculus
  siRNA target sequence for Gprk2l (NM_019497.1,45-63).
ccgtctaggatttaacaaa

SEQ ID NO: 503093 - DNA, 19 bp, Mus musculus
  siRNA target sequence for Gprk2l (NM_019497.1,47-65).
gtctaggatttaacaaaca

SEQ ID NO: 503094 - DNA, 19 bp, Mus musculus
  siRNA target sequence for Gprk2l (NM_019497.1,64-82).
cagactggtcgtagtaaaa

SEQ ID NO: 503095 - DNA, 19 bp, Mus musculus
  siRNA target sequence for Gprk2l (NM_019497.1,66-84).
gactggtcgtagtaaaaaa

SEQ ID NO: 503096 - DNA, 19 bp, Mus musculus
  siRNA target sequence for Gprk2l (NM_019497.1,70-88).
ggtcgtagtaaaaaatgga

SEQ ID NO: 503097 - DNA, 19 bp, Mus musculus
  siRNA target sequence for Gprk2l (NM_019497.1,87-105).
gagagagctcctgaagttt

SEQ ID NO: 503098 - DNA, 19 bp, Mus musculus
  siRNA target sequence for Gprk2l (NM_019497.1,138-156).
gtccatcgaaaaggatttt

SEQ ID NO: 503099 - DNA, 19 bp, Mus musculus
  siRNA target sequence for Gprk2l (NM_019497.1,168-186).
cgacaaacagccaattgga

SEQ ID NO: 503100 - DNA, 19 bp, Mus musculus
  siRNA target sequence for Gprk2l (NM_019497.1,177-195).
gccaattggaagacttctt

SEQ ID NO: 503101 - DNA, 19 bp, Mus musculus
  siRNA target sequence for Gprk2l (NM_019497.1,226-244).
ctaaaaaggtgcattgaat

SEQ ID NO: 503102 - DNA, 19 bp, Mus musculus
  siRNA target sequence for Gprk2l (NM_019497.1,301-319).
ggactagccatcttcagta

SEQ ID NO: 503103 - DNA, 19 bp, Mus musculus
  siRNA target sequence for Gprk2l (NM_019497.1,304-322).
ctagccatcttcagtagat

SEQ ID NO: 503104 - DNA, 19 bp, Mus musculus
  siRNA target sequence for Gprk2l (NM_019497.1,373-391).
gtgaaagagtgtaaatgga

SEQ ID NO: 503105 - DNA, 19 bp, Mus musculus
  siRNA target sequence for Gprk2l (NM_019497.1,390-408).
gaatctgaagcagaattct

SEQ ID NO: 503106 - DNA, 19 bp, Mus musculus
  siRNA target sequence for Gprk2l (NM_019497.1,407-425).
ctccctctcaaaatgtttt

SEQ ID NO: 503107 - DNA, 19 bp, Mus musculus
  siRNA target sequence for Gprk2l (NM_019497.1,459-477).
gagtgaaacaccatttgaa

SEQ ID NO: 503108 - DNA, 19 bp, Mus musculus
  siRNA target sequence for Gprk2l (NM_019497.1,461-479).
gtgaaacaccatttgaaga

SEQ ID NO: 503109 - DNA, 19 bp, Mus musculus
  siRNA target sequence for Gprk2l (NM_019497.1,484-502).
caagaaagtacctacttta

SEQ ID NO: 503110 - DNA, 19 bp, Mus musculus
  siRNA target sequence for Gprk2l (NM_019497.1,491-509).
gtacctactttaatcgatt

SEQ ID NO: 503111 - DNA, 19 bp, Mus musculus
  siRNA target sequence for Gprk2l (NM_019497.1,535-553).
cgtccagtaacaaagaaca

SEQ ID NO: 503112 - DNA, 19 bp, Mus musculus
  siRNA target sequence for Gprk2l (NM_019497.1,613-631).
gtacgagctacaggaaaaa

SEQ ID NO: 503113 - DNA, 19 bp, Mus musculus
  siRNA target sequence for Gprk2l (NM_019497.1,616-634).
cgagctacaggaaaaatgt

SEQ ID NO: 503114 - DNA, 19 bp, Mus musculus
  siRNA target sequence for Gprk2l (NM_019497.1,637-655).
gcctgcaaaaaactagaaa

SEQ ID NO: 503115 - DNA, 19 bp, Mus musculus
  siRNA target sequence for Gprk2l (NM_019497.1,686-704).
ccatggctctgaatgaaaa

SEQ ID NO: 503116 - DNA, 19 bp, Mus musculus
  siRNA target sequence for Gprk2l (NM_019497.1,723-741).
gcatagtagatttgtagtt

SEQ ID NO: 503117 - DNA, 19 bp, Mus musculus
  siRNA target sequence for Gprk2l (NM_019497.1,743-761).
gtttagcctacacttatga

SEQ ID NO: 503118 - DNA, 19 bp, Mus musculus
  siRNA target sequence for Gprk2l (NM_019497.1,777-795).
gtgtttggtgctaaccata

SEQ ID NO: 503119 - DNA, 19 bp, Mus musculus
  siRNA target sequence for Gprk2l (NM_019497.1,779-797).
gtttggtgctaaccataat

SEQ ID NO: 503120 - DNA, 19 bp, Mus musculus
  siRNA target sequence for Gprk2l (NM_019497.1,783-801).
ggtgctaaccataatgaat

SEQ ID NO: 503121 - DNA, 19 bp, Mus musculus
  siRNA target sequence for Gprk2l (NM_019497.1,855-873).
gccgagagctgtgttctat

SEQ ID NO: 503122 - DNA, 19 bp, Mus musculus
  siRNA target sequence for Gprk2l (NM_019497.1,983-1001).
cagatcttggtctagctat

SEQ ID NO: 503123 - DNA, 19 bp, Mus musculus
  siRNA target sequence for Gprk2l (NM_019497.1,1056-1074).
ggctccagaaattatcaat

SEQ ID NO: 503124 - DNA, 19 bp, Mus musculus
  siRNA target sequence for Gprk2l (NM_019497.1,1058-1076).
ctccagaaattatcaatca

SEQ ID NO: 503125 - DNA, 19 bp, Mus musculus
  siRNA target sequence for Gprk2l (NM_019497.1,1108-1126).
ggacttggctgtttgatat

SEQ ID NO: 503126 - DNA, 19 bp, Mus musculus
  siRNA target sequence for Gprk2l (NM_019497.1,1109-1127).
gacttggctgtttgatata

SEQ ID NO: 503127 - DNA, 19 bp, Mus musculus
  siRNA target sequence for Gprk2l (NM_019497.1,1114-1132).
ggctgtttgatatatgaaa

SEQ ID NO: 503128 - DNA, 19 bp, Mus musculus
  siRNA target sequence for Gprk2l (NM_019497.1,1140-1158).
gggacattctccattcaga

SEQ ID NO: 503129 - DNA, 19 bp, Mus musculus
  siRNA target sequence for Gprk2l (NM_019497.1,1141-1159).
ggacattctccattcagaa

SEQ ID NO: 503130 - DNA, 19 bp, Mus musculus
  siRNA target sequence for Gprk2l (NM_019497.1,1251-1269).
gtccatctgcagcatgtta

SEQ ID NO: 503131 - DNA, 19 bp, Mus musculus
  siRNA target sequence for Gprk2l (NM_019497.1,1253-1271).
ccatctgcagcatgttact

SEQ ID NO: 503132 - DNA, 19 bp, Mus musculus
  siRNA target sequence for Gprk2l (NM_019497.1,1260-1278).
cagcatgttactcatcaaa

SEQ ID NO: 503133 - DNA, 19 bp, Mus musculus
  siRNA target sequence for Gprk2l (NM_019497.1,1324-1342).
gtaaagcagcacccaatat

SEQ ID NO: 503134 - DNA, 19 bp, Mus musculus
  siRNA target sequence for Gprk2l (NM_019497.1,1359-1377).
cagcaggctggaagcaaat

SEQ ID NO: 503135 - DNA, 19 bp, Mus musculus
  siRNA target sequence for Gprk2l (NM_019497.1,1365-1383).
gctggaagcaaatatgtta

SEQ ID NO: 503136 - DNA, 19 bp, Mus musculus
  siRNA target sequence for Gprk2l (NM_019497.1,1421-1439).
gtaggaacatcttggatat

SEQ ID NO: 503137 - DNA, 19 bp, Mus musculus
  siRNA target sequence for Gprk2l (NM_019497.1,1467-1485).
caacctggataccaatgat

SEQ ID NO: 503138 - DNA, 19 bp, Mus musculus
  siRNA target sequence for Gprk2l (NM_019497.1,1556-1574).
gatgtttcaaggatctcaa

SEQ ID NO: 503139 - DNA, 19 bp, Mus musculus
  siRNA target sequence for Gprk2l (NM_019497.1,1559-1577).
gtttcaaggatctcaatga

SEQ ID NO: 503140 - DNA, 19 bp, Mus musculus
  siRNA target sequence for Gprk2l (NM_019497.1,1587-1605).
cgatttgtcatcacttgaa

SEQ ID NO: 503141 - DNA, 19 bp, Mus musculus
  siRNA target sequence for Gprk2l (NM_019497.1,1600-1618).
cttgaaaaatacaagatgt

SEQ ID NO: 503142 - DNA, 19 bp, Mus musculus
  siRNA target sequence for Gprk2l (NM_019497.1,1654-1672).
cgtagactcttcagaagaa

SEQ ID NO: 503143 - DNA, 19 bp, Mus musculus
  siRNA target sequence for Gprk5 (NM_018869.2,359-377).
cttagtggcagaatatgaa

SEQ ID NO: 503144 - DNA, 19 bp, Mus musculus
  siRNA target sequence for Gprk5 (NM_018869.2,365-383).
ggcagaatatgaaattact

SEQ ID NO: 503145 - DNA, 19 bp, Mus musculus
  siRNA target sequence for Gprk5 (NM_018869.2,403-421).
cgaaggggaaggaaataat

SEQ ID NO: 503146 - DNA, 19 bp, Mus musculus
  siRNA target sequence for Gprk5 (NM_018869.2,716-734).
ggttcgggccactggtaaa

SEQ ID NO: 503147 - DNA, 19 bp, Mus musculus
  siRNA target sequence for Gprk5 (NM_018869.2,717-735).
gttcgggccactggtaaaa

SEQ ID NO: 503148 - DNA, 19 bp, Mus musculus
  siRNA target sequence for Gprk5 (NM_018869.2,721-739).
gggccactggtaaaatgta

SEQ ID NO: 503149 - DNA, 19 bp, Mus musculus
  siRNA target sequence for Gprk5 (NM_018869.2,741-759).
gcttgtaaacgcttagaga

SEQ ID NO: 503150 - DNA, 19 bp, Mus musculus
  siRNA target sequence for Gprk5 (NM_018869.2,742-760).
cttgtaaacgcttagagaa

SEQ ID NO: 503151 - DNA, 19 bp, Mus musculus
  siRNA target sequence for Gprk5 (NM_018869.2,745-763).
gtaaacgcttagagaagaa

SEQ ID NO: 503152 - DNA, 19 bp, Mus musculus
  siRNA target sequence for Gprk5 (NM_018869.2,962-980).
gcgagccttattttatgca

SEQ ID NO: 503153 - DNA, 19 bp, Mus musculus
  siRNA target sequence for Gprk5 (NM_018869.2,1013-1031).
ccgtgagaacactgtctat

SEQ ID NO: 503154 - DNA, 19 bp, Mus musculus
  siRNA target sequence for Gprk5 (NM_018869.2,1014-1032).
cgtgagaacactgtctata

SEQ ID NO: 503155 - DNA, 19 bp, Mus musculus
  siRNA target sequence for Gprk5 (NM_018869.2,1062-1080).
gatgattatggccacataa

SEQ ID NO: 503156 - DNA, 19 bp, Mus musculus
  siRNA target sequence for Gprk5 (NM_018869.2,1214-1232).
cctgggctgcctcatctat

SEQ ID NO: 503157 - DNA, 19 bp, Mus musculus
  siRNA target sequence for Gprk5 (NM_018869.2,1222-1240).
gcctcatctatgagatgat

SEQ ID NO: 503158 - DNA, 19 bp, Mus musculus
  siRNA target sequence for Gprk5 (NM_018869.2,1263-1281).
ggtcgcaaggagaaggtta

SEQ ID NO: 503159 - DNA, 19 bp, Mus musculus
  siRNA target sequence for Gprk5 (NM_018869.2,1323-1341).
gtatattcctccaagttct

SEQ ID NO: 503160 - DNA, 19 bp, Mus musculus
  siRNA target sequence for Gprk5 (NM_018869.2,1440-1458).
cccttcttcaggaacatga

SEQ ID NO: 503161 - DNA, 19 bp, Mus musculus
  siRNA target sequence for Gprk5 (NM_018869.2,1771-1789).
ggcggcagcatcaaagcaa

SEQ ID NO: 503162 - DNA, 19 bp, Mus musculus
  siRNA target sequence for Gprk5 (NM_018869.2,1772-1790).
gcggcagcatcaaagcaat

SEQ ID NO: 503163 - DNA, 19 bp, Mus musculus
  siRNA target sequence for Gprk6 (NM_011938.1,23-41).
cgaacacggtgctactcaa

SEQ ID NO: 503164 - DNA, 19 bp, Mus musculus
  siRNA target sequence for Gprk6 (NM_011938.1,308-326).
gccgactaatgcagaactt

SEQ ID NO: 503165 - DNA, 19 bp, Mus musculus
  siRNA target sequence for Gprk6 (NM_011938.1,309-327).
ccgactaatgcagaacttt

SEQ ID NO: 503166 - DNA, 19 bp, Mus musculus
  siRNA target sequence for Gprk6 (NM_011938.1,311-329).
gactaatgcagaactttct

SEQ ID NO: 503167 - DNA, 19 bp, Mus musculus
  siRNA target sequence for Gprk6 (NM_011938.1,365-383).
cacggcagctggtgagtaa

SEQ ID NO: 503168 - DNA, 19 bp, Mus musculus
  siRNA target sequence for Gprk6 (NM_011938.1,484-502).
ctcgacagcatctacttca

SEQ ID NO: 503169 - DNA, 19 bp, Mus musculus
  siRNA target sequence for Gprk6 (NM_011938.1,617-635).
gggcaacaggcaagatgta

SEQ ID NO: 503170 - DNA, 19 bp, Mus musculus
  siRNA target sequence for Gprk6 (NM_011938.1,691-709).
gctctcaacgagaaacaga

SEQ ID NO: 503171 - DNA, 19 bp, Mus musculus
  siRNA target sequence for Gsg2 (NM_010353.1,58-76).
ggtacccggctctttcgaa

SEQ ID NO: 503172 - DNA, 19 bp, Mus musculus
  siRNA target sequence for Gsg2 (NM_010353.1,295-313).
cagcggaccctgacaaaca

SEQ ID NO: 503173 - DNA, 19 bp, Mus musculus
  siRNA target sequence for Gsg2 (NM_010353.1,561-579).
ggcagcctccctaagtgaa

SEQ ID NO: 503174 - DNA, 19 bp, Mus musculus
  siRNA target sequence for Gsg2 (NM_010353.1,732-750).
gaaggaatcgtgttgtgaa

SEQ ID NO: 503175 - DNA, 19 bp, Mus musculus
  siRNA target sequence for Gsg2 (NM_010353.1,735-753).
ggaatcgtgttgtgaaaga

SEQ ID NO: 503176 - DNA, 19 bp, Mus musculus
  siRNA target sequence for Gsg2 (NM_010353.1,736-754).
gaatcgtgttgtgaaagaa

SEQ ID NO: 503177 - DNA, 19 bp, Mus musculus
  siRNA target sequence for Gsg2 (NM_010353.1,973-991).
cgccactaccaccaatcta

SEQ ID NO: 503178 - DNA, 19 bp, Mus musculus
  siRNA target sequence for Gsg2 (NM_010353.1,974-992).
gccactaccaccaatctaa

SEQ ID NO: 503179 - DNA, 19 bp, Mus musculus
  siRNA target sequence for Gsg2 (NM_010353.1,976-994).
cactaccaccaatctaaga

SEQ ID NO: 503180 - DNA, 19 bp, Mus musculus
  siRNA target sequence for Gsg2 (NM_010353.1,1006-1024).
gcgtcagtctccttatgga

SEQ ID NO: 503181 - DNA, 19 bp, Mus musculus
  siRNA target sequence for Gsg2 (NM_010353.1,1007-1025).
cgtcagtctccttatggaa

SEQ ID NO: 503182 - DNA, 19 bp, Mus musculus
  siRNA target sequence for Gsg2 (NM_010353.1,1017-1035).
cttatggaacttgaatact

SEQ ID NO: 503183 - DNA, 19 bp, Mus musculus
  siRNA target sequence for Gsg2 (NM_010353.1,1163-1181).
gttcgacccctcctatcaa

SEQ ID NO: 503184 - DNA, 19 bp, Mus musculus
  siRNA target sequence for Gsg2 (NM_010353.1,1259-1277).
cagaccaaaggccatctta

SEQ ID NO: 503185 - DNA, 19 bp, Mus musculus
  siRNA target sequence for Gsg2 (NM_010353.1,1268-1286).
ggccatcttatgctgaaaa

SEQ ID NO: 503186 - DNA, 19 bp, Mus musculus
  siRNA target sequence for Gsg2 (NM_010353.1,1271-1289).
catcttatgctgaaaaggt

SEQ ID NO: 503187 - DNA, 19 bp, Mus musculus
  siRNA target sequence for Gsg2 (NM_010353.1,1287-1305).
ggtttatggggagtgtaat

SEQ ID NO: 503188 - DNA, 19 bp, Mus musculus
  siRNA target sequence for Gsg2 (NM_010353.1,1313-1331).
ggcccatcccctttagtga

SEQ ID NO: 503189 - DNA, 19 bp, Mus musculus
  siRNA target sequence for Gsg2 (NM_010353.1,1314-1332).
gcccatcccctttagtgat

SEQ ID NO: 503190 - DNA, 19 bp, Mus musculus
  siRNA target sequence for Gsg2 (NM_010353.1,1315-1333).
cccatcccctttagtgatt

SEQ ID NO: 503191 - DNA, 19 bp, Mus musculus
  siRNA target sequence for Gsg2 (NM_010353.1,1334-1352).
gcctttccacggaaaaact

SEQ ID NO: 503192 - DNA, 19 bp, Mus musculus
  siRNA target sequence for Gsg2 (NM_010353.1,1353-1371).
ggaacggtgtgagaagatt

SEQ ID NO: 503193 - DNA, 19 bp, Mus musculus
  siRNA target sequence for Gsg2 (NM_010353.1,1418-1436).
cacctgtagccctaaaaat

SEQ ID NO: 503194 - DNA, 19 bp, Mus musculus
  siRNA target sequence for Gsg2 (NM_010353.1,1420-1438).
cctgtagccctaaaaatca

SEQ ID NO: 503195 - DNA, 19 bp, Mus musculus
  siRNA target sequence for Gsg2 (NM_010353.1,1421-1439).
ctgtagccctaaaaatcat

SEQ ID NO: 503196 - DNA, 19 bp, Mus musculus
  siRNA target sequence for Gsg2 (NM_010353.1,1426-1444).
gccctaaaaatcattgcta

SEQ ID NO: 503197 - DNA, 19 bp, Mus musculus
  siRNA target sequence for Gsg2 (NM_010353.1,1427-1445).
ccctaaaaatcattgctat

SEQ ID NO: 503198 - DNA, 19 bp, Mus musculus
  siRNA target sequence for Gsg2 (NM_010353.1,1428-1446).
cctaaaaatcattgctatt

SEQ ID NO: 503199 - DNA, 19 bp, Mus musculus
  siRNA target sequence for Gsg2 (NM_010353.1,1447-1465).
gaagggttagatttagtca

SEQ ID NO: 503200 - DNA, 19 bp, Mus musculus
  siRNA target sequence for Gsg2 (NM_010353.1,1554-1572).
ccgcacagaaggctttatt

SEQ ID NO: 503201 - DNA, 19 bp, Mus musculus
  siRNA target sequence for Gsg2 (NM_010353.1,1623-1641).
gaaagcctgggatcactat

SEQ ID NO: 503202 - DNA, 19 bp, Mus musculus
  siRNA target sequence for Gsg2 (NM_010353.1,1627-1645).
gcctgggatcactataaca

SEQ ID NO: 503203 - DNA, 19 bp, Mus musculus
  siRNA target sequence for Gsg2 (NM_010353.1,1684-1702).
caggaagaccagctcttta

SEQ ID NO: 503204 - DNA, 19 bp, Mus musculus
  siRNA target sequence for Gsg2 (NM_010353.1,1686-1704).
ggaagaccagctctttatt

SEQ ID NO: 503205 - DNA, 19 bp, Mus musculus
  siRNA target sequence for Gsg2 (NM_010353.1,1687-1705).
gaagaccagctctttatta

SEQ ID NO: 503206 - DNA, 19 bp, Mus musculus
  siRNA target sequence for Gsg2 (NM_010353.1,1837-1855).
gagcaccgggacttacact

SEQ ID NO: 503207 - DNA, 19 bp, Mus musculus
  siRNA target sequence for Gsg2 (NM_010353.1,1940-1958).
ggctacaggtcaacatcat

SEQ ID NO: 503208 - DNA, 19 bp, Mus musculus
  siRNA target sequence for Gsg2 (NM_010353.1,1941-1959).
gctacaggtcaacatcatt

SEQ ID NO: 503209 - DNA, 19 bp, Mus musculus
  siRNA target sequence for Gsg2 (NM_010353.1,2044-2062).
ggtgactaccagtttgaga

SEQ ID NO: 503210 - DNA, 19 bp, Mus musculus
  siRNA target sequence for Gsg2 (NM_010353.1,2104-2122).
gagtatcacccttacaata

SEQ ID NO: 503211 - DNA, 19 bp, Mus musculus
  siRNA target sequence for Gsg2 (NM_010353.1,2106-2124).
gtatcacccttacaataat

SEQ ID NO: 503212 - DNA, 19 bp, Mus musculus
  siRNA target sequence for Gsg2 (NM_010353.1,2147-2165).
cagacaagattctgaataa

SEQ ID NO: 503213 - DNA, 19 bp, Mus musculus
  siRNA target sequence for Gsg2 (NM_010353.1,2192-2210).
gcgcagccatgaagcaaat

SEQ ID NO: 503214 - DNA, 19 bp, Mus musculus
  siRNA target sequence for Gsg2 (NM_010353.1,2193-2211).
cgcagccatgaagcaaata

SEQ ID NO: 503215 - DNA, 19 bp, Mus musculus
  siRNA target sequence for Gsg2 (NM_010353.1,2272-2290).
ctctgccaacacagtctat

SEQ ID NO: 503216 - DNA, 19 bp, Mus musculus
  siRNA target sequence for Gsg2 (NM_010353.1,2278-2296).
caacacagtctatttaggt

SEQ ID NO: 503217 - DNA, 19 bp, Mus musculus
  siRNA target sequence for Gsk3b (NM_019827.2,1503-1521).
gcagcagccttcagctttt

SEQ ID NO: 503218 - DNA, 19 bp, Mus musculus
  siRNA target sequence for Gsk3b (NM_019827.2,1506-1524).
gcagccttcagcttttggt

SEQ ID NO: 503219 - DNA, 19 bp, Mus musculus
  siRNA target sequence for Gsk3b (NM_019827.2,1507-1525).
cagccttcagcttttggta

SEQ ID NO: 503220 - DNA, 19 bp, Mus musculus
  siRNA target sequence for Gsk3b (NM_019827.2,1602-1620).
gccacaggaagtcagttat

SEQ ID NO: 503221 - DNA, 19 bp, Mus musculus
  siRNA target sequence for Gsk3b (NM_019827.2,1603-1621).
ccacaggaagtcagttata

SEQ ID NO: 503222 - DNA, 19 bp, Mus musculus
  siRNA target sequence for Gsk3b (NM_019827.2,1624-1642).
gacacgaaagtgattggaa

SEQ ID NO: 503223 - DNA, 19 bp, Mus musculus
  siRNA target sequence for Gsk3b (NM_019827.2,1626-1644).
cacgaaagtgattggaaat

SEQ ID NO: 503224 - DNA, 19 bp, Mus musculus
  siRNA target sequence for Gsk3b (NM_019827.2,1659-1677).
ggtatatcaagccaaactt

SEQ ID NO: 503225 - DNA, 19 bp, Mus musculus
  siRNA target sequence for Gsk3b (NM_019827.2,1714-1732).
ctacaggacaagcgattta

SEQ ID NO: 503226 - DNA, 19 bp, Mus musculus
  siRNA target sequence for Gsk3b (NM_019827.2,1757-1775).
gaaagctagaccactgtaa

SEQ ID NO: 503227 - DNA, 19 bp, Mus musculus
  siRNA target sequence for Gsk3b (NM_019827.2,1780-1798).
gtccgactgcggtatttct

SEQ ID NO: 503228 - DNA, 19 bp, Mus musculus
  siRNA target sequence for Gsk3b (NM_019827.2,1783-1801).
cgactgcggtatttcttct

SEQ ID NO: 503229 - DNA, 19 bp, Mus musculus
  siRNA target sequence for Gsk3b (NM_019827.2,1872-1890).
cagagtcgccagacactat

SEQ ID NO: 503230 - DNA, 19 bp, Mus musculus
  siRNA target sequence for Gsk3b (NM_019827.2,1909-1927).
ctccctgtgatctatgtca

SEQ ID NO: 503231 - DNA, 19 bp, Mus musculus
  siRNA target sequence for Gsk3b (NM_019827.2,1915-1933).
gtgatctatgtcaagttgt

SEQ ID NO: 503232 - DNA, 19 bp, Mus musculus
  siRNA target sequence for Gsk3b (NM_019827.2,1917-1935).
gatctatgtcaagttgtat

SEQ ID NO: 503233 - DNA, 19 bp, Mus musculus
  siRNA target sequence for Gsk3b (NM_019827.2,1952-1970).
gaagtctagcctatatcca

SEQ ID NO: 503234 - DNA, 19 bp, Mus musculus
  siRNA target sequence for Gsk3b (NM_019827.2,1983-2001).
ctgccatcgagacattaaa

SEQ ID NO: 503235 - DNA, 19 bp, Mus musculus
  siRNA target sequence for Gsk3b (NM_019827.2,2013-2031).
cttgttggatcctgataca

SEQ ID NO: 503236 - DNA, 19 bp, Mus musculus
  siRNA target sequence for Gsk3b (NM_019827.2,2076-2094).
ccgaggagagcccaatgtt

SEQ ID NO: 503237 - DNA, 19 bp, Mus musculus
  siRNA target sequence for Gsk3b (NM_019827.2,2088-2106).
caatgtttcatatatctgt

SEQ ID NO: 503238 - DNA, 19 bp, Mus musculus
  siRNA target sequence for Gsk3b (NM_019827.2,2154-2172).
cacgtccagtatagatgta

SEQ ID NO: 503239 - DNA, 19 bp, Mus musculus
  siRNA target sequence for Gsk3b (NM_019827.2,2186-2204).
gtgtgttggctgaattgtt

SEQ ID NO: 503240 - DNA, 19 bp, Mus musculus
  siRNA target sequence for Gsk3b (NM_019827.2,2205-2223).
gctaggacaaccaatattt

SEQ ID NO: 503241 - DNA, 19 bp, Mus musculus
  siRNA target sequence for Gsk3b (NM_019827.2,2278-2296).
ccaacaagggagcaaatta

SEQ ID NO: 503242 - DNA, 19 bp, Mus musculus
  siRNA target sequence for Gsk3b (NM_019827.2,2456-2474).
gtgcacattcatttttcga

SEQ ID NO: 503243 - DNA, 19 bp, Mus musculus
  siRNA target sequence for Gsk3b (NM_019827.2,2461-2479).
cattcatttttcgatgaat

SEQ ID NO: 503244 - DNA, 19 bp, Mus musculus
  siRNA target sequence for Gsk3b (NM_019827.2,2481-2499).
gcgggacccaaatgtcaaa

SEQ ID NO: 503245 - DNA, 19 bp, Mus musculus
  siRNA target sequence for Gsk3b (NM_019827.2,2483-2501).
gggacccaaatgtcaaact

SEQ ID NO: 503246 - DNA, 19 bp, Mus musculus
  siRNA target sequence for Gsk3b (NM_019827.2,2484-2502).
ggacccaaatgtcaaacta

SEQ ID NO: 503247 - DNA, 19 bp, Mus musculus
  siRNA target sequence for Gsk3b (NM_019827.2,2636-2654).
cagcagcctcagatactaa

SEQ ID NO: 503248 - DNA, 19 bp, Mus musculus
  siRNA target sequence for Gsk3b (NM_019827.2,2662-2680).
gaccgtggacagaccaata

SEQ ID NO: 503249 - DNA, 19 bp, Mus musculus
  siRNA target sequence for Gss (NM_008180.1,386-404).
ctgaatcgctcagattaca

SEQ ID NO: 503250 - DNA, 19 bp, Mus musculus
  siRNA target sequence for Gss (NM_008180.1,443-461).
cagatcgagatcaacacta

SEQ ID NO: 503251 - DNA, 19 bp, Mus musculus
  siRNA target sequence for Gss (NM_008180.1,448-466).
cgagatcaacactatctct

SEQ ID NO: 503252 - DNA, 19 bp, Mus musculus
  siRNA target sequence for Gss (NM_008180.1,505-523).
gcaccgacacgttctcaat

SEQ ID NO: 503253 - DNA, 19 bp, Mus musculus
  siRNA target sequence for Gss (NM_008180.1,753-771).
ggggttctctggaccaaaa

SEQ ID NO: 503254 - DNA, 19 bp, Mus musculus
  siRNA target sequence for Gss (NM_008180.1,767-785).
caaaaccgaaggctgttta

SEQ ID NO: 503255 - DNA, 19 bp, Mus musculus
  siRNA target sequence for Gss (NM_008180.1,772-790).
ccgaaggctgtttatggat

SEQ ID NO: 503256 - DNA, 19 bp, Mus musculus
  siRNA target sequence for Gss (NM_008180.1,826-844).
ctacatgcccagtcagtat

SEQ ID NO: 503257 - DNA, 19 bp, Mus musculus
  siRNA target sequence for Gss (NM_008180.1,1125-1143).
gtggaggtaacaacttata

SEQ ID NO: 503258 - DNA, 19 bp, Mus musculus
  siRNA target sequence for Gss (NM_008180.1,1223-1241).
gaacctgagccttttagga

SEQ ID NO: 503259 - DNA, 19 bp, Mus musculus
  siRNA target sequence for Gss (NM_008180.1,1226-1244).
cctgagccttttaggaatt

SEQ ID NO: 503260 - DNA, 19 bp, Mus musculus
  siRNA target sequence for Gss (NM_008180.1,1288-1306).
ctcggagctgggtattttt

SEQ ID NO: 503261 - DNA, 19 bp, Mus musculus
  siRNA target sequence for Gss (NM_008180.1,1299-1317).
gtatttttggagtctatgt

SEQ ID NO: 503262 - DNA, 19 bp, Mus musculus
  siRNA target sequence for Gss (NM_008180.1,1357-1375).
gcacctgcttcgaaccaaa

SEQ ID NO: 503263 - DNA, 19 bp, Mus musculus
  siRNA target sequence for Gtf2f2 (NM_026816.1,173-191).
gctggtcaaggttcctaaa

SEQ ID NO: 503264 - DNA, 19 bp, Mus musculus
  siRNA target sequence for Gtf2f2 (NM_026816.1,174-192).
ctggtcaaggttcctaaat

SEQ ID NO: 503265 - DNA, 19 bp, Mus musculus
  siRNA target sequence for Gtf2f2 (NM_026816.1,177-195).
gtcaaggttcctaaatatt

SEQ ID NO: 503266 - DNA, 19 bp, Mus musculus
  siRNA target sequence for Gtf2f2 (NM_026816.1,265-283).
gaaggactgaggtatcatt

SEQ ID NO: 503267 - DNA, 19 bp, Mus musculus
  siRNA target sequence for Gtf2f2 (NM_026816.1,269-287).
gactgaggtatcatttact

SEQ ID NO: 503268 - DNA, 19 bp, Mus musculus
  siRNA target sequence for Gtf2f2 (NM_026816.1,290-308).
gaacgaggatcttgcaaat

SEQ ID NO: 503269 - DNA, 19 bp, Mus musculus
  siRNA target sequence for Gtf2f2 (NM_026816.1,296-314).
ggatcttgcaaatattcat

SEQ ID NO: 503270 - DNA, 19 bp, Mus musculus
  siRNA target sequence for Gtf2f2 (NM_026816.1,349-367).
ctagagaacacccatttgt

SEQ ID NO: 503271 - DNA, 19 bp, Mus musculus
  siRNA target sequence for Gtf2f2 (NM_026816.1,361-379).
catttgtcttgcaaagtgt

SEQ ID NO: 503272 - DNA, 19 bp, Mus musculus
  siRNA target sequence for Gtf2f2 (NM_026816.1,376-394).
gtgttggcggacagacatt

SEQ ID NO: 503273 - DNA, 19 bp, Mus musculus
  siRNA target sequence for Gtf2f2 (NM_026816.1,378-396).
gttggcggacagacattaa

SEQ ID NO: 503274 - DNA, 19 bp, Mus musculus
  siRNA target sequence for Gtf2f2 (NM_026816.1,382-400).
gcggacagacattaacagt

SEQ ID NO: 503275 - DNA, 19 bp, Mus musculus
  siRNA target sequence for Gtf2f2 (NM_026816.1,541-559).
cacaacagctggacaaagt

SEQ ID NO: 503276 - DNA, 19 bp, Mus musculus
  siRNA target sequence for Gtf2f2 (NM_026816.1,585-603).
gctaaccatcagtacaata

SEQ ID NO: 503277 - DNA, 19 bp, Mus musculus
  siRNA target sequence for Gtf2f2 (NM_026816.1,586-604).
ctaaccatcagtacaatat

SEQ ID NO: 503278 - DNA, 19 bp, Mus musculus
  siRNA target sequence for Gtf2f2 (NM_026816.1,591-609).
catcagtacaatattgaat

SEQ ID NO: 503279 - DNA, 19 bp, Mus musculus
  siRNA target sequence for Gtf2f2 (NM_026816.1,638-656).
gcgagctcgggcagacaaa

SEQ ID NO: 503280 - DNA, 19 bp, Mus musculus
  siRNA target sequence for Gtf2f2 (NM_026816.1,640-658).
gagctcgggcagacaaaca

SEQ ID NO: 503281 - DNA, 19 bp, Mus musculus
  siRNA target sequence for Gtf2f2 (NM_026816.1,690-708).
gagaagcatcagtactata

SEQ ID NO: 503282 - DNA, 19 bp, Mus musculus
  siRNA target sequence for Gtf2f2 (NM_026816.1,692-710).
gaagcatcagtactataat

SEQ ID NO: 503283 - DNA, 19 bp, Mus musculus
  siRNA target sequence for Gtf2f2 (NM_026816.1,744-762).
gtgggatacctgaaagaaa

SEQ ID NO: 503284 - DNA, 19 bp, Mus musculus
  siRNA target sequence for Gtf2f2 (NM_026816.1,795-813).
ggaattcacaagaacacat

SEQ ID NO: 503285 - DNA, 19 bp, Mus musculus
  siRNA target sequence for Gucy2e (NM_008192.1,195-213).
ggcttgcgaccccatcttt

SEQ ID NO: 503286 - DNA, 19 bp, Mus musculus
  siRNA target sequence for Gucy2e (NM_008192.1,255-273).
ccgcctgaatcgtgacttt

SEQ ID NO: 503287 - DNA, 19 bp, Mus musculus
  siRNA target sequence for Gucy2e (NM_008192.1,839-857).
ccttcgacacgcttcacta

SEQ ID NO: 503288 - DNA, 19 bp, Mus musculus
  siRNA target sequence for Gucy2e (NM_008192.1,849-867).
gcttcactacgctttgtct

SEQ ID NO: 503289 - DNA, 19 bp, Mus musculus
  siRNA target sequence for Gucy2e (NM_008192.1,981-999).
cctgcgcagggctcaagaa

SEQ ID NO: 503290 - DNA, 19 bp, Mus musculus
  siRNA target sequence for Gucy2e (NM_008192.1,1235-1253).
catccggagaacagttgtt

SEQ ID NO: 503291 - DNA, 19 bp, Mus musculus
  siRNA target sequence for Gucy2e (NM_008192.1,1358-1376).
ggttcgatccagatgtgat

SEQ ID NO: 503292 - DNA, 19 bp, Mus musculus
  siRNA target sequence for Gucy2e (NM_008192.1,1472-1490).
ggcacaggctgctacacat

SEQ ID NO: 503293 - DNA, 19 bp, Mus musculus
  siRNA target sequence for Gucy2e (NM_008192.1,1521-1539).
cttgacgttggaagatgtt

SEQ ID NO: 503294 - DNA, 19 bp, Mus musculus
  siRNA target sequence for Gucy2e (NM_008192.1,1524-1542).
gacgttggaagatgttact

SEQ ID NO: 503295 - DNA, 19 bp, Mus musculus
  siRNA target sequence for Gucy2e (NM_008192.1,1526-1544).
cgttggaagatgttacttt

SEQ ID NO: 503296 - DNA, 19 bp, Mus musculus
  siRNA target sequence for Gucy2e (NM_008192.1,1575-1593).
ggtggtccagggaagtaga

SEQ ID NO: 503297 - DNA, 19 bp, Mus musculus
  siRNA target sequence for Gucy2e (NM_008192.1,1608-1626).
ccggagcgcatcagacatt

SEQ ID NO: 503298 - DNA, 19 bp, Mus musculus
  siRNA target sequence for Gucy2e (NM_008192.1,1658-1676).
ccaacgttggcctctatga

SEQ ID NO: 503299 - DNA, 19 bp, Mus musculus
  siRNA target sequence for Gucy2e (NM_008192.1,1724-1742).
ctatcaggccagcaacaaa

SEQ ID NO: 503300 - DNA, 19 bp, Mus musculus
  siRNA target sequence for Gucy2e (NM_008192.1,1959-1977).
catcaagggaatgagatat

SEQ ID NO: 503301 - DNA, 19 bp, Mus musculus
  siRNA target sequence for Gucy2e (NM_008192.1,2182-2200).
ctagctggtgatgtcttta

SEQ ID NO: 503302 - DNA, 19 bp, Mus musculus
  siRNA target sequence for Gucy2e (NM_008192.1,2264-2282).
cgcccgaggaagtaataca

SEQ ID NO: 503303 - DNA, 19 bp, Mus musculus
  siRNA target sequence for Gucy2e (NM_008192.1,2266-2284).
cccgaggaagtaatacaga

SEQ ID NO: 503304 - DNA, 19 bp, Mus musculus
  siRNA target sequence for Gucy2e (NM_008192.1,2419-2437).
ctgttcaagagcatcaaca

SEQ ID NO: 503305 - DNA, 19 bp, Mus musculus
  siRNA target sequence for Gucy2e (NM_008192.1,2641-2659).
gaggtgacactctacttca

SEQ ID NO: 503306 - DNA, 19 bp, Mus musculus
  siRNA target sequence for Gucy2e (NM_008192.1,2721-2739).
gcttaatgacctctatact

SEQ ID NO: 503307 - DNA, 19 bp, Mus musculus
  siRNA target sequence for Gucy2e (NM_008192.1,2757-2775).
cggtgcccatgatgtctat

SEQ ID NO: 503308 - DNA, 19 bp, Mus musculus
  siRNA target sequence for Gucy2e (NM_008192.1,2758-2776).
ggtgcccatgatgtctata

SEQ ID NO: 503309 - DNA, 19 bp, Mus musculus
  siRNA target sequence for Gucy2e (NM_008192.1,2926-2944).
gtgcgcatccgcattggtt

SEQ ID NO: 503310 - DNA, 19 bp, Mus musculus
  siRNA target sequence for Gucy2e (NM_008192.1,3058-3076).
cgcatccacgttaacatga

SEQ ID NO: 503311 - DNA, 19 bp, Mus musculus
  siRNA target sequence for Gucy2e (NM_008192.1,3075-3093).
gagcactgttcggattctt

SEQ ID NO: 503312 - DNA, 19 bp, Mus musculus
  siRNA target sequence for Guk1 (NM_008193.2,210-228).
gaagatggcaaagattact

SEQ ID NO: 503313 - DNA, 19 bp, Mus musculus
  siRNA target sequence for Guk1 (NM_008193.2,217-235).
gcaaagattactactttgt

SEQ ID NO: 503314 - DNA, 19 bp, Mus musculus
  siRNA target sequence for Guk1 (NM_008193.2,245-263).
gatgatgcagcgtgatatt

SEQ ID NO: 503315 - DNA, 19 bp, Mus musculus
  siRNA target sequence for Guk1 (NM_008193.2,248-266).
gatgcagcgtgatattgca

SEQ ID NO: 503316 - DNA, 19 bp, Mus musculus
  siRNA target sequence for Guk1 (NM_008193.2,265-283).
cagcaggggacttcattga

SEQ ID NO: 503317 - DNA, 19 bp, Mus musculus
  siRNA target sequence for Guk1 (NM_008193.2,355-373).
gcatctgcgtgctagatgt

SEQ ID NO: 503318 - DNA, 19 bp, Mus musculus
  siRNA target sequence for Guk1 (NM_008193.2,385-403).
gtgtgcgcagcatcaagaa

SEQ ID NO: 503319 - DNA, 19 bp, Mus musculus
  siRNA target sequence for Guk1 (NM_008193.2,387-405).
gtgcgcagcatcaagaaga

SEQ ID NO: 503320 - DNA, 19 bp, Mus musculus
  siRNA target sequence for Guk1 (NM_008193.2,411-429).
ctgtgtcccatctacatct

SEQ ID NO: 503321 - DNA, 19 bp, Mus musculus
  siRNA target sequence for Guk1 (NM_008193.2,413-431).
gtgtcccatctacatcttt

SEQ ID NO: 503322 - DNA, 19 bp, Mus musculus
  siRNA target sequence for Gyk (NM_008194.1,171-189).
ggttttcaattcaaaaaca

SEQ ID NO: 503323 - DNA, 19 bp, Mus musculus
  siRNA target sequence for Gyk (NM_008194.1,319-337).
ggacagctcaatattgata

SEQ ID NO: 503324 - DNA, 19 bp, Mus musculus
  siRNA target sequence for Gyk (NM_008194.1,320-338).
gacagctcaatattgatat

SEQ ID NO: 503325 - DNA, 19 bp, Mus musculus
  siRNA target sequence for Gyk (NM_008194.1,402-420).
caccggagagcctctctat

SEQ ID NO: 503326 - DNA, 19 bp, Mus musculus
  siRNA target sequence for Gyk (NM_008194.1,523-541).
ccacttagcacgtatttca

SEQ ID NO: 503327 - DNA, 19 bp, Mus musculus
  siRNA target sequence for Gyk (NM_008194.1,562-580).
ctccttgacaacgtgaaaa

SEQ ID NO: 503328 - DNA, 19 bp, Mus musculus
  siRNA target sequence for Gyk (NM_008194.1,582-600).
ggtccaagaggctgttgaa

SEQ ID NO: 503329 - DNA, 19 bp, Mus musculus
  siRNA target sequence for Gyk (NM_008194.1,613-631).
ctttttgggaccattgatt

SEQ ID NO: 503330 - DNA, 19 bp, Mus musculus
  siRNA target sequence for Gyk (NM_008194.1,784-802).
cccaacgttcggagttctt

SEQ ID NO: 503331 - DNA, 19 bp, Mus musculus
  siRNA target sequence for Gyk (NM_008194.1,954-972).
caacacgggccataagtgt

SEQ ID NO: 503332 - DNA, 19 bp, Mus musculus
  siRNA target sequence for Gyk (NM_008194.1,959-977).
cgggccataagtgtgtatt

SEQ ID NO: 503333 - DNA, 19 bp, Mus musculus
  siRNA target sequence for Gyk (NM_008194.1,993-1011).
cctgacaaccgtagcatat

SEQ ID NO: 503334 - DNA, 19 bp, Mus musculus
  siRNA target sequence for Gyk (NM_008194.1,994-1012).
ctgacaaccgtagcatata

SEQ ID NO: 503335 - DNA, 19 bp, Mus musculus
  siRNA target sequence for Gyk (NM_008194.1,996-1014).
gacaaccgtagcatataaa

SEQ ID NO: 503336 - DNA, 19 bp, Mus musculus
  siRNA target sequence for Gyk (NM_008194.1,1091-1109).
gagacaaccttggaattat

SEQ ID NO: 503337 - DNA, 19 bp, Mus musculus
  siRNA target sequence for Gyk (NM_008194.1,1113-1131).
gtcctctgaggaaattgaa

SEQ ID NO: 503338 - DNA, 19 bp, Mus musculus
  siRNA target sequence for Gyk (NM_008194.1,1115-1133).
cctctgaggaaattgaaaa

SEQ ID NO: 503339 - DNA, 19 bp, Mus musculus
  siRNA target sequence for Gyk (NM_008194.1,1167-1185).
ctacttcgttccagcattt

SEQ ID NO: 503340 - DNA, 19 bp, Mus musculus
  siRNA target sequence for Gyk (NM_008194.1,1189-1207).
gggttatatgcgccttatt

SEQ ID NO: 503341 - DNA, 19 bp, Mus musculus
  siRNA target sequence for Gyk (NM_008194.1,1269-1287).
cgcttttgctgcactagaa

SEQ ID NO: 503342 - DNA, 19 bp, Mus musculus
  siRNA target sequence for Gyk (NM_008194.1,1382-1400).
gcaataaaattcttatgca

SEQ ID NO: 503343 - DNA, 19 bp, Mus musculus
  siRNA target sequence for Gyk (NM_008194.1,1402-1420).
ctacaagcagacattctgt

SEQ ID NO: 503344 - DNA, 19 bp, Mus musculus
  siRNA target sequence for Gyk (NM_008194.1,1539-1557).
cacaatggagcggtttgaa

SEQ ID NO: 503345 - DNA, 19 bp, Mus musculus
  siRNA target sequence for Gyk (NM_008194.1,1561-1579).
cagatcaatgctgaagaaa

SEQ ID NO: 503346 - DNA, 19 bp, Mus musculus
  siRNA target sequence for Hars (NM_008214.2,128-146).
cgaaactcctaaaactgaa

SEQ ID NO: 503347 - DNA, 19 bp, Mus musculus
  siRNA target sequence for Hars (NM_008214.2,198-216).
caagggcacgagagactat

SEQ ID NO: 503348 - DNA, 19 bp, Mus musculus
  siRNA target sequence for Hars (NM_008214.2,201-219).
gggcacgagagactatagt

SEQ ID NO: 503349 - DNA, 19 bp, Mus musculus
  siRNA target sequence for Hars (NM_008214.2,258-276).
catcatccgctgtttcaaa

SEQ ID NO: 503350 - DNA, 19 bp, Mus musculus
  siRNA target sequence for Hars (NM_008214.2,279-297).
ccatggagcagaagtgatt

SEQ ID NO: 503351 - DNA, 19 bp, Mus musculus
  siRNA target sequence for Hars (NM_008214.2,294-312).
gattgatacacctgtgttt

SEQ ID NO: 503352 - DNA, 19 bp, Mus musculus
  siRNA target sequence for Hars (NM_008214.2,302-320).
cacctgtgtttgaactaaa

SEQ ID NO: 503353 - DNA, 19 bp, Mus musculus
  siRNA target sequence for Hars (NM_008214.2,344-362).
gagaagactcaaagcttat

SEQ ID NO: 503354 - DNA, 19 bp, Mus musculus
  siRNA target sequence for Hars (NM_008214.2,444-462).
gaataaactgaccaacatt

SEQ ID NO: 503355 - DNA, 19 bp, Mus musculus
  siRNA target sequence for Hars (NM_008214.2,517-535).
ggccgttaccgtgaattct

SEQ ID NO: 503356 - DNA, 19 bp, Mus musculus
  siRNA target sequence for Hars (NM_008214.2,518-536).
gccgttaccgtgaattcta

SEQ ID NO: 503357 - DNA, 19 bp, Mus musculus
  siRNA target sequence for Hars (NM_008214.2,519-537).
ccgttaccgtgaattctat

SEQ ID NO: 503358 - DNA, 19 bp, Mus musculus
  siRNA target sequence for Hars (NM_008214.2,521-539).
gttaccgtgaattctatca

SEQ ID NO: 503359 - DNA, 19 bp, Mus musculus
  siRNA target sequence for Hars (NM_008214.2,731-749).
cggtggacaagctagacaa

SEQ ID NO: 503360 - DNA, 19 bp, Mus musculus
  siRNA target sequence for Hars (NM_008214.2,736-754).
gacaagctagacaaggttt

SEQ ID NO: 503361 - DNA, 19 bp, Mus musculus
  siRNA target sequence for Hars (NM_008214.2,1011-1029).
ctatactggggtcatctat

SEQ ID NO: 503362 - DNA, 19 bp, Mus musculus
  siRNA target sequence for Hars (NM_008214.2,1115-1133).
gcctggttggcatgtttga

SEQ ID NO: 503363 - DNA, 19 bp, Mus musculus
  siRNA target sequence for Hars (NM_008214.2,1158-1176).
cgttgggctcagtattgga

SEQ ID NO: 503364 - DNA, 19 bp, Mus musculus
  siRNA target sequence for Hars (NM_008214.2,1174-1192).
ggagtggagcggatctttt

SEQ ID NO: 503365 - DNA, 19 bp, Mus musculus
  siRNA target sequence for Hars (NM_008214.2,1179-1197).
ggagcggatcttttccatt

SEQ ID NO: 503366 - DNA, 19 bp, Mus musculus
  siRNA target sequence for Hars (NM_008214.2,1182-1200).
gcggatcttttccattgta

SEQ ID NO: 503367 - DNA, 19 bp, Mus musculus
  siRNA target sequence for Harsl (NM_080636.1,215-233).
ggttgcaaaggcagtgtta

SEQ ID NO: 503368 - DNA, 19 bp, Mus musculus
  siRNA target sequence for Harsl (NM_080636.1,216-234).
gttgcaaaggcagtgttaa

SEQ ID NO: 503369 - DNA, 19 bp, Mus musculus
  siRNA target sequence for Harsl (NM_080636.1,219-237).
gcaaaggcagtgttaacgt

SEQ ID NO: 503370 - DNA, 19 bp, Mus musculus
  siRNA target sequence for Harsl (NM_080636.1,261-279).
gagaagccgaattttgtca

SEQ ID NO: 503371 - DNA, 19 bp, Mus musculus
  siRNA target sequence for Harsl (NM_080636.1,331-349).
gggagaaaatcctcgataa

SEQ ID NO: 503372 - DNA, 19 bp, Mus musculus
  siRNA target sequence for Harsl (NM_080636.1,375-393).
ggggcgaaggggttggata

SEQ ID NO: 503373 - DNA, 19 bp, Mus musculus
  siRNA target sequence for Harsl (NM_080636.1,399-417).
gcgtttgagctaaaagaaa

SEQ ID NO: 503374 - DNA, 19 bp, Mus musculus
  siRNA target sequence for Harsl (NM_080636.1,400-418).
cgtttgagctaaaagaaat

SEQ ID NO: 503375 - DNA, 19 bp, Mus musculus
  siRNA target sequence for Harsl (NM_080636.1,424-442).
ccgagaagtatgaagacaa

SEQ ID NO: 503376 - DNA, 19 bp, Mus musculus
  siRNA target sequence for Harsl (NM_080636.1,652-670).
gtgagtttgacccaatgat

SEQ ID NO: 503377 - DNA, 19 bp, Mus musculus
  siRNA target sequence for Harsl (NM_080636.1,672-690).
cctgatgcagagtgtttga

SEQ ID NO: 503378 - DNA, 19 bp, Mus musculus
  siRNA target sequence for Harsl (NM_080636.1,723-741).
ctgggggactttctcatta

SEQ ID NO: 503379 - DNA, 19 bp, Mus musculus
  siRNA target sequence for Harsl (NM_080636.1,757-775).
gggttgtagatgggatatt

SEQ ID NO: 503380 - DNA, 19 bp, Mus musculus
  siRNA target sequence for Harsl (NM_080636.1,758-776).
ggttgtagatgggatattt

SEQ ID NO: 503381 - DNA, 19 bp, Mus musculus
  siRNA target sequence for Harsl (NM_080636.1,823-841).
caatggacaaactagacaa

SEQ ID NO: 503382 - DNA, 19 bp, Mus musculus
  siRNA target sequence for Harsl (NM_080636.1,895-913).
ccgaggtggccgatcgaat

SEQ ID NO: 503383 - DNA, 19 bp, Mus musculus
  siRNA target sequence for Harsl (NM_080636.1,896-914).
cgaggtggccgatcgaatt

SEQ ID NO: 503384 - DNA, 19 bp, Mus musculus
  siRNA target sequence for Harsl (NM_080636.1,916-934).
gggacttcgtccaatatca

SEQ ID NO: 503385 - DNA, 19 bp, Mus musculus
  siRNA target sequence for Harsl (NM_080636.1,917-935).
ggacttcgtccaatatcat

SEQ ID NO: 503386 - DNA, 19 bp, Mus musculus
  siRNA target sequence for Harsl (NM_080636.1,1050-1068).
ggaattgctgataagatct

SEQ ID NO: 503387 - DNA, 19 bp, Mus musculus
  siRNA target sequence for Harsl (NM_080636.1,1189-1207).
ctggtgggcgctatgacaa

SEQ ID NO: 503388 - DNA, 19 bp, Mus musculus
  siRNA target sequence for Harsl (NM_080636.1,1192-1210).
gtgggcgctatgacaatct

SEQ ID NO: 503389 - DNA, 19 bp, Mus musculus
  siRNA target sequence for Harsl (NM_080636.1,1267-1285).
gagtagagagaatcttcta

SEQ ID NO: 503390 - DNA, 19 bp, Mus musculus
  siRNA target sequence for Harsl (NM_080636.1,1374-1392).
ctccaagaacgtttgaaga

SEQ ID NO: 503391 - DNA, 19 bp, Mus musculus
  siRNA target sequence for Harsl (NM_080636.1,1376-1394).
ccaagaacgtttgaagata

SEQ ID NO: 503392 - DNA, 19 bp, Mus musculus
  siRNA target sequence for Harsl (NM_080636.1,1462-1480).
cccagctgcactattgtga

SEQ ID NO: 503393 - DNA, 19 bp, Mus musculus
  siRNA target sequence for Harsl (NM_080636.1,1466-1484).
gctgcactattgtgagaaa

SEQ ID NO: 503394 - DNA, 19 bp, Mus musculus
  siRNA target sequence for Harsl (NM_080636.1,1574-1592).
gaccattaatcgagaaagt

SEQ ID NO: 503395 - DNA, 19 bp, Mus musculus
  siRNA target sequence for Harsl (NM_080636.1,1576-1594).
ccattaatcgagaaagtct

SEQ ID NO: 503396 - DNA, 19 bp, Mus musculus
  siRNA target sequence for Harsl (NM_080636.1,1591-1609).
gtctcgtggctgaaattca

SEQ ID NO: 503397 - DNA, 19 bp, Mus musculus
  siRNA target sequence for Harsl (NM_080636.1,1593-1611).
ctcgtggctgaaattcaga

SEQ ID NO: 503398 - DNA, 19 bp, Mus musculus
  siRNA target sequence for Havcr2 (NM_134250.1,222-240).
ctggggcaagggattctgt

SEQ ID NO: 503399 - DNA, 19 bp, Mus musculus
  siRNA target sequence for Havcr2 (NM_134250.1,348-366).
gtctctgatcataaagaat

SEQ ID NO: 503400 - DNA, 19 bp, Mus musculus
  siRNA target sequence for Havcr2 (NM_134250.1,406-424).
cagttccctggtcttatga

SEQ ID NO: 503401 - DNA, 19 bp, Mus musculus
  siRNA target sequence for Havcr2 (NM_134250.1,408-426).
gttccctggtcttatgaat

SEQ ID NO: 503402 - DNA, 19 bp, Mus musculus
  siRNA target sequence for Havcr2 (NM_134250.1,487-505).
gcccatggggactctacta

SEQ ID NO: 503403 - DNA, 19 bp, Mus musculus
  siRNA target sequence for Havcr2 (NM_134250.1,489-507).
ccatggggactctactaca

SEQ ID NO: 503404 - DNA, 19 bp, Mus musculus
  siRNA target sequence for Havcr2 (NM_134250.1,521-539).
ccctaaccacggagagaaa

SEQ ID NO: 503405 - DNA, 19 bp, Mus musculus
  siRNA target sequence for Havcr2 (NM_134250.1,557-575).
cactggtgaccctccataa

SEQ ID NO: 503406 - DNA, 19 bp, Mus musculus
  siRNA target sequence for Havcr2 (NM_134250.1,559-577).
ctggtgaccctccataata

SEQ ID NO: 503407 - DNA, 19 bp, Mus musculus
  siRNA target sequence for Havcr2 (NM_134250.1,562-580).
gtgaccctccataataaca

SEQ ID NO: 503408 - DNA, 19 bp, Mus musculus
  siRNA target sequence for Havcr2 (NM_134250.1,564-582).
gaccctccataataacaat

SEQ ID NO: 503409 - DNA, 19 bp, Mus musculus
  siRNA target sequence for Havcr2 (NM_134250.1,596-614).
ccacatgggctgatgaaat

SEQ ID NO: 503410 - DNA, 19 bp, Mus musculus
  siRNA target sequence for Havcr2 (NM_134250.1,693-711).
cattggtgtcttaatcctt

SEQ ID NO: 503411 - DNA, 19 bp, Mus musculus
  siRNA target sequence for Havcr2 (NM_134250.1,697-715).
ggtgtcttaatccttaaat

SEQ ID NO: 503412 - DNA, 19 bp, Mus musculus
  siRNA target sequence for Havcr2 (NM_134250.1,700-718).
gtcttaatccttaaatggt

SEQ ID NO: 503413 - DNA, 19 bp, Mus musculus
  siRNA target sequence for Havcr2 (NM_134250.1,702-720).
cttaatccttaaatggtat

SEQ ID NO: 503414 - DNA, 19 bp, Mus musculus
  siRNA target sequence for Havcr2 (NM_134250.1,723-741).
ctgtaagaaaaagaagtta

SEQ ID NO: 503415 - DNA, 19 bp, Mus musculus
  siRNA target sequence for Havcr2 (NM_134250.1,746-764).
gtttgagccttattacact

SEQ ID NO: 503416 - DNA, 19 bp, Mus musculus
  siRNA target sequence for Havcr2 (NM_134250.1,809-827).
ggattcgctctgaggaaaa

SEQ ID NO: 503417 - DNA, 19 bp, Mus musculus
  siRNA target sequence for Havcr2 (NM_134250.1,814-832).
cgctctgaggaaaatatct

SEQ ID NO: 503418 - DNA, 19 bp, Mus musculus
  siRNA target sequence for Havcr2 (NM_134250.1,836-854).
ccatcgaggagaacgtata

SEQ ID NO: 503419 - DNA, 19 bp, Mus musculus
  siRNA target sequence for Havcr2 (NM_134250.1,837-855).
catcgaggagaacgtatat

SEQ ID NO: 503420 - DNA, 19 bp, Mus musculus
  siRNA target sequence for Hck (NM_010407.3,722-740).
gttgtctgttcgagacttt

SEQ ID NO: 503421 - DNA, 19 bp, Mus musculus
  siRNA target sequence for Hck (NM_010407.3,756-774).
gacaccgtgaagcactata

SEQ ID NO: 503422 - DNA, 19 bp, Mus musculus
  siRNA target sequence for Hck (NM_010407.3,760-778).
ccgtgaagcactataagat

SEQ ID NO: 503423 - DNA, 19 bp, Mus musculus
  siRNA target sequence for Hck (NM_010407.3,843-861).
ctcgtgctccactacaaga

SEQ ID NO: 503424 - DNA, 19 bp, Mus musculus
  siRNA target sequence for Hck (NM_010407.3,1009-1027).
ggatggccacctacaacaa

SEQ ID NO: 503425 - DNA, 19 bp, Mus musculus
  siRNA target sequence for Hck (NM_010407.3,1111-1129).
cgctgcagcatgacaaact

SEQ ID NO: 503426 - DNA, 19 bp, Mus musculus
  siRNA target sequence for Hck (NM_010407.3,1238-1256).
gccactgccaaaactcatt

SEQ ID NO: 503427 - DNA, 19 bp, Mus musculus
  siRNA target sequence for Hck (NM_010407.3,1240-1258).
cactgccaaaactcattga

SEQ ID NO: 503428 - DNA, 19 bp, Mus musculus
  siRNA target sequence for Hck (NM_010407.3,1327-1345).
gggctgccaacatcttagt

SEQ ID NO: 503429 - DNA, 19 bp, Mus musculus
  siRNA target sequence for Hck (NM_010407.3,1348-1366).
ctgcatcactggtgtgtaa

SEQ ID NO: 503430 - DNA, 19 bp, Mus musculus
  siRNA target sequence for Hck (NM_010407.3,1350-1368).
gcatcactggtgtgtaaga

SEQ ID NO: 503431 - DNA, 19 bp, Mus musculus
  siRNA target sequence for Hck (NM_010407.3,1547-1565).
cccttacccaggtatgtca

SEQ ID NO: 503432 - DNA, 19 bp, Mus musculus
  siRNA target sequence for Hck (NM_010407.3,1603-1621).
gtatgcctcgaccagataa

SEQ ID NO: 503433 - DNA, 19 bp, Mus musculus
  siRNA target sequence for Hck (NM_010407.3,1607-1625).
gcctcgaccagataactgt

SEQ ID NO: 503434 - DNA, 19 bp, Mus musculus
  siRNA target sequence for Hck (NM_010407.3,1626-1644).
ccagaagagctctacaata

SEQ ID NO: 503435 - DNA, 19 bp, Mus musculus
  siRNA target sequence for Hck (NM_010407.3,1629-1647).
gaagagctctacaatatca

SEQ ID NO: 503436 - DNA, 19 bp, Mus musculus
  siRNA target sequence for Hck (NM_010407.3,1632-1650).
gagctctacaatatcatga

SEQ ID NO: 503437 - DNA, 19 bp, Mus musculus
  siRNA target sequence for Hck (NM_010407.3,1677-1695).
gaacggcccacctttgaat

SEQ ID NO: 503438 - DNA, 19 bp, Mus musculus
  siRNA target sequence for Hck (NM_010407.3,1680-1698).
cggcccacctttgaataca

SEQ ID NO: 503439 - DNA, 19 bp, Mus musculus
  siRNA target sequence for Hipk1 (NM_010432.1,363-381).
ctcaccaggtagcaaattt

SEQ ID NO: 503440 - DNA, 19 bp, Mus musculus
  siRNA target sequence for Hipk1 (NM_010432.1,370-388).
ggtagcaaatttcaatctt

SEQ ID NO: 503441 - DNA, 19 bp, Mus musculus
  siRNA target sequence for Hipk1 (NM_010432.1,420-438).
ctcctgccgtggagcatat

SEQ ID NO: 503442 - DNA, 19 bp, Mus musculus
  siRNA target sequence for Hipk1 (NM_010432.1,473-491).
gctacagcaaccttccaaa

SEQ ID NO: 503443 - DNA, 19 bp, Mus musculus
  siRNA target sequence for Hipk1 (NM_010432.1,514-532).
gagcaacgtttctttgctt

SEQ ID NO: 503444 - DNA, 19 bp, Mus musculus
  siRNA target sequence for Hipk1 (NM_010432.1,586-604).
cggtagcgtgcagatcata

SEQ ID NO: 503445 - DNA, 19 bp, Mus musculus
  siRNA target sequence for Hipk1 (NM_010432.1,696-714).
gcggagaaggggattacca

SEQ ID NO: 503446 - DNA, 19 bp, Mus musculus
  siRNA target sequence for Hipk1 (NM_010432.1,903-921).
cccgcctaagcagtgaaaa

SEQ ID NO: 503447 - DNA, 19 bp, Mus musculus
  siRNA target sequence for Hipk1 (NM_010432.1,904-922).
ccgcctaagcagtgaaaat

SEQ ID NO: 503448 - DNA, 19 bp, Mus musculus
  siRNA target sequence for Hipk1 (NM_010432.1,1048-1066).
gccactcaagtacataaga

SEQ ID NO: 503449 - DNA, 19 bp, Mus musculus
  siRNA target sequence for Hipk1 (NM_010432.1,1105-1123).
gaagagtcttggtctgatt

SEQ ID NO: 503450 - DNA, 19 bp, Mus musculus
  siRNA target sequence for Hipk1 (NM_010432.1,1315-1333).
gtcactgggctgtgtaata

SEQ ID NO: 503451 - DNA, 19 bp, Mus musculus
  siRNA target sequence for Hipk1 (NM_010432.1,1365-1383).
ctggtgcttcagaatacga

SEQ ID NO: 503452 - DNA, 19 bp, Mus musculus
  siRNA target sequence for Hipk1 (NM_010432.1,1371-1389).
cttcagaatacgatcagat

SEQ ID NO: 503453 - DNA, 19 bp, Mus musculus
  siRNA target sequence for Hipk1 (NM_010432.1,1413-1431).
gcctgccagctgagtatct

SEQ ID NO: 503454 - DNA, 19 bp, Mus musculus
  siRNA target sequence for Hipk1 (NM_010432.1,1414-1432).
cctgccagctgagtatctt

SEQ ID NO: 503455 - DNA, 19 bp, Mus musculus
  siRNA target sequence for Hipk1 (NM_010432.1,1490-1508).
ccactgtggaggcttaaga

SEQ ID NO: 503456 - DNA, 19 bp, Mus musculus
  siRNA target sequence for Hipk1 (NM_010432.1,1553-1571).
gctcggaagtacattttta

SEQ ID NO: 503457 - DNA, 19 bp, Mus musculus
  siRNA target sequence for Hipk1 (NM_010432.1,1556-1574).
cggaagtacatttttaact

SEQ ID NO: 503458 - DNA, 19 bp, Mus musculus
  siRNA target sequence for Hipk1 (NM_010432.1,1588-1606).
ggctcaggtaaatatgtct

SEQ ID NO: 503459 - DNA, 19 bp, Mus musculus
  siRNA target sequence for Hipk1 (NM_010432.1,1643-1661).
gcagatcggagagagtata

SEQ ID NO: 503460 - DNA, 19 bp, Mus musculus
  siRNA target sequence for Hipk1 (NM_010432.1,1644-1662).
cagatcggagagagtatat

SEQ ID NO: 503461 - DNA, 19 bp, Mus musculus
  siRNA target sequence for Hipk1 (NM_010432.1,1655-1673).
gagtatattgatcttctaa

SEQ ID NO: 503462 - DNA, 19 bp, Mus musculus
  siRNA target sequence for Hipk1 (NM_010432.1,1675-1693).
gaaaatgctgacgattgat

SEQ ID NO: 503463 - DNA, 19 bp, Mus musculus
  siRNA target sequence for Hipk1 (NM_010432.1,1720-1738).
gactcttaaccaccaattt

SEQ ID NO: 503464 - DNA, 19 bp, Mus musculus
  siRNA target sequence for Hipk1 (NM_010432.1,1769-1787).
cacagcagccacgttaagt

SEQ ID NO: 503465 - DNA, 19 bp, Mus musculus
  siRNA target sequence for Hipk1 (NM_010432.1,1816-1834).
gcggagggttcacatgtat

SEQ ID NO: 503466 - DNA, 19 bp, Mus musculus
  siRNA target sequence for Hipk1 (NM_010432.1,1818-1836).
ggagggttcacatgtatga

SEQ ID NO: 503467 - DNA, 19 bp, Mus musculus
  siRNA target sequence for Hipk1 (NM_010432.1,1871-1889).
catgtcgctccaaatacaa

SEQ ID NO: 503468 - DNA, 19 bp, Mus musculus
  siRNA target sequence for Hipk1 (NM_010432.1,1881-1899).
caaatacaagcacaaatct

SEQ ID NO: 503469 - DNA, 19 bp, Mus musculus
  siRNA target sequence for Hipk1 (NM_010432.1,1887-1905).
caagcacaaatctaaccat

SEQ ID NO: 503470 - DNA, 19 bp, Mus musculus
  siRNA target sequence for Hipk1 (NM_010432.1,1936-1954).
caatcaggccagtgttcta

SEQ ID NO: 503471 - DNA, 19 bp, Mus musculus
  siRNA target sequence for Hipk1 (NM_010432.1,2003-2021).
gatgtctcgctgctaaact

SEQ ID NO: 503472 - DNA, 19 bp, Mus musculus
  siRNA target sequence for Hipk1 (NM_010432.1,2071-2089).
ccagcagggtgtttcctta

SEQ ID NO: 503473 - DNA, 19 bp, Mus musculus
  siRNA target sequence for Hipk1 (NM_010432.1,2112-2130).
gcactcagacagatccatt

SEQ ID NO: 503474 - DNA, 19 bp, Mus musculus
  siRNA target sequence for Hipk1 (NM_010432.1,2126-2144).
ccattccagcaaacattta

SEQ ID NO: 503475 - DNA, 19 bp, Mus musculus
  siRNA target sequence for Hipk1 (NM_010432.1,2131-2149).
ccagcaaacatttatagta

SEQ ID NO: 503476 - DNA, 19 bp, Mus musculus
  siRNA target sequence for Hipk1 (NM_010432.1,2132-2150).
cagcaaacatttatagtat

SEQ ID NO: 503477 - DNA, 19 bp, Mus musculus
  siRNA target sequence for Hipk1 (NM_010432.1,2292-2310).
gaagctgtacaccactaat

SEQ ID NO: 503478 - DNA, 19 bp, Mus musculus
  siRNA target sequence for Hipk1 (NM_010432.1,2295-2313).
gctgtacaccactaatggt

SEQ ID NO: 503479 - DNA, 19 bp, Mus musculus
  siRNA target sequence for Hipk1 (NM_010432.1,2697-2715).
ctagttccctcccttcaaa

SEQ ID NO: 503480 - DNA, 19 bp, Mus musculus
  siRNA target sequence for Hipk1 (NM_010432.1,2704-2722).
cctcccttcaaagaagaat

SEQ ID NO: 503481 - DNA, 19 bp, Mus musculus
  siRNA target sequence for Hipk1 (NM_010432.1,2705-2723).
ctcccttcaaagaagaata

SEQ ID NO: 503482 - DNA, 19 bp, Mus musculus
  siRNA target sequence for Hipk1 (NM_010432.1,2765-2783).
ctgccttctcaagtttatt

SEQ ID NO: 503483 - DNA, 19 bp, Mus musculus
  siRNA target sequence for Hipk1 (NM_010432.1,2767-2785).
gccttctcaagtttattct

SEQ ID NO: 503484 - DNA, 19 bp, Mus musculus
  siRNA target sequence for Hipk1 (NM_010432.1,2801-2819).
cctcttcgtaccacatctt

SEQ ID NO: 503485 - DNA, 19 bp, Mus musculus
  siRNA target sequence for Hipk1 (NM_010432.1,2807-2825).
cgtaccacatcttcttata

SEQ ID NO: 503486 - DNA, 19 bp, Mus musculus
  siRNA target sequence for Hipk1 (NM_010432.1,3564-3582).
gttccattgctcatctgtt

SEQ ID NO: 503487 - DNA, 19 bp, Mus musculus
  siRNA target sequence for Hipk1 (NM_010432.1,3744-3762).
cttcccgaggctcaacaat

SEQ ID NO: 503488 - DNA, 19 bp, Mus musculus
  siRNA target sequence for Hipk1 (NM_010432.1,3747-3765).
cccgaggctcaacaattta

SEQ ID NO: 503489 - DNA, 19 bp, Mus musculus
  siRNA target sequence for Hipk2 (NM_010433.1,161-179).
gcctcacatgtgcaagttt

SEQ ID NO: 503490 - DNA, 19 bp, Mus musculus
  siRNA target sequence for Hipk2 (NM_010433.1,270-288).
gctcccacagcaaagtgta

SEQ ID NO: 503491 - DNA, 19 bp, Mus musculus
  siRNA target sequence for Hipk2 (NM_010433.1,357-375).
ccaacccaagcctacctta

SEQ ID NO: 503492 - DNA, 19 bp, Mus musculus
  siRNA target sequence for Hipk2 (NM_010433.1,402-420).
gtactggacacatagttgt

SEQ ID NO: 503493 - DNA, 19 bp, Mus musculus
  siRNA target sequence for Hipk2 (NM_010433.1,460-478).
cggtggaccacataaccta

SEQ ID NO: 503494 - DNA, 19 bp, Mus musculus
  siRNA target sequence for Hipk2 (NM_010433.1,461-479).
ggtggaccacataacctaa

SEQ ID NO: 503495 - DNA, 19 bp, Mus musculus
  siRNA target sequence for Hipk2 (NM_010433.1,462-480).
gtggaccacataacctaat

SEQ ID NO: 503496 - DNA, 19 bp, Mus musculus
  siRNA target sequence for Hipk2 (NM_010433.1,500-518).
ctccttgacacctaccaaa

SEQ ID NO: 503497 - DNA, 19 bp, Mus musculus
  siRNA target sequence for Hipk2 (NM_010433.1,503-521).
cttgacacctaccaaaaat

SEQ ID NO: 503498 - DNA, 19 bp, Mus musculus
  siRNA target sequence for Hipk2 (NM_010433.1,558-576).
caagcagcgtgcagatcat

SEQ ID NO: 503499 - DNA, 19 bp, Mus musculus
  siRNA target sequence for Hipk2 (NM_010433.1,587-605).
ccacccatgattcagaata

SEQ ID NO: 503500 - DNA, 19 bp, Mus musculus
  siRNA target sequence for Hipk2 (NM_010433.1,588-606).
cacccatgattcagaataa

SEQ ID NO: 503501 - DNA, 19 bp, Mus musculus
  siRNA target sequence for Hipk2 (NM_010433.1,724-742).
caacacctatgaggtttta

SEQ ID NO: 503502 - DNA, 19 bp, Mus musculus
  siRNA target sequence for Hipk2 (NM_010433.1,748-766).
cttggggcgagggacattt

SEQ ID NO: 503503 - DNA, 19 bp, Mus musculus
  siRNA target sequence for Hipk2 (NM_010433.1,891-909).
cggagagcgctgatgacta

SEQ ID NO: 503504 - DNA, 19 bp, Mus musculus
  siRNA target sequence for Hipk2 (NM_010433.1,897-915).
gcgctgatgactacaattt

SEQ ID NO: 503505 - DNA, 19 bp, Mus musculus
  siRNA target sequence for Hipk2 (NM_010433.1,1017-1035).
gtcccttgcccctcaagta

SEQ ID NO: 503506 - DNA, 19 bp, Mus musculus
  siRNA target sequence for Hipk2 (NM_010433.1,1339-1357).
cccaggtgcttctgagtat

SEQ ID NO: 503507 - DNA, 19 bp, Mus musculus
  siRNA target sequence for Hipk2 (NM_010433.1,1420-1438).
gacaaagacaactaggttt

SEQ ID NO: 503508 - DNA, 19 bp, Mus musculus
  siRNA target sequence for Hipk2 (NM_010433.1,1452-1470).
cagactcaccgtatccttt

SEQ ID NO: 503509 - DNA, 19 bp, Mus musculus
  siRNA target sequence for Hipk2 (NM_010433.1,1596-1614).
ggagtgacatgttagtaga

SEQ ID NO: 503510 - DNA, 19 bp, Mus musculus
  siRNA target sequence for Hipk2 (NM_010433.1,1620-1638).
cagaccgacgggagttcat

SEQ ID NO: 503511 - DNA, 19 bp, Mus musculus
  siRNA target sequence for Hipk2 (NM_010433.1,1631-1649).
gagttcattgacctgttaa

SEQ ID NO: 503512 - DNA, 19 bp, Mus musculus
  siRNA target sequence for Hipk2 (NM_010433.1,1700-1718).
ctgaaccacccctttgtca

SEQ ID NO: 503513 - DNA, 19 bp, Mus musculus
  siRNA target sequence for Hipk2 (NM_010433.1,1744-1762).
ccatagtgcccatgtcaaa

SEQ ID NO: 503514 - DNA, 19 bp, Mus musculus
  siRNA target sequence for Hipk2 (NM_010433.1,1745-1763).
catagtgcccatgtcaaat

SEQ ID NO: 503515 - DNA, 19 bp, Mus musculus
  siRNA target sequence for Hipk2 (NM_010433.1,1751-1769).
gcccatgtcaaatcttgtt

SEQ ID NO: 503516 - DNA, 19 bp, Mus musculus
  siRNA target sequence for Hipk2 (NM_010433.1,1796-1814).
cgggtgaatatgtatgaca

SEQ ID NO: 503517 - DNA, 19 bp, Mus musculus
  siRNA target sequence for Hipk2 (NM_010433.1,1958-1976).
cccgaagtctccatactaa

SEQ ID NO: 503518 - DNA, 19 bp, Mus musculus
  siRNA target sequence for Hipk2 (NM_010433.1,1959-1977).
ccgaagtctccatactaaa

SEQ ID NO: 503519 - DNA, 19 bp, Mus musculus
  siRNA target sequence for Hipk2 (NM_010433.1,1961-1979).
gaagtctccatactaaact

SEQ ID NO: 503520 - DNA, 19 bp, Mus musculus
  siRNA target sequence for Hipk2 (NM_010433.1,2050-2068).
gacgggaacagcccaaatt

SEQ ID NO: 503521 - DNA, 19 bp, Mus musculus
  siRNA target sequence for Hipk2 (NM_010433.1,2053-2071).
gggaacagcccaaatttgt

SEQ ID NO: 503522 - DNA, 19 bp, Mus musculus
  siRNA target sequence for Hipk2 (NM_010433.1,2161-2179).
ctcagtgcggatggaaaat

SEQ ID NO: 503523 - DNA, 19 bp, Mus musculus
  siRNA target sequence for Hipk2 (NM_010433.1,2398-2416).
gcatgctcatggaagtcat

SEQ ID NO: 503524 - DNA, 19 bp, Mus musculus
  siRNA target sequence for Hipk2 (NM_010433.1,2403-2421).
ctcatggaagtcattacaa

SEQ ID NO: 503525 - DNA, 19 bp, Mus musculus
  siRNA target sequence for Hipk2 (NM_010433.1,2747-2765).
cagcggcagacgattgtca

SEQ ID NO: 503526 - DNA, 19 bp, Mus musculus
  siRNA target sequence for Hipk2 (NM_010433.1,3601-3619).
catccaccccagtcagtat

SEQ ID NO: 503527 - DNA, 19 bp, Mus musculus
  siRNA target sequence for Hipk2 (NM_010433.1,3632-3650).
gcccaccagacctatatca

SEQ ID NO: 503528 - DNA, 19 bp, Mus musculus
  siRNA target sequence for Hipk2 (NM_010433.1,3706-3724).
caaccaatacccttacata

SEQ ID NO: 503529 - DNA, 19 bp, Mus musculus
  siRNA target sequence for Hipk3 (NM_010434.1,316-334).
ggtctacccaccgtatgtt

SEQ ID NO: 503530 - DNA, 19 bp, Mus musculus
  siRNA target sequence for Hipk3 (NM_010434.1,317-335).
gtctacccaccgtatgttt

SEQ ID NO: 503531 - DNA, 19 bp, Mus musculus
  siRNA target sequence for Hipk3 (NM_010434.1,323-341).
ccaccgtatgtttatcaaa

SEQ ID NO: 503532 - DNA, 19 bp, Mus musculus
  siRNA target sequence for Hipk3 (NM_010434.1,383-401).
gagccaagcggttgtgttt

SEQ ID NO: 503533 - DNA, 19 bp, Mus musculus
  siRNA target sequence for Hipk3 (NM_010434.1,387-405).
caagcggttgtgttttcca

SEQ ID NO: 503534 - DNA, 19 bp, Mus musculus
  siRNA target sequence for Hipk3 (NM_010434.1,422-440).
cagatccatgtgaatggta

SEQ ID NO: 503535 - DNA, 19 bp, Mus musculus
  siRNA target sequence for Hipk3 (NM_010434.1,458-476).
catccttccacgaaaggta

SEQ ID NO: 503536 - DNA, 19 bp, Mus musculus
  siRNA target sequence for Hipk3 (NM_010434.1,474-492).
gtagtgctttccagacaaa

SEQ ID NO: 503537 - DNA, 19 bp, Mus musculus
  siRNA target sequence for Hipk3 (NM_010434.1,509-527).
cctcgaggacacagctttt

SEQ ID NO: 503538 - DNA, 19 bp, Mus musculus
  siRNA target sequence for Hipk3 (NM_010434.1,631-649).
gtggagaaacaggttacat

SEQ ID NO: 503539 - DNA, 19 bp, Mus musculus
  siRNA target sequence for Hipk3 (NM_010434.1,663-681).
cccagcgatgcgggttaaa

SEQ ID NO: 503540 - DNA, 19 bp, Mus musculus
  siRNA target sequence for Hipk3 (NM_010434.1,715-733).
cgcgatgcagattgttgat

SEQ ID NO: 503541 - DNA, 19 bp, Mus musculus
  siRNA target sequence for Hipk3 (NM_010434.1,830-848).
ggggaaggcgactatcagt

SEQ ID NO: 503542 - DNA, 19 bp, Mus musculus
  siRNA target sequence for Hipk3 (NM_010434.1,831-849).
gggaaggcgactatcagtt

SEQ ID NO: 503543 - DNA, 19 bp, Mus musculus
  siRNA target sequence for Hipk3 (NM_010434.1,832-850).
ggaaggcgactatcagtta

SEQ ID NO: 503544 - DNA, 19 bp, Mus musculus
  siRNA target sequence for Hipk3 (NM_010434.1,918-936).
cttttggccaggttgtcaa

SEQ ID NO: 503545 - DNA, 19 bp, Mus musculus
  siRNA target sequence for Hipk3 (NM_010434.1,923-941).
ggccaggttgtcaaatgct

SEQ ID NO: 503546 - DNA, 19 bp, Mus musculus
  siRNA target sequence for Hipk3 (NM_010434.1,1005-1023).
gtcaagggcagatagaagt

SEQ ID NO: 503547 - DNA, 19 bp, Mus musculus
  siRNA target sequence for Hipk3 (NM_010434.1,1189-1207).
ggtgatccggcctgttctt

SEQ ID NO: 503548 - DNA, 19 bp, Mus musculus
  siRNA target sequence for Hipk3 (NM_010434.1,1303-1321).
ccagccgtacagggttaaa

SEQ ID NO: 503549 - DNA, 19 bp, Mus musculus
  siRNA target sequence for Hipk3 (NM_010434.1,1307-1325).
ccgtacagggttaaagtga

SEQ ID NO: 503550 - DNA, 19 bp, Mus musculus
  siRNA target sequence for Hipk3 (NM_010434.1,1308-1326).
cgtacagggttaaagtgat

SEQ ID NO: 503551 - DNA, 19 bp, Mus musculus
  siRNA target sequence for Hipk3 (NM_010434.1,1315-1333).
ggttaaagtgatagacttt

SEQ ID NO: 503552 - DNA, 19 bp, Mus musculus
  siRNA target sequence for Hipk3 (NM_010434.1,1334-1352).
ggatcggccagtcatgtat

SEQ ID NO: 503553 - DNA, 19 bp, Mus musculus
  siRNA target sequence for Hipk3 (NM_010434.1,1338-1356).
cggccagtcatgtatcaaa

SEQ ID NO: 503554 - DNA, 19 bp, Mus musculus
  siRNA target sequence for Hipk3 (NM_010434.1,1340-1358).
gccagtcatgtatcaaaga

SEQ ID NO: 503555 - DNA, 19 bp, Mus musculus
  siRNA target sequence for Hipk3 (NM_010434.1,1357-1375).
gactgtttgctcaacgtat

SEQ ID NO: 503556 - DNA, 19 bp, Mus musculus
  siRNA target sequence for Hipk3 (NM_010434.1,1366-1384).
ctcaacgtatcttcaatct

SEQ ID NO: 503557 - DNA, 19 bp, Mus musculus
  siRNA target sequence for Hipk3 (NM_010434.1,1414-1432).
ggggttgccgttttgtgaa

SEQ ID NO: 503558 - DNA, 19 bp, Mus musculus
  siRNA target sequence for Hipk3 (NM_010434.1,1458-1476).
gcgtgatcgcagagttatt

SEQ ID NO: 503559 - DNA, 19 bp, Mus musculus
  siRNA target sequence for Hipk3 (NM_010434.1,1462-1480).
gatcgcagagttattcctt

SEQ ID NO: 503560 - DNA, 19 bp, Mus musculus
  siRNA target sequence for Hipk3 (NM_010434.1,1514-1532).
gatcagatccgatacattt

SEQ ID NO: 503561 - DNA, 19 bp, Mus musculus
  siRNA target sequence for Hipk3 (NM_010434.1,1554-1572).
gagagcaattgttgaatgt

SEQ ID NO: 503562 - DNA, 19 bp, Mus musculus
  siRNA target sequence for Hipk3 (NM_010434.1,1574-1592).
ggtacaaaatccacaagat

SEQ ID NO: 503563 - DNA, 19 bp, Mus musculus
  siRNA target sequence for Hipk3 (NM_010434.1,1619-1637).
cattctggttggaggttaa

SEQ ID NO: 503564 - DNA, 19 bp, Mus musculus
  siRNA target sequence for Hipk3 (NM_010434.1,1661-1679).
gagacaggaatgaagtcta

SEQ ID NO: 503565 - DNA, 19 bp, Mus musculus
  siRNA target sequence for Hipk3 (NM_010434.1,1702-1720).
caacagtctggacgatata

SEQ ID NO: 503566 - DNA, 19 bp, Mus musculus
  siRNA target sequence for Hipk3 (NM_010434.1,1858-1876).
gaaccacccattcgttaat

SEQ ID NO: 503567 - DNA, 19 bp, Mus musculus
  siRNA target sequence for Hipk3 (NM_010434.1,1862-1880).
cacccattcgttaatatga

SEQ ID NO: 503568 - DNA, 19 bp, Mus musculus
  siRNA target sequence for Hipk3 (NM_010434.1,1923-1941).
gttttcatatcatggatat

SEQ ID NO: 503569 - DNA, 19 bp, Mus musculus
  siRNA target sequence for Hipk3 (NM_010434.1,1948-1966).
gtctccgagttcatgtgaa

SEQ ID NO: 503570 - DNA, 19 bp, Mus musculus
  siRNA target sequence for Hipk3 (NM_010434.1,1952-1970).
ccgagttcatgtgaaacaa

SEQ ID NO: 503571 - DNA, 19 bp, Mus musculus
  siRNA target sequence for Hipk3 (NM_010434.1,1968-1986).
caaataaccacagtaaaat

SEQ ID NO: 503572 - DNA, 19 bp, Mus musculus
  siRNA target sequence for Hipk3 (NM_010434.1,1978-1996).
cagtaaaatgtcactctta

SEQ ID NO: 503573 - DNA, 19 bp, Mus musculus
  siRNA target sequence for Hipk3 (NM_010434.1,2024-2042).
gctctagcagcaaacttta

SEQ ID NO: 503574 - DNA, 19 bp, Mus musculus
  siRNA target sequence for Hipk3 (NM_010434.1,2156-2174).
catcagaccctgattatct

SEQ ID NO: 503575 - DNA, 19 bp, Mus musculus
  siRNA target sequence for Hipk3 (NM_010434.1,2173-2191).
ctgtcccccagctatccaa

SEQ ID NO: 503576 - DNA, 19 bp, Mus musculus
  siRNA target sequence for Hipk3 (NM_010434.1,2178-2196).
ccccagctatccaaggtat

SEQ ID NO: 503577 - DNA, 19 bp, Mus musculus
  siRNA target sequence for Hipk3 (NM_010434.1,2216-2234).
cccaccagttattccataa

SEQ ID NO: 503578 - DNA, 19 bp, Mus musculus
  siRNA target sequence for Hipk3 (NM_010434.1,2230-2248).
cataagggtagacaataca

SEQ ID NO: 503579 - DNA, 19 bp, Mus musculus
  siRNA target sequence for Hipk3 (NM_010434.1,2247-2265).
cagttccgcttgtaactca

SEQ ID NO: 503580 - DNA, 19 bp, Mus musculus
  siRNA target sequence for Hipk3 (NM_010434.1,2330-2348).
cgaacacagcagatgctaa

SEQ ID NO: 503581 - DNA, 19 bp, Mus musculus
  siRNA target sequence for Hipk3 (NM_010434.1,2389-2407).
cgcaacactaacttctgaa

SEQ ID NO: 503582 - DNA, 19 bp, Mus musculus
  siRNA target sequence for Hipk3 (NM_010434.1,2484-2502).
caccgcctcttctaaccaa

SEQ ID NO: 503583 - DNA, 19 bp, Mus musculus
  siRNA target sequence for Hipk3 (NM_010434.1,2495-2513).
ctaaccaaccagatcacat

SEQ ID NO: 503584 - DNA, 19 bp, Mus musculus
  siRNA target sequence for Hipk3 (NM_010434.1,2500-2518).
caaccagatcacattatca

SEQ ID NO: 503585 - DNA, 19 bp, Mus musculus
  siRNA target sequence for Hipk3 (NM_010434.1,2536-2554).
cgtgggcattgcacatgtt

SEQ ID NO: 503586 - DNA, 19 bp, Mus musculus
  siRNA target sequence for Hipk3 (NM_010434.1,2566-2584).
gcctgccactaccaagaaa

SEQ ID NO: 503587 - DNA, 19 bp, Mus musculus
  siRNA target sequence for Hipk3 (NM_010434.1,2570-2588).
gccactaccaagaaaaata

SEQ ID NO: 503588 - DNA, 19 bp, Mus musculus
  siRNA target sequence for Hipk3 (NM_010434.1,2593-2611).
gtgccagaacaggagtaat

SEQ ID NO: 503589 - DNA, 19 bp, Mus musculus
  siRNA target sequence for Hipk3 (NM_010434.1,2623-2641).
caccaatatcccacattca

SEQ ID NO: 503590 - DNA, 19 bp, Mus musculus
  siRNA target sequence for Hipk3 (NM_010434.1,2677-2695).
ggttgaggaagtaagttgt

SEQ ID NO: 503591 - DNA, 19 bp, Mus musculus
  siRNA target sequence for Hipk3 (NM_010434.1,2828-2846).
gtgagtgtgatcaccatta

SEQ ID NO: 503592 - DNA, 19 bp, Mus musculus
  siRNA target sequence for Hipk3 (NM_010434.1,2883-2901).
cttcactccgagagtgtaa

SEQ ID NO: 503593 - DNA, 19 bp, Mus musculus
  siRNA target sequence for Hipk3 (NM_010434.1,2888-2906).
ctccgagagtgtaaaggta

SEQ ID NO: 503594 - DNA, 19 bp, Mus musculus
  siRNA target sequence for Hipk3 (NM_010434.1,2896-2914).
gtgtaaaggtagtctagat

SEQ ID NO: 503595 - DNA, 19 bp, Mus musculus
  siRNA target sequence for Hipk3 (NM_010434.1,2925-2943).
gccaaagcactttgaatat

SEQ ID NO: 503596 - DNA, 19 bp, Mus musculus
  siRNA target sequence for Hipk3 (NM_010434.1,3076-3094).
ggatggctctccaacatca

SEQ ID NO: 503597 - DNA, 19 bp, Mus musculus
  siRNA target sequence for Hipk3 (NM_010434.1,3103-3121).
ggggcacgacagtccattt

SEQ ID NO: 503598 - DNA, 19 bp, Mus musculus
  siRNA target sequence for Hipk3 (NM_010434.1,3106-3124).
gcacgacagtccatttgca

SEQ ID NO: 503599 - DNA, 19 bp, Mus musculus
  siRNA target sequence for Hipk3 (NM_010434.1,3218-3236).
ccaccggtggggagagaaa

SEQ ID NO: 503600 - DNA, 19 bp, Mus musculus
  siRNA target sequence for Hipk3 (NM_010434.1,3262-3280).
ggcaaacacggattctaca

SEQ ID NO: 503601 - DNA, 19 bp, Mus musculus
  siRNA target sequence for Hipk3 (NM_010434.1,3369-3387).
cgttccctcagcagcattt

SEQ ID NO: 503602 - DNA, 19 bp, Mus musculus
  siRNA target sequence for Hipk3 (NM_010434.1,3458-3476).
cagcaagcatatattccta

SEQ ID NO: 503603 - DNA, 19 bp, Mus musculus
  siRNA target sequence for Hipk3 (NM_010434.1,3480-3498).
gtgttaccagtaatccatt

SEQ ID NO: 503604 - DNA, 19 bp, Mus musculus
  siRNA target sequence for Hipk3 (NM_010434.1,3651-3669).
gtacctcaagacctatgtt

SEQ ID NO: 503605 - DNA, 19 bp, Mus musculus
  siRNA target sequence for Hipk3 (NM_010434.1,3671-3689).
cagcatccaacttacaata

SEQ ID NO: 503606 - DNA, 19 bp, Mus musculus
  siRNA target sequence for Hipk3 (NM_010434.1,3674-3692).
catccaacttacaatatct

SEQ ID NO: 503607 - DNA, 19 bp, Mus musculus
  siRNA target sequence for Hipk3 (NM_010434.1,3771-3789).
ctcagtacaaaccaatctt

SEQ ID NO: 503608 - DNA, 19 bp, Mus musculus
  siRNA target sequence for Hipk3 (NM_010434.1,3821-3839).
gcgtatactggatttccat

SEQ ID NO: 503609 - DNA, 19 bp, Mus musculus
  siRNA target sequence for Hk1 (NM_010438.1,205-223).
gcgaggacaggctgtagat

SEQ ID NO: 503610 - DNA, 19 bp, Mus musculus
  siRNA target sequence for Hk1 (NM_010438.1,218-236).
gtagatgttgaaccaaaaa

SEQ ID NO: 503611 - DNA, 19 bp, Mus musculus
  siRNA target sequence for Hk1 (NM_010438.1,256-274).
ggaaaagattgataagtat

SEQ ID NO: 503612 - DNA, 19 bp, Mus musculus
  siRNA target sequence for Hk1 (NM_010438.1,321-339).
cacgcttcaagaaagagat

SEQ ID NO: 503613 - DNA, 19 bp, Mus musculus
  siRNA target sequence for Hk1 (NM_010438.1,347-365).
ggcctctcccgggattata

SEQ ID NO: 503614 - DNA, 19 bp, Mus musculus
  siRNA target sequence for Hk1 (NM_010438.1,348-366).
gcctctcccgggattataa

SEQ ID NO: 503615 - DNA, 19 bp, Mus musculus
  siRNA target sequence for Hk1 (NM_010438.1,369-387).
caacggcctccgtcaagat

SEQ ID NO: 503616 - DNA, 19 bp, Mus musculus
  siRNA target sequence for Hk1 (NM_010438.1,567-585).
gaagccagctttttgatca

SEQ ID NO: 503617 - DNA, 19 bp, Mus musculus
  siRNA target sequence for Hk1 (NM_010438.1,644-662).
cccgtgggattcacgtttt

SEQ ID NO: 503618 - DNA, 19 bp, Mus musculus
  siRNA target sequence for Hk1 (NM_010438.1,667-685).
cccgtgccgacaatccaaa

SEQ ID NO: 503619 - DNA, 19 bp, Mus musculus
  siRNA target sequence for Hk1 (NM_010438.1,668-686).
ccgtgccgacaatccaaaa

SEQ ID NO: 503620 - DNA, 19 bp, Mus musculus
  siRNA target sequence for Hk1 (NM_010438.1,669-687).
cgtgccgacaatccaaaat

SEQ ID NO: 503621 - DNA, 19 bp, Mus musculus
  siRNA target sequence for Hk1 (NM_010438.1,789-807).
gggactatgacgctaacat

SEQ ID NO: 503622 - DNA, 19 bp, Mus musculus
  siRNA target sequence for Hk1 (NM_010438.1,790-808).
ggactatgacgctaacatt

SEQ ID NO: 503623 - DNA, 19 bp, Mus musculus
  siRNA target sequence for Hk1 (NM_010438.1,793-811).
ctatgacgctaacattgta

SEQ ID NO: 503624 - DNA, 19 bp, Mus musculus
  siRNA target sequence for Hk1 (NM_010438.1,890-908).
ggcactggcaccaatgctt

SEQ ID NO: 503625 - DNA, 19 bp, Mus musculus
  siRNA target sequence for Hk1 (NM_010438.1,1139-1157).
gccaaggaaagcctcttat

SEQ ID NO: 503626 - DNA, 19 bp, Mus musculus
  siRNA target sequence for Hk1 (NM_010438.1,1184-1202).
ctcacgaggggcaagttca

SEQ ID NO: 503627 - DNA, 19 bp, Mus musculus
  siRNA target sequence for Hk1 (NM_010438.1,1210-1228).
cgacgtagccgccattgaa

SEQ ID NO: 503628 - DNA, 19 bp, Mus musculus
  siRNA target sequence for Hk1 (NM_010438.1,1211-1229).
gacgtagccgccattgaaa

SEQ ID NO: 503629 - DNA, 19 bp, Mus musculus
  siRNA target sequence for Hk1 (NM_010438.1,1313-1331).
gttcaaaatgccaaggaaa

SEQ ID NO: 503630 - DNA, 19 bp, Mus musculus
  siRNA target sequence for Hk1 (NM_010438.1,1434-1452).
cgctcggtgccatcttgaa

SEQ ID NO: 503631 - DNA, 19 bp, Mus musculus
  siRNA target sequence for Hk1 (NM_010438.1,1519-1537).
caagatgcacccacagtat

SEQ ID NO: 503632 - DNA, 19 bp, Mus musculus
  siRNA target sequence for Hk1 (NM_010438.1,1861-1879).
ggatctcggaggaacgaat

SEQ ID NO: 503633 - DNA, 19 bp, Mus musculus
  siRNA target sequence for Hk1 (NM_010438.1,1862-1880).
gatctcggaggaacgaatt

SEQ ID NO: 503634 - DNA, 19 bp, Mus musculus
  siRNA target sequence for Hk1 (NM_010438.1,1923-1941).
cagtggagatgcacaacaa

SEQ ID NO: 503635 - DNA, 19 bp, Mus musculus
  siRNA target sequence for Hk1 (NM_010438.1,1950-1968).
ccattcccctggaaatcat

SEQ ID NO: 503636 - DNA, 19 bp, Mus musculus
  siRNA target sequence for Hk1 (NM_010438.1,2026-2044).
ggactacatggggatcaaa

SEQ ID NO: 503637 - DNA, 19 bp, Mus musculus
  siRNA target sequence for Hk1 (NM_010438.1,2097-2115).
gcctagattgcggaatctt

SEQ ID NO: 503638 - DNA, 19 bp, Mus musculus
  siRNA target sequence for Hk1 (NM_010438.1,2099-2117).
ctagattgcggaatcttga

SEQ ID NO: 503639 - DNA, 19 bp, Mus musculus
  siRNA target sequence for Hk1 (NM_010438.1,2102-2120).
gattgcggaatcttgatca

SEQ ID NO: 503640 - DNA, 19 bp, Mus musculus
  siRNA target sequence for Hk1 (NM_010438.1,2368-2386).
gggccagatgtgcatcaat

SEQ ID NO: 503641 - DNA, 19 bp, Mus musculus
  siRNA target sequence for Hk1 (NM_010438.1,2452-2470).
ggtggacgaatattctcta

SEQ ID NO: 503642 - DNA, 19 bp, Mus musculus
  siRNA target sequence for Hk1 (NM_010438.1,2453-2471).
gtggacgaatattctctaa

SEQ ID NO: 503643 - DNA, 19 bp, Mus musculus
  siRNA target sequence for Hk1 (NM_010438.1,2458-2476).
cgaatattctctaaacagt

SEQ ID NO: 503644 - DNA, 19 bp, Mus musculus
  siRNA target sequence for Hk1 (NM_010438.1,2531-2549).
cgtaacatcctgattgact

SEQ ID NO: 503645 - DNA, 19 bp, Mus musculus
  siRNA target sequence for Hk1 (NM_010438.1,2532-2550).
gtaacatcctgattgactt

SEQ ID NO: 503646 - DNA, 19 bp, Mus musculus
  siRNA target sequence for Hk1 (NM_010438.1,2542-2560).
gattgacttcaccaagaaa

SEQ ID NO: 503647 - DNA, 19 bp, Mus musculus
  siRNA target sequence for Hk1 (NM_010438.1,2817-2835).
gcctagaccacctgaatgt

SEQ ID NO: 503648 - DNA, 19 bp, Mus musculus
  siRNA target sequence for Hk1 (NM_010438.1,2819-2837).
ctagaccacctgaatgtaa

SEQ ID NO: 503649 - DNA, 19 bp, Mus musculus
  siRNA target sequence for Hk2 (NM_013820.1,492-510).
catatgatcgcctgcttat

SEQ ID NO: 503650 - DNA, 19 bp, Mus musculus
  siRNA target sequence for Hk2 (NM_013820.1,514-532).
cggagctcaaccaaaacca

SEQ ID NO: 503651 - DNA, 19 bp, Mus musculus
  siRNA target sequence for Hk2 (NM_013820.1,515-533).
ggagctcaaccaaaaccaa

SEQ ID NO: 503652 - DNA, 19 bp, Mus musculus
  siRNA target sequence for Hk2 (NM_013820.1,579-597).
gagacccttctggagattt

SEQ ID NO: 503653 - DNA, 19 bp, Mus musculus
  siRNA target sequence for Hk2 (NM_013820.1,817-835).
ccattcccgaggacatcat

SEQ ID NO: 503654 - DNA, 19 bp, Mus musculus
  siRNA target sequence for Hk2 (NM_013820.1,961-979).
cgaaactggatgagagttt

SEQ ID NO: 503655 - DNA, 19 bp, Mus musculus
  siRNA target sequence for Hk2 (NM_013820.1,1062-1080).
cgcagaggggactttgaca

SEQ ID NO: 503656 - DNA, 19 bp, Mus musculus
  siRNA target sequence for Hk2 (NM_013820.1,1064-1082).
cagaggggactttgacatt

SEQ ID NO: 503657 - DNA, 19 bp, Mus musculus
  siRNA target sequence for Hk2 (NM_013820.1,1148-1166).
ctgcgagattggtctcatt

SEQ ID NO: 503658 - DNA, 19 bp, Mus musculus
  siRNA target sequence for Hk2 (NM_013820.1,1237-1255).
gacggatgtgcatcaacat

SEQ ID NO: 503659 - DNA, 19 bp, Mus musculus
  siRNA target sequence for Hk2 (NM_013820.1,1498-1516).
cggatattgaagacgataa

SEQ ID NO: 503660 - DNA, 19 bp, Mus musculus
  siRNA target sequence for Hk2 (NM_013820.1,1596-1614).
cgaatctgccagattgtgt

SEQ ID NO: 503661 - DNA, 19 bp, Mus musculus
  siRNA target sequence for Hk2 (NM_013820.1,1716-1734).
gatggctctgtctacaaga

SEQ ID NO: 503662 - DNA, 19 bp, Mus musculus
  siRNA target sequence for Hk2 (NM_013820.1,2006-2024).
gaagatgttgcccacttat

SEQ ID NO: 503663 - DNA, 19 bp, Mus musculus
  siRNA target sequence for Hk2 (NM_013820.1,2131-2149).
ggggcgtagagatgcataa

SEQ ID NO: 503664 - DNA, 19 bp, Mus musculus
  siRNA target sequence for Hk2 (NM_013820.1,2133-2151).
ggcgtagagatgcataaca

SEQ ID NO: 503665 - DNA, 19 bp, Mus musculus
  siRNA target sequence for Hk2 (NM_013820.1,2134-2152).
gcgtagagatgcataacaa

SEQ ID NO: 503666 - DNA, 19 bp, Mus musculus
  siRNA target sequence for Hk2 (NM_013820.1,2227-2245).
cggacttccttgagtacat

SEQ ID NO: 503667 - DNA, 19 bp, Mus musculus
  siRNA target sequence for Hk2 (NM_013820.1,2359-2377).
gctgcgagggtgaagatgt

SEQ ID NO: 503668 - DNA, 19 bp, Mus musculus
  siRNA target sequence for Hk2 (NM_013820.1,2494-2512).
gtgaagttggcctcattgt

SEQ ID NO: 503669 - DNA, 19 bp, Mus musculus
  siRNA target sequence for Hk2 (NM_013820.1,2742-2760).
cgcaacatcctgatcgatt

SEQ ID NO: 503670 - DNA, 19 bp, Mus musculus
  siRNA target sequence for Hk2 (NM_013820.1,2743-2761).
gcaacatcctgatcgattt

SEQ ID NO: 503671 - DNA, 19 bp, Mus musculus
  siRNA target sequence for Hk2 (NM_013820.1,2815-2833).
ggggaatcttcgaaactaa

SEQ ID NO: 503672 - DNA, 19 bp, Mus musculus
  siRNA target sequence for Hk2 (NM_013820.1,2817-2835).
ggaatcttcgaaactaagt

SEQ ID NO: 503673 - DNA, 19 bp, Mus musculus
  siRNA target sequence for Hk2 (NM_013820.1,2818-2836).
gaatcttcgaaactaagtt

SEQ ID NO: 503674 - DNA, 19 bp, Mus musculus
  siRNA target sequence for Hk2 (NM_013820.1,2915-2933).
gtgtgacgacagcatcatt

SEQ ID NO: 503675 - DNA, 19 bp, Mus musculus
  siRNA target sequence for Hk2 (NM_013820.1,2997-3015).
gccgtggtggacaagataa

SEQ ID NO: 503676 - DNA, 19 bp, Mus musculus
  siRNA target sequence for Hk2 (NM_013820.1,3028-3046).
gactggacaacctcaaagt

SEQ ID NO: 503677 - DNA, 19 bp, Mus musculus
  siRNA target sequence for Hsp105 (NM_013559.1,247-265).
gtcagtcatatcatttgga

SEQ ID NO: 503678 - DNA, 19 bp, Mus musculus
  siRNA target sequence for Hsp105 (NM_013559.1,322-340).
caatacggtctctagcttt

SEQ ID NO: 503679 - DNA, 19 bp, Mus musculus
  siRNA target sequence for Hsp105 (NM_013559.1,328-346).
ggtctctagctttaagaga

SEQ ID NO: 503680 - DNA, 19 bp, Mus musculus
  siRNA target sequence for Hsp105 (NM_013559.1,333-351).
ctagctttaagagatttca

SEQ ID NO: 503681 - DNA, 19 bp, Mus musculus
  siRNA target sequence for Hsp105 (NM_013559.1,391-409).
ggagaacctgagctatgat

SEQ ID NO: 503682 - DNA, 19 bp, Mus musculus
  siRNA target sequence for Hsp105 (NM_013559.1,392-410).
gagaacctgagctatgatt

SEQ ID NO: 503683 - DNA, 19 bp, Mus musculus
  siRNA target sequence for Hsp105 (NM_013559.1,412-430).
ggtcccaatgaaaaatggt

SEQ ID NO: 503684 - DNA, 19 bp, Mus musculus
  siRNA target sequence for Hsp105 (NM_013559.1,429-447).
gtggcgtgggaataaaggt

SEQ ID NO: 503685 - DNA, 19 bp, Mus musculus
  siRNA target sequence for Hsp105 (NM_013559.1,437-455).
ggaataaaggtcatgtaca

SEQ ID NO: 503686 - DNA, 19 bp, Mus musculus
  siRNA target sequence for Hsp105 (NM_013559.1,475-493).
cagtgtggagcagataaca

SEQ ID NO: 503687 - DNA, 19 bp, Mus musculus
  siRNA target sequence for Hsp105 (NM_013559.1,495-513).
ccatgctgctgactaagtt

SEQ ID NO: 503688 - DNA, 19 bp, Mus musculus
  siRNA target sequence for Hsp105 (NM_013559.1,496-514).
catgctgctgactaagtta

SEQ ID NO: 503689 - DNA, 19 bp, Mus musculus
  siRNA target sequence for Hsp105 (NM_013559.1,637-655).
ctgcttgcggctcatgaat

SEQ ID NO: 503690 - DNA, 19 bp, Mus musculus
  siRNA target sequence for Hsp105 (NM_013559.1,661-679).
gacggctgttgctttgaat

SEQ ID NO: 503691 - DNA, 19 bp, Mus musculus
  siRNA target sequence for Hsp105 (NM_013559.1,743-761).
gacatgggacactcatctt

SEQ ID NO: 503692 - DNA, 19 bp, Mus musculus
  siRNA target sequence for Hsp105 (NM_013559.1,834-852).
gaggaaagaactttgatga

SEQ ID NO: 503693 - DNA, 19 bp, Mus musculus
  siRNA target sequence for Hsp105 (NM_013559.1,853-871).
gaagctagtagaacatttt

SEQ ID NO: 503694 - DNA, 19 bp, Mus musculus
  siRNA target sequence for Hsp105 (NM_013559.1,856-874).
gctagtagaacatttttgt

SEQ ID NO: 503695 - DNA, 19 bp, Mus musculus
  siRNA target sequence for Hsp105 (NM_013559.1,873-891).
gtgctgaatttaaaaccaa

SEQ ID NO: 503696 - DNA, 19 bp, Mus musculus
  siRNA target sequence for Hsp105 (NM_013559.1,1042-1060).
gaacaggtcacagtttgaa

SEQ ID NO: 503697 - DNA, 19 bp, Mus musculus
  siRNA target sequence for Hsp105 (NM_013559.1,1321-1339).
caccgatgcagttcctttt

SEQ ID NO: 503698 - DNA, 19 bp, Mus musculus
  siRNA target sequence for Hsp105 (NM_013559.1,1324-1342).
cgatgcagttccttttcca

SEQ ID NO: 503699 - DNA, 19 bp, Mus musculus
  siRNA target sequence for Hsp105 (NM_013559.1,1455-1473).
cctttgagctagaagcttt

SEQ ID NO: 503700 - DNA, 19 bp, Mus musculus
  siRNA target sequence for Hsp105 (NM_013559.1,1460-1478).
gagctagaagctttctatt

SEQ ID NO: 503701 - DNA, 19 bp, Mus musculus
  siRNA target sequence for Hsp105 (NM_013559.1,1483-1501).
ccctcaaggagttccatat

SEQ ID NO: 503702 - DNA, 19 bp, Mus musculus
  siRNA target sequence for Hsp105 (NM_013559.1,1509-1527).
caaaaataggccgttttgt

SEQ ID NO: 503703 - DNA, 19 bp, Mus musculus
  siRNA target sequence for Hsp105 (NM_013559.1,1518-1536).
gccgttttgttgttcagaa

SEQ ID NO: 503704 - DNA, 19 bp, Mus musculus
  siRNA target sequence for Hsp105 (NM_013559.1,1566-1584).
cgagagtgaaggtcaaagt

SEQ ID NO: 503705 - DNA, 19 bp, Mus musculus
  siRNA target sequence for Hsp105 (NM_013559.1,1716-1734).
gctcggatgtggataaaaa

SEQ ID NO: 503706 - DNA, 19 bp, Mus musculus
  siRNA target sequence for Hsp105 (NM_013559.1,1717-1735).
ctcggatgtggataaaaat

SEQ ID NO: 503707 - DNA, 19 bp, Mus musculus
  siRNA target sequence for Hsp105 (NM_013559.1,1768-1786).
gccccaggtacaaactgat

SEQ ID NO: 503708 - DNA, 19 bp, Mus musculus
  siRNA target sequence for Hsp105 (NM_013559.1,1848-1866).
cagatgctgacaaagcaaa

SEQ ID NO: 503709 - DNA, 19 bp, Mus musculus
  siRNA target sequence for Hsp105 (NM_013559.1,1964-1982).
gggagagaccttcttaaca

SEQ ID NO: 503710 - DNA, 19 bp, Mus musculus
  siRNA target sequence for Hsp105 (NM_013559.1,1965-1983).
ggagagaccttcttaacat

SEQ ID NO: 503711 - DNA, 19 bp, Mus musculus
  siRNA target sequence for Hsp105 (NM_013559.1,1968-1986).
gagaccttcttaacatgta

SEQ ID NO: 503712 - DNA, 19 bp, Mus musculus
  siRNA target sequence for Hsp105 (NM_013559.1,1970-1988).
gaccttcttaacatgtata

SEQ ID NO: 503713 - DNA, 19 bp, Mus musculus
  siRNA target sequence for Hsp105 (NM_013559.1,1972-1990).
ccttcttaacatgtatatt

SEQ ID NO: 503714 - DNA, 19 bp, Mus musculus
  siRNA target sequence for Hsp105 (NM_013559.1,2054-2072).
gccgtggaggagtgtgtat

SEQ ID NO: 503715 - DNA, 19 bp, Mus musculus
  siRNA target sequence for Hsp105 (NM_013559.1,2055-2073).
ccgtggaggagtgtgtata

SEQ ID NO: 503716 - DNA, 19 bp, Mus musculus
  siRNA target sequence for Hsp105 (NM_013559.1,2056-2074).
cgtggaggagtgtgtatat

SEQ ID NO: 503717 - DNA, 19 bp, Mus musculus
  siRNA target sequence for Hsp105 (NM_013559.1,2075-2093).
gagttcagggacaagctat

SEQ ID NO: 503718 - DNA, 19 bp, Mus musculus
  siRNA target sequence for Hsp105 (NM_013559.1,2090-2108).
ctatgtggaccatatgaga

SEQ ID NO: 503719 - DNA, 19 bp, Mus musculus
  siRNA target sequence for Hsp105 (NM_013559.1,2094-2112).
gtggaccatatgagaaatt

SEQ ID NO: 503720 - DNA, 19 bp, Mus musculus
  siRNA target sequence for Hsp105 (NM_013559.1,2196-2214).
ctaagcaggcatacattga

SEQ ID NO: 503721 - DNA, 19 bp, Mus musculus
  siRNA target sequence for Hsp105 (NM_013559.1,2273-2291).
gaggaacgaccgaaagtgt

SEQ ID NO: 503722 - DNA, 19 bp, Mus musculus
  siRNA target sequence for Hsp105 (NM_013559.1,2452-2470).
ggctaaaagaagtcttgat

SEQ ID NO: 503723 - DNA, 19 bp, Mus musculus
  siRNA target sequence for Hsp105 (NM_013559.1,2454-2472).
ctaaaagaagtcttgatca

SEQ ID NO: 503724 - DNA, 19 bp, Mus musculus
  siRNA target sequence for Hsp105 (NM_013559.1,2476-2494).
ccctgttgttcgaactcat

SEQ ID NO: 503725 - DNA, 19 bp, Mus musculus
  siRNA target sequence for Hsp105 (NM_013559.1,2480-2498).
gttgttcgaactcatgaaa

SEQ ID NO: 503726 - DNA, 19 bp, Mus musculus
  siRNA target sequence for Hsp105 (NM_013559.1,2483-2501).
gttcgaactcatgaaatca

SEQ ID NO: 503727 - DNA, 19 bp, Mus musculus
  siRNA target sequence for Hsp105 (NM_013559.1,2505-2523).
cgaaggtcaaggaattgaa

SEQ ID NO: 503728 - DNA, 19 bp, Mus musculus
  siRNA target sequence for Hsp105 (NM_013559.1,2515-2533).
ggaattgaacaatgtttgt

SEQ ID NO: 503729 - DNA, 19 bp, Mus musculus
  siRNA target sequence for Hsp105 (NM_013559.1,2528-2546).
gtttgtgaacctgttgtaa

SEQ ID NO: 503730 - DNA, 19 bp, Mus musculus
  siRNA target sequence for Hsp105 (NM_013559.1,2532-2550).
gtgaacctgttgtaactca

SEQ ID NO: 503731 - DNA, 19 bp, Mus musculus
  siRNA target sequence for Hsp105 (NM_013559.1,2543-2561).
gtaactcaacccaaaccaa

SEQ ID NO: 503732 - DNA, 19 bp, Mus musculus
  siRNA target sequence for Hsp105 (NM_013559.1,2589-2607).
ctccaaatggcccaaatat

SEQ ID NO: 503733 - DNA, 19 bp, Mus musculus
  siRNA target sequence for Hsp105 (NM_013559.1,2592-2610).
caaatggcccaaatattga

SEQ ID NO: 503734 - DNA, 19 bp, Mus musculus
  siRNA target sequence for Hsp105 (NM_013559.1,2599-2617).
cccaaatattgacaagaaa

SEQ ID NO: 503735 - DNA, 19 bp, Mus musculus
  siRNA target sequence for Hsp105 (NM_013559.1,2601-2619).
caaatattgacaagaaaga

SEQ ID NO: 503736 - DNA, 19 bp, Mus musculus
  siRNA target sequence for Hsp70-4 (NM_015765.1,152-170).
ccgatgtggttgcaaatga

SEQ ID NO: 503737 - DNA, 19 bp, Mus musculus
  siRNA target sequence for Hsp70-4 (NM_015765.1,225-243).
ggttggactggcagcaaaa

SEQ ID NO: 503738 - DNA, 19 bp, Mus musculus
  siRNA target sequence for Hsp70-4 (NM_015765.1,229-247).
ggactggcagcaaaacaaa

SEQ ID NO: 503739 - DNA, 19 bp, Mus musculus
  siRNA target sequence for Hsp70-4 (NM_015765.1,344-362).
gtaaatgcttagtcattga

SEQ ID NO: 503740 - DNA, 19 bp, Mus musculus
  siRNA target sequence for Hsp70-4 (NM_015765.1,371-389).
ggaagttgcggtatgaaat

SEQ ID NO: 503741 - DNA, 19 bp, Mus musculus
  siRNA target sequence for Hsp70-4 (NM_015765.1,372-390).
gaagttgcggtatgaaata

SEQ ID NO: 503742 - DNA, 19 bp, Mus musculus
  siRNA target sequence for Hsp70-4 (NM_015765.1,375-393).
gttgcggtatgaaatagat

SEQ ID NO: 503743 - DNA, 19 bp, Mus musculus
  siRNA target sequence for Hsp70-4 (NM_015765.1,427-445).
gatgttgccagactgatat

SEQ ID NO: 503744 - DNA, 19 bp, Mus musculus
  siRNA target sequence for Hsp70-4 (NM_015765.1,430-448).
gttgccagactgatattca

SEQ ID NO: 503745 - DNA, 19 bp, Mus musculus
  siRNA target sequence for Hsp70-4 (NM_015765.1,433-451).
gccagactgatattcagta

SEQ ID NO: 503746 - DNA, 19 bp, Mus musculus
  siRNA target sequence for Hsp70-4 (NM_015765.1,434-452).
ccagactgatattcagtaa

SEQ ID NO: 503747 - DNA, 19 bp, Mus musculus
  siRNA target sequence for Hsp70-4 (NM_015765.1,437-455).
gactgatattcagtaaaat

SEQ ID NO: 503748 - DNA, 19 bp, Mus musculus
  siRNA target sequence for Hsp70-4 (NM_015765.1,563-581).
gagctgctggatttaacgt

SEQ ID NO: 503749 - DNA, 19 bp, Mus musculus
  siRNA target sequence for Hsp70-4 (NM_015765.1,676-694).
cttggaggaacgtccttat

SEQ ID NO: 503750 - DNA, 19 bp, Mus musculus
  siRNA target sequence for Hsp70-4 (NM_015765.1,730-748).
cgggtcctttccacaaaca

SEQ ID NO: 503751 - DNA, 19 bp, Mus musculus
  siRNA target sequence for Hsp70-4 (NM_015765.1,848-866).
cccgagccatgatgaaatt

SEQ ID NO: 503752 - DNA, 19 bp, Mus musculus
  siRNA target sequence for Hsp70-4 (NM_015765.1,850-868).
cgagccatgatgaaattga

SEQ ID NO: 503753 - DNA, 19 bp, Mus musculus
  siRNA target sequence for Hsp70-4 (NM_015765.1,851-869).
gagccatgatgaaattgat

SEQ ID NO: 503754 - DNA, 19 bp, Mus musculus
  siRNA target sequence for Hsp70-4 (NM_015765.1,916-934).
gccaactgctttgtagatt

SEQ ID NO: 503755 - DNA, 19 bp, Mus musculus
  siRNA target sequence for Hsp70-4 (NM_015765.1,924-942).
ctttgtagattccttgtat

SEQ ID NO: 503756 - DNA, 19 bp, Mus musculus
  siRNA target sequence for Hsp70-4 (NM_015765.1,952-970).
gactttgattgcaatgtgt

SEQ ID NO: 503757 - DNA, 19 bp, Mus musculus
  siRNA target sequence for Hsp70-4 (NM_015765.1,995-1013).
gttctccgctttttaacaa

SEQ ID NO: 503758 - DNA, 19 bp, Mus musculus
  siRNA target sequence for Hsp70-4 (NM_015765.1,1000-1018).
ccgctttttaacaaatgta

SEQ ID NO: 503759 - DNA, 19 bp, Mus musculus
  siRNA target sequence for Hsp70-4 (NM_015765.1,1041-1059).
gcgccagactggattcaca

SEQ ID NO: 503760 - DNA, 19 bp, Mus musculus
  siRNA target sequence for Hsp70-4 (NM_015765.1,1051-1069).
ggattcacagcagatgata

SEQ ID NO: 503761 - DNA, 19 bp, Mus musculus
  siRNA target sequence for Hsp70-4 (NM_015765.1,1052-1070).
gattcacagcagatgatat

SEQ ID NO: 503762 - DNA, 19 bp, Mus musculus
  siRNA target sequence for Hsp70-4 (NM_015765.1,1058-1076).
cagcagatgatatcaacaa

SEQ ID NO: 503763 - DNA, 19 bp, Mus musculus
  siRNA target sequence for Hsp70-4 (NM_015765.1,1153-1171).
gtggacctcctcaactcta

SEQ ID NO: 503764 - DNA, 19 bp, Mus musculus
  siRNA target sequence for Hsp70-4 (NM_015765.1,1206-1224).
catagaagccgggattctt

SEQ ID NO: 503765 - DNA, 19 bp, Mus musculus
  siRNA target sequence for Hsp70-4 (NM_015765.1,1269-1287).
gtgttcagccaaggatatt

SEQ ID NO: 503766 - DNA, 19 bp, Mus musculus
  siRNA target sequence for Hsp70-4 (NM_015765.1,1403-1421).
ccgtttgccttgaactcta

SEQ ID NO: 503767 - DNA, 19 bp, Mus musculus
  siRNA target sequence for Hsp70-4 (NM_015765.1,1431-1449).
ggggaagaactctgctaaa

SEQ ID NO: 503768 - DNA, 19 bp, Mus musculus
  siRNA target sequence for Hsp70-4 (NM_015765.1,1522-1540).
gctgttcttactatgaaaa

SEQ ID NO: 503769 - DNA, 19 bp, Mus musculus
  siRNA target sequence for Hsp70-4 (NM_015765.1,1536-1554).
gaaaagggatggatcttta

SEQ ID NO: 503770 - DNA, 19 bp, Mus musculus
  siRNA target sequence for Hsp70-4 (NM_015765.1,1584-1602).
caagtgtgaggccattact

SEQ ID NO: 503771 - DNA, 19 bp, Mus musculus
  siRNA target sequence for Hspa12a (NM_175199.1,444-462).
cccagtgaggccaagcaat

SEQ ID NO: 503772 - DNA, 19 bp, Mus musculus
  siRNA target sequence for Hspa12a (NM_175199.1,454-472).
ccaagcaatggctgtactt

SEQ ID NO: 503773 - DNA, 19 bp, Mus musculus
  siRNA target sequence for Hspa12a (NM_175199.1,574-592).
cttacgccctgcagtactt

SEQ ID NO: 503774 - DNA, 19 bp, Mus musculus
  siRNA target sequence for Hspa12a (NM_175199.1,627-645).
gcagggtcggactttgaga

SEQ ID NO: 503775 - DNA, 19 bp, Mus musculus
  siRNA target sequence for Hspa12a (NM_175199.1,752-770).
ctcggagcagctcatcatt

SEQ ID NO: 503776 - DNA, 19 bp, Mus musculus
  siRNA target sequence for Hspa12a (NM_175199.1,890-908).
gtttgcacaggctaaggaa

SEQ ID NO: 503777 - DNA, 19 bp, Mus musculus
  siRNA target sequence for Hspa12a (NM_175199.1,924-942).
cggcagagtcggacctttt

SEQ ID NO: 503778 - DNA, 19 bp, Mus musculus
  siRNA target sequence for Hspa12a (NM_175199.1,925-943).
ggcagagtcggaccttttt

SEQ ID NO: 503779 - DNA, 19 bp, Mus musculus
  siRNA target sequence for Hspa12a (NM_175199.1,1110-1128).
ctgggagtggattatgaat

SEQ ID NO: 503780 - DNA, 19 bp, Mus musculus
  siRNA target sequence for Hspa12a (NM_175199.1,1169-1187).
cgaacagttcaagatcaaa

SEQ ID NO: 503781 - DNA, 19 bp, Mus musculus
  siRNA target sequence for Hspa12a (NM_175199.1,1195-1213).
cagcctgggttgacctaat

SEQ ID NO: 503782 - DNA, 19 bp, Mus musculus
  siRNA target sequence for Hspa12a (NM_175199.1,1198-1216).
cctgggttgacctaatgat

SEQ ID NO: 503783 - DNA, 19 bp, Mus musculus
  siRNA target sequence for Hspa12a (NM_175199.1,1405-1423).
ccatgaacgccctcttcaa

SEQ ID NO: 503784 - DNA, 19 bp, Mus musculus
  siRNA target sequence for Hspa12a (NM_175199.1,1486-1504).
cggtcaagttcctctttct

SEQ ID NO: 503785 - DNA, 19 bp, Mus musculus
  siRNA target sequence for Hspa12a (NM_175199.1,1563-1581).
gacaaatgcaggatcatca

SEQ ID NO: 503786 - DNA, 19 bp, Mus musculus
  siRNA target sequence for Hspa12a (NM_175199.1,1717-1735).
ctcccgagaagctattggt

SEQ ID NO: 503787 - DNA, 19 bp, Mus musculus
  siRNA target sequence for Hspa12a (NM_175199.1,2028-2046).
gccacggccgtcgacataa

SEQ ID NO: 503788 - DNA, 19 bp, Mus musculus
  siRNA target sequence for Hspa12a (NM_175199.1,2040-2058).
gacataaccacctcaaaga

SEQ ID NO: 503789 - DNA, 19 bp, Mus musculus
  siRNA target sequence for Hspa12a (NM_175199.1,2042-2060).
cataaccacctcaaagagt

SEQ ID NO: 503790 - DNA, 19 bp, Mus musculus
  siRNA target sequence for Hspa12a (NM_175199.1,2067-2085).
gtggggatcgacttcttaa

SEQ ID NO: 503791 - DNA, 19 bp, Mus musculus
  siRNA target sequence for Hspa12a (NM_175199.1,2069-2087).
ggggatcgacttcttaaat

SEQ ID NO: 503792 - DNA, 19 bp, Mus musculus
  siRNA target sequence for Hspa12a (NM_175199.1,2070-2088).
gggatcgacttcttaaatt

SEQ ID NO: 503793 - DNA, 19 bp, Mus musculus
  siRNA target sequence for Hspa12a (NM_175199.1,2071-2089).
ggatcgacttcttaaatta

SEQ ID NO: 503794 - DNA, 19 bp, Mus musculus
  siRNA target sequence for Hspa12b (NM_028306.2,143-161).
gcctgcaagggctgtatat

SEQ ID NO: 503795 - DNA, 19 bp, Mus musculus
  siRNA target sequence for Hspa12b (NM_028306.2,145-163).
ctgcaagggctgtatatca

SEQ ID NO: 503796 - DNA, 19 bp, Mus musculus
  siRNA target sequence for Hspa12b (NM_028306.2,367-385).
gaggccattcacatgatga

SEQ ID NO: 503797 - DNA, 19 bp, Mus musculus
  siRNA target sequence for Hspa12b (NM_028306.2,449-467).
ccccagaaggcatctttca

SEQ ID NO: 503798 - DNA, 19 bp, Mus musculus
  siRNA target sequence for Hspa12b (NM_028306.2,521-539).
ctcgggactggctctactt

SEQ ID NO: 503799 - DNA, 19 bp, Mus musculus
  siRNA target sequence for Hspa12b (NM_028306.2,526-544).
gactggctctactttgaga

SEQ ID NO: 503800 - DNA, 19 bp, Mus musculus
  siRNA target sequence for Hspa12b (NM_028306.2,591-609).
ccagctcgaggcggtaaat

SEQ ID NO: 503801 - DNA, 19 bp, Mus musculus
  siRNA target sequence for Hspa12b (NM_028306.2,690-708).
gcagagcgagtgtatgctt

SEQ ID NO: 503802 - DNA, 19 bp, Mus musculus
  siRNA target sequence for Hspa12b (NM_028306.2,695-713).
gcgagtgtatgcttgagaa

SEQ ID NO: 503803 - DNA, 19 bp, Mus musculus
  siRNA target sequence for Hspa12b (NM_028306.2,760-778).
ccggctaaacagttcatga

SEQ ID NO: 503804 - DNA, 19 bp, Mus musculus
  siRNA target sequence for Hspa12b (NM_028306.2,992-1010).
ctcgccacagccgaacttt

SEQ ID NO: 503805 - DNA, 19 bp, Mus musculus
  siRNA target sequence for Hspa12b (NM_028306.2,1264-1282).
gcagcttgggtggatctaa

SEQ ID NO: 503806 - DNA, 19 bp, Mus musculus
  siRNA target sequence for Hspa12b (NM_028306.2,1268-1286).
cttgggtggatctaaccat

SEQ ID NO: 503807 - DNA, 19 bp, Mus musculus
  siRNA target sequence for Hspa12b (NM_028306.2,1464-1482).
gtcctgtgaggctatgaat

SEQ ID NO: 503808 - DNA, 19 bp, Mus musculus
  siRNA target sequence for Hspa12b (NM_028306.2,1466-1484).
cctgtgaggctatgaatga

SEQ ID NO: 503809 - DNA, 19 bp, Mus musculus
  siRNA target sequence for Hspa12b (NM_028306.2,1475-1493).
ctatgaatgagctgtttca

SEQ ID NO: 503810 - DNA, 19 bp, Mus musculus
  siRNA target sequence for Hspa12b (NM_028306.2,1508-1526).
ggatcatccaacacataga

SEQ ID NO: 503811 - DNA, 19 bp, Mus musculus
  siRNA target sequence for Hspa12b (NM_028306.2,1731-1749).
ccgctcccccctcacttat

SEQ ID NO: 503812 - DNA, 19 bp, Mus musculus
  siRNA target sequence for Hspa12b (NM_028306.2,1753-1771).
gtgggcgtgctcaatcgtt

SEQ ID NO: 503813 - DNA, 19 bp, Mus musculus
  siRNA target sequence for Hspa12b (NM_028306.2,1755-1773).
gggcgtgctcaatcgtttt

SEQ ID NO: 503814 - DNA, 19 bp, Mus musculus
  siRNA target sequence for Hspa12b (NM_028306.2,1757-1775).
gcgtgctcaatcgttttgt

SEQ ID NO: 503815 - DNA, 19 bp, Mus musculus
  siRNA target sequence for Hspa12b (NM_028306.2,1923-1941).
gcggcgtgtgctcatcaat

SEQ ID NO: 503816 - DNA, 19 bp, Mus musculus
  siRNA target sequence for Hspa12b (NM_028306.2,1925-1943).
ggcgtgtgctcatcaatct

SEQ ID NO: 503817 - DNA, 19 bp, Mus musculus
  siRNA target sequence for Hspa12b (NM_028306.2,1960-1978).
gaggatgcgcgcttcatca

SEQ ID NO: 503818 - DNA, 19 bp, Mus musculus
  siRNA target sequence for Hspa12b (NM_028306.2,2091-2109).
gtttggcgatactgagatt

SEQ ID NO: 503819 - DNA, 19 bp, Mus musculus
  siRNA target sequence for Hspa12b (NM_028306.2,2096-2114).
gcgatactgagattaaggt

SEQ ID NO: 503820 - DNA, 19 bp, Mus musculus
  siRNA target sequence for Hspa12b (NM_028306.2,2150-2168).
gggcagccatcgactttct

SEQ ID NO: 503821 - DNA, 19 bp, Mus musculus
  siRNA target sequence for Hspa12b (NM_028306.2,2152-2170).
gcagccatcgactttcttt

SEQ ID NO: 503822 - DNA, 19 bp, Mus musculus
  siRNA target sequence for Hspa12b (NM_028306.2,2156-2174).
ccatcgactttctttccaa

SEQ ID NO: 503823 - DNA, 19 bp, Mus musculus
  siRNA target sequence for Hspa1l (NM_013558.1,367-385).
ctaattggcaggaagttta

SEQ ID NO: 503824 - DNA, 19 bp, Mus musculus
  siRNA target sequence for Hspa1l (NM_013558.1,391-409).
cctgttgtgcagtcagata

SEQ ID NO: 503825 - DNA, 19 bp, Mus musculus
  siRNA target sequence for Hspa1l (NM_013558.1,419-437).
ggccatttcaagtgatcaa

SEQ ID NO: 503826 - DNA, 19 bp, Mus musculus
  siRNA target sequence for Hspa1l (NM_013558.1,420-438).
gccatttcaagtgatcaat

SEQ ID NO: 503827 - DNA, 19 bp, Mus musculus
  siRNA target sequence for Hspa1l (NM_013558.1,422-440).
catttcaagtgatcaatga

SEQ ID NO: 503828 - DNA, 19 bp, Mus musculus
  siRNA target sequence for Hspa1l (NM_013558.1,456-474).
ggtgatggtgtcctataaa

SEQ ID NO: 503829 - DNA, 19 bp, Mus musculus
  siRNA target sequence for Hspa1l (NM_013558.1,459-477).
gatggtgtcctataaagga

SEQ ID NO: 503830 - DNA, 19 bp, Mus musculus
  siRNA target sequence for Hspa1l (NM_013558.1,585-603).
ggtgccagcctatttcaat

SEQ ID NO: 503831 - DNA, 19 bp, Mus musculus
  siRNA target sequence for Hspa1l (NM_013558.1,696-714).
ctacggcttggataaagga

SEQ ID NO: 503832 - DNA, 19 bp, Mus musculus
  siRNA target sequence for Hspa1l (NM_013558.1,996-1014).
ggagatcgactctttatat

SEQ ID NO: 503833 - DNA, 19 bp, Mus musculus
  siRNA target sequence for Hspa1l (NM_013558.1,1041-1059).
cactagagcacggtttgaa

SEQ ID NO: 503834 - DNA, 19 bp, Mus musculus
  siRNA target sequence for Hspa1l (NM_013558.1,1043-1061).
ctagagcacggtttgaaga

SEQ ID NO: 503835 - DNA, 19 bp, Mus musculus
  siRNA target sequence for Hspa1l (NM_013558.1,1114-1132).
cgggatgccaagatggata

SEQ ID NO: 503836 - DNA, 19 bp, Mus musculus
  siRNA target sequence for Hspa1l (NM_013558.1,1128-1146).
ggataaggctaaaatccat

SEQ ID NO: 503837 - DNA, 19 bp, Mus musculus
  siRNA target sequence for Hspa1l (NM_013558.1,1134-1152).
ggctaaaatccatgacatt

SEQ ID NO: 503838 - DNA, 19 bp, Mus musculus
  siRNA target sequence for Hspa1l (NM_013558.1,1216-1234).
ggacgggatctcaacaaga

SEQ ID NO: 503839 - DNA, 19 bp, Mus musculus
  siRNA target sequence for Hspa1l (NM_013558.1,1219-1237).
cgggatctcaacaagagta

SEQ ID NO: 503840 - DNA, 19 bp, Mus musculus
  siRNA target sequence for Hspa1l (NM_013558.1,1273-1291).
gtccaggcagctattttaa

SEQ ID NO: 503841 - DNA, 19 bp, Mus musculus
  siRNA target sequence for Hspa1l (NM_013558.1,1293-1311).
gggcgacaaatctgaaaaa

SEQ ID NO: 503842 - DNA, 19 bp, Mus musculus
  siRNA target sequence for Hspa1l (NM_013558.1,1296-1314).
cgacaaatctgaaaaagta

SEQ ID NO: 503843 - DNA, 19 bp, Mus musculus
  siRNA target sequence for Hspa1l (NM_013558.1,1524-1542).
ctttgacttgactggaata

SEQ ID NO: 503844 - DNA, 19 bp, Mus musculus
  siRNA target sequence for Hspa1l (NM_013558.1,1752-1770).
gaaaatcgctgccaaaaat

SEQ ID NO: 503845 - DNA, 19 bp, Mus musculus
  siRNA target sequence for Hspa1l (NM_013558.1,1762-1780).
gccaaaaatgccttagaat

SEQ ID NO: 503846 - DNA, 19 bp, Mus musculus
  siRNA target sequence for Hspa1l (NM_013558.1,1777-1795).
gaatcgtacgcctttaata

SEQ ID NO: 503847 - DNA, 19 bp, Mus musculus
  siRNA target sequence for Hspa1l (NM_013558.1,1781-1799).
cgtacgcctttaatatgaa

SEQ ID NO: 503848 - DNA, 19 bp, Mus musculus
  siRNA target sequence for Hspa1l (NM_013558.1,1914-1932).
gaaagatgagtttgatcat

SEQ ID NO: 503849 - DNA, 19 bp, Mus musculus
  siRNA target sequence for Hspa1l (NM_013558.1,1958-1976).
gtaatccgatcatcacaaa

SEQ ID NO: 503850 - DNA, 19 bp, Mus musculus
  siRNA target sequence for Hspa1l (NM_013558.1,1963-1981).
ccgatcatcacaaaactgt

SEQ ID NO: 503851 - DNA, 19 bp, Mus musculus
  siRNA target sequence for Hspa1l (NM_013558.1,1964-1982).
cgatcatcacaaaactgta

SEQ ID NO: 503852 - DNA, 19 bp, Mus musculus
  siRNA target sequence for Hspa2 (NM_008301.2,182-200).
gtgcgtgggggtattccaa

SEQ ID NO: 503853 - DNA, 19 bp, Mus musculus
  siRNA target sequence for Hspa2 (NM_008301.2,568-586).
ctgttcctgcctatttcaa

SEQ ID NO: 503854 - DNA, 19 bp, Mus musculus
  siRNA target sequence for Hspa2 (NM_008301.2,638-656).
cgtgttgcgcatcatcaat

SEQ ID NO: 503855 - DNA, 19 bp, Mus musculus
  siRNA target sequence for Hspa2 (NM_008301.2,1159-1177).
caacccgcatccctaagat

SEQ ID NO: 503856 - DNA, 19 bp, Mus musculus
  siRNA target sequence for Hspa2 (NM_008301.2,1283-1301).
cggcgacaagtcggaaaat

SEQ ID NO: 503857 - DNA, 19 bp, Mus musculus
  siRNA target sequence for Hspa2 (NM_008301.2,1450-1468).
gcgtgctggtgcaagtgta

SEQ ID NO: 503858 - DNA, 19 bp, Mus musculus
  siRNA target sequence for Hspa2 (NM_008301.2,1619-1637).
gagcaccggtaaagaaaat

SEQ ID NO: 503859 - DNA, 19 bp, Mus musculus
  siRNA target sequence for Hspa2 (NM_008301.2,1621-1639).
gcaccggtaaagaaaataa

SEQ ID NO: 503860 - DNA, 19 bp, Mus musculus
  siRNA target sequence for Hspa2 (NM_008301.2,1622-1640).
caccggtaaagaaaataaa

SEQ ID NO: 503861 - DNA, 19 bp, Mus musculus
  siRNA target sequence for Hspa2 (NM_008301.2,1701-1719).
gaggcggagcggtacaaat

SEQ ID NO: 503862 - DNA, 19 bp, Mus musculus
  siRNA target sequence for Hspa2 (NM_008301.2,1711-1729).
ggtacaaatcggaagatga

SEQ ID NO: 503863 - DNA, 19 bp, Mus musculus
  siRNA target sequence for Hspa2 (NM_008301.2,1797-1815).
gtggaagacgagaaactga

SEQ ID NO: 503864 - DNA, 19 bp, Mus musculus
  siRNA target sequence for Hspa4 (NM_008300.2,347-365).
gtcctaagaatcgttcaat

SEQ ID NO: 503865 - DNA, 19 bp, Mus musculus
  siRNA target sequence for Hspa4 (NM_008300.2,381-399).
gagccaggtaatttctaat

SEQ ID NO: 503866 - DNA, 19 bp, Mus musculus
  siRNA target sequence for Hspa4 (NM_008300.2,440-458).
gtgcattctccgatccatt

SEQ ID NO: 503867 - DNA, 19 bp, Mus musculus
  siRNA target sequence for Hspa4 (NM_008300.2,443-461).
cattctccgatccatttgt

SEQ ID NO: 503868 - DNA, 19 bp, Mus musculus
  siRNA target sequence for Hspa4 (NM_008300.2,462-480).
ggaagcagaaaaatctaat

SEQ ID NO: 503869 - DNA, 19 bp, Mus musculus
  siRNA target sequence for Hspa4 (NM_008300.2,498-516).
gcagttgcccactggatta

SEQ ID NO: 503870 - DNA, 19 bp, Mus musculus
  siRNA target sequence for Hspa4 (NM_008300.2,499-517).
cagttgcccactggattaa

SEQ ID NO: 503871 - DNA, 19 bp, Mus musculus
  siRNA target sequence for Hspa4 (NM_008300.2,512-530).
gattaacgggcataaaggt

SEQ ID NO: 503872 - DNA, 19 bp, Mus musculus
  siRNA target sequence for Hspa4 (NM_008300.2,518-536).
cgggcataaaggttacata

SEQ ID NO: 503873 - DNA, 19 bp, Mus musculus
  siRNA target sequence for Hspa4 (NM_008300.2,519-537).
gggcataaaggttacatat

SEQ ID NO: 503874 - DNA, 19 bp, Mus musculus
  siRNA target sequence for Hspa4 (NM_008300.2,520-538).
ggcataaaggttacatata

SEQ ID NO: 503875 - DNA, 19 bp, Mus musculus
  siRNA target sequence for Hspa4 (NM_008300.2,521-539).
gcataaaggttacatatat

SEQ ID NO: 503876 - DNA, 19 bp, Mus musculus
  siRNA target sequence for Hspa4 (NM_008300.2,690-708).
gatggatgccacacagatt

SEQ ID NO: 503877 - DNA, 19 bp, Mus musculus
  siRNA target sequence for Hspa4 (NM_008300.2,705-723).
gattgctggtctcaattgt

SEQ ID NO: 503878 - DNA, 19 bp, Mus musculus
  siRNA target sequence for Hspa4 (NM_008300.2,722-740).
gtttgcggttaatgaatga

SEQ ID NO: 503879 - DNA, 19 bp, Mus musculus
  siRNA target sequence for Hspa4 (NM_008300.2,726-744).
gcggttaatgaatgaaaca

SEQ ID NO: 503880 - DNA, 19 bp, Mus musculus
  siRNA target sequence for Hspa4 (NM_008300.2,755-773).
ctcttgcttatggaatcta

SEQ ID NO: 503881 - DNA, 19 bp, Mus musculus
  siRNA target sequence for Hspa4 (NM_008300.2,757-775).
cttgcttatggaatctata

SEQ ID NO: 503882 - DNA, 19 bp, Mus musculus
  siRNA target sequence for Hspa4 (NM_008300.2,841-859).
gcctatcaagtttctgtat

SEQ ID NO: 503883 - DNA, 19 bp, Mus musculus
  siRNA target sequence for Hspa4 (NM_008300.2,854-872).
ctgtatgtgcatttaataa

SEQ ID NO: 503884 - DNA, 19 bp, Mus musculus
  siRNA target sequence for Hspa4 (NM_008300.2,894-912).
cacagcttttgatacaaca

SEQ ID NO: 503885 - DNA, 19 bp, Mus musculus
  siRNA target sequence for Hspa4 (NM_008300.2,911-929).
cattgggaggcagaaaatt

SEQ ID NO: 503886 - DNA, 19 bp, Mus musculus
  siRNA target sequence for Hspa4 (NM_008300.2,995-1013).
ctaaaattcgtgctttatt

SEQ ID NO: 503887 - DNA, 19 bp, Mus musculus
  siRNA target sequence for Hspa4 (NM_008300.2,1121-1139).
ctatgaatagaggcaaatt

SEQ ID NO: 503888 - DNA, 19 bp, Mus musculus
  siRNA target sequence for Hspa4 (NM_008300.2,1190-1208).
gcgtcttggagcaatccaa

SEQ ID NO: 503889 - DNA, 19 bp, Mus musculus
  siRNA target sequence for Hspa4 (NM_008300.2,1198-1216).
gagcaatccaagttaaaga

SEQ ID NO: 503890 - DNA, 19 bp, Mus musculus
  siRNA target sequence for Hspa4 (NM_008300.2,1284-1302).
cagcaagttttttggtaaa

SEQ ID NO: 503891 - DNA, 19 bp, Mus musculus
  siRNA target sequence for Hspa4 (NM_008300.2,1303-1321).
gaactcagcacaacattaa

SEQ ID NO: 503892 - DNA, 19 bp, Mus musculus
  siRNA target sequence for Hspa4 (NM_008300.2,1308-1326).
cagcacaacattaaatgca

SEQ ID NO: 503893 - DNA, 19 bp, Mus musculus
  siRNA target sequence for Hspa4 (NM_008300.2,1356-1374).
gcagtgtgcaattttatca

SEQ ID NO: 503894 - DNA, 19 bp, Mus musculus
  siRNA target sequence for Hspa4 (NM_008300.2,1404-1422).
cactgatgtggtaccatat

SEQ ID NO: 503895 - DNA, 19 bp, Mus musculus
  siRNA target sequence for Hspa4 (NM_008300.2,1408-1426).
gatgtggtaccatatccaa

SEQ ID NO: 503896 - DNA, 19 bp, Mus musculus
  siRNA target sequence for Hspa4 (NM_008300.2,1414-1432).
gtaccatatccaatatctt

SEQ ID NO: 503897 - DNA, 19 bp, Mus musculus
  siRNA target sequence for Hspa4 (NM_008300.2,1542-1560).
cactcttgaggcctactat

SEQ ID NO: 503898 - DNA, 19 bp, Mus musculus
  siRNA target sequence for Hspa4 (NM_008300.2,1546-1564).
cttgaggcctactatagtt

SEQ ID NO: 503899 - DNA, 19 bp, Mus musculus
  siRNA target sequence for Hspa4 (NM_008300.2,1581-1599).
ctatccagatcctgctata

SEQ ID NO: 503900 - DNA, 19 bp, Mus musculus
  siRNA target sequence for Hspa4 (NM_008300.2,1646-1664).
gctcaaaagtgaaagtcaa

SEQ ID NO: 503901 - DNA, 19 bp, Mus musculus
  siRNA target sequence for Hspa4 (NM_008300.2,1866-1884).
ggagatggagacatctcaa

SEQ ID NO: 503902 - DNA, 19 bp, Mus musculus
  siRNA target sequence for Hspa4 (NM_008300.2,1877-1895).
catctcaagctggatcaaa

SEQ ID NO: 503903 - DNA, 19 bp, Mus musculus
  siRNA target sequence for Hspa4 (NM_008300.2,1882-1900).
caagctggatcaaaagata

SEQ ID NO: 503904 - DNA, 19 bp, Mus musculus
  siRNA target sequence for Hspa4 (NM_008300.2,2083-2101).
gctgtggaagagtatgtgt

SEQ ID NO: 503905 - DNA, 19 bp, Mus musculus
  siRNA target sequence for Hspa4 (NM_008300.2,2084-2102).
ctgtggaagagtatgtgta

SEQ ID NO: 503906 - DNA, 19 bp, Mus musculus
  siRNA target sequence for Hspa4 (NM_008300.2,2089-2107).
gaagagtatgtgtatgaga

SEQ ID NO: 503907 - DNA, 19 bp, Mus musculus
  siRNA target sequence for Hspa4 (NM_008300.2,2126-2144).
gtgaatatgagaagtttgt

SEQ ID NO: 503908 - DNA, 19 bp, Mus musculus
  siRNA target sequence for Hspa4 (NM_008300.2,2152-2170).
gatgatcgtaatactttta

SEQ ID NO: 503909 - DNA, 19 bp, Mus musculus
  siRNA target sequence for Hspa4 (NM_008300.2,2155-2173).
gatcgtaatacttttacct

SEQ ID NO: 503910 - DNA, 19 bp, Mus musculus
  siRNA target sequence for Hspa4 (NM_008300.2,2158-2176).
cgtaatacttttaccttaa

SEQ ID NO: 503911 - DNA, 19 bp, Mus musculus
  siRNA target sequence for Hspa4 (NM_008300.2,2218-2236).
gatcaaccaaagcaagttt

SEQ ID NO: 503912 - DNA, 19 bp, Mus musculus
  siRNA target sequence for Hspa4 (NM_008300.2,2230-2248).
caagtttatgtagacaaat

SEQ ID NO: 503913 - DNA, 19 bp, Mus musculus
  siRNA target sequence for Hspa4 (NM_008300.2,2250-2268).
ggctgaattaaaaagttta

SEQ ID NO: 503914 - DNA, 19 bp, Mus musculus
  siRNA target sequence for Hspa4 (NM_008300.2,2264-2282).
gtttaggtcaacccattaa

SEQ ID NO: 503915 - DNA, 19 bp, Mus musculus
  siRNA target sequence for Hspa4 (NM_008300.2,2334-2352).
gaagcaaatccaacagtat

SEQ ID NO: 503916 - DNA, 19 bp, Mus musculus
  siRNA target sequence for Hspa4 (NM_008300.2,2359-2377).
gtgatcagctctttcaaaa

SEQ ID NO: 503917 - DNA, 19 bp, Mus musculus
  siRNA target sequence for Hspa4 (NM_008300.2,2456-2474).
ggatgaatagcaagcttaa

SEQ ID NO: 503918 - DNA, 19 bp, Mus musculus
  siRNA target sequence for Hspa4 (NM_008300.2,2545-2563).
gagctgacaagtatttgca

SEQ ID NO: 503919 - DNA, 19 bp, Mus musculus
  siRNA target sequence for Hspa4 (NM_008300.2,2694-2712).
cacagctgtgccttctgat

SEQ ID NO: 503920 - DNA, 19 bp, Mus musculus
  siRNA target sequence for Hspa5 (NM_022310.2,349-367).
cctgcgtcggtgtgttcaa

SEQ ID NO: 503921 - DNA, 19 bp, Mus musculus
  siRNA target sequence for Hspa5 (NM_022310.2,352-370).
gcgtcggtgtgttcaagaa

SEQ ID NO: 503922 - DNA, 19 bp, Mus musculus
  siRNA target sequence for Hspa5 (NM_022310.2,524-542).
catcggacgcacttggaat

SEQ ID NO: 503923 - DNA, 19 bp, Mus musculus
  siRNA target sequence for Hspa5 (NM_022310.2,596-614).
gaaaactaaaccgtacatt

SEQ ID NO: 503924 - DNA, 19 bp, Mus musculus
  siRNA target sequence for Hspa5 (NM_022310.2,601-619).
ctaaaccgtacattcaagt

SEQ ID NO: 503925 - DNA, 19 bp, Mus musculus
  siRNA target sequence for Hspa5 (NM_022310.2,606-624).
ccgtacattcaagttgata

SEQ ID NO: 503926 - DNA, 19 bp, Mus musculus
  siRNA target sequence for Hspa5 (NM_022310.2,607-625).
cgtacattcaagttgatat

SEQ ID NO: 503927 - DNA, 19 bp, Mus musculus
  siRNA target sequence for Hspa5 (NM_022310.2,608-626).
gtacattcaagttgatatt

SEQ ID NO: 503928 - DNA, 19 bp, Mus musculus
  siRNA target sequence for Hspa5 (NM_022310.2,630-648).
ggtgggcaaaccaagacat

SEQ ID NO: 503929 - DNA, 19 bp, Mus musculus
  siRNA target sequence for Hspa5 (NM_022310.2,631-649).
gtgggcaaaccaagacatt

SEQ ID NO: 503930 - DNA, 19 bp, Mus musculus
  siRNA target sequence for Hspa5 (NM_022310.2,727-745).
cccatgcagttgttactgt

SEQ ID NO: 503931 - DNA, 19 bp, Mus musculus
  siRNA target sequence for Hspa5 (NM_022310.2,728-746).
ccatgcagttgttactgta

SEQ ID NO: 503932 - DNA, 19 bp, Mus musculus
  siRNA target sequence for Hspa5 (NM_022310.2,794-812).
cactattgctggactgaat

SEQ ID NO: 503933 - DNA, 19 bp, Mus musculus
  siRNA target sequence for Hspa5 (NM_022310.2,928-946).
ctcttctcaccattgacaa

SEQ ID NO: 503934 - DNA, 19 bp, Mus musculus
  siRNA target sequence for Hspa5 (NM_022310.2,967-985).
ccactaatggagatactca

SEQ ID NO: 503935 - DNA, 19 bp, Mus musculus
  siRNA target sequence for Hspa5 (NM_022310.2,989-1007).
gggtggggaagactttgat

SEQ ID NO: 503936 - DNA, 19 bp, Mus musculus
  siRNA target sequence for Hspa5 (NM_022310.2,1012-1030).
gggtcatggaacacttcat

SEQ ID NO: 503937 - DNA, 19 bp, Mus musculus
  siRNA target sequence for Hspa5 (NM_022310.2,1113-1131).
gctaagagagccttgtctt

SEQ ID NO: 503938 - DNA, 19 bp, Mus musculus
  siRNA target sequence for Hspa5 (NM_022310.2,1192-1210).
cccttactcgggccaaatt

SEQ ID NO: 503939 - DNA, 19 bp, Mus musculus
  siRNA target sequence for Hspa5 (NM_022310.2,1193-1211).
ccttactcgggccaaattt

SEQ ID NO: 503940 - DNA, 19 bp, Mus musculus
  siRNA target sequence for Hspa5 (NM_022310.2,1198-1216).
ctcgggccaaatttgaaga

SEQ ID NO: 503941 - DNA, 19 bp, Mus musculus
  siRNA target sequence for Hspa5 (NM_022310.2,1320-1338).
ggatctactcgaattccaa

SEQ ID NO: 503942 - DNA, 19 bp, Mus musculus
  siRNA target sequence for Hspa5 (NM_022310.2,1321-1339).
gatctactcgaattccaaa

SEQ ID NO: 503943 - DNA, 19 bp, Mus musculus
  siRNA target sequence for Hspa5 (NM_022310.2,1324-1342).
ctactcgaattccaaagat

SEQ ID NO: 503944 - DNA, 19 bp, Mus musculus
  siRNA target sequence for Hspa5 (NM_022310.2,1327-1345).
ctcgaattccaaagattca

SEQ ID NO: 503945 - DNA, 19 bp, Mus musculus
  siRNA target sequence for Hspa5 (NM_022310.2,1472-1490).
ggtactgcttgatgtttgt

SEQ ID NO: 503946 - DNA, 19 bp, Mus musculus
  siRNA target sequence for Hspa5 (NM_022310.2,1489-1507).
gtccccttacacttggtat

SEQ ID NO: 503947 - DNA, 19 bp, Mus musculus
  siRNA target sequence for Hspa5 (NM_022310.2,1492-1510).
cccttacacttggtattga

SEQ ID NO: 503948 - DNA, 19 bp, Mus musculus
  siRNA target sequence for Hspa5 (NM_022310.2,1515-1533).
gtgggaggagtcatgacaa

SEQ ID NO: 503949 - DNA, 19 bp, Mus musculus
  siRNA target sequence for Hspa5 (NM_022310.2,1519-1537).
gaggagtcatgacaaaact

SEQ ID NO: 503950 - DNA, 19 bp, Mus musculus
  siRNA target sequence for Hspa5 (NM_022310.2,1554-1572).
gtggtacccaccaagaagt

SEQ ID NO: 503951 - DNA, 19 bp, Mus musculus
  siRNA target sequence for Hspa5 (NM_022310.2,1583-1601).
ctccacggcttccgataat

SEQ ID NO: 503952 - DNA, 19 bp, Mus musculus
  siRNA target sequence for Hspa5 (NM_022310.2,1585-1603).
ccacggcttccgataatca

SEQ ID NO: 503953 - DNA, 19 bp, Mus musculus
  siRNA target sequence for Hspa5 (NM_022310.2,1595-1613).
cgataatcagccaactgta

SEQ ID NO: 503954 - DNA, 19 bp, Mus musculus
  siRNA target sequence for Hspa5 (NM_022310.2,1632-1650).
ggtgaacgacccctaacaa

SEQ ID NO: 503955 - DNA, 19 bp, Mus musculus
  siRNA target sequence for Hspa5 (NM_022310.2,1633-1651).
gtgaacgacccctaacaaa

SEQ ID NO: 503956 - DNA, 19 bp, Mus musculus
  siRNA target sequence for Hspa5 (NM_022310.2,1638-1656).
cgacccctaacaaaagaca

SEQ ID NO: 503957 - DNA, 19 bp, Mus musculus
  siRNA target sequence for Hspa5 (NM_022310.2,1639-1657).
gacccctaacaaaagacaa

SEQ ID NO: 503958 - DNA, 19 bp, Mus musculus
  siRNA target sequence for Hspa5 (NM_022310.2,1648-1666).
caaaagacaatcatcttct

SEQ ID NO: 503959 - DNA, 19 bp, Mus musculus
  siRNA target sequence for Hspa5 (NM_022310.2,1736-1754).
gatagatgttaatggtatt

SEQ ID NO: 503960 - DNA, 19 bp, Mus musculus
  siRNA target sequence for Hspa5 (NM_022310.2,1824-1842).
cgcctgacacctgaagaaa

SEQ ID NO: 503961 - DNA, 19 bp, Mus musculus
  siRNA target sequence for Hspa5 (NM_022310.2,1893-1911).
ctcaaagagcgcattgaca

SEQ ID NO: 503962 - DNA, 19 bp, Mus musculus
  siRNA target sequence for Hspa5 (NM_022310.2,1916-1934).
gaatgaattggaaagctat

SEQ ID NO: 503963 - DNA, 19 bp, Mus musculus
  siRNA target sequence for Hspa5 (NM_022310.2,1925-1943).
ggaaagctatgcttattct

SEQ ID NO: 503964 - DNA, 19 bp, Mus musculus
  siRNA target sequence for Hspa5 (NM_022310.2,1973-1991).
gctgggaggtaaactttct

SEQ ID NO: 503965 - DNA, 19 bp, Mus musculus
  siRNA target sequence for Hspa5 (NM_022310.2,1974-1992).
ctgggaggtaaactttctt

SEQ ID NO: 503966 - DNA, 19 bp, Mus musculus
  siRNA target sequence for Hspa5 (NM_022310.2,2103-2121).
gaaattgttcagccaatta

SEQ ID NO: 503967 - DNA, 19 bp, Mus musculus
  siRNA target sequence for Hspa5 (NM_022310.2,2115-2133).
ccaattatcagcaaactct

SEQ ID NO: 503968 - DNA, 19 bp, Mus musculus
  siRNA target sequence for Hspa9a (NM_010481.1,175-193).
ccatgaggcttttagattt

SEQ ID NO: 503969 - DNA, 19 bp, Mus musculus
  siRNA target sequence for Hspa9a (NM_010481.1,314-332).
gctgaaggtgccagaacta

SEQ ID NO: 503970 - DNA, 19 bp, Mus musculus
  siRNA target sequence for Hspa9a (NM_010481.1,622-640).
ccacacagcaaaaaatgct

SEQ ID NO: 503971 - DNA, 19 bp, Mus musculus
  siRNA target sequence for Hspa9a (NM_010481.1,831-849).
ctatcctggaaattcagaa

SEQ ID NO: 503972 - DNA, 19 bp, Mus musculus
  siRNA target sequence for Hspa9a (NM_010481.1,915-933).
ctttgttgcggcacattgt

SEQ ID NO: 503973 - DNA, 19 bp, Mus musculus
  siRNA target sequence for Hspa9a (NM_010481.1,950-968).
gagacaggggttgatttga

SEQ ID NO: 503974 - DNA, 19 bp, Mus musculus
  siRNA target sequence for Hspa9a (NM_010481.1,1889-1907).
gatgagtgcaacaagctaa

SEQ ID NO: 503975 - DNA, 19 bp, Mus musculus
  siRNA target sequence for Hspa9a (NM_010481.1,1991-2009).
ctacagcaggcgtcattga

SEQ ID NO: 503976 - DNA, 19 bp, Mus musculus
  siRNA target sequence for Hspa9a (NM_010481.1,2004-2022).
cattgaaactcttcgaaat

SEQ ID NO: 503977 - DNA, 19 bp, Mus musculus
  siRNA target sequence for Hspd1 (NM_010477.2,1240-1258).
gaacgagcgacttgctaaa

SEQ ID NO: 503978 - DNA, 19 bp, Mus musculus
  siRNA target sequence for Hspd1 (NM_010477.2,1243-1261).
cgagcgacttgctaaactt

SEQ ID NO: 503979 - DNA, 19 bp, Mus musculus
  siRNA target sequence for Hspd1 (NM_010477.2,1244-1262).
gagcgacttgctaaacttt

SEQ ID NO: 503980 - DNA, 19 bp, Mus musculus
  siRNA target sequence for Htf9c (NM_008307.1,630-648).
gggcagcagtcattactgt

SEQ ID NO: 503981 - DNA, 19 bp, Mus musculus
  siRNA target sequence for Htf9c (NM_008307.1,658-676).
gataggatgggggagaatt

SEQ ID NO: 503982 - DNA, 19 bp, Mus musculus
  siRNA target sequence for Htf9c (NM_008307.1,677-695).
gggtctcgagagtaaaaga

SEQ ID NO: 503983 - DNA, 19 bp, Mus musculus
  siRNA target sequence for Htf9c (NM_008307.1,678-696).
ggtctcgagagtaaaagaa

SEQ ID NO: 503984 - DNA, 19 bp, Mus musculus
  siRNA target sequence for Htf9c (NM_008307.1,754-772).
gggagcgagtcataccaat

SEQ ID NO: 503985 - DNA, 19 bp, Mus musculus
  siRNA target sequence for Htf9c (NM_008307.1,755-773).
ggagcgagtcataccaatt

SEQ ID NO: 503986 - DNA, 19 bp, Mus musculus
  siRNA target sequence for Htf9c (NM_008307.1,756-774).
gagcgagtcataccaatta

SEQ ID NO: 503987 - DNA, 19 bp, Mus musculus
  siRNA target sequence for Htf9c (NM_008307.1,758-776).
gcgagtcataccaattaga

SEQ ID NO: 503988 - DNA, 19 bp, Mus musculus
  siRNA target sequence for Htf9c (NM_008307.1,868-886).
ccccactatgtcaaaaaga

SEQ ID NO: 503989 - DNA, 19 bp, Mus musculus
  siRNA target sequence for Htf9c (NM_008307.1,941-959).
gctacataagggatgactt

SEQ ID NO: 503990 - DNA, 19 bp, Mus musculus
  siRNA target sequence for Htf9c (NM_008307.1,1019-1037).
gtgacgtccggcgttttct

SEQ ID NO: 503991 - DNA, 19 bp, Mus musculus
  siRNA target sequence for Htf9c (NM_008307.1,1048-1066).
ggtctacagtcccacaaaa

SEQ ID NO: 503992 - DNA, 19 bp, Mus musculus
  siRNA target sequence for Htf9c (NM_008307.1,1049-1067).
gtctacagtcccacaaaat

SEQ ID NO: 503993 - DNA, 19 bp, Mus musculus
  siRNA target sequence for Htf9c (NM_008307.1,1084-1102).
ccaccatgtgcctttgtaa

SEQ ID NO: 503994 - DNA, 19 bp, Mus musculus
  siRNA target sequence for Htf9c (NM_008307.1,1241-1259).
gtgagccatcagtaacaca

SEQ ID NO: 503995 - DNA, 19 bp, Mus musculus
  siRNA target sequence for Htf9c (NM_008307.1,1333-1351).
gtgagcgggtgctacagaa

SEQ ID NO: 503996 - DNA, 19 bp, Mus musculus
  siRNA target sequence for Htf9c (NM_008307.1,1460-1478).
caccccagcagactgaata

SEQ ID NO: 503997 - DNA, 19 bp, Mus musculus
  siRNA target sequence for Htf9c (NM_008307.1,1464-1482).
ccagcagactgaatatcgt

SEQ ID NO: 503998 - DNA, 19 bp, Mus musculus
  siRNA target sequence for Htf9c (NM_008307.1,1465-1483).
cagcagactgaatatcgta

SEQ ID NO: 503999 - DNA, 19 bp, Mus musculus
  siRNA target sequence for Htf9c (NM_008307.1,1467-1485).
gcagactgaatatcgtaat

SEQ ID NO: 504000 - DNA, 19 bp, Mus musculus
  siRNA target sequence for Htf9c (NM_008307.1,1468-1486).
cagactgaatatcgtaata

SEQ ID NO: 504001 - DNA, 19 bp, Mus musculus
  siRNA target sequence for Htf9c (NM_008307.1,1541-1559).
gccggcttggcaagtacaa

SEQ ID NO: 504002 - DNA, 19 bp, Mus musculus
  siRNA target sequence for Htf9c (NM_008307.1,1658-1676).
caccatactcggcatatga

SEQ ID NO: 504003 - DNA, 19 bp, Mus musculus
  siRNA target sequence for Htf9c (NM_008307.1,1848-1866).
ggtgacctccctctacttt

SEQ ID NO: 504004 - DNA, 19 bp, Mus musculus
  siRNA target sequence for Htf9c (NM_008307.1,2014-2032).
gaggtgctctacacagtaa

SEQ ID NO: 504005 - DNA, 19 bp, Mus musculus
  siRNA target sequence for Htf9c (NM_008307.1,2258-2276).
gactgtcttcccatcaact

SEQ ID NO: 504006 - DNA, 19 bp, Mus musculus
  siRNA target sequence for Htf9c (NM_008307.1,2296-2314).
ccacgggctggcctacatt

SEQ ID NO: 504007 - DNA, 19 bp, Mus musculus
  siRNA target sequence for Htf9c (NM_008307.1,2299-2317).
cgggctggcctacattcta

SEQ ID NO: 504008 - DNA, 19 bp, Mus musculus
  siRNA target sequence for Htf9c (NM_008307.1,2300-2318).
gggctggcctacattctaa

SEQ ID NO: 504009 - DNA, 19 bp, Mus musculus
  siRNA target sequence for Htf9c (NM_008307.1,2420-2438).
ccccatctaaccgagtaaa

SEQ ID NO: 504010 - DNA, 19 bp, Mus musculus
  siRNA target sequence for Htf9c (NM_008307.1,2421-2439).
cccatctaaccgagtaaaa

SEQ ID NO: 504011 - DNA, 19 bp, Mus musculus
  siRNA target sequence for Htf9c (NM_008307.1,2494-2512).
ccgcactgtgagatgctta

SEQ ID NO: 504012 - DNA, 19 bp, Mus musculus
  siRNA target sequence for Htf9c (NM_008307.1,2495-2513).
cgcactgtgagatgcttat

SEQ ID NO: 504013 - DNA, 19 bp, Mus musculus
  siRNA target sequence for Htf9c (NM_008307.1,2555-2573).
ccctggagcatcaagaatt

SEQ ID NO: 504014 - DNA, 19 bp, Mus musculus
  siRNA target sequence for Htf9c (NM_008307.1,2556-2574).
cctggagcatcaagaattt

SEQ ID NO: 504015 - DNA, 19 bp, Mus musculus
  siRNA target sequence for Hunk (NM_015755.1,310-328).
cgggagaaaaggtagctat

SEQ ID NO: 504016 - DNA, 19 bp, Mus musculus
  siRNA target sequence for Hunk (NM_015755.1,332-350).
ggtcatcgataagaaaaga

SEQ ID NO: 504017 - DNA, 19 bp, Mus musculus
  siRNA target sequence for Hunk (NM_015755.1,360-378).
gacacctacgtcaccaaaa

SEQ ID NO: 504018 - DNA, 19 bp, Mus musculus
  siRNA target sequence for Hunk (NM_015755.1,364-382).
cctacgtcaccaaaaacct

SEQ ID NO: 504019 - DNA, 19 bp, Mus musculus
  siRNA target sequence for Hunk (NM_015755.1,553-571).
gatacatccggcaactcat

SEQ ID NO: 504020 - DNA, 19 bp, Mus musculus
  siRNA target sequence for Hunk (NM_015755.1,636-654).
ctactagatgaagacaata

SEQ ID NO: 504021 - DNA, 19 bp, Mus musculus
  siRNA target sequence for Hunk (NM_015755.1,688-706).
gtgcagggatcctaggtta

SEQ ID NO: 504022 - DNA, 19 bp, Mus musculus
  siRNA target sequence for Hunk (NM_015755.1,799-817).
ggtcaataggcgtgaacat

SEQ ID NO: 504023 - DNA, 19 bp, Mus musculus
  siRNA target sequence for Hunk (NM_015755.1,802-820).
caataggcgtgaacatgta

SEQ ID NO: 504024 - DNA, 19 bp, Mus musculus
  siRNA target sequence for Hunk (NM_015755.1,833-851).
ggggaccctacctttcact

SEQ ID NO: 504025 - DNA, 19 bp, Mus musculus
  siRNA target sequence for Hunk (NM_015755.1,973-991).
ctgtgaagaggccgaatat

SEQ ID NO: 504026 - DNA, 19 bp, Mus musculus
  siRNA target sequence for Hunk (NM_015755.1,1016-1034).
gttgaatgagaattacact

SEQ ID NO: 504027 - DNA, 19 bp, Mus musculus
  siRNA target sequence for Hunk (NM_015755.1,1176-1194).
cacatcctggccatctact

SEQ ID NO: 504028 - DNA, 19 bp, Mus musculus
  siRNA target sequence for Hunk (NM_015755.1,1248-1266).
gatagcatctgctacaaga

SEQ ID NO: 504029 - DNA, 19 bp, Mus musculus
  siRNA target sequence for Hunk (NM_015755.1,1330-1348).
cctggacgagggactttga

SEQ ID NO: 504030 - DNA, 19 bp, Mus musculus
  siRNA target sequence for Hunk (NM_015755.1,1333-1351).
ggacgagggactttgaatt

SEQ ID NO: 504031 - DNA, 19 bp, Mus musculus
  siRNA target sequence for Hunk (NM_015755.1,1336-1354).
cgagggactttgaattcca

SEQ ID NO: 504032 - DNA, 19 bp, Mus musculus
  siRNA target sequence for Hunk (NM_015755.1,1352-1370).
ccatgctgtgcaggataaa

SEQ ID NO: 504033 - DNA, 19 bp, Mus musculus
  siRNA target sequence for Hunk (NM_015755.1,1411-1429).
gtccgttttccaagaagtt

SEQ ID NO: 504034 - DNA, 19 bp, Mus musculus
  siRNA target sequence for Hunk (NM_015755.1,1436-1454).
gaatctgccttctcacaaa

SEQ ID NO: 504035 - DNA, 19 bp, Mus musculus
  siRNA target sequence for Hunk (NM_015755.1,1528-1546).
caggcttccccgacaaaga

SEQ ID NO: 504036 - DNA, 19 bp, Mus musculus
  siRNA target sequence for Hunk (NM_015755.1,1530-1548).
ggcttccccgacaaagatt

SEQ ID NO: 504037 - DNA, 19 bp, Mus musculus
  siRNA target sequence for Hunk (NM_015755.1,1550-1568).
cttcgtctgccgcaatctt

SEQ ID NO: 504038 - DNA, 19 bp, Mus musculus
  siRNA target sequence for Hunk (NM_015755.1,1560-1578).
cgcaatcttttccgaaaaa

SEQ ID NO: 504039 - DNA, 19 bp, Mus musculus
  siRNA target sequence for Hunk (NM_015755.1,1639-1657).
ggacaccaaggattgtaaa

SEQ ID NO: 504040 - DNA, 19 bp, Mus musculus
  siRNA target sequence for Hunk (NM_015755.1,1642-1660).
caccaaggattgtaaagaa

SEQ ID NO: 504041 - DNA, 19 bp, Mus musculus
  siRNA target sequence for Hunk (NM_015755.1,1786-1804).
cttctcaccattataggat

SEQ ID NO: 504042 - DNA, 19 bp, Mus musculus
  siRNA target sequence for Hunk (NM_015755.1,1823-1841).
cctggctcgtaggaattct

SEQ ID NO: 504043 - DNA, 19 bp, Mus musculus
  siRNA target sequence for Hunk (NM_015755.1,1824-1842).
ctggctcgtaggaattcta

SEQ ID NO: 504044 - DNA, 19 bp, Mus musculus
  siRNA target sequence for Hunk (NM_015755.1,1976-1994).
gcctcccgttcccagtaat

SEQ ID NO: 504045 - DNA, 19 bp, Mus musculus
  siRNA target sequence for Ick (NM_019987.1,292-310).
ctggggagaagcattgagt

SEQ ID NO: 504046 - DNA, 19 bp, Mus musculus
  siRNA target sequence for Ick (NM_019987.1,375-393).
ccttcgggaggttaagtct

SEQ ID NO: 504047 - DNA, 19 bp, Mus musculus
  siRNA target sequence for Ick (NM_019987.1,376-394).
cttcgggaggttaagtctt

SEQ ID NO: 504048 - DNA, 19 bp, Mus musculus
  siRNA target sequence for Ick (NM_019987.1,390-408).
gtctttaaagaagcttaat

SEQ ID NO: 504049 - DNA, 19 bp, Mus musculus
  siRNA target sequence for Ick (NM_019987.1,409-427).
catgccaatatcgtaaagt

SEQ ID NO: 504050 - DNA, 19 bp, Mus musculus
  siRNA target sequence for Ick (NM_019987.1,412-430).
gccaatatcgtaaagttaa

SEQ ID NO: 504051 - DNA, 19 bp, Mus musculus
  siRNA target sequence for Ick (NM_019987.1,413-431).
ccaatatcgtaaagttaaa

SEQ ID NO: 504052 - DNA, 19 bp, Mus musculus
  siRNA target sequence for Ick (NM_019987.1,445-463).
gaaaacgaccatctttact

SEQ ID NO: 504053 - DNA, 19 bp, Mus musculus
  siRNA target sequence for Ick (NM_019987.1,527-545).
cagagtctgctataaggaa

SEQ ID NO: 504054 - DNA, 19 bp, Mus musculus
  siRNA target sequence for Ick (NM_019987.1,529-547).
gagtctgctataaggaata

SEQ ID NO: 504055 - DNA, 19 bp, Mus musculus
  siRNA target sequence for Ick (NM_019987.1,531-549).
gtctgctataaggaatata

SEQ ID NO: 504056 - DNA, 19 bp, Mus musculus
  siRNA target sequence for Ick (NM_019987.1,533-551).
ctgctataaggaatataat

SEQ ID NO: 504057 - DNA, 19 bp, Mus musculus
  siRNA target sequence for Ick (NM_019987.1,569-587).
gactggcattcattcacaa

SEQ ID NO: 504058 - DNA, 19 bp, Mus musculus
  siRNA target sequence for Ick (NM_019987.1,636-654).
gggaccagaacttgtgaaa

SEQ ID NO: 504059 - DNA, 19 bp, Mus musculus
  siRNA target sequence for Ick (NM_019987.1,697-715).
ccgtacacagactatgtgt

SEQ ID NO: 504060 - DNA, 19 bp, Mus musculus
  siRNA target sequence for Ick (NM_019987.1,842-860).
ccagtgaaattgacacaat

SEQ ID NO: 504061 - DNA, 19 bp, Mus musculus
  siRNA target sequence for Ick (NM_019987.1,952-970).
cagtgcatacccaataact

SEQ ID NO: 504062 - DNA, 19 bp, Mus musculus
  siRNA target sequence for Ick (NM_019987.1,954-972).
gtgcatacccaataactta

SEQ ID NO: 504063 - DNA, 19 bp, Mus musculus
  siRNA target sequence for Ick (NM_019987.1,956-974).
gcatacccaataacttaaa

SEQ ID NO: 504064 - DNA, 19 bp, Mus musculus
  siRNA target sequence for Ick (NM_019987.1,1058-1076).
ctagtcaggctcttcgata

SEQ ID NO: 504065 - DNA, 19 bp, Mus musculus
  siRNA target sequence for Ick (NM_019987.1,1067-1085).
ctcttcgatatccttactt

SEQ ID NO: 504066 - DNA, 19 bp, Mus musculus
  siRNA target sequence for Ick (NM_019987.1,1157-1175).
caggccctcctccttacat

SEQ ID NO: 504067 - DNA, 19 bp, Mus musculus
  siRNA target sequence for Ick (NM_019987.1,1160-1178).
gccctcctccttacatcaa

SEQ ID NO: 504068 - DNA, 19 bp, Mus musculus
  siRNA target sequence for Ick (NM_019987.1,1209-1227).
ggcatatacgctgatttct

SEQ ID NO: 504069 - DNA, 19 bp, Mus musculus
  siRNA target sequence for Ick (NM_019987.1,1210-1228).
gcatatacgctgatttctt

SEQ ID NO: 504070 - DNA, 19 bp, Mus musculus
  siRNA target sequence for Ick (NM_019987.1,1348-1366).
ccatccctccacaataaga

SEQ ID NO: 504071 - DNA, 19 bp, Mus musculus
  siRNA target sequence for Ick (NM_019987.1,1349-1367).
catccctccacaataagaa

SEQ ID NO: 504072 - DNA, 19 bp, Mus musculus
  siRNA target sequence for Ick (NM_019987.1,1352-1370).
ccctccacaataagaatct

SEQ ID NO: 504073 - DNA, 19 bp, Mus musculus
  siRNA target sequence for Ick (NM_019987.1,1478-1496).
gggccgacttggatgactt

SEQ ID NO: 504074 - DNA, 19 bp, Mus musculus
  siRNA target sequence for Ick (NM_019987.1,1479-1497).
ggccgacttggatgactta

SEQ ID NO: 504075 - DNA, 19 bp, Mus musculus
  siRNA target sequence for Ick (NM_019987.1,1481-1499).
ccgacttggatgacttaga

SEQ ID NO: 504076 - DNA, 19 bp, Mus musculus
  siRNA target sequence for Ick (NM_019987.1,1483-1501).
gacttggatgacttagact

SEQ ID NO: 504077 - DNA, 19 bp, Mus musculus
  siRNA target sequence for Ick (NM_019987.1,1509-1527).
ctctctcaccaggatagat

SEQ ID NO: 504078 - DNA, 19 bp, Mus musculus
  siRNA target sequence for Ick (NM_019987.1,1515-1533).
caccaggatagatgtaaaa

SEQ ID NO: 504079 - DNA, 19 bp, Mus musculus
  siRNA target sequence for Ick (NM_019987.1,1563-1581).
ctgcaggtttgaaagtgtt

SEQ ID NO: 504080 - DNA, 19 bp, Mus musculus
  siRNA target sequence for Ick (NM_019987.1,1705-1723).
cgctacttgcctggaataa

SEQ ID NO: 504081 - DNA, 19 bp, Mus musculus
  siRNA target sequence for Ick (NM_019987.1,1706-1724).
gctacttgcctggaataaa

SEQ ID NO: 504082 - DNA, 19 bp, Mus musculus
  siRNA target sequence for Ick (NM_019987.1,1758-1776).
ggactttcttccatcaaat

SEQ ID NO: 504083 - DNA, 19 bp, Mus musculus
  siRNA target sequence for Ick (NM_019987.1,1791-1809).
cggcttgtctggaaaatct

SEQ ID NO: 504084 - DNA, 19 bp, Mus musculus
  siRNA target sequence for Ick (NM_019987.1,1794-1812).
cttgtctggaaaatcttca

SEQ ID NO: 504085 - DNA, 19 bp, Mus musculus
  siRNA target sequence for Ick (NM_019987.1,2005-2023).
gggaggcctttctttcaca

SEQ ID NO: 504086 - DNA, 19 bp, Mus musculus
  siRNA target sequence for Idh3g (NM_008323.1,202-220).
cggcatacagtgactatga

SEQ ID NO: 504087 - DNA, 19 bp, Mus musculus
  siRNA target sequence for Idh3g (NM_008323.1,414-432).
gccaccatcccacaaatct

SEQ ID NO: 504088 - DNA, 19 bp, Mus musculus
  siRNA target sequence for Idh3g (NM_008323.1,422-440).
cccacaaatctcgaaacaa

SEQ ID NO: 504089 - DNA, 19 bp, Mus musculus
  siRNA target sequence for Idh3g (NM_008323.1,470-488).
ccaacgtcatccactgtaa

SEQ ID NO: 504090 - DNA, 19 bp, Mus musculus
  siRNA target sequence for Idh3g (NM_008323.1,522-540).
catagacatcctcattgta

SEQ ID NO: 504091 - DNA, 19 bp, Mus musculus
  siRNA target sequence for Idh3g (NM_008323.1,532-550).
ctcattgtacgggaaaaca

SEQ ID NO: 504092 - DNA, 19 bp, Mus musculus
  siRNA target sequence for Idh3g (NM_008323.1,598-616).
gtggagagcttgaagatta

SEQ ID NO: 504093 - DNA, 19 bp, Mus musculus
  siRNA target sequence for Idh3g (NM_008323.1,941-959).
gccatgtgtatgcagtatt

SEQ ID NO: 504094 - DNA, 19 bp, Mus musculus
  siRNA target sequence for Idh3g (NM_008323.1,983-1001).
gcaaaagtattgccaataa

SEQ ID NO: 504095 - DNA, 19 bp, Mus musculus
  siRNA target sequence for Idh3g (NM_008323.1,989-1007).
gtattgccaataagaacat

SEQ ID NO: 504096 - DNA, 19 bp, Mus musculus
  siRNA target sequence for Idh3g (NM_008323.1,994-1012).
gccaataagaacattgcta

SEQ ID NO: 504097 - DNA, 19 bp, Mus musculus
  siRNA target sequence for Idh3g (NM_008323.1,995-1013).
ccaataagaacattgctaa

SEQ ID NO: 504098 - DNA, 19 bp, Mus musculus
  siRNA target sequence for Idh3g (NM_008323.1,1087-1105).
cgcaaagctgtcttagcat

SEQ ID NO: 504099 - DNA, 19 bp, Mus musculus
  siRNA target sequence for Idh3g (NM_008323.1,1125-1143).
gcataccccagatattgga

SEQ ID NO: 504100 - DNA, 19 bp, Mus musculus
  siRNA target sequence for Idh3g (NM_008323.1,1183-1201).
cgtcatatccgcatcatta

SEQ ID NO: 504101 - DNA, 19 bp, Mus musculus
  siRNA target sequence for Idh3g (NM_008323.1,1184-1202).
gtcatatccgcatcattaa

SEQ ID NO: 504102 - DNA, 19 bp, Mus musculus
  siRNA target sequence for Ifld2 (NM_144554.1,224-242).
gaaaccgttggagtttgat

SEQ ID NO: 504103 - DNA, 19 bp, Mus musculus
  siRNA target sequence for Ifld2 (NM_144554.1,256-274).
ccaagtgtccagtcctaaa

SEQ ID NO: 504104 - DNA, 19 bp, Mus musculus
  siRNA target sequence for Ifld2 (NM_144554.1,260-278).
gtgtccagtcctaaaacga

SEQ ID NO: 504105 - DNA, 19 bp, Mus musculus
  siRNA target sequence for Ifld2 (NM_144554.1,373-391).
ctcgactggggccttatat

SEQ ID NO: 504106 - DNA, 19 bp, Mus musculus
  siRNA target sequence for Ifld2 (NM_144554.1,376-394).
gactggggccttatatcct

SEQ ID NO: 504107 - DNA, 19 bp, Mus musculus
  siRNA target sequence for Ifld2 (NM_144554.1,491-509).
ggcggtgctggcaccttat

SEQ ID NO: 504108 - DNA, 19 bp, Mus musculus
  siRNA target sequence for Ifld2 (NM_144554.1,565-583).
ctcggctcctttacatctt

SEQ ID NO: 504109 - DNA, 19 bp, Mus musculus
  siRNA target sequence for Ifld2 (NM_144554.1,848-866).
ctacgtgggaccagagata

SEQ ID NO: 504110 - DNA, 19 bp, Mus musculus
  siRNA target sequence for Ifld2 (NM_144554.1,852-870).
gtgggaccagagatactca

SEQ ID NO: 504111 - DNA, 19 bp, Mus musculus
  siRNA target sequence for Igf1r (NM_010513.1,77-95).
ggccgacgagtggagaaat

SEQ ID NO: 504112 - DNA, 19 bp, Mus musculus
  siRNA target sequence for Igf1r (NM_010513.1,79-97).
ccgacgagtggagaaatct

SEQ ID NO: 504113 - DNA, 19 bp, Mus musculus
  siRNA target sequence for Igf1r (NM_010513.1,81-99).
gacgagtggagaaatctgt

SEQ ID NO: 504114 - DNA, 19 bp, Mus musculus
  siRNA target sequence for Igf1r (NM_010513.1,236-254).
ccgtcatcactgagtactt

SEQ ID NO: 504115 - DNA, 19 bp, Mus musculus
  siRNA target sequence for Igf1r (NM_010513.1,326-344).
ggaaactcttctacaacta

SEQ ID NO: 504116 - DNA, 19 bp, Mus musculus
  siRNA target sequence for Igf1r (NM_010513.1,366-384).
gaccaatctcaaggatatt

SEQ ID NO: 504117 - DNA, 19 bp, Mus musculus
  siRNA target sequence for Igf1r (NM_010513.1,375-393).
caaggatattgggctttat

SEQ ID NO: 504118 - DNA, 19 bp, Mus musculus
  siRNA target sequence for Igf1r (NM_010513.1,484-502).
gatgcggtgtccaataact

SEQ ID NO: 504119 - DNA, 19 bp, Mus musculus
  siRNA target sequence for Igf1r (NM_010513.1,487-505).
gcggtgtccaataactaca

SEQ ID NO: 504120 - DNA, 19 bp, Mus musculus
  siRNA target sequence for Igf1r (NM_010513.1,488-506).
cggtgtccaataactacat

SEQ ID NO: 504121 - DNA, 19 bp, Mus musculus
  siRNA target sequence for Igf1r (NM_010513.1,489-507).
ggtgtccaataactacatt

SEQ ID NO: 504122 - DNA, 19 bp, Mus musculus
  siRNA target sequence for Igf1r (NM_010513.1,623-641).
caaatcgctgccagaaaat

SEQ ID NO: 504123 - DNA, 19 bp, Mus musculus
  siRNA target sequence for Igf1r (NM_010513.1,665-683).
gagcctgcaccgagaacaa

SEQ ID NO: 504124 - DNA, 19 bp, Mus musculus
  siRNA target sequence for Igf1r (NM_010513.1,748-766).
gcctgcagacactactact

SEQ ID NO: 504125 - DNA, 19 bp, Mus musculus
  siRNA target sequence for Igf1r (NM_010513.1,749-767).
cctgcagacactactacta

SEQ ID NO: 504126 - DNA, 19 bp, Mus musculus
  siRNA target sequence for Igf1r (NM_010513.1,874-892).
gactcggatggcttcgtta

SEQ ID NO: 504127 - DNA, 19 bp, Mus musculus
  siRNA target sequence for Igf1r (NM_010513.1,878-896).
cggatggcttcgttatcca

SEQ ID NO: 504128 - DNA, 19 bp, Mus musculus
  siRNA target sequence for Igf1r (NM_010513.1,947-965).
cccagagcatgtactgtat

SEQ ID NO: 504129 - DNA, 19 bp, Mus musculus
  siRNA target sequence for Igf1r (NM_010513.1,995-1013).
gcggcgatgaagagaagaa

SEQ ID NO: 504130 - DNA, 19 bp, Mus musculus
  siRNA target sequence for Igf1r (NM_010513.1,1076-1094).
gcaatctgcttattaacat

SEQ ID NO: 504131 - DNA, 19 bp, Mus musculus
  siRNA target sequence for Igf1r (NM_010513.1,1095-1113).
ccggagaggcaataacatt

SEQ ID NO: 504132 - DNA, 19 bp, Mus musculus
  siRNA target sequence for Igf1r (NM_010513.1,1115-1133).
cctcggagttggagaactt

SEQ ID NO: 504133 - DNA, 19 bp, Mus musculus
  siRNA target sequence for Igf1r (NM_010513.1,1167-1185).
gaagatccgccattctcat

SEQ ID NO: 504134 - DNA, 19 bp, Mus musculus
  siRNA target sequence for Igf1r (NM_010513.1,1212-1230).
gaaccttcgtctcatctta

SEQ ID NO: 504135 - DNA, 19 bp, Mus musculus
  siRNA target sequence for Igf1r (NM_010513.1,1240-1258).
cagctggaagggaactact

SEQ ID NO: 504136 - DNA, 19 bp, Mus musculus
  siRNA target sequence for Igf1r (NM_010513.1,1259-1277).
ccttctatgtcctagacaa

SEQ ID NO: 504137 - DNA, 19 bp, Mus musculus
  siRNA target sequence for Igf1r (NM_010513.1,1322-1340).
ccgtcaggtccggaaagat

SEQ ID NO: 504138 - DNA, 19 bp, Mus musculus
  siRNA target sequence for Igf1r (NM_010513.1,1362-1380).
gctgtgtgtctccgaaatt

SEQ ID NO: 504139 - DNA, 19 bp, Mus musculus
  siRNA target sequence for Igf1r (NM_010513.1,1363-1381).
ctgtgtgtctccgaaattt

SEQ ID NO: 504140 - DNA, 19 bp, Mus musculus
  siRNA target sequence for Igf1r (NM_010513.1,1502-1520).
cctggaagaaccgaatcat

SEQ ID NO: 504141 - DNA, 19 bp, Mus musculus
  siRNA target sequence for Igf1r (NM_010513.1,1505-1523).
ggaagaaccgaatcatcat

SEQ ID NO: 504142 - DNA, 19 bp, Mus musculus
  siRNA target sequence for Igf1r (NM_010513.1,1506-1524).
gaagaaccgaatcatcata

SEQ ID NO: 504143 - DNA, 19 bp, Mus musculus
  siRNA target sequence for Igf1r (NM_010513.1,1547-1565).
cggactaccgggatctcat

SEQ ID NO: 504144 - DNA, 19 bp, Mus musculus
  siRNA target sequence for Igf1r (NM_010513.1,1581-1599).
ctacaaggaggcaccattt

SEQ ID NO: 504145 - DNA, 19 bp, Mus musculus
  siRNA target sequence for Igf1r (NM_010513.1,1590-1608).
ggcaccatttaaaaacgtt

SEQ ID NO: 504146 - DNA, 19 bp, Mus musculus
  siRNA target sequence for Igf1r (NM_010513.1,1591-1609).
gcaccatttaaaaacgtta

SEQ ID NO: 504147 - DNA, 19 bp, Mus musculus
  siRNA target sequence for Igf1r (NM_010513.1,1649-1667).
ggaacatggtggatgtaga

SEQ ID NO: 504148 - DNA, 19 bp, Mus musculus
  siRNA target sequence for Igf1r (NM_010513.1,1686-1704).
gggcgagcctggcatttta

SEQ ID NO: 504149 - DNA, 19 bp, Mus musculus
  siRNA target sequence for Igf1r (NM_010513.1,1688-1706).
gcgagcctggcattttact

SEQ ID NO: 504150 - DNA, 19 bp, Mus musculus
  siRNA target sequence for Igf1r (NM_010513.1,1725-1743).
gacccagtatgctgtctat

SEQ ID NO: 504151 - DNA, 19 bp, Mus musculus
  siRNA target sequence for Igf1r (NM_010513.1,1729-1747).
cagtatgctgtctatgtca

SEQ ID NO: 504152 - DNA, 19 bp, Mus musculus
  siRNA target sequence for Igf1r (NM_010513.1,1790-1808).
gggccaaaagtgaaatctt

SEQ ID NO: 504153 - DNA, 19 bp, Mus musculus
  siRNA target sequence for Igf1r (NM_010513.1,1792-1810).
gccaaaagtgaaatcttgt

SEQ ID NO: 504154 - DNA, 19 bp, Mus musculus
  siRNA target sequence for Igf1r (NM_010513.1,1852-1870).
gtcctctcagcatcaaact

SEQ ID NO: 504155 - DNA, 19 bp, Mus musculus
  siRNA target sequence for Igf1r (NM_010513.1,1854-1872).
cctctcagcatcaaactct

SEQ ID NO: 504156 - DNA, 19 bp, Mus musculus
  siRNA target sequence for Igf1r (NM_010513.1,1909-1927).
ctgcccaatggtaacttga

SEQ ID NO: 504157 - DNA, 19 bp, Mus musculus
  siRNA target sequence for Igf1r (NM_010513.1,1913-1931).
ccaatggtaacttgagtta

SEQ ID NO: 504158 - DNA, 19 bp, Mus musculus
  siRNA target sequence for Igf1r (NM_010513.1,1918-1936).
ggtaacttgagttactaca

SEQ ID NO: 504159 - DNA, 19 bp, Mus musculus
  siRNA target sequence for Igf1r (NM_010513.1,1919-1937).
gtaacttgagttactacat

SEQ ID NO: 504160 - DNA, 19 bp, Mus musculus
  siRNA target sequence for Igf1r (NM_010513.1,2100-2118).
ctgcgcttgccctaaaact

SEQ ID NO: 504161 - DNA, 19 bp, Mus musculus
  siRNA target sequence for Igf1r (NM_010513.1,2102-2120).
gcgcttgccctaaaactga

SEQ ID NO: 504162 - DNA, 19 bp, Mus musculus
  siRNA target sequence for Igf1r (NM_010513.1,2103-2121).
cgcttgccctaaaactgaa

SEQ ID NO: 504163 - DNA, 19 bp, Mus musculus
  siRNA target sequence for Igf1r (NM_010513.1,2150-2168).
ctgagtaccgtaaagtctt

SEQ ID NO: 504164 - DNA, 19 bp, Mus musculus
  siRNA target sequence for Igf1r (NM_010513.1,2157-2175).
ccgtaaagtctttgagaat

SEQ ID NO: 504165 - DNA, 19 bp, Mus musculus
  siRNA target sequence for Igf1r (NM_010513.1,2277-2295).
ggtagctgacacctacaat

SEQ ID NO: 504166 - DNA, 19 bp, Mus musculus
  siRNA target sequence for Igf1r (NM_010513.1,2278-2296).
gtagctgacacctacaata

SEQ ID NO: 504167 - DNA, 19 bp, Mus musculus
  siRNA target sequence for Igf1r (NM_010513.1,2281-2299).
gctgacacctacaatatca

SEQ ID NO: 504168 - DNA, 19 bp, Mus musculus
  siRNA target sequence for Igf1r (NM_010513.1,2323-2341).
gagtaccctttctttgaga

SEQ ID NO: 504169 - DNA, 19 bp, Mus musculus
  siRNA target sequence for Igf1r (NM_010513.1,2393-2411).
ctctgtaccgcatcgatat

SEQ ID NO: 504170 - DNA, 19 bp, Mus musculus
  siRNA target sequence for Igf1r (NM_010513.1,2524-2542).
gagccaagacccgaaaact

SEQ ID NO: 504171 - DNA, 19 bp, Mus musculus
  siRNA target sequence for Igf1r (NM_010513.1,2533-2551).
cccgaaaactccatctttt

SEQ ID NO: 504172 - DNA, 19 bp, Mus musculus
  siRNA target sequence for Igf1r (NM_010513.1,2534-2552).
ccgaaaactccatcttttt

SEQ ID NO: 504173 - DNA, 19 bp, Mus musculus
  siRNA target sequence for Igf1r (NM_010513.1,2535-2553).
cgaaaactccatcttttta

SEQ ID NO: 504174 - DNA, 19 bp, Mus musculus
  siRNA target sequence for Igf1r (NM_010513.1,2575-2593).
cccaacggattgatcctaa

SEQ ID NO: 504175 - DNA, 19 bp, Mus musculus
  siRNA target sequence for Igf1r (NM_010513.1,2580-2598).
cggattgatcctaatgtat

SEQ ID NO: 504176 - DNA, 19 bp, Mus musculus
  siRNA target sequence for Igf1r (NM_010513.1,2586-2604).
gatcctaatgtatgaaatt

SEQ ID NO: 504177 - DNA, 19 bp, Mus musculus
  siRNA target sequence for Igf1r (NM_010513.1,2675-2693).
ccaaactcaaccgtctaaa

SEQ ID NO: 504178 - DNA, 19 bp, Mus musculus
  siRNA target sequence for Igf1r (NM_010513.1,2779-2797).
gccaaaacgacgtatgaga

SEQ ID NO: 504179 - DNA, 19 bp, Mus musculus
  siRNA target sequence for Igf1r (NM_010513.1,2799-2817).
cttcatgcatctgatcatt

SEQ ID NO: 504180 - DNA, 19 bp, Mus musculus
  siRNA target sequence for Igf1r (NM_010513.1,2857-2875).
gttatcatgctgtatgtct

SEQ ID NO: 504181 - DNA, 19 bp, Mus musculus
  siRNA target sequence for Igf1r (NM_010513.1,2872-2890).
gtcttccatagaaagagaa

SEQ ID NO: 504182 - DNA, 19 bp, Mus musculus
  siRNA target sequence for Igf1r (NM_010513.1,2959-2977).
gtgtacgtgcctgatgaat

SEQ ID NO: 504183 - DNA, 19 bp, Mus musculus
  siRNA target sequence for Igf1r (NM_010513.1,3095-3113).
ccatcaagacggtaaacga

SEQ ID NO: 504184 - DNA, 19 bp, Mus musculus
  siRNA target sequence for Igf1r (NM_010513.1,3130-3148).
gaaagaatcgagtttctca

SEQ ID NO: 504185 - DNA, 19 bp, Mus musculus
  siRNA target sequence for Igf1r (NM_010513.1,3160-3178).
gtgatgaaggagttcaatt

SEQ ID NO: 504186 - DNA, 19 bp, Mus musculus
  siRNA target sequence for Igf1r (NM_010513.1,3234-3252).
catcatggaactaatgaca

SEQ ID NO: 504187 - DNA, 19 bp, Mus musculus
  siRNA target sequence for Igf1r (NM_010513.1,3249-3267).
gacacgcggtgatctcaaa

SEQ ID NO: 504188 - DNA, 19 bp, Mus musculus
  siRNA target sequence for Igf1r (NM_010513.1,3253-3271).
cgcggtgatctcaaaagtt

SEQ ID NO: 504189 - DNA, 19 bp, Mus musculus
  siRNA target sequence for Igf1r (NM_010513.1,3254-3272).
gcggtgatctcaaaagtta

SEQ ID NO: 504190 - DNA, 19 bp, Mus musculus
  siRNA target sequence for Igf1r (NM_010513.1,3255-3273).
cggtgatctcaaaagttat

SEQ ID NO: 504191 - DNA, 19 bp, Mus musculus
  siRNA target sequence for Igf1r (NM_010513.1,3316-3334).
ctcattcctccgagcttaa

SEQ ID NO: 504192 - DNA, 19 bp, Mus musculus
  siRNA target sequence for Igf1r (NM_010513.1,3325-3343).
ccgagcttaagcaagatga

SEQ ID NO: 504193 - DNA, 19 bp, Mus musculus
  siRNA target sequence for Igf1r (NM_010513.1,3326-3344).
cgagcttaagcaagatgat

SEQ ID NO: 504194 - DNA, 19 bp, Mus musculus
  siRNA target sequence for Igf1r (NM_010513.1,3428-3446).
gcatggtagccgaagattt

SEQ ID NO: 504195 - DNA, 19 bp, Mus musculus
  siRNA target sequence for Igf1r (NM_010513.1,3432-3450).
ggtagccgaagatttcaca

SEQ ID NO: 504196 - DNA, 19 bp, Mus musculus
  siRNA target sequence for Igf1r (NM_010513.1,3470-3488).
gtatgacacgagacatcta

SEQ ID NO: 504197 - DNA, 19 bp, Mus musculus
  siRNA target sequence for Igf1r (NM_010513.1,3654-3672).
gtccaacgagcaagttctt

SEQ ID NO: 504198 - DNA, 19 bp, Mus musculus
  siRNA target sequence for Igf1r (NM_010513.1,3707-3725).
cggacaactgccctgatat

SEQ ID NO: 504199 - DNA, 19 bp, Mus musculus
  siRNA target sequence for Igf1r (NM_010513.1,3719-3737).
ctgatatgctgtttgaact

SEQ ID NO: 504200 - DNA, 19 bp, Mus musculus
  siRNA target sequence for Igf1r (NM_010513.1,3721-3739).
gatatgctgtttgaactta

SEQ ID NO: 504201 - DNA, 19 bp, Mus musculus
  siRNA target sequence for Ikbkb (NM_010546.1,244-262).
cagatcgccatcaagcaat

SEQ ID NO: 504202 - DNA, 19 bp, Mus musculus
  siRNA target sequence for Ikbkb (NM_010546.1,430-448).
ggagatctccgaagatact

SEQ ID NO: 504203 - DNA, 19 bp, Mus musculus
  siRNA target sequence for Ikbkb (NM_010546.1,510-528).
catcgcatcggctcttaga

SEQ ID NO: 504204 - DNA, 19 bp, Mus musculus
  siRNA target sequence for Ikbkb (NM_010546.1,844-862).
gaagtggacatcgttgtta

SEQ ID NO: 504205 - DNA, 19 bp, Mus musculus
  siRNA target sequence for Ikbkb (NM_010546.1,849-867).
ggacatcgttgttagtgaa

SEQ ID NO: 504206 - DNA, 19 bp, Mus musculus
  siRNA target sequence for Ikbkb (NM_010546.1,873-891).
gaatggagcagtgaagttt

SEQ ID NO: 504207 - DNA, 19 bp, Mus musculus
  siRNA target sequence for Ikbkb (NM_010546.1,899-917).
cgctacccttccccaataa

SEQ ID NO: 504208 - DNA, 19 bp, Mus musculus
  siRNA target sequence for Ikbkb (NM_010546.1,900-918).
gctacccttccccaataat

SEQ ID NO: 504209 - DNA, 19 bp, Mus musculus
  siRNA target sequence for Ikbkb (NM_010546.1,1117-1135).
gagagtctgcagagcttaa

SEQ ID NO: 504210 - DNA, 19 bp, Mus musculus
  siRNA target sequence for Ikbkb (NM_010546.1,1268-1286).
cgttggacatggatcttgt

SEQ ID NO: 504211 - DNA, 19 bp, Mus musculus
  siRNA target sequence for Ikbkb (NM_010546.1,1269-1287).
gttggacatggatcttgtt

SEQ ID NO: 504212 - DNA, 19 bp, Mus musculus
  siRNA target sequence for Ikbkb (NM_010546.1,1477-1495).
cagcgagcagccatgatga

SEQ ID NO: 504213 - DNA, 19 bp, Mus musculus
  siRNA target sequence for Ikbkb (NM_010546.1,1514-1532).
gctgcctctctaagatgaa

SEQ ID NO: 504214 - DNA, 19 bp, Mus musculus
  siRNA target sequence for Ikbkb (NM_010546.1,1740-1758).
ggcactgcagactgacatt

SEQ ID NO: 504215 - DNA, 19 bp, Mus musculus
  siRNA target sequence for Ikbkb (NM_010546.1,1742-1760).
cactgcagactgacattgt

SEQ ID NO: 504216 - DNA, 19 bp, Mus musculus
  siRNA target sequence for Ikbkb (NM_010546.1,1935-1953).
gaaagttcgggtgatttat

SEQ ID NO: 504217 - DNA, 19 bp, Mus musculus
  siRNA target sequence for Ikbkb (NM_010546.1,1964-1982).
gtaagaccgtggtttgtaa

SEQ ID NO: 504218 - DNA, 19 bp, Mus musculus
  siRNA target sequence for Ikbkb (NM_010546.1,2017-2035).
gaggtagtgagccttatga

SEQ ID NO: 504219 - DNA, 19 bp, Mus musculus
  siRNA target sequence for Ikbkb (NM_010546.1,2173-2191).
caccctggtcagctaatgt

SEQ ID NO: 504220 - DNA, 19 bp, Mus musculus
  siRNA target sequence for Ikbkb (NM_010546.1,2269-2287).
ctctgctcccggctagaaa

SEQ ID NO: 504221 - DNA, 19 bp, Mus musculus
  siRNA target sequence for Ikbke (NM_019777.2,366-384).
ctacctgtggcatactgat

SEQ ID NO: 504222 - DNA, 19 bp, Mus musculus
  siRNA target sequence for Ikbke (NM_019777.2,454-472).
gctgtaaaggtcttcaact

SEQ ID NO: 504223 - DNA, 19 bp, Mus musculus
  siRNA target sequence for Ikbke (NM_019777.2,541-559).
cagaacatcgtgaagctat

SEQ ID NO: 504224 - DNA, 19 bp, Mus musculus
  siRNA target sequence for Ikbke (NM_019777.2,584-602).
gccggcagaaggtgctaat

SEQ ID NO: 504225 - DNA, 19 bp, Mus musculus
  siRNA target sequence for Ikbke (NM_019777.2,586-604).
cggcagaaggtgctaatca

SEQ ID NO: 504226 - DNA, 19 bp, Mus musculus
  siRNA target sequence for Ikbke (NM_019777.2,587-605).
ggcagaaggtgctaatcat

SEQ ID NO: 504227 - DNA, 19 bp, Mus musculus
  siRNA target sequence for Ikbke (NM_019777.2,657-675).
cacgttcgggctttctgaa

SEQ ID NO: 504228 - DNA, 19 bp, Mus musculus
  siRNA target sequence for Ikbke (NM_019777.2,790-808).
gaggggcagagcatctata

SEQ ID NO: 504229 - DNA, 19 bp, Mus musculus
  siRNA target sequence for Ikbke (NM_019777.2,794-812).
ggcagagcatctataagct

SEQ ID NO: 504230 - DNA, 19 bp, Mus musculus
  siRNA target sequence for Ikbke (NM_019777.2,833-851).
gcaagctggacgatgatga

SEQ ID NO: 504231 - DNA, 19 bp, Mus musculus
  siRNA target sequence for Ikbke (NM_019777.2,840-858).
ggacgatgatgagaagttt

SEQ ID NO: 504232 - DNA, 19 bp, Mus musculus
  siRNA target sequence for Ikbke (NM_019777.2,927-945).
ccagcaaaaggcatttggt

SEQ ID NO: 504233 - DNA, 19 bp, Mus musculus
  siRNA target sequence for Ikbke (NM_019777.2,1042-1060).
gagatcatgtacagaatca

SEQ ID NO: 504234 - DNA, 19 bp, Mus musculus
  siRNA target sequence for Ikbke (NM_019777.2,1245-1263).
cgcggagaccagtgacatt

SEQ ID NO: 504235 - DNA, 19 bp, Mus musculus
  siRNA target sequence for Ikbke (NM_019777.2,1247-1265).
cggagaccagtgacattct

SEQ ID NO: 504236 - DNA, 19 bp, Mus musculus
  siRNA target sequence for Ikbke (NM_019777.2,1304-1322).
ccgttttgcatcatgtcta

SEQ ID NO: 504237 - DNA, 19 bp, Mus musculus
  siRNA target sequence for Ikbke (NM_019777.2,1335-1353).
caacacgattgccatcttt

SEQ ID NO: 504238 - DNA, 19 bp, Mus musculus
  siRNA target sequence for Ikbke (NM_019777.2,1541-1559).
ctctggatgtcccaaagtt

SEQ ID NO: 504239 - DNA, 19 bp, Mus musculus
  siRNA target sequence for Ikbke (NM_019777.2,1573-1591).
gacctacaggccgattaca

SEQ ID NO: 504240 - DNA, 19 bp, Mus musculus
  siRNA target sequence for Ikbke (NM_019777.2,1668-1686).
gatgcttcgggggttacat

SEQ ID NO: 504241 - DNA, 19 bp, Mus musculus
  siRNA target sequence for Ikbke (NM_019777.2,1805-1823).
ctgacgtccaggaacgaaa

SEQ ID NO: 504242 - DNA, 19 bp, Mus musculus
  siRNA target sequence for Ikbke (NM_019777.2,1874-1892).
ctaaatgttcccacaatgt

SEQ ID NO: 504243 - DNA, 19 bp, Mus musculus
  siRNA target sequence for Ikbke (NM_019777.2,1941-1959).
gaaccgggaccagattcat

SEQ ID NO: 504244 - DNA, 19 bp, Mus musculus
  siRNA target sequence for Ikbke (NM_019777.2,1968-1986).
caaaagtatccagaagatt

SEQ ID NO: 504245 - DNA, 19 bp, Mus musculus
  siRNA target sequence for Ikbke (NM_019777.2,2048-2066).
cagggctcagctacaatga

SEQ ID NO: 504246 - DNA, 19 bp, Mus musculus
  siRNA target sequence for Ikbke (NM_019777.2,2077-2095).
cacaagctggataaggtaa

SEQ ID NO: 504247 - DNA, 19 bp, Mus musculus
  siRNA target sequence for Ikbke (NM_019777.2,2083-2101).
ctggataaggtaaatttca

SEQ ID NO: 504248 - DNA, 19 bp, Mus musculus
  siRNA target sequence for Ikbke (NM_019777.2,2085-2103).
ggataaggtaaatttcagt

SEQ ID NO: 504249 - DNA, 19 bp, Mus musculus
  siRNA target sequence for Ikbke (NM_019777.2,2397-2415).
catgcaggagctttgtaat

SEQ ID NO: 504250 - DNA, 19 bp, Mus musculus
  siRNA target sequence for Ikbke (NM_019777.2,2401-2419).
caggagctttgtaatgata

SEQ ID NO: 504251 - DNA, 19 bp, Mus musculus
  siRNA target sequence for Ikbke (NM_019777.2,2411-2429).
gtaatgatatgaagctatt

SEQ ID NO: 504252 - DNA, 19 bp, Mus musculus
  siRNA target sequence for Ikbke (NM_019777.2,2458-2476).
ctcatcgaacggttacata

SEQ ID NO: 504253 - DNA, 19 bp, Mus musculus
  siRNA target sequence for Ikbke (NM_019777.2,2460-2478).
catcgaacggttacataga

SEQ ID NO: 504254 - DNA, 19 bp, Mus musculus
  siRNA target sequence for Ikbke (NM_019777.2,2463-2481).
cgaacggttacatagagtt

SEQ ID NO: 504255 - DNA, 19 bp, Mus musculus
  siRNA target sequence for Il1r2 (NM_010555.2,110-128).
gttagtaactggagtttct

SEQ ID NO: 504256 - DNA, 19 bp, Mus musculus
  siRNA target sequence for Il1r2 (NM_010555.2,150-168).
gtgcacacaggaaaggttt

SEQ ID NO: 504257 - DNA, 19 bp, Mus musculus
  siRNA target sequence for Il1r2 (NM_010555.2,225-243).
cgtggcagagagttcaaat

SEQ ID NO: 504258 - DNA, 19 bp, Mus musculus
  siRNA target sequence for Il1r2 (NM_010555.2,388-406).
gggtgaagggtaacatact

SEQ ID NO: 504259 - DNA, 19 bp, Mus musculus
  siRNA target sequence for Il1r2 (NM_010555.2,489-507).
gtggaactcaaggtcttta

SEQ ID NO: 504260 - DNA, 19 bp, Mus musculus
  siRNA target sequence for Il1r2 (NM_010555.2,495-513).
ctcaaggtctttaagaata

SEQ ID NO: 504261 - DNA, 19 bp, Mus musculus
  siRNA target sequence for Il1r2 (NM_010555.2,497-515).
caaggtctttaagaatact

SEQ ID NO: 504262 - DNA, 19 bp, Mus musculus
  siRNA target sequence for Il1r2 (NM_010555.2,531-549).
catgtctcctacttgcaaa

SEQ ID NO: 504263 - DNA, 19 bp, Mus musculus
  siRNA target sequence for Il1r2 (NM_010555.2,560-578).
ctccaccaccgggttacta

SEQ ID NO: 504264 - DNA, 19 bp, Mus musculus
  siRNA target sequence for Il1r2 (NM_010555.2,562-580).
ccaccaccgggttactagt

SEQ ID NO: 504265 - DNA, 19 bp, Mus musculus
  siRNA target sequence for Il1r2 (NM_010555.2,622-640).
gaaagatacagtggtataa

SEQ ID NO: 504266 - DNA, 19 bp, Mus musculus
  siRNA target sequence for Il1r2 (NM_010555.2,657-675).
gataaaggcaataaggaat

SEQ ID NO: 504267 - DNA, 19 bp, Mus musculus
  siRNA target sequence for Il1r2 (NM_010555.2,690-708).
gaccccacacgcctattga

SEQ ID NO: 504268 - DNA, 19 bp, Mus musculus
  siRNA target sequence for Il1r2 (NM_010555.2,692-710).
ccccacacgcctattgata

SEQ ID NO: 504269 - DNA, 19 bp, Mus musculus
  siRNA target sequence for Il1r2 (NM_010555.2,697-715).
cacgcctattgatatccaa

SEQ ID NO: 504270 - DNA, 19 bp, Mus musculus
  siRNA target sequence for Il1r2 (NM_010555.2,743-761).
cagatgtgttatgacattt

SEQ ID NO: 504271 - DNA, 19 bp, Mus musculus
  siRNA target sequence for Il1r2 (NM_010555.2,748-766).
gtgttatgacatttaccta

SEQ ID NO: 504272 - DNA, 19 bp, Mus musculus
  siRNA target sequence for Il1r2 (NM_010555.2,954-972).
gctaacagcacgtttatct

SEQ ID NO: 504273 - DNA, 19 bp, Mus musculus
  siRNA target sequence for Il1r2 (NM_010555.2,1044-1062).
gtggaagtgtcgctgattt

SEQ ID NO: 504274 - DNA, 19 bp, Mus musculus
  siRNA target sequence for Il1r2 (NM_010555.2,1079-1097).
ggaggatctgcatacagat

SEQ ID NO: 504275 - DNA, 19 bp, Mus musculus
  siRNA target sequence for Il1r2 (NM_010555.2,1080-1098).
gaggatctgcatacagatt

SEQ ID NO: 504276 - DNA, 19 bp, Mus musculus
  siRNA target sequence for Il1r2 (NM_010555.2,1215-1233).
gttgtgggggcaatatgga

SEQ ID NO: 504277 - DNA, 19 bp, Mus musculus
  siRNA target sequence for Il1r2 (NM_010555.2,1232-1250).
gatgcgcagacggtgtaaa

SEQ ID NO: 504278 - DNA, 19 bp, Mus musculus
  siRNA target sequence for Il1r2 (NM_010555.2,1251-1269).
cgcagggctggaaagacat

SEQ ID NO: 504279 - DNA, 19 bp, Mus musculus
  siRNA target sequence for Ilk (NM_010562.1,194-212).
caatcagggggatgatcat

SEQ ID NO: 504280 - DNA, 19 bp, Mus musculus
  siRNA target sequence for Ilk (NM_010562.1,250-268).
gctctgcggtggttgaaat

SEQ ID NO: 504281 - DNA, 19 bp, Mus musculus
  siRNA target sequence for Ilk (NM_010562.1,253-271).
ctgcggtggttgaaatgct

SEQ ID NO: 504282 - DNA, 19 bp, Mus musculus
  siRNA target sequence for Ilk (NM_010562.1,278-296).
gcgtggagcacggattaat

SEQ ID NO: 504283 - DNA, 19 bp, Mus musculus
  siRNA target sequence for Ilk (NM_010562.1,280-298).
gtggagcacggattaatgt

SEQ ID NO: 504284 - DNA, 19 bp, Mus musculus
  siRNA target sequence for Ilk (NM_010562.1,286-304).
cacggattaatgtgatgaa

SEQ ID NO: 504285 - DNA, 19 bp, Mus musculus
  siRNA target sequence for Ilk (NM_010562.1,360-378).
gtacagaagctgttgcaat

SEQ ID NO: 504286 - DNA, 19 bp, Mus musculus
  siRNA target sequence for Ilk (NM_010562.1,413-431).
caatgtgccacttcactat

SEQ ID NO: 504287 - DNA, 19 bp, Mus musculus
  siRNA target sequence for Ilk (NM_010562.1,484-502).
ctcttgtgagcatctgtaa

SEQ ID NO: 504288 - DNA, 19 bp, Mus musculus
  siRNA target sequence for Ilk (NM_010562.1,486-504).
cttgtgagcatctgtaaca

SEQ ID NO: 504289 - DNA, 19 bp, Mus musculus
  siRNA target sequence for Ilk (NM_010562.1,489-507).
gtgagcatctgtaacaagt

SEQ ID NO: 504290 - DNA, 19 bp, Mus musculus
  siRNA target sequence for Ilk (NM_010562.1,491-509).
gagcatctgtaacaagtat

SEQ ID NO: 504291 - DNA, 19 bp, Mus musculus
  siRNA target sequence for Ilk (NM_010562.1,532-550).
ccaaggcaccccttagaga

SEQ ID NO: 504292 - DNA, 19 bp, Mus musculus
  siRNA target sequence for Ilk (NM_010562.1,558-576).
cgagaacgggcagagaaaa

SEQ ID NO: 504293 - DNA, 19 bp, Mus musculus
  siRNA target sequence for Ilk (NM_010562.1,584-602).
gaatctcaaccgtattcca

SEQ ID NO: 504294 - DNA, 19 bp, Mus musculus
  siRNA target sequence for Ilk (NM_010562.1,651-669).
gggaccctgaacaaacact

SEQ ID NO: 504295 - DNA, 19 bp, Mus musculus
  siRNA target sequence for Ilk (NM_010562.1,668-686).
ctccggtattgacttcaaa

SEQ ID NO: 504296 - DNA, 19 bp, Mus musculus
  siRNA target sequence for Ilk (NM_010562.1,670-688).
ccggtattgacttcaaaca

SEQ ID NO: 504297 - DNA, 19 bp, Mus musculus
  siRNA target sequence for Ilk (NM_010562.1,699-717).
ctggcaaagctcaatgaga

SEQ ID NO: 504298 - DNA, 19 bp, Mus musculus
  siRNA target sequence for Ilk (NM_010562.1,743-761).
ccgctggcagggcaatgat

SEQ ID NO: 504299 - DNA, 19 bp, Mus musculus
  siRNA target sequence for Ilk (NM_010562.1,744-762).
cgctggcagggcaatgata

SEQ ID NO: 504300 - DNA, 19 bp, Mus musculus
  siRNA target sequence for Ilk (NM_010562.1,745-763).
gctggcagggcaatgatat

SEQ ID NO: 504301 - DNA, 19 bp, Mus musculus
  siRNA target sequence for Ilk (NM_010562.1,746-764).
ctggcagggcaatgatatt

SEQ ID NO: 504302 - DNA, 19 bp, Mus musculus
  siRNA target sequence for Ilk (NM_010562.1,748-766).
ggcagggcaatgatattgt

SEQ ID NO: 504303 - DNA, 19 bp, Mus musculus
  siRNA target sequence for Ilk (NM_010562.1,749-767).
gcagggcaatgatattgtt

SEQ ID NO: 504304 - DNA, 19 bp, Mus musculus
  siRNA target sequence for Ilk (NM_010562.1,754-772).
gcaatgatattgttgtgaa

SEQ ID NO: 504305 - DNA, 19 bp, Mus musculus
  siRNA target sequence for Ilk (NM_010562.1,944-962).
ctacaatgttctacatgaa

SEQ ID NO: 504306 - DNA, 19 bp, Mus musculus
  siRNA target sequence for Ilk (NM_010562.1,954-972).
ctacatgaaggcaccaatt

SEQ ID NO: 504307 - DNA, 19 bp, Mus musculus
  siRNA target sequence for Immp2l (NM_053122.2,233-251).
caatgcagccttctttgaa

SEQ ID NO: 504308 - DNA, 19 bp, Mus musculus
  siRNA target sequence for Immp2l (NM_053122.2,269-287).
cctcagatgtggtactttt

SEQ ID NO: 504309 - DNA, 19 bp, Mus musculus
  siRNA target sequence for Immp2l (NM_053122.2,319-337).
cagcgtggtgacattgtgt

SEQ ID NO: 504310 - DNA, 19 bp, Mus musculus
  siRNA target sequence for Immp2l (NM_053122.2,323-341).
gtggtgacattgtgtcatt

SEQ ID NO: 504311 - DNA, 19 bp, Mus musculus
  siRNA target sequence for Immp2l (NM_053122.2,336-354).
gtcattggtgtctcctaaa

SEQ ID NO: 504312 - DNA, 19 bp, Mus musculus
  siRNA target sequence for Immp2l (NM_053122.2,378-396).
gagagtgatcgctcttgaa

SEQ ID NO: 504313 - DNA, 19 bp, Mus musculus
  siRNA target sequence for Immp2l (NM_053122.2,461-479).
gggttgaaggcgatcatca

SEQ ID NO: 504314 - DNA, 19 bp, Mus musculus
  siRNA target sequence for Immp2l (NM_053122.2,462-480).
ggttgaaggcgatcatcat

SEQ ID NO: 504315 - DNA, 19 bp, Mus musculus
  siRNA target sequence for Immp2l (NM_053122.2,484-502).
cacagttttgatagtaatt

SEQ ID NO: 504316 - DNA, 19 bp, Mus musculus
  siRNA target sequence for Immp2l (NM_053122.2,573-591).
gcagagactggaatctgtt

SEQ ID NO: 504317 - DNA, 19 bp, Mus musculus
  siRNA target sequence for Insr (NM_010568.1,283-301).
cccaaactcatcatgatca

SEQ ID NO: 504318 - DNA, 19 bp, Mus musculus
  siRNA target sequence for Insr (NM_010568.1,383-401).
cccgtctcttcttcaacta

SEQ ID NO: 504319 - DNA, 19 bp, Mus musculus
  siRNA target sequence for Insr (NM_010568.1,443-461).
ggctttataacctcatgaa

SEQ ID NO: 504320 - DNA, 19 bp, Mus musculus
  siRNA target sequence for Insr (NM_010568.1,478-496).
gtccgcatcgagaagaata

SEQ ID NO: 504321 - DNA, 19 bp, Mus musculus
  siRNA target sequence for Insr (NM_010568.1,480-498).
ccgcatcgagaagaataat

SEQ ID NO: 504322 - DNA, 19 bp, Mus musculus
  siRNA target sequence for Insr (NM_010568.1,675-693).
ctggacacacagtcattgt

SEQ ID NO: 504323 - DNA, 19 bp, Mus musculus
  siRNA target sequence for Insr (NM_010568.1,700-718).
gtttgcccaaccatctgta

SEQ ID NO: 504324 - DNA, 19 bp, Mus musculus
  siRNA target sequence for Insr (NM_010568.1,760-778).
gagtgcctgggcaactgtt

SEQ ID NO: 504325 - DNA, 19 bp, Mus musculus
  siRNA target sequence for Insr (NM_010568.1,807-825).
ggcctgtcgcaacttctat

SEQ ID NO: 504326 - DNA, 19 bp, Mus musculus
  siRNA target sequence for Insr (NM_010568.1,809-827).
cctgtcgcaacttctatct

SEQ ID NO: 504327 - DNA, 19 bp, Mus musculus
  siRNA target sequence for Insr (NM_010568.1,905-923).
gccaagaccttcacttcaa

SEQ ID NO: 504328 - DNA, 19 bp, Mus musculus
  siRNA target sequence for Insr (NM_010568.1,907-925).
caagaccttcacttcaaat

SEQ ID NO: 504329 - DNA, 19 bp, Mus musculus
  siRNA target sequence for Insr (NM_010568.1,944-962).
ctggctgccaccaatacgt

SEQ ID NO: 504330 - DNA, 19 bp, Mus musculus
  siRNA target sequence for Insr (NM_010568.1,950-968).
gccaccaatacgtcattca

SEQ ID NO: 504331 - DNA, 19 bp, Mus musculus
  siRNA target sequence for Insr (NM_010568.1,992-1010).
gcccgtctggctataccat

SEQ ID NO: 504332 - DNA, 19 bp, Mus musculus
  siRNA target sequence for Insr (NM_010568.1,996-1014).
gtctggctataccatgaat

SEQ ID NO: 504333 - DNA, 19 bp, Mus musculus
  siRNA target sequence for Insr (NM_010568.1,1000-1018).
ggctataccatgaattcca

SEQ ID NO: 504334 - DNA, 19 bp, Mus musculus
  siRNA target sequence for Insr (NM_010568.1,1078-1096).
ggtgagaagaccattgatt

SEQ ID NO: 504335 - DNA, 19 bp, Mus musculus
  siRNA target sequence for Insr (NM_010568.1,1141-1159).
ggtagcctgatcatcaaca

SEQ ID NO: 504336 - DNA, 19 bp, Mus musculus
  siRNA target sequence for Insr (NM_010568.1,1142-1160).
gtagcctgatcatcaacat

SEQ ID NO: 504337 - DNA, 19 bp, Mus musculus
  siRNA target sequence for Insr (NM_010568.1,1216-1234).
gaaatttcgggatttctaa

SEQ ID NO: 504338 - DNA, 19 bp, Mus musculus
  siRNA target sequence for Insr (NM_010568.1,1275-1293).
caggaagctacatctgatt

SEQ ID NO: 504339 - DNA, 19 bp, Mus musculus
  siRNA target sequence for Insr (NM_010568.1,1519-1537).
gaccaggcatcgtgtgaaa

SEQ ID NO: 504340 - DNA, 19 bp, Mus musculus
  siRNA target sequence for Insr (NM_010568.1,1521-1539).
ccaggcatcgtgtgaaaat

SEQ ID NO: 504341 - DNA, 19 bp, Mus musculus
  siRNA target sequence for Insr (NM_010568.1,1526-1544).
catcgtgtgaaaatgaatt

SEQ ID NO: 504342 - DNA, 19 bp, Mus musculus
  siRNA target sequence for Insr (NM_010568.1,1540-1558).
gaattgcttaaattttctt

SEQ ID NO: 504343 - DNA, 19 bp, Mus musculus
  siRNA target sequence for Insr (NM_010568.1,1565-1583).
ggacatcttttgacaagat

SEQ ID NO: 504344 - DNA, 19 bp, Mus musculus
  siRNA target sequence for Insr (NM_010568.1,1622-1640).
gagatctcctgggattcat

SEQ ID NO: 504345 - DNA, 19 bp, Mus musculus
  siRNA target sequence for Insr (NM_010568.1,1624-1642).
gatctcctgggattcatgt

SEQ ID NO: 504346 - DNA, 19 bp, Mus musculus
  siRNA target sequence for Insr (NM_010568.1,1633-1651).
ggattcatgttgttctaca

SEQ ID NO: 504347 - DNA, 19 bp, Mus musculus
  siRNA target sequence for Insr (NM_010568.1,1634-1652).
gattcatgttgttctacaa

SEQ ID NO: 504348 - DNA, 19 bp, Mus musculus
  siRNA target sequence for Insr (NM_010568.1,1657-1675).
gccccttatcagaatgtga

SEQ ID NO: 504349 - DNA, 19 bp, Mus musculus
  siRNA target sequence for Insr (NM_010568.1,1713-1731).
ctggactgtggtggatatt

SEQ ID NO: 504350 - DNA, 19 bp, Mus musculus
  siRNA target sequence for Insr (NM_010568.1,1715-1733).
ggactgtggtggatattga

SEQ ID NO: 504351 - DNA, 19 bp, Mus musculus
  siRNA target sequence for Insr (NM_010568.1,1812-1830).
gacccaatacgccatcttt

SEQ ID NO: 504352 - DNA, 19 bp, Mus musculus
  siRNA target sequence for Insr (NM_010568.1,1816-1834).
caatacgccatctttgtga

SEQ ID NO: 504353 - DNA, 19 bp, Mus musculus
  siRNA target sequence for Insr (NM_010568.1,1868-1886).
cctatggagccaaaagtga

SEQ ID NO: 504354 - DNA, 19 bp, Mus musculus
  siRNA target sequence for Insr (NM_010568.1,1926-1944).
ccccctggatcccatatca

SEQ ID NO: 504355 - DNA, 19 bp, Mus musculus
  siRNA target sequence for Insr (NM_010568.1,1930-1948).
ctggatcccatatcagttt

SEQ ID NO: 504356 - DNA, 19 bp, Mus musculus
  siRNA target sequence for Insr (NM_010568.1,1932-1950).
ggatcccatatcagtttct

SEQ ID NO: 504357 - DNA, 19 bp, Mus musculus
  siRNA target sequence for Insr (NM_010568.1,1933-1951).
gatcccatatcagtttcta

SEQ ID NO: 504358 - DNA, 19 bp, Mus musculus
  siRNA target sequence for Insr (NM_010568.1,1936-1954).
cccatatcagtttctaatt

SEQ ID NO: 504359 - DNA, 19 bp, Mus musculus
  siRNA target sequence for Insr (NM_010568.1,2055-2073).
gctgtttgagctggattat

SEQ ID NO: 504360 - DNA, 19 bp, Mus musculus
  siRNA target sequence for Insr (NM_010568.1,2064-2082).
gctggattattgtctcaaa

SEQ ID NO: 504361 - DNA, 19 bp, Mus musculus
  siRNA target sequence for Insr (NM_010568.1,2116-2134).
ccctttgagtctgatgatt

SEQ ID NO: 504362 - DNA, 19 bp, Mus musculus
  siRNA target sequence for Insr (NM_010568.1,2240-2258).
ggaagaccttcgaggatta

SEQ ID NO: 504363 - DNA, 19 bp, Mus musculus
  siRNA target sequence for Insr (NM_010568.1,2484-2502).
gcaggcatgcaatcaagat

SEQ ID NO: 504364 - DNA, 19 bp, Mus musculus
  siRNA target sequence for Insr (NM_010568.1,2485-2503).
caggcatgcaatcaagatt

SEQ ID NO: 504365 - DNA, 19 bp, Mus musculus
  siRNA target sequence for Insr (NM_010568.1,2607-2625).
gaacaatgttgtacactta

SEQ ID NO: 504366 - DNA, 19 bp, Mus musculus
  siRNA target sequence for Insr (NM_010568.1,2637-2655).
gccaaaggaacctaatggt

SEQ ID NO: 504367 - DNA, 19 bp, Mus musculus
  siRNA target sequence for Insr (NM_010568.1,2643-2661).
ggaacctaatggtctgatt

SEQ ID NO: 504368 - DNA, 19 bp, Mus musculus
  siRNA target sequence for Insr (NM_010568.1,2676-2694).
gagctatcgccgatatggt

SEQ ID NO: 504369 - DNA, 19 bp, Mus musculus
  siRNA target sequence for Insr (NM_010568.1,2833-2851).
cccacctatttttatgtga

SEQ ID NO: 504370 - DNA, 19 bp, Mus musculus
  siRNA target sequence for Insr (NM_010568.1,2892-2910).
cattggacccctcatcttt

SEQ ID NO: 504371 - DNA, 19 bp, Mus musculus
  siRNA target sequence for Insr (NM_010568.1,2896-2914).
ggacccctcatctttgtct

SEQ ID NO: 504372 - DNA, 19 bp, Mus musculus
  siRNA target sequence for Insr (NM_010568.1,2897-2915).
gacccctcatctttgtctt

SEQ ID NO: 504373 - DNA, 19 bp, Mus musculus
  siRNA target sequence for Insr (NM_010568.1,2931-2949).
gattggaagtatttatcta

SEQ ID NO: 504374 - DNA, 19 bp, Mus musculus
  siRNA target sequence for Insr (NM_010568.1,3133-3151).
gaaggcaatgccaaggata

SEQ ID NO: 504375 - DNA, 19 bp, Mus musculus
  siRNA target sequence for Insr (NM_010568.1,3174-3192).
ccgtgttgcggttaagact

SEQ ID NO: 504376 - DNA, 19 bp, Mus musculus
  siRNA target sequence for Insr (NM_010568.1,3182-3200).
cggttaagactgtcaatga

SEQ ID NO: 504377 - DNA, 19 bp, Mus musculus
  siRNA target sequence for Insr (NM_010568.1,3221-3239).
ggatcgagttcctcaatga

SEQ ID NO: 504378 - DNA, 19 bp, Mus musculus
  siRNA target sequence for Insr (NM_010568.1,3316-3334).
ctggtagtgatggaattga

SEQ ID NO: 504379 - DNA, 19 bp, Mus musculus
  siRNA target sequence for Insr (NM_010568.1,3406-3424).
ccccctaccttgcaagaaa

SEQ ID NO: 504380 - DNA, 19 bp, Mus musculus
  siRNA target sequence for Insr (NM_010568.1,3407-3425).
cccctaccttgcaagaaat

SEQ ID NO: 504381 - DNA, 19 bp, Mus musculus
  siRNA target sequence for Insr (NM_010568.1,3409-3427).
cctaccttgcaagaaatga

SEQ ID NO: 504382 - DNA, 19 bp, Mus musculus
  siRNA target sequence for Insr (NM_010568.1,3516-3534).
ggttgcccatgattttact

SEQ ID NO: 504383 - DNA, 19 bp, Mus musculus
  siRNA target sequence for Insr (NM_010568.1,3554-3572).
gaatgacaagggacatcta

SEQ ID NO: 504384 - DNA, 19 bp, Mus musculus
  siRNA target sequence for Insr (NM_010568.1,3642-3660).
gaaggatggagtctttact

SEQ ID NO: 504385 - DNA, 19 bp, Mus musculus
  siRNA target sequence for Insr (NM_010568.1,3691-3709).
gtcctttgggaaatcacta

SEQ ID NO: 504386 - DNA, 19 bp, Mus musculus
  siRNA target sequence for Insr (NM_010568.1,3710-3728).
gcttggctgagcaacctta

SEQ ID NO: 504387 - DNA, 19 bp, Mus musculus
  siRNA target sequence for Insr (NM_010568.1,3711-3729).
cttggctgagcaaccttat

SEQ ID NO: 504388 - DNA, 19 bp, Mus musculus
  siRNA target sequence for Insr (NM_010568.1,3781-3799).
ctggatccccctgataact

SEQ ID NO: 504389 - DNA, 19 bp, Mus musculus
  siRNA target sequence for Insr (NM_010568.1,3783-3801).
ggatccccctgataactgt

SEQ ID NO: 504390 - DNA, 19 bp, Mus musculus
  siRNA target sequence for Insr (NM_010568.1,3838-3856).
cagttcaaccccaagatga

SEQ ID NO: 504391 - DNA, 19 bp, Mus musculus
  siRNA target sequence for Insr (NM_010568.1,4068-4086).
catcaaacggacctatgat

SEQ ID NO: 504392 - DNA, 19 bp, Mus musculus
  siRNA target sequence for Insrr (NM_011832.1,382-400).
ggccctggggagtacactt

SEQ ID NO: 504393 - DNA, 19 bp, Mus musculus
  siRNA target sequence for Insrr (NM_011832.1,388-406).
ggggagtacacttgcttat

SEQ ID NO: 504394 - DNA, 19 bp, Mus musculus
  siRNA target sequence for Insrr (NM_011832.1,547-565).
ctgccactggagaggattt

SEQ ID NO: 504395 - DNA, 19 bp, Mus musculus
  siRNA target sequence for Insrr (NM_011832.1,693-711).
ctgggctacgcactcatta

SEQ ID NO: 504396 - DNA, 19 bp, Mus musculus
  siRNA target sequence for Insrr (NM_011832.1,696-714).
ggctacgcactcattatct

SEQ ID NO: 504397 - DNA, 19 bp, Mus musculus
  siRNA target sequence for Insrr (NM_011832.1,697-715).
gctacgcactcattatctt

SEQ ID NO: 504398 - DNA, 19 bp, Mus musculus
  siRNA target sequence for Insrr (NM_011832.1,698-716).
ctacgcactcattatcttt

SEQ ID NO: 504399 - DNA, 19 bp, Mus musculus
  siRNA target sequence for Insrr (NM_011832.1,703-721).
cactcattatctttgagat

SEQ ID NO: 504400 - DNA, 19 bp, Mus musculus
  siRNA target sequence for Insrr (NM_011832.1,775-793).
ccgtgcgtgtggagaagaa

SEQ ID NO: 504401 - DNA, 19 bp, Mus musculus
  siRNA target sequence for Insrr (NM_011832.1,1149-1167).
cctccgggcacctaccaat

SEQ ID NO: 504402 - DNA, 19 bp, Mus musculus
  siRNA target sequence for Insrr (NM_011832.1,1153-1171).
cgggcacctaccaatatga

SEQ ID NO: 504403 - DNA, 19 bp, Mus musculus
  siRNA target sequence for Insrr (NM_011832.1,1155-1173).
ggcacctaccaatatgagt

SEQ ID NO: 504404 - DNA, 19 bp, Mus musculus
  siRNA target sequence for Insrr (NM_011832.1,1433-1451).
ccttcgccaaggctacaat

SEQ ID NO: 504405 - DNA, 19 bp, Mus musculus
  siRNA target sequence for Insrr (NM_011832.1,1663-1681).
ccattcccgtgggcaaaat

SEQ ID NO: 504406 - DNA, 19 bp, Mus musculus
  siRNA target sequence for Insrr (NM_011832.1,1664-1682).
cattcccgtgggcaaaata

SEQ ID NO: 504407 - DNA, 19 bp, Mus musculus
  siRNA target sequence for Insrr (NM_011832.1,1668-1686).
cccgtgggcaaaatatact

SEQ ID NO: 504408 - DNA, 19 bp, Mus musculus
  siRNA target sequence for Insrr (NM_011832.1,1704-1722).
ctctgcttggagcacatat

SEQ ID NO: 504409 - DNA, 19 bp, Mus musculus
  siRNA target sequence for Insrr (NM_011832.1,1811-1829).
gactcgcactctacgtttt

SEQ ID NO: 504410 - DNA, 19 bp, Mus musculus
  siRNA target sequence for Insrr (NM_011832.1,1813-1831).
ctcgcactctacgttttgt

SEQ ID NO: 504411 - DNA, 19 bp, Mus musculus
  siRNA target sequence for Insrr (NM_011832.1,1815-1833).
cgcactctacgttttgtgt

SEQ ID NO: 504412 - DNA, 19 bp, Mus musculus
  siRNA target sequence for Insrr (NM_011832.1,1816-1834).
gcactctacgttttgtgtt

SEQ ID NO: 504413 - DNA, 19 bp, Mus musculus
  siRNA target sequence for Insrr (NM_011832.1,1819-1837).
ctctacgttttgtgttcaa

SEQ ID NO: 504414 - DNA, 19 bp, Mus musculus
  siRNA target sequence for Insrr (NM_011832.1,2133-2151).
gcccagagccccattgtct

SEQ ID NO: 504415 - DNA, 19 bp, Mus musculus
  siRNA target sequence for Insrr (NM_011832.1,2134-2152).
cccagagccccattgtcta

SEQ ID NO: 504416 - DNA, 19 bp, Mus musculus
  siRNA target sequence for Insrr (NM_011832.1,2179-2197).
cggtgccccaagatgtcat

SEQ ID NO: 504417 - DNA, 19 bp, Mus musculus
  siRNA target sequence for Insrr (NM_011832.1,2244-2262).
ccggtccagcgcaatggaa

SEQ ID NO: 504418 - DNA, 19 bp, Mus musculus
  siRNA target sequence for Insrr (NM_011832.1,2245-2263).
cggtccagcgcaatggaaa

SEQ ID NO: 504419 - DNA, 19 bp, Mus musculus
  siRNA target sequence for Insrr (NM_011832.1,2250-2268).
cagcgcaatggaaacatca

SEQ ID NO: 504420 - DNA, 19 bp, Mus musculus
  siRNA target sequence for Insrr (NM_011832.1,2550-2568).
gtgacatccatcaacaaga

SEQ ID NO: 504421 - DNA, 19 bp, Mus musculus
  siRNA target sequence for Insrr (NM_011832.1,2630-2648).
caactcggattttgagatt

SEQ ID NO: 504422 - DNA, 19 bp, Mus musculus
  siRNA target sequence for Insrr (NM_011832.1,2633-2651).
ctcggattttgagattcaa

SEQ ID NO: 504423 - DNA, 19 bp, Mus musculus
  siRNA target sequence for Insrr (NM_011832.1,2635-2653).
cggattttgagattcaaga

SEQ ID NO: 504424 - DNA, 19 bp, Mus musculus
  siRNA target sequence for Insrr (NM_011832.1,2667-2685).
cgggagcgagcgatattga

SEQ ID NO: 504425 - DNA, 19 bp, Mus musculus
  siRNA target sequence for Insrr (NM_011832.1,2785-2803).
gcaccatgccacatagaga

SEQ ID NO: 504426 - DNA, 19 bp, Mus musculus
  siRNA target sequence for Insrr (NM_011832.1,2953-2971).
gtgtgtcccgtcttcgata

SEQ ID NO: 504427 - DNA, 19 bp, Mus musculus
  siRNA target sequence for Insrr (NM_011832.1,3003-3021).
ctgccccctggaaactact

SEQ ID NO: 504428 - DNA, 19 bp, Mus musculus
  siRNA target sequence for Insrr (NM_011832.1,3064-3082).
ggactgacggtgttacctt

SEQ ID NO: 504429 - DNA, 19 bp, Mus musculus
  siRNA target sequence for Insrr (NM_011832.1,3069-3087).
gacggtgttaccttctaca

SEQ ID NO: 504430 - DNA, 19 bp, Mus musculus
  siRNA target sequence for Insrr (NM_011832.1,3072-3090).
ggtgttaccttctacatca

SEQ ID NO: 504431 - DNA, 19 bp, Mus musculus
  siRNA target sequence for Insrr (NM_011832.1,3174-3192).
gctgccctcggtttcttct

SEQ ID NO: 504432 - DNA, 19 bp, Mus musculus
  siRNA target sequence for Insrr (NM_011832.1,3175-3193).
ctgccctcggtttcttcta

SEQ ID NO: 504433 - DNA, 19 bp, Mus musculus
  siRNA target sequence for Insrr (NM_011832.1,3177-3195).
gccctcggtttcttctaca

SEQ ID NO: 504434 - DNA, 19 bp, Mus musculus
  siRNA target sequence for Insrr (NM_011832.1,3245-3263).
cagtgcatcccacatgtat

SEQ ID NO: 504435 - DNA, 19 bp, Mus musculus
  siRNA target sequence for Insrr (NM_011832.1,3247-3265).
gtgcatcccacatgtatgt

SEQ ID NO: 504436 - DNA, 19 bp, Mus musculus
  siRNA target sequence for Insrr (NM_011832.1,3390-3408).
gtagccctgaagacagtta

SEQ ID NO: 504437 - DNA, 19 bp, Mus musculus
  siRNA target sequence for Insrr (NM_011832.1,3394-3412).
ccctgaagacagttaatga

SEQ ID NO: 504438 - DNA, 19 bp, Mus musculus
  siRNA target sequence for Insrr (NM_011832.1,3423-3441).
gctcgggaacgcgttgaat

SEQ ID NO: 504439 - DNA, 19 bp, Mus musculus
  siRNA target sequence for Insrr (NM_011832.1,3424-3442).
ctcgggaacgcgttgaatt

SEQ ID NO: 504440 - DNA, 19 bp, Mus musculus
  siRNA target sequence for Insrr (NM_011832.1,3622-3640).
ctgcactcagtgacatgat

SEQ ID NO: 504441 - DNA, 19 bp, Mus musculus
  siRNA target sequence for Insrr (NM_011832.1,3644-3662).
gatggcaggggaaattgca

SEQ ID NO: 504442 - DNA, 19 bp, Mus musculus
  siRNA target sequence for Insrr (NM_011832.1,3677-3695).
ccttgctgccaagaagttt

SEQ ID NO: 504443 - DNA, 19 bp, Mus musculus
  siRNA target sequence for Insrr (NM_011832.1,3766-3784).
gaatgactcgggatgtgta

SEQ ID NO: 504444 - DNA, 19 bp, Mus musculus
  siRNA target sequence for Insrr (NM_011832.1,3780-3798).
gtgtatgagacagactatt

SEQ ID NO: 504445 - DNA, 19 bp, Mus musculus
  siRNA target sequence for Insrr (NM_011832.1,3922-3940).
ccctggccgaacaaccata

SEQ ID NO: 504446 - DNA, 19 bp, Mus musculus
  siRNA target sequence for Insrr (NM_011832.1,3937-3955).
cataccagggtctatcaaa

SEQ ID NO: 504447 - DNA, 19 bp, Mus musculus
  siRNA target sequence for Irak1 (NM_008363.1,756-774).
catccctccccgttttgct

SEQ ID NO: 504448 - DNA, 19 bp, Mus musculus
  siRNA target sequence for Irak1 (NM_008363.1,773-791).
ctggcccttctgtgagatt

SEQ ID NO: 504449 - DNA, 19 bp, Mus musculus
  siRNA target sequence for Irak1 (NM_008363.1,827-845).
gattggagagggtggtttt

SEQ ID NO: 504450 - DNA, 19 bp, Mus musculus
  siRNA target sequence for Irak1 (NM_008363.1,866-884).
catgagaaatactacatat

SEQ ID NO: 504451 - DNA, 19 bp, Mus musculus
  siRNA target sequence for Irak1 (NM_008363.1,929-947).
ggtgaaacagagcttctta

SEQ ID NO: 504452 - DNA, 19 bp, Mus musculus
  siRNA target sequence for Irak1 (NM_008363.1,932-950).
gaaacagagcttcttaaca

SEQ ID NO: 504453 - DNA, 19 bp, Mus musculus
  siRNA target sequence for Irak1 (NM_008363.1,970-988).
ggtttcgtcacccaaatat

SEQ ID NO: 504454 - DNA, 19 bp, Mus musculus
  siRNA target sequence for Irak1 (NM_008363.1,1020-1038).
ggcttatactgccttgttt

SEQ ID NO: 504455 - DNA, 19 bp, Mus musculus
  siRNA target sequence for Irak1 (NM_008363.1,1022-1040).
cttatactgccttgtttat

SEQ ID NO: 504456 - DNA, 19 bp, Mus musculus
  siRNA target sequence for Irak1 (NM_008363.1,1147-1165).
gggctattcagtttttaca

SEQ ID NO: 504457 - DNA, 19 bp, Mus musculus
  siRNA target sequence for Irak1 (NM_008363.1,1381-1399).
ctgtggacaccgatacctt

SEQ ID NO: 504458 - DNA, 19 bp, Mus musculus
  siRNA target sequence for Irak1 (NM_008363.1,1400-1418).
cagctttggggtggtaata

SEQ ID NO: 504459 - DNA, 19 bp, Mus musculus
  siRNA target sequence for Irak1 (NM_008363.1,1402-1420).
gctttggggtggtaatact

SEQ ID NO: 504460 - DNA, 19 bp, Mus musculus
  siRNA target sequence for Irak1 (NM_008363.1,1458-1476).
ggtgcaaagaccaagtatt

SEQ ID NO: 504461 - DNA, 19 bp, Mus musculus
  siRNA target sequence for Irak1 (NM_008363.1,1459-1477).
gtgcaaagaccaagtattt

SEQ ID NO: 504462 - DNA, 19 bp, Mus musculus
  siRNA target sequence for Irak1 (NM_008363.1,1509-1527).
gctggagtgaccctgaaaa

SEQ ID NO: 504463 - DNA, 19 bp, Mus musculus
  siRNA target sequence for Irak1 (NM_008363.1,1579-1597).
caattgctgcccagatcta

SEQ ID NO: 504464 - DNA, 19 bp, Mus musculus
  siRNA target sequence for Irak1 (NM_008363.1,1680-1698).
caccgtcgggccaagaaga

SEQ ID NO: 504465 - DNA, 19 bp, Mus musculus
  siRNA target sequence for Irak1 (NM_008363.1,1704-1722).
cccatgacccaggtataca

SEQ ID NO: 504466 - DNA, 19 bp, Mus musculus
  siRNA target sequence for Irak1 (NM_008363.1,1715-1733).
ggtatacaagagactagaa

SEQ ID NO: 504467 - DNA, 19 bp, Mus musculus
  siRNA target sequence for Irak1 (NM_008363.1,1846-1864).
catggcagcctctagtagt

SEQ ID NO: 504468 - DNA, 19 bp, Mus musculus
  siRNA target sequence for Irak1 (NM_008363.1,2034-2052).
ggaggcactaccagagaat

SEQ ID NO: 504469 - DNA, 19 bp, Mus musculus
  siRNA target sequence for Irak1 (NM_008363.1,2037-2055).
ggcactaccagagaatcaa

SEQ ID NO: 504470 - DNA, 19 bp, Mus musculus
  siRNA target sequence for Irak1 (NM_008363.1,2039-2057).
cactaccagagaatcaagt

SEQ ID NO: 504471 - DNA, 19 bp, Mus musculus
  siRNA target sequence for Irak1 (NM_008363.1,2163-2181).
cgacagaagatggtacaaa

SEQ ID NO: 504472 - DNA, 19 bp, Mus musculus
  siRNA target sequence for Irak1 (NM_008363.1,2243-2261).
cccaggcttggatttagaa

SEQ ID NO: 504473 - DNA, 19 bp, Mus musculus
  siRNA target sequence for Irak2 (NM_172161.2,542-560).
ccgactctccccagtctaa

SEQ ID NO: 504474 - DNA, 19 bp, Mus musculus
  siRNA target sequence for Irak2 (NM_172161.2,546-564).
ctctccccagtctaagtat

SEQ ID NO: 504475 - DNA, 19 bp, Mus musculus
  siRNA target sequence for Irak2 (NM_172161.2,694-712).
ggcacctttgccgatatct

SEQ ID NO: 504476 - DNA, 19 bp, Mus musculus
  siRNA target sequence for Irak2 (NM_172161.2,779-797).
cagggtccatggacagatt

SEQ ID NO: 504477 - DNA, 19 bp, Mus musculus
  siRNA target sequence for Irak2 (NM_172161.2,1029-1047).
catcatccacagcaatgtt

SEQ ID NO: 504478 - DNA, 19 bp, Mus musculus
  siRNA target sequence for Irak2 (NM_172161.2,1108-1126).
caccctcatcccgacaata

SEQ ID NO: 504479 - DNA, 19 bp, Mus musculus
  siRNA target sequence for Irak2 (NM_172161.2,1114-1132).
catcccgacaataaaaaga

SEQ ID NO: 504480 - DNA, 19 bp, Mus musculus
  siRNA target sequence for Irak2 (NM_172161.2,1178-1196).
catatctgccggaacactt

SEQ ID NO: 504481 - DNA, 19 bp, Mus musculus
  siRNA target sequence for Irak2 (NM_172161.2,1183-1201).
ctgccggaacacttcatca

SEQ ID NO: 504482 - DNA, 19 bp, Mus musculus
  siRNA target sequence for Irak2 (NM_172161.2,1330-1348).
gagattcccaacagtactt

SEQ ID NO: 504483 - DNA, 19 bp, Mus musculus
  siRNA target sequence for Irak2 (NM_172161.2,1585-1603).
gaggccacaggctcatctt

SEQ ID NO: 504484 - DNA, 19 bp, Mus musculus
  siRNA target sequence for Irak2 (NM_172161.2,1590-1608).
cacaggctcatcttccaat

SEQ ID NO: 504485 - DNA, 19 bp, Mus musculus
  siRNA target sequence for Irak2 (NM_172161.2,1811-1829).
cttcatggaaaattgagat

SEQ ID NO: 504486 - DNA, 19 bp, Mus musculus
  siRNA target sequence for Irak2 (NM_172161.2,1857-1875).
gaacatcgtactctacaaa

SEQ ID NO: 504487 - DNA, 19 bp, Mus musculus
  siRNA target sequence for Irak3 (NM_028679.2,208-226).
cctggcggagcgactttca

SEQ ID NO: 504488 - DNA, 19 bp, Mus musculus
  siRNA target sequence for Irak3 (NM_028679.2,209-227).
ctggcggagcgactttcaa

SEQ ID NO: 504489 - DNA, 19 bp, Mus musculus
  siRNA target sequence for Irak3 (NM_028679.2,212-230).
gcggagcgactttcaaaca

SEQ ID NO: 504490 - DNA, 19 bp, Mus musculus
  siRNA target sequence for Irak3 (NM_028679.2,234-252).
ggctggatgttcgtcatat

SEQ ID NO: 504491 - DNA, 19 bp, Mus musculus
  siRNA target sequence for Irak3 (NM_028679.2,242-260).
gttcgtcatattgaaaagt

SEQ ID NO: 504492 - DNA, 19 bp, Mus musculus
  siRNA target sequence for Irak3 (NM_028679.2,259-277).
gtacgtaaaccaaggtaaa

SEQ ID NO: 504493 - DNA, 19 bp, Mus musculus
  siRNA target sequence for Irak3 (NM_028679.2,262-280).
cgtaaaccaaggtaaaagt

SEQ ID NO: 504494 - DNA, 19 bp, Mus musculus
  siRNA target sequence for Irak3 (NM_028679.2,322-340).
gacgatcggcgacctttta

SEQ ID NO: 504495 - DNA, 19 bp, Mus musculus
  siRNA target sequence for Irak3 (NM_028679.2,324-342).
cgatcggcgaccttttaga

SEQ ID NO: 504496 - DNA, 19 bp, Mus musculus
  siRNA target sequence for Irak3 (NM_028679.2,365-383).
caacgagctatccacttaa

SEQ ID NO: 504497 - DNA, 19 bp, Mus musculus
  siRNA target sequence for Irak3 (NM_028679.2,368-386).
cgagctatccacttaatca

SEQ ID NO: 504498 - DNA, 19 bp, Mus musculus
  siRNA target sequence for Irak3 (NM_028679.2,369-387).
gagctatccacttaatcat

SEQ ID NO: 504499 - DNA, 19 bp, Mus musculus
  siRNA target sequence for Irak3 (NM_028679.2,372-390).
ctatccacttaatcatcaa

SEQ ID NO: 504500 - DNA, 19 bp, Mus musculus
  siRNA target sequence for Irak3 (NM_028679.2,376-394).
ccacttaatcatcaactat

SEQ ID NO: 504501 - DNA, 19 bp, Mus musculus
  siRNA target sequence for Irak3 (NM_028679.2,423-441).
cgcatcacgagcttccatt

SEQ ID NO: 504502 - DNA, 19 bp, Mus musculus
  siRNA target sequence for Irak3 (NM_028679.2,514-532).
cacagtggataatgttctt

SEQ ID NO: 504503 - DNA, 19 bp, Mus musculus
  siRNA target sequence for Irak3 (NM_028679.2,573-591).
ctatcagcttccagagtat

SEQ ID NO: 504504 - DNA, 19 bp, Mus musculus
  siRNA target sequence for Irak3 (NM_028679.2,593-611).
ctagaaggaaccaaacatt

SEQ ID NO: 504505 - DNA, 19 bp, Mus musculus
  siRNA target sequence for Irak3 (NM_028679.2,638-656).
ggggagatattcgaagtat

SEQ ID NO: 504506 - DNA, 19 bp, Mus musculus
  siRNA target sequence for Irak3 (NM_028679.2,639-657).
gggagatattcgaagtata

SEQ ID NO: 504507 - DNA, 19 bp, Mus musculus
  siRNA target sequence for Irak3 (NM_028679.2,641-659).
gagatattcgaagtataca

SEQ ID NO: 504508 - DNA, 19 bp, Mus musculus
  siRNA target sequence for Irak3 (NM_028679.2,643-661).
gatattcgaagtatacaga

SEQ ID NO: 504509 - DNA, 19 bp, Mus musculus
  siRNA target sequence for Irak3 (NM_028679.2,667-685).
cattcgaaaccaagcatat

SEQ ID NO: 504510 - DNA, 19 bp, Mus musculus
  siRNA target sequence for Irak3 (NM_028679.2,680-698).
gcatatgctgttaaattgt

SEQ ID NO: 504511 - DNA, 19 bp, Mus musculus
  siRNA target sequence for Irak3 (NM_028679.2,775-793).
ccgtcacccccacatacta

SEQ ID NO: 504512 - DNA, 19 bp, Mus musculus
  siRNA target sequence for Irak3 (NM_028679.2,823-841).
gaaactttgtctggtttat

SEQ ID NO: 504513 - DNA, 19 bp, Mus musculus
  siRNA target sequence for Irak3 (NM_028679.2,831-849).
gtctggtttatccctatat

SEQ ID NO: 504514 - DNA, 19 bp, Mus musculus
  siRNA target sequence for Irak3 (NM_028679.2,852-870).
gcaacgggacgcttttcga

SEQ ID NO: 504515 - DNA, 19 bp, Mus musculus
  siRNA target sequence for Irak3 (NM_028679.2,859-877).
gacgcttttcgacagatta

SEQ ID NO: 504516 - DNA, 19 bp, Mus musculus
  siRNA target sequence for Irak3 (NM_028679.2,861-879).
cgcttttcgacagattaca

SEQ ID NO: 504517 - DNA, 19 bp, Mus musculus
  siRNA target sequence for Irak3 (NM_028679.2,863-881).
cttttcgacagattacagt

SEQ ID NO: 504518 - DNA, 19 bp, Mus musculus
  siRNA target sequence for Irak3 (NM_028679.2,871-889).
cagattacagtgcacaaat

SEQ ID NO: 504519 - DNA, 19 bp, Mus musculus
  siRNA target sequence for Irak3 (NM_028679.2,914-932).
gttcgaatcagcgtattga

SEQ ID NO: 504520 - DNA, 19 bp, Mus musculus
  siRNA target sequence for Irak3 (NM_028679.2,922-940).
cagcgtattgataggaata

SEQ ID NO: 504521 - DNA, 19 bp, Mus musculus
  siRNA target sequence for Irak3 (NM_028679.2,983-1001).
gtcatctgtggcaacgttt

SEQ ID NO: 504522 - DNA, 19 bp, Mus musculus
  siRNA target sequence for Irak3 (NM_028679.2,997-1015).
cgtttccagtgcaaacata

SEQ ID NO: 504523 - DNA, 19 bp, Mus musculus
  siRNA target sequence for Irak3 (NM_028679.2,1002-1020).
ccagtgcaaacatactctt

SEQ ID NO: 504524 - DNA, 19 bp, Mus musculus
  siRNA target sequence for Irak3 (NM_028679.2,1039-1057).
caaactaacggattttgct

SEQ ID NO: 504525 - DNA, 19 bp, Mus musculus
  siRNA target sequence for Irak3 (NM_028679.2,1063-1081).
gcacttccgacccaatcta

SEQ ID NO: 504526 - DNA, 19 bp, Mus musculus
  siRNA target sequence for Irak3 (NM_028679.2,1084-1102).
gcagcagagttctaccata

SEQ ID NO: 504527 - DNA, 19 bp, Mus musculus
  siRNA target sequence for Irak3 (NM_028679.2,1088-1106).
cagagttctaccataaata

SEQ ID NO: 504528 - DNA, 19 bp, Mus musculus
  siRNA target sequence for Irak3 (NM_028679.2,1134-1152).
ggtacatgccagaagaata

SEQ ID NO: 504529 - DNA, 19 bp, Mus musculus
  siRNA target sequence for Irak3 (NM_028679.2,1167-1185).
gactttccgttaaaactga

SEQ ID NO: 504530 - DNA, 19 bp, Mus musculus
  siRNA target sequence for Irak3 (NM_028679.2,1173-1191).
ccgttaaaactgatgtcta

SEQ ID NO: 504531 - DNA, 19 bp, Mus musculus
  siRNA target sequence for Irak3 (NM_028679.2,1194-1212).
gcttcggaatcgtgatcat

SEQ ID NO: 504532 - DNA, 19 bp, Mus musculus
  siRNA target sequence for Irak3 (NM_028679.2,1456-1474).
ccagcctagcttgtatttt

SEQ ID NO: 504533 - DNA, 19 bp, Mus musculus
  siRNA target sequence for Irak3 (NM_028679.2,1512-1530).
gtccttctccactgttctt

SEQ ID NO: 504534 - DNA, 19 bp, Mus musculus
  siRNA target sequence for Irak3 (NM_028679.2,1531-1549).
ggataatgtcccaagtatt

SEQ ID NO: 504535 - DNA, 19 bp, Mus musculus
  siRNA target sequence for Irak3 (NM_028679.2,1540-1558).
cccaagtattccagtagaa

SEQ ID NO: 504536 - DNA, 19 bp, Mus musculus
  siRNA target sequence for Irak3 (NM_028679.2,1651-1669).
gtctgaggtcacctttcta

SEQ ID NO: 504537 - DNA, 19 bp, Mus musculus
  siRNA target sequence for Irak3 (NM_028679.2,1698-1716).
gaagtgaagcggattgcaa

SEQ ID NO: 504538 - DNA, 19 bp, Mus musculus
  siRNA target sequence for Itk (NM_010583.1,151-169).
ggacttctccctcgaattt

SEQ ID NO: 504539 - DNA, 19 bp, Mus musculus
  siRNA target sequence for Itk (NM_010583.1,152-170).
gacttctccctcgaatttt

SEQ ID NO: 504540 - DNA, 19 bp, Mus musculus
  siRNA target sequence for Itk (NM_010583.1,154-172).
cttctccctcgaattttaa

SEQ ID NO: 504541 - DNA, 19 bp, Mus musculus
  siRNA target sequence for Itk (NM_010583.1,177-195).
cgtttctttgtcttaacga

SEQ ID NO: 504542 - DNA, 19 bp, Mus musculus
  siRNA target sequence for Itk (NM_010583.1,284-302).
gattgtcaagagtgacatt

SEQ ID NO: 504543 - DNA, 19 bp, Mus musculus
  siRNA target sequence for Itk (NM_010583.1,288-306).
gtcaagagtgacattagca

SEQ ID NO: 504544 - DNA, 19 bp, Mus musculus
  siRNA target sequence for Itk (NM_010583.1,304-322).
gcatcccgtgccactataa

SEQ ID NO: 504545 - DNA, 19 bp, Mus musculus
  siRNA target sequence for Itk (NM_010583.1,305-323).
catcccgtgccactataaa

SEQ ID NO: 504546 - DNA, 19 bp, Mus musculus
  siRNA target sequence for Itk (NM_010583.1,413-431).
ctgggtgctgacccttaaa

SEQ ID NO: 504547 - DNA, 19 bp, Mus musculus
  siRNA target sequence for Itk (NM_010583.1,416-434).
ggtgctgacccttaaagaa

SEQ ID NO: 504548 - DNA, 19 bp, Mus musculus
  siRNA target sequence for Itk (NM_010583.1,435-453).
gaaacgaggaataacaaca

SEQ ID NO: 504549 - DNA, 19 bp, Mus musculus
  siRNA target sequence for Itk (NM_010583.1,454-472).
gcctggtatccaagtatca

SEQ ID NO: 504550 - DNA, 19 bp, Mus musculus
  siRNA target sequence for Itk (NM_010583.1,545-563).
ctacgacccatccaagaat

SEQ ID NO: 504551 - DNA, 19 bp, Mus musculus
  siRNA target sequence for Itk (NM_010583.1,688-706).
ggtgtgatgaagagtacta

SEQ ID NO: 504552 - DNA, 19 bp, Mus musculus
  siRNA target sequence for Itk (NM_010583.1,733-751).
ggtggagggttcaagacaa

SEQ ID NO: 504553 - DNA, 19 bp, Mus musculus
  siRNA target sequence for Itk (NM_010583.1,734-752).
gtggagggttcaagacaaa

SEQ ID NO: 504554 - DNA, 19 bp, Mus musculus
  siRNA target sequence for Itk (NM_010583.1,844-862).
gccgcgacaaagctgaaaa

SEQ ID NO: 504555 - DNA, 19 bp, Mus musculus
  siRNA target sequence for Itk (NM_010583.1,845-863).
ccgcgacaaagctgaaaaa

SEQ ID NO: 504556 - DNA, 19 bp, Mus musculus
  siRNA target sequence for Itk (NM_010583.1,946-964).
ccaaggccatcataagtga

SEQ ID NO: 504557 - DNA, 19 bp, Mus musculus
  siRNA target sequence for Itk (NM_010583.1,965-983).
gaacccctgtataaaacat

SEQ ID NO: 504558 - DNA, 19 bp, Mus musculus
  siRNA target sequence for Itk (NM_010583.1,968-986).
cccctgtataaaacattat

SEQ ID NO: 504559 - DNA, 19 bp, Mus musculus
  siRNA target sequence for Itk (NM_010583.1,1028-1046).
ggctgagaagtatgtgttt

SEQ ID NO: 504560 - DNA, 19 bp, Mus musculus
  siRNA target sequence for Itk (NM_010583.1,1323-1341).
gaggcggaagtcatgatga

SEQ ID NO: 504561 - DNA, 19 bp, Mus musculus
  siRNA target sequence for Itk (NM_010583.1,1327-1345).
cggaagtcatgatgaaact

SEQ ID NO: 504562 - DNA, 19 bp, Mus musculus
  siRNA target sequence for Itk (NM_010583.1,1429-1447).
gctgcctgtcggattacct

SEQ ID NO: 504563 - DNA, 19 bp, Mus musculus
  siRNA target sequence for Itk (NM_010583.1,1430-1448).
ctgcctgtcggattacctt

SEQ ID NO: 504564 - DNA, 19 bp, Mus musculus
  siRNA target sequence for Itk (NM_010583.1,1513-1531).
gcatggcctacctggaaaa

SEQ ID NO: 504565 - DNA, 19 bp, Mus musculus
  siRNA target sequence for Itk (NM_010583.1,1629-1647).
cttgatgatcaatatacca

SEQ ID NO: 504566 - DNA, 19 bp, Mus musculus
  siRNA target sequence for Itk (NM_010583.1,1648-1666).
gctccacgggcaccaaatt

SEQ ID NO: 504567 - DNA, 19 bp, Mus musculus
  siRNA target sequence for Itk (NM_010583.1,1686-1704).
ccagaggtgttctccttta

SEQ ID NO: 504568 - DNA, 19 bp, Mus musculus
  siRNA target sequence for Itk (NM_010583.1,1770-1788).
ggcaaaatcccatacgaaa

SEQ ID NO: 504569 - DNA, 19 bp, Mus musculus
  siRNA target sequence for Itk (NM_010583.1,1771-1789).
gcaaaatcccatacgaaaa

SEQ ID NO: 504570 - DNA, 19 bp, Mus musculus
  siRNA target sequence for Itk (NM_010583.1,1822-1840).
gcactggctttcggttata

SEQ ID NO: 504571 - DNA, 19 bp, Mus musculus
  siRNA target sequence for Itk (NM_010583.1,1825-1843).
ctggctttcggttatacaa

SEQ ID NO: 504572 - DNA, 19 bp, Mus musculus
  siRNA target sequence for Itm2b (NM_008410.1,357-375).
gaggggcgtacctgtacaa

SEQ ID NO: 504573 - DNA, 19 bp, Mus musculus
  siRNA target sequence for Itm2b (NM_008410.1,359-377).
ggggcgtacctgtacaagt

SEQ ID NO: 504574 - DNA, 19 bp, Mus musculus
  siRNA target sequence for Itm2b (NM_008410.1,360-378).
gggcgtacctgtacaagta

SEQ ID NO: 504575 - DNA, 19 bp, Mus musculus
  siRNA target sequence for Itm2b (NM_008410.1,361-379).
ggcgtacctgtacaagtat

SEQ ID NO: 504576 - DNA, 19 bp, Mus musculus
  siRNA target sequence for Itm2b (NM_008410.1,362-380).
gcgtacctgtacaagtatt

SEQ ID NO: 504577 - DNA, 19 bp, Mus musculus
  siRNA target sequence for Itm2b (NM_008410.1,363-381).
cgtacctgtacaagtattt

SEQ ID NO: 504578 - DNA, 19 bp, Mus musculus
  siRNA target sequence for Itm2b (NM_008410.1,411-429).
gtggactaaagtacatcaa

SEQ ID NO: 504579 - DNA, 19 bp, Mus musculus
  siRNA target sequence for Itm2b (NM_008410.1,474-492).
ctcgctaccagacaattga

SEQ ID NO: 504580 - DNA, 19 bp, Mus musculus
  siRNA target sequence for Itm2b (NM_008410.1,477-495).
gctaccagacaattgaaga

SEQ ID NO: 504581 - DNA, 19 bp, Mus musculus
  siRNA target sequence for Itm2b (NM_008410.1,515-533).
gaagacgcagtggaattca

SEQ ID NO: 504582 - DNA, 19 bp, Mus musculus
  siRNA target sequence for Itm2b (NM_008410.1,518-536).
gacgcagtggaattcatca

SEQ ID NO: 504583 - DNA, 19 bp, Mus musculus
  siRNA target sequence for Itm2b (NM_008410.1,562-580).
cagcgatcctgccaacatt

SEQ ID NO: 504584 - DNA, 19 bp, Mus musculus
  siRNA target sequence for Itm2b (NM_008410.1,606-624).
ctgcttatttggaccttaa

SEQ ID NO: 504585 - DNA, 19 bp, Mus musculus
  siRNA target sequence for Itm2b (NM_008410.1,609-627).
cttatttggaccttaacct

SEQ ID NO: 504586 - DNA, 19 bp, Mus musculus
  siRNA target sequence for Itm2b (NM_008410.1,688-706).
ggagctccttattaacatt

SEQ ID NO: 504587 - DNA, 19 bp, Mus musculus
  siRNA target sequence for Itm2b (NM_008410.1,847-865).
ggaaacaattagaggtatt

SEQ ID NO: 504588 - DNA, 19 bp, Mus musculus
  siRNA target sequence for Itm2b (NM_008410.1,852-870).
caattagaggtattcagaa

SEQ ID NO: 504589 - DNA, 19 bp, Mus musculus
  siRNA target sequence for Itm2b (NM_008410.1,925-943).
ggagactttaatttgttct

SEQ ID NO: 504590 - DNA, 19 bp, Mus musculus
  siRNA target sequence for Itm2c (NM_022417.1,288-306).
ccatgggcatggttgtatt

SEQ ID NO: 504591 - DNA, 19 bp, Mus musculus
  siRNA target sequence for Itm2c (NM_022417.1,362-380).
cagctggcccgagataact

SEQ ID NO: 504592 - DNA, 19 bp, Mus musculus
  siRNA target sequence for Itm2c (NM_022417.1,365-383).
ctggcccgagataacttct

SEQ ID NO: 504593 - DNA, 19 bp, Mus musculus
  siRNA target sequence for Itm2c (NM_022417.1,475-493).
gaactatgaacgtattaat

SEQ ID NO: 504594 - DNA, 19 bp, Mus musculus
  siRNA target sequence for Itm2c (NM_022417.1,623-641).
ctacccccacgaaacttct

SEQ ID NO: 504595 - DNA, 19 bp, Mus musculus
  siRNA target sequence for Itm2c (NM_022417.1,853-871).
ccgccacttcgagaataca

SEQ ID NO: 504596 - DNA, 19 bp, Mus musculus
  siRNA target sequence for Itm2c (NM_022417.1,854-872).
cgccacttcgagaatacat

SEQ ID NO: 504597 - DNA, 19 bp, Mus musculus
  siRNA target sequence for Itm2c (NM_022417.1,855-873).
gccacttcgagaatacatt

SEQ ID NO: 504598 - DNA, 19 bp, Mus musculus
  siRNA target sequence for Jak1 (NM_146145.1,302-320).
catggcgttctgtgctaaa

SEQ ID NO: 504599 - DNA, 19 bp, Mus musculus
  siRNA target sequence for Jak1 (NM_146145.1,306-324).
gcgttctgtgctaaaatga

SEQ ID NO: 504600 - DNA, 19 bp, Mus musculus
  siRNA target sequence for Jak1 (NM_146145.1,413-431).
cctgggcagcggagagtat

SEQ ID NO: 504601 - DNA, 19 bp, Mus musculus
  siRNA target sequence for Jak1 (NM_146145.1,461-479).
ccaggagtgcagtatctct

SEQ ID NO: 504602 - DNA, 19 bp, Mus musculus
  siRNA target sequence for Jak1 (NM_146145.1,534-552).
gctccgaaccgaatcatca

SEQ ID NO: 504603 - DNA, 19 bp, Mus musculus
  siRNA target sequence for Jak1 (NM_146145.1,587-605).
ccgcatgaggttctacttt

SEQ ID NO: 504604 - DNA, 19 bp, Mus musculus
  siRNA target sequence for Jak1 (NM_146145.1,588-606).
cgcatgaggttctacttta

SEQ ID NO: 504605 - DNA, 19 bp, Mus musculus
  siRNA target sequence for Jak1 (NM_146145.1,608-626).
caactggcacggaaccaat

SEQ ID NO: 504606 - DNA, 19 bp, Mus musculus
  siRNA target sequence for Jak1 (NM_146145.1,613-631).
ggcacggaaccaatgacaa

SEQ ID NO: 504607 - DNA, 19 bp, Mus musculus
  siRNA target sequence for Jak1 (NM_146145.1,627-645).
gacaacgaacagtctgtat

SEQ ID NO: 504608 - DNA, 19 bp, Mus musculus
  siRNA target sequence for Jak1 (NM_146145.1,638-656).
gtctgtatggcgacattct

SEQ ID NO: 504609 - DNA, 19 bp, Mus musculus
  siRNA target sequence for Jak1 (NM_146145.1,744-762).
gcacagggacagtatgatt

SEQ ID NO: 504610 - DNA, 19 bp, Mus musculus
  siRNA target sequence for Jak1 (NM_146145.1,747-765).
cagggacagtatgatttga

SEQ ID NO: 504611 - DNA, 19 bp, Mus musculus
  siRNA target sequence for Jak1 (NM_146145.1,751-769).
gacagtatgatttgatcaa

SEQ ID NO: 504612 - DNA, 19 bp, Mus musculus
  siRNA target sequence for Jak1 (NM_146145.1,801-819).
gagcaagacggacatgata

SEQ ID NO: 504613 - DNA, 19 bp, Mus musculus
  siRNA target sequence for Jak1 (NM_146145.1,803-821).
gcaagacggacatgatatt

SEQ ID NO: 504614 - DNA, 19 bp, Mus musculus
  siRNA target sequence for Jak1 (NM_146145.1,807-825).
gacggacatgatattgaaa

SEQ ID NO: 504615 - DNA, 19 bp, Mus musculus
  siRNA target sequence for Jak1 (NM_146145.1,809-827).
cggacatgatattgaaaat

SEQ ID NO: 504616 - DNA, 19 bp, Mus musculus
  siRNA target sequence for Jak1 (NM_146145.1,859-877).
cccactatgccatgatgaa

SEQ ID NO: 504617 - DNA, 19 bp, Mus musculus
  siRNA target sequence for Jak1 (NM_146145.1,891-909).
ccggaacttcccaaagaca

SEQ ID NO: 504618 - DNA, 19 bp, Mus musculus
  siRNA target sequence for Jak1 (NM_146145.1,892-910).
cggaacttcccaaagacat

SEQ ID NO: 504619 - DNA, 19 bp, Mus musculus
  siRNA target sequence for Jak1 (NM_146145.1,911-929).
cagctacaagcgatatatt

SEQ ID NO: 504620 - DNA, 19 bp, Mus musculus
  siRNA target sequence for Jak1 (NM_146145.1,921-939).
cgatatattccagaaacat

SEQ ID NO: 504621 - DNA, 19 bp, Mus musculus
  siRNA target sequence for Jak1 (NM_146145.1,969-987).
cttaccaggatgcgaataa

SEQ ID NO: 504622 - DNA, 19 bp, Mus musculus
  siRNA target sequence for Jak1 (NM_146145.1,973-991).
ccaggatgcgaataaataa

SEQ ID NO: 504623 - DNA, 19 bp, Mus musculus
  siRNA target sequence for Jak1 (NM_146145.1,976-994).
ggatgcgaataaataatgt

SEQ ID NO: 504624 - DNA, 19 bp, Mus musculus
  siRNA target sequence for Jak1 (NM_146145.1,977-995).
gatgcgaataaataatgtt

SEQ ID NO: 504625 - DNA, 19 bp, Mus musculus
  siRNA target sequence for Jak1 (NM_146145.1,1050-1068).
catgacctgaaggtgaaat

SEQ ID NO: 504626 - DNA, 19 bp, Mus musculus
  siRNA target sequence for Jak1 (NM_146145.1,1104-1122).
cattatggagctgaaatat

SEQ ID NO: 504627 - DNA, 19 bp, Mus musculus
  siRNA target sequence for Jak1 (NM_146145.1,1127-1145).
gacttctatgctactgatt

SEQ ID NO: 504628 - DNA, 19 bp, Mus musculus
  siRNA target sequence for Jak1 (NM_146145.1,1167-1185).
cgatgccattcgaatgaca

SEQ ID NO: 504629 - DNA, 19 bp, Mus musculus
  siRNA target sequence for Jak1 (NM_146145.1,1178-1196).
gaatgacagtggcaatgtt

SEQ ID NO: 504630 - DNA, 19 bp, Mus musculus
  siRNA target sequence for Jak1 (NM_146145.1,1237-1255).
ggcggcagaaaccaaatgt

SEQ ID NO: 504631 - DNA, 19 bp, Mus musculus
  siRNA target sequence for Jak1 (NM_146145.1,1238-1256).
gcggcagaaaccaaatgtt

SEQ ID NO: 504632 - DNA, 19 bp, Mus musculus
  siRNA target sequence for Jak1 (NM_146145.1,1240-1258).
ggcagaaaccaaatgttgt

SEQ ID NO: 504633 - DNA, 19 bp, Mus musculus
  siRNA target sequence for Jak1 (NM_146145.1,1291-1309).
ggaaaaaactggaatataa

SEQ ID NO: 504634 - DNA, 19 bp, Mus musculus
  siRNA target sequence for Jak1 (NM_146145.1,1292-1310).
gaaaaaactggaatataat

SEQ ID NO: 504635 - DNA, 19 bp, Mus musculus
  siRNA target sequence for Jak1 (NM_146145.1,1343-1361).
ccgggaagagtggaacaat

SEQ ID NO: 504636 - DNA, 19 bp, Mus musculus
  siRNA target sequence for Jak1 (NM_146145.1,1344-1362).
cgggaagagtggaacaatt

SEQ ID NO: 504637 - DNA, 19 bp, Mus musculus
  siRNA target sequence for Jak1 (NM_146145.1,1345-1363).
gggaagagtggaacaattt

SEQ ID NO: 504638 - DNA, 19 bp, Mus musculus
  siRNA target sequence for Jak1 (NM_146145.1,1346-1364).
ggaagagtggaacaatttt

SEQ ID NO: 504639 - DNA, 19 bp, Mus musculus
  siRNA target sequence for Jak1 (NM_146145.1,1350-1368).
gagtggaacaatttttcct

SEQ ID NO: 504640 - DNA, 19 bp, Mus musculus
  siRNA target sequence for Jak1 (NM_146145.1,1352-1370).
gtggaacaatttttcctat

SEQ ID NO: 504641 - DNA, 19 bp, Mus musculus
  siRNA target sequence for Jak1 (NM_146145.1,1384-1402).
cccacattgtaataaagga

SEQ ID NO: 504642 - DNA, 19 bp, Mus musculus
  siRNA target sequence for Jak1 (NM_146145.1,1401-1419).
gagtctgtggtcagcatta

SEQ ID NO: 504643 - DNA, 19 bp, Mus musculus
  siRNA target sequence for Jak1 (NM_146145.1,1526-1544).
ccattacctctgtactgat

SEQ ID NO: 504644 - DNA, 19 bp, Mus musculus
  siRNA target sequence for Jak1 (NM_146145.1,1590-1608).
ggtccaatctgcacagaat

SEQ ID NO: 504645 - DNA, 19 bp, Mus musculus
  siRNA target sequence for Jak1 (NM_146145.1,1666-1684).
ggagctgcaccgactttga

SEQ ID NO: 504646 - DNA, 19 bp, Mus musculus
  siRNA target sequence for Jak1 (NM_146145.1,1672-1690).
gcaccgactttgacaacat

SEQ ID NO: 504647 - DNA, 19 bp, Mus musculus
  siRNA target sequence for Jak1 (NM_146145.1,1675-1693).
ccgactttgacaacattct

SEQ ID NO: 504648 - DNA, 19 bp, Mus musculus
  siRNA target sequence for Jak1 (NM_146145.1,1676-1694).
cgactttgacaacattctt

SEQ ID NO: 504649 - DNA, 19 bp, Mus musculus
  siRNA target sequence for Jak1 (NM_146145.1,1677-1695).
gactttgacaacattctta

SEQ ID NO: 504650 - DNA, 19 bp, Mus musculus
  siRNA target sequence for Jak1 (NM_146145.1,1739-1757).
gaagcagttcaagaacttt

SEQ ID NO: 504651 - DNA, 19 bp, Mus musculus
  siRNA target sequence for Jak1 (NM_146145.1,1816-1834).
gcctgcgagacctcatgaa

SEQ ID NO: 504652 - DNA, 19 bp, Mus musculus
  siRNA target sequence for Jak1 (NM_146145.1,1853-1871).
cctgcgcacggacaacata

SEQ ID NO: 504653 - DNA, 19 bp, Mus musculus
  siRNA target sequence for Jak1 (NM_146145.1,1854-1872).
ctgcgcacggacaacataa

SEQ ID NO: 504654 - DNA, 19 bp, Mus musculus
  siRNA target sequence for Jak1 (NM_146145.1,1857-1875).
cgcacggacaacataagct

SEQ ID NO: 504655 - DNA, 19 bp, Mus musculus
  siRNA target sequence for Jak1 (NM_146145.1,1858-1876).
gcacggacaacataagctt

SEQ ID NO: 504656 - DNA, 19 bp, Mus musculus
  siRNA target sequence for Jak1 (NM_146145.1,1899-1917).
cctaagcctcgagaaatct

SEQ ID NO: 504657 - DNA, 19 bp, Mus musculus
  siRNA target sequence for Jak1 (NM_146145.1,1984-2002).
gctttgatcggatccttaa

SEQ ID NO: 504658 - DNA, 19 bp, Mus musculus
  siRNA target sequence for Jak1 (NM_146145.1,1994-2012).
gatccttaagaaagatatt

SEQ ID NO: 504659 - DNA, 19 bp, Mus musculus
  siRNA target sequence for Jak1 (NM_146145.1,2359-2377).
ccagtgccctgagttactt

SEQ ID NO: 504660 - DNA, 19 bp, Mus musculus
  siRNA target sequence for Jak1 (NM_146145.1,2369-2387).
gagttacttggaagataaa

SEQ ID NO: 504661 - DNA, 19 bp, Mus musculus
  siRNA target sequence for Jak1 (NM_146145.1,2400-2418).
ggaaatgtgtgcactaaaa

SEQ ID NO: 504662 - DNA, 19 bp, Mus musculus
  siRNA target sequence for Jak1 (NM_146145.1,2430-2448).
gcccgtgagggcattgaca

SEQ ID NO: 504663 - DNA, 19 bp, Mus musculus
  siRNA target sequence for Jak1 (NM_146145.1,2457-2475).
ggcccgttcatcaagctta

SEQ ID NO: 504664 - DNA, 19 bp, Mus musculus
  siRNA target sequence for Jak1 (NM_146145.1,2540-2558).
cgctcctgagtgtgttgaa

SEQ ID NO: 504665 - DNA, 19 bp, Mus musculus
  siRNA target sequence for Jak1 (NM_146145.1,2630-2648).
cggagagattcctctcaaa

SEQ ID NO: 504666 - DNA, 19 bp, Mus musculus
  siRNA target sequence for Jak1 (NM_146145.1,2632-2650).
gagagattcctctcaaaga

SEQ ID NO: 504667 - DNA, 19 bp, Mus musculus
  siRNA target sequence for Jak1 (NM_146145.1,2666-2684).
gaaagagaggttttatgaa

SEQ ID NO: 504668 - DNA, 19 bp, Mus musculus
  siRNA target sequence for Jak1 (NM_146145.1,2735-2753).
gactcgctgcatgaactat

SEQ ID NO: 504669 - DNA, 19 bp, Mus musculus
  siRNA target sequence for Jak1 (NM_146145.1,2816-2834).
gaatccagacattgtttca

SEQ ID NO: 504670 - DNA, 19 bp, Mus musculus
  siRNA target sequence for Jak1 (NM_146145.1,2927-2945).
ggttgagctctgcagatat

SEQ ID NO: 504671 - DNA, 19 bp, Mus musculus
  siRNA target sequence for Jak1 (NM_146145.1,3032-3050).
gaaggagatagagatctta

SEQ ID NO: 504672 - DNA, 19 bp, Mus musculus
  siRNA target sequence for Jak1 (NM_146145.1,3142-3160).
cttcgggaagcctaaagga

SEQ ID NO: 504673 - DNA, 19 bp, Mus musculus
  siRNA target sequence for Jak1 (NM_146145.1,3148-3166).
gaagcctaaaggagtatct

SEQ ID NO: 504674 - DNA, 19 bp, Mus musculus
  siRNA target sequence for Jak1 (NM_146145.1,3226-3244).
gtaaggggatggactactt

SEQ ID NO: 504675 - DNA, 19 bp, Mus musculus
  siRNA target sequence for Jak1 (NM_146145.1,3245-3263).
gggttctcggcaatacgtt

SEQ ID NO: 504676 - DNA, 19 bp, Mus musculus
  siRNA target sequence for Jak1 (NM_146145.1,3343-3361).
caattgaaaccgataagga

SEQ ID NO: 504677 - DNA, 19 bp, Mus musculus
  siRNA target sequence for Jak1 (NM_146145.1,3409-3427).
ctccggaatgtttaatcca

SEQ ID NO: 504678 - DNA, 19 bp, Mus musculus
  siRNA target sequence for Jak1 (NM_146145.1,3418-3436).
gtttaatccagtgtaaatt

SEQ ID NO: 504679 - DNA, 19 bp, Mus musculus
  siRNA target sequence for Jak1 (NM_146145.1,3521-3539).
cttgttcctgaaaatgata

SEQ ID NO: 504680 - DNA, 19 bp, Mus musculus
  siRNA target sequence for Jak1 (NM_146145.1,3562-3580).
cagtgacacggcttgtgaa

SEQ ID NO: 504681 - DNA, 19 bp, Mus musculus
  siRNA target sequence for Jak1 (NM_146145.1,3639-3657).
cagcttatgagaaaatgct

SEQ ID NO: 504682 - DNA, 19 bp, Mus musculus
  siRNA target sequence for Jak1 (NM_146145.1,3649-3667).
gaaaatgctgggaattcca

SEQ ID NO: 504683 - DNA, 19 bp, Mus musculus
  siRNA target sequence for Jak1 (NM_146145.1,3658-3676).
gggaattccaaccatctaa

SEQ ID NO: 504684 - DNA, 19 bp, Mus musculus
  siRNA target sequence for Jak1 (NM_146145.1,3670-3688).
catctaaccggacaacttt

SEQ ID NO: 504685 - DNA, 19 bp, Mus musculus
  siRNA target sequence for Jak1 (NM_146145.1,3673-3691).
ctaaccggacaacttttca

SEQ ID NO: 504686 - DNA, 19 bp, Mus musculus
  siRNA target sequence for Jak2 (NM_008413.1,102-120).
ggcctgccttacaatgaca

SEQ ID NO: 504687 - DNA, 19 bp, Mus musculus
  siRNA target sequence for Jak2 (NM_008413.1,137-155).
ccacatctcctgtacatca

SEQ ID NO: 504688 - DNA, 19 bp, Mus musculus
  siRNA target sequence for Jak2 (NM_008413.1,140-158).
catctcctgtacatcagaa

SEQ ID NO: 504689 - DNA, 19 bp, Mus musculus
  siRNA target sequence for Jak2 (NM_008413.1,211-229).
caagtgtatctgtaccatt

SEQ ID NO: 504690 - DNA, 19 bp, Mus musculus
  siRNA target sequence for Jak2 (NM_008413.1,241-259).
gctgaaggagagtatctga

SEQ ID NO: 504691 - DNA, 19 bp, Mus musculus
  siRNA target sequence for Jak2 (NM_008413.1,242-260).
ctgaaggagagtatctgaa

SEQ ID NO: 504692 - DNA, 19 bp, Mus musculus
  siRNA target sequence for Jak2 (NM_008413.1,274-292).
gagtatgttgcagaagaaa

SEQ ID NO: 504693 - DNA, 19 bp, Mus musculus
  siRNA target sequence for Jak2 (NM_008413.1,298-316).
gtggctgcttctaaagctt

SEQ ID NO: 504694 - DNA, 19 bp, Mus musculus
  siRNA target sequence for Jak2 (NM_008413.1,320-338).
gtattacgcctgtgtatca

SEQ ID NO: 504695 - DNA, 19 bp, Mus musculus
  siRNA target sequence for Jak2 (NM_008413.1,326-344).
cgcctgtgtatcataatat

SEQ ID NO: 504696 - DNA, 19 bp, Mus musculus
  siRNA target sequence for Jak2 (NM_008413.1,375-393).
ctggtacccacccaatcat

SEQ ID NO: 504697 - DNA, 19 bp, Mus musculus
  siRNA target sequence for Jak2 (NM_008413.1,377-395).
ggtacccacccaatcatgt

SEQ ID NO: 504698 - DNA, 19 bp, Mus musculus
  siRNA target sequence for Jak2 (NM_008413.1,411-429).
gtcaaccaggcatgacata

SEQ ID NO: 504699 - DNA, 19 bp, Mus musculus
  siRNA target sequence for Jak2 (NM_008413.1,413-431).
caaccaggcatgacatact

SEQ ID NO: 504700 - DNA, 19 bp, Mus musculus
  siRNA target sequence for Jak2 (NM_008413.1,424-442).
gacatactctacaggataa

SEQ ID NO: 504701 - DNA, 19 bp, Mus musculus
  siRNA target sequence for Jak2 (NM_008413.1,556-574).
gttcagtggcggcatgatt

SEQ ID NO: 504702 - DNA, 19 bp, Mus musculus
  siRNA target sequence for Jak2 (NM_008413.1,599-617).
ctgtgactcatgaaactca

SEQ ID NO: 504703 - DNA, 19 bp, Mus musculus
  siRNA target sequence for Jak2 (NM_008413.1,631-649).
gggatggcggtgttagaca

SEQ ID NO: 504704 - DNA, 19 bp, Mus musculus
  siRNA target sequence for Jak2 (NM_008413.1,632-650).
ggatggcggtgttagacat

SEQ ID NO: 504705 - DNA, 19 bp, Mus musculus
  siRNA target sequence for Jak2 (NM_008413.1,637-655).
gcggtgttagacatgatga

SEQ ID NO: 504706 - DNA, 19 bp, Mus musculus
  siRNA target sequence for Jak2 (NM_008413.1,680-698).
ctccactggctgtctataa

SEQ ID NO: 504707 - DNA, 19 bp, Mus musculus
  siRNA target sequence for Jak2 (NM_008413.1,744-762).
gatccaagactatcacatt

SEQ ID NO: 504708 - DNA, 19 bp, Mus musculus
  siRNA target sequence for Jak2 (NM_008413.1,747-765).
ccaagactatcacatttta

SEQ ID NO: 504709 - DNA, 19 bp, Mus musculus
  siRNA target sequence for Jak2 (NM_008413.1,748-766).
caagactatcacattttaa

SEQ ID NO: 504710 - DNA, 19 bp, Mus musculus
  siRNA target sequence for Jak2 (NM_008413.1,786-804).
cagatttcgcagattcatt

SEQ ID NO: 504711 - DNA, 19 bp, Mus musculus
  siRNA target sequence for Jak2 (NM_008413.1,788-806).
gatttcgcagattcattca

SEQ ID NO: 504712 - DNA, 19 bp, Mus musculus
  siRNA target sequence for Jak2 (NM_008413.1,794-812).
gcagattcattcagcaatt

SEQ ID NO: 504713 - DNA, 19 bp, Mus musculus
  siRNA target sequence for Jak2 (NM_008413.1,805-823).
cagcaattcagtcaatgta

SEQ ID NO: 504714 - DNA, 19 bp, Mus musculus
  siRNA target sequence for Jak2 (NM_008413.1,807-825).
gcaattcagtcaatgtaaa

SEQ ID NO: 504715 - DNA, 19 bp, Mus musculus
  siRNA target sequence for Jak2 (NM_008413.1,826-844).
gccactgccaggaacctaa

SEQ ID NO: 504716 - DNA, 19 bp, Mus musculus
  siRNA target sequence for Jak2 (NM_008413.1,840-858).
cctaaaacttaagtatctt

SEQ ID NO: 504717 - DNA, 19 bp, Mus musculus
  siRNA target sequence for Jak2 (NM_008413.1,841-859).
ctaaaacttaagtatctta

SEQ ID NO: 504718 - DNA, 19 bp, Mus musculus
  siRNA target sequence for Jak2 (NM_008413.1,934-952).
ggtgaggagatttttgcaa

SEQ ID NO: 504719 - DNA, 19 bp, Mus musculus
  siRNA target sequence for Jak2 (NM_008413.1,965-983).
ctggaaacggtggaattca

SEQ ID NO: 504720 - DNA, 19 bp, Mus musculus
  siRNA target sequence for Jak2 (NM_008413.1,967-985).
ggaaacggtggaattcagt

SEQ ID NO: 504721 - DNA, 19 bp, Mus musculus
  siRNA target sequence for Jak2 (NM_008413.1,986-1004).
ggtcaagagggaaacataa

SEQ ID NO: 504722 - DNA, 19 bp, Mus musculus
  siRNA target sequence for Jak2 (NM_008413.1,1029-1047).
ggacgtacagttatattgt

SEQ ID NO: 504723 - DNA, 19 bp, Mus musculus
  siRNA target sequence for Jak2 (NM_008413.1,1033-1051).
gtacagttatattgtgatt

SEQ ID NO: 504724 - DNA, 19 bp, Mus musculus
  siRNA target sequence for Jak2 (NM_008413.1,1046-1064).
gtgatttccctgatattat

SEQ ID NO: 504725 - DNA, 19 bp, Mus musculus
  siRNA target sequence for Jak2 (NM_008413.1,1089-1107).
ccaggaatgctcaaatgaa

SEQ ID NO: 504726 - DNA, 19 bp, Mus musculus
  siRNA target sequence for Jak2 (NM_008413.1,1090-1108).
caggaatgctcaaatgaaa

SEQ ID NO: 504727 - DNA, 19 bp, Mus musculus
  siRNA target sequence for Jak2 (NM_008413.1,1097-1115).
gctcaaatgaaagtagaat

SEQ ID NO: 504728 - DNA, 19 bp, Mus musculus
  siRNA target sequence for Jak2 (NM_008413.1,1112-1130).
gaattgtaactgtccataa

SEQ ID NO: 504729 - DNA, 19 bp, Mus musculus
  siRNA target sequence for Jak2 (NM_008413.1,1125-1143).
ccataaacaagatggtaaa

SEQ ID NO: 504730 - DNA, 19 bp, Mus musculus
  siRNA target sequence for Jak2 (NM_008413.1,1139-1157).
gtaaagttttggagataga

SEQ ID NO: 504731 - DNA, 19 bp, Mus musculus
  siRNA target sequence for Jak2 (NM_008413.1,1152-1170).
gatagaacttagctcatta

SEQ ID NO: 504732 - DNA, 19 bp, Mus musculus
  siRNA target sequence for Jak2 (NM_008413.1,1193-1211).
cattaattgacgggtatta

SEQ ID NO: 504733 - DNA, 19 bp, Mus musculus
  siRNA target sequence for Jak2 (NM_008413.1,1203-1221).
cgggtattacagactaact

SEQ ID NO: 504734 - DNA, 19 bp, Mus musculus
  siRNA target sequence for Jak2 (NM_008413.1,1267-1285).
gtgctcgagaacatacaca

SEQ ID NO: 504735 - DNA, 19 bp, Mus musculus
  siRNA target sequence for Jak2 (NM_008413.1,1290-1308).
ctgccacggcccaatatca

SEQ ID NO: 504736 - DNA, 19 bp, Mus musculus
  siRNA target sequence for Jak2 (NM_008413.1,1292-1310).
gccacggcccaatatcaat

SEQ ID NO: 504737 - DNA, 19 bp, Mus musculus
  siRNA target sequence for Jak2 (NM_008413.1,1296-1314).
cggcccaatatcaatggat

SEQ ID NO: 504738 - DNA, 19 bp, Mus musculus
  siRNA target sequence for Jak2 (NM_008413.1,1297-1315).
ggcccaatatcaatggatt

SEQ ID NO: 504739 - DNA, 19 bp, Mus musculus
  siRNA target sequence for Jak2 (NM_008413.1,1299-1317).
cccaatatcaatggatttt

SEQ ID NO: 504740 - DNA, 19 bp, Mus musculus
  siRNA target sequence for Jak2 (NM_008413.1,1343-1361).
gtaaccagactggactata

SEQ ID NO: 504741 - DNA, 19 bp, Mus musculus
  siRNA target sequence for Jak2 (NM_008413.1,1378-1396).
cctaaggacttcaacaaat

SEQ ID NO: 504742 - DNA, 19 bp, Mus musculus
  siRNA target sequence for Jak2 (NM_008413.1,1435-1453).
gaatataaacactgtttga

SEQ ID NO: 504743 - DNA, 19 bp, Mus musculus
  siRNA target sequence for Jak2 (NM_008413.1,1452-1470).
gattacgaagaatgagaat

SEQ ID NO: 504744 - DNA, 19 bp, Mus musculus
  siRNA target sequence for Jak2 (NM_008413.1,1549-1567).
gtgcgctcagacagtatca

SEQ ID NO: 504745 - DNA, 19 bp, Mus musculus
  siRNA target sequence for Jak2 (NM_008413.1,1552-1570).
cgctcagacagtatcatct

SEQ ID NO: 504746 - DNA, 19 bp, Mus musculus
  siRNA target sequence for Jak2 (NM_008413.1,1667-1685).
cattacagaggcataataa

SEQ ID NO: 504747 - DNA, 19 bp, Mus musculus
  siRNA target sequence for Jak2 (NM_008413.1,1672-1690).
cagaggcataataatgtga

SEQ ID NO: 504748 - DNA, 19 bp, Mus musculus
  siRNA target sequence for Jak2 (NM_008413.1,1674-1692).
gaggcataataatgtgaat

SEQ ID NO: 504749 - DNA, 19 bp, Mus musculus
  siRNA target sequence for Jak2 (NM_008413.1,1676-1694).
ggcataataatgtgaatca

SEQ ID NO: 504750 - DNA, 19 bp, Mus musculus
  siRNA target sequence for Jak2 (NM_008413.1,1715-1733).
ggaatgaagatttaatatt

SEQ ID NO: 504751 - DNA, 19 bp, Mus musculus
  siRNA target sequence for Jak2 (NM_008413.1,1747-1765).
ggccaaggtacttttacaa

SEQ ID NO: 504752 - DNA, 19 bp, Mus musculus
  siRNA target sequence for Jak2 (NM_008413.1,1748-1766).
gccaaggtacttttacaaa

SEQ ID NO: 504753 - DNA, 19 bp, Mus musculus
  siRNA target sequence for Jak2 (NM_008413.1,1749-1767).
ccaaggtacttttacaaaa

SEQ ID NO: 504754 - DNA, 19 bp, Mus musculus
  siRNA target sequence for Jak2 (NM_008413.1,1850-1868).
cacataggaactattcaga

SEQ ID NO: 504755 - DNA, 19 bp, Mus musculus
  siRNA target sequence for Jak2 (NM_008413.1,1946-1964).
gtggagaggagaacattct

SEQ ID NO: 504756 - DNA, 19 bp, Mus musculus
  siRNA target sequence for Jak2 (NM_008413.1,1965-1983).
ggttcaagaatttgtaaaa

SEQ ID NO: 504757 - DNA, 19 bp, Mus musculus
  siRNA target sequence for Jak2 (NM_008413.1,2064-2082).
ggcatgggccatgcatttt

SEQ ID NO: 504758 - DNA, 19 bp, Mus musculus
  siRNA target sequence for Jak2 (NM_008413.1,2120-2138).
ctaaaaatatcctgcttat

SEQ ID NO: 504759 - DNA, 19 bp, Mus musculus
  siRNA target sequence for Jak2 (NM_008413.1,2163-2181).
gaacccacctttcatcaaa

SEQ ID NO: 504760 - DNA, 19 bp, Mus musculus
  siRNA target sequence for Jak2 (NM_008413.1,2188-2206).
gatcctggcattagcatta

SEQ ID NO: 504761 - DNA, 19 bp, Mus musculus
  siRNA target sequence for Jak2 (NM_008413.1,2192-2210).
ctggcattagcattacagt

SEQ ID NO: 504762 - DNA, 19 bp, Mus musculus
  siRNA target sequence for Jak2 (NM_008413.1,2196-2214).
cattagcattacagttcta

SEQ ID NO: 504763 - DNA, 19 bp, Mus musculus
  siRNA target sequence for Jak2 (NM_008413.1,2246-2264).
gggtacctcctgaatgcat

SEQ ID NO: 504764 - DNA, 19 bp, Mus musculus
  siRNA target sequence for Jak2 (NM_008413.1,2247-2265).
ggtacctcctgaatgcatt

SEQ ID NO: 504765 - DNA, 19 bp, Mus musculus
  siRNA target sequence for Jak2 (NM_008413.1,2251-2269).
cctcctgaatgcattgaga

SEQ ID NO: 504766 - DNA, 19 bp, Mus musculus
  siRNA target sequence for Jak2 (NM_008413.1,2261-2279).
gcattgagaatcctaaaaa

SEQ ID NO: 504767 - DNA, 19 bp, Mus musculus
  siRNA target sequence for Jak2 (NM_008413.1,2266-2284).
gagaatcctaaaaatctca

SEQ ID NO: 504768 - DNA, 19 bp, Mus musculus
  siRNA target sequence for Jak2 (NM_008413.1,2426-2444).
cagagttagcaaaccttat

SEQ ID NO: 504769 - DNA, 19 bp, Mus musculus
  siRNA target sequence for Jak2 (NM_008413.1,2428-2446).
gagttagcaaaccttataa

SEQ ID NO: 504770 - DNA, 19 bp, Mus musculus
  siRNA target sequence for Jak2 (NM_008413.1,2458-2476).
gactatgagccagatttca

SEQ ID NO: 504771 - DNA, 19 bp, Mus musculus
  siRNA target sequence for Jak2 (NM_008413.1,2503-2521).
gatcttaacagcctgttta

SEQ ID NO: 504772 - DNA, 19 bp, Mus musculus
  siRNA target sequence for Jak2 (NM_008413.1,2513-2531).
gcctgtttactccagatta

SEQ ID NO: 504773 - DNA, 19 bp, Mus musculus
  siRNA target sequence for Jak2 (NM_008413.1,2514-2532).
cctgtttactccagattat

SEQ ID NO: 504774 - DNA, 19 bp, Mus musculus
  siRNA target sequence for Jak2 (NM_008413.1,2517-2535).
gtttactccagattatgaa

SEQ ID NO: 504775 - DNA, 19 bp, Mus musculus
  siRNA target sequence for Jak2 (NM_008413.1,2551-2569).
gacatgctaccaaacatga

SEQ ID NO: 504776 - DNA, 19 bp, Mus musculus
  siRNA target sequence for Jak2 (NM_008413.1,2556-2574).
gctaccaaacatgagaata

SEQ ID NO: 504777 - DNA, 19 bp, Mus musculus
  siRNA target sequence for Jak2 (NM_008413.1,2764-2782).
cacctccgagactttgaga

SEQ ID NO: 504778 - DNA, 19 bp, Mus musculus
  siRNA target sequence for Jak2 (NM_008413.1,2815-2833).
gacaacatcgtcaagtaca

SEQ ID NO: 504779 - DNA, 19 bp, Mus musculus
  siRNA target sequence for Jak2 (NM_008413.1,2851-2869).
gcgggtcggcgcaacctaa

SEQ ID NO: 504780 - DNA, 19 bp, Mus musculus
  siRNA target sequence for Jak2 (NM_008413.1,2854-2872).
ggtcggcgcaacctaagat

SEQ ID NO: 504781 - DNA, 19 bp, Mus musculus
  siRNA target sequence for Jak2 (NM_008413.1,2855-2873).
gtcggcgcaacctaagatt

SEQ ID NO: 504782 - DNA, 19 bp, Mus musculus
  siRNA target sequence for Jak2 (NM_008413.1,2857-2875).
cggcgcaacctaagattaa

SEQ ID NO: 504783 - DNA, 19 bp, Mus musculus
  siRNA target sequence for Jak2 (NM_008413.1,2858-2876).
ggcgcaacctaagattaat

SEQ ID NO: 504784 - DNA, 19 bp, Mus musculus
  siRNA target sequence for Jak2 (NM_008413.1,2859-2877).
gcgcaacctaagattaatt

SEQ ID NO: 504785 - DNA, 19 bp, Mus musculus
  siRNA target sequence for Jak2 (NM_008413.1,2860-2878).
cgcaacctaagattaatta

SEQ ID NO: 504786 - DNA, 19 bp, Mus musculus
  siRNA target sequence for Jak2 (NM_008413.1,2861-2879).
gcaacctaagattaattat

SEQ ID NO: 504787 - DNA, 19 bp, Mus musculus
  siRNA target sequence for Jak2 (NM_008413.1,2865-2883).
cctaagattaattatggaa

SEQ ID NO: 504788 - DNA, 19 bp, Mus musculus
  siRNA target sequence for Jak2 (NM_008413.1,2866-2884).
ctaagattaattatggaat

SEQ ID NO: 504789 - DNA, 19 bp, Mus musculus
  siRNA target sequence for Jak2 (NM_008413.1,2897-2915).
gaagtttacgagactatct

SEQ ID NO: 504790 - DNA, 19 bp, Mus musculus
  siRNA target sequence for Jak2 (NM_008413.1,2929-2947).
gaacggatagatcacaaaa

SEQ ID NO: 504791 - DNA, 19 bp, Mus musculus
  siRNA target sequence for Jak2 (NM_008413.1,2933-2951).
ggatagatcacaaaaaact

SEQ ID NO: 504792 - DNA, 19 bp, Mus musculus
  siRNA target sequence for Jak2 (NM_008413.1,2934-2952).
gatagatcacaaaaaactt

SEQ ID NO: 504793 - DNA, 19 bp, Mus musculus
  siRNA target sequence for Jak2 (NM_008413.1,2992-3010).
cttggtacaaaaaggtata

SEQ ID NO: 504794 - DNA, 19 bp, Mus musculus
  siRNA target sequence for Jak2 (NM_008413.1,3097-3115).
ccgcaggacaaagaatact

SEQ ID NO: 504795 - DNA, 19 bp, Mus musculus
  siRNA target sequence for Jak2 (NM_008413.1,3098-3116).
cgcaggacaaagaatacta

SEQ ID NO: 504796 - DNA, 19 bp, Mus musculus
  siRNA target sequence for Jak2 (NM_008413.1,3131-3149).
caggggaaagccccatatt

SEQ ID NO: 504797 - DNA, 19 bp, Mus musculus
  siRNA target sequence for Jak2 (NM_008413.1,3217-3235).
gtggttctatacgaacttt

SEQ ID NO: 504798 - DNA, 19 bp, Mus musculus
  siRNA target sequence for Jak2 (NM_008413.1,3220-3238).
gttctatacgaacttttca

SEQ ID NO: 504799 - DNA, 19 bp, Mus musculus
  siRNA target sequence for Jak2 (NM_008413.1,3243-3261).
catcgagaagagtaaaagt

SEQ ID NO: 504800 - DNA, 19 bp, Mus musculus
  siRNA target sequence for Jak2 (NM_008413.1,3260-3278).
gtccacccgtggaatttat

SEQ ID NO: 504801 - DNA, 19 bp, Mus musculus
  siRNA target sequence for Jak2 (NM_008413.1,3270-3288).
ggaatttatgcgaatgatt

SEQ ID NO: 504802 - DNA, 19 bp, Mus musculus
  siRNA target sequence for Jak2 (NM_008413.1,3279-3297).
gcgaatgattggcaatgat

SEQ ID NO: 504803 - DNA, 19 bp, Mus musculus
  siRNA target sequence for Jak2 (NM_008413.1,3280-3298).
cgaatgattggcaatgata

SEQ ID NO: 504804 - DNA, 19 bp, Mus musculus
  siRNA target sequence for Jak2 (NM_008413.1,3281-3299).
gaatgattggcaatgataa

SEQ ID NO: 504805 - DNA, 19 bp, Mus musculus
  siRNA target sequence for Jak2 (NM_008413.1,3301-3319).
caagggcaaatgattgtgt

SEQ ID NO: 504806 - DNA, 19 bp, Mus musculus
  siRNA target sequence for Jak2 (NM_008413.1,3370-3388).
ggatgcccagatgagattt

SEQ ID NO: 504807 - DNA, 19 bp, Mus musculus
  siRNA target sequence for Jak2 (NM_008413.1,3376-3394).
ccagatgagatttatgtga

SEQ ID NO: 504808 - DNA, 19 bp, Mus musculus
  siRNA target sequence for Jak2 (NM_008413.1,3401-3419).
cagagtgctggaacaacaa

SEQ ID NO: 504809 - DNA, 19 bp, Mus musculus
  siRNA target sequence for Katna1 (NM_011835.1,196-214).
ctactatcagggagttctt

SEQ ID NO: 504810 - DNA, 19 bp, Mus musculus
  siRNA target sequence for Katna1 (NM_011835.1,229-247).
gtacctgtactcagtcaaa

SEQ ID NO: 504811 - DNA, 19 bp, Mus musculus
  siRNA target sequence for Katna1 (NM_011835.1,232-250).
cctgtactcagtcaaagat

SEQ ID NO: 504812 - DNA, 19 bp, Mus musculus
  siRNA target sequence for Katna1 (NM_011835.1,233-251).
ctgtactcagtcaaagata

SEQ ID NO: 504813 - DNA, 19 bp, Mus musculus
  siRNA target sequence for Katna1 (NM_011835.1,235-253).
gtactcagtcaaagataca

SEQ ID NO: 504814 - DNA, 19 bp, Mus musculus
  siRNA target sequence for Katna1 (NM_011835.1,311-329).
gttaaggatatcatgaaaa

SEQ ID NO: 504815 - DNA, 19 bp, Mus musculus
  siRNA target sequence for Katna1 (NM_011835.1,1106-1124).
gctgagctgctggttcaaa

SEQ ID NO: 504816 - DNA, 19 bp, Mus musculus
  siRNA target sequence for Katna1 (NM_011835.1,1229-1247).
cgtctggagaaaagaatct

SEQ ID NO: 504817 - DNA, 19 bp, Mus musculus
  siRNA target sequence for Katna1 (NM_011835.1,1230-1248).
gtctggagaaaagaatcta

SEQ ID NO: 504818 - DNA, 19 bp, Mus musculus
  siRNA target sequence for Katna1 (NM_011835.1,1366-1384).
gggtgcagacattaccaat

SEQ ID NO: 504819 - DNA, 19 bp, Mus musculus
  siRNA target sequence for Katna1 (NM_011835.1,1370-1388).
gcagacattaccaatgtat

SEQ ID NO: 504820 - DNA, 19 bp, Mus musculus
  siRNA target sequence for Katna1 (NM_011835.1,1538-1556).
gctgcagatattgaaagat

SEQ ID NO: 504821 - DNA, 19 bp, Mus musculus
  siRNA target sequence for Kcnj1 (NM_019659.2,242-260).
ggtttgtcactcacatatt

SEQ ID NO: 504822 - DNA, 19 bp, Mus musculus
  siRNA target sequence for Kcnj1 (NM_019659.2,312-330).
catcgagtttggcaatgta

SEQ ID NO: 504823 - DNA, 19 bp, Mus musculus
  siRNA target sequence for Kcnj1 (NM_019659.2,315-333).
cgagtttggcaatgtagat

SEQ ID NO: 504824 - DNA, 19 bp, Mus musculus
  siRNA target sequence for Kcnj1 (NM_019659.2,331-349).
gatgcacagtcgaggttta

SEQ ID NO: 504825 - DNA, 19 bp, Mus musculus
  siRNA target sequence for Kcnj1 (NM_019659.2,334-352).
gcacagtcgaggtttatat

SEQ ID NO: 504826 - DNA, 19 bp, Mus musculus
  siRNA target sequence for Kcnj1 (NM_019659.2,335-353).
cacagtcgaggtttatatt

SEQ ID NO: 504827 - DNA, 19 bp, Mus musculus
  siRNA target sequence for Kcnj1 (NM_019659.2,337-355).
cagtcgaggtttatattct

SEQ ID NO: 504828 - DNA, 19 bp, Mus musculus
  siRNA target sequence for Kcnj1 (NM_019659.2,339-357).
gtcgaggtttatattcttt

SEQ ID NO: 504829 - DNA, 19 bp, Mus musculus
  siRNA target sequence for Kcnj1 (NM_019659.2,360-378).
ggatatctggacaactgta

SEQ ID NO: 504830 - DNA, 19 bp, Mus musculus
  siRNA target sequence for Kcnj1 (NM_019659.2,376-394).
gtacttgacctgaaatgga

SEQ ID NO: 504831 - DNA, 19 bp, Mus musculus
  siRNA target sequence for Kcnj1 (NM_019659.2,459-477).
gtatgtcgtagcctatgtt

SEQ ID NO: 504832 - DNA, 19 bp, Mus musculus
  siRNA target sequence for Kcnj1 (NM_019659.2,520-538).
ccttgtgtggagaacatta

SEQ ID NO: 504833 - DNA, 19 bp, Mus musculus
  siRNA target sequence for Kcnj1 (NM_019659.2,521-539).
cttgtgtggagaacattaa

SEQ ID NO: 504834 - DNA, 19 bp, Mus musculus
  siRNA target sequence for Kcnj1 (NM_019659.2,575-593).
cccaagtgaccataggtta

SEQ ID NO: 504835 - DNA, 19 bp, Mus musculus
  siRNA target sequence for Kcnj1 (NM_019659.2,626-644).
ctgccatttttctgcttat

SEQ ID NO: 504836 - DNA, 19 bp, Mus musculus
  siRNA target sequence for Kcnj1 (NM_019659.2,628-646).
gccatttttctgcttatct

SEQ ID NO: 504837 - DNA, 19 bp, Mus musculus
  siRNA target sequence for Kcnj1 (NM_019659.2,639-657).
gcttatcttccagtctatt

SEQ ID NO: 504838 - DNA, 19 bp, Mus musculus
  siRNA target sequence for Kcnj1 (NM_019659.2,653-671).
ctattcttggagtgatcat

SEQ ID NO: 504839 - DNA, 19 bp, Mus musculus
  siRNA target sequence for Kcnj1 (NM_019659.2,658-676).
cttggagtgatcatcaatt

SEQ ID NO: 504840 - DNA, 19 bp, Mus musculus
  siRNA target sequence for Kcnj1 (NM_019659.2,691-709).
gccatattagccaagatct

SEQ ID NO: 504841 - DNA, 19 bp, Mus musculus
  siRNA target sequence for Kcnj1 (NM_019659.2,708-726).
ctctagacccaaaaaacgt

SEQ ID NO: 504842 - DNA, 19 bp, Mus musculus
  siRNA target sequence for Kcnj1 (NM_019659.2,724-742).
cgtgcaaagaccattacat

SEQ ID NO: 504843 - DNA, 19 bp, Mus musculus
  siRNA target sequence for Kcnj1 (NM_019659.2,797-815).
gagtagcaaatcttaggaa

SEQ ID NO: 504844 - DNA, 19 bp, Mus musculus
  siRNA target sequence for Kcnj1 (NM_019659.2,799-817).
gtagcaaatcttaggaaaa

SEQ ID NO: 504845 - DNA, 19 bp, Mus musculus
  siRNA target sequence for Kcnj1 (NM_019659.2,823-841).
ctgattggcagtcacatat

SEQ ID NO: 504846 - DNA, 19 bp, Mus musculus
  siRNA target sequence for Kcnj1 (NM_019659.2,829-847).
ggcagtcacatatatggta

SEQ ID NO: 504847 - DNA, 19 bp, Mus musculus
  siRNA target sequence for Kcnj1 (NM_019659.2,830-848).
gcagtcacatatatggtaa

SEQ ID NO: 504848 - DNA, 19 bp, Mus musculus
  siRNA target sequence for Kcnj1 (NM_019659.2,895-913).
gatcagaccaatataaact

SEQ ID NO: 504849 - DNA, 19 bp, Mus musculus
  siRNA target sequence for Kcnj1 (NM_019659.2,922-940).
gatgctggcaatgaaaatt

SEQ ID NO: 504850 - DNA, 19 bp, Mus musculus
  siRNA target sequence for Kcnj1 (NM_019659.2,926-944).
ctggcaatgaaaatttgtt

SEQ ID NO: 504851 - DNA, 19 bp, Mus musculus
  siRNA target sequence for Kcnj1 (NM_019659.2,958-976).
ctgacaatctaccacatta

SEQ ID NO: 504852 - DNA, 19 bp, Mus musculus
  siRNA target sequence for Kcnj1 (NM_019659.2,960-978).
gacaatctaccacattatt

SEQ ID NO: 504853 - DNA, 19 bp, Mus musculus
  siRNA target sequence for Kcnj1 (NM_019659.2,999-1017).
ccacatggcggcagaaact

SEQ ID NO: 504854 - DNA, 19 bp, Mus musculus
  siRNA target sequence for Kcnj1 (NM_019659.2,1035-1053).
cgagttggttgtcttttta

SEQ ID NO: 504855 - DNA, 19 bp, Mus musculus
  siRNA target sequence for Kcnj1 (NM_019659.2,1038-1056).
gttggttgtctttttagat

SEQ ID NO: 504856 - DNA, 19 bp, Mus musculus
  siRNA target sequence for Kcnj1 (NM_019659.2,1085-1103).
gccaagtccgcacatcata

SEQ ID NO: 504857 - DNA, 19 bp, Mus musculus
  siRNA target sequence for Kcnj1 (NM_019659.2,1087-1105).
caagtccgcacatcataca

SEQ ID NO: 504858 - DNA, 19 bp, Mus musculus
  siRNA target sequence for Kcnj1 (NM_019659.2,1226-1244).
gtgccatgtgcctctataa

SEQ ID NO: 504859 - DNA, 19 bp, Mus musculus
  siRNA target sequence for Kcnj1 (NM_019659.2,1229-1247).
ccatgtgcctctataatga

SEQ ID NO: 504860 - DNA, 19 bp, Mus musculus
  siRNA target sequence for Kcnj1 (NM_019659.2,1282-1300).
gacaaccctaactttgtct

SEQ ID NO: 504861 - DNA, 19 bp, Mus musculus
  siRNA target sequence for Kcnj1 (NM_019659.2,1293-1311).
ctttgtcttgtcagaagtt

SEQ ID NO: 504862 - DNA, 19 bp, Mus musculus
  siRNA target sequence for Kcnj10 (NM_020269.3,59-77).
cggtcgctaaggtctatta

SEQ ID NO: 504863 - DNA, 19 bp, Mus musculus
  siRNA target sequence for Kcnj10 (NM_020269.3,61-79).
gtcgctaaggtctattaca

SEQ ID NO: 504864 - DNA, 19 bp, Mus musculus
  siRNA target sequence for Kcnj10 (NM_020269.3,626-644).
ggaagccttgccttatgat

SEQ ID NO: 504865 - DNA, 19 bp, Mus musculus
  siRNA target sequence for Kcnj10 (NM_020269.3,717-735).
gacaaaggagggtgagaat

SEQ ID NO: 504866 - DNA, 19 bp, Mus musculus
  siRNA target sequence for Kcnj10 (NM_020269.3,719-737).
caaaggagggtgagaatat

SEQ ID NO: 504867 - DNA, 19 bp, Mus musculus
  siRNA target sequence for Kcnj10 (NM_020269.3,750-768).
ggtcaacgtgactttccaa

SEQ ID NO: 504868 - DNA, 19 bp, Mus musculus
  siRNA target sequence for Kcnj10 (NM_020269.3,834-852).
gaccagccccttaaaagat

SEQ ID NO: 504869 - DNA, 19 bp, Mus musculus
  siRNA target sequence for Kcnj10 (NM_020269.3,836-854).
ccagccccttaaaagatct

SEQ ID NO: 504870 - DNA, 19 bp, Mus musculus
  siRNA target sequence for Kdr (NM_010612.2,394-412).
caaatacaacccttcagat

SEQ ID NO: 504871 - DNA, 19 bp, Mus musculus
  siRNA target sequence for Kdr (NM_010612.2,452-470).
caatgctcagcgtgattct

SEQ ID NO: 504872 - DNA, 19 bp, Mus musculus
  siRNA target sequence for Kdr (NM_010612.2,499-517).
gcggtggtgacagtatctt

SEQ ID NO: 504873 - DNA, 19 bp, Mus musculus
  siRNA target sequence for Kdr (NM_010612.2,542-560).
ggtggttggaaatgatact

SEQ ID NO: 504874 - DNA, 19 bp, Mus musculus
  siRNA target sequence for Kdr (NM_010612.2,555-573).
gatactggagcctacaagt

SEQ ID NO: 504875 - DNA, 19 bp, Mus musculus
  siRNA target sequence for Kdr (NM_010612.2,614-632).
ctatgttcgagattacaga

SEQ ID NO: 504876 - DNA, 19 bp, Mus musculus
  siRNA target sequence for Kdr (NM_010612.2,711-729).
ccctgccgagggtcgattt

SEQ ID NO: 504877 - DNA, 19 bp, Mus musculus
  siRNA target sequence for Kdr (NM_010612.2,715-733).
gccgagggtcgatttcaaa

SEQ ID NO: 504878 - DNA, 19 bp, Mus musculus
  siRNA target sequence for Kdr (NM_010612.2,724-742).
cgatttcaaacctcaatgt

SEQ ID NO: 504879 - DNA, 19 bp, Mus musculus
  siRNA target sequence for Kdr (NM_010612.2,743-761).
gtctctttgcgctaggtat

SEQ ID NO: 504880 - DNA, 19 bp, Mus musculus
  siRNA target sequence for Kdr (NM_010612.2,751-769).
gcgctaggtatccagaaaa

SEQ ID NO: 504881 - DNA, 19 bp, Mus musculus
  siRNA target sequence for Kdr (NM_010612.2,753-771).
gctaggtatccagaaaaga

SEQ ID NO: 504882 - DNA, 19 bp, Mus musculus
  siRNA target sequence for Kdr (NM_010612.2,757-775).
ggtatccagaaaagagatt

SEQ ID NO: 504883 - DNA, 19 bp, Mus musculus
  siRNA target sequence for Kdr (NM_010612.2,772-790).
gatttgttccggatggaaa

SEQ ID NO: 504884 - DNA, 19 bp, Mus musculus
  siRNA target sequence for Kdr (NM_010612.2,806-824).
cagcgagataggctttact

SEQ ID NO: 504885 - DNA, 19 bp, Mus musculus
  siRNA target sequence for Kdr (NM_010612.2,808-826).
gcgagataggctttactct

SEQ ID NO: 504886 - DNA, 19 bp, Mus musculus
  siRNA target sequence for Kdr (NM_010612.2,823-841).
ctctccccagttacatgat

SEQ ID NO: 504887 - DNA, 19 bp, Mus musculus
  siRNA target sequence for Kdr (NM_010612.2,875-893).
gatcaatgatgaaacctat

SEQ ID NO: 504888 - DNA, 19 bp, Mus musculus
  siRNA target sequence for Kdr (NM_010612.2,885-903).
gaaacctatcagtctatca

SEQ ID NO: 504889 - DNA, 19 bp, Mus musculus
  siRNA target sequence for Kdr (NM_010612.2,912-930).
gttgtggttgtaggatata

SEQ ID NO: 504890 - DNA, 19 bp, Mus musculus
  siRNA target sequence for Kdr (NM_010612.2,915-933).
gtggttgtaggatatagga

SEQ ID NO: 504891 - DNA, 19 bp, Mus musculus
  siRNA target sequence for Kdr (NM_010612.2,917-935).
ggttgtaggatataggatt

SEQ ID NO: 504892 - DNA, 19 bp, Mus musculus
  siRNA target sequence for Kdr (NM_010612.2,918-936).
gttgtaggatataggattt

SEQ ID NO: 504893 - DNA, 19 bp, Mus musculus
  siRNA target sequence for Kdr (NM_010612.2,925-943).
gatataggatttatgatgt

SEQ ID NO: 504894 - DNA, 19 bp, Mus musculus
  siRNA target sequence for Kdr (NM_010612.2,971-989).
gctatctgccggagaaaaa

SEQ ID NO: 504895 - DNA, 19 bp, Mus musculus
  siRNA target sequence for Kdr (NM_010612.2,976-994).
ctgccggagaaaaacttgt

SEQ ID NO: 504896 - DNA, 19 bp, Mus musculus
  siRNA target sequence for Kdr (NM_010612.2,1045-1063).
ggcactctccaccttcaaa

SEQ ID NO: 504897 - DNA, 19 bp, Mus musculus
  siRNA target sequence for Kdr (NM_010612.2,1068-1086).
catcataagaagattgtaa

SEQ ID NO: 504898 - DNA, 19 bp, Mus musculus
  siRNA target sequence for Kdr (NM_010612.2,1136-1154).
caccttgacaatagaaagt

SEQ ID NO: 504899 - DNA, 19 bp, Mus musculus
  siRNA target sequence for Kdr (NM_010612.2,1195-1213).
ccagtggacggatgatcaa

SEQ ID NO: 504900 - DNA, 19 bp, Mus musculus
  siRNA target sequence for Kdr (NM_010612.2,1200-1218).
ggacggatgatcaagagaa

SEQ ID NO: 504901 - DNA, 19 bp, Mus musculus
  siRNA target sequence for Kdr (NM_010612.2,1201-1219).
gacggatgatcaagagaaa

SEQ ID NO: 504902 - DNA, 19 bp, Mus musculus
  siRNA target sequence for Kdr (NM_010612.2,1203-1221).
cggatgatcaagagaaata

SEQ ID NO: 504903 - DNA, 19 bp, Mus musculus
  siRNA target sequence for Kdr (NM_010612.2,1262-1280).
cggtagtgggatgaaatct

SEQ ID NO: 504904 - DNA, 19 bp, Mus musculus
  siRNA target sequence for Kdr (NM_010612.2,1263-1281).
ggtagtgggatgaaatctt

SEQ ID NO: 504905 - DNA, 19 bp, Mus musculus
  siRNA target sequence for Kdr (NM_010612.2,1264-1282).
gtagtgggatgaaatcttt

SEQ ID NO: 504906 - DNA, 19 bp, Mus musculus
  siRNA target sequence for Kdr (NM_010612.2,1310-1328).
ccgaatccctgtgaagtat

SEQ ID NO: 504907 - DNA, 19 bp, Mus musculus
  siRNA target sequence for Kdr (NM_010612.2,1318-1336).
ctgtgaagtatctcagtta

SEQ ID NO: 504908 - DNA, 19 bp, Mus musculus
  siRNA target sequence for Kdr (NM_010612.2,1347-1365).
gatatcaaatggtacagaa

SEQ ID NO: 504909 - DNA, 19 bp, Mus musculus
  siRNA target sequence for Kdr (NM_010612.2,1380-1398).
gagtccaactacacaatga

SEQ ID NO: 504910 - DNA, 19 bp, Mus musculus
  siRNA target sequence for Kdr (NM_010612.2,1382-1400).
gtccaactacacaatgatt

SEQ ID NO: 504911 - DNA, 19 bp, Mus musculus
  siRNA target sequence for Kdr (NM_010612.2,1384-1402).
ccaactacacaatgattgt

SEQ ID NO: 504912 - DNA, 19 bp, Mus musculus
  siRNA target sequence for Kdr (NM_010612.2,1547-1565).
cttgatctcgcctatggat

SEQ ID NO: 504913 - DNA, 19 bp, Mus musculus
  siRNA target sequence for Kdr (NM_010612.2,1680-1698).
caaacaagcccgtatgctt

SEQ ID NO: 504914 - DNA, 19 bp, Mus musculus
  siRNA target sequence for Kdr (NM_010612.2,1684-1702).
caagcccgtatgcttgtaa

SEQ ID NO: 504915 - DNA, 19 bp, Mus musculus
  siRNA target sequence for Kdr (NM_010612.2,1711-1729).
gacacgtggaggatttcca

SEQ ID NO: 504916 - DNA, 19 bp, Mus musculus
  siRNA target sequence for Kdr (NM_010612.2,1760-1778).
ccaatatgccctgattgaa

SEQ ID NO: 504917 - DNA, 19 bp, Mus musculus
  siRNA target sequence for Kdr (NM_010612.2,1767-1785).
gccctgattgaaggaaaaa

SEQ ID NO: 504918 - DNA, 19 bp, Mus musculus
  siRNA target sequence for Kdr (NM_010612.2,1895-1913).
gatcaggggtcctgaaatt

SEQ ID NO: 504919 - DNA, 19 bp, Mus musculus
  siRNA target sequence for Kdr (NM_010612.2,1898-1916).
caggggtcctgaaattact

SEQ ID NO: 504920 - DNA, 19 bp, Mus musculus
  siRNA target sequence for Kdr (NM_010612.2,1900-1918).
ggggtcctgaaattactgt

SEQ ID NO: 504921 - DNA, 19 bp, Mus musculus
  siRNA target sequence for Kdr (NM_010612.2,2047-2065).
cactcacaccagtttgcaa

SEQ ID NO: 504922 - DNA, 19 bp, Mus musculus
  siRNA target sequence for Kdr (NM_010612.2,2053-2071).
caccagtttgcaagaactt

SEQ ID NO: 504923 - DNA, 19 bp, Mus musculus
  siRNA target sequence for Kdr (NM_010612.2,2088-2106).
ctgaatggcaccatgtttt

SEQ ID NO: 504924 - DNA, 19 bp, Mus musculus
  siRNA target sequence for Kdr (NM_010612.2,2107-2125).
ctaacagcacaaatgacat

SEQ ID NO: 504925 - DNA, 19 bp, Mus musculus
  siRNA target sequence for Kdr (NM_010612.2,2209-2227).
gacattgcctggtcaaaca

SEQ ID NO: 504926 - DNA, 19 bp, Mus musculus
  siRNA target sequence for Kdr (NM_010612.2,2244-2262).
cgcatggcacccatgatca

SEQ ID NO: 504927 - DNA, 19 bp, Mus musculus
  siRNA target sequence for Kdr (NM_010612.2,2291-2309).
cattggcgagaccattgaa

SEQ ID NO: 504928 - DNA, 19 bp, Mus musculus
  siRNA target sequence for Kdr (NM_010612.2,2334-2352).
cctaccccacacattacat

SEQ ID NO: 504929 - DNA, 19 bp, Mus musculus
  siRNA target sequence for Kdr (NM_010612.2,2366-2384).
cgagaccctggtagaagat

SEQ ID NO: 504930 - DNA, 19 bp, Mus musculus
  siRNA target sequence for Kdr (NM_010612.2,2407-2425).
ggaaccggaacctgactat

SEQ ID NO: 504931 - DNA, 19 bp, Mus musculus
  siRNA target sequence for Kdr (NM_010612.2,2494-2512).
gagcggagacgctcttcat

SEQ ID NO: 504932 - DNA, 19 bp, Mus musculus
  siRNA target sequence for Kdr (NM_010612.2,2497-2515).
cggagacgctcttcataat

SEQ ID NO: 504933 - DNA, 19 bp, Mus musculus
  siRNA target sequence for Kdr (NM_010612.2,2498-2516).
ggagacgctcttcataata

SEQ ID NO: 504934 - DNA, 19 bp, Mus musculus
  siRNA target sequence for Kdr (NM_010612.2,2501-2519).
gacgctcttcataatagaa

SEQ ID NO: 504935 - DNA, 19 bp, Mus musculus
  siRNA target sequence for Kdr (NM_010612.2,2536-2554).
ccaacttggaagtcattat

SEQ ID NO: 504936 - DNA, 19 bp, Mus musculus
  siRNA target sequence for Kdr (NM_010612.2,2568-2586).
gcagtgattgccatgttct

SEQ ID NO: 504937 - DNA, 19 bp, Mus musculus
  siRNA target sequence for Kdr (NM_010612.2,2648-2666).
gacaggctacttgtctatt

SEQ ID NO: 504938 - DNA, 19 bp, Mus musculus
  siRNA target sequence for Kdr (NM_010612.2,2650-2668).
caggctacttgtctattgt

SEQ ID NO: 504939 - DNA, 19 bp, Mus musculus
  siRNA target sequence for Kdr (NM_010612.2,2652-2670).
ggctacttgtctattgtca

SEQ ID NO: 504940 - DNA, 19 bp, Mus musculus
  siRNA target sequence for Kdr (NM_010612.2,2653-2671).
gctacttgtctattgtcat

SEQ ID NO: 504941 - DNA, 19 bp, Mus musculus
  siRNA target sequence for Kdr (NM_010612.2,2750-2768).
ccggctgaaactaggaaaa

SEQ ID NO: 504942 - DNA, 19 bp, Mus musculus
  siRNA target sequence for Kdr (NM_010612.2,2753-2771).
gctgaaactaggaaaacct

SEQ ID NO: 504943 - DNA, 19 bp, Mus musculus
  siRNA target sequence for Kdr (NM_010612.2,2782-2800).
gtgccttcggccaagtgat

SEQ ID NO: 504944 - DNA, 19 bp, Mus musculus
  siRNA target sequence for Kdr (NM_010612.2,2785-2803).
ccttcggccaagtgattga

SEQ ID NO: 504945 - DNA, 19 bp, Mus musculus
  siRNA target sequence for Kdr (NM_010612.2,2808-2826).
gacgcttttggaattgaca

SEQ ID NO: 504946 - DNA, 19 bp, Mus musculus
  siRNA target sequence for Kdr (NM_010612.2,2825-2843).
caagacagcgacttgcaaa

SEQ ID NO: 504947 - DNA, 19 bp, Mus musculus
  siRNA target sequence for Kdr (NM_010612.2,2830-2848).
cagcgacttgcaaaacagt

SEQ ID NO: 504948 - DNA, 19 bp, Mus musculus
  siRNA target sequence for Kdr (NM_010612.2,2852-2870).
cgtcaagatgttgaaagaa

SEQ ID NO: 504949 - DNA, 19 bp, Mus musculus
  siRNA target sequence for Kdr (NM_010612.2,2927-2945).
cattggtcaccatctcaat

SEQ ID NO: 504950 - DNA, 19 bp, Mus musculus
  siRNA target sequence for Kdr (NM_010612.2,3003-3021).
gaattctgcaagtttggaa

SEQ ID NO: 504951 - DNA, 19 bp, Mus musculus
  siRNA target sequence for Kdr (NM_010612.2,3035-3053).
cttacggggcaagagaaat

SEQ ID NO: 504952 - DNA, 19 bp, Mus musculus
  siRNA target sequence for Kdr (NM_010612.2,3040-3058).
ggggcaagagaaatgaatt

SEQ ID NO: 504953 - DNA, 19 bp, Mus musculus
  siRNA target sequence for Kdr (NM_010612.2,3194-3212).
gaaatcgctcagtgatgta

SEQ ID NO: 504954 - DNA, 19 bp, Mus musculus
  siRNA target sequence for Kdr (NM_010612.2,3338-3356).
cctggcagcacgaaacatt

SEQ ID NO: 504955 - DNA, 19 bp, Mus musculus
  siRNA target sequence for Kdr (NM_010612.2,3422-3440).
cccggattatgtcagaaaa

SEQ ID NO: 504956 - DNA, 19 bp, Mus musculus
  siRNA target sequence for Kdr (NM_010612.2,3572-3590).
ccctggggtcaagattgat

SEQ ID NO: 504957 - DNA, 19 bp, Mus musculus
  siRNA target sequence for Kdr (NM_010612.2,3574-3592).
ctggggtcaagattgatga

SEQ ID NO: 504958 - DNA, 19 bp, Mus musculus
  siRNA target sequence for Kdr (NM_010612.2,3579-3597).
gtcaagattgatgaagaat

SEQ ID NO: 504959 - DNA, 19 bp, Mus musculus
  siRNA target sequence for Kdr (NM_010612.2,3584-3602).
gattgatgaagaattttgt

SEQ ID NO: 504960 - DNA, 19 bp, Mus musculus
  siRNA target sequence for Kdr (NM_010612.2,3698-3716).
ccagagaccctcgttttca

SEQ ID NO: 504961 - DNA, 19 bp, Mus musculus
  siRNA target sequence for Kdr (NM_010612.2,3759-3777).
cagcaggatggcaaagact

SEQ ID NO: 504962 - DNA, 19 bp, Mus musculus
  siRNA target sequence for Kdr (NM_010612.2,3769-3787).
gcaaagactatattgttct

SEQ ID NO: 504963 - DNA, 19 bp, Mus musculus
  siRNA target sequence for Kdr (NM_010612.2,3875-3893).
gtgcgaccccaaattccat

SEQ ID NO: 504964 - DNA, 19 bp, Mus musculus
  siRNA target sequence for Kdr (NM_010612.2,3877-3895).
gcgaccccaaattccatta

SEQ ID NO: 504965 - DNA, 19 bp, Mus musculus
  siRNA target sequence for Kdr (NM_010612.2,3878-3896).
cgaccccaaattccattat

SEQ ID NO: 504966 - DNA, 19 bp, Mus musculus
  siRNA target sequence for Kdr (NM_010612.2,3904-3922).
cagcaggaatcagtcatta

SEQ ID NO: 504967 - DNA, 19 bp, Mus musculus
  siRNA target sequence for Kdr (NM_010612.2,3907-3925).
caggaatcagtcattatct

SEQ ID NO: 504968 - DNA, 19 bp, Mus musculus
  siRNA target sequence for Kdr (NM_010612.2,3918-3936).
cattatctccagaacagta

SEQ ID NO: 504969 - DNA, 19 bp, Mus musculus
  siRNA target sequence for Kdr (NM_010612.2,4093-4111).
catcttttggtggaatgat

SEQ ID NO: 504970 - DNA, 19 bp, Mus musculus
  siRNA target sequence for Kdr (NM_010612.2,4216-4234).
gcgacgaggcaggactttt

SEQ ID NO: 504971 - DNA, 19 bp, Mus musculus
  siRNA target sequence for Kdr (NM_010612.2,4217-4235).
cgacgaggcaggactttta

SEQ ID NO: 504972 - DNA, 19 bp, Mus musculus
  siRNA target sequence for Kdr (NM_010612.2,4218-4236).
gacgaggcaggacttttaa

SEQ ID NO: 504973 - DNA, 19 bp, Mus musculus
  siRNA target sequence for Kif12 (NM_010616.1,536-554).
gaccttcacctggctatta

SEQ ID NO: 504974 - DNA, 19 bp, Mus musculus
  siRNA target sequence for Kif12 (NM_010616.1,538-556).
ccttcacctggctattaga

SEQ ID NO: 504975 - DNA, 19 bp, Mus musculus
  siRNA target sequence for Kif12 (NM_010616.1,539-557).
cttcacctggctattagat

SEQ ID NO: 504976 - DNA, 19 bp, Mus musculus
  siRNA target sequence for Kif12 (NM_010616.1,654-672).
cggcctctgcctgttagat

SEQ ID NO: 504977 - DNA, 19 bp, Mus musculus
  siRNA target sequence for Kif12 (NM_010616.1,677-695).
caaggcacgaggcttctat

SEQ ID NO: 504978 - DNA, 19 bp, Mus musculus
  siRNA target sequence for Kif12 (NM_010616.1,771-789).
cgtcggagctcctcacata

SEQ ID NO: 504979 - DNA, 19 bp, Mus musculus
  siRNA target sequence for Kif12 (NM_010616.1,775-793).
ggagctcctcacatacctt

SEQ ID NO: 504980 - DNA, 19 bp, Mus musculus
  siRNA target sequence for Kif12 (NM_010616.1,1249-1267).
caccccagcaagtagagaa

SEQ ID NO: 504981 - DNA, 19 bp, Mus musculus
  siRNA target sequence for Kif12 (NM_010616.1,1386-1404).
gggatgctgcaggagttta

SEQ ID NO: 504982 - DNA, 19 bp, Mus musculus
  siRNA target sequence for Kif12 (NM_010616.1,1387-1405).
ggatgctgcaggagtttat

SEQ ID NO: 504983 - DNA, 19 bp, Mus musculus
  siRNA target sequence for Kif12 (NM_010616.1,1489-1507).
cccaacaggtccatgatct

SEQ ID NO: 504984 - DNA, 19 bp, Mus musculus
  siRNA target sequence for Kif12 (NM_010616.1,1709-1727).
cgaggccccaggtcacata

SEQ ID NO: 504985 - DNA, 19 bp, Mus musculus
  siRNA target sequence for Kif12 (NM_010616.1,1710-1728).
gaggccccaggtcacatat

SEQ ID NO: 504986 - DNA, 19 bp, Mus musculus
  siRNA target sequence for Kif13a (NM_010617.1,101-119).
gtcggatacgaaggtaaaa

SEQ ID NO: 504987 - DNA, 19 bp, Mus musculus
  siRNA target sequence for Kif13a (NM_010617.1,103-121).
cggatacgaaggtaaaagt

SEQ ID NO: 504988 - DNA, 19 bp, Mus musculus
  siRNA target sequence for Kif13a (NM_010617.1,104-122).
ggatacgaaggtaaaagtt

SEQ ID NO: 504989 - DNA, 19 bp, Mus musculus
  siRNA target sequence for Kif13a (NM_010617.1,283-301).
ggtccatggatgaatcgaa

SEQ ID NO: 504990 - DNA, 19 bp, Mus musculus
  siRNA target sequence for Kif13a (NM_010617.1,291-309).
gatgaatcgaacacaacaa

SEQ ID NO: 504991 - DNA, 19 bp, Mus musculus
  siRNA target sequence for Kif13a (NM_010617.1,294-312).
gaatcgaacacaacaaaat

SEQ ID NO: 504992 - DNA, 19 bp, Mus musculus
  siRNA target sequence for Kif13a (NM_010617.1,316-334).
ctggtcaagaagtcgtttt

SEQ ID NO: 504993 - DNA, 19 bp, Mus musculus
  siRNA target sequence for Kif13a (NM_010617.1,374-392).
gggatacaatgcttgtatt

SEQ ID NO: 504994 - DNA, 19 bp, Mus musculus
  siRNA target sequence for Kif13a (NM_010617.1,478-496).
gtgctctgtttcaaaggat

SEQ ID NO: 504995 - DNA, 19 bp, Mus musculus
  siRNA target sequence for Kif13a (NM_010617.1,493-511).
ggatcgccctggagcaaaa

SEQ ID NO: 504996 - DNA, 19 bp, Mus musculus
  siRNA target sequence for Kif13a (NM_010617.1,494-512).
gatcgccctggagcaaaat

SEQ ID NO: 504997 - DNA, 19 bp, Mus musculus
  siRNA target sequence for Kif13a (NM_010617.1,527-545).
caaagtcgaggtatcgtat

SEQ ID NO: 504998 - DNA, 19 bp, Mus musculus
  siRNA target sequence for Kif13a (NM_010617.1,541-559).
cgtatatggagatctataa

SEQ ID NO: 504999 - DNA, 19 bp, Mus musculus
  siRNA target sequence for Kif13a (NM_010617.1,892-910).
cgggtgagcggctgaaaga

SEQ ID NO: 505000 - DNA, 19 bp, Mus musculus
  siRNA target sequence for Kif13a (NM_010617.1,893-911).
gggtgagcggctgaaagaa

SEQ ID NO: 505001 - DNA, 19 bp, Mus musculus
  siRNA target sequence for Kif13a (NM_010617.1,937-955).
caaccttgggattggttat

SEQ ID NO: 505002 - DNA, 19 bp, Mus musculus
  siRNA target sequence for Kif13a (NM_010617.1,995-1013).
caaattcgtgccttatcga

SEQ ID NO: 505003 - DNA, 19 bp, Mus musculus
  siRNA target sequence for Kif13a (NM_010617.1,1011-1029).
cgagattcggtccttactt

SEQ ID NO: 505004 - DNA, 19 bp, Mus musculus
  siRNA target sequence for Kif13a (NM_010617.1,1020-1038).
gtccttacttggcttctta

SEQ ID NO: 505005 - DNA, 19 bp, Mus musculus
  siRNA target sequence for Kif13a (NM_010617.1,1058-1076).
cagccagacctctatgata

SEQ ID NO: 505006 - DNA, 19 bp, Mus musculus
  siRNA target sequence for Kif13a (NM_010617.1,1088-1106).
cccagcagcagacaactat

SEQ ID NO: 505007 - DNA, 19 bp, Mus musculus
  siRNA target sequence for Kif13a (NM_010617.1,1114-1132).
cactgtccacgctaagata

SEQ ID NO: 505008 - DNA, 19 bp, Mus musculus
  siRNA target sequence for Kif13a (NM_010617.1,1118-1136).
gtccacgctaagatatgca

SEQ ID NO: 505009 - DNA, 19 bp, Mus musculus
  siRNA target sequence for Kif13a (NM_010617.1,1290-1308).
gagtctgagaagctgataa

SEQ ID NO: 505010 - DNA, 19 bp, Mus musculus
  siRNA target sequence for Kif13a (NM_010617.1,1475-1493).
cgagcttctggtttactat

SEQ ID NO: 505011 - DNA, 19 bp, Mus musculus
  siRNA target sequence for Kif13a (NM_010617.1,1478-1496).
gcttctggtttactattta

SEQ ID NO: 505012 - DNA, 19 bp, Mus musculus
  siRNA target sequence for Kif13a (NM_010617.1,1604-1622).
cactctcacgcccaaagaa

SEQ ID NO: 505013 - DNA, 19 bp, Mus musculus
  siRNA target sequence for Kif13a (NM_010617.1,1676-1694).
gcacggcgacaggatctta

SEQ ID NO: 505014 - DNA, 19 bp, Mus musculus
  siRNA target sequence for Kif13a (NM_010617.1,1677-1695).
cacggcgacaggatcttat

SEQ ID NO: 505015 - DNA, 19 bp, Mus musculus
  siRNA target sequence for Kif13a (NM_010617.1,1687-1705).
ggatcttatggggaaacaa

SEQ ID NO: 505016 - DNA, 19 bp, Mus musculus
  siRNA target sequence for Kif13a (NM_010617.1,1743-1761).
cgggactggttgaaagact

SEQ ID NO: 505017 - DNA, 19 bp, Mus musculus
  siRNA target sequence for Kif13a (NM_010617.1,1780-1798).
ccgcggagcacgatctaga

SEQ ID NO: 505018 - DNA, 19 bp, Mus musculus
  siRNA target sequence for Kif13a (NM_010617.1,1877-1895).
cagcaatgatccagttcaa

SEQ ID NO: 505019 - DNA, 19 bp, Mus musculus
  siRNA target sequence for Kif13a (NM_010617.1,2094-2112).
gagagggatgaactcttta

SEQ ID NO: 505020 - DNA, 19 bp, Mus musculus
  siRNA target sequence for Kif13a (NM_010617.1,2142-2160).
ctggtgaaagccaacactt

SEQ ID NO: 505021 - DNA, 19 bp, Mus musculus
  siRNA target sequence for Kif13a (NM_010617.1,2319-2337).
caggtctggaccattgaga

SEQ ID NO: 505022 - DNA, 19 bp, Mus musculus
  siRNA target sequence for Kif13a (NM_010617.1,2339-2357).
gctggagaataagctaatt

SEQ ID NO: 505023 - DNA, 19 bp, Mus musculus
  siRNA target sequence for Kif13a (NM_010617.1,2442-2460).
gaagcgcaggagaatcaca

SEQ ID NO: 505024 - DNA, 19 bp, Mus musculus
  siRNA target sequence for Kif13a (NM_010617.1,2469-2487).
ggtgtggctaatgtgtttt

SEQ ID NO: 505025 - DNA, 19 bp, Mus musculus
  siRNA target sequence for Kif13a (NM_010617.1,2470-2488).
gtgtggctaatgtgttttt

SEQ ID NO: 505026 - DNA, 19 bp, Mus musculus
  siRNA target sequence for Kif13a (NM_010617.1,2503-2521).
gtgatgtgaagcttcaata

SEQ ID NO: 505027 - DNA, 19 bp, Mus musculus
  siRNA target sequence for Kif13a (NM_010617.1,2573-2591).
ggaggtgacgcgcattaca

SEQ ID NO: 505028 - DNA, 19 bp, Mus musculus
  siRNA target sequence for Kif13a (NM_010617.1,2582-2600).
gcgcattacaggaaccatt

SEQ ID NO: 505029 - DNA, 19 bp, Mus musculus
  siRNA target sequence for Kif13a (NM_010617.1,2669-2687).
cagcagcggcgaagtcatt

SEQ ID NO: 505030 - DNA, 19 bp, Mus musculus
  siRNA target sequence for Kif13a (NM_010617.1,2671-2689).
gcagcggcgaagtcattca

SEQ ID NO: 505031 - DNA, 19 bp, Mus musculus
  siRNA target sequence for Kif13a (NM_010617.1,2682-2700).
gtcattcaccgggtcaaaa

SEQ ID NO: 505032 - DNA, 19 bp, Mus musculus
  siRNA target sequence for Kif13a (NM_010617.1,2703-2721).
ctgacatgcagggtgataa

SEQ ID NO: 505033 - DNA, 19 bp, Mus musculus
  siRNA target sequence for Kif13a (NM_010617.1,2707-2725).
catgcagggtgataattaa

SEQ ID NO: 505034 - DNA, 19 bp, Mus musculus
  siRNA target sequence for Kif13a (NM_010617.1,2710-2728).
gcagggtgataattaaaga

SEQ ID NO: 505035 - DNA, 19 bp, Mus musculus
  siRNA target sequence for Kif13a (NM_010617.1,2742-2760).
cccataagcctctcaaatt

SEQ ID NO: 505036 - DNA, 19 bp, Mus musculus
  siRNA target sequence for Kif13a (NM_010617.1,2743-2761).
ccataagcctctcaaattt

SEQ ID NO: 505037 - DNA, 19 bp, Mus musculus
  siRNA target sequence for Kif13a (NM_010617.1,2938-2956).
gtgcgctggcgattgaagt

SEQ ID NO: 505038 - DNA, 19 bp, Mus musculus
  siRNA target sequence for Kif13a (NM_010617.1,3092-3110).
gaatgagctcggggattat

SEQ ID NO: 505039 - DNA, 19 bp, Mus musculus
  siRNA target sequence for Kif13a (NM_010617.1,3243-3261).
gaagccatcctatcagtat

SEQ ID NO: 505040 - DNA, 19 bp, Mus musculus
  siRNA target sequence for Kif13a (NM_010617.1,3247-3265).
ccatcctatcagtatccat

SEQ ID NO: 505041 - DNA, 19 bp, Mus musculus
  siRNA target sequence for Kif13a (NM_010617.1,3248-3266).
catcctatcagtatccatt

SEQ ID NO: 505042 - DNA, 19 bp, Mus musculus
  siRNA target sequence for Kif13a (NM_010617.1,3313-3331).
gctaccaggaagaagactt

SEQ ID NO: 505043 - DNA, 19 bp, Mus musculus
  siRNA target sequence for Kif13a (NM_010617.1,3324-3342).
gaagacttgaattgtgtaa

SEQ ID NO: 505044 - DNA, 19 bp, Mus musculus
  siRNA target sequence for Kif13a (NM_010617.1,3352-3370).
ggtccgatgcactcattaa

SEQ ID NO: 505045 - DNA, 19 bp, Mus musculus
  siRNA target sequence for Kif13a (NM_010617.1,3353-3371).
gtccgatgcactcattaaa

SEQ ID NO: 505046 - DNA, 19 bp, Mus musculus
  siRNA target sequence for Kif13a (NM_010617.1,3356-3374).
cgatgcactcattaaacga

SEQ ID NO: 505047 - DNA, 19 bp, Mus musculus
  siRNA target sequence for Kif13a (NM_010617.1,3556-3574).
ctcctggcatggaaacaca

SEQ ID NO: 505048 - DNA, 19 bp, Mus musculus
  siRNA target sequence for Kif13a (NM_010617.1,3674-3692).
ggaacacggcagtcagttt

SEQ ID NO: 505049 - DNA, 19 bp, Mus musculus
  siRNA target sequence for Kif13a (NM_010617.1,3678-3696).
cacggcagtcagtttttct

SEQ ID NO: 505050 - DNA, 19 bp, Mus musculus
  siRNA target sequence for Kif13a (NM_010617.1,3784-3802).
gggtcacaccgcagaatga

SEQ ID NO: 505051 - DNA, 19 bp, Mus musculus
  siRNA target sequence for Kif13a (NM_010617.1,3785-3803).
ggtcacaccgcagaatgaa

SEQ ID NO: 505052 - DNA, 19 bp, Mus musculus
  siRNA target sequence for Kif13a (NM_010617.1,3786-3804).
gtcacaccgcagaatgaaa

SEQ ID NO: 505053 - DNA, 19 bp, Mus musculus
  siRNA target sequence for Kif13a (NM_010617.1,3790-3808).
caccgcagaatgaaaggat

SEQ ID NO: 505054 - DNA, 19 bp, Mus musculus
  siRNA target sequence for Kif13a (NM_010617.1,3917-3935).
gagtttgaagagacgaata

SEQ ID NO: 505055 - DNA, 19 bp, Mus musculus
  siRNA target sequence for Kif13a (NM_010617.1,3937-3955).
cactgatcaatatatgtta

SEQ ID NO: 505056 - DNA, 19 bp, Mus musculus
  siRNA target sequence for Kif13a (NM_010617.1,3964-3982).
gcgtgacctatgagatagt

SEQ ID NO: 505057 - DNA, 19 bp, Mus musculus
  siRNA target sequence for Kif13a (NM_010617.1,3965-3983).
cgtgacctatgagatagta

SEQ ID NO: 505058 - DNA, 19 bp, Mus musculus
  siRNA target sequence for Kif13a (NM_010617.1,3970-3988).
cctatgagatagtatccaa

SEQ ID NO: 505059 - DNA, 19 bp, Mus musculus
  siRNA target sequence for Kif13a (NM_010617.1,4055-4073).
gaacgagggcactttggat

SEQ ID NO: 505060 - DNA, 19 bp, Mus musculus
  siRNA target sequence for Kif13a (NM_010617.1,4210-4228).
gtacaccgaacgttcacaa

SEQ ID NO: 505061 - DNA, 19 bp, Mus musculus
  siRNA target sequence for Kif13a (NM_010617.1,4258-4276).
gcttcgatgaagacgataa

SEQ ID NO: 505062 - DNA, 19 bp, Mus musculus
  siRNA target sequence for Kif13a (NM_010617.1,4282-4300).
ggcccgagaaccagttaga

SEQ ID NO: 505063 - DNA, 19 bp, Mus musculus
  siRNA target sequence for Kif13a (NM_010617.1,4334-4352).
cgcgtgctatgggacttta

SEQ ID NO: 505064 - DNA, 19 bp, Mus musculus
  siRNA target sequence for Kif13a (NM_010617.1,4397-4415).
gaatcctcatgccttaaca

SEQ ID NO: 505065 - DNA, 19 bp, Mus musculus
  siRNA target sequence for Kif13a (NM_010617.1,4438-4456).
ctcctcagccaccaaagtt

SEQ ID NO: 505066 - DNA, 19 bp, Mus musculus
  siRNA target sequence for Kif13a (NM_010617.1,4465-4483).
ccctcatgcctgtaaaaga

SEQ ID NO: 505067 - DNA, 19 bp, Mus musculus
  siRNA target sequence for Kif13a (NM_010617.1,4474-4492).
ctgtaaaagaggagcataa

SEQ ID NO: 505068 - DNA, 19 bp, Mus musculus
  siRNA target sequence for Kif13a (NM_010617.1,4476-4494).
gtaaaagaggagcataaga

SEQ ID NO: 505069 - DNA, 19 bp, Mus musculus
  siRNA target sequence for Kif13a (NM_010617.1,4930-4948).
cagggaaggatgagacaat

SEQ ID NO: 505070 - DNA, 19 bp, Mus musculus
  siRNA target sequence for Kif13a (NM_010617.1,4951-4969).
ctgtgccgctggaggaaaa

SEQ ID NO: 505071 - DNA, 19 bp, Mus musculus
  siRNA target sequence for Kif13a (NM_010617.1,5110-5128).
gagaggtgacgatagaaca

SEQ ID NO: 505072 - DNA, 19 bp, Mus musculus
  siRNA target sequence for Kif13a (NM_010617.1,5175-5193).
gtttctgatggcaaagact

SEQ ID NO: 505073 - DNA, 19 bp, Mus musculus
  siRNA target sequence for Kif13a (NM_010617.1,5179-5197).
ctgatggcaaagactttga

SEQ ID NO: 505074 - DNA, 19 bp, Mus musculus
  siRNA target sequence for Kif13a (NM_010617.1,5237-5255).
gagggctctaacaaacgaa

SEQ ID NO: 505075 - DNA, 19 bp, Mus musculus
  siRNA target sequence for Kif13a (NM_010617.1,5242-5260).
ctctaacaaacgaaacaga

SEQ ID NO: 505076 - DNA, 19 bp, Mus musculus
  siRNA target sequence for Kif13a (NM_010617.1,5248-5266).
caaacgaaacagaccataa

SEQ ID NO: 505077 - DNA, 19 bp, Mus musculus
  siRNA target sequence for Kif13a (NM_010617.1,5297-5315).
ccggctgcatcccaagata

SEQ ID NO: 505078 - DNA, 19 bp, Mus musculus
  siRNA target sequence for Kif17 (NM_010623.2,281-299).
cgctgccgacccatgaaca

SEQ ID NO: 505079 - DNA, 19 bp, Mus musculus
  siRNA target sequence for Kif17 (NM_010623.2,282-300).
gctgccgacccatgaacaa

SEQ ID NO: 505080 - DNA, 19 bp, Mus musculus
  siRNA target sequence for Kif17 (NM_010623.2,353-371).
ggccaatgcttcattcaga

SEQ ID NO: 505081 - DNA, 19 bp, Mus musculus
  siRNA target sequence for Kif17 (NM_010623.2,412-430).
cgatggcgcctactacata

SEQ ID NO: 505082 - DNA, 19 bp, Mus musculus
  siRNA target sequence for Kif17 (NM_010623.2,744-762).
ccgagaagggagtgtatgt

SEQ ID NO: 505083 - DNA, 19 bp, Mus musculus
  siRNA target sequence for Kif17 (NM_010623.2,895-913).
catcaacatcgagatctat

SEQ ID NO: 505084 - DNA, 19 bp, Mus musculus
  siRNA target sequence for Kif17 (NM_010623.2,1091-1109).
cgctgcaagcacattcctt

SEQ ID NO: 505085 - DNA, 19 bp, Mus musculus
  siRNA target sequence for Kif17 (NM_010623.2,1092-1110).
gctgcaagcacattcctta

SEQ ID NO: 505086 - DNA, 19 bp, Mus musculus
  siRNA target sequence for Kif17 (NM_010623.2,1186-1204).
gtctcccgcagacaacaat

SEQ ID NO: 505087 - DNA, 19 bp, Mus musculus
  siRNA target sequence for Kif17 (NM_010623.2,1188-1206).
ctcccgcagacaacaatta

SEQ ID NO: 505088 - DNA, 19 bp, Mus musculus
  siRNA target sequence for Kif17 (NM_010623.2,1191-1209).
ccgcagacaacaattacga

SEQ ID NO: 505089 - DNA, 19 bp, Mus musculus
  siRNA target sequence for Kif17 (NM_010623.2,1192-1210).
cgcagacaacaattacgat

SEQ ID NO: 505090 - DNA, 19 bp, Mus musculus
  siRNA target sequence for Kif17 (NM_010623.2,1221-1239).
gtacgctgcgctatgctaa

SEQ ID NO: 505091 - DNA, 19 bp, Mus musculus
  siRNA target sequence for Kif17 (NM_010623.2,1236-1254).
ctaacagggccaagaacat

SEQ ID NO: 505092 - DNA, 19 bp, Mus musculus
  siRNA target sequence for Kif17 (NM_010623.2,1258-1276).
gaacaagccacgcattaat

SEQ ID NO: 505093 - DNA, 19 bp, Mus musculus
  siRNA target sequence for Kif17 (NM_010623.2,1261-1279).
caagccacgcattaatgaa

SEQ ID NO: 505094 - DNA, 19 bp, Mus musculus
  siRNA target sequence for Kif17 (NM_010623.2,1718-1736).
cctcctttgcagtatgaga

SEQ ID NO: 505095 - DNA, 19 bp, Mus musculus
  siRNA target sequence for Kif17 (NM_010623.2,2272-2290).
cgggactgagcctgatgta

SEQ ID NO: 505096 - DNA, 19 bp, Mus musculus
  siRNA target sequence for Kif17 (NM_010623.2,2304-2322).
ctgaggaggtggtttctga

SEQ ID NO: 505097 - DNA, 19 bp, Mus musculus
  siRNA target sequence for Kif17 (NM_010623.2,3016-3034).
gaacaagccagctcgaaaa

SEQ ID NO: 505098 - DNA, 19 bp, Mus musculus
  siRNA target sequence for Kif17 (NM_010623.2,3316-3334).
caaagccaagcgtaaaaaa

SEQ ID NO: 505099 - DNA, 19 bp, Mus musculus
  siRNA target sequence for Kif17 (NM_010623.2,3321-3339).
ccaagcgtaaaaaaagcaa

SEQ ID NO: 505100 - DNA, 19 bp, Mus musculus
  siRNA target sequence for Kif18a (NM_139303.1,222-240).
cttatgtcaccgcatgaaa

SEQ ID NO: 505101 - DNA, 19 bp, Mus musculus
  siRNA target sequence for Kif18a (NM_139303.1,227-245).
gtcaccgcatgaaagtagt

SEQ ID NO: 505102 - DNA, 19 bp, Mus musculus
  siRNA target sequence for Kif18a (NM_139303.1,279-297).
ggcggtgcagttctgtaaa

SEQ ID NO: 505103 - DNA, 19 bp, Mus musculus
  siRNA target sequence for Kif18a (NM_139303.1,281-299).
cggtgcagttctgtaaagt

SEQ ID NO: 505104 - DNA, 19 bp, Mus musculus
  siRNA target sequence for Kif18a (NM_139303.1,291-309).
ctgtaaagtggttcatgta

SEQ ID NO: 505105 - DNA, 19 bp, Mus musculus
  siRNA target sequence for Kif18a (NM_139303.1,293-311).
gtaaagtggttcatgtagt

SEQ ID NO: 505106 - DNA, 19 bp, Mus musculus
  siRNA target sequence for Kif18a (NM_139303.1,327-345).
cagttttgatccgaaacaa

SEQ ID NO: 505107 - DNA, 19 bp, Mus musculus
  siRNA target sequence for Kif18a (NM_139303.1,329-347).
gttttgatccgaaacaaga

SEQ ID NO: 505108 - DNA, 19 bp, Mus musculus
  siRNA target sequence for Kif18a (NM_139303.1,380-398).
caaattttgatattactaa

SEQ ID NO: 505109 - DNA, 19 bp, Mus musculus
  siRNA target sequence for Kif18a (NM_139303.1,452-470).
caactcaaatggaagtttt

SEQ ID NO: 505110 - DNA, 19 bp, Mus musculus
  siRNA target sequence for Kif18a (NM_139303.1,455-473).
ctcaaatggaagtttttga

SEQ ID NO: 505111 - DNA, 19 bp, Mus musculus
  siRNA target sequence for Kif18a (NM_139303.1,496-514).
catagttttctgaatggat

SEQ ID NO: 505112 - DNA, 19 bp, Mus musculus
  siRNA target sequence for Kif18a (NM_139303.1,505-523).
ctgaatggatacaattgca

SEQ ID NO: 505113 - DNA, 19 bp, Mus musculus
  siRNA target sequence for Kif18a (NM_139303.1,516-534).
caattgcacagtatttgca

SEQ ID NO: 505114 - DNA, 19 bp, Mus musculus
  siRNA target sequence for Kif18a (NM_139303.1,593-611).
gggtcatgtacctgacaat

SEQ ID NO: 505115 - DNA, 19 bp, Mus musculus
  siRNA target sequence for Kif18a (NM_139303.1,624-642).
caaatgcatcgatgagatt

SEQ ID NO: 505116 - DNA, 19 bp, Mus musculus
  siRNA target sequence for Kif18a (NM_139303.1,659-677).
gtagcactgccgtgtcata

SEQ ID NO: 505117 - DNA, 19 bp, Mus musculus
  siRNA target sequence for Kif18a (NM_139303.1,703-721).
cgtgacctcttgacaaact

SEQ ID NO: 505118 - DNA, 19 bp, Mus musculus
  siRNA target sequence for Kif18a (NM_139303.1,738-756).
ccgggaagattcccaaaaa

SEQ ID NO: 505119 - DNA, 19 bp, Mus musculus
  siRNA target sequence for Kif18a (NM_139303.1,781-799).
ctacaccagcctaaatctt

SEQ ID NO: 505120 - DNA, 19 bp, Mus musculus
  siRNA target sequence for Kif18a (NM_139303.1,881-899).
gttcccatgctgttttcca

SEQ ID NO: 505121 - DNA, 19 bp, Mus musculus
  siRNA target sequence for Kif18a (NM_139303.1,926-944).
cagcgagcatcaatcaaaa

SEQ ID NO: 505122 - DNA, 19 bp, Mus musculus
  siRNA target sequence for Kif18a (NM_139303.1,929-947).
cgagcatcaatcaaaatgt

SEQ ID NO: 505123 - DNA, 19 bp, Mus musculus
  siRNA target sequence for Kif18a (NM_139303.1,946-964).
gtccgtatagccaaaatgt

SEQ ID NO: 505124 - DNA, 19 bp, Mus musculus
  siRNA target sequence for Kif18a (NM_139303.1,948-966).
ccgtatagccaaaatgtca

SEQ ID NO: 505125 - DNA, 19 bp, Mus musculus
  siRNA target sequence for Kif18a (NM_139303.1,996-1014).
cagtgtttcgggtgctaaa

SEQ ID NO: 505126 - DNA, 19 bp, Mus musculus
  siRNA target sequence for Kif18a (NM_139303.1,1010-1028).
ctaaagggtcacgatttgt

SEQ ID NO: 505127 - DNA, 19 bp, Mus musculus
  siRNA target sequence for Kif18a (NM_139303.1,1027-1045).
gtagaaggcacaaatatta

SEQ ID NO: 505128 - DNA, 19 bp, Mus musculus
  siRNA target sequence for Kif18a (NM_139303.1,1108-1126).
cagcatattccttacagaa

SEQ ID NO: 505129 - DNA, 19 bp, Mus musculus
  siRNA target sequence for Kif18a (NM_139303.1,1110-1128).
gcatattccttacagaaat

SEQ ID NO: 505130 - DNA, 19 bp, Mus musculus
  siRNA target sequence for Kif18a (NM_139303.1,1195-1213).
gttagtccttcctctttat

SEQ ID NO: 505131 - DNA, 19 bp, Mus musculus
  siRNA target sequence for Kif18a (NM_139303.1,1222-1240).
gacacatataacactctta

SEQ ID NO: 505132 - DNA, 19 bp, Mus musculus
  siRNA target sequence for Kif18a (NM_139303.1,1246-1264).
gctaatcgtgcaaaggaaa

SEQ ID NO: 505133 - DNA, 19 bp, Mus musculus
  siRNA target sequence for Kif18a (NM_139303.1,1247-1265).
ctaatcgtgcaaaggaaat

SEQ ID NO: 505134 - DNA, 19 bp, Mus musculus
  siRNA target sequence for Kif18a (NM_139303.1,1278-1296).
gaagagcaatgttcttaat

SEQ ID NO: 505135 - DNA, 19 bp, Mus musculus
  siRNA target sequence for Kif18a (NM_139303.1,1409-1427).
gaaatgactgtgctaaatt

SEQ ID NO: 505136 - DNA, 19 bp, Mus musculus
  siRNA target sequence for Kif18a (NM_139303.1,1420-1438).
gctaaattagtacattcaa

SEQ ID NO: 505137 - DNA, 19 bp, Mus musculus
  siRNA target sequence for Kif18a (NM_139303.1,1505-1523).
gaatcaggcaagagtatct

SEQ ID NO: 505138 - DNA, 19 bp, Mus musculus
  siRNA target sequence for Kif18a (NM_139303.1,1524-1542).
gaagttagaaatgttactt

SEQ ID NO: 505139 - DNA, 19 bp, Mus musculus
  siRNA target sequence for Kif18a (NM_139303.1,1545-1563).
ggcaaatgcgctaaagtca

SEQ ID NO: 505140 - DNA, 19 bp, Mus musculus
  siRNA target sequence for Kif18a (NM_139303.1,1546-1564).
gcaaatgcgctaaagtcat

SEQ ID NO: 505141 - DNA, 19 bp, Mus musculus
  siRNA target sequence for Kif18a (NM_139303.1,1580-1598).
gccataaacagatagagat

SEQ ID NO: 505142 - DNA, 19 bp, Mus musculus
  siRNA target sequence for Kif18a (NM_139303.1,1647-1665).
cagacttgaaaagttgaaa

SEQ ID NO: 505143 - DNA, 19 bp, Mus musculus
  siRNA target sequence for Kif18a (NM_139303.1,1696-1714).
gaagaggtgtcgaaacaat

SEQ ID NO: 505144 - DNA, 19 bp, Mus musculus
  siRNA target sequence for Kif18a (NM_139303.1,1701-1719).
ggtgtcgaaacaatttgat

SEQ ID NO: 505145 - DNA, 19 bp, Mus musculus
  siRNA target sequence for Kif18a (NM_139303.1,1704-1722).
gtcgaaacaatttgatgaa

SEQ ID NO: 505146 - DNA, 19 bp, Mus musculus
  siRNA target sequence for Kif18a (NM_139303.1,1738-1756).
catcgtgttgaaaacgaaa

SEQ ID NO: 505147 - DNA, 19 bp, Mus musculus
  siRNA target sequence for Kif18a (NM_139303.1,1924-1942).
gctttgcttccagtactaa

SEQ ID NO: 505148 - DNA, 19 bp, Mus musculus
  siRNA target sequence for Kif18a (NM_139303.1,1933-1951).
ccagtactaagaaaacagt

SEQ ID NO: 505149 - DNA, 19 bp, Mus musculus
  siRNA target sequence for Kif18a (NM_139303.1,1934-1952).
cagtactaagaaaacagta

SEQ ID NO: 505150 - DNA, 19 bp, Mus musculus
  siRNA target sequence for Kif18a (NM_139303.1,2017-2035).
catttagtagagagaaaaa

SEQ ID NO: 505151 - DNA, 19 bp, Mus musculus
  siRNA target sequence for Kif18a (NM_139303.1,2048-2066).
gggctgaccaaactaatga

SEQ ID NO: 505152 - DNA, 19 bp, Mus musculus
  siRNA target sequence for Kif18a (NM_139303.1,2049-2067).
ggctgaccaaactaatgaa

SEQ ID NO: 505153 - DNA, 19 bp, Mus musculus
  siRNA target sequence for Kif18a (NM_139303.1,2053-2071).
gaccaaactaatgaacatt

SEQ ID NO: 505154 - DNA, 19 bp, Mus musculus
  siRNA target sequence for Kif18a (NM_139303.1,2055-2073).
ccaaactaatgaacattca

SEQ ID NO: 505155 - DNA, 19 bp, Mus musculus
  siRNA target sequence for Kif18a (NM_139303.1,2117-2135).
cacagcttgaaccaattca

SEQ ID NO: 505156 - DNA, 19 bp, Mus musculus
  siRNA target sequence for Kif18a (NM_139303.1,2125-2143).
gaaccaattcagtctattt

SEQ ID NO: 505157 - DNA, 19 bp, Mus musculus
  siRNA target sequence for Kif18a (NM_139303.1,2167-2185).
cctaacgtgcttaaactta

SEQ ID NO: 505158 - DNA, 19 bp, Mus musculus
  siRNA target sequence for Kif18a (NM_139303.1,2250-2268).
gtctgcactgtctgaaagt

SEQ ID NO: 505159 - DNA, 19 bp, Mus musculus
  siRNA target sequence for Kif18a (NM_139303.1,2296-2314).
gaacttcagcctattgttt

SEQ ID NO: 505160 - DNA, 19 bp, Mus musculus
  siRNA target sequence for Kif18a (NM_139303.1,2299-2317).
cttcagcctattgtttata

SEQ ID NO: 505161 - DNA, 19 bp, Mus musculus
  siRNA target sequence for Kif18a (NM_139303.1,2338-2356).
gctcaagacctgtttccat

SEQ ID NO: 505162 - DNA, 19 bp, Mus musculus
  siRNA target sequence for Kif18a (NM_139303.1,2347-2365).
ctgtttccatccttaacga

SEQ ID NO: 505163 - DNA, 19 bp, Mus musculus
  siRNA target sequence for Kif18a (NM_139303.1,2353-2371).
ccatccttaacgagaactt

SEQ ID NO: 505164 - DNA, 19 bp, Mus musculus
  siRNA target sequence for Kif18a (NM_139303.1,2372-2390).
catcgcagtctgcaaatgt

SEQ ID NO: 505165 - DNA, 19 bp, Mus musculus
  siRNA target sequence for Kif18a (NM_139303.1,2375-2393).
cgcagtctgcaaatgtaat

SEQ ID NO: 505166 - DNA, 19 bp, Mus musculus
  siRNA target sequence for Kif18a (NM_139303.1,2461-2479).
ggtttgtactctacatcta

SEQ ID NO: 505167 - DNA, 19 bp, Mus musculus
  siRNA target sequence for Kif18a (NM_139303.1,2477-2495).
ctactctgtgtgatagcat

SEQ ID NO: 505168 - DNA, 19 bp, Mus musculus
  siRNA target sequence for Kif18a (NM_139303.1,2557-2575).
cacaggatagagtcttctt

SEQ ID NO: 505169 - DNA, 19 bp, Mus musculus
  siRNA target sequence for Kif18a (NM_139303.1,2561-2579).
ggatagagtcttcttcatt

SEQ ID NO: 505170 - DNA, 19 bp, Mus musculus
  siRNA target sequence for Kif18a (NM_139303.1,2667-2685).
gagttctacatcaaatgct

SEQ ID NO: 505171 - DNA, 19 bp, Mus musculus
  siRNA target sequence for Kif18a (NM_139303.1,2722-2740).
cgcattcgacgggataatt

SEQ ID NO: 505172 - DNA, 19 bp, Mus musculus
  siRNA target sequence for Kif18a (NM_139303.1,2724-2742).
cattcgacgggataattca

SEQ ID NO: 505173 - DNA, 19 bp, Mus musculus
  siRNA target sequence for Kif18a (NM_139303.1,2751-2769).
gcctatgcaagaaaacaga

SEQ ID NO: 505174 - DNA, 19 bp, Mus musculus
  siRNA target sequence for Kif18a (NM_139303.1,2768-2786).
gactgaaagtgggctataa

SEQ ID NO: 505175 - DNA, 19 bp, Mus musculus
  siRNA target sequence for Kif18a (NM_139303.1,2770-2788).
ctgaaagtgggctataaaa

SEQ ID NO: 505176 - DNA, 19 bp, Mus musculus
  siRNA target sequence for Kif18a (NM_139303.1,2779-2797).
ggctataaaagaaatacca

SEQ ID NO: 505177 - DNA, 19 bp, Mus musculus
  siRNA target sequence for Kif1a (NM_008440.1,215-233).
gaagcaccaccactattgt

SEQ ID NO: 505178 - DNA, 19 bp, Mus musculus
  siRNA target sequence for Kif1a (NM_008440.1,302-320).
cgccggaggacatcaacta

SEQ ID NO: 505179 - DNA, 19 bp, Mus musculus
  siRNA target sequence for Kif1a (NM_008440.1,344-362).
gggacattggggaagagat

SEQ ID NO: 505180 - DNA, 19 bp, Mus musculus
  siRNA target sequence for Kif1a (NM_008440.1,459-477).
ggaccagcaaggcatcatt

SEQ ID NO: 505181 - DNA, 19 bp, Mus musculus
  siRNA target sequence for Kif1a (NM_008440.1,925-943).
gccaacatcaacaagtctt

SEQ ID NO: 505182 - DNA, 19 bp, Mus musculus
  siRNA target sequence for Kif1a (NM_008440.1,1038-1056).
ccgagactccgtattgaca

SEQ ID NO: 505183 - DNA, 19 bp, Mus musculus
  siRNA target sequence for Kif1a (NM_008440.1,1039-1057).
cgagactccgtattgacat

SEQ ID NO: 505184 - DNA, 19 bp, Mus musculus
  siRNA target sequence for Kif1a (NM_008440.1,1116-1134).
ccctgcggacatcaactat

SEQ ID NO: 505185 - DNA, 19 bp, Mus musculus
  siRNA target sequence for Kif1a (NM_008440.1,1276-1294).
caaggtcttggcgatatca

SEQ ID NO: 505186 - DNA, 19 bp, Mus musculus
  siRNA target sequence for Kif1a (NM_008440.1,1380-1398).
ccatgagcgcatcttgttt

SEQ ID NO: 505187 - DNA, 19 bp, Mus musculus
  siRNA target sequence for Kif1a (NM_008440.1,1407-1425).
cagcgaggaggctattgaa

SEQ ID NO: 505188 - DNA, 19 bp, Mus musculus
  siRNA target sequence for Kif1a (NM_008440.1,1575-1593).
gttttctcccaaaaagact

SEQ ID NO: 505189 - DNA, 19 bp, Mus musculus
  siRNA target sequence for Kif1a (NM_008440.1,1584-1602).
caaaaagactcctcatctt

SEQ ID NO: 505190 - DNA, 19 bp, Mus musculus
  siRNA target sequence for Kif1a (NM_008440.1,1637-1655).
gcctcctttactacatcaa

SEQ ID NO: 505191 - DNA, 19 bp, Mus musculus
  siRNA target sequence for Kif1a (NM_008440.1,1638-1656).
cctcctttactacatcaaa

SEQ ID NO: 505192 - DNA, 19 bp, Mus musculus
  siRNA target sequence for Kif1a (NM_008440.1,1715-1733).
gtggacacttcatcaaaga

SEQ ID NO: 505193 - DNA, 19 bp, Mus musculus
  siRNA target sequence for Kif1a (NM_008440.1,1819-1837).
gtcaacggcaagaaagtca

SEQ ID NO: 505194 - DNA, 19 bp, Mus musculus
  siRNA target sequence for Kif1a (NM_008440.1,1886-1904).
gccacgtgttccggtttaa

SEQ ID NO: 505195 - DNA, 19 bp, Mus musculus
  siRNA target sequence for Kif1a (NM_008440.1,2111-2129).
ggctggactatgagagtaa

SEQ ID NO: 505196 - DNA, 19 bp, Mus musculus
  siRNA target sequence for Kif1a (NM_008440.1,2265-2283).
gtggtaccagtttacttct

SEQ ID NO: 505197 - DNA, 19 bp, Mus musculus
  siRNA target sequence for Kif1a (NM_008440.1,2833-2851).
cagtcaggaactgctaaaa

SEQ ID NO: 505198 - DNA, 19 bp, Mus musculus
  siRNA target sequence for Kif1a (NM_008440.1,2855-2873).
cctttgatgaccagcattt

SEQ ID NO: 505199 - DNA, 19 bp, Mus musculus
  siRNA target sequence for Kif1a (NM_008440.1,2981-2999).
ggccttcagctgatgaagt

SEQ ID NO: 505200 - DNA, 19 bp, Mus musculus
  siRNA target sequence for Kif1a (NM_008440.1,2982-3000).
gccttcagctgatgaagtt

SEQ ID NO: 505201 - DNA, 19 bp, Mus musculus
  siRNA target sequence for Kif1a (NM_008440.1,2984-3002).
cttcagctgatgaagttaa

SEQ ID NO: 505202 - DNA, 19 bp, Mus musculus
  siRNA target sequence for Kif1a (NM_008440.1,3136-3154).
ctgcaggcgtccagtatct

SEQ ID NO: 505203 - DNA, 19 bp, Mus musculus
  siRNA target sequence for Kif1a (NM_008440.1,3138-3156).
gcaggcgtccagtatctct

SEQ ID NO: 505204 - DNA, 19 bp, Mus musculus
  siRNA target sequence for Kif1a (NM_008440.1,3146-3164).
ccagtatctctgctgaata

SEQ ID NO: 505205 - DNA, 19 bp, Mus musculus
  siRNA target sequence for Kif1a (NM_008440.1,3160-3178).
gaatacgctgacatcttct

SEQ ID NO: 505206 - DNA, 19 bp, Mus musculus
  siRNA target sequence for Kif1a (NM_008440.1,3260-3278).
gcttctaccatgtccaaaa

SEQ ID NO: 505207 - DNA, 19 bp, Mus musculus
  siRNA target sequence for Kif1a (NM_008440.1,3296-3314).
ccaagtccttcatcgaata

SEQ ID NO: 505208 - DNA, 19 bp, Mus musculus
  siRNA target sequence for Kif1a (NM_008440.1,3368-3386).
cgttcccacctctttgcaa

SEQ ID NO: 505209 - DNA, 19 bp, Mus musculus
  siRNA target sequence for Kif1a (NM_008440.1,3431-3449).
gggtcatgccgttatccaa

SEQ ID NO: 505210 - DNA, 19 bp, Mus musculus
  siRNA target sequence for Kif1a (NM_008440.1,3500-3518).
cctgccattgcaagtatga

SEQ ID NO: 505211 - DNA, 19 bp, Mus musculus
  siRNA target sequence for Kif1a (NM_008440.1,3550-3568).
gaagccaatggcgattaca

SEQ ID NO: 505212 - DNA, 19 bp, Mus musculus
  siRNA target sequence for Kif1a (NM_008440.1,3627-3645).
catccagagacggataact

SEQ ID NO: 505213 - DNA, 19 bp, Mus musculus
  siRNA target sequence for Kif1a (NM_008440.1,3639-3657).
gataactgtgacactgtta

SEQ ID NO: 505214 - DNA, 19 bp, Mus musculus
  siRNA target sequence for Kif1a (NM_008440.1,3734-3752).
ctgacgaagctctgattga

SEQ ID NO: 505215 - DNA, 19 bp, Mus musculus
  siRNA target sequence for Kif1a (NM_008440.1,3840-3858).
gaccttctaccagtttgaa

SEQ ID NO: 505216 - DNA, 19 bp, Mus musculus
  siRNA target sequence for Kif1a (NM_008440.1,3868-3886).
gacagttccatgcataact

SEQ ID NO: 505217 - DNA, 19 bp, Mus musculus
  siRNA target sequence for Kif1a (NM_008440.1,3910-3928).
ccttaccgggagaaaatct

SEQ ID NO: 505218 - DNA, 19 bp, Mus musculus
  siRNA target sequence for Kif1a (NM_008440.1,3911-3929).
cttaccgggagaaaatcta

SEQ ID NO: 505219 - DNA, 19 bp, Mus musculus
  siRNA target sequence for Kif1a (NM_008440.1,3916-3934).
cgggagaaaatctacatga

SEQ ID NO: 505220 - DNA, 19 bp, Mus musculus
  siRNA target sequence for Kif1a (NM_008440.1,3935-3953).
cgctctctgcctacattga

SEQ ID NO: 505221 - DNA, 19 bp, Mus musculus
  siRNA target sequence for Kif1a (NM_008440.1,4392-4410).
ctctgagtcccgtagttct

SEQ ID NO: 505222 - DNA, 19 bp, Mus musculus
  siRNA target sequence for Kif1a (NM_008440.1,4750-4768).
ccagaacttgactctaaga

SEQ ID NO: 505223 - DNA, 19 bp, Mus musculus
  siRNA target sequence for Kif1a (NM_008440.1,4753-4771).
gaacttgactctaagaaga

SEQ ID NO: 505224 - DNA, 19 bp, Mus musculus
  siRNA target sequence for Kif1a (NM_008440.1,4937-4955).
gtccctacgcctacatgta

SEQ ID NO: 505225 - DNA, 19 bp, Mus musculus
  siRNA target sequence for Kif1a (NM_008440.1,4939-4957).
ccctacgcctacatgtaca

SEQ ID NO: 505226 - DNA, 19 bp, Mus musculus
  siRNA target sequence for Kif1a (NM_008440.1,4940-4958).
cctacgcctacatgtacaa

SEQ ID NO: 505227 - DNA, 19 bp, Mus musculus
  siRNA target sequence for Kif1b (NM_008441.1,323-341).
cgagtgaggcccttcaatt

SEQ ID NO: 505228 - DNA, 19 bp, Mus musculus
  siRNA target sequence for Kif1b (NM_008441.1,387-405).
gcaactcgaccagtattat

SEQ ID NO: 505229 - DNA, 19 bp, Mus musculus
  siRNA target sequence for Kif1b (NM_008441.1,388-406).
caactcgaccagtattatt

SEQ ID NO: 505230 - DNA, 19 bp, Mus musculus
  siRNA target sequence for Kif1b (NM_008441.1,399-417).
gtattattaacccaaagaa

SEQ ID NO: 505231 - DNA, 19 bp, Mus musculus
  siRNA target sequence for Kif1b (NM_008441.1,466-484).
ccacacctcgcctgaagat

SEQ ID NO: 505232 - DNA, 19 bp, Mus musculus
  siRNA target sequence for Kif1b (NM_008441.1,475-493).
gcctgaagatccctgtttt

SEQ ID NO: 505233 - DNA, 19 bp, Mus musculus
  siRNA target sequence for Kif1b (NM_008441.1,498-516).
cgcagaatcgtgtgtacaa

SEQ ID NO: 505234 - DNA, 19 bp, Mus musculus
  siRNA target sequence for Kif1b (NM_008441.1,660-678).
gtgaagaactctttgagaa

SEQ ID NO: 505235 - DNA, 19 bp, Mus musculus
  siRNA target sequence for Kif1b (NM_008441.1,686-704).
gacaattgtaatgaagaaa

SEQ ID NO: 505236 - DNA, 19 bp, Mus musculus
  siRNA target sequence for Kif1b (NM_008441.1,693-711).
gtaatgaagaaatgtctta

SEQ ID NO: 505237 - DNA, 19 bp, Mus musculus
  siRNA target sequence for Kif1b (NM_008441.1,744-762).
gtgagagagtacgagattt

SEQ ID NO: 505238 - DNA, 19 bp, Mus musculus
  siRNA target sequence for Kif1b (NM_008441.1,771-789).
ccaaaaacaagggtaactt

SEQ ID NO: 505239 - DNA, 19 bp, Mus musculus
  siRNA target sequence for Kif1b (NM_008441.1,983-1001).
gatcctgagacgaaccttt

SEQ ID NO: 505240 - DNA, 19 bp, Mus musculus
  siRNA target sequence for Kif1b (NM_008441.1,986-1004).
cctgagacgaacctttcta

SEQ ID NO: 505241 - DNA, 19 bp, Mus musculus
  siRNA target sequence for Kif1b (NM_008441.1,1005-1023).
ctgagaaggtcagtaaaat

SEQ ID NO: 505242 - DNA, 19 bp, Mus musculus
  siRNA target sequence for Kif1b (NM_008441.1,1091-1109).
gaaggtgcaaatatcaata

SEQ ID NO: 505243 - DNA, 19 bp, Mus musculus
  siRNA target sequence for Kif1b (NM_008441.1,1094-1112).
ggtgcaaatatcaataagt

SEQ ID NO: 505244 - DNA, 19 bp, Mus musculus
  siRNA target sequence for Kif1b (NM_008441.1,1105-1123).
caataagtcccttacaact

SEQ ID NO: 505245 - DNA, 19 bp, Mus musculus
  siRNA target sequence for Kif1b (NM_008441.1,1119-1137).
caactttgggcaaagtcat

SEQ ID NO: 505246 - DNA, 19 bp, Mus musculus
  siRNA target sequence for Kif1b (NM_008441.1,1143-1161).
ccttggcagaggtgagtaa

SEQ ID NO: 505247 - DNA, 19 bp, Mus musculus
  siRNA target sequence for Kif1b (NM_008441.1,1144-1162).
cttggcagaggtgagtaaa

SEQ ID NO: 505248 - DNA, 19 bp, Mus musculus
  siRNA target sequence for Kif1b (NM_008441.1,1149-1167).
cagaggtgagtaaaaagaa

SEQ ID NO: 505249 - DNA, 19 bp, Mus musculus
  siRNA target sequence for Kif1b (NM_008441.1,1212-1230).
ggctccttcgagaaaatct

SEQ ID NO: 505250 - DNA, 19 bp, Mus musculus
  siRNA target sequence for Kif1b (NM_008441.1,1240-1258).
ctcccgaactgcaatggtt

SEQ ID NO: 505251 - DNA, 19 bp, Mus musculus
  siRNA target sequence for Kif1b (NM_008441.1,1296-1314).
ctttgagcacactgagata

SEQ ID NO: 505252 - DNA, 19 bp, Mus musculus
  siRNA target sequence for Kif1b (NM_008441.1,1315-1333).
cgcagatcgtgcaaaacaa

SEQ ID NO: 505253 - DNA, 19 bp, Mus musculus
  siRNA target sequence for Kif1b (NM_008441.1,1436-1454).
ctgggagatattattgata

SEQ ID NO: 505254 - DNA, 19 bp, Mus musculus
  siRNA target sequence for Kif1b (NM_008441.1,1438-1456).
gggagatattattgataca

SEQ ID NO: 505255 - DNA, 19 bp, Mus musculus
  siRNA target sequence for Kif1b (NM_008441.1,1488-1506).
catgctcacttaatagtca
